United States Patent Application Publication US 2024/0066150 A1 - sequence listing, part 3

SEQ ID NO: 18246 - DNA, 20 bp, synthetic construct
  misc_feature 1..20: note = Description of Artificial Sequence: Synthetic oligonucleotide
  misc_feature 1..20: note = Target: SCN10A; (-) strand; PAM type: NRG; PAM sequence: GGG
  source 1..20: mol_type = other DNA
ggtgattggtggaaggaaag

SEQ ID NO: 18247 - DNA, 20 bp, synthetic construct
  misc_feature 1..20: note = Description of Artificial Sequence: Synthetic oligonucleotide
  misc_feature 1..20: note = Target: SCN10A; (-) strand; PAM type: NRG; PAM sequence: GGG
  source 1..20: mol_type = other DNA
aggtgattggtggaaggaaa

SEQ ID NO: 18248 - DNA, 20 bp, synthetic construct
  misc_feature 1..20: note = Description of Artificial Sequence: Synthetic oligonucleotide
  misc_feature 1..20: note = Target: SCN10A; (-) strand; PAM type: NRG; PAM sequence: AGG
  source 1..20: mol_type = other DNA
caggtgattggtggaaggaa

SEQ ID NO: 18249 - DNA, 20 bp, synthetic construct
  misc_feature 1..20: note = Description of Artificial Sequence: Synthetic oligonucleotide
  misc_feature 1..20: note = Target: SCN10A; (-) strand; PAM type: NRG; PAM sequence: AAG
  source 1..20: mol_type = other DNA
gcaggtgattggtggaagga

SEQ ID NO: 18250 - DNA, 20 bp, synthetic construct
  misc_feature 1..20: note = Description of Artificial Sequence: Synthetic oligonucleotide
  misc_feature 1..20: note = Target: SCN10A; (-) strand; PAM type: NRG; PAM sequence: AGG
  source 1..20: mol_type = other DNA
atttgcaggtgattggtgga

SEQ ID NO: 18251 - DNA, 20 bp, synthetic construct
  misc_feature 1..20: note = Description of Artificial Sequence: Synthetic oligonucleotide
  misc_feature 1..20: note = Target: SCN10A; (-) strand; PAM type: NRG; PAM sequence: AAG
  source 1..20: mol_type = other DNA
gatttgcaggtgattggtgg

SEQ ID NO: 18252 - DNA, 20 bp, synthetic construct
  misc_feature 1..20: note = Description of Artificial Sequence: Synthetic oligonucleotide
  misc_feature 1..20: note = Target: SCN10A; (-) strand; PAM type: NRG; PAM sequence: TGG
  source 1..20: mol_type = other DNA
cgggatttgcaggtgattgg

SEQ ID NO: 18253 - DNA, 20 bp, synthetic construct
  misc_feature 1..20: note = Description of Artificial Sequence: Synthetic oligonucleotide
  misc_feature 1..20: note = Target: SCN10A; (-) strand; PAM type: NRG; PAM sequence: TGG
  source 1..20: mol_type = other DNA
taccgggatttgcaggtgat

SEQ ID NO: 18254 - DNA, 20 bp, synthetic construct
  misc_feature 1..20: note = Description of Artificial Sequence: Synthetic oligonucleotide
  misc_feature 1..20: note = Target: SCN10A; (-) strand; PAM type: NRG; PAM sequence: AGG
  source 1..20: mol_type = other DNA
gggtggataccgggatttgc

SEQ ID NO: 18255 - DNA, 20 bp, synthetic construct
  misc_feature 1..20: note = Description of Artificial Sequence: Synthetic oligonucleotide
  misc_feature 1..20: note = Target: SCN10A; (-) strand; PAM type: NRG; PAM sequence: CAG
  source 1..20: mol_type = other DNA
tgggtggataccgggatttg

SEQ ID NO: 18256 - DNA, 20 bp, synthetic construct
  misc_feature 1..20: note = Description of Artificial Sequence: Synthetic oligonucleotide
  misc_feature 1..20: note = Target: SCN10A; (-) strand; PAM type: NRG; PAM sequence: GGG
  source 1..20: mol_type = other DNA
atgtttagtgggtggatacc

SEQ ID NO: 18257 - DNA, 20 bp, synthetic construct
  misc_feature 1..20: note = Description of Artificial Sequence: Synthetic oligonucleotide
  misc_feature 1..20: note = Target: SCN10A; (-) strand; PAM type: NRG; PAM sequence: CGG
  source 1..20: mol_type = other DNA
aatgtttagtgggtggatac

SEQ ID NO: 18258 - DNA, 20 bp, synthetic construct
  misc_feature 1..20: note = Description of Artificial Sequence: Synthetic oligonucleotide
  misc_feature 1..20: note = Target: SCN10A; (-) strand; PAM type: NRG; PAM sequence: TGG
  source 1..20: mol_type = other DNA
attagaaaatgtttagtggg

SEQ ID NO: 18259 - DNA, 20 bp, synthetic construct
  misc_feature 1..20: note = Description of Artificial Sequence: Synthetic oligonucleotide
  misc_feature 1..20: note = Target: SCN10A; (-) strand; PAM type: NRG; PAM sequence: GGG
  source 1..20: mol_type = other DNA
tttattagaaaatgtttagt

SEQ ID NO: 18260 - DNA, 20 bp, synthetic construct
  misc_feature 1..20: note = Description of Artificial Sequence: Synthetic oligonucleotide
  misc_feature 1..20: note = Target: SCN10A; (-) strand; PAM type: NRG; PAM sequence: TGG
  source 1..20: mol_type = other DNA
ttttattagaaaatgtttag

SEQ ID NO: 18261 - DNA, 20 bp, synthetic construct
  misc_feature 1..20: note = Description of Artificial Sequence: Synthetic oligonucleotide
  misc_feature 1..20: note = Target: SCN10A; (-) strand; PAM type: NRG; PAM sequence: TAG
  source 1..20: mol_type = other DNA
tatttttattagaaaatgtt

SEQ ID NO: 18262 - DNA, 20 bp, synthetic construct
  misc_feature 1..20: note = Description of Artificial Sequence: Synthetic oligonucleotide
  misc_feature 1..20: note = Target: SCN10A; (-) strand; PAM type: NRG; PAM sequence: TAG
  source 1..20: mol_type = other DNA
cttcaaggcagtatttttat

SEQ ID NO: 18263 - DNA, 20 bp, synthetic construct
  misc_feature 1..20: note = Description of Artificial Sequence: Synthetic oligonucleotide
  misc_feature 1..20: note = Target: SCN10A; (-) strand; PAM type: NRG; PAM sequence: CAG
  source 1..20: mol_type = other DNA
tccctgtgctgtcttcaagg

SEQ ID NO: 18264 - DNA, 20 bp, synthetic construct
  misc_feature 1..20: note = Description of Artificial Sequence: Synthetic oligonucleotide
  misc_feature 1..20: note = Target: SCN10A; (-) strand; PAM type: NRG; PAM sequence: AGG
  source 1..20: mol_type = other DNA
gtctccctgtgctgtcttca

SEQ ID NO: 18265 - DNA, 20 bp, synthetic construct
  misc_feature 1..20: note = Description of Artificial Sequence: Synthetic oligonucleotide
  misc_feature 1..20: note = Target: SCN10A; (-) strand; PAM type: NRG; PAM sequence: AAG
  source 1..20: mol_type = other DNA
tgtctccctgtgctgtcttc

SEQ ID NO: 18266 - DNA, 20 bp, synthetic construct
  misc_feature 1..20: note = Description of Artificial Sequence: Synthetic oligonucleotide
  misc_feature 1..20: note = Target: SCN10A; (-) strand; PAM type: NRG; PAM sequence: CAG
  source 1..20: mol_type = other DNA
agaagacaggaggtcaagct

SEQ ID NO: 18267 - DNA, 20 bp, synthetic construct
  misc_feature 1..20: note = Description of Artificial Sequence: Synthetic oligonucleotide
  misc_feature 1..20: note = Target: SCN10A; (-) strand; PAM type: NRG; PAM sequence: AAG
  source 1..20: mol_type = other DNA
tggcaagaagacaggaggtc

SEQ ID NO: 18268 - DNA, 20 bp, synthetic construct
  misc_feature 1..20: note = Description of Artificial Sequence: Synthetic oligonucleotide
  misc_feature 1..20: note = Target: SCN10A; (-) strand; PAM type: NRG; PAM sequence: AGG
  source 1..20: mol_type = other DNA
ctggctggcaagaagacagg

SEQ ID NO: 18269 - DNA, 20 bp, synthetic construct
  misc_feature 1..20: note = Description of Artificial Sequence: Synthetic oligonucleotide
  misc_feature 1..20: note = Target: SCN10A; (-) strand; PAM type: NRG; PAM sequence: GAG
  source 1..20: mol_type = other DNA
gctggctggcaagaagacag

SEQ ID NO: 18270 - DNA, 20 bp, synthetic construct
  misc_feature 1..20: note = Description of Artificial Sequence: Synthetic oligonucleotide
  misc_feature 1..20: note = Target: SCN10A; (-) strand; PAM type: NRG; PAM sequence: AGG
  source 1..20: mol_type = other DNA
aagctggctggcaagaagac

SEQ ID NO: 18271 - DNA, 20 bp, synthetic construct
  misc_feature 1..20: note = Description of Artificial Sequence: Synthetic oligonucleotide
  misc_feature 1..20: note = Target: SCN10A; (-) strand; PAM type: NRG; PAM sequence: CAG
  source 1..20: mol_type = other DNA
caagctggctggcaagaaga

SEQ ID NO: 18272 - DNA, 20 bp, synthetic construct
  misc_feature 1..20: note = Description of Artificial Sequence: Synthetic oligonucleotide
  misc_feature 1..20: note = Target: SCN10A; (-) strand; PAM type: NRG; PAM sequence: AAG
  source 1..20: mol_type = other DNA
actgcaagctggctggcaag

SEQ ID NO: 18273 - DNA, 20 bp, synthetic construct
  misc_feature 1..20: note = Description of Artificial Sequence: Synthetic oligonucleotide
  misc_feature 1..20: note = Target: SCN10A; (-) strand; PAM type: NRG; PAM sequence: AAG
  source 1..20: mol_type = other DNA
aatactgcaagctggctggc

SEQ ID NO: 18274 - DNA, 20 bp, synthetic construct
  misc_feature 1..20: note = Description of Artificial Sequence: Synthetic oligonucleotide
  misc_feature 1..20: note = Target: SCN10A; (-) strand; PAM type: NRG; PAM sequence: TGG
  source 1..20: mol_type = other DNA
gcttaatactgcaagctggc

SEQ ID NO: 18275 - DNA, 20 bp, synthetic construct
  misc_feature 1..20: note = Description of Artificial Sequence: Synthetic oligonucleotide
  misc_feature 1..20: note = Target: SCN10A; (-) strand; PAM type: NRG; PAM sequence: TGG
  source 1..20: mol_type = other DNA
aaaagcttaatactgcaagc

SEQ ID NO: 18276 - DNA, 20 bp, synthetic construct
  misc_feature 1..20: note = Description of Artificial Sequence: Synthetic oligonucleotide
  misc_feature 1..20: note = Target: SCN10A; (-) strand; PAM type: NRG; PAM sequence: AAG
  source 1..20: mol_type = other DNA
aaagaaaagcttaatactgc

SEQ ID NO: 18277 - DNA, 20 bp, synthetic construct
  misc_feature 1..20: note = Description of Artificial Sequence: Synthetic oligonucleotide
  misc_feature 1..20: note = Target: SCN10A; (-) strand; PAM type: NRG; PAM sequence: AAG
  source 1..20: mol_type = other DNA
ccaggcttttgagaaaagaa

SEQ ID NO: 18278 - DNA, 20 bp, synthetic construct
  misc_feature 1..20: note = Description of Artificial Sequence: Synthetic oligonucleotide
  misc_feature 1..20: note = Target: SCN10A; (-) strand; PAM type: NRG; PAM sequence: AAG
  source 1..20: mol_type = other DNA
ggacaccaggcttttgagaa

SEQ ID NO: 18279 - DNA, 20 bp, synthetic construct
  misc_feature 1..20: note = Description of Artificial Sequence: Synthetic oligonucleotide
  misc_feature 1..20: note = Target: SCN10A; (-) strand; PAM type: NRG; PAM sequence: GAG
  source 1..20: mol_type = other DNA
gacgaggacaccaggctttt

SEQ ID NO: 18280 - DNA, 20 bp, synthetic construct
  misc_feature 1..20: note = Description of Artificial Sequence: Synthetic oligonucleotide
  misc_feature 1..20: note = Target: SCN10A; (-) strand; PAM type: NRG; PAM sequence: AGG
  source 1..20: mol_type = other DNA
gaagccaagacgaggacacc

SEQ ID NO: 18281 - DNA, 20 bp, synthetic construct
  misc_feature 1..20: note = Description of Artificial Sequence: Synthetic oligonucleotide
  misc_feature 1..20: note = Target: SCN10A; (-) strand; PAM type: NRG; PAM sequence: CAG
  source 1..20: mol_type = other DNA
ggaagccaagacgaggacac

SEQ ID NO: 18282 - DNA, 20 bp, synthetic construct
  misc_feature 1..20: note = Description of Artificial Sequence: Synthetic oligonucleotide
  misc_feature 1..20: note = Target: SCN10A; (-) strand; PAM type: NRG; PAM sequence: AGG
  source 1..20: mol_type = other DNA
tgactttggaagccaagacg

SEQ ID NO: 18283 - DNA, 20 bp, synthetic construct
  misc_feature 1..20: note = Description of Artificial Sequence: Synthetic oligonucleotide
  misc_feature 1..20: note = Target: SCN10A; (-) strand; PAM type: NRG; PAM sequence: GAG
  source 1..20: mol_type = other DNA
atgactttggaagccaagac

SEQ ID NO: 18284 - DNA, 20 bp, synthetic construct
  misc_feature 1..20: note = Description of Artificial Sequence: Synthetic oligonucleotide
  misc_feature 1..20: note = Target: SCN10A; (-) strand; PAM type: NRG; PAM sequence: AAG
  source 1..20: mol_type = other DNA
atactatgactttggaagcc

SEQ ID NO: 18285 - DNA, 20 bp, synthetic construct
  misc_feature 1..20: note = Description of Artificial Sequence: Synthetic oligonucleotide
  misc_feature 1..20: note = Target: SCN10A; (-) strand; PAM type: NRG; PAM sequence: AAG
  source 1..20: mol_type = other DNA
agccaatactatgactttgg

SEQ ID NO: 18286 - DNA, 20 bp, synthetic construct
  misc_feature 1..20: note = Description of Artificial Sequence: Synthetic oligonucleotide
  misc_feature 1..20: note = Target: SCN10A; (-) strand; PAM type: NRG; PAM sequence: TGG
  source 1..20: mol_type = other DNA
agaagccaatactatgactt

SEQ ID NO: 18287 - DNA, 20 bp, synthetic construct
  misc_feature 1..20: note = Description of Artificial Sequence: Synthetic oligonucleotide
  misc_feature 1..20: note = Target: SCN10A; (-) strand; PAM type: NRG; PAM sequence: AAG
  source 1..20: mol_type = other DNA
ctcactgcccaatgctctag

SEQ ID NO: 18288 - DNA, 20 bp, synthetic construct
  misc_feature 1..20: note = Description of Artificial Sequence: Synthetic oligonucleotide
  misc_feature 1..20: note = Target: SCN10A; (-) strand; PAM type: NRG; PAM sequence: TAG
  source 1..20: mol_type = other DNA
gggctcactgcccaatgctc

SEQ ID NO: 18289 - DNA, 20 bp, synthetic construct
  misc_feature 1..20: note = Description of Artificial Sequence: Synthetic oligonucleotide
  misc_feature 1..20: note = Target: SCN10A; (-) strand; PAM type: NRG; PAM sequence: GGG
  source 1..20: mol_type = other DNA
ctttgttatagagccagtgg

SEQ ID NO: 18290 - DNA, 20 bp, synthetic construct
  misc_feature 1..20: note = Description of Artificial Sequence: Synthetic oligonucleotide
  misc_feature 1..20: note = Target: SCN10A; (-) strand; PAM type: NRG; PAM sequence: GGG
  source 1..20: mol_type = other DNA
cctttgttatagagccagtg

SEQ ID NO: 18291 - DNA, 20 bp, synthetic construct
  misc_feature 1..20: note = Description of Artificial Sequence: Synthetic oligonucleotide
  misc_feature 1..20: note = Target: SCN10A; (-) strand; PAM type: NRG; PAM sequence: GGG
  source 1..20: mol_type = other DNA
acctttgttatagagccagt

SEQ ID NO: 18292 - DNA, 20 bp, synthetic construct
  misc_feature 1..20: note = Description of Artificial Sequence: Synthetic oligonucleotide
  misc_feature 1..20: note = Target: SCN10A; (-) strand; PAM type: NRG; PAM sequence: TGG
  source 1..20: mol_type = other DNA
tacctttgttatagagccag

SEQ ID NO: 18293 - DNA, 20 bp, synthetic construct
  misc_feature 1..20: note = Description of Artificial Sequence: Synthetic oligonucleotide
  misc_feature 1..20: note = Target: SCN10A; (-) strand; PAM type: NRG; PAM sequence: CAG
  source 1..20: mol_type = other DNA
ttatacctttgttatagagc

SEQ ID NO: 18294 - DNA, 20 bp, synthetic construct
  misc_feature 1..20: note = Description of Artificial Sequence: Synthetic oligonucleotide
  misc_feature 1..20: note = Target: SCN10A; (-) strand; PAM type: NRG; PAM sequence: GAG
  source 1..20: mol_type = other DNA
ctctttatacctttgttata

SEQ ID NO: 18295 - DNA, 20 bp, synthetic construct
  misc_feature 1..20: note = Description of Artificial Sequence: Synthetic oligonucleotide
  misc_feature 1..20: note = Target: SCN10A; (-) strand; PAM type: NRG; PAM sequence: TAG
  source 1..20: mol_type = other DNA
tgctctttatacctttgtta

SEQ ID NO: 18296 - DNA, 20 bp, synthetic construct
  misc_feature 1..20: note = Description of Artificial Sequence: Synthetic oligonucleotide
  misc_feature 1..20: note = Target: SCN10A; (-) strand; PAM type: NRG; PAM sequence: TAG
  source 1..20: mol_type = other DNA
tttagattcactctcatgct

SEQ ID NO: 18297 - DNA, 20 bp, synthetic construct
  misc_feature 1..20: note = Description of Artificial Sequence: Synthetic oligonucleotide
  misc_feature 1..20: note = Target: SCN10A; (-) strand; PAM type: NRG; PAM sequence: TAG
  source 1..20: mol_type = other DNA
gtgtccactcaatgtttatt

SEQ ID NO: 18298 - DNA, 20 bp, synthetic construct
  misc_feature 1..20: note = Description of Artificial Sequence: Synthetic oligonucleotide
  misc_feature 1..20: note = Target: SCN10A; (-) strand; PAM type: NRG; PAM sequence: AAG
  source 1..20: mol_type = other DNA
cagtctcttccacatctcac

SEQ ID NO: 18299 - DNA, 20 bp, synthetic construct
  misc_feature 1..20: note = Description of Artificial Sequence: Synthetic oligonucleotide
  misc_feature 1..20: note = Target: SCN10A; (-) strand; PAM type: NRG; PAM sequence: CAG
  source 1..20: mol_type = other DNA
gtgaatggagactatatgac

SEQ ID NO: 18300 - DNA, 20 bp, synthetic construct
  misc_feature 1..20: note = Description of Artificial Sequence: Synthetic oligonucleotide
  misc_feature 1..20: note = Target: SCN10A; (-) strand; PAM type: NRG; PAM sequence: GAG
  source 1..20: mol_type = other DNA
tgggaggagaaaagtgaatg

SEQ ID NO: 18301 - DNA, 20 bp, synthetic construct
  misc_feature 1..20: note = Description of Artificial Sequence: Synthetic oligonucleotide
  misc_feature 1..20: note = Target: SCN10A; (-) strand; PAM type: NRG; PAM sequence: TGG
  source 1..20: mol_type = other DNA
tctgggaggagaaaagtgaa

SEQ ID NO: 18302 - DNA, 20 bp, synthetic construct
  misc_feature 1..20: note = Description of Artificial Sequence: Synthetic oligonucleotide
  misc_feature 1..20: note = Target: SCN10A; (-) strand; PAM type: NRG; PAM sequence: AAG
  source 1..20: mol_type = other DNA
cgttgtgtctgggaggagaa

SEQ ID NO: 18303 - DNA, 20 bp, synthetic construct
  misc_feature 1..20: note = Description of Artificial Sequence: Synthetic oligonucleotide
  misc_feature 1..20: note = Target: SCN10A; (-) strand; PAM type: NRG; PAM sequence: GAG
  source 1..20: mol_type = other DNA
tcttccgttgtgtctgggag

SEQ ID NO: 18304 - DNA, 20 bp, synthetic construct
  misc_feature 1..20: note = Description of Artificial Sequence: Synthetic oligonucleotide
  misc_feature 1..20: note = Target: SCN10A; (-) strand; PAM type: NRG; PAM sequence: AGG
  source 1..20: mol_type = other DNA
agtcttccgttgtgtctggg

SEQ ID NO: 18305 - DNA, 20 bp, synthetic construct
  misc_feature 1..20: note = Description of Artificial Sequence: Synthetic oligonucleotide
  misc_feature 1..20: note = Target: SCN10A; (-) strand; PAM type: NRG; PAM sequence: GAG
  source 1..20: mol_type = other DNA
cagtcttccgttgtgtctgg

SEQ ID NO: 18306 - DNA, 20 bp, synthetic construct
  misc_feature 1..20: note = Description of Artificial Sequence: Synthetic oligonucleotide
  misc_feature 1..20: note = Target: SCN10A; (-) strand; PAM type: NRG; PAM sequence: GGG
  source 1..20: mol_type = other DNA
aacagtcttccgttgtgtct

SEQ ID NO: 18307 - DNA, 20 bp, synthetic construct
  misc_feature 1..20: note = Description of Artificial Sequence: Synthetic oligonucleotide
  misc_feature 1..20: note = Target: SCN10A; (-) strand; PAM type: NRG; PAM sequence: TGG
  source 1..20: mol_type = other DNA
aaacagtcttccgttgtgtc

SEQ ID NO: 18308 - DNA, 20 bp, synthetic construct
  misc_feature 1..20: note = Description of Artificial Sequence: Synthetic oligonucleotide
  misc_feature 1..20: note = Target: SCN10A; (-) strand; PAM type: NRG; PAM sequence: CAG
  source 1..20: mol_type = other DNA
ttgcaagcaaaactggaaaa

SEQ ID NO: 18309 - DNA, 20 bp, synthetic construct
  misc_feature 1..20: note = Description of Artificial Sequence: Synthetic oligonucleotide
  misc_feature 1..20: note = Target: SCN10A; (-) strand; PAM type: NRG; PAM sequence: TGG
  source 1..20: mol_type = other DNA
caactatttgcaagcaaaac

SEQ ID NO: 18310 - DNA, 20 bp, synthetic construct
  misc_feature 1..20: note = Description of Artificial Sequence: Synthetic oligonucleotide
  misc_feature 1..20: note = Target: SCN10A; (-) strand; PAM type: NRG; PAM sequence: AAG
  source 1..20: mol_type = other DNA
acatgaccccaactatttgc

SEQ ID NO: 18311 - DNA, 20 bp, synthetic construct
  misc_feature 1..20: note = Description of Artificial Sequence: Synthetic oligonucleotide
  misc_feature 1..20: note = Target: SCN10A; (-) strand; PAM type: NRG; PAM sequence: CAG
  source 1..20: mol_type = other DNA
tccatctccattccaccaga

SEQ ID NO: 18312 - DNA, 20 bp, synthetic construct
  misc_feature 1..20: note = Description of Artificial Sequence: Synthetic oligonucleotide
  misc_feature 1..20: note = Target: SCN10A; (-) strand; PAM type: NRG; PAM sequence: CAG
  source 1..20: mol_type = other DNA
tgtctccatctccattccac

SEQ ID NO: 18313 - DNA, 20 bp, synthetic construct
  misc_feature 1..20: note = Description of Artificial Sequence: Synthetic oligonucleotide
  misc_feature 1..20: note = Target: SCN10A; (-) strand; PAM type: NRG; PAM sequence: AAG
  source 1..20: mol_type = other DNA
gggtttaaggctatgcctaa

SEQ ID NO: 18314 - DNA, 20 bp, synthetic construct
  misc_feature 1..20: note = Description of Artificial Sequence: Synthetic oligonucleotide
  misc_feature 1..20: note = Target: SCN10A; (-) strand; PAM type: NRG; PAM sequence: AGG
  source 1..20: mol_type = other DNA
gaaaaagttcagggggttta

SEQ ID NO: 18315 - DNA, 20 bp, synthetic construct
  misc_feature 1..20: note = Description of Artificial Sequence: Synthetic oligonucleotide
  misc_feature 1..20: note = Target: SCN10A; (-) strand; PAM type: NRG; PAM sequence: AAG
  source 1..20: mol_type = other DNA
agaaaaagttcagggggttt

SEQ ID NO: 18316 - DNA, 20 bp, synthetic construct
  misc_feature 1..20: note = Description of Artificial Sequence: Synthetic oligonucleotide
  misc_feature 1..20: note = Target: SCN10A; (-) strand; PAM type: NRG; PAM sequence: GGG
  source 1..20: mol_type = other DNA
agggaaagaaaaagttcagg

SEQ ID NO: 18317 - DNA, 20 bp, synthetic construct
  misc_feature 1..20: note = Description of Artificial Sequence: Synthetic oligonucleotide
  misc_feature 1..20: note = Target: SCN10A; (-) strand; PAM type: NRG; PAM sequence: GGG
  source 1..20: mol_type = other DNA
aagggaaagaaaaagttcag

SEQ ID NO: 18318 - DNA, 20 bp, synthetic construct
  misc_feature 1..20: note = Description of Artificial Sequence: Synthetic oligonucleotide
  misc_feature 1..20: note = Target: SCN10A; (-) strand; PAM type: NRG; PAM sequence: GGG
  source 1..20: mol_type = other DNA
aaagggaaagaaaaagttca

SEQ ID NO: 18319 - DNA, 20 bp, synthetic construct
  misc_feature 1..20: note = Description of Artificial Sequence: Synthetic oligonucleotide
  misc_feature 1..20: note = Target: SCN10A; (-) strand; PAM type: NRG; PAM sequence: AGG
  source 1..20: mol_type = other DNA
gaaagggaaagaaaaagttc

SEQ ID NO: 18320 - DNA, 20 bp, synthetic construct
  misc_feature 1..20: note = Description of Artificial Sequence: Synthetic oligonucleotide
  misc_feature 1..20: note = Target: SCN10A; (-) strand; PAM type: NRG; PAM sequence: CAG
  source 1..20: mol_type = other DNA
tgaaagggaaagaaaaagtt

SEQ ID NO: 18321 - DNA, 20 bp, synthetic construct
  misc_feature 1..20: note = Description of Artificial Sequence: Synthetic oligonucleotide
  misc_feature 1..20: note = Target: SCN10A; (-) strand; PAM type: NRG; PAM sequence: AAG
  source 1..20: mol_type = other DNA
gaacatgaaagggaaagaaa

SEQ ID NO: 18322 - DNA, 20 bp, synthetic construct
  misc_feature 1..20: note = Description of Artificial Sequence: Synthetic oligonucleotide
  misc_feature 1..20: note = Target: SCN10A; (-) strand; PAM type: NRG; PAM sequence: AAG
  source 1..20: mol_type = other DNA
tatggtgaacatgaaaggga

SEQ ID NO: 18323 - DNA, 20 bp, synthetic construct
  misc_feature 1..20: note = Description of Artificial Sequence: Synthetic oligonucleotide
  misc_feature 1..20: note = Target: SCN10A; (-) strand; PAM type: NRG; PAM sequence: GGG
  source 1..20: mol_type = other DNA
cctttatggtgaacatgaaa

SEQ ID NO: 18324 - DNA, 20 bp, synthetic construct
  misc_feature 1..20: note = Description of Artificial Sequence: Synthetic oligonucleotide
  misc_feature 1..20: note = Target: SCN10A; (-) strand; PAM type: NRG; PAM sequence: AGG
  source 1..20: mol_type = other DNA
acctttatggtgaacatgaa

SEQ ID NO: 18325 - DNA, 20 bp, synthetic construct
  misc_feature 1..20: note = Description of Artificial Sequence: Synthetic oligonucleotide
  misc_feature 1..20: note = Target: SCN10A; (-) strand; PAM type: NRG; PAM sequence: AAG
  source 1..20: mol_type = other DNA
gacctttatggtgaacatga

SEQ ID NO: 18326 - DNA, 20 bp, synthetic construct
  misc_feature 1..20: note = Description of Artificial Sequence: Synthetic oligonucleotide
  misc_feature 1..20: note = Target: SCN10A; (-) strand; PAM type: NRG; PAM sequence: TGG
  source 1..20: mol_type = other DNA
tcttcagttagtgaccttta

SEQ ID NO: 18327 - DNA, 20 bp, synthetic construct
  misc_feature 1..20: note = Description of Artificial Sequence: Synthetic oligonucleotide
  misc_feature 1..20: note = Target: SCN10A; (-) strand; PAM type: NRG; PAM sequence: TAG
  source 1..20: mol_type = other DNA
gtgatgtcaccatcttcagt

SEQ ID NO: 18328 - DNA, 20 bp, synthetic construct
  misc_feature 1..20: note = Description of Artificial Sequence: Synthetic oligonucleotide
  misc_feature 1..20: note = Target: SCN10A; (-) strand; PAM type: NRG; PAM sequence: CAG
  source 1..20: mol_type = other DNA
tatcgtgatgtcaccatctt

SEQ ID NO: 18329 - DNA, 20 bp, synthetic construct
  misc_feature 1..20: note = Description of Artificial Sequence: Synthetic oligonucleotide
  misc_feature 1..20: note = Target: SCN10A; (-) strand; PAM type: NRG; PAM sequence: AGG
  source 1..20: mol_type = other DNA
aagtagcgcctcaaggatct

SEQ ID NO: 18330 - DNA, 20 bp, synthetic construct
  misc_feature 1..20: note = Description of Artificial Sequence: Synthetic oligonucleotide
  misc_feature 1..20: note = Target: SCN10A; (-) strand; PAM type: NRG; PAM sequence: TAG
  source 1..20: mol_type = other DNA
caagtagcgcctcaaggatc

SEQ ID NO: 18331 - DNA, 20 bp, synthetic construct
  misc_feature 1..20: note = Description of Artificial Sequence: Synthetic oligonucleotide
  misc_feature 1..20: note = Target: SCN10A; (-) strand; PAM type: NRG; PAM sequence: AGG
  source 1..20: mol_type = other DNA
ctacttcaagtagcgcctca

SEQ ID NO: 18332 - DNA, 20 bp, synthetic construct
  misc_feature 1..20: note = Description of Artificial Sequence: Synthetic oligonucleotide
  misc_feature 1..20: note = Target: SCN10A; (-) strand; PAM type: NRG; PAM sequence: AAG
  source 1..20: mol_type = other DNA
tctacttcaagtagcgcctc

SEQ ID NO: 18333 - DNA, 20 bp, synthetic construct
  misc_feature 1..20: note = Description of Artificial Sequence: Synthetic oligonucleotide
  misc_feature 1..20: note = Target: SCN10A; (-) strand; PAM type: NRG; PAM sequence: TAG
  source 1..20: mol_type = other DNA
ctgggagtgtctacttcaag

SEQ ID NO: 18334 - DNA, 20 bp, synthetic construct
  misc_feature 1..20: note = Description of Artificial Sequence: Synthetic oligonucleotide
  misc_feature 1..20: note = Target: SCN10A; (-) strand; PAM type: NRG; PAM sequence: AAG
  source 1..20: mol_type = other DNA
ctcctgggagtgtctacttc

SEQ ID NO: 18335 - DNA, 20 bp, synthetic construct
  misc_feature 1..20: note = Description of Artificial Sequence: Synthetic oligonucleotide
  misc_feature 1..20: note = Target: SCN10A; (-) strand; PAM type: NRG; PAM sequence: GAG
  source 1..20: mol_type = other DNA
ttgttgggaagctctcctgg

SEQ ID NO: 18336 - DNA, 20 bp, synthetic construct
  misc_feature 1..20: note = Description of Artificial Sequence: Synthetic oligonucleotide
  misc_feature 1..20: note = Target: SCN10A; (-) strand; PAM type: NRG; PAM sequence: GGG
  source 1..20: mol_type = other DNA
gcttgttgggaagctctcct

SEQ ID NO: 18337 - DNA, 20 bp, synthetic construct
  misc_feature 1..20: note = Description of Artificial Sequence: Synthetic oligonucleotide
  misc_feature 1..20: note = Target: SCN10A; (-) strand; PAM type: NRG; PAM sequence: TGG
  source 1..20: mol_type = other DNA
tgcttgttgggaagctctcc

SEQ ID NO: 18338 - DNA, 20 bp, synthetic construct
  misc_feature 1..20: note = Description of Artificial Sequence: Synthetic oligonucleotide
  misc_feature 1..20: note = Target: SCN10A; (-) strand; PAM type: NRG; PAM sequence: AAG
  source 1..20: mol_type = other DNA
cacattcagtgcttgttggg

SEQ ID NO: 18339 - DNA, 20 bp, synthetic construct
  misc_feature 1..20: note = Description of Artificial Sequence: Synthetic oligonucleotide
  misc_feature 1..20: note = Target: SCN10A; (-) strand; PAM type: NRG; PAM sequence: GGG
  source 1..20: mol_type = other DNA
cagcacattcagtgcttgtt

SEQ ID NO: 18340 - DNA, 20 bp, synthetic construct
  misc_feature 1..20: note = Description of Artificial Sequence: Synthetic oligonucleotide
  misc_feature 1..20: note = Target: SCN10A; (-) strand; PAM type: NRG; PAM sequence: TGG
  source 1..20: mol_type = other DNA
acagcacattcagtgcttgt

SEQ ID NO: 18341 - DNA, 20 bp, synthetic construct
  misc_feature 1..20: note = Description of Artificial Sequence: Synthetic oligonucleotide
  misc_feature 1..20: note = Target: SCN10A; (-) strand; PAM type: NRG; PAM sequence: CAG
  source 1..20: mol_type = other DNA
tgtatgtctcacagcacatt

SEQ ID NO: 18342 - DNA, 20 bp, synthetic construct
  misc_feature 1..20: note = Description of Artificial Sequence: Synthetic oligonucleotide
  misc_feature 1..20: note = Target: SCN10A; (-) strand; PAM type: NRG; PAM sequence: CAG
  source 1..20: mol_type = other DNA
taatagagatgtatgtctca

SEQ ID NO: 18343 - DNA, 20 bp, synthetic construct
  misc_feature 1..20: note = Description of Artificial Sequence: Synthetic oligonucleotide
  misc_feature 1..20: note = Target: SCN10A; (-) strand; PAM type: NRG; PAM sequence: GAG
  source 1..20: mol_type = other DNA
atctgtgagttaacataata

SEQ ID NO: 18344 - DNA, 20 bp, synthetic construct
  misc_feature 1..20: note = Description of Artificial Sequence: Synthetic oligonucleotide
  misc_feature 1..20: note = Target: SCN10A; (-) strand; PAM type: NRG; PAM sequence: TAG
  source 1..20: mol_type = other DNA
aaatctgtgagttaacataa

SEQ ID NO: 18345 - DNA, 20 bp, synthetic construct
  misc_feature 1..20: note = Description of Artificial Sequence: Synthetic oligonucleotide
  misc_feature 1..20: note = Target: SCN10A; (-) strand; PAM type: NRG; PAM sequence: GAG
  source 1..20: mol_type = other DNA
gtgataccctctaaatctgt

SEQ ID NO: 18346 - DNA, 20 bp, synthetic construct
  misc_feature 1..20: note = Description of Artificial Sequence: Synthetic oligonucleotide
  misc_feature 1..20: note = Target: SCN10A; (-) strand; PAM type: NRG; PAM sequence: CAG
  source 1..20: mol_type = other DNA
aagataagtacaactagctg

SEQ ID NO: 18347 - DNA, 20 bp, synthetic construct
  misc_feature 1..20: note = Description of Artificial Sequence: Synthetic oligonucleotide
  misc_feature 1..20: note = Target: SCN10A; (-) strand; PAM type: NRG; PAM sequence: TAG
  source 1..20: mol_type = other DNA
ttactcaagataagtacaac

SEQ ID NO: 18348 - DNA, 20 bp, synthetic construct
  misc_feature 1..20: note = Description of Artificial Sequence: Synthetic oligonucleotide
  misc_feature 1..20: note = Target: SCN10A; (-) strand; PAM type: NRG; PAM sequence: AAG
  source 1..20: mol_type = other DNA
atttctccattactcaagat

SEQ ID NO: 18349 - DNA, 20 bp, synthetic construct
  misc_feature 1..20: note = Description of Artificial Sequence: Synthetic oligonucleotide
  misc_feature 1..20: note = Target: SCN10A; (-) strand; PAM type: NRG; PAM sequence: AAG
  source 1..20: mol_type = other DNA
aagcaatttctccattactc

SEQ ID NO: 18350 - DNA, 20 bp, synthetic construct
  misc_feature 1..20: note = Description of Artificial Sequence: Synthetic oligonucleotide
  misc_feature 1..20: note = Target: SCN10A; (-) strand; PAM type: NRG; PAM sequence: AAG
  source 1..20: mol_type = other DNA
ggcaataccttttttcaatg

SEQ ID NO: 18351 - DNA, 20 bp, synthetic construct
  misc_feature 1..20: note = Description of Artificial Sequence: Synthetic oligonucleotide
  misc_feature 1..20: note = Target: SCN10A; (-) strand; PAM type: NRG; PAM sequence: AGG
  source 1..20: mol_type = other DNA
catagttgatgcttttgaaa

SEQ ID NO: 18352 - DNA, 20 bp, synthetic construct
  misc_feature 1..20: note = Description of Artificial Sequence: Synthetic oligonucleotide
  misc_feature 1..20: note = Target: SCN10A; (-) strand; PAM type: NRG; PAM sequence: AAG
  source 1..20: mol_type = other DNA
acatagttgatgcttttgaa

SEQ ID NO: 18353 - DNA, 20 bp, synthetic construct
  misc_feature 1..20: note = Description of Artificial Sequence: Synthetic oligonucleotide
  misc_feature 1..20: note = Target: SCN10A; (-) strand; PAM type: NRG; PAM sequence: TAG
  source 1..20: mol_type = other DNA
atcattaagccagtgccaca

SEQ ID NO: 18354 - DNA, 20 bp, synthetic construct
  misc_feature 1..20: note = Description of Artificial Sequence: Synthetic oligonucleotide
  misc_feature 1..20: note = Target: SCN10A; (-) strand; PAM type: NRG; PAM sequence: CAG
  source 1..20: mol_type = other DNA
ccaccacatgatcattaagc

SEQ ID NO: 18355 - DNA, 20 bp, synthetic construct
  misc_feature 1..20: note = Description of Artificial Sequence: Synthetic oligonucleotide
  misc_feature 1..20: note = Target: SCN10A; (-) strand; PAM type: NRG; PAM sequence: AAG
  source 1..20: mol_type = other DNA
ttgcccaccacatgatcatt

SEQ ID NO: 18356 - DNA, 20 bp, synthetic construct
  misc_feature 1..20: note = Description of Artificial Sequence: Synthetic oligonucleotide
  misc_feature 1..20: note = Target: SCN10A; (-) strand; PAM type: NRG; PAM sequence: CAG
  source 1..20: mol_type = other DNA
cattccaagccttctcctat

SEQ ID NO: 18357 - DNA, 20 bp, synthetic construct
  misc_feature 1..20: note = Description of Artificial Sequence: Synthetic oligonucleotide
  misc_feature 1..20: note = Target: SCN10A; (-) strand; PAM type: NRG; PAM sequence: AAG
  source 1..20: mol_type = other DNA
ataacatagattgacattcc

SEQ ID NO: 18358 - DNA, 20 bp, synthetic construct
  misc_feature 1..20: note = Description of Artificial Sequence: Synthetic oligonucleotide
  misc_feature 1..20: note = Target: SCN10A; (-) strand; PAM type: NRG; PAM sequence: TAG
  source 1..20: mol_type = other DNA
atttttgtcactgaataaca

SEQ ID NO: 18359 - DNA, 20 bp, synthetic construct
  misc_feature 1..20: note = Description of Artificial Sequence: Synthetic oligonucleotide
  misc_feature 1..20: note = Target: SCN10A; (-) strand; PAM type: NRG; PAM sequence: CAG
  source 1..20: mol_type = other DNA
ctctgcctcaaaatttttgc

SEQ ID NO: 18360 - DNA, 20 bp, synthetic construct
  misc_feature 1..20: note = Description of Artificial Sequence: Synthetic oligonucleotide
  misc_feature 1..20: note = Target: SCN10A; (-) strand; PAM type: NRG; PAM sequence: AGG
  source 1..20: mol_type = other DNA
cctagggttgctggttcatg

SEQ ID NO: 18361 - DNA, 20 bp, synthetic construct
  misc_feature 1..20: note = Description of Artificial Sequence: Synthetic oligonucleotide
  misc_feature 1..20: note = Target: SCN10A; (-) strand; PAM type: NRG; PAM sequence: GAG
  source 1..20: mol_type = other DNA
ccctagggttgctggttcat

SEQ ID NO: 18362 - DNA, 20 bp, synthetic construct
  misc_feature 1..20: note = Description of Artificial Sequence: Synthetic oligonucleotide
  misc_feature 1..20: note = Target: SCN10A; (-) strand; PAM type: NRG; PAM sequence: TGG
  source 1..20: mol_type = other DNA
aacccttcccctagggttgc

SEQ ID NO: 18363 - DNA, 20 bp, synthetic construct
  misc_feature 1..20: note = Description of Artificial Sequence: Synthetic oligonucleotide
  misc_feature 1..20: note = Target: SCN10A; (-) strand; PAM type: NRG; PAM sequence: GGG
  source 1..20: mol_type = other DNA
tttaataaacccttccccta

SEQ ID NO: 18364 - DNA, 20 bp, synthetic construct
  misc_feature 1..20: note = Description of Artificial Sequence: Synthetic oligonucleotide
  misc_feature 1..20: note = Target: SCN10A; (-) strand; PAM type: NRG; PAM sequence: AGG
  source 1..20: mol_type = other DNA
gtttaataaacccttcccct

SEQ ID NO: 18365 - DNA, 20 bp, synthetic construct
  misc_feature 1..20: note = Description of Artificial Sequence: Synthetic oligonucleotide
  misc_feature 1..20: note = Target: SCN10A; (-) strand; PAM type: NRG; PAM sequence: TAG
  source 1..20: mol_type = other DNA
ggtttaataaacccttcccc

SEQ ID NO: 18366 - DNA, 20 bp, synthetic construct
  misc_feature 1..20: note = Description of Artificial Sequence: Synthetic oligonucleotide
  misc_feature 1..20: note = Target: SCN10A; (-) strand; PAM type: NRG; PAM sequence: AGG
  source 1..20: mol_type = other DNA
acaactgacccacaatacta

SEQ ID NO: 18367 - DNA, 20 bp, synthetic construct
  misc_feature 1..20: note = Description of Artificial Sequence: Synthetic oligonucleotide
  misc_feature 1..20: note = Target: SCN10A; (-) strand; PAM type: NRG; PAM sequence: AAG
  source 1..20: mol_type = other DNA
tacaactgacccacaatact

SEQ ID NO: 18368 - DNA, 20 bp, synthetic construct
  misc_feature 1..20: note = Description of Artificial Sequence: Synthetic oligonucleotide
  misc_feature 1..20: note = Target: SCN10A; (-) strand; PAM type: NRG; PAM sequence: TAG
  source 1..20: mol_type = other DNA
ttgtactgtcttgaccaaca

SEQ ID NO: 18369 - DNA, 20 bp, synthetic construct
  misc_feature 1..20: note = Description of Artificial Sequence: Synthetic oligonucleotide
  misc_feature 1..20: note = Target: SCN10A; (-) strand; PAM type: NRG; PAM sequence: GAG
  source 1..20: mol_type = other DNA
aaaccagctaaatctttcct

SEQ ID NO: 18370 - DNA, 20 bp, synthetic construct
  misc_feature 1..20: note = Description of Artificial Sequence: Synthetic oligonucleotide
  misc_feature 1..20: note = Target: SCN10A; (-) strand; PAM type: NRG; PAM sequence: CAG
  source 1..20: mol_type = other DNA
tttcttttattcttataaac

SEQ ID NO: 18371 - DNA, 20 bp, synthetic construct
  misc_feature 1..20: note = Description of Artificial Sequence: Synthetic oligonucleotide
  misc_feature 1..20: note = Target: SCN10A; (-) strand; PAM type: NRG; PAM sequence: TGG
  source 1..20: mol_type = other DNA
tcgtcaaggctctaaacttc

SEQ ID NO: 18372 - DNA, 20 bp, synthetic construct
  misc_feature 1..20: note = Description of Artificial Sequence: Synthetic oligonucleotide
  misc_feature 1..20: note = Target: SCN10A; (-) strand; PAM type: NRG; PAM sequence: AGG
  source 1..20: mol_type = other DNA
tacagttccctaaatcgtca

SEQ ID NO: 18373 - DNA, 20 bp, synthetic construct
  misc_feature 1..20: note = Description of Artificial Sequence: Synthetic oligonucleotide
  misc_feature 1..20: note = Target: SCN10A; (-) strand; PAM type: NRG; PAM sequence: AAG
  source 1..20: mol_type = other DNA
gtacagttccctaaatcgtc

SEQ ID NO: 18374 - DNA, 20 bp, synthetic construct
  misc_feature 1..20: note = Description of Artificial Sequence: Synthetic oligonucleotide
  misc_feature 1..20: note = Target: SCN10A; (-) strand; PAM type: NRG; PAM sequence: CAG
  source 1..20: mol_type = other DNA
cctggaatctagaagcagta

SEQ ID NO: 18375 - DNA, 20 bp, synthetic construct
  misc_feature 1..20: note = Description of Artificial Sequence: Synthetic oligonucleotide
  misc_feature 1..20: note = Target: SCN10A; (-) strand; PAM type: NRG; PAM sequence: CAG
  source 1..20: mol_type = other DNA
cactgcctggaatctagaag

SEQ ID NO: 18376 - DNA, 20 bp, synthetic construct
  misc_feature 1..20: note = Description of Artificial Sequence: Synthetic oligonucleotide
  misc_feature 1..20: note = Target: SCN10A; (-) strand; PAM type: NRG; PAM sequence: AAG
  source 1..20: mol_type = other DNA
gctcactgcctggaatctag

SEQ ID NO: 18377 - DNA, 20 bp, synthetic construct
  misc_feature 1..20: note = Description of Artificial Sequence: Synthetic oligonucleotide
  misc_feature 1..20: note = Target: SCN10A; (-) strand; PAM type: NRG; PAM sequence: TAG
  source 1..20: mol_type = other DNA
attgctcactgcctggaatc

SEQ ID NO: 18378 - DNA, 20 bp, synthetic construct
  misc_feature 1..20: note = Description of Artificial Sequence: Synthetic oligonucleotide
  misc_feature 1..20: note = Target: SCN10A; (-) strand; PAM type: NRG; PAM sequence: TGG
  source 1..20: mol_type = other DNA
taatcccattgctcactgcc

SEQ ID NO: 18379 - DNA, 20 bp, synthetic construct
  misc_feature 1..20: note = Description of Artificial Sequence: Synthetic oligonucleotide
  misc_feature 1..20: note = Target: SCN10A; (-) strand; PAM type: NRG; PAM sequence: AAG
  source 1..20: mol_type = other DNA
taactagtcttcaacatttg

SEQ ID NO: 18380 - DNA, 20 bp, synthetic construct
  misc_feature 1..20: note = Description of Artificial Sequence: Synthetic oligonucleotide
  misc_feature 1..20: note = Target: SCN10A; (-) strand; PAM type: NRG; PAM sequence: TAG
  source 1..20: mol_type = other DNA
atttaattggaaaatttaac

SEQ ID NO: 18381 - DNA, 20 bp, synthetic construct
  misc_feature 1..20: note = Description of Artificial Sequence: Synthetic oligonucleotide
  misc_feature 1..20: note = Target: SCN10A; (-) strand; PAM type: NRG; PAM sequence: TGG
  source 1..20: mol_type = other DNA
taagagttgtttcatttaat

SEQ ID NO: 18382 - DNA, 20 bp, synthetic construct
  misc_feature 1..20: note = Description of Artificial Sequence: Synthetic oligonucleotide
  misc_feature 1..20: note = Target: SCN10A; (-) strand; PAM type: NRG; PAM sequence: GAG
  source 1..20: mol_type = other DNA
attactacaagctttgctaa

SEQ ID NO: 18383 - DNA, 20 bp, synthetic construct
  misc_feature 1..20: note = Description of Artificial Sequence: Synthetic oligonucleotide
  misc_feature 1..20: note = Target: SCN10A; (-) strand; PAM type: NRG; PAM sequence: AAG
  source 1..20: mol_type = other DNA
ccattactacaagctttgct

SEQ ID NO: 18384 - DNA, 20 bp, synthetic construct
  misc_feature 1..20: note = Description of Artificial Sequence: Synthetic oligonucleotide
  misc_feature 1..20: note = Target: SCN10A; (-) strand; PAM type: NRG; PAM sequence: AAG
  source 1..20: mol_type = other DNA
agtggctacaccattactac

SEQ ID NO: 18385 - DNA, 20 bp, synthetic construct
  misc_feature 1..20: note = Description of Artificial Sequence: Synthetic oligonucleotide
  misc_feature 1..20: note = Target: SCN10A; (-) strand; PAM type: NRG; PAM sequence: TGG
  source 1..20: mol_type = other DNA
ttctcttgcacaagaaacag

SEQ ID NO: 18386 - DNA, 20 bp, synthetic construct
  misc_feature 1..20: note = Description of Artificial Sequence: Synthetic oligonucleotide
  misc_feature 1..20: note = Target: SCN10A; (-) strand; PAM type: NRG; PAM sequence: CAG
  source 1..20: mol_type = other DNA
cctttctcttgcacaagaaa

SEQ ID NO: 18387 - DNA, 20 bp, synthetic construct
  misc_feature 1..20: note = Description of Artificial Sequence: Synthetic oligonucleotide
  misc_feature 1..20: note = Target: SCN10A; (-) strand; PAM type: NRG; PAM sequence: AAG
  source 1..20: mol_type = other DNA
cccatgcctttctcttgcac

SEQ ID NO: 18388 - DNA, 20 bp, synthetic construct
  misc_feature 1..20: note = Description of Artificial Sequence: Synthetic oligonucleotide
  misc_feature 1..20: note = Target: SCN10A; (-) strand; PAM type: NRG; PAM sequence: AAG
  source 1..20: mol_type = other DNA
acaaagtgctttctttgaca

SEQ ID NO: 18389 - DNA, 20 bp, synthetic construct
  misc_feature 1..20: note = Description of Artificial Sequence: Synthetic oligonucleotide
  misc_feature 1..20: note = Target: SCN10A; (-) strand; PAM type: NRG; PAM sequence: AAG
  source 1..20: mol_type = other DNA
agacctctcattgccacaca

SEQ ID NO: 18390 - DNA, 20 bp, synthetic construct
  misc_feature 1..20: note = Description of Artificial Sequence: Synthetic oligonucleotide
  misc_feature 1..20: note = Target: SCN10A; (-) strand; PAM type: NRG; PAM sequence: CAG
  source 1..20: mol_type = other DNA
ttcaaaaacttagatggctt

SEQ ID NO: 18391 - DNA, 20 bp, synthetic construct
  misc_feature 1..20: note = Description of Artificial Sequence: Synthetic oligonucleotide
  misc_feature 1..20: note = Target: SCN10A; (-) strand; PAM type: NRG; PAM sequence: TGG
  source 1..20: mol_type = other DNA
aattacttcaaaaacttaga

SEQ ID NO: 18392 - DNA, 20 bp, synthetic construct
  misc_feature 1..20: note = Description of Artificial Sequence: Synthetic oligonucleotide
  misc_feature 1..20: note = Target: SCN10A; (-) strand; PAM type: NRG; PAM sequence: TAG
  source 1..20: mol_type = other DNA
atacaattacttcaaaaact

SEQ ID NO: 18393 - DNA, 20 bp, synthetic construct
  misc_feature 1..20: note = Description of Artificial Sequence: Synthetic oligonucleotide
  misc_feature 1..20: note = Target: SCN10A; (-) strand; PAM type: NRG; PAM sequence: GGG
  source 1..20: mol_type = other DNA
gtgaaaggctttttcagtca

SEQ ID NO: 18394 - DNA, 20 bp, synthetic construct
  misc_feature 1..20: note = Description of Artificial Sequence: Synthetic oligonucleotide
  misc_feature 1..20: note = Target: SCN10A; (-) strand; PAM type: NRG; PAM sequence: AGG
  source 1..20: mol_type = other DNA
agtgaaaggctttttcagtc

SEQ ID NO: 18395 - DNA, 20 bp, synthetic construct
  misc_feature 1..20: note = Description of Artificial Sequence: Synthetic oligonucleotide
  misc_feature 1..20: note = Target: SCN10A; (-) strand; PAM type: NRG; PAM sequence: CAG
  source 1..20: mol_type = other DNA
cagtgaaaggctttttcagt

SEQ ID NO: 18396 - DNA, 20 bp, synthetic construct
  misc_feature 1..20: note = Description of Artificial Sequence: Synthetic oligonucleotide
  misc_feature 1..20: note = Target: SCN10A; (-) strand; PAM type: NRG; PAM sequence: CAG
  source 1..20: mol_type = other DNA
taaacagtgaaaggcttttt

SEQ ID NO: 18397 - DNA, 20 bp, synthetic construct
  misc_feature 1..20: note = Description of Artificial Sequence: Synthetic oligonucleotide
  misc_feature 1..20: note = Target: SCN10A; (-) strand; PAM type: NRG; PAM sequence: AGG
  source 1..20: mol_type = other DNA
tttaaggtttaaacagtgaa

SEQ ID NO: 18398 - DNA, 20 bp, synthetic construct
  misc_feature 1..20: note = Description of Artificial Sequence: Synthetic oligonucleotide
  misc_feature 1..20: note = Target: SCN10A; (-) strand; PAM type: NRG; PAM sequence: AAG
  source 1..20: mol_type = other DNA
ttttaaggtttaaacagtga

SEQ ID NO: 18399 - DNA, 20 bp, synthetic construct
  misc_feature 1..20: note = Description of Artificial Sequence: Synthetic oligonucleotide
  misc_feature 1..20: note = Target: SCN10A; (-) strand; PAM type: NRG; PAM sequence: CAG
  source 1..20: mol_type = other DNA
ggtttgttttaaggtttaaa

SEQ ID NO: 18400 - DNA, 20 bp, synthetic construct
  misc_feature 1..20: note = Description of Artificial Sequence: Synthetic oligonucleotide
  misc_feature 1..20: note = Target: SCN10A; (-) strand; PAM type: NRG; PAM sequence: AGG
  source 1..20: mol_type = other DNA
gaaagccaaggtttgtttta

SEQ ID NO: 18401 - DNA, 20 bp, synthetic construct
  misc_feature 1..20: note = Description of Artificial Sequence: Synthetic oligonucleotide
  misc_feature 1..20: note = Target: SCN10A; (-) strand; PAM type: NRG; PAM sequence: AAG
  source 1..20: mol_type = other DNA
ggaaagccaaggtttgtttt

SEQ ID NO: 18402 - DNA, 20 bp, synthetic construct
  misc_feature 1..20: note = Description of Artificial Sequence: Synthetic oligonucleotide
  misc_feature 1..20: note = Target: SCN10A; (-) strand; PAM type: NRG; PAM sequence: AGG
  source 1..20: mol_type = other DNA
tgtgggaaaatggaaagcca

SEQ ID NO: 18403 - DNA, 20 bp, synthetic construct
  misc_feature 1..20: note = Description of Artificial Sequence: Synthetic oligonucleotide
  misc_feature 1..20: note = Target: SCN10A; (-) strand; PAM type: NRG; PAM sequence: AAG
  source 1..20: mol_type = other DNA
ttgtgggaaaatggaaagcc

SEQ ID NO: 18404 - DNA, 20 bp, synthetic construct
  misc_feature 1..20: note = Description of Artificial Sequence: Synthetic oligonucleotide
  misc_feature 1..20: note = Target: SCN10A; (-) strand; PAM type: NRG; PAM sequence: AAG
  source 1..20: mol_type = other DNA
cctgcttgtgggaaaatgga

SEQ ID NO: 18405 - DNA, 20 bp, synthetic construct
  misc_feature 1..20: note = Description of Artificial Sequence: Synthetic oligonucleotide
  misc_feature 1..20: note = Target: SCN10A; (-) strand; PAM type: NRG; PAM sequence: TGG
  source 1..20: mol_type = other DNA
gcctcctgcttgtgggaaaa

SEQ ID NO: 18406 - DNA, 20 bp, synthetic construct
  misc_feature 1..20: note = Description of Artificial Sequence: Synthetic oligonucleotide
  misc_feature 1..20: note = Target: SCN10A; (-) strand; PAM type: NRG; PAM sequence: GGG
  source 1..20: mol_type = other DNA
aaagtttgcctcctgcttgt

SEQ ID NO: 18407 - DNA, 20 bp, synthetic construct
  misc_feature 1..20: note = Description of Artificial Sequence: Synthetic oligonucleotide
  misc_feature 1..20: note = Target: SCN10A; (-) strand; PAM type: NRG; PAM sequence: TGG
  source 1..20: mol_type = other DNA
caaagtttgcctcctgcttg

SEQ ID NO: 18408 - DNA, 20 bp, synthetic construct
  misc_feature 1..20: note = Description of Artificial Sequence: Synthetic oligonucleotide
  misc_feature 1..20: note = Target: SCN10A; (-) strand; PAM type: NRG; PAM sequence: AAG
  source 1..20: mol_type = other DNA
aggaggccaatataacttca

SEQ ID NO: 18409 - DNA, 20 bp, synthetic construct
  misc_feature 1..20: note = Description of Artificial Sequence: Synthetic oligonucleotide
  misc_feature 1..20: note = Target: SCN10A; (-) strand; PAM type: NRG; PAM sequence: AGG
  source 1..20: mol_type = other DNA
gactttgccatgcctgaagg

SEQ ID NO: 18410 - DNA, 20 bp, synthetic construct
  misc_feature 1..20: note = Description of Artificial Sequence: Synthetic oligonucleotide
  misc_feature 1..20: note = Target: SCN10A; (-) strand; PAM type: NRG; PAM sequence: GAG
  source 1..20: mol_type = other DNA
tgactttgccatgcctgaag

SEQ ID NO: 18411 - DNA, 20 bp, synthetic construct
  misc_feature 1..20: note = Description of Artificial Sequence: Synthetic oligonucleotide
  misc_feature 1..20: note = Target: SCN10A; (-) strand; PAM type: NRG; PAM sequence: AGG
  source 1..20: mol_type = other DNA
agtgactttgccatgcctga

SEQ ID NO: 18412 - DNA, 20 bp, synthetic construct
  misc_feature 1..20: note = Description of Artificial Sequence: Synthetic oligonucleotide
  misc_feature 1..20: note = Target: SCN10A; (-) strand; PAM type: NRG; PAM sequence: AAG
  source 1..20: mol_type = other DNA
aagtgactttgccatgcctg

SEQ ID NO: 18413 - DNA, 20 bp, synthetic construct
  misc_feature 1..20: note = Description of Artificial Sequence: Synthetic oligonucleotide
  misc_feature 1..20: note = Target: SCN10A; (-) strand; PAM type: NRG; PAM sequence: AAG
  source 1..20: mol_type = other DNA
gctctaggtgggactccaag

SEQ ID NO: 18414 - DNA, 20 bp, synthetic construct
  misc_feature 1..20: note = Description of Artificial Sequence: Synthetic oligonucleotide
  misc_feature 1..20: note = Target: SCN10A; (-) strand; PAM type: NRG; PAM sequence: AAG
  source 1..20: mol_type = other DNA
acagctctaggtgggactcc

SEQ ID NO: 18415 - DNA, 20 bp, synthetic construct
  misc_feature 1..20: note = Description of Artificial Sequence: Synthetic oligonucleotide
  misc_feature 1..20: note = Target: SCN10A; (-) strand; PAM type: NRG; PAM sequence: GGG
  source 1..20: mol_type = other DNA
caagccagacagctctaggt

SEQ ID NO: 18416 - DNA, 20 bp, synthetic construct
  misc_feature 1..20: note = Description of Artificial Sequence: Synthetic oligonucleotide
  misc_feature 1..20: note = Target: SCN10A; (-) strand; PAM type: NRG; PAM sequence: TGG
  source 1..20: mol_type = other DNA
gcaagccagacagctctagg

SEQ ID NO: 18417 - DNA, 20 bp, synthetic construct
  misc_feature 1..20: note = Description of Artificial Sequence: Synthetic oligonucleotide
  misc_feature 1..20: note = Target: SCN10A; (-) strand; PAM type: NRG; PAM sequence: AGG
  source 1..20: mol_type = other DNA
aatgcaagccagacagctct

SEQ ID NO: 18418 - DNA, 20 bp, synthetic construct
  misc_feature 1..20: note = Description of Artificial Sequence: Synthetic oligonucleotide
  misc_feature 1..20: note = Target: SCN10A; (-) strand; PAM type: NRG; PAM sequence: TAG
  source 1..20: mol_type = other DNA
taatgcaagccagacagctc

SEQ ID NO: 18419 - DNA, 20 bp, synthetic construct
  misc_feature 1..20: note = Description of Artificial Sequence: Synthetic oligonucleotide
  misc_feature 1..20: note = Target: SCN10A; (-) strand; PAM type: NRG; PAM sequence: CAG
  source 1..20: mol_type = other DNA
atagcctaatgcaagccaga

SEQ ID NO: 18420 - DNA, 20 bp, synthetic construct
  misc_feature 1..20: note = Description of Artificial Sequence: Synthetic oligonucleotide
  misc_feature 1..20: note = Target: SCN10A; (-) strand; PAM type: NRG; PAM sequence: CAG
  source 1..20: mol_type = other DNA
tatcatagcctaatgcaagc

SEQ ID NO: 18421 - DNA, 20 bp, synthetic construct
  misc_feature 1..20: note = Description of Artificial Sequence: Synthetic oligonucleotide
  misc_feature 1..20: note = Target: SCN10A; (-) strand; PAM type: NRG; PAM sequence: AAG
  source 1..20: mol_type = other DNA
ctcgtatcatagcctaatgc

SEQ ID NO: 18422 - DNA, 20 bp, synthetic construct
  misc_feature 1..20: note = Description of Artificial Sequence: Synthetic oligonucleotide
  misc_feature 1..20: note = Target: SCN10A; (-) strand; PAM type: NRG; PAM sequence: TAG
  source 1..20: mol_type = other DNA
tttatttctcactcgtatca

SEQ ID NO: 18423 - DNA, 20 bp, synthetic construct
  misc_feature 1..20: note = Description of Artificial Sequence: Synthetic oligonucleotide
  misc_feature 1..20: note = Target: SCN10A; (-) strand; PAM type: NRG; PAM sequence: AGG
  source 1..20: mol_type = other DNA
tgagtaactgaccccaataa

SEQ ID NO: 18424 - DNA, 20 bp, synthetic construct
  misc_feature 1..20: note = Description of Artificial Sequence: Synthetic oligonucleotide
  misc_feature 1..20: note = Target: SCN10A; (-) strand; PAM type: NRG; PAM sequence: AAG
  source 1..20: mol_type = other DNA
ctgagtaactgaccccaata

SEQ ID NO: 18425 - DNA, 20 bp, synthetic construct
  misc_feature 1..20: note = Description of Artificial Sequence: Synthetic oligonucleotide
  misc_feature 1..20: note = Target: SCN10A; (-) strand; PAM type: NRG; PAM sequence: GAG
  source 1..20: mol_type = other DNA
tacagacaatctctaaaact

SEQ ID NO: 18426 - DNA, 20 bp, synthetic construct
  misc_feature 1..20: note = Description of Artificial Sequence: Synthetic oligonucleotide
  misc_feature 1..20: note = Target: SCN10A; (-) strand; PAM type: NRG; PAM sequence: CAG
  source 1..20: mol_type = other DNA
aaataaagctacctattata

SEQ ID NO: 18427 - DNA, 20 bp, synthetic construct
  misc_feature 1..20: note = Description of Artificial Sequence: Synthetic oligonucleotide
  misc_feature 1..20: note = Target: SCN10A; (-) strand; PAM type: NRG; PAM sequence: AAG
  source 1..20: mol_type = other DNA
ttattaatcaatgaaaaata

SEQ ID NO: 18428 - DNA, 20 bp, synthetic construct
  misc_feature 1..20: note = Description of Artificial Sequence: Synthetic oligonucleotide
  misc_feature 1..20: note = Target: SCN10A; (-) strand; PAM type: NRG; PAM sequence: AAG
  source 1..20: mol_type = other DNA
tcccaatttattgtaatgat

SEQ ID NO: 18429 - DNA, 20 bp, synthetic construct
  misc_feature 1..20: note = Description of Artificial Sequence: Synthetic oligonucleotide
  misc_feature 1..20: note = Target: SCN10A; (-) strand; PAM type: NRG; PAM sequence: CAG
  source 1..20: mol_type = other DNA
tccaagacaacttttcattc

SEQ ID NO: 18430 - DNA, 20 bp, synthetic construct
  misc_feature 1..20: note = Description of Artificial Sequence: Synthetic oligonucleotide
  misc_feature 1..20: note = Target: SCN10A; (-) strand; PAM type: NRG; PAM sequence: AAG
  source 1..20: mol_type = other DNA
aaaatctttaaccttcctcc

SEQ ID NO: 18431 - DNA, 20 bp, synthetic construct
  misc_feature 1..20: note = Description of Artificial Sequence: Synthetic oligonucleotide
  misc_feature 1..20: note = Target: SCN10A; (-) strand; PAM type: NRG; PAM sequence: TAG
  source 1..20: mol_type = other DNA
acttaatcaaagccaaaagt

SEQ ID NO: 18432 - DNA, 20 bp, synthetic construct
  misc_feature 1..20: note = Description of Artificial Sequence: Synthetic oligonucleotide
  misc_feature 1..20: note = Target: SCN10A; (-) strand; PAM type: NRG; PAM sequence: AAG
  source 1..20: mol_type = other DNA
gttaacttaatcaaagccaa

SEQ ID NO: 18433 - DNA, 20 bp, synthetic construct
  misc_feature 1..20: note = Description of Artificial Sequence: Synthetic oligonucleotide
  misc_feature 1..20: note = Target: SCN10A; (-) strand; PAM type: NRG; PAM sequence: AAG
  source 1..20: mol_type = other DNA
tccattagttaacttaatca

SEQ ID NO: 18434 - DNA, 20 bp, synthetic construct
  misc_feature 1..20: note = Description of Artificial Sequence: Synthetic oligonucleotide
  misc_feature 1..20: note = Target: SCN10A; (-) strand; PAM type: NRG; PAM sequence: TAG
  source 1..20: mol_type = other DNA
agcataaattaactctccat

SEQ ID NO: 18435 - DNA, 20 bp, synthetic construct
  misc_feature 1..20: note = Description of Artificial Sequence: Synthetic oligonucleotide
  misc_feature 1..20: note = Target: SCN10A; (-) strand; PAM type: NRG; PAM sequence: CAG
  source 1..20: mol_type = other DNA
ggtcgtggctgcagaaatta

SEQ ID NO: 18436 - DNA, 20 bp, synthetic construct
  misc_feature 1..20: note = Description of Artificial Sequence: Synthetic oligonucleotide
  misc_feature 1..20: note = Target: SCN10A; (-) strand; PAM type: NRG; PAM sequence: CAG
  source 1..20: mol_type = other DNA
agcccaggaggtcgtggctg

SEQ ID NO: 18437 - DNA, 20 bp, synthetic construct
  misc_feature 1..20: note = Description of Artificial Sequence: Synthetic oligonucleotide
  misc_feature 1..20: note = Target: SCN10A; (-) strand; PAM type: NRG; PAM sequence: TGG
  source 1..20: mol_type = other DNA
gacttgagcccaggaggtcg

SEQ ID NO: 18438 - DNA, 20 bp, synthetic construct
  misc_feature 1..20: note = Description of Artificial Sequence: Synthetic oligonucleotide
  misc_feature 1..20: note = Target: SCN10A; (-) strand; PAM type: NRG; PAM sequence: AGG
  source 1..20: mol_type = other DNA
gaggatgacttgagcccagg

SEQ ID NO: 18439 - DNA, 20 bp, synthetic construct
  misc_feature 1..20: note = Description of Artificial Sequence: Synthetic oligonucleotide
  misc_feature 1..20: note = Target: SCN10A; (-) strand; PAM type: NRG; PAM sequence: GAG
  source 1..20: mol_type = other DNA
ggaggatgacttgagcccag

SEQ ID NO: 18440 - DNA, 20 bp, synthetic construct
  misc_feature 1..20: note = Description of Artificial Sequence: Synthetic oligonucleotide
  misc_feature 1..20: note = Target: SCN10A; (-) strand; PAM type: NRG; PAM sequence: AGG
  source 1..20: mol_type = other DNA
tgggaggatgacttgagccc

SEQ ID NO: 18441 - DNA, 20 bp, synthetic construct
  misc_feature 1..20: note = Description of Artificial Sequence: Synthetic oligonucleotide
  misc_feature 1..20: note = Target: SCN10A; (-) strand; PAM type: NRG; PAM sequence: CAG
  source 1..20: mol_type = other DNA
gtgggaggatgacttgagcc

SEQ ID NO: 18442 - DNA, 20 bp, synthetic construct
  misc_feature 1..20: note = Description of Artificial Sequence: Synthetic oligonucleotide
  misc_feature 1..20: note = Target: SCN10A; (-) strand; PAM type: NRG; PAM sequence: GAG
  source 1..20: mol_type = other DNA
ctgaggtgggaggatgactt

SEQ ID NO: 18443 - DNA, 20 bp, synthetic construct
  misc_feature 1..20: note = Description of Artificial Sequence: Synthetic oligonucleotide
  misc_feature 1..20: note = Target: SCN10A; (-) strand; PAM type: NRG; PAM sequence: AGG
  source 1..20: mol_type = other DNA
atttgggaggctgaggtggg

SEQ ID NO: 18444 - DNA, 20 bp, synthetic construct
  misc_feature 1..20: note = Description of Artificial Sequence: Synthetic oligonucleotide
  misc_feature 1..20: note = Target: SCN10A; (-) strand; PAM type: NRG; PAM sequence: GAG
  source 1..20: mol_type = other DNA
tatttgggaggctgaggtgg

SEQ ID NO: 18445 - DNA, 20 bp, synthetic construct
  misc_feature 1..20: note = Description of Artificial Sequence: Synthetic oligonucleotide
  misc_feature 1..20: note = Target: SCN10A; (-) strand; PAM type: NRG; PAM sequence: GGG
  source 1..20: mol_type = other DNA
gctatttgggaggctgaggt

SEQ ID NO: 18446 - DNA, 20 bp, synthetic construct
  misc_feature 1..20: note = Description of Artificial Sequence: Synthetic oligonucleotide
  misc_feature 1..20: note = Target: SCN10A; (-) strand; PAM type: NRG; PAM sequence: TGG
  source 1..20: mol_type = other DNA
agctatttgggaggctgagg

SEQ ID NO: 18447 - DNA, 20 bp, synthetic construct
  misc_feature 1..20: note = Description of Artificial Sequence: Synthetic oligonucleotide
  misc_feature 1..20: note = Target: SCN10A; (-) strand; PAM type: NRG; PAM sequence: AGG
  source 1..20: mol_type = other DNA
ctcagctatttgggaggctg

SEQ ID NO: 18448 - DNA, 20 bp, synthetic construct
  misc_feature 1..20: note = Description of Artificial Sequence: Synthetic oligonucleotide
  misc_feature 1..20: note = Target: SCN10A; (-) strand; PAM type: NRG; PAM sequence: GAG
  source 1..20: mol_type = other DNA
tctcagctatttgggaggct

SEQ ID NO: 18449 - DNA, 20 bp, synthetic construct
  misc_feature 1..20: note = Description of Artificial Sequence: Synthetic oligonucleotide
  misc_feature 1..20: note = Target: SCN10A; (-) strand; PAM type: NRG; PAM sequence: AGG
  source 1..20: mol_type = other DNA
tgtagtctcagctatttggg

SEQ ID NO: 18450 - DNA, 20 bp, synthetic construct
  misc_feature 1..20: note = Description of Artificial Sequence: Synthetic oligonucleotide
  misc_feature 1..20: note = Target: SCN10A; (-) strand; PAM type: NRG; PAM sequence: GAG
  source 1..20: mol_type = other DNA
ctgtagtctcagctatttgg

SEQ ID NO: 18451 - DNA, 20 bp, synthetic construct
  misc_feature 1..20: note = Description of Artificial Sequence: Synthetic oligonucleotide
  misc_feature 1..20: note = Target: SCN10A; (-) strand; PAM type: NRG; PAM sequence: GGG
  source 1..20: mol_type = other DNA
gtctgtagtctcagctattt

SEQ ID NO: 18452 - DNA, 20 bp, synthetic construct
  misc_feature 1..20: note = Description of Artificial Sequence: Synthetic oligonucleotide
  misc_feature 1..20: note = Target: SCN10A; (-) strand; PAM type: NRG; PAM sequence: TGG
  source 1..20: mol_type = other DNA
tgtctgtagtctcagctatt

SEQ ID NO: 18453 - DNA, 20 bp, synthetic construct
  misc_feature 1..20: note = Description of Artificial Sequence: Synthetic oligonucleotide
  misc_feature 1..20: note = Target: SCN10A; (-) strand; PAM type: NRG; PAM sequence: CAG
  source 1..20: mol_type = other DNA
atggcacgtgtctgtagtct

SEQ ID NO: 18454 - DNA, 20 bp, synthetic construct
  misc_feature 1..20: note = Description of Artificial Sequence: Synthetic oligonucleotide
  misc_feature 1..20: note = Target: SCN10A; (-) strand; PAM type: NRG; PAM sequence: TAG
  source 1..20: mol_type = other DNA
ggcatgatggcacgtgtctg

SEQ ID NO: 18455 - DNA, 20 bp, synthetic construct
  misc_feature 1..20: note = Description of Artificial Sequence: Synthetic oligonucleotide
  misc_feature 1..20: note = Target: SCN10A; (-) strand; PAM type: NRG; PAM sequence: TGG
  source 1..20: mol_type = other DNA
aagaaattagctgggcatga

SEQ ID NO: 18456 - DNA, 20 bp, synthetic construct
  misc_feature 1..20: note = Description of Artificial Sequence: Synthetic oligonucleotide
  misc_feature 1..20: note = Target: SCN10A; (-) strand; PAM type: NRG; PAM sequence: GGG
  source 1..20: mol_type = other DNA
gaaaaggaaagaaattagct

SEQ ID NO: 18457 - DNA, 20 bp, synthetic construct
  misc_feature 1..20: note = Description of Artificial Sequence: Synthetic oligonucleotide
  misc_feature 1..20: note = Target: SCN10A; (-) strand; PAM type: NRG; PAM sequence: TGG
  source 1..20: mol_type = other DNA
agaaaaggaaagaaattagc

SEQ ID NO: 18458 - DNA, 20 bp, synthetic construct
  misc_feature 1..20: note = Description of Artificial Sequence: Synthetic oligonucleotide
  misc_feature 1..20: note = Target: SCN10A; (-) strand; PAM type: NRG; PAM sequence: TAG
  source 1..20: mol_type = other DNA
aaaaagaaaaggaaagaaat

SEQ ID NO: 18459 - DNA, 20 bp, synthetic construct
  misc_feature 1..20: note = Description of Artificial Sequence: Synthetic oligonucleotide
  misc_feature 1..20: note = Target: SCN10A; (-) strand; PAM type: NRG; PAM sequence: AAG
  source 1..20: mol_type = other DNA
aaatttaaaaaagaaaagga

SEQ ID NO: 18460 - DNA, 20 bp, synthetic construct
  misc_feature 1..20: note = Description of Artificial Sequence: Synthetic oligonucleotide
  misc_feature 1..20: note = Target: SCN10A; (-) strand; PAM type: NRG; PAM sequence: AGG
  source 1..20: mol_type = other DNA
ttttaaatttaaaaaagaaa

SEQ ID NO: 18461 - DNA, 20 bp, synthetic construct
  misc_feature 1..20: note = Description of Artificial Sequence: Synthetic oligonucleotide
  misc_feature 1..20: note = Target: SCN10A; (-) strand; PAM type: NRG; PAM sequence: AAG
  source 1..20: mol_type = other DNA
attttaaatttaaaaaagaa

SEQ ID NO: 18462 - DNA, 20 bp, synthetic construct
  misc_feature 1..20: note = Description of Artificial Sequence: Synthetic oligonucleotide
  misc_feature 1..20: note = Target: SCN10A; (-) strand; PAM type: NRG; PAM sequence: AAG
  source 1..20: mol_type = other DNA
aataaattttaaatttaaaa

SEQ ID NO: 18463 - DNA, 20 bp, synthetic construct
  misc_feature 1..20: note = Description of Artificial Sequence: Synthetic oligonucleotide
  misc_feature 1..20: note = Target: SCN10A; (-) strand; PAM type: NRG; PAM sequence: GGG
  source 1..20: mol_type = other DNA
cactccagcctgggcaacaa

SEQ ID NO: 18464 - DNA, 20 bp, synthetic construct
  misc_feature 1..20: note = Description of Artificial Sequence: Synthetic oligonucleotide
  misc_feature 1..20: note = Target: SCN10A; (-) strand; PAM type: NRG; PAM sequence: AGG
  source 1..20: mol_type = other DNA
gcactccagcctgggcaaca

SEQ ID NO: 18465 - DNA, 20 bp, synthetic construct
  misc_feature 1..20: note = Description of Artificial Sequence: Synthetic oligonucleotide
  misc_feature 1..20: note = Target: SCN10A; (-) strand; PAM type: NRG; PAM sequence: AAG
  source 1..20: mol_type = other DNA
tgcactccagcctgggcaac

SEQ ID NO: 18466 - DNA, 20 bp, synthetic construct
  misc_feature 1..20: note = Description of Artificial Sequence: Synthetic oligonucleotide
  misc_feature 1..20: note = Target: SCN10A; (-) strand; PAM type: NRG; PAM sequence: GGG
  source 1..20: mol_type = other DNA
gcaccattgcactccagcct

SEQ ID NO: 18467 - DNA, 20 bp, synthetic construct
  misc_feature 1..20: note = Description of Artificial Sequence: Synthetic oligonucleotide
  misc_feature 1..20: note = Target: SCN10A; (-) strand; PAM type: NRG; PAM sequence: TGG
  source 1..20: mol_type = other DNA
tgcaccattgcactccagcc

SEQ ID NO: 18468 - DNA, 20 bp, synthetic construct
  misc_feature 1..20: note = Description of Artificial Sequence: Synthetic oligonucleotide
  misc_feature 1..20: note = Target: SCN10A; (-) strand; PAM type: NRG; PAM sequence: CAG
  source 1..20: mol_type = other DNA
gagattgcaccattgcactc

SEQ ID NO: 18469 - DNA, 20 bp, synthetic construct
  misc_feature 1..20: note = Description of Artificial Sequence: Synthetic oligonucleotide
  misc_feature 1..20: note = Target: SCN10A; (-) strand; PAM type: NRG; PAM sequence: GAG
  source 1..20: mol_type = other DNA
ggcggaggttgcggtgagct

SEQ ID NO: 18470 - DNA, 20 bp, synthetic construct
  misc_feature 1..20: note = Description of Artificial Sequence: Synthetic oligonucleotide
  misc_feature 1..20: note = Target: SCN10A; (-) strand; PAM type: NRG; PAM sequence: GAG
  source 1..20: mol_type = other DNA
cgggaggcggaggttgcggt

SEQ ID NO: 18471 - DNA, 20 bp, synthetic construct
  misc_feature 1..20: note = Description of Artificial Sequence: Synthetic oligonucleotide
  misc_feature 1..20: note = Target: SCN10A; (-) strand; PAM type: NRG; PAM sequence: CGG
  source 1..20: mol_type = other DNA
aacccgggaggcggaggttg

SEQ ID NO: 18472 - DNA, 20 bp, synthetic construct
  misc_feature 1..20: note = Description of Artificial Sequence: Synthetic oligonucleotide
  misc_feature 1..20: note = Target: SCN10A; (-) strand; PAM type: NRG; PAM sequence: AGG
  source 1..20: mol_type = other DNA
tgcttgaacccgggaggcgg

SEQ ID NO: 18473 - DNA, 20 bp, synthetic construct
  misc_feature 1..20: note = Description of Artificial Sequence: Synthetic oligonucleotide
  misc_feature 1..20: note = Target: SCN10A; (-) strand; PAM type: NRG; PAM sequence: GAG
  source 1..20: mol_type = other DNA
ttgcttgaacccgggaggcg

SEQ ID NO: 18474 - DNA, 20 bp, synthetic construct
  misc_feature 1..20: note = Description of Artificial Sequence: Synthetic oligonucleotide
  misc_feature 1..20: note = Target: SCN10A; (-) strand; PAM type: NRG; PAM sequence: CGG
  source 1..20: mol_type = other DNA
aattgcttgaacccgggagg

SEQ ID NO: 18475 - DNA, 20 bp, synthetic construct
  misc_feature 1..20: note = Description of Artificial Sequence: Synthetic oligonucleotide
  misc_feature 1..20: note = Target: SCN10A; (-) strand; PAM type: NRG; PAM sequence: AGG
  source 1..20: mol_type = other DNA
gagaattgcttgaacccggg

SEQ ID NO: 18476 - DNA, 20 bp, synthetic construct
  misc_feature 1..20: note = Description of Artificial Sequence: Synthetic oligonucleotide
  misc_feature 1..20: note = Target: SCN10A; (-) strand; PAM type: NRG; PAM sequence: GAG
  source 1..20: mol_type = other DNA
ggagaattgcttgaacccgg

SEQ ID NO: 18477 - DNA, 20 bp, synthetic construct
  misc_feature 1..20: note = Description of Artificial Sequence: Synthetic oligonucleotide
  misc_feature 1..20: note = Target: SCN10A; (-) strand; PAM type: NRG; PAM sequence: GGG
  source 1..20: mol_type = other DNA
gaggagaattgcttgaaccc

SEQ ID NO: 18478 - DNA, 20 bp, synthetic construct
  misc_feature 1..20: note = Description of Artificial Sequence: Synthetic oligonucleotide
  misc_feature 1..20: note = Target: SCN10A; (-) strand; PAM type: NRG; PAM sequence: CGG
  source 1..20: mol_type = other DNA
ggaggagaattgcttgaacc

SEQ ID NO: 18479 - DNA, 20 bp, synthetic construct
  misc_feature 1..20: note = Description of Artificial Sequence: Synthetic oligonucleotide
  misc_feature 1..20: note = Target: SCN10A; (-) strand; PAM type: NRG; PAM sequence: GAG
  source 1..20: mol_type = other DNA
tacttgggaggctgagggag

SEQ ID NO: 18480 - DNA, 20 bp, synthetic construct
  misc_feature 1..20: note = Description of Artificial Sequence: Synthetic oligonucleotide
  misc_feature 1..20: note = Target: SCN10A; (-) strand; PAM type: NRG; PAM sequence: AGG
  source 1..20: mol_type = other DNA
gctacttgggaggctgaggg

SEQ ID NO: 18481 - DNA, 20 bp, synthetic construct
  misc_feature 1..20: note = Description of Artificial Sequence: Synthetic oligonucleotide
  misc_feature 1..20: note = Target: SCN10A; (-) strand; PAM type: NRG; PAM sequence: GAG
  source 1..20: mol_type = other DNA
agctacttgggaggctgagg

SEQ ID NO: 18482 - DNA, 20 bp, synthetic construct
  misc_feature 1..20: note = Description of Artificial Sequence: Synthetic oligonucleotide
  misc_feature 1..20: note = Target: SCN10A; (-) strand; PAM type: NRG; PAM sequence: GGG
  source 1..20: mol_type = other DNA
ccagctacttgggaggctga

SEQ ID NO: 18483 - DNA, 20 bp, synthetic construct
  misc_feature 1..20: note = Description of Artificial Sequence: Synthetic oligonucleotide
  misc_feature 1..20: note = Target: SCN10A; (-) strand; PAM type: NRG; PAM sequence: AGG
  source 1..20: mol_type = other DNA
cccagctacttgggaggctg

SEQ ID NO: 18484 - DNA, 20 bp, synthetic construct
  misc_feature 1..20: note = Description of Artificial Sequence: Synthetic oligonucleotide
  misc_feature 1..20: note = Target: SCN10A; (-) strand; PAM type: NRG; PAM sequence: GAG
  source 1..20: mol_type = other DNA
tcccagctacttgggaggct

SEQ ID NO: 18485 - DNA, 20 bp, synthetic construct
  misc_feature 1..20: note = Description of Artificial Sequence: Synthetic oligonucleotide
  misc_feature 1..20: note = Target: SCN10A; (-) strand; PAM type: NRG; PAM sequence: AGG
  source 1..20: mol_type = other DNA
tttaatcccagctacttggg

SEQ ID NO: 18486 - DNA, 20 bp, synthetic construct
  misc_feature 1..20: note = Description of Artificial Sequence: Synthetic oligonucleotide
  misc_feature 1..20: note = Target: SCN10A; (-) strand; PAM type: NRG; PAM sequence: GAG
  source 1..20: mol_type = other DNA
ttttaatcccagctacttgg

SEQ ID NO: 18487 - DNA, 20 bp, synthetic construct
  misc_feature 1..20: note = Description of Artificial Sequence: Synthetic oligonucleotide
  misc_feature 1..20: note = Target: SCN10A; (-) strand; PAM type: NRG; PAM sequence: GGG
  source 1..20: mol_type = other DNA
acttttaatcccagctactt

SEQ ID NO: 18488 - DNA, 20 bp, synthetic construct
  misc_feature 1..20: note = Description of Artificial Sequence: Synthetic oligonucleotide
  misc_feature 1..20: note = Target: SCN10A; (-) strand; PAM type: NRG; PAM sequence: TGG
  source 1..20: mol_type = other DNA
tacttttaatcccagctact

SEQ ID NO: 18489 - DNA, 20 bp, synthetic construct
  misc_feature 1..20: note = Description of Artificial Sequence: Synthetic oligonucleotide
  misc_feature 1..20: note = Target: SCN10A; (-) strand; PAM type: NRG; PAM sequence: CAG
  source 1..20: mol_type = other DNA
atggtgcatacttttaatcc

SEQ ID NO: 18490 - DNA, 20 bp, synthetic construct
  misc_feature 1..20: note = Description of Artificial Sequence: Synthetic oligonucleotide
  misc_feature 1..20: note = Target: SCN10A; (-) strand; PAM type: NRG; PAM sequence: TGG
  source 1..20: mol_type = other DNA
acaaaattagccaggtgtga

SEQ ID NO: 18491 - DNA, 20 bp, synthetic construct
  misc_feature 1..20: note = Description of Artificial Sequence: Synthetic oligonucleotide
  misc_feature 1..20: note = Target: SCN10A; (-) strand; PAM type: NRG; PAM sequence: AGG
  source 1..20: mol_type = other DNA
ccaaaaatacaaaattagcc

SEQ ID NO: 18492 - DNA, 20 bp, synthetic construct
  misc_feature 1..20: note = Description of Artificial Sequence: Synthetic oligonucleotide
  misc_feature 1..20: note = Target: SCN10A; (-) strand; PAM type: NRG; PAM sequence: CAG
  source 1..20: mol_type = other DNA
accaaaaatacaaaattagc

SEQ ID NO: 18493 - DNA, 20 bp, synthetic construct
  misc_feature 1..20: note = Description of Artificial Sequence: Synthetic oligonucleotide
  misc_feature 1..20: note = Target: SCN10A; (-) strand; PAM type: NRG; PAM sequence: TAG
  source 1..20: mol_type = other DNA
ctctaccaaaaatacaaaat

SEQ ID NO: 18494 - DNA, 20 bp, synthetic construct
  misc_feature 1..20: note = Description of Artificial Sequence: Synthetic oligonucleotide
  misc_feature 1..20: note = Target: SCN10A; (-) strand; PAM type: NRG; PAM sequence: AAG
  source 1..20: mol_type = other DNA
ccagcctgaccaacatggag

SEQ ID NO: 18495 - DNA, 20 bp, synthetic construct
  misc_feature 1..20: note = Description of Artificial Sequence: Synthetic oligonucleotide
  misc_feature 1..20: note = Target: SCN10A; (-) strand; PAM type: NRG; PAM sequence: GAG
  source 1..20: mol_type = other DNA
agaccagcctgaccaacatg

SEQ ID NO: 18496 - DNA, 20 bp, synthetic construct
  misc_feature 1..20: note = Description of Artificial Sequence: Synthetic oligonucleotide
  misc_feature 1..20: note = Target: SCN10A; (-) strand; PAM type: NRG; PAM sequence: TGG
  source 1..20: mol_type = other DNA
cgagaccagcctgaccaaca

SEQ ID NO: 18497 - DNA, 20 bp, synthetic construct
  misc_feature 1..20: note = Description of Artificial Sequence: Synthetic oligonucleotide
  misc_feature 1..20: note = Target: SCN10A; (-) strand; PAM type: NRG; PAM sequence: CAG
  source 1..20: mol_type = other DNA
tgaggtcgggagttcgagac

SEQ ID NO: 18498 - DNA, 20 bp, synthetic construct
  misc_feature 1..20: note = Description of Artificial Sequence: Synthetic oligonucleotide
  misc_feature 1..20: note = Target: SCN10A; (-) strand; PAM type: NRG; PAM sequence: GAG
  source 1..20: mol_type = other DNA
tcacctgaggtcgggagttc

SEQ ID NO: 18499 - DNA, 20 bp, synthetic construct
  misc_feature 1..20: note = Description of Artificial Sequence: Synthetic oligonucleotide
  misc_feature 1..20: note = Target: SCN10A; (-) strand; PAM type: NRG; PAM sequence: GAG
  source 1..20: mol_type = other DNA
ggcggatcacctgaggtcgg

SEQ ID NO: 18500 - DNA, 20 bp, synthetic construct
  misc_feature 1..20: note = Description of Artificial Sequence: Synthetic oligonucleotide
  misc_feature 1..20: note = Target: SCN10A; (-) strand; PAM type: NRG; PAM sequence: GGG
  source 1..20: mol_type = other DNA
caggcggatcacctgaggtc

SEQ ID NO: 18501 - DNA, 20 bp, synthetic construct
  misc_feature 1..20: note = Description of Artificial Sequence: Synthetic oligonucleotide
  misc_feature 1..20: note = Target: SCN10A; (-) strand; PAM type: NRG; PAM sequence: CGG
  source 1..20: mol_type = other DNA
gcaggcggatcacctgaggt

SEQ ID NO: 18502 - DNA, 20 bp, synthetic construct
  misc_feature 1..20: note = Description of Artificial Sequence: Synthetic oligonucleotide
  misc_feature 1..20: note = Target: SCN10A; (-) strand; PAM type: NRG; PAM sequence: AGG
  source 1..20: mol_type = other DNA
gcaggcaggcggatcacctg

SEQ ID NO: 18503 - DNA, 20 bp, synthetic construct
  misc_feature 1..20: note = Description of Artificial Sequence: Synthetic oligonucleotide
  misc_feature 1..20: note = Target: SCN10A; (-) strand; PAM type: NRG; PAM sequence: GAG
  source 1..20: mol_type = other DNA
cgcaggcaggcggatcacct

SEQ ID NO: 18504 - DNA, 20 bp, synthetic construct
  misc_feature 1..20: note = Description of Artificial Sequence: Synthetic oligonucleotide
  misc_feature 1..20: note = Target: SCN10A; (-) strand; PAM type: NRG; PAM sequence: CGG
  source 1..20: mol_type = other DNA
ctgttggaggcgcaggcagg

SEQ ID NO: 18505 - DNA, 20 bp, synthetic construct
  misc_feature 1..20: note = Description of Artificial Sequence: Synthetic oligonucleotide
  misc_feature 1..20: note = Target: SCN10A; (-) strand; PAM type: NRG; PAM sequence: AGG
  source 1..20: mol_type = other DNA
gcactgttggaggcgcaggc

SEQ ID NO: 18506 - DNA, 20 bp, synthetic construct
  misc_feature 1..20: note = Description of Artificial Sequence: Synthetic oligonucleotide
  misc_feature 1..20: note = Target: SCN10A; (-) strand; PAM type: NRG; PAM sequence: CAG
  source 1..20: mol_type = other DNA
agcactgttggaggcgcagg

SEQ ID NO: 18507 - DNA, 20 bp, synthetic construct
  misc_feature 1..20: note = Description of Artificial Sequence: Synthetic oligonucleotide
  misc_feature 1..20: note = Target: SCN10A; (-) strand; PAM type: NRG; PAM sequence: AGG
  source 1..20: mol_type = other DNA
cccagcactgttggaggcgc

SEQ ID NO: 18508 - DNA, 20 bp, synthetic construct
  misc_feature 1..20: note = Description of Artificial Sequence: Synthetic oligonucleotide
  misc_feature 1..20: note = Target: SCN10A; (-) strand; PAM type: NRG; PAM sequence: CAG
  source 1..20: mol_type = other DNA
tcccagcactgttggaggcg

SEQ ID NO: 18509 - DNA, 20 bp, synthetic construct
  misc_feature 1..20: note = Description of Artificial Sequence: Synthetic oligonucleotide
  misc_feature 1..20: note = Target: SCN10A; (-) strand; PAM type: NRG; PAM sequence: AGG
  source 1..20: mol_type = other DNA
tgtaatcccagcactgttgg

SEQ ID NO: 18510 - DNA, 20 bp, synthetic construct
  misc_feature 1..20: note = Description of Artificial Sequence: Synthetic oligonucleotide
  misc_feature 1..20: note = Target: SCN10A; (-) strand; PAM type: NRG; PAM sequence: GAG
  source 1..20: mol_type = other DNA
ctgtaatcccagcactgttg

SEQ ID NO: 18511 - DNA, 20 bp, synthetic construct
  misc_feature 1..20: note = Description of Artificial Sequence: Synthetic oligonucleotide
  misc_feature 1..20: note = Target: SCN10A; (-) strand; PAM type: NRG; PAM sequence: TGG
  source 1..20: mol_type = other DNA
gcctgtaatcccagcactgt

SEQ ID NO: 18512 - DNA, 20 bp, synthetic construct
  misc_feature 1..20: note = Description of Artificial Sequence: Synthetic oligonucleotide
  misc_feature 1..20: note = Target: SCN10A; (-) strand; PAM type: NRG; PAM sequence: CAG
  source 1..20: mol_type = other DNA
gtggttaatgcctgtaatcc

SEQ ID NO: 18513 - DNA, 20 bp, synthetic construct
  misc_feature 1..20: note = Description of Artificial Sequence: Synthetic oligonucleotide
  misc_feature 1..20: note = Target: SCN10A; (-) strand; PAM type: NRG; PAM sequence: TGG
  source 1..20: mol_type = other DNA
aaaaagaaggccaggggcag

SEQ ID NO: 18514 - DNA, 20 bp, synthetic construct
  misc_feature 1..20: note = Description of Artificial Sequence: Synthetic oligonucleotide
  misc_feature 1..20: note = Target: SCN10A; (-) strand; PAM type: NRG; PAM sequence: CAG
  source 1..20: mol_type = other DNA
aataaaaagaaggccagggg

SEQ ID NO: 18515 - DNA, 20 bp, synthetic construct
  misc_feature 1..20: note = Description of Artificial Sequence: Synthetic oligonucleotide
  misc_feature 1..20: note = Target: SCN10A; (-) strand; PAM type: NRG; PAM sequence: GGG
  source 1..20: mol_type = other DNA
aacaataaaaagaaggccag

SEQ ID NO: 18516 - DNA, 20 bp, synthetic construct
  misc_feature 1..20: note = Description of Artificial Sequence: Synthetic oligonucleotide
  misc_feature 1..20: note = Target: SCN10A; (-) strand; PAM type: NRG; PAM sequence: GGG
  source 1..20: mol_type = other DNA
aaacaataaaaagaaggcca

SEQ ID NO: 18517 - DNA, 20 bp, synthetic construct
  misc_feature 1..20: note = Description of Artificial Sequence: Synthetic oligonucleotide
  misc_feature 1..20: note = Target: SCN10A; (-) strand; PAM type: NRG; PAM sequence: AGG
  source 1..20: mol_type = other DNA
aaaacaataaaaagaaggcc

SEQ ID NO: 18518 - DNA, 20 bp, synthetic construct
  misc_feature 1..20: note = Description of Artificial Sequence: Synthetic oligonucleotide
  misc_feature 1..20: note = Target: SCN10A; (-) strand; PAM type: NRG; PAM sequence: CAG
  source 1..20: mol_type = other DNA
gaaaacaataaaaagaaggc

SEQ ID NO: 18519 - DNA, 20 bp, synthetic construct
  misc_feature 1..20: note = Description of Artificial Sequence: Synthetic oligonucleotide
  misc_feature 1..20: note = Target: SCN10A; (-) strand; PAM type: NRG; PAM sequence: AGG
  source 1..20: mol_type = other DNA
cattgaaaacaataaaaaga

SEQ ID NO: 18520 - DNA, 20 bp, synthetic construct
  misc_feature 1..20: note = Description of Artificial Sequence: Synthetic oligonucleotide
  misc_feature 1..20: note = Target: SCN10A; (-) strand; PAM type: NRG; PAM sequence: AAG
  source 1..20: mol_type = other DNA
tcattgaaaacaataaaaag

SEQ ID NO: 18521 - DNA, 20 bp, synthetic construct
  misc_feature 1..20: note = Description of Artificial Sequence: Synthetic oligonucleotide
  misc_feature 1..20: note = Target: SCN10A; (-) strand; PAM type: NRG; PAM sequence: AAG
  source 1..20: mol_type = other DNA
gtctcattgaaaacaataaa

SEQ ID NO: 18522 - DNA, 20 bp, synthetic construct
  misc_feature 1..20: note = Description of Artificial Sequence: Synthetic oligonucleotide
  misc_feature 1..20: note = Target: SCN10A; (-) strand; PAM type: NRG; PAM sequence: GAG
  source 1..20: mol_type = other DNA
tccagcctgggcaacagagc

SEQ ID NO: 18523 - DNA, 20 bp, synthetic construct
  misc_feature 1..20: note = Description of Artificial Sequence: Synthetic oligonucleotide
  misc_feature 1..20: note = Target: SCN10A; (-) strand; PAM type: NRG; PAM sequence: GAG
  source 1..20: mol_type = other DNA
gcactccagcctgggcaaca

SEQ ID NO: 18524 - DNA, 20 bp, synthetic construct
  misc_feature 1..20: note = Description of Artificial Sequence: Synthetic oligonucleotide
  misc_feature 1..20: note = Target: SCN10A; (-) strand; PAM type: NRG; PAM sequence: CAG
  source 1..20: mol_type = other DNA
ctgcactccagcctgggcaa

SEQ ID NO: 18525 - DNA, 20 bp, synthetic construct
  misc_feature 1..20: note = Description of Artificial Sequence: Synthetic oligonucleotide
  misc_feature 1..20: note = Target: SCN10A; (-) strand; PAM type: NRG; PAM sequence: GGG
  source 1..20: mol_type = other DNA
atgccactgcactccagcct

SEQ ID NO: 18526 - DNA, 20 bp, synthetic construct
  misc_feature 1..20: note = Description of Artificial Sequence: Synthetic oligonucleotide
  misc_feature 1..20: note = Target: SCN10A; (-) strand; PAM type: NRG; PAM sequence: TGG
  source 1..20: mol_type = other DNA
catgccactgcactccagcc

SEQ ID NO: 18527 - DNA, 20 bp, synthetic construct
  misc_feature 1..20: note = Description of Artificial Sequence: Synthetic oligonucleotide
  misc_feature 1..20: note = Target: SCN10A; (-) strand; PAM type: NRG; PAM sequence: CAG
  source 1..20: mol_type = other DNA
gagatcatgccactgcactc

SEQ ID NO: 18528 - DNA, 20 bp, synthetic construct
  misc_feature 1..20: note = Description of Artificial Sequence: Synthetic oligonucleotide
  misc_feature 1..20: note = Target: SCN10A; (-) strand; PAM type: NRG; PAM sequence: GAG
  source 1..20: mol_type = other DNA
gacagaggttgcagtgagct

SEQ ID NO: 18529 - DNA, 20 bp, synthetic construct
  misc_feature 1..20: note = Description of Artificial Sequence: Synthetic oligonucleotide
  misc_feature 1..20: note = Target: SCN10A; (-) strand; PAM type: NRG; PAM sequence: GAG
  source 1..20: mol_type = other DNA
ccagagacagaggttgcagt

SEQ ID NO: 18530 - DNA, 20 bp, synthetic construct
  misc_feature 1..20: note = Description of Artificial Sequence: Synthetic oligonucleotide
  misc_feature 1..20: note = Target: SCN10A; (-) strand; PAM type: NRG; PAM sequence: CAG
  source 1..20: mol_type = other DNA
aatcccagagacagaggttg

SEQ ID NO: 18531 - DNA, 20 bp, synthetic construct
  misc_feature 1..20: note = Description of Artificial Sequence: Synthetic oligonucleotide
  misc_feature 1..20: note = Target: SCN10A; (-) strand; PAM type: NRG; PAM sequence: AGG
  source 1..20: mol_type = other DNA
tgcttgaatcccagagacag

SEQ ID NO: 18532 - DNA, 20 bp, synthetic construct
  misc_feature 1..20: note = Description of Artificial Sequence: Synthetic oligonucleotide
  misc_feature 1..20: note = Target: SCN10A; (-) strand; PAM type: NRG; PAM sequence: GAG
  source 1..20: mol_type = other DNA
ttgcttgaatcccagagaca

SEQ ID NO: 18533 - DNA, 20 bp, synthetic construct
  misc_feature 1..20: note = Description of Artificial Sequence: Synthetic oligonucleotide
  misc_feature 1..20: note = Target: SCN10A; (-) strand; PAM type: NRG; PAM sequence: CAG
  source 1..20: mol_type = other DNA
aattgcttgaatcccagaga

SEQ ID NO: 18534 - DNA, 20 bp, synthetic construct
  misc_feature 1..20: note = Description of Artificial Sequence: Synthetic oligonucleotide
  misc_feature 1..20: note = Target: SCN10A; (-) strand; PAM type: NRG; PAM sequence: GAG
  source 1..20: mol_type = other DNA
tgagaattgcttgaatccca

SEQ ID NO: 18535 - DNA, 20 bp, synthetic construct
  misc_feature 1..20: note = Description of Artificial Sequence: Synthetic oligonucleotide
  misc_feature 1..20: note = Target: SCN10A; (-) strand; PAM type: NRG; PAM sequence: CAG
  source 1..20: mol_type = other DNA
catgagaattgcttgaatcc

SEQ ID NO: 18536 - DNA, 20 bp, synthetic construct
  misc_feature 1..20: note = Description of Artificial Sequence: Synthetic oligonucleotide
  misc_feature 1..20: note = Target: SCN10A; (-) strand; PAM type: NRG; PAM sequence: GAG
  source 1..20: mol_type = other DNA
tactcaggagggtgaggcat

SEQ ID NO: 18537 - DNA, 20 bp, synthetic construct
  misc_feature 1..20: note = Description of Artificial Sequence: Synthetic oligonucleotide
  misc_feature 1..20: note = Target: SCN10A; (-) strand; PAM type: NRG; PAM sequence: AGG
  source 1..20: mol_type = other DNA
cccagctactcaggagggtg

SEQ ID NO: 18538 - DNA, 20 bp, synthetic construct
  misc_feature 1..20: note = Description of Artificial Sequence: Synthetic oligonucleotide
  misc_feature 1..20: note = Target: SCN10A; (-) strand; PAM type: NRG; PAM sequence: GAG
  source 1..20: mol_type = other DNA
tcccagctactcaggagggt

SEQ ID NO: 18539 - DNA, 20 bp, synthetic construct
  misc_feature 1..20: note = Description of Artificial Sequence: Synthetic oligonucleotide
  misc_feature 1..20: note = Target: SCN10A; (-) strand; PAM type: NRG; PAM sequence: GGG
  source 1..20: mol_type = other DNA
gtaatcccagctactcagga

SEQ ID NO: 18540 - DNA, 20 bp, synthetic construct
  misc_feature 1..20: note = Description of Artificial Sequence: Synthetic oligonucleotide
  misc_feature 1..20: note = Target: SCN10A; (-) strand; PAM type: NRG; PAM sequence: AGG
  source 1..20: mol_type = other DNA
tgtaatcccagctactcagg

SEQ ID NO: 18541 - DNA, 20 bp, synthetic construct
  misc_feature 1..20: note = Description of Artificial Sequence: Synthetic oligonucleotide
  misc_feature 1..20: note = Target: SCN10A; (-) strand; PAM type: NRG; PAM sequence: GAG
  source 1..20: mol_type = other DNA
ctgtaatcccagctactcag

SEQ ID NO: 18542 - DNA, 20 bp, synthetic construct
  misc_feature 1..20: note = Description of Artificial Sequence: Synthetic oligonucleotide
  misc_feature 1..20: note = Target: SCN10A; (-) strand; PAM type: NRG; PAM sequence: AGG
  source 1..20: mol_type = other DNA
acctgtaatcccagctactc

SEQ ID NO: 18543 - DNA, 20 bp, synthetic construct
  misc_feature 1..20: note = Description of Artificial Sequence: Synthetic oligonucleotide
  misc_feature 1..20: note = Target: SCN10A; (-) strand; PAM type: NRG; PAM sequence: CAG
  source 1..20: mol_type = other DNA
cacctgtaatcccagctact

SEQ ID NO: 18544 - DNA, 20 bp, synthetic construct
  misc_feature 1..20: note = Description of Artificial Sequence: Synthetic oligonucleotide
  misc_feature 1..20: note = Target: SCN10A; (-) strand; PAM type: NRG; PAM sequence: CAG
  source 1..20: mol_type = other DNA
gtggcacacacctgtaatcc

SEQ ID NO: 18545 - DNA, 20 bp, synthetic construct
  misc_feature 1..20: note = Description of Artificial Sequence: Synthetic oligonucleotide
  misc_feature 1..20: note = Target: SCN10A; (-) strand; PAM type: NRG; PAM sequence: TGG
  source 1..20: mol_type = other DNA
tataaattagctgggtgtgg

SEQ ID NO: 18546 - DNA, 20 bp, synthetic construct
  misc_feature 1..20: note = Description of Artificial Sequence: Synthetic oligonucleotide
  misc_feature 1..20: note = Target: SCN10A; (-) strand; PAM type: NRG; PAM sequence: TGG
  source 1..20: mol_type = other DNA
atatataaattagctgggtg

SEQ ID NO: 18547 - DNA, 20 bp, synthetic construct
  misc_feature 1..20: note = Description of Artificial Sequence: Synthetic oligonucleotide
  misc_feature 1..20: note = Target: SCN10A; (-) strand; PAM type: NRG; PAM sequence: GGG
  source 1..20: mol_type = other DNA
taaaaatatataaattagct

SEQ ID NO: 18548 - DNA, 20 bp, synthetic construct
  misc_feature 1..20: note = Description of Artificial Sequence: Synthetic oligonucleotide
  misc_feature 1..20: note = Target: SCN10A; (-) strand; PAM type: NRG; PAM sequence: TGG
  source 1..20: mol_type = other DNA
ctaaaaatatataaattagc

SEQ ID NO: 18549 - DNA, 20 bp, synthetic construct
  misc_feature 1..20: note = Description of Artificial Sequence: Synthetic oligonucleotide
  misc_feature 1..20: note = Target: SCN10A; (-) strand; PAM type: NRG; PAM sequence: TAG
  source 1..20: mol_type = other DNA
tctactaaaaatatataaat

SEQ ID NO: 18550 - DNA, 20 bp, synthetic construct
  misc_feature 1..20: note = Description of Artificial Sequence: Synthetic oligonucleotide
  misc_feature 1..20: note = Target: SCN10A; (-) strand; PAM type: NRG; PAM sequence: GAG
  source 1..20: mol_type = other DNA
gagaccagcctggccaacag

SEQ ID NO: 18551 - DNA, 20 bp, synthetic construct
  misc_feature 1..20: note = Description of Artificial Sequence: Synthetic oligonucleotide
  misc_feature 1..20: note = Target: SCN10A; (-) strand; PAM type: NRG; PAM sequence: AGG
  source 1..20: mol_type = other DNA
tggagaccagcctggccaac

SEQ ID NO: 18552 - DNA, 20 bp, synthetic construct
  misc_feature 1..20: note = Description of Artificial Sequence: Synthetic oligonucleotide
  misc_feature 1..20: note = Target: SCN10A; (-) strand; PAM type: NRG; PAM sequence: CAG
  source 1..20: mol_type = other DNA
ttggagaccagcctggccaa

SEQ ID NO: 18553 - DNA, 20 bp, synthetic construct
  misc_feature 1..20: note = Description of Artificial Sequence: Synthetic oligonucleotide
  misc_feature 1..20: note = Target: SCN10A; (-) strand; PAM type: NRG; PAM sequence: TGG
  source 1..20: mol_type = other DNA
acaggagttggagaccagcc

SEQ ID NO: 18554 - DNA, 20 bp, synthetic construct
  misc_feature 1..20: note = Description of Artificial Sequence: Synthetic oligonucleotide
  misc_feature 1..20: note = Target: SCN10A; (-) strand; PAM type: NRG; PAM sequence: CAG
  source 1..20: mol_type = other DNA
tgaggacaggagttggagac

SEQ ID NO: 18555 - DNA, 20 bp, synthetic construct
  misc_feature 1..20: note = Description of Artificial Sequence: Synthetic oligonucleotide
  misc_feature 1..20: note = Target: SCN10A; (-) strand; PAM type: NRG; PAM sequence: GAG
  source 1..20: mol_type = other DNA
ttgcttgaggacaggagttg

SEQ ID NO: 18556 - DNA, 20 bp, synthetic construct
  misc_feature 1..20: note = Description of Artificial Sequence: Synthetic oligonucleotide
  misc_feature 1..20: note = Target: SCN10A; (-) strand; PAM type: NRG; PAM sequence: TGG
  source 1..20: mol_type = other DNA
gattgcttgaggacaggagt

SEQ ID NO: 18557 - DNA, 20 bp, synthetic construct
  misc_feature 1..20: note = Description of Artificial Sequence: Synthetic oligonucleotide
  misc_feature 1..20: note = Target: SCN10A; (-) strand; PAM type: NRG; PAM sequence: GAG
  source 1..20: mol_type = other DNA
ggaggattgcttgaggacag

SEQ ID NO: 18558 - DNA, 20 bp, synthetic construct
  misc_feature 1..20: note = Description of Artificial Sequence: Synthetic oligonucleotide
  misc_feature 1..20: note = Target: SCN10A; (-) strand; PAM type: NRG; PAM sequence: AGG
  source 1..20: mol_type = other DNA
tgggaggattgcttgaggac

SEQ ID NO: 18559 - DNA, 20 bp, synthetic construct
  misc_feature 1..20: note = Description of Artificial Sequence: Synthetic oligonucleotide
  misc_feature 1..20: note = Target: SCN10A; (-) strand; PAM type: NRG; PAM sequence: CAG
  source 1..20: mol_type = other DNA
gtgggaggattgcttgagga

SEQ ID NO: 18560 - DNA, 20 bp, synthetic construct
  misc_feature 1..20: note = Description of Artificial Sequence: Synthetic oligonucleotide
  misc_feature 1..20: note = Target: SCN10A; (-) strand; PAM type: NRG; PAM sequence: AGG
  source 1..20: mol_type = other DNA
caaggtgggaggattgcttg

SEQ ID NO: 18561 - DNA, 20 bp, synthetic construct
  misc_feature 1..20: note = Description of Artificial Sequence: Synthetic oligonucleotide
  misc_feature 1..20: note = Target: SCN10A; (-) strand; PAM type: NRG; PAM sequence: GAG
  source 1..20: mol_type = other DNA
ccaaggtgggaggattgctt

SEQ ID NO: 18562 - DNA, 20 bp, synthetic construct
  misc_feature 1..20: note = Description of Artificial Sequence: Synthetic oligonucleotide
  misc_feature 1..20: note = Target: SCN10A; (-) strand; PAM type: NRG; PAM sequence: AGG
  source 1..20: mol_type = other DNA
ttttgggaggccaaggtggg

SEQ ID NO: 18563 - DNA, 20 bp, synthetic construct
  misc_feature 1..20: note = Description of Artificial Sequence: Synthetic oligonucleotide
  misc_feature 1..20: note = Target: SCN10A; (-) strand; PAM type: NRG; PAM sequence: GAG
  source 1..20: mol_type = other DNA
attttgggaggccaaggtgg

SEQ ID NO: 18564 - DNA, 20 bp, synthetic construct
  misc_feature 1..20: note = Description of Artificial Sequence: Synthetic oligonucleotide
  misc_feature 1..20: note = Target: SCN10A; (-) strand; PAM type: NRG; PAM sequence: GGG
  source 1..20: mol_type = other DNA
gaattttgggaggccaaggt

SEQ ID NO: 18565 - DNA, 20 bp, synthetic construct
  misc_feature 1..20: note = Description of Artificial Sequence: Synthetic oligonucleotide
  misc_feature 1..20: note = Target: SCN10A; (-) strand; PAM type: NRG; PAM sequence: TGG
  source 1..20: mol_type = other DNA
agaattttgggaggccaagg

SEQ ID NO: 18566 - DNA, 20 bp, synthetic construct
  misc_feature 1..20: note = Description of Artificial Sequence: Synthetic oligonucleotide
  misc_feature 1..20: note = Target: SCN10A; (-) strand; PAM type: NRG; PAM sequence: AGG
  source 1..20: mol_type = other DNA
cccagaattttgggaggcca

SEQ ID NO: 18567 - DNA, 20 bp, synthetic construct
  misc_feature 1..20: note = Description of Artificial Sequence: Synthetic oligonucleotide
  misc_feature 1..20: note = Target: SCN10A; (-) strand; PAM type: NRG; PAM sequence: AAG
  source 1..20: mol_type = other DNA
tcccagaattttgggaggcc

SEQ ID NO: 18568 - DNA, 20 bp, synthetic construct
  misc_feature 1..20: note = Description of Artificial Sequence: Synthetic oligonucleotide
  misc_feature 1..20: note = Target: SCN10A; (-) strand; PAM type: NRG; PAM sequence: AGG
  source 1..20: mol_type = other DNA
tgtaatcccagaattttggg

SEQ ID NO: 18569 - DNA, 20 bp, synthetic construct
  misc_feature 1..20: note = Description of Artificial Sequence: Synthetic oligonucleotide
  misc_feature 1..20: note = Target: SCN10A; (-) strand; PAM type: NRG; PAM sequence: GAG
  source 1..20: mol_type = other DNA
ctgtaatcccagaattttgg

SEQ ID NO: 18570 - DNA, 20 bp, synthetic construct
  misc_feature 1..20: note = Description of Artificial Sequence: Synthetic oligonucleotide
  misc_feature 1..20: note = Target: SCN10A; (-) strand; PAM type: NRG; PAM sequence: GGG
  source 1..20: mol_type = other DNA
gcctgtaatcccagaatttt

SEQ ID NO: 18571 - DNA, 20 bp, synthetic construct
  misc_feature 1..20: note = Description of Artificial Sequence: Synthetic oligonucleotide
  misc_feature 1..20: note = Target: SCN10A; (-) strand; PAM type: NRG; PAM sequence: TGG
  source 1..20: mol_type = other DNA
cgcctgtaatcccagaattt

SEQ ID NO: 18572 - DNA, 20 bp, synthetic construct
  misc_feature 1..20: note = Description of Artificial Sequence: Synthetic oligonucleotide
  misc_feature 1..20: note = Target: SCN10A; (-) strand; PAM type: NRG; PAM sequence: CAG
  source 1..20: mol_type = other DNA
gtggctcacgcctgtaatcc

SEQ ID NO: 18573 - DNA, 20 bp, synthetic construct
  misc_feature 1..20: note = Description of Artificial Sequence: Synthetic oligonucleotide
  misc_feature 1..20: note = Target: SCN10A; (-) strand; PAM type: NRG; PAM sequence: TGG
  source 1..20: mol_type = other DNA
gccaagggggccaggtgggg

SEQ ID NO: 18574 - DNA, 20 bp, synthetic construct
  misc_feature 1..20: note = Description of Artificial Sequence: Synthetic oligonucleotide
  misc_feature 1..20: note = Target: SCN10A; (-) strand; PAM type: NRG; PAM sequence: GGG
  source 1..20: mol_type = other DNA
aaagccaagggggccaggtg

SEQ ID NO: 18575 - DNA, 20 bp, synthetic construct
  misc_feature 1..20: note = Description of Artificial Sequence: Synthetic oligonucleotide
  misc_feature 1..20: note = Target: SCN10A; (-) strand; PAM type: NRG; PAM sequence: GGG
  source 1..20: mol_type = other DNA
taaagccaagggggccaggt

SEQ ID NO: 18576 - DNA, 20 bp, synthetic construct
  misc_feature 1..20: note = Description of Artificial Sequence: Synthetic oligonucleotide
  misc_feature 1..20: note = Target: SCN10A; (-) strand; PAM type: NRG; PAM sequence: TGG
  source 1..20: mol_type = other DNA
ttaaagccaagggggccagg

SEQ ID NO: 18577 - DNA, 20 bp, synthetic construct
  misc_feature 1..20: note = Description of Artificial Sequence: Synthetic oligonucleotide
  misc_feature 1..20: note = Target: SCN10A; (-) strand; PAM type: NRG; PAM sequence: AGG
  source 1..20: mol_type = other DNA
tttttaaagccaagggggcc

SEQ ID NO: 18578 - DNA, 20 bp, synthetic construct
  misc_feature 1..20: note = Description of Artificial Sequence: Synthetic oligonucleotide
  misc_feature 1..20: note = Target: SCN10A; (-) strand; PAM type: NRG; PAM sequence: CAG
  source 1..20: mol_type = other DNA
ttttttaaagccaagggggc

SEQ ID NO: 18579 - DNA, 20 bp, synthetic construct
  misc_feature 1..20: note = Description of Artificial Sequence: Synthetic oligonucleotide
  misc_feature 1..20: note = Target: SCN10A; (-) strand; PAM type: NRG; PAM sequence: GGG
  source 1..20: mol_type = other DNA
ttttttttttaaagccaagg

SEQ ID NO: 18580 - DNA, 20 bp, synthetic construct
  misc_feature 1..20: note = Description of Artificial Sequence: Synthetic oligonucleotide
  misc_feature 1..20: note = Target: SCN10A; (-) strand; PAM type: NRG; PAM sequence: GGG
  source 1..20: mol_type = other DNA
attttttttttaaagccaag

SEQ ID NO: 18581 - DNA, 20 bp, synthetic construct
  misc_feature 1..20: note = Description of Artificial Sequence: Synthetic oligonucleotide
  misc_feature 1..20: note = Target: SCN10A; (-) strand; PAM type: NRG; PAM sequence: GGG
  source 1..20: mol_type = other DNA
cattttttttttaaagccaa

SEQ ID NO: 18582 - DNA, 20 bp, synthetic construct
  misc_feature 1..20: note = Description of Artificial Sequence: Synthetic oligonucleotide
  misc_feature 1..20: note = Target: SCN10A; (-) strand; PAM type: NRG; PAM sequence: AGG
  source 1..20: mol_type = other DNA
ccattttttttttaaagcca

SEQ ID NO: 18583 - DNA, 20 bp, synthetic construct
  misc_feature 1..20: note = Description of Artificial Sequence: Synthetic oligonucleotide
  misc_feature 1..20: note = Target: SCN10A; (-) strand; PAM type: NRG; PAM sequence: AAG
  source 1..20: mol_type = other DNA
gccattttttttttaaagcc

SEQ ID NO: 18584 - DNA, 20 bp, synthetic construct
  misc_feature 1..20: note = Description of Artificial Sequence: Synthetic oligonucleotide
  misc_feature 1..20: note = Target: SCN10A; (-) strand; PAM type: NRG; PAM sequence: AAG
  source 1..20: mol_type = other DNA
attatgccatttttttttta

SEQ ID NO: 18585 - DNA, 20 bp, synthetic construct
  misc_feature 1..20: note = Description of Artificial Sequence: Synthetic oligonucleotide
  misc_feature 1..20: note = Target: SCN10A; (-) strand; PAM type: NRG; PAM sequence: AAG
  source 1..20: mol_type = other DNA
ggttttggtatcaaggttcc

SEQ ID NO: 18586 - DNA, 20 bp, synthetic construct
  misc_feature 1..20: note = Description of Artificial Sequence: Synthetic oligonucleotide
  misc_feature 1..20: note = Target: SCN10A; (-) strand; PAM type: NRG; PAM sequence: AGG
  source 1..20: mol_type = other DNA
cttgccaggttttggtatca

SEQ ID NO: 18587 - DNA, 20 bp, synthetic construct
  misc_feature 1..20: note = Description of Artificial Sequence: Synthetic oligonucleotide
  misc_feature 1..20: note = Target: SCN10A; (-) strand; PAM type: NRG; PAM sequence: AAG
  source 1..20: mol_type = other DNA
ccttgccaggttttggtatc

SEQ ID NO: 18588 - DNA, 20 bp, synthetic construct
  misc_feature 1..20: note = Description of Artificial Sequence: Synthetic oligonucleotide
  misc_feature 1..20: note = Target: SCN10A; (-) strand; PAM type: NRG; PAM sequence: TGG
  source 1..20: mol_type = other DNA
tcattgtccttgccaggttt

SEQ ID NO: 18589 - DNA, 20 bp, synthetic construct
  misc_feature 1..20: note = Description of Artificial Sequence: Synthetic oligonucleotide
  misc_feature 1..20: note = Target: SCN10A; (-) strand; PAM type: NRG; PAM sequence: AGG
  source 1..20: mol_type = other DNA
tgactttcattgtccttgcc

SEQ ID NO: 18590 - DNA, 20 bp, synthetic construct
  misc_feature 1..20: note = Description of Artificial Sequence: Synthetic oligonucleotide
  misc_feature 1..20: note = Target: SCN10A; (-) strand; PAM type: NRG; PAM sequence: CAG
  source 1..20: mol_type = other DNA
ctgactttcattgtccttgc

SEQ ID NO: 18591 - DNA, 20 bp, synthetic construct
  misc_feature 1..20: note = Description of Artificial Sequence: Synthetic oligonucleotide
  misc_feature 1..20: note = Target: SCN10A; (-) strand; PAM type: NRG; PAM sequence: GAG
  source 1..20: mol_type = other DNA
atttttttatccatatcaat

SEQ ID NO: 18592 - DNA, 20 bp, synthetic construct
  misc_feature 1..20: note = Description of Artificial Sequence: Synthetic oligonucleotide
  misc_feature 1..20: note = Target: SCN10A; (-) strand; PAM type: NRG; PAM sequence: AAG
  source 1..20: mol_type = other DNA
agtttgctaaaaatttgctt

SEQ ID NO: 18593 - DNA, 20 bp, synthetic construct
  misc_feature 1..20: note = Description of Artificial Sequence: Synthetic oligonucleotide
  misc_feature 1..20: note = Target: SCN10A; (-) strand; PAM type: NRG; PAM sequence: TAG
  source 1..20: mol_type = other DNA
ttttaatacattggaagatt

SEQ ID NO: 18594 - DNA, 20 bp, synthetic construct
  misc_feature 1..20: note = Description of Artificial Sequence: Synthetic oligonucleotide
  misc_feature 1..20: note = Target: SCN10A; (-) strand; PAM type: NRG; PAM sequence: AAG
  source 1..20: mol_type = other DNA
tgcattttttaatacattgg

SEQ ID NO: 18595 - DNA, 20 bp, synthetic construct
  misc_feature 1..20: note = Description of Artificial Sequence: Synthetic oligonucleotide
  misc_feature 1..20: note = Target: SCN10A; (-) strand; PAM type: NRG; PAM sequence: TGG
  source 1..20: mol_type = other DNA
tgatgcattttttaatacat

SEQ ID NO: 18596 - DNA, 20 bp, synthetic construct
  misc_feature 1..20: note = Description of Artificial Sequence: Synthetic oligonucleotide
  misc_feature 1..20: note = Target: SCN10A; (-) strand; PAM type: NRG; PAM sequence: TAG
  source 1..20: mol_type = other DNA
ttacattcccagctcaaacc

SEQ ID NO: 18597 - DNA, 20 bp, synthetic construct
  misc_feature 1..20: note = Description of Artificial Sequence: Synthetic oligonucleotide
  misc_feature 1..20: note = Target: SCN10A; (-) strand; PAM type: NRG; PAM sequence: CAG
  source 1..20: mol_type = other DNA
ttaaatcaactttacattcc

SEQ ID NO: 18598 - DNA, 20 bp, synthetic construct
  misc_feature 1..20: note = Description of Artificial Sequence: Synthetic oligonucleotide
  misc_feature 1..20: note = Target: SCN10A; (-) strand; PAM type: NRG; PAM sequence: TGG
  source 1..20: mol_type = other DNA
tctccttcaatctgttaaag

SEQ ID NO: 18599 - DNA, 20 bp, synthetic construct
  misc_feature 1..20: note = Description of Artificial Sequence: Synthetic oligonucleotide
  misc_feature 1..20: note = Target: SCN10A; (-) strand; PAM type: NRG; PAM sequence: AAG
  source 1..20: mol_type = other DNA
ttttctccttcaatctgtta

SEQ ID NO: 18600 - DNA, 20 bp, synthetic construct
  misc_feature 1..20: note = Description of Artificial Sequence: Synthetic oligonucleotide
  misc_feature 1..20: note = Target: SCN10A; (-) strand; PAM type: NRG; PAM sequence: GAG
  source 1..20: mol_type = other DNA
acaattattctacatgtatt

SEQ ID NO: 18601 - DNA, 20 bp, synthetic construct
  misc_feature 1..20: note = Description of Artificial Sequence: Synthetic oligonucleotide
  misc_feature 1..20: note = Target: SCN10A; (-) strand; PAM type: NRG; PAM sequence: CAG
  source 1..20: mol_type = other DNA
gaatggatgtttaattttat

SEQ ID NO: 18602 - DNA, 20 bp, synthetic construct
  misc_feature 1..20: note = Description of Artificial Sequence: Synthetic oligonucleotide
  misc_feature 1..20: note = Target: SCN10A; (-) strand; PAM type: NRG; PAM sequence: TGG
  source 1..20: mol_type = other DNA
tcaagaatatttatcatgaa

SEQ ID NO: 18603 - DNA, 20 bp, synthetic construct
  misc_feature 1..20: note = Description of Artificial Sequence: Synthetic oligonucleotide
  misc_feature 1..20: note = Target: SCN10A; (-) strand; PAM type: NRG; PAM sequence: AAG
  source 1..20: mol_type = other DNA
tcaggaagttctcttttatc

SEQ ID NO: 18604 - DNA, 20 bp, synthetic construct
  misc_feature 1..20: note = Description of Artificial Sequence: Synthetic oligonucleotide
  misc_feature 1..20: note = Target: SCN10A; (-) strand; PAM type: NRG; PAM sequence: AAG
  source 1..20: mol_type = other DNA
gaaatctttatcagttcagg

SEQ ID NO: 18605 - DNA, 20 bp, synthetic construct
  misc_feature 1..20: note = Description of Artificial Sequence: Synthetic oligonucleotide
  misc_feature 1..20: note = Target: SCN10A; (-) strand; PAM type: NRG; PAM sequence: AGG
  source 1..20: mol_type = other DNA
taagaaatctttatcagttc

SEQ ID NO: 18606 - DNA, 20 bp, synthetic construct
  misc_feature 1..20: note = Description of Artificial Sequence: Synthetic oligonucleotide
  misc_feature 1..20: note = Target: SCN10A; (-) strand; PAM type: NRG; PAM sequence: CAG
  source 1..20: mol_type = other DNA
ataagaaatctttatcagtt

SEQ ID NO: 18607 - DNA, 20 bp, synthetic construct
  misc_feature 1..20: note = Description of Artificial Sequence: Synthetic oligonucleotide
  misc_feature 1..20: note = Target: SCN10A; (-) strand; PAM type: NRG; PAM sequence: CAG
  source 1..20: mol_type = other DNA
taaagataagaaatctttat

SEQ ID NO: 18608 - DNA, 20 bp, synthetic construct
  misc_feature 1..20: note = Description of Artificial Sequence: Synthetic oligonucleotide
  misc_feature 1..20: note = Target: SCN10A; (-) strand; PAM type: NRG; PAM sequence: AAG
  source 1..20: mol_type = other DNA
ggcaggctttttttaaagat

SEQ ID NO: 18609 - DNA, 20 bp, synthetic construct
  misc_feature 1..20: note = Description of Artificial Sequence: Synthetic oligonucleotide
  misc_feature 1..20: note = Target: SCN10A; (-) strand; PAM type: NRG; PAM sequence: AAG
  source 1..20: mol_type = other DNA
attgtggcaggcttttttta

SEQ ID NO: 18610 - DNA, 20 bp, synthetic construct
  misc_feature 1..20: note = Description of Artificial Sequence: Synthetic oligonucleotide
  misc_feature 1..20: note = Target: SCN10A; (-) strand; PAM type: NRG; PAM sequence: AGG
  source 1..20: mol_type = other DNA
ccacctctaacaattgtggc

SEQ ID NO: 18611 - DNA, 20 bp, synthetic construct
  misc_feature 1..20: note = Description of Artificial Sequence: Synthetic oligonucleotide
  misc_feature 1..20: note = Target: SCN10A; (-) strand; PAM type: NRG; PAM sequence: CAG
  source 1..20: mol_type = other DNA
accacctctaacaattgtgg

SEQ ID NO: 18612 - DNA, 20 bp, synthetic construct
  misc_feature 1..20: note = Description of Artificial Sequence: Synthetic oligonucleotide
  misc_feature 1..20: note = Target: SCN10A; (-) strand; PAM type: NRG; PAM sequence: TGG
  source 1..20: mol_type = other DNA
ttcaccacctctaacaattg

SEQ ID NO: 18613 - DNA, 20 bp, synthetic construct
  misc_feature 1..20: note = Description of Artificial Sequence: Synthetic oligonucleotide
  misc_feature 1..20: note = Target: SCN10A; (-) strand; PAM type: NRG; PAM sequence: AAG
  source 1..20: mol_type = other DNA
atcaattttctgatcccaaa

SEQ ID NO: 18614 - DNA, 20 bp, synthetic construct
  misc_feature 1..20: note = Description of Artificial Sequence: Synthetic oligonucleotide
  misc_feature 1..20: note = Target: SCN10A; (-) strand; PAM type: NRG; PAM sequence: AGG
  source 1..20: mol_type = other DNA
tgaaaagaagtgttaataac

SEQ ID NO: 18615 - DNA, 20 bp, synthetic construct
  misc_feature 1..20: note = Description of Artificial Sequence: Synthetic oligonucleotide
  misc_feature 1..20: note = Target: SCN10A; (-) strand; PAM type: NRG; PAM sequence: CAG
  source 1..20: mol_type = other DNA
ttgaaaagaagtgttaataa

SEQ ID NO: 18616 - DNA, 20 bp, synthetic construct
  misc_feature 1..20: note = Description of Artificial Sequence: Synthetic oligonucleotide
  misc_feature 1..20: note = Target: SCN10A; (-) strand; PAM type: NRG; PAM sequence: AAG
  source 1..20: mol_type = other DNA
tccagtacactgttgaaaag

SEQ ID NO: 18617 - DNA, 20 bp, synthetic construct
  misc_feature 1..20: note = Description of Artificial Sequence: Synthetic oligonucleotide
  misc_feature 1..20: note = Target: SCN10A; (-) strand; PAM type: NRG; PAM sequence: AAG
  source 1..20: mol_type = other DNA
acatccagtacactgttgaa

SEQ ID NO: 18618 - DNA, 20 bp, synthetic construct
  misc_feature 1..20: note = Description of Artificial Sequence: Synthetic oligonucleotide
  misc_feature 1..20: note = Target: SCN10A; (-) strand; PAM type: NRG; PAM sequence: CAG
  source 1..20: mol_type = other DNA
actgtgctagttaggacatc

SEQ ID NO: 18619 - DNA, 20 bp, synthetic construct
  misc_feature 1..20: note = Description of Artificial Sequence: Synthetic oligonucleotide
  misc_feature 1..20: note = Target: SCN10A; (-) strand; PAM type: NRG; PAM sequence: AGG
  source 1..20: mol_type = other DNA
actagatcactgtgctagtt

SEQ ID NO: 18620 - DNA, 20 bp, synthetic construct
  misc_feature 1..20: note = Description of Artificial Sequence: Synthetic oligonucleotide
  misc_feature 1..20: note = Target: SCN10A; (-) strand; PAM type: NRG; PAM sequence: TAG
  source 1..20: mol_type = other DNA
tactagatcactgtgctagt

SEQ ID NO: 18621 - DNA, 20 bp, synthetic construct
  misc_feature 1..20: note = Description of Artificial Sequence: Synthetic oligonucleotide
  misc_feature 1..20: note = Target: SCN10A; (-) strand; PAM type: NRG; PAM sequence: TAG
  source 1..20: mol_type = other DNA
tttttactagatcactgtgc

SEQ ID NO: 18622 - DNA, 20 bp, synthetic construct
  misc_feature 1..20: note = Description of Artificial Sequence: Synthetic oligonucleotide
  misc_feature 1..20: note = Target: SCN10A; (-) strand; PAM type: NRG; PAM sequence: TAG
  source 1..20: mol_type = other DNA
tgccattaggttctttttac

SEQ ID NO: 18623 - DNA, 20 bp, synthetic construct
  misc_feature 1..20: note = Description of Artificial Sequence: Synthetic oligonucleotide
  misc_feature 1..20: note = Target: SCN10A; (-) strand; PAM type: NRG; PAM sequence: AGG
  source 1..20: mol_type = other DNA
tttctaatccttatgccatt

SEQ ID NO: 18624 - DNA, 20 bp, synthetic construct
  misc_feature 1..20: note = Description of Artificial Sequence: Synthetic oligonucleotide
  misc_feature 1..20: note = Target: SCN10A; (-) strand; PAM type: NRG; PAM sequence: TAG
  source 1..20: mol_type = other DNA
ttttctaatccttatgccat

SEQ ID NO: 18625 - DNA, 20 bp, synthetic construct
  misc_feature 1..20: note = Description of Artificial Sequence: Synthetic oligonucleotide
  misc_feature 1..20: note = Target: SCN10A; (-) strand; PAM type: NRG; PAM sequence: CAG
  source 1..20: mol_type = other DNA
aggcatgagccacccacgcc

SEQ ID NO: 18626 - DNA, 20 bp, synthetic construct
  misc_feature 1..20: note = Description of Artificial Sequence: Synthetic oligonucleotide
  misc_feature 1..20: note = Target: SCN10A; (-) strand; PAM type: NRG; PAM sequence: GAG
  source 1..20: mol_type = other DNA
agtgctgggattacaggcat

SEQ ID NO: 18627 - DNA, 20 bp, synthetic construct
  misc_feature 1..20: note = Description of Artificial Sequence: Synthetic oligonucleotide
  misc_feature 1..20: note = Target: SCN10A; (-) strand; PAM type: NRG; PAM sequence: AGG
  source 1..20: mol_type = other DNA
tcctaaagtgctgggattac

SEQ ID NO: 18628 - DNA, 20 bp, synthetic construct
  misc_feature 1..20: note = Description of Artificial Sequence: Synthetic oligonucleotide
  misc_feature 1..20: note = Target: SCN10A; (-) strand; PAM type: NRG; PAM sequence: CAG
  source 1..20: mol_type = other DNA
ctcctaaagtgctgggatta

SEQ ID NO: 18629 - DNA, 20 bp, synthetic construct
  misc_feature 1..20: note = Description of Artificial Sequence: Synthetic oligonucleotide
  misc_feature 1..20: note = Target: SCN10A; (-) strand; PAM type: NRG; PAM sequence: GGG
  source 1..20: mol_type = other DNA
ccttggcctcctaaagtgct

SEQ ID NO: 18630 - DNA, 20 bp, synthetic construct
  misc_feature 1..20: note = Description of Artificial Sequence: Synthetic oligonucleotide
  misc_feature 1..20: note = Target: SCN10A; (-) strand; PAM type: NRG; PAM sequence: TGG
  source 1..20: mol_type = other DNA
gccttggcctcctaaagtgc

SEQ ID NO: 18631 - DNA, 20 bp, synthetic construct
  misc_feature 1..20: note = Description of Artificial Sequence: Synthetic oligonucleotide
  misc_feature 1..20: note = Target: SCN10A; (-) strand; PAM type: NRG; PAM sequence: AAG
  source 1..20: mol_type = other DNA
ctgcctgccttggcctccta

SEQ ID NO: 18632 - DNA, 20 bp, synthetic construct
  misc_feature 1..20: note = Description of Artificial Sequence: Synthetic oligonucleotide
  misc_feature 1..20: note = Target: SCN10A; (-) strand; PAM type: NRG; PAM sequence: TGG
  source 1..20: mol_type = other DNA
acctcatgatctgcctgcct

SEQ ID NO: 18633 - DNA, 20 bp, synthetic construct
  misc_feature 1..20: note = Description of Artificial Sequence: Synthetic oligonucleotide
  misc_feature 1..20: note = Target: SCN10A; (-) strand; PAM type: NRG; PAM sequence: TGG
  source 1..20: mol_type = other DNA
tttcaccgtgttagccagga

SEQ ID NO: 18634 - DNA, 20 bp, synthetic construct
  misc_feature 1..20: note = Description of Artificial Sequence: Synthetic oligonucleotide
  misc_feature 1..20: note = Target: SCN10A; (-) strand; PAM type: NRG; PAM sequence: AGG
  source 1..20: mol_type = other DNA
ggggtttcaccgtgttagcc

SEQ ID NO: 18635 - DNA, 20 bp, synthetic construct
  misc_feature 1..20: note = Description of Artificial Sequence: Synthetic oligonucleotide
  misc_feature 1..20: note = Target: SCN10A; (-) strand; PAM type: NRG; PAM sequence: CAG
  source 1..20: mol_type = other DNA
cggggtttcaccgtgttagc

SEQ ID NO: 18636 - DNA, 20 bp, synthetic construct
  misc_feature 1..20: note = Description of Artificial Sequence: Synthetic oligonucleotide
  misc_feature 1..20: note = Target: SCN10A; (-) strand; PAM type: NRG; PAM sequence: TAG
  source 1..20: mol_type = other DNA
gagacggggtttcaccgtgt

SEQ ID NO: 18637 - DNA, 20 bp, synthetic construct
  misc_feature 1..20: note = Description of Artificial Sequence: Synthetic oligonucleotide
  misc_feature 1..20: note = Target: SCN10A; (-) strand; PAM type: NRG; PAM sequence: GGG
  source 1..20: mol_type = other DNA
ttgtatttttagtagagacg

SEQ ID NO: 18638 - DNA, 20 bp, synthetic construct
  misc_feature 1..20: note = Description of Artificial Sequence: Synthetic oligonucleotide
  misc_feature 1..20: note = Target: SCN10A; (-) strand; PAM type: NRG; PAM sequence: GGG
  source 1..20: mol_type = other DNA
tttgtatttttagtagagac

SEQ ID NO: 18639 - DNA, 20 bp, synthetic construct
  misc_feature 1..20: note = Description of Artificial Sequence: Synthetic oligonucleotide
  misc_feature 1..20: note = Target: SCN10A; (-) strand; PAM type: NRG; PAM sequence: CGG
  source 1..20: mol_type = other DNA
ctttgtatttttagtagaga

SEQ ID NO: 18640 - DNA, 20 bp, synthetic construct
  misc_feature 1..20: note = Description of Artificial Sequence: Synthetic oligonucleotide
  misc_feature 1..20: note = Target: SCN10A; (-) strand; PAM type: NRG; PAM sequence: GAG
  source 1..20: mol_type = other DNA
aattctttgtatttttagta

SEQ ID NO: 18641 - DNA, 20 bp, synthetic construct
  misc_feature 1..20: note = Description of Artificial Sequence: Synthetic oligonucleotide
  misc_feature 1..20: note = Target: SCN10A; (-) strand; PAM type: NRG; PAM sequence: TAG
  source 1..20: mol_type = other DNA
ctaattctttgtatttttag

SEQ ID NO: 18642 - DNA, 20 bp, synthetic construct
  misc_feature 1..20: note = Description of Artificial Sequence: Synthetic oligonucleotide
  misc_feature 1..20: note = Target: SCN10A; (-) strand; PAM type: NRG; PAM sequence: TAG
  source 1..20: mol_type = other DNA
tggctaattctttgtatttt

SEQ ID NO: 18643 - DNA, 20 bp, synthetic construct
  misc_feature 1..20: note = Description of Artificial Sequence: Synthetic oligonucleotide
  misc_feature 1..20: note = Target: SCN10A; (-) strand; PAM type: NRG; PAM sequence: TGG
  source 1..20: mol_type = other DNA
caggcacccaccaccatgcc

SEQ ID NO: 18644 - DNA, 20 bp, synthetic construct
  misc_feature 1..20: note = Description of Artificial Sequence: Synthetic oligonucleotide
  misc_feature 1..20: note = Target: SCN10A; (-) strand; PAM type: NRG; PAM sequence: AGG
  source 1..20: mol_type = other DNA
tcctgagtagctgggactac

SEQ ID NO: 18645 - DNA, 20 bp, synthetic construct
  misc_feature 1..20: note = Description of Artificial Sequence: Synthetic oligonucleotide
  misc_feature 1..20: note = Target: SCN10A; (-) strand; PAM type: NRG; PAM sequence: CAG
  source 1..20: mol_type = other DNA
ctcctgagtagctgggacta

SEQ ID NO: 18646 - DNA, 20 bp, synthetic construct
  misc_feature 1..20: note = Description of Artificial Sequence: Synthetic oligonucleotide
  misc_feature 1..20: note = Target: SCN10A; (-) strand; PAM type: NRG; PAM sequence: GGG
  source 1..20: mol_type = other DNA
cctcagcctcctgagtagct

SEQ ID NO: 18647 - DNA, 20 bp, synthetic construct
  misc_feature 1..20: note = Description of Artificial Sequence: Synthetic oligonucleotide
  misc_feature 1..20: note = Target: SCN10A; (-) strand; PAM type: NRG; PAM sequence: TGG
  source 1..20: mol_type = other DNA
gcctcagcctcctgagtagc

SEQ ID NO: 18648 - DNA, 20 bp, synthetic construct
  misc_feature 1..20: note = Description of Artificial Sequence: Synthetic oligonucleotide
  misc_feature 1..20: note = Target: SCN10A; (-) strand; PAM type: NRG; PAM sequence: TAG
  source 1..20: mol_type = other DNA
tcctgcctcagcctcctgag

SEQ ID NO: 18649 - DNA, 20 bp, synthetic construct
  misc_feature 1..20: note = Description of Artificial Sequence: Synthetic oligonucleotide
  misc_feature 1..20: note = Target: SCN10A; (-) strand; PAM type: NRG; PAM sequence: GAG
  source 1..20: mol_type = other DNA
ttctcctgcctcagcctcct

SEQ ID NO: 18650 - DNA, 20 bp, synthetic construct
  misc_feature 1..20: note = Description of Artificial Sequence: Synthetic oligonucleotide
  misc_feature 1..20: note = Target: SCN10A; (-) strand; PAM type: NRG; PAM sequence: CAG
  source 1..20: mol_type = other DNA
ttcacgccattctcctgcct

SEQ ID NO: 18651 - DNA, 20 bp, synthetic construct
  misc_feature 1..20: note = Description of Artificial Sequence: Synthetic oligonucleotide
  misc_feature 1..20: note = Target: SCN10A; (-) strand; PAM type: NRG; PAM sequence: GGG
  source 1..20: mol_type = other DNA
cattgccagctccacctccc

SEQ ID NO: 18652 - DNA, 20 bp, synthetic construct
  misc_feature 1..20: note = Description of Artificial Sequence: Synthetic oligonucleotide
  misc_feature 1..20: note = Target: SCN10A; (-) strand; PAM type: NRG; PAM sequence: CGG
  source 1..20: mol_type = other DNA
tcattgccagctccacctcc

SEQ ID NO: 18653 - DNA, 20 bp, synthetic construct
  misc_feature 1..20: note = Description of Artificial Sequence: Synthetic oligonucleotide
  misc_feature 1..20: note = Target: SCN10A; (-) strand; PAM type: NRG; PAM sequence: CAG
  source 1..20: mol_type = other DNA
gcgtgatctcggctcattgc

SEQ ID NO: 18654 - DNA, 20 bp, synthetic construct
  misc_feature 1..20: note = Description of Artificial Sequence: Synthetic oligonucleotide
  misc_feature 1..20: note = Target: SCN10A; (-) strand; PAM type: NRG; PAM sequence: CGG
  source 1..20: mol_type = other DNA
agagtgcagtggcgtgatct

SEQ ID NO: 18655 - DNA, 20 bp, synthetic construct
  misc_feature 1..20: note = Description of Artificial Sequence: Synthetic oligonucleotide
  misc_feature 1..20: note = Target: SCN10A; (-) strand; PAM type: NRG; PAM sequence: TGG
  source 1..20: mol_type = other DNA
tcacccaggctagagtgcag

SEQ ID NO: 18656 - DNA, 20 bp, synthetic construct
  misc_feature 1..20: note = Description of Artificial Sequence: Synthetic oligonucleotide
  misc_feature 1..20: note = Target: SCN10A; (-) strand; PAM type: NRG; PAM sequence: CAG
  source 1..20: mol_type = other DNA
ctgtcacccaggctagagtg

SEQ ID NO: 18657 - DNA, 20 bp, synthetic construct
  misc_feature 1..20: note = Description of Artificial Sequence: Synthetic oligonucleotide
  misc_feature 1..20: note = Target: SCN10A; (-) strand; PAM type: NRG; PAM sequence: GAG
  source 1..20: mol_type = other DNA
tcgctctgtcacccaggcta

SEQ ID NO: 18658 - DNA, 20 bp, synthetic construct
  misc_feature 1..20: note = Description of Artificial Sequence: Synthetic oligonucleotide
  misc_feature 1..20: note = Target: SCN10A; (-) strand; PAM type: NRG; PAM sequence: TAG
  source 1..20: mol_type = other DNA
tctcgctctgtcacccaggc

SEQ ID NO: 18659 - DNA, 20 bp, synthetic construct
  misc_feature 1..20: note = Description of Artificial Sequence: Synthetic oligonucleotide
  misc_feature 1..20: note = Target: SCN10A; (-) strand; PAM type: NRG; PAM sequence: AGG
  source 1..20: mol_type = other DNA
agagtctcgctctgtcaccc

SEQ ID NO: 18660 - DNA, 20 bp, synthetic construct
  misc_feature 1..20: note = Description of Artificial Sequence: Synthetic oligonucleotide
  misc_feature 1..20: note = Target: SCN10A; (-) strand; PAM type: NRG; PAM sequence: CAG
  source 1..20: mol_type = other DNA
cagagtctcgctctgtcacc

SEQ ID NO: 18661 - DNA, 20 bp, synthetic construct
  misc_feature 1..20: note = Description of Artificial Sequence: Synthetic oligonucleotide
  misc_feature 1..20: note = Target: SCN10A; (-) strand; PAM type: NRG; PAM sequence: GAG
  source 1..20: mol_type = other DNA
ttttttttttttttgagaca

SEQ ID NO: 18662 - DNA, 20 bp, synthetic construct
  misc_feature 1..20: note = Description of Artificial Sequence: Synthetic oligonucleotide
  misc_feature 1..20: note = Target: SCN10A; (-) strand; PAM type: NRG; PAM sequence: CAG
  source 1..20: mol_type = other DNA
ttttttttttttttttgaga

SEQ ID NO: 18663 - DNA, 20 bp, synthetic construct
  misc_feature 1..20: note = Description of Artificial Sequence: Synthetic oligonucleotide
  misc_feature 1..20: note = Target: SCN10A; (-) strand; PAM type: NRG; PAM sequence: GAG
  source 1..20: mol_type = other DNA
tttttttttttttttttttt

SEQ ID NO: 18664 - DNA, 20 bp, synthetic construct
  misc_feature 1..20: note = Description of Artificial Sequence: Synthetic oligonucleotide
  misc_feature 1..20: note = Target: SCN10A; (-) strand; PAM type: NRG; PAM sequence: GAG
  source 1..20: mol_type = other DNA
catcatgtgaaaataacaat

SEQ ID NO: 18665 - DNA, 20 bp, synthetic construct
  misc_feature 1..20: note = Description of Artificial Sequence: Synthetic oligonucleotide
  misc_feature 1..20: note = Target: SCN10A; (-) strand; PAM type: NRG; PAM sequence: TAG
  source 1..20: mol_type = other DNA
atatttaacatttttgtatc

SEQ ID NO: 18666 - DNA, 20 bp, synthetic construct
  misc_feature 1..20: note = Description of Artificial Sequence: Synthetic oligonucleotide
  misc_feature 1..20: note = Target: SCN10A; (-) strand; PAM type: NRG; PAM sequence: TAG
  source 1..20: mol_type = other DNA
tcttttctggcatttttggc

SEQ ID NO: 18667 - DNA, 20 bp, synthetic construct
  misc_feature 1..20: note = Description of Artificial Sequence: Synthetic oligonucleotide
  misc_feature 1..20: note = Target: SCN10A; (-) strand; PAM type: NRG; PAM sequence: TGG
  source 1..20: mol_type = other DNA
atgttcttttctggcatttt

SEQ ID NO: 18668 - DNA, 20 bp, synthetic construct
  misc_feature 1..20: note = Description of Artificial Sequence: Synthetic oligonucleotide
  misc_feature 1..20: note = Target: SCN10A; (-) strand; PAM type: NRG; PAM sequence: TGG
  source 1..20: mol_type = other DNA
tcttcttaaatgttcttttc

SEQ ID NO: 18669 - DNA, 20 bp, synthetic construct
  misc_feature 1..20: note = Description of Artificial Sequence: Synthetic oligonucleotide
  misc_feature 1..20: note = Target: SCN10A; (-) strand; PAM type: NRG; PAM sequence: AGG
  source 1..20: mol_type = other DNA
gtttttataattttctccat

SEQ ID NO: 18670 - DNA, 20 bp, synthetic construct
  misc_feature 1..20: note = Description of Artificial Sequence: Synthetic oligonucleotide
  misc_feature 1..20: note = Target: SCN10A; (-) strand; PAM type: NRG; PAM sequence: TAG
  source 1..20: mol_type = other DNA
ggtttttataattttctcca

SEQ ID NO: 18671 - DNA, 20 bp, synthetic construct
  misc_feature 1..20: note = Description of Artificial Sequence: Synthetic oligonucleotide
  misc_feature 1..20: note = Target: SCN10A; (-) strand; PAM type: NRG; PAM sequence: AGG
  source 1..20: mol_type = other DNA
agtttaaaaatgtttccatg

SEQ ID NO: 18672 - DNA, 20 bp, synthetic construct
  misc_feature 1..20: note = Description of Artificial Sequence: Synthetic oligonucleotide
  misc_feature 1..20: note = Target: SCN10A; (-) strand; PAM type: NRG; PAM sequence: GAG
  source 1..20: mol_type = other DNA
aagtttaaaaatgtttccat

SEQ ID NO: 18673 - DNA, 20 bp, synthetic construct
  misc_feature 1..20: note = Description of Artificial Sequence: Synthetic oligonucleotide
  misc_feature 1..20: note = Target: SCN10A; (-) strand; PAM type: NRG; PAM sequence: AAG
  source 1..20: mol_type = other DNA
tgtataccagtctttcaata

SEQ ID NO: 18674 - DNA, 20 bp, synthetic construct
  misc_feature 1..20: note = Description of Artificial Sequence: Synthetic oligonucleotide
  misc_feature 1..20: note = Target: SCN10A; (-) strand; PAM type: NRG; PAM sequence: CAG
  source 1..20: mol_type = other DNA
agatagtatacgctgtatac

SEQ ID NO: 18675 - DNA, 20 bp, synthetic construct
  misc_feature 1..20: note = Description of Artificial Sequence: Synthetic oligonucleotide
  misc_feature 1..20: note = Target: SCN10A; (-) strand; PAM type: NRG; PAM sequence: TAG
  source 1..20: mol_type = other DNA
agtcttctgatctatgaaga

SEQ ID NO: 18676 - DNA, 20 bp, synthetic construct
  misc_feature 1..20: note = Description of Artificial Sequence: Synthetic oligonucleotide
  misc_feature 1..20: note = Target: SCN10A; (-) strand; PAM type: NRG; PAM sequence: AAG
  source 1..20: mol_type = other DNA
attcagtcttctgatctatg

SEQ ID NO: 18677 - DNA, 20 bp, synthetic construct
  misc_feature 1..20: note = Description of Artificial Sequence: Synthetic oligonucleotide
  misc_feature 1..20: note = Target: SCN10A; (-) strand; PAM type: NRG; PAM sequence: CAG
  source 1..20: mol_type = other DNA
cttataatctttacataatt

SEQ ID NO: 18678 - DNA, 20 bp, synthetic construct
  misc_feature 1..20: note = Description of Artificial Sequence: Synthetic oligonucleotide
  misc_feature 1..20: note = Target: SCN10A; (-) strand; PAM type: NRG; PAM sequence: AAG
  source 1..20: mol_type = other DNA
aattgataggtcaatttggg

SEQ ID NO: 18679 - DNA, 20 bp, synthetic construct
  misc_feature 1..20: note = Description of Artificial Sequence: Synthetic oligonucleotide
  misc_feature 1..20: note = Target: SCN10A; (-) strand; PAM type: NRG; PAM sequence: GGG
  source 1..20: mol_type = other DNA
tgtaattgataggtcaattt

SEQ ID NO: 18680 - DNA, 20 bp, synthetic construct
  misc_feature 1..20: note = Description of Artificial Sequence: Synthetic oligonucleotide
  misc_feature 1..20: note = Target: SCN10A; (-) strand; PAM type: NRG; PAM sequence: TGG
  source 1..20: mol_type = other DNA
ctgtaattgataggtcaatt

SEQ ID NO: 18681 - DNA, 20 bp, synthetic construct
  misc_feature 1..20: note = Description of Artificial Sequence: Synthetic oligonucleotide
  misc_feature 1..20: note = Target: SCN10A; (-) strand; PAM type: NRG; PAM sequence: AGG
  source 1..20: mol_type = other DNA
tagggactgctgtaattgat

SEQ ID NO: 18682 - DNA, 20 bp, synthetic construct
  misc_feature 1..20: note = Description of Artificial Sequence: Synthetic oligonucleotide
  misc_feature 1..20: note = Target: SCN10A; (-) strand; PAM type: NRG; PAM sequence: TAG
  source 1..20: mol_type = other DNA
ttagggactgctgtaattga

SEQ ID NO: 18683 - DNA, 20 bp, synthetic construct
  misc_feature 1..20: note = Description of Artificial Sequence: Synthetic oligonucleotide
  misc_feature 1..20: note = Target: SCN10A; (-) strand; PAM type: NRG; PAM sequence: GGG
  source 1..20: mol_type = other DNA
tgctattgtttttcccatta

SEQ ID NO: 18684 - DNA, 20 bp, synthetic construct
  misc_feature 1..20: note = Description of Artificial Sequence: Synthetic oligonucleotide
  misc_feature 1..20: note = Target: SCN10A; (-) strand; PAM type: NRG; PAM sequence: AGG
  source 1..20: mol_type = other DNA
ctgctattgtttttcccatt

SEQ ID NO: 18685 - DNA, 20 bp, synthetic construct
  misc_feature 1..20: note = Description of Artificial Sequence: Synthetic oligonucleotide
  misc_feature 1..20: note = Target: SCN10A; (-) strand; PAM type: NRG; PAM sequence: TAG
  source 1..20: mol_type = other DNA
actgctattgtttttcccat

SEQ ID NO: 18686 - DNA, 20 bp, synthetic construct
  misc_feature 1..20: note = Description of Artificial Sequence: Synthetic oligonucleotide
  misc_feature 1..20: note = Target: SCN10A; (-) strand; PAM type: NRG; PAM sequence: AAG
  source 1..20: mol_type = other DNA
cactttagaattatcttgcc

SEQ ID NO: 18687 - DNA, 20 bp, synthetic construct
  misc_feature 1..20: note = Description of Artificial Sequence: Synthetic oligonucleotide
  misc_feature 1..20: note = Target: SCN10A; (-) strand; PAM type: NRG; PAM sequence: TAG
  source 1..20: mol_type = other DNA
gcacactttcatattcactt

SEQ ID NO: 18688 - DNA, 20 bp, synthetic construct
  misc_feature 1..20: note = Description of Artificial Sequence: Synthetic oligonucleotide
  misc_feature 1..20: note = Target: SCN10A; (-) strand; PAM type: NRG; PAM sequence: TGG
  source 1..20: mol_type = other DNA
aatttacttcaagaatatct

SEQ ID NO: 18689 - DNA, 20 bp, synthetic construct
  misc_feature 1..20: note = Description of Artificial Sequence: Synthetic oligonucleotide
  misc_feature 1..20: note = Target: SCN10A; (-) strand; PAM type: NRG; PAM sequence: AAG
  source 1..20: mol_type = other DNA
taatccacctaatttacttc

SEQ ID NO: 18690 - DNA, 20 bp, synthetic construct
  misc_feature 1..20: note = Description of Artificial Sequence: Synthetic oligonucleotide
  misc_feature 1..20: note = Target: SCN10A; (-) strand; PAM type: NRG; PAM sequence: AAG
  source 1..20: mol_type = other DNA
tatatctgtgtctgtaaatc

SEQ ID NO: 18691 - DNA, 20 bp, synthetic construct
  misc_feature 1..20: note = Description of Artificial Sequence: Synthetic oligonucleotide
  misc_feature 1..20: note = Target: SCN10A; (-) strand; PAM type: NRG; PAM sequence: CAG
  source 1..20: mol_type = other DNA
aatatcagtcttaattatgg

SEQ ID NO: 18692 - DNA, 20 bp, synthetic construct
  misc_feature 1..20: note = Description of Artificial Sequence: Synthetic oligonucleotide
  misc_feature 1..20: note = Target: SCN10A; (-) strand; PAM type: NRG; PAM sequence: TGG
  source 1..20: mol_type = other DNA
accaatatcagtcttaatta

SEQ ID NO: 18693 - DNA, 20 bp, synthetic construct
  misc_feature 1..20: note = Description of Artificial Sequence: Synthetic oligonucleotide
  misc_feature 1..20: note = Target: SCN10A; (-) strand; PAM type: NRG; PAM sequence: CAG
  source 1..20: mol_type = other DNA
gtctatcctggcaccaatat

SEQ ID NO: 18694 - DNA, 20 bp, synthetic construct
  misc_feature 1..20: note = Description of Artificial Sequence: Synthetic oligonucleotide
  misc_feature 1..20: note = Target: SCN10A; (-) strand; PAM type: NRG; PAM sequence: TGG
  source 1..20: mol_type = other DNA
gttagtccattggtctatcc

SEQ ID NO: 18695 - DNA, 20 bp, synthetic construct
  misc_feature 1..20: note = Description of Artificial Sequence: Synthetic oligonucleotide
  misc_feature 1..20: note = Target: SCN10A; (-) strand; PAM type: NRG; PAM sequence: TGG
  source 1..20: mol_type = other DNA
catttgctctgttagtccat

SEQ ID NO: 18696 - DNA, 20 bp, synthetic construct
  misc_feature 1..20: note = Description of Artificial Sequence: Synthetic oligonucleotide
  misc_feature 1..20: note = Target: SCN10A; (-) strand; PAM type: NRG; PAM sequence: TAG
  source 1..20: mol_type = other DNA
ccttgctccatttgctctgt

SEQ ID NO: 18697 - DNA, 20 bp, synthetic construct
  misc_feature 1..20: note = Description of Artificial Sequence: Synthetic oligonucleotide
  misc_feature 1..20: note = Target: SCN10A; (-) strand; PAM type: NRG; PAM sequence: AAG
  source 1..20: mol_type = other DNA
gcttctcctcccgtcactta

SEQ ID NO: 18698 - DNA, 20 bp, synthetic construct
  misc_feature 1..20: note = Description of Artificial Sequence: Synthetic oligonucleotide
  misc_feature 1..20: note = Target: SCN10A; (-) strand; PAM type: NRG; PAM sequence: TAG
  source 1..20: mol_type = other DNA
gtcttccttctctcccaaaa

SEQ ID NO: 18699 - DNA, 20 bp, synthetic construct
  misc_feature 1..20: note = Description of Artificial Sequence: Synthetic oligonucleotide
  misc_feature 1..20: note = Target: SCN10A; (-) strand; PAM type: NRG; PAM sequence: AAG
  source 1..20: mol_type = other DNA
gggaaaaaggaagaaataaa

SEQ ID NO: 18700 - DNA, 20 bp, synthetic construct
  misc_feature 1..20: note = Description of Artificial Sequence: Synthetic oligonucleotide
  misc_feature 1..20: note = Target: SCN10A; (-) strand; PAM type: NRG; PAM sequence: AAG
  source 1..20: mol_type = other DNA
ggaaggtggagggaaaaagg

SEQ ID NO: 18701 - DNA, 20 bp, synthetic construct
  misc_feature 1..20: note = Description of Artificial Sequence: Synthetic oligonucleotide
  misc_feature 1..20: note = Target: SCN10A; (-) strand; PAM type: NRG; PAM sequence: AGG
  source 1..20: mol_type = other DNA
agaggaaggtggagggaaaa

SEQ ID NO: 18702 - DNA, 20 bp, synthetic construct
  misc_feature 1..20: note = Description of Artificial Sequence: Synthetic oligonucleotide
  misc_feature 1..20: note = Target: SCN10A; (-) strand; PAM type: NRG; PAM sequence: AAG
  source 1..20: mol_type = other DNA
gagaggaaggtggagggaaa

SEQ ID NO: 18703 - DNA, 20 bp, synthetic construct
  misc_feature 1..20: note = Description of Artificial Sequence: Synthetic oligonucleotide
  misc_feature 1..20: note = Target: SCN10A; (-) strand; PAM type: NRG; PAM sequence: GGG
  source 1..20: mol_type = other DNA
aagaaagagaggaaggtgga

SEQ ID NO: 18704 - DNA, 20 bp, synthetic construct
  misc_feature 1..20: note = Description of Artificial Sequence: Synthetic oligonucleotide
  misc_feature 1..20: note = Target: SCN10A; (-) strand; PAM type: NRG; PAM sequence: AGG
  source 1..20: mol_type = other DNA
aaagaaagagaggaaggtgg

SEQ ID NO: 18705 - DNA, 20 bp, synthetic construct
  misc_feature 1..20: note = Description of Artificial Sequence: Synthetic oligonucleotide
  misc_feature 1..20: note = Target: SCN10A; (-) strand; PAM type: NRG; PAM sequence: GAG
  source 1..20: mol_type = other DNA
gaaagaaagagaggaaggtg

SEQ ID NO: 18706 - DNA, 20 bp, synthetic construct
  misc_feature 1..20: note = Description of Artificial Sequence: Synthetic oligonucleotide
  misc_feature 1..20: note = Target: SCN10A; (-) strand; PAM type: NRG; PAM sequence: TGG
  source 1..20: mol_type = other DNA
aggaaagaaagagaggaagg

SEQ ID NO: 18707 - DNA, 20 bp, synthetic construct
  misc_feature 1..20: note = Description of Artificial Sequence: Synthetic oligonucleotide
  misc_feature 1..20: note = Target: SCN10A; (-) strand; PAM type: NRG; PAM sequence: AGG
  source 1..20: mol_type = other DNA
ggaaggaaagaaagagagga

SEQ ID NO: 18708 - DNA, 20 bp, synthetic construct
  misc_feature 1..20: note = Description of Artificial Sequence: Synthetic oligonucleotide
  misc_feature 1..20: note = Target: SCN10A; (-) strand; PAM type: NRG; PAM sequence: AAG
  source 1..20: mol_type = other DNA
aggaaggaaagaaagagagg

SEQ ID NO: 18709 - DNA, 20 bp, synthetic construct
  misc_feature 1..20: note = Description of Artificial Sequence: Synthetic oligonucleotide
  misc_feature 1..20: note = Target: SCN10A; (-) strand; PAM type: NRG; PAM sequence: AGG
  source 1..20: mol_type = other DNA
tgaaggaaggaaagaaagag

SEQ ID NO: 18710 - DNA, 20 bp, synthetic construct
  misc_feature 1..20: note = Description of Artificial Sequence: Synthetic oligonucleotide
  misc_feature 1..20: note = Target: SCN10A; (-) strand; PAM type: NRG; PAM sequence: GAG
  source 1..20: mol_type = other DNA
ttgaaggaaggaaagaaaga

SEQ ID NO: 18711 - DNA, 20 bp, synthetic construct
  misc_feature 1..20: note = Description of Artificial Sequence: Synthetic oligonucleotide
  misc_feature 1..20: note = Target: SCN10A; (-) strand; PAM type: NRG; PAM sequence: GAG
  source 1..20: mol_type = other DNA
gattgaaggaaggaaagaaa

SEQ ID NO: 18712 - DNA, 20 bp, synthetic construct
  misc_feature 1..20: note = Description of Artificial Sequence: Synthetic oligonucleotide
  misc_feature 1..20: note = Target: SCN10A; (-) strand; PAM type: NRG; PAM sequence: AAG
  source 1..20: mol_type = other DNA
ttgattgaaggaaggaaaga

SEQ ID NO: 18713 - DNA, 20 bp, synthetic construct
  misc_feature 1..20: note = Description of Artificial Sequence: Synthetic oligonucleotide
  misc_feature 1..20: note = Target: SCN10A; (-) strand; PAM type: NRG; PAM sequence: AAG
  source 1..20: mol_type = other DNA
ttgattgattgaaggaagga

SEQ ID NO: 18714 - DNA, 20 bp, synthetic construct
  misc_feature 1..20: note = Description of Artificial Sequence: Synthetic oligonucleotide
  misc_feature 1..20: note = Target: SCN10A; (-) strand; PAM type: NRG; PAM sequence: AGG
  source 1..20: mol_type = other DNA
cctgttgattgattgaagga

SEQ ID NO: 18715 - DNA, 20 bp, synthetic construct
  misc_feature 1..20: note = Description of Artificial Sequence: Synthetic oligonucleotide
  misc_feature 1..20: note = Target: SCN10A; (-) strand; PAM type: NRG; PAM sequence: AAG
  source 1..20: mol_type = other DNA
acctgttgattgattgaagg

SEQ ID NO: 18716 - DNA, 20 bp, synthetic construct
  misc_feature 1..20: note = Description of Artificial Sequence: Synthetic oligonucleotide
  misc_feature 1..20: note = Target: SCN10A; (-) strand; PAM type: NRG; PAM sequence: AGG
  source 1..20: mol_type = other DNA
aacacctgttgattgattga

SEQ ID NO: 18717 - DNA, 20 bp, synthetic construct
  misc_feature 1..20: note = Description of Artificial Sequence: Synthetic oligonucleotide
  misc_feature 1..20: note = Target: SCN10A; (-) strand; PAM type: NRG; PAM sequence: AAG
  source 1..20: mol_type = other DNA
aaacacctgttgattgattg

SEQ ID NO: 18718 - DNA, 20 bp, synthetic construct
  misc_feature 1..20: note = Description of Artificial Sequence: Synthetic oligonucleotide
  misc_feature 1..20: note = Target: SCN10A; (-) strand; PAM type: NRG; PAM sequence: AGG
  source 1..20: mol_type = other DNA
acaaggcccagcacatacat

SEQ ID NO: 18719 - DNA, 20 bp, synthetic construct
  misc_feature 1..20: note = Description of Artificial Sequence: Synthetic oligonucleotide
  misc_feature 1..20: note = Target: SCN10A; (-) strand; PAM type: NRG; PAM sequence: TAG
  source 1..20: mol_type = other DNA
cacaaggcccagcacataca

SEQ ID NO: 18720 - DNA, 20 bp, synthetic construct
  misc_feature 1..20: note = Description of Artificial Sequence: Synthetic oligonucleotide
  misc_feature 1..20: note = Target: SCN10A; (-) strand; PAM type: NRG; PAM sequence: CAG
  source 1..20: mol_type = other DNA
caagggcctagcacaaggcc

SEQ ID NO: 18721 - DNA, 20 bp, synthetic construct
  misc_feature 1..20: note = Description of Artificial Sequence: Synthetic oligonucleotide
  misc_feature 1..20: note = Target: SCN10A; (-) strand; PAM type: NRG; PAM sequence: AGG
  source 1..20: mol_type = other DNA
tatcccaagggcctagcaca

SEQ ID NO: 18722 - DNA, 20 bp, synthetic construct
  misc_feature 1..20: note = Description of Artificial Sequence: Synthetic oligonucleotide
  misc_feature 1..20: note = Target: SCN10A; (-) strand; PAM type: NRG; PAM sequence: AAG
  source 1..20: mol_type = other DNA
ttatcccaagggcctagcac

SEQ ID NO: 18723 - DNA, 20 bp, synthetic construct
  misc_feature 1..20: note = Description of Artificial Sequence: Synthetic oligonucleotide
  misc_feature 1..20: note = Target: SCN10A; (-) strand; PAM type: NRG; PAM sequence: TAG
  source 1..20: mol_type = other DNA
accgttttatcccaagggcc

SEQ ID NO: 18724 - DNA, 20 bp, synthetic construct
  misc_feature 1..20: note = Description of Artificial Sequence: Synthetic oligonucleotide
  misc_feature 1..20: note = Target: SCN10A; (-) strand; PAM type: NRG; PAM sequence: GGG
  source 1..20: mol_type = other DNA
tgtctaccgttttatcccaa

SEQ ID NO: 18725 - DNA, 20 bp, synthetic construct
  misc_feature 1..20: note = Description of Artificial Sequence: Synthetic oligonucleotide
  misc_feature 1..20: note = Target: SCN10A; (-) strand; PAM type: NRG; PAM sequence: AGG
  source 1..20: mol_type = other DNA
ttgtctaccgttttatccca

SEQ ID NO: 18726 - DNA, 20 bp, synthetic construct
  misc_feature 1..20: note = Description of Artificial Sequence: Synthetic oligonucleotide
  misc_feature 1..20: note = Target: SCN10A; (-) strand; PAM type: NRG; PAM sequence: AAG
  source 1..20: mol_type = other DNA
cttgtctaccgttttatccc

SEQ ID NO: 18727 - DNA, 20 bp, synthetic construct
  misc_feature 1..20: note = Description of Artificial Sequence: Synthetic oligonucleotide
  misc_feature 1..20: note = Target: SCN10A; (-) strand; PAM type: NRG; PAM sequence: GAG
  source 1..20: mol_type = other DNA
atcccatgaggcaaaaacca

SEQ ID NO: 18728 - DNA, 20 bp, synthetic construct
  misc_feature 1..20: note = Description of Artificial Sequence: Synthetic oligonucleotide
  misc_feature 1..20: note = Target: SCN10A; (-) strand; PAM type: NRG; PAM sequence: CAG
  source 1..20: mol_type = other DNA
ctatcccatgaggcaaaaac

SEQ ID NO: 18729 - DNA, 20 bp, synthetic construct
  misc_feature 1..20: note = Description of Artificial Sequence: Synthetic oligonucleotide
  misc_feature 1..20: note = Target: SCN10A; (-) strand; PAM type: NRG; PAM sequence: AGG
  source 1..20: mol_type = other DNA
aattgtcctgctatcccatg

SEQ ID NO: 18730 - DNA, 20 bp, synthetic construct
  misc_feature 1..20: note = Description of Artificial Sequence: Synthetic oligonucleotide
  misc_feature 1..20: note = Target: SCN10A; (-) strand; PAM type: NRG; PAM sequence: GAG
  source 1..20: mol_type = other DNA
caattgtcctgctatcccat

SEQ ID NO: 18731 - DNA, 20 bp, synthetic construct
  misc_feature 1..20: note = Description of Artificial Sequence: Synthetic oligonucleotide
  misc_feature 1..20: note = Target: SCN10A; (-) strand; PAM type: NRG; PAM sequence: TGG
  source 1..20: mol_type = other DNA
attccttcatcaaattaacc

SEQ ID NO: 18732 - DNA, 20 bp, synthetic construct
  misc_feature 1..20: note = Description of Artificial Sequence: Synthetic oligonucleotide
  misc_feature 1..20: note = Target: SCN10A; (-) strand; PAM type: NRG; PAM sequence: TGG
  source 1..20: mol_type = other DNA
ccaaccacactatctaaagt

SEQ ID NO: 18733 - DNA, 20 bp, synthetic construct
  misc_feature 1..20: note = Description of Artificial Sequence: Synthetic oligonucleotide
  misc_feature 1..20: note = Target: SCN10A; (-) strand; PAM type: NRG; PAM sequence: AAG
  source 1..20: mol_type = other DNA
ctccccaaccacactatcta

SEQ ID NO: 18734 - DNA, 20 bp, synthetic construct
  misc_feature 1..20: note = Description of Artificial Sequence: Synthetic oligonucleotide
  misc_feature 1..20: note = Target: SCN10A; (-) strand; PAM type: NRG; PAM sequence: GGG
  source 1..20: mol_type = other DNA
cacttgtcacctccttagag

SEQ ID NO: 18735 - DNA, 20 bp, synthetic construct
  misc_feature 1..20: note = Description of Artificial Sequence: Synthetic oligonucleotide
  misc_feature 1..20: note = Target: SCN10A; (-) strand; PAM type: NRG; PAM sequence: GGG
  source 1..20: mol_type = other DNA
gcacttgtcacctccttaga

SEQ ID NO: 18736 - DNA, 20 bp, synthetic construct
  misc_feature 1..20: note = Description of Artificial Sequence: Synthetic oligonucleotide
  misc_feature 1..20: note = Target: SCN10A; (-) strand; PAM type: NRG; PAM sequence: AGG
  source 1..20: mol_type = other DNA
tgcacttgtcacctccttag

SEQ ID NO: 18737 - DNA, 20 bp, synthetic construct
  misc_feature 1..20: note = Description of Artificial Sequence: Synthetic oligonucleotide
  misc_feature 1..20: note = Target: SCN10A; (-) strand; PAM type: NRG; PAM sequence: GAG
  source 1..20: mol_type = other DNA
atgcacttgtcacctcctta

SEQ ID NO: 18738 - DNA, 20 bp, synthetic construct
  misc_feature 1..20: note = Description of Artificial Sequence: Synthetic oligonucleotide
  misc_feature 1..20: note = Target: SCN10A; (-) strand; PAM type: NRG; PAM sequence: TAG
  source 1..20: mol_type = other DNA
caatgcacttgtcacctcct

SEQ ID NO: 18739 - DNA, 20 bp, synthetic construct
  misc_feature 1..20: note = Description of Artificial Sequence: Synthetic oligonucleotide
  misc_feature 1..20: note = Target: SCN10A; (-) strand; PAM type: NRG; PAM sequence: TAG
  source 1..20: mol_type = other DNA
cttttcctttagtcttcact

SEQ ID NO: 18740 - DNA, 20 bp, synthetic construct
  misc_feature 1..20: note = Description of Artificial Sequence: Synthetic oligonucleotide
  misc_feature 1..20: note = Target: SCN10A; (-) strand; PAM type: NRG; PAM sequence: TAG
  source 1..20: mol_type = other DNA
tgcctggaatacttttcctt

SEQ ID NO: 18741 - DNA, 20 bp, synthetic construct
  misc_feature 1..20: note = Description of Artificial Sequence: Synthetic oligonucleotide
  misc_feature 1..20: note = Target: SCN10A; (-) strand; PAM type: NRG; PAM sequence: TGG
  source 1..20: mol_type = other DNA
gaagtttttttcgctgtgcc

SEQ ID NO: 18742 - DNA, 20 bp, synthetic construct
  misc_feature 1..20: note = Description of Artificial Sequence: Synthetic oligonucleotide
  misc_feature 1..20: note = Target: SCN10A; (-) strand; PAM type: NRG; PAM sequence: AAG
  source 1..20: mol_type = other DNA
ttcttggctttgggcctttg

SEQ ID NO: 18743 - DNA, 20 bp, synthetic construct
  misc_feature 1..20: note = Description of Artificial Sequence: Synthetic oligonucleotide
  misc_feature 1..20: note = Target: SCN10A; (-) strand; PAM type: NRG; PAM sequence: GGG
  source 1..20: mol_type = other DNA
acagagaacttcttggcttt

SEQ ID NO: 18744 - DNA, 20 bp, synthetic construct
  misc_feature 1..20: note = Description of Artificial Sequence: Synthetic oligonucleotide
  misc_feature 1..20: note = Target: SCN10A; (-) strand; PAM type: NRG; PAM sequence: TGG
  source 1..20: mol_type = other DNA
aacagagaacttcttggctt

SEQ ID NO: 18745 - DNA, 20 bp, synthetic construct
  misc_feature 1..20: note = Description of Artificial Sequence: Synthetic oligonucleotide
  misc_feature 1..20: note = Target: SCN10A; (-) strand; PAM type: NRG; PAM sequence: TGG
  source 1..20: mol_type = other DNA
acacataacagagaacttct

SEQ ID NO: 18746 - DNA, 20 bp, synthetic construct
  misc_feature 1..20: note = Description of Artificial Sequence: Synthetic oligonucleotide
  misc_feature 1..20: note = Target: SCN10A; (-) strand; PAM type: NRG; PAM sequence: GAG
  source 1..20: mol_type = other DNA
tctcttcttcacacataaca

SEQ ID NO: 18747 - DNA, 20 bp, synthetic construct
  misc_feature 1..20: note = Description of Artificial Sequence: Synthetic oligonucleotide
  misc_feature 1..20: note = Target: SCN10A; (-) strand; PAM type: NRG; PAM sequence: CAG
  source 1..20: mol_type = other DNA
tctctcttcttcacacataa

SEQ ID NO: 18748 - DNA, 20 bp, synthetic construct
  misc_feature 1..20: note = Description of Artificial Sequence: Synthetic oligonucleotide
  misc_feature 1..20: note = Target: SCN10A; (-) strand; PAM type: NRG; PAM sequence: AGG
  source 1..20: mol_type = other DNA
ccactttgctccagccaaaa

SEQ ID NO: 18749 - DNA, 20 bp, synthetic construct
  misc_feature 1..20: note = Description of Artificial Sequence: Synthetic oligonucleotide
  misc_feature 1..20: note = Target: SCN10A; (-) strand; PAM type: NRG; PAM sequence: AAG
  source 1..20: mol_type = other DNA
cccactttgctccagccaaa

SEQ ID NO: 18750 - DNA, 20 bp, synthetic construct
  misc_feature 1..20: note = Description of Artificial Sequence: Synthetic oligonucleotide
  misc_feature 1..20: note = Target: SCN10A; (-) strand; PAM type: NRG; PAM sequence: CAG
  source 1..20: mol_type = other DNA
ccgtcttgcccactttgctc

SEQ ID NO: 18751 - DNA, 20 bp, synthetic construct
  misc_feature 1..20: note = Description of Artificial Sequence: Synthetic oligonucleotide
  misc_feature 1..20: note = Target: SCN10A; (-) strand; PAM type: NRG; PAM sequence: CAG
  source 1..20: mol_type = other DNA
atcaggacctgccagttcac

SEQ ID NO: 18752 - DNA, 20 bp, synthetic construct
  misc_feature 1..20: note = Description of Artificial Sequence: Synthetic oligonucleotide
  misc_feature 1..20: note = Target: SCN10A; (-) strand; PAM type: NRG; PAM sequence: CAG
  source 1..20: mol_type = other DNA
tctgcataatcaggacctgc

SEQ ID NO: 18753 - DNA, 20 bp, synthetic construct
  misc_feature 1..20: note = Description of Artificial Sequence: Synthetic oligonucleotide
  misc_feature 1..20: note = Target: SCN10A; (-) strand; PAM type: NRG; PAM sequence: AGG
  source 1..20: mol_type = other DNA
gtacaaagttctgcataatc

SEQ ID NO: 18754 - DNA, 20 bp, synthetic construct
  misc_feature 1..20: note = Description of Artificial Sequence: Synthetic oligonucleotide
  misc_feature 1..20: note = Target: SCN10A; (-) strand; PAM type: NRG; PAM sequence: CAG
  source 1..20: mol_type = other DNA
tgtacaaagttctgcataat

SEQ ID NO: 18755 - DNA, 20 bp, synthetic construct
  misc_feature 1..20: note = Description of Artificial Sequence: Synthetic oligonucleotide
  misc_feature 1..20: note = Target: SCN10A; (-) strand; PAM type: NRG; PAM sequence: AAG
  source 1..20: mol_type = other DNA
actcctcatgatggtgtaca

SEQ ID NO: 18756 - DNA, 20 bp, synthetic construct
  misc_feature 1..20: note = Description of Artificial Sequence: Synthetic oligonucleotide
  misc_feature 1..20: note = Target: SCN10A; (-) strand; PAM type: NRG; PAM sequence: TGG
  source 1..20: mol_type = other DNA
aaaatccagactcctcatga

SEQ ID NO: 18757 - DNA, 20 bp, synthetic construct
  misc_feature 1..20: note = Description of Artificial Sequence: Synthetic oligonucleotide
  misc_feature 1..20: note = Target: SCN10A; (-) strand; PAM type: NRG; PAM sequence: CAG
  source 1..20: mol_type = other DNA
attgctctgagaataaaatc

SEQ ID NO: 18758 - DNA, 20 bp, synthetic construct
  misc_feature 1..20: note = Description of Artificial Sequence: Synthetic oligonucleotide
  misc_feature 1..20: note = Target: SCN10A; (-) strand; PAM type: NRG; PAM sequence: GAG
  source 1..20: mol_type = other DNA
cactggtttcccattgctct

SEQ ID NO: 18759 - DNA, 20 bp, synthetic construct
  misc_feature 1..20: note = Description of Artificial Sequence: Synthetic oligonucleotide
  misc_feature 1..20: note = Target: SCN10A; (-) strand; PAM type: NRG; PAM sequence: TGG
  source 1..20: mol_type = other DNA
tttgttacaaataacttcac

SEQ ID NO: 18760 - DNA, 20 bp, synthetic construct
  misc_feature 1..20: note = Description of Artificial Sequence: Synthetic oligonucleotide
  misc_feature 1..20: note = Target: SCN10A; (-) strand; PAM type: NRG; PAM sequence: TAG
  source 1..20: mol_type = other DNA
ctattaccaacatcttatgt

SEQ ID NO: 18761 - DNA, 20 bp, synthetic construct
  misc_feature 1..20: note = Description of Artificial Sequence: Synthetic oligonucleotide
  misc_feature 1..20: note = Target: SCN10A; (-) strand; PAM type: NRG; PAM sequence: GAG
  source 1..20: mol_type = other DNA
cacacacacacacacacaca

SEQ ID NO: 18762 - DNA, 20 bp, synthetic construct
  misc_feature 1..20: note = Description of Artificial Sequence: Synthetic oligonucleotide
  misc_feature 1..20: note = Target: SCN10A; (-) strand; PAM type: NRG; PAM sequence: CAG
  source 1..20: mol_type = other DNA
cacacacacacacacacaca

SEQ ID NO: 18763 - DNA, 20 bp, synthetic construct
  misc_feature 1..20: note = Description of Artificial Sequence: Synthetic oligonucleotide
  misc_feature 1..20: note = Target: SCN10A; (-) strand; PAM type: NRG; PAM sequence: AAG
  source 1..20: mol_type = other DNA
actggagcagattgaacaga

SEQ ID NO: 18764 - DNA, 20 bp, synthetic construct
  misc_feature 1..20: note = Description of Artificial Sequence: Synthetic oligonucleotide
  misc_feature 1..20: note = Target: SCN10A; (-) strand; PAM type: NRG; PAM sequence: CAG
  source 1..20: mol_type = other DNA
gaaaactggagcagattgaa

SEQ ID NO: 18765 - DNA, 20 bp, synthetic construct
  misc_feature 1..20: note = Description of Artificial Sequence: Synthetic oligonucleotide
  misc_feature 1..20: note = Target: SCN10A; (-) strand; PAM type: NRG; PAM sequence: CAG
  source 1..20: mol_type = other DNA
cagttttcagaaaactggag

SEQ ID NO: 18766 - DNA, 20 bp, synthetic construct
  misc_feature 1..20: note = Description of Artificial Sequence: Synthetic oligonucleotide
  misc_feature 1..20: note = Target: SCN10A; (-) strand; PAM type: NRG; PAM sequence: GAG
  source 1..20: mol_type = other DNA
tttcagttttcagaaaactg

SEQ ID NO: 18767 - DNA, 20 bp, synthetic construct
  misc_feature 1..20: note = Description of Artificial Sequence: Synthetic oligonucleotide
  misc_feature 1..20: note = Target: SCN10A; (-) strand; PAM type: NRG; PAM sequence: TGG
  source 1..20: mol_type = other DNA
gttttcagttttcagaaaac

SEQ ID NO: 18768 - DNA, 20 bp, synthetic construct
  misc_feature 1..20: note = Description of Artificial Sequence: Synthetic oligonucleotide
  misc_feature 1..20: note = Target: SCN10A; (-) strand; PAM type: NRG; PAM sequence: CAG
  source 1..20: mol_type = other DNA
tcaggacagttttcagtttt

SEQ ID NO: 18769 - DNA, 20 bp, synthetic construct
  misc_feature 1..20: note = Description of Artificial Sequence: Synthetic oligonucleotide
  misc_feature 1..20: note = Target: SCN10A; (-) strand; PAM type: NRG; PAM sequence: CAG
  source 1..20: mol_type = other DNA
tttattttcaggacagtttt

SEQ ID NO: 18770 - DNA, 20 bp, synthetic construct
  misc_feature 1..20: note = Description of Artificial Sequence: Synthetic oligonucleotide
  misc_feature 1..20: note = Target: SCN10A; (-) strand; PAM type: NRG; PAM sequence: CAG
  source 1..20: mol_type = other DNA
aatagactttattttcagga

SEQ ID NO: 18771 - DNA, 20 bp, synthetic construct
  misc_feature 1..20: note = Description of Artificial Sequence: Synthetic oligonucleotide
  misc_feature 1..20: note = Target: SCN10A; (-) strand; PAM type: NRG; PAM sequence: AGG
  source 1..20: mol_type = other DNA
aattaatagactttattttc

SEQ ID NO: 18772 - DNA, 20 bp, synthetic construct
  misc_feature 1..20: note = Description of Artificial Sequence: Synthetic oligonucleotide
  misc_feature 1..20: note = Target: SCN10A; (-) strand; PAM type: NRG; PAM sequence: CAG
  source 1..20: mol_type = other DNA
taattaatagactttatttt

SEQ ID NO: 18773 - DNA, 20 bp, synthetic construct
  misc_feature 1..20: note = Description of Artificial Sequence: Synthetic oligonucleotide
  misc_feature 1..20: note = Target: SCN10A; (-) strand; PAM type: NRG; PAM sequence: TAG
  source 1..20: mol_type = other DNA
agtttcctggttttaattaa

SEQ ID NO: 18774 - DNA, 20 bp, synthetic construct
  misc_feature 1..20: note = Description of Artificial Sequence: Synthetic oligonucleotide
  misc_feature 1..20: note = Target: SCN10A; (-) strand; PAM type: NRG; PAM sequence: TGG
  source 1..20: mol_type = other DNA
ccgccagctggtcagtttcc

SEQ ID NO: 18775 - DNA, 20 bp, synthetic construct
  misc_feature 1..20: note = Description of Artificial Sequence: Synthetic oligonucleotide
  misc_feature 1..20: note = Target: SCN10A; (-) strand; PAM type: NRG; PAM sequence: CAG
  source 1..20: mol_type = other DNA
aaaaatcaccgccagctggt

SEQ ID NO: 18776 - DNA, 20 bp, synthetic construct
  misc_feature 1..20: note = Description of Artificial Sequence: Synthetic oligonucleotide
  misc_feature 1..20: note = Target: SCN10A; (-) strand; PAM type: NRG; PAM sequence: TGG
  source 1..20: mol_type = other DNA
ggagaaaaatcaccgccagc

SEQ ID NO: 18777 - DNA, 20 bp, synthetic construct
  misc_feature 1..20: note = Description of Artificial Sequence: Synthetic oligonucleotide
  misc_feature 1..20: note = Target: SCN10A; (-) strand; PAM type: NRG; PAM sequence: CAG
  source 1..20: mol_type = other DNA
tgctggagaaaaatcaccgc

SEQ ID NO: 18778 - DNA, 20 bp, synthetic construct
  misc_feature 1..20: note = Description of Artificial Sequence: Synthetic oligonucleotide
  misc_feature 1..20: note = Target: SCN10A; (-) strand; PAM type: NRG; PAM sequence: GAG
  source 1..20: mol_type = other DNA
ctgagctgtgagaaatgctg

SEQ ID NO: 18779 - DNA, 20 bp, synthetic construct
  misc_feature 1..20: note = Description of Artificial Sequence: Synthetic oligonucleotide
  misc_feature 1..20: note = Target: SCN10A; (-) strand; PAM type: NRG; PAM sequence: TGG
  source 1..20: mol_type = other DNA
acctgagctgtgagaaatgc

SEQ ID NO: 18780 - DNA, 20 bp, synthetic construct
  misc_feature 1..20: note = Description of Artificial Sequence: Synthetic oligonucleotide
  misc_feature 1..20: note = Target: SCN10A; (-) strand; PAM type: NRG; PAM sequence: GAG
  source 1..20: mol_type = other DNA
cttgtctgcacctgagctgt

SEQ ID NO: 18781 - DNA, 20 bp, synthetic construct
  misc_feature 1..20: note = Description of Artificial Sequence: Synthetic oligonucleotide
  misc_feature 1..20: note = Target: SCN10A; (-) strand; PAM type: NRG; PAM sequence: GAG
  source 1..20: mol_type = other DNA
tctccaccttgtctgcacct

SEQ ID NO: 18782 - DNA, 20 bp, synthetic construct
  misc_feature 1..20: note = Description of Artificial Sequence: Synthetic oligonucleotide
  misc_feature 1..20: note = Target: SCN10A; (-) strand; PAM type: NRG; PAM sequence: AAG
  source 1..20: mol_type = other DNA
aaaacctcaccggagagtct

SEQ ID NO: 18783 - DNA, 20 bp, synthetic construct
  misc_feature 1..20: note = Description of Artificial Sequence: Synthetic oligonucleotide
  misc_feature 1..20: note = Target: SCN10A; (-) strand; PAM type: NRG; PAM sequence: GAG
  source 1..20: mol_type = other DNA
tttgccaaaacctcaccgga

SEQ ID NO: 18784 - DNA, 20 bp, synthetic construct
  misc_feature 1..20: note = Description of Artificial Sequence: Synthetic oligonucleotide
  misc_feature 1..20: note = Target: SCN10A; (-) strand; PAM type: NRG; PAM sequence: GAG
  source 1..20: mol_type = other DNA
tgtttgccaaaacctcaccg

SEQ ID NO: 18785 - DNA, 20 bp, synthetic construct
  misc_feature 1..20: note = Description of Artificial Sequence: Synthetic oligonucleotide
  misc_feature 1..20: note = Target: SCN10A; (-) strand; PAM type: NRG; PAM sequence: CGG
  source 1..20: mol_type = other DNA
tgtgtttgccaaaacctcac

SEQ ID NO: 18786 - DNA, 20 bp, synthetic construct
  misc_feature 1..20: note = Description of Artificial Sequence: Synthetic oligonucleotide
  misc_feature 1..20: note = Target: SCN10A; (-) strand; PAM type: NRG; PAM sequence: CAG
  source 1..20: mol_type = other DNA
atgacctagcttagatttca

SEQ ID NO: 18787 - DNA, 20 bp, synthetic construct
  misc_feature 1..20: note = Description of Artificial Sequence: Synthetic oligonucleotide
  misc_feature 1..20: note = Target: SCN10A; (-) strand; PAM type: NRG; PAM sequence: TAG
  source 1..20: mol_type = other DNA
acttccctcatgacctagct

SEQ ID NO: 18788 - DNA, 20 bp, synthetic construct
  misc_feature 1..20: note = Description of Artificial Sequence: Synthetic oligonucleotide
  misc_feature 1..20: note = Target: SCN10A; (-) strand; PAM type: NRG; PAM sequence: TAG
  source 1..20: mol_type = other DNA
attccacttccctcatgacc

SEQ ID NO: 18789 - DNA, 20 bp, synthetic construct
  misc_feature 1..20: note = Description of Artificial Sequence: Synthetic oligonucleotide
  misc_feature 1..20: note = Target: SCN10A; (-) strand; PAM type: NRG; PAM sequence: GGG
  source 1..20: mol_type = other DNA
caccaactacacactttctt

SEQ ID NO: 18790 - DNA, 20 bp, synthetic construct
  misc_feature 1..20: note = Description of Artificial Sequence: Synthetic oligonucleotide
  misc_feature 1..20: note = Target: SCN10A; (-) strand; PAM type: NRG; PAM sequence: TGG
  source 1..20: mol_type = other DNA
ccaccaactacacactttct

SEQ ID NO: 18791 - DNA, 20 bp, synthetic construct
  misc_feature 1..20: note = Description of Artificial Sequence: Synthetic oligonucleotide
  misc_feature 1..20: note = Target: SCN10A; (-) strand; PAM type: NRG; PAM sequence: CAG
  source 1..20: mol_type = other DNA
cgctgatttaacatgctgat

SEQ ID NO: 18792 - DNA, 20 bp, synthetic construct
  misc_feature 1..20: note = Description of Artificial Sequence: Synthetic oligonucleotide
  misc_feature 1..20: note = Target: SCN10A; (-) strand; PAM type: NRG; PAM sequence: GGG
  source 1..20: mol_type = other DNA
gcccctacaggattctgcag

SEQ ID NO: 18793 - DNA, 20 bp, synthetic construct
  misc_feature 1..20: note = Description of Artificial Sequence: Synthetic oligonucleotide
  misc_feature 1..20: note = Target: SCN10A; (-) strand; PAM type: NRG; PAM sequence: GGG
  source 1..20: mol_type = other DNA
tgcccctacaggattctgca

SEQ ID NO: 18794 - DNA, 20 bp, synthetic construct
  misc_feature 1..20: note = Description of Artificial Sequence: Synthetic oligonucleotide
  misc_feature 1..20: note = Target: SCN10A; (-) strand; PAM type: NRG; PAM sequence: AGG
  source 1..20: mol_type = other DNA
ctgcccctacaggattctgc

SEQ ID NO: 18795 - DNA, 20 bp, synthetic construct
  misc_feature 1..20: note = Description of Artificial Sequence: Synthetic oligonucleotide
  misc_feature 1..20: note = Target: SCN10A; (-) strand; PAM type: NRG; PAM sequence: CAG
  source 1..20: mol_type = other DNA
tctgcccctacaggattctg

SEQ ID NO: 18796 - DNA, 20 bp, synthetic construct
  misc_feature 1..20: note = Description of Artificial Sequence: Synthetic oligonucleotide
  misc_feature 1..20: note = Target: SCN10A; (-) strand; PAM type: NRG; PAM sequence: AGG
  source 1..20: mol_type = other DNA
acttcacagtctgcccctac

SEQ ID NO: 18797 - DNA, 20 bp, synthetic construct
  misc_feature 1..20: note = Description of Artificial Sequence: Synthetic oligonucleotide
  misc_feature 1..20: note = Target: SCN10A; (-) strand; PAM type: NRG; PAM sequence: CAG
  source 1..20: mol_type = other DNA
tacttcacagtctgccccta

SEQ ID NO: 18798 - DNA, 20 bp, synthetic construct
  misc_feature 1..20: note = Description of Artificial Sequence: Synthetic oligonucleotide
  misc_feature 1..20: note = Target: SCN10A; (-) strand; PAM type: NRG; PAM sequence: CAG
  source 1..20: mol_type = other DNA
aaataggcaagtttacttca

SEQ ID NO: 18799 - DNA, 20 bp, synthetic construct
  misc_feature 1..20: note = Description of Artificial Sequence: Synthetic oligonucleotide
  misc_feature 1..20: note = Target: SCN10A; (-) strand; PAM type: NRG; PAM sequence: AAG
  source 1..20: mol_type = other DNA
ccaaacaaccaaaaataggc

SEQ ID NO: 18800 - DNA, 20 bp, synthetic construct
  misc_feature 1..20: note = Description of Artificial Sequence: Synthetic oligonucleotide
  misc_feature 1..20: note = Target: SCN10A; (-) strand; PAM type: NRG; PAM sequence: AGG
  source 1..20: mol_type = other DNA
agtcccaaacaaccaaaaat

SEQ ID NO: 18801 - DNA, 20 bp, synthetic construct
  misc_feature 1..20: note = Description of Artificial Sequence: Synthetic oligonucleotide
  misc_feature 1..20: note = Target: SCN10A; (-) strand; PAM type: NRG; PAM sequence: TAG
  source 1..20: mol_type = other DNA
aagtcccaaacaaccaaaaa

SEQ ID NO: 18802 - DNA, 20 bp, synthetic construct
  misc_feature 1..20: note = Description of Artificial Sequence: Synthetic oligonucleotide
  misc_feature 1..20: note = Target: SCN10A; (-) strand; PAM type: NRG; PAM sequence: AAG
  source 1..20: mol_type = other DNA
tgttctgatcccacagtcta

SEQ ID NO: 18803 - DNA, 20 bp, synthetic construct
  misc_feature 1..20: note = Description of Artificial Sequence: Synthetic oligonucleotide
  misc_feature 1..20: note = Target: SCN10A; (-) strand; PAM type: NRG; PAM sequence: CAG
  source 1..20: mol_type = other DNA
ctacttttgttctgatccca

SEQ ID NO: 18804 - DNA, 20 bp, synthetic construct
  misc_feature 1..20: note = Description of Artificial Sequence: Synthetic oligonucleotide
  misc_feature 1..20: note = Target: SCN10A; (-) strand; PAM type: NRG; PAM sequence: AGG
  source 1..20: mol_type = other DNA
agcagaagcttagtgtttta

SEQ ID NO: 18805 - DNA, 20 bp, synthetic construct
  misc_feature 1..20: note = Description of Artificial Sequence: Synthetic oligonucleotide
  misc_feature 1..20: note = Target: SCN10A; (-) strand; PAM type: NRG; PAM sequence: AAG
  source 1..20: mol_type = other DNA
aagcagaagcttagtgtttt

SEQ ID NO: 18806 - DNA, 20 bp, synthetic construct
  misc_feature 1..20: note = Description of Artificial Sequence: Synthetic oligonucleotide
  misc_feature 1..20: note = Target: SCN10A; (-) strand; PAM type: NRG; PAM sequence: TAG
  source 1..20: mol_type = other DNA
cacttggggaagcagaagct

SEQ ID NO: 18807 - DNA, 20 bp, synthetic construct
  misc_feature 1..20: note = Description of Artificial Sequence: Synthetic oligonucleotide
  misc_feature 1..20: note = Target: SCN10A; (-) strand; PAM type: NRG; PAM sequence: AAG
  source 1..20: mol_type = other DNA
tgctacacttggggaagcag

SEQ ID NO: 18808 - DNA, 20 bp, synthetic construct
  misc_feature 1..20: note = Description of Artificial Sequence: Synthetic oligonucleotide
  misc_feature 1..20: note = Target: SCN10A; (-) strand; PAM type: NRG; PAM sequence: CAG
  source 1..20: mol_type = other DNA
ttctgctacacttggggaag

SEQ ID NO: 18809 - DNA, 20 bp, synthetic construct
  misc_feature 1..20: note = Description of Artificial Sequence: Synthetic oligonucleotide
  misc_feature 1..20: note = Target: SCN10A; (-) strand; PAM type: NRG; PAM sequence: AAG
  source 1..20: mol_type = other DNA
catttctgctacacttgggg

SEQ ID NO: 18810 - DNA, 20 bp, synthetic construct
  misc_feature 1..20: note = Description of Artificial Sequence: Synthetic oligonucleotide
  misc_feature 1..20: note = Target: SCN10A; (-) strand; PAM type: NRG; PAM sequence: GGG
  source 1..20: mol_type = other DNA
gaacatttctgctacacttg

SEQ ID NO: 18811 - DNA, 20 bp, synthetic construct
  misc_feature 1..20: note = Description of Artificial Sequence: Synthetic oligonucleotide
  misc_feature 1..20: note = Target: SCN10A; (-) strand; PAM type: NRG; PAM sequence: GGG
  source 1..20: mol_type = other DNA
cgaacatttctgctacactt

SEQ ID NO: 18812 - DNA, 20 bp, synthetic construct
  misc_feature 1..20: note = Description of Artificial Sequence: Synthetic oligonucleotide
  misc_feature 1..20: note = Target: SCN10A; (-) strand; PAM type: NRG; PAM sequence: TGG
  source 1..20: mol_type = other DNA
acgaacatttctgctacact

SEQ ID NO: 18813 - DNA, 20 bp, synthetic construct
  misc_feature 1..20: note = Description of Artificial Sequence: Synthetic oligonucleotide
  misc_feature 1..20: note = Target: SCN10A; (-) strand; PAM type: NRG; PAM sequence: GGG
  source 1..20: mol_type = other DNA
tccggcctgggctaaacagc

SEQ ID NO: 18814 - DNA, 20 bp, synthetic construct
  misc_feature 1..20: note = Description of Artificial Sequence: Synthetic oligonucleotide
  misc_feature 1..20: note = Target: SCN10A; (-) strand; PAM type: NRG; PAM sequence: CGG
  source 1..20: mol_type = other DNA
atccggcctgggctaaacag

SEQ ID NO: 18815 - DNA, 20 bp, synthetic construct
  misc_feature 1..20: note = Description of Artificial Sequence: Synthetic oligonucleotide
  misc_feature 1..20: note = Target: SCN10A; (-) strand; PAM type: NRG; PAM sequence: CAG
  source 1..20: mol_type = other DNA
gcaatccggcctgggctaaa

SEQ ID NO: 18816 - DNA, 20 bp, synthetic construct
  misc_feature 1..20: note = Description of Artificial Sequence: Synthetic oligonucleotide
  misc_feature 1..20: note = Target: SCN10A; (-) strand; PAM type: NRG; PAM sequence: GGG
  source 1..20: mol_type = other DNA
gcgccactgcaatccggcct

SEQ ID NO: 18817 - DNA, 20 bp, synthetic construct
  misc_feature 1..20: note = Description of Artificial Sequence: Synthetic oligonucleotide
  misc_feature 1..20: note = Target: SCN10A; (-) strand; PAM type: NRG; PAM sequence: TGG
  source 1..20: mol_type = other DNA
tgcgccactgcaatccggcc

SEQ ID NO: 18818 - DNA, 20 bp, synthetic construct
  misc_feature 1..20: note = Description of Artificial Sequence: Synthetic oligonucleotide
  misc_feature 1..20: note = Target: SCN10A; (-) strand; PAM type: NRG; PAM sequence: CGG
  source 1..20: mol_type = other DNA
gagattgcgccactgcaatc

SEQ ID NO: 18819 - DNA, 20 bp, synthetic construct
  misc_feature 1..20: note = Description of Artificial Sequence: Synthetic oligonucleotide
  misc_feature 1..20: note = Target: SCN10A; (-) strand; PAM type: NRG; PAM sequence: GAG
  source 1..20: mol_type = other DNA
ggcggagcttacagtgagcc

SEQ ID NO: 18820 - DNA, 20 bp, synthetic construct
  misc_feature 1..20: note = Description of Artificial Sequence: Synthetic oligonucleotide
  misc_feature 1..20: note = Target: SCN10A; (-) strand; PAM type: NRG; PAM sequence: GAG
  source 1..20: mol_type = other DNA
tgggaggcggagcttacagt

SEQ ID NO: 18821 - DNA, 20 bp, synthetic construct
  misc_feature 1..20: note = Description of Artificial Sequence: Synthetic oligonucleotide
  misc_feature 1..20: note = Target: SCN10A; (-) strand; PAM type: NRG; PAM sequence: CAG
  source 1..20: mol_type = other DNA
aacctgggaggcggagctta

SEQ ID NO: 18822 - DNA, 20 bp, synthetic construct
  misc_feature 1..20: note = Description of Artificial Sequence: Synthetic oligonucleotide
  misc_feature 1..20: note = Target: SCN10A; (-) strand; PAM type: NRG; PAM sequence: GAG
  source 1..20: mol_type = other DNA
tggcgtgaacctgggaggcg

SEQ ID NO: 18823 - DNA, 20 bp, synthetic construct
  misc_feature 1..20: note = Description of Artificial Sequence: Synthetic oligonucleotide
  misc_feature 1..20: note = Target: SCN10A; (-) strand; PAM type: NRG; PAM sequence: CGG
  source 1..20: mol_type = other DNA
aatggcgtgaacctgggagg

SEQ ID NO: 18824 - DNA, 20 bp, synthetic construct
  misc_feature 1..20: note = Description of Artificial Sequence: Synthetic oligonucleotide
  misc_feature 1..20: note = Target: SCN10A; (-) strand; PAM type: NRG; PAM sequence: AGG
  source 1..20: mol_type = other DNA
gagaatggcgtgaacctggg

SEQ ID NO: 18825 - DNA, 20 bp, synthetic construct
  misc_feature 1..20: note = Description of Artificial Sequence: Synthetic oligonucleotide
  misc_feature 1..20: note = Target: SCN10A; (-) strand; PAM type: NRG; PAM sequence: GAG
  source 1..20: mol_type = other DNA
ggagaatggcgtgaacctgg

SEQ ID NO: 18826 - DNA, 20 bp, synthetic construct
  misc_feature 1..20: note = Description of Artificial Sequence: Synthetic oligonucleotide
  misc_feature 1..20: note = Target: SCN10A; (-) strand; PAM type: NRG; PAM sequence: GGG
  source 1..20: mol_type = other DNA
caggagaatggcgtgaacct

SEQ ID NO: 18827 - DNA, 20 bp, synthetic construct
  misc_feature 1..20: note = Description of Artificial Sequence: Synthetic oligonucleotide
  misc_feature 1..20: note = Target: SCN10A; (-) strand; PAM type: NRG; PAM sequence: TGG
  source 1..20: mol_type = other DNA
gcaggagaatggcgtgaacc

SEQ ID NO: 18828 - DNA, 20 bp, synthetic construct
  misc_feature 1..20: note = Description of Artificial Sequence: Synthetic oligonucleotide
  misc_feature 1..20: note = Target: SCN10A; (-) strand; PAM type: NRG; PAM sequence: TGG
  source 1..20: mol_type = other DNA
gggaggctgaggcaggagaa

SEQ ID NO: 18829 - DNA, 20 bp, synthetic construct
  misc_feature 1..20: note = Description of Artificial Sequence: Synthetic oligonucleotide
  misc_feature 1..20: note = Target: SCN10A; (-) strand; PAM type: NRG; PAM sequence: GAG
  source 1..20: mol_type = other DNA
tactcgggaggctgaggcag

SEQ ID NO: 18830 - DNA, 20 bp, synthetic construct
  misc_feature 1..20: note = Description of Artificial Sequence: Synthetic oligonucleotide
  misc_feature 1..20: note = Target: SCN10A; (-) strand; PAM type: NRG; PAM sequence: AGG
  source 1..20: mol_type = other DNA
gctactcgggaggctgaggc

SEQ ID NO: 18831 - DNA, 20 bp, synthetic construct
  misc_feature 1..20: note = Description of Artificial Sequence: Synthetic oligonucleotide
  misc_feature 1..20: note = Target: SCN10A; (-) strand; PAM type: NRG; PAM sequence: CAG
  source 1..20: mol_type = other DNA
agctactcgggaggctgagg

SEQ ID NO: 18832 - DNA, 20 bp, synthetic construct
  misc_feature 1..20: note = Description of Artificial Sequence: Synthetic oligonucleotide
  misc_feature 1..20: note = Target: SCN10A; (-) strand; PAM type: NRG; PAM sequence: AGG
  source 1..20: mol_type = other DNA
cccagctactcgggaggctg

SEQ ID NO: 18833 - DNA, 20 bp, synthetic construct
  misc_feature 1..20: note = Description of Artificial Sequence: Synthetic oligonucleotide
  misc_feature 1..20: note = Target: SCN10A; (-) strand; PAM type: NRG; PAM sequence: GAG
  source 1..20: mol_type = other DNA
tcccagctactcgggaggct

SEQ ID NO: 18834 - DNA, 20 bp, synthetic construct
  misc_feature 1..20: note = Description of Artificial Sequence: Synthetic oligonucleotide
  misc_feature 1..20: note = Target: SCN10A; (-) strand; PAM type: NRG; PAM sequence: AGG
  source 1..20: mol_type = other DNA
tgtagtcccagctactcggg

SEQ ID NO: 18835 - DNA, 20 bp, synthetic construct
  misc_feature 1..20: note = Description of Artificial Sequence: Synthetic oligonucleotide
  misc_feature 1..20: note = Target: SCN10A; (-) strand; PAM type: NRG; PAM sequence: GAG
  source 1..20: mol_type = other DNA
ctgtagtcccagctactcgg

SEQ ID NO: 18836 - DNA, 20 bp, synthetic construct
  misc_feature 1..20: note = Description of Artificial Sequence: Synthetic oligonucleotide
  misc_feature 1..20: note = Target: SCN10A; (-) strand; PAM type: NRG; PAM sequence: GGG
  source 1..20: mol_type = other DNA
gcctgtagtcccagctactc

SEQ ID NO: 18837 - DNA, 20 bp, synthetic construct
  misc_feature 1..20: note = Description of Artificial Sequence: Synthetic oligonucleotide
  misc_feature 1..20: note = Target: SCN10A; (-) strand; PAM type: NRG; PAM sequence: CGG
  source 1..20: mol_type = other DNA
cgcctgtagtcccagctact

SEQ ID NO: 18838 - DNA, 20 bp, synthetic construct
  misc_feature 1..20: note = Description of Artificial Sequence: Synthetic oligonucleotide
  misc_feature 1..20: note = Target: SCN10A; (-) strand; PAM type: NRG; PAM sequence: CAG
  source 1..20: mol_type = other DNA
gtggcgggcgcctgtagtcc

SEQ ID NO: 18839 - DNA, 20 bp, synthetic construct
  misc_feature 1..20: note = Description of Artificial Sequence: Synthetic oligonucleotide
  misc_feature 1..20: note = Target: SCN10A; (-) strand; PAM type: NRG; PAM sequence: TAG
  source 1..20: mol_type = other DNA
ggcacggtggcgggcgcctg

SEQ ID NO: 18840 - DNA, 20 bp, synthetic construct
  misc_feature 1..20: note = Description of Artificial Sequence: Synthetic oligonucleotide
  misc_feature 1..20: note = Target: SCN10A; (-) strand; PAM type: NRG; PAM sequence: GGG
  source 1..20: mol_type = other DNA
aattagccgggcacggtggc

SEQ ID NO: 18841 - DNA, 20 bp, synthetic construct
  misc_feature 1..20: note = Description of Artificial Sequence: Synthetic oligonucleotide
  misc_feature 1..20: note = Target: SCN10A; (-) strand; PAM type: NRG; PAM sequence: CGG
  source 1..20: mol_type = other DNA
aaattagccgggcacggtgg

SEQ ID NO: 18842 - DNA, 20 bp, synthetic construct
  misc_feature 1..20: note = Description of Artificial Sequence: Synthetic oligonucleotide
  misc_feature 1..20: note = Target: SCN10A; (-) strand; PAM type: NRG; PAM sequence: TGG
  source 1..20: mol_type = other DNA
aaaaaattagccgggcacgg

SEQ ID NO: 18843 - DNA, 20 bp, synthetic construct
  misc_feature 1..20: note = Description of Artificial Sequence: Synthetic oligonucleotide
  misc_feature 1..20: note = Target: SCN10A; (-) strand; PAM type: NRG; PAM sequence: CGG
  source 1..20: mol_type = other DNA
tacaaaaaattagccgggca

SEQ ID NO: 18844 - DNA, 20 bp, synthetic construct
  misc_feature 1..20: note = Description of Artificial Sequence: Synthetic oligonucleotide
  misc_feature 1..20: note = Target: SCN10A; (-) strand; PAM type: NRG; PAM sequence: GGG
  source 1..20: mol_type = other DNA
aaaaatacaaaaaattagcc

SEQ ID NO: 18845 - DNA, 20 bp, synthetic construct
  misc_feature 1..20: note = Description of Artificial Sequence: Synthetic oligonucleotide
  misc_feature 1..20: note = Target: SCN10A; (-) strand; PAM type: NRG; PAM sequence: CGG
  source 1..20: mol_type = other DNA
taaaaatacaaaaaattagc

SEQ ID NO: 18846 - DNA, 20 bp, synthetic construct
  misc_feature 1..20: note = Description of Artificial Sequence: Synthetic oligonucleotide
  misc_feature 1..20: note = Target: SCN10A; (-) strand; PAM type: NRG; PAM sequence: TAG
  source 1..20: mol_type = other DNA
ctactaaaaatacaaaaaat

SEQ ID NO: 18847 - DNA, 20 bp, synthetic construct
  misc_feature 1..20: note = Description of Artificial Sequence: Synthetic oligonucleotide
  misc_feature 1..20: note = Target: SCN10A; (-) strand; PAM type: NRG; PAM sequence: CGG
  source 1..20: mol_type = other DNA
cgagaccatcttggctaaca

SEQ ID NO: 18848 - DNA, 20 bp, synthetic construct
  misc_feature 1..20: note = Description of Artificial Sequence: Synthetic oligonucleotide
  misc_feature 1..20: note = Target: SCN10A; (-) strand; PAM type: NRG; PAM sequence: TGG
  source 1..20: mol_type = other DNA
tcaggagatcgagaccatct

SEQ ID NO: 18849 - DNA, 20 bp, synthetic construct
  misc_feature 1..20: note = Description of Artificial Sequence: Synthetic oligonucleotide
  misc_feature 1..20: note = Target: SCN10A; (-) strand; PAM type: NRG; PAM sequence: GAG
  source 1..20: mol_type = other DNA
gatcacaaggtcaggagatc

SEQ ID NO: 18850 - DNA, 20 bp, synthetic construct
  misc_feature 1..20: note = Description of Artificial Sequence: Synthetic oligonucleotide
  misc_feature 1..20: note = Target: SCN10A; (-) strand; PAM type: NRG; PAM sequence: GAG
  source 1..20: mol_type = other DNA
caggcggatcacaaggtcag

SEQ ID NO: 18851 - DNA, 20 bp, synthetic construct
  misc_feature 1..20: note = Description of Artificial Sequence: Synthetic oligonucleotide
  misc_feature 1..20: note = Target: SCN10A; (-) strand; PAM type: NRG; PAM sequence: AGG
  source 1..20: mol_type = other DNA
ggcaggcggatcacaaggtc

SEQ ID NO: 18852 - DNA, 20 bp, synthetic construct
  misc_feature 1..20: note = Description of Artificial Sequence: Synthetic oligonucleotide
  misc_feature 1..20: note = Target: SCN10A; (-) strand; PAM type: NRG; PAM sequence: CAG
  source 1..20: mol_type = other DNA
aggcaggcggatcacaaggt

SEQ ID NO: 18853 - DNA, 20 bp, synthetic construct
  misc_feature 1..20: note = Description of Artificial Sequence: Synthetic oligonucleotide
  misc_feature 1..20: note = Target: SCN10A; (-) strand; PAM type: NRG; PAM sequence: AGG
  source 1..20: mol_type = other DNA
gccgaggcaggcggatcaca

SEQ ID NO: 18854 - DNA, 20 bp, synthetic construct
  misc_feature 1..20: note = Description of Artificial Sequence: Synthetic oligonucleotide
  misc_feature 1..20: note = Target: SCN10A; (-) strand; PAM type: NRG; PAM sequence: AAG
  source 1..20: mol_type = other DNA
ggccgaggcaggcggatcac

SEQ ID NO: 18855 - DNA, 20 bp, synthetic construct
  misc_feature 1..20: note = Description of Artificial Sequence: Synthetic oligonucleotide
  misc_feature 1..20: note = Target: SCN10A; (-) strand; PAM type: NRG; PAM sequence: CGG
  source 1..20: mol_type = other DNA
ctttgggaggccgaggcagg

SEQ ID NO: 18856 - DNA, 20 bp, synthetic construct
  misc_feature 1..20: note = Description of Artificial Sequence: Synthetic oligonucleotide
  misc_feature 1..20: note = Target: SCN10A; (-) strand; PAM type: NRG; PAM sequence: AGG
  source 1..20: mol_type = other DNA
gcactttgggaggccgaggc

SEQ ID NO: 18857 - DNA, 20 bp, synthetic construct
  misc_feature 1..20: note = Description of Artificial Sequence: Synthetic oligonucleotide
  misc_feature 1..20: note = Target: SCN10A; (-) strand; PAM type: NRG; PAM sequence: CAG
  source 1..20: mol_type = other DNA
agcactttgggaggccgagg

SEQ ID NO: 18858 - DNA, 20 bp, synthetic construct
  misc_feature 1..20: note = Description of Artificial Sequence: Synthetic oligonucleotide
  misc_feature 1..20: note = Target: SCN10A; (-) strand; PAM type: NRG; PAM sequence: AGG
  source 1..20: mol_type = other DNA
cccagcactttgggaggccg

SEQ ID NO: 18859 - DNA, 20 bp, synthetic construct
  misc_feature 1..20: note = Description of Artificial Sequence: Synthetic oligonucleotide
  misc_feature 1..20: note = Target: SCN10A; (-) strand; PAM type: NRG; PAM sequence: GAG
  source 1..20: mol_type = other DNA
tcccagcactttgggaggcc

SEQ ID NO: 18860 - DNA, 20 bp, synthetic construct
  misc_feature 1..20: note = Description of Artificial Sequence: Synthetic oligonucleotide
  misc_feature 1..20: note = Target: SCN10A; (-) strand; PAM type: NRG; PAM sequence: AGG
  source 1..20: mol_type = other DNA
tgtaatcccagcactttggg

SEQ ID NO: 18861 - DNA, 20 bp, synthetic construct
  misc_feature 1..20: note = Description of Artificial Sequence: Synthetic oligonucleotide
  misc_feature 1..20: note = Target: SCN10A; (-) strand; PAM type: NRG; PAM sequence: GAG
  source 1..20: mol_type = other DNA
ctgtaatcccagcactttgg

SEQ ID NO: 18862 - DNA, 20 bp, synthetic construct
  misc_feature 1..20: note = Description of Artificial Sequence: Synthetic oligonucleotide
  misc_feature 1..20: note = Target: SCN10A; (-) strand; PAM type: NRG; PAM sequence: GGG
  source 1..20: mol_type = other DNA
gcctgtaatcccagcacttt

SEQ ID NO: 18863 - DNA, 20 bp, synthetic construct
  misc_feature 1..20: note = Description of Artificial Sequence: Synthetic oligonucleotide
  misc_feature 1..20: note = Target: SCN10A; (-) strand; PAM type: NRG; PAM sequence: TGG
  source 1..20: mol_type = other DNA
cgcctgtaatcccagcactt

SEQ ID NO: 18864 - DNA, 20 bp, synthetic construct
  misc_feature 1..20: note = Description of Artificial Sequence: Synthetic oligonucleotide
  misc_feature 1..20: note = Target: SCN10A; (-) strand; PAM type: NRG; PAM sequence: CAG
  source 1..20: mol_type = other DNA
gtggctcacgcctgtaatcc

SEQ ID NO: 18865 - DNA, 20 bp, synthetic construct
  misc_feature 1..20: note = Description of Artificial Sequence: Synthetic oligonucleotide
  misc_feature 1..20: note = Target: SCN10A; (-) strand; PAM type: NRG; PAM sequence: TGG
  source 1..20: mol_type = other DNA
aaatacgaggctgggcgcgg

SEQ ID NO: 18866 - DNA, 20 bp, synthetic construct
  misc_feature 1..20: note = Description of Artificial Sequence: Synthetic oligonucleotide
  misc_feature 1..20: note = Target: SCN10A; (-) strand; PAM type: NRG; PAM sequence: CGG
  source 1..20: mol_type = other DNA
ataaaatacgaggctgggcg

SEQ ID NO: 18867 - DNA, 20 bp, synthetic construct
  misc_feature 1..20: note = Description of Artificial Sequence: Synthetic oligonucleotide
  misc_feature 1..20: note = Target: SCN10A; (-) strand; PAM type: NRG; PAM sequence: GGG
  source 1..20: mol_type = other DNA
ttctaataaaatacgaggct

SEQ ID NO: 18868 - DNA, 20 bp, synthetic construct
  misc_feature 1..20: note = Description of Artificial Sequence: Synthetic oligonucleotide
  misc_feature 1..20: note = Target: SCN10A; (-) strand; PAM type: NRG; PAM sequence: TGG
  source 1..20: mol_type = other DNA
tttctaataaaatacgaggc

SEQ ID NO: 18869 - DNA, 20 bp, synthetic construct
  misc_feature 1..20: note = Description of Artificial Sequence: Synthetic oligonucleotide
  misc_feature 1..20: note = Target: SCN10A; (-) strand; PAM type: NRG; PAM sequence: AGG
  source 1..20: mol_type = other DNA
tagttttctaataaaatacg

SEQ ID NO: 18870 - DNA, 20 bp, synthetic construct
  misc_feature 1..20: note = Description of Artificial Sequence: Synthetic oligonucleotide
  misc_feature 1..20: note = Target: SCN10A; (-) strand; PAM type: NRG; PAM sequence: GAG
  source 1..20: mol_type = other DNA
ttagttttctaataaaatac

SEQ ID NO: 18871 - DNA, 20 bp, synthetic construct
  misc_feature 1..20: note = Description of Artificial Sequence: Synthetic oligonucleotide
  misc_feature 1..20: note = Target: SCN10A; (-) strand; PAM type: NRG; PAM sequence: TAG
  source 1..20: mol_type = other DNA
taccctggcaggcccacagt

SEQ ID NO: 18872 - DNA, 20 bp, synthetic construct
  misc_feature 1..20: note = Description of Artificial Sequence: Synthetic oligonucleotide
  misc_feature 1..20: note = Target: SCN10A; (-) strand; PAM type: NRG; PAM sequence: CAG
  source 1..20: mol_type = other DNA
cccataccctggcaggccca

SEQ ID NO: 18873 - DNA, 20 bp, synthetic construct
  misc_feature 1..20: note = Description of Artificial Sequence: Synthetic oligonucleotide
  misc_feature 1..20: note = Target: SCN10A; (-) strand; PAM type: NRG; PAM sequence: AGG
  source 1..20: mol_type = other DNA
tcacacccccataccctggc

SEQ ID NO: 18874 - DNA, 20 bp, synthetic construct
  misc_feature 1..20: note = Description of Artificial Sequence: Synthetic oligonucleotide
  misc_feature 1..20: note = Target: SCN10A; (-) strand; PAM type: NRG; PAM sequence: CAG
  source 1..20: mol_type = other DNA
atcacacccccataccctgg

SEQ ID NO: 18875 - DNA, 20 bp, synthetic construct
  misc_feature 1..20: note = Description of Artificial Sequence: Synthetic oligonucleotide
  misc_feature 1..20: note = Target: SCN10A; (-) strand; PAM type: NRG; PAM sequence: TGG
  source 1..20: mol_type = other DNA
gatatcacacccccataccc

SEQ ID NO: 18876 - DNA, 20 bp, synthetic construct
  misc_feature 1..20: note = Description of Artificial Sequence: Synthetic oligonucleotide
  misc_feature 1..20: note = Target: SCN10A; (-) strand; PAM type: NRG; PAM sequence: GAG
  source 1..20: mol_type = other DNA
cacaatcgtcaagagagcag

SEQ ID NO: 18877 - DNA, 20 bp, synthetic construct
  misc_feature 1..20: note = Description of Artificial Sequence: Synthetic oligonucleotide
  misc_feature 1..20: note = Target: SCN10A; (-) strand; PAM type: NRG; PAM sequence: AGG
  source 1..20: mol_type = other DNA
tgcacaatcgtcaagagagc

SEQ ID NO: 18878 - DNA, 20 bp, synthetic construct
  misc_feature 1..20: note = Description of Artificial Sequence: Synthetic oligonucleotide
  misc_feature 1..20: note = Target: SCN10A; (-) strand; PAM type: NRG; PAM sequence: CAG
  source 1..20: mol_type = other DNA
atgcacaatcgtcaagagag

SEQ ID NO: 18879 - DNA, 20 bp, synthetic construct
  misc_feature 1..20: note = Description of Artificial Sequence: Synthetic oligonucleotide
  misc_feature 1..20: note = Target: SCN10A; (-) strand; PAM type: NRG; PAM sequence: GAG
  source 1..20: mol_type = other DNA
cctatgcacaatcgtcaaga

SEQ ID NO: 18880 - DNA, 20 bp, synthetic construct
  misc_feature 1..20: note = Description of Artificial Sequence: Synthetic oligonucleotide
  misc_feature 1..20: note = Target: SCN10A; (-) strand; PAM type: NRG; PAM sequence: GAG
  source 1..20: mol_type = other DNA
tacctatgcacaatcgtcaa

SEQ ID NO: 18881 - DNA, 20 bp, synthetic construct
  misc_feature 1..20: note = Description of Artificial Sequence: Synthetic oligonucleotide
  misc_feature 1..20: note = Target: SCN10A; (-) strand; PAM type: NRG; PAM sequence: AAG
  source 1..20: mol_type = other DNA
ggtacctatgcacaatcgtc

SEQ ID NO: 18882 - DNA, 20 bp, synthetic construct
  misc_feature 1..20: note = Description of Artificial Sequence: Synthetic oligonucleotide
  misc_feature 1..20: note = Target: SCN10A; (-) strand; PAM type: NRG; PAM sequence: AGG
  source 1..20: mol_type = other DNA
ctaagctaatggtcaatata

SEQ ID NO: 18883 - DNA, 20 bp, synthetic construct
  misc_feature 1..20: note = Description of Artificial Sequence: Synthetic oligonucleotide
  misc_feature 1..20: note = Target: SCN10A; (-) strand; PAM type: NRG; PAM sequence: AAG
  source 1..20: mol_type = other DNA
cctaagctaatggtcaatat

SEQ ID NO: 18884 - DNA, 20 bp, synthetic construct
  misc_feature 1..20: note = Description of Artificial Sequence: Synthetic oligonucleotide
  misc_feature 1..20: note = Target: SCN10A; (-) strand; PAM type: NRG; PAM sequence: TGG
  source 1..20: mol_type = other DNA
gatgtaggcccctaagctaa

SEQ ID NO: 18885 - DNA, 20 bp, synthetic construct
  misc_feature 1..20: note = Description of Artificial Sequence: Synthetic oligonucleotide
  misc_feature 1..20: note = Target: SCN10A; (-) strand; PAM type: NRG; PAM sequence: AAG
  source 1..20: mol_type = other DNA
atgtcaagatgtaggcccct

SEQ ID NO: 18886 - DNA, 20 bp, synthetic construct
  misc_feature 1..20: note = Description of Artificial Sequence: Synthetic oligonucleotide
  misc_feature 1..20: note = Target: SCN10A; (-) strand; PAM type: NRG; PAM sequence: AGG
  source 1..20: mol_type = other DNA
agaaattgatgtcaagatgt

SEQ ID NO: 18887 - DNA, 20 bp, synthetic construct
  misc_feature 1..20: note = Description of Artificial Sequence: Synthetic oligonucleotide
  misc_feature 1..20: note = Target: SCN10A; (-) strand; PAM type: NRG; PAM sequence: TAG
  source 1..20: mol_type = other DNA
tagaaattgatgtcaagatg

SEQ ID NO: 18888 - DNA, 20 bp, synthetic construct
  misc_feature 1..20: note = Description of Artificial Sequence: Synthetic oligonucleotide
  misc_feature 1..20: note = Target: SCN10A; (-) strand; PAM type: NRG; PAM sequence: AAG
  source 1..20: mol_type = other DNA
ggtatctagaaattgatgtc

SEQ ID NO: 18889 - DNA, 20 bp, synthetic construct
  misc_feature 1..20: note = Description of Artificial Sequence: Synthetic oligonucleotide
  misc_feature 1..20: note = Target: SCN10A; (-) strand; PAM type: NRG; PAM sequence: TAG
  source 1..20: mol_type = other DNA
gacagatttctctaggtatc

SEQ ID NO: 18890 - DNA, 20 bp, synthetic construct
  misc_feature 1..20: note = Description of Artificial Sequence: Synthetic oligonucleotide
  misc_feature 1..20: note = Target: SCN10A; (-) strand; PAM type: NRG; PAM sequence: AGG
  source 1..20: mol_type = other DNA
ttagaaggacagatttctct

SEQ ID NO: 18891 - DNA, 20 bp, synthetic construct
  misc_feature 1..20: note = Description of Artificial Sequence: Synthetic oligonucleotide
  misc_feature 1..20: note = Target: SCN10A; (-) strand; PAM type: NRG; PAM sequence: TAG
  source 1..20: mol_type = other DNA
tttagaaggacagatttctc

SEQ ID NO: 18892 - DNA, 20 bp, synthetic construct
  misc_feature 1..20: note = Description of Artificial Sequence: Synthetic oligonucleotide
  misc_feature 1..20: note = Target: SCN10A; (-) strand; PAM type: NRG; PAM sequence: CAG
  source 1..20: mol_type = other DNA
aaatcacatttttagaagga

SEQ ID NO: 18893 - DNA, 20 bp, synthetic construct
  misc_feature 1..20: note = Description of Artificial Sequence: Synthetic oligonucleotide
  misc_feature 1..20: note = Target: SCN10A; (-) strand; PAM type: NRG; PAM sequence: AGG
  source 1..20: mol_type = other DNA
aattaaatcacatttttaga

SEQ ID NO: 18894 - DNA, 20 bp, synthetic construct
  misc_feature 1..20: note = Description of Artificial Sequence: Synthetic oligonucleotide
  misc_feature 1..20: note = Target: SCN10A; (-) strand; PAM type: NRG; PAM sequence: AAG
  source 1..20: mol_type = other DNA
gaattaaatcacatttttag

SEQ ID NO: 18895 - DNA, 20 bp, synthetic construct
  misc_feature 1..20: note = Description of Artificial Sequence: Synthetic oligonucleotide
  misc_feature 1..20: note = Target: SCN10A; (-) strand; PAM type: NRG; PAM sequence: TAG
  source 1..20: mol_type = other DNA
tcagaattaaatcacatttt

SEQ ID NO: 18896 - DNA, 20 bp, synthetic construct
  misc_feature 1..20: note = Description of Artificial Sequence: Synthetic oligonucleotide
  misc_feature 1..20: note = Target: SCN10A; (-) strand; PAM type: NRG; PAM sequence: CAG
  source 1..20: mol_type = other DNA
acttgaaaatcttacaaggt

SEQ ID NO: 18897 - DNA, 20 bp, synthetic construct
  misc_feature 1..20: note = Description of Artificial Sequence: Synthetic oligonucleotide
  misc_feature 1..20: note = Target: SCN10A; (-) strand; PAM type: NRG; PAM sequence: AGG
  source 1..20: mol_type = other DNA
cataacttgaaaatcttaca

SEQ ID NO: 18898 - DNA, 20 bp, synthetic construct
  misc_feature 1..20: note = Description of Artificial Sequence: Synthetic oligonucleotide
  misc_feature 1..20: note = Target: SCN10A; (-) strand; PAM type: NRG; PAM sequence: AAG
  source 1..20: mol_type = other DNA
ccataacttgaaaatcttac

SEQ ID NO: 18899 - DNA, 20 bp, synthetic construct
  misc_feature 1..20: note = Description of Artificial Sequence: Synthetic oligonucleotide
  misc_feature 1..20: note = Target: SCN10A; (-) strand; PAM type: NRG; PAM sequence: AGG
  source 1..20: mol_type = other DNA
aagggtagagtaggcctggt

SEQ ID NO: 18900 - DNA, 20 bp, synthetic construct
  misc_feature 1..20: note = Description of Artificial Sequence: Synthetic oligonucleotide
  misc_feature 1..20: note = Target: SCN10A; (-) strand; PAM type: NRG; PAM sequence: TAG
  source 1..20: mol_type = other DNA
gaagggtagagtaggcctgg

SEQ ID NO: 18901 - DNA, 20 bp, synthetic construct
  misc_feature 1..20: note = Description of Artificial Sequence: Synthetic oligonucleotide
  misc_feature 1..20: note = Target: SCN10A; (-) strand; PAM type: NRG; PAM sequence: TGG
  source 1..20: mol_type = other DNA
ggagaagggtagagtaggcc

SEQ ID NO: 18902 - DNA, 20 bp, synthetic construct
  misc_feature 1..20: note = Description of Artificial Sequence: Synthetic oligonucleotide
  misc_feature 1..20: note = Target: SCN10A; (-) strand; PAM type: NRG; PAM sequence: AGG
  source 1..20: mol_type = other DNA
agggaggagaagggtagagt

SEQ ID NO: 18903 - DNA, 20 bp, synthetic construct
  misc_feature 1..20: note = Description of Artificial Sequence: Synthetic oligonucleotide
  misc_feature 1..20: note = Target: SCN10A; (-) strand; PAM type: NRG; PAM sequence: TAG
  source 1..20: mol_type = other DNA
cagggaggagaagggtagag

SEQ ID NO: 18904 - DNA, 20 bp, synthetic construct
  misc_feature 1..20: note = Description of Artificial Sequence: Synthetic oligonucleotide
  misc_feature 1..20: note = Target: SCN10A; (-) strand; PAM type: NRG; PAM sequence: GAG
  source 1..20: mol_type = other DNA
tcccagggaggagaagggta

SEQ ID NO: 18905 - DNA, 20 bp, synthetic construct
  misc_feature 1..20: note = Description of Artificial Sequence: Synthetic oligonucleotide
  misc_feature 1..20: note = Target: SCN10A; (-) strand; PAM type: NRG; PAM sequence: TAG
  source 1..20: mol_type = other DNA
catcccagggaggagaaggg

SEQ ID NO: 18906 - DNA, 20 bp, synthetic construct
  misc_feature 1..20: note = Description of Artificial Sequence: Synthetic oligonucleotide
  misc_feature 1..20: note = Target: SCN10A; (-) strand; PAM type: NRG; PAM sequence: GGG
  source 1..20: mol_type = other DNA
caccatcccagggaggagaa

SEQ ID NO: 18907 - DNA, 20 bp, synthetic construct
  misc_feature 1..20: note = Description of Artificial Sequence: Synthetic oligonucleotide
  misc_feature 1..20: note = Target: SCN10A; (-) strand; PAM type: NRG; PAM sequence: AGG
  source 1..20: mol_type = other DNA
tcaccatcccagggaggaga

SEQ ID NO: 18908 - DNA, 20 bp, synthetic construct
  misc_feature 1..20: note = Description of Artificial Sequence: Synthetic oligonucleotide
  misc_feature 1..20: note = Target: SCN10A; (-) strand; PAM type: NRG; PAM sequence: AAG
  source 1..20: mol_type = other DNA
gtcaccatcccagggaggag

SEQ ID NO: 18909 - DNA, 20 bp, synthetic construct
  misc_feature 1..20: note = Description of Artificial Sequence: Synthetic oligonucleotide
  misc_feature 1..20: note = Target: SCN10A; (-) strand; PAM type: NRG; PAM sequence: GAG
  source 1..20: mol_type = other DNA
actgtcaccatcccagggag

SEQ ID NO: 18910 - DNA, 20 bp, synthetic construct
  misc_feature 1..20: note = Description of Artificial Sequence: Synthetic oligonucleotide
  misc_feature 1..20: note = Target: SCN10A; (-) strand; PAM type: NRG; PAM sequence: AGG
  source 1..20: mol_type = other DNA
gtactgtcaccatcccaggg

SEQ ID NO: 18911 - DNA, 20 bp, synthetic construct
  misc_feature 1..20: note = Description of Artificial Sequence: Synthetic oligonucleotide
  misc_feature 1..20: note = Target: SCN10A; (-) strand; PAM type: NRG; PAM sequence: GAG
  source 1..20: mol_type = other DNA
ggtactgtcaccatcccagg

SEQ ID NO: 18912 - DNA, 20 bp, synthetic construct
  misc_feature 1..20: note = Description of Artificial Sequence: Synthetic oligonucleotide
  misc_feature 1..20: note = Target: SCN10A; (-) strand; PAM type: NRG; PAM sequence: GGG
  source 1..20: mol_type = other DNA
atggtactgtcaccatccca

SEQ ID NO: 18913 - DNA, 20 bp, synthetic construct
  misc_feature 1..20: note = Description of Artificial Sequence: Synthetic oligonucleotide
  misc_feature 1..20: note = Target: SCN10A; (-) strand; PAM type: NRG; PAM sequence: AGG
  source 1..20: mol_type = other DNA
gatggtactgtcaccatccc

SEQ ID NO: 18914 - DNA, 20 bp, synthetic construct
  misc_feature 1..20: note = Description of Artificial Sequence: Synthetic oligonucleotide
  misc_feature 1..20: note = Target: SCN10A; (-) strand; PAM type: NRG; PAM sequence: CAG
  source 1..20: mol_type = other DNA
tgatggtactgtcaccatcc

SEQ ID NO: 18915 - DNA, 20 bp, synthetic construct
  misc_feature 1..20: note = Description of Artificial Sequence: Synthetic oligonucleotide
  misc_feature 1..20: note = Target: SCN10A; (-) strand; PAM type: NRG; PAM sequence: TGG
  source 1..20: mol_type = other DNA
atggcatctgcctaagctga

SEQ ID NO: 18916 - DNA, 20 bp, synthetic construct
  misc_feature 1..20: note = Description of Artificial Sequence: Synthetic oligonucleotide
  misc_feature 1..20: note = Target: SCN10A; (-) strand; PAM type: NRG; PAM sequence: AAG
  source 1..20: mol_type = other DNA
ctggttgatggcatctgcct

SEQ ID NO: 18917 - DNA, 20 bp, synthetic construct
  misc_feature 1..20: note = Description of Artificial Sequence: Synthetic oligonucleotide
  misc_feature 1..20: note = Target: SCN10A; (-) strand; PAM type: NRG; PAM sequence: TGG
  source 1..20: mol_type = other DNA
tgccatgaaacgctggttga

SEQ ID NO: 18918 - DNA, 20 bp, synthetic construct
  misc_feature 1..20: note = Description of Artificial Sequence: Synthetic oligonucleotide
  misc_feature 1..20: note = Target: SCN10A; (-) strand; PAM type: NRG; PAM sequence: TGG
  source 1..20: mol_type = other DNA
acagctgtgccatgaaacgc

SEQ ID NO: 18919 - DNA, 20 bp, synthetic construct
  misc_feature 1..20: note = Description of Artificial Sequence: Synthetic oligonucleotide
  misc_feature 1..20: note = Target: SCN10A; (-) strand; PAM type: NRG; PAM sequence: CAG
  source 1..20: mol_type = other DNA
ataaagcatgtcctgagaca

SEQ ID NO: 18920 - DNA, 20 bp, synthetic construct
  misc_feature 1..20: note = Description of Artificial Sequence: Synthetic oligonucleotide
  misc_feature 1..20: note = Target: SCN10A; (-) strand; PAM type: NRG; PAM sequence: GAG
  source 1..20: mol_type = other DNA
gaccaaataaagcatgtcct

SEQ ID NO: 18921 - DNA, 20 bp, synthetic construct
  misc_feature 1..20: note = Description of Artificial Sequence: Synthetic oligonucleotide
  misc_feature 1..20: note = Target: SCN10A; (-) strand; PAM type: NRG; PAM sequence: AAG
  source 1..20: mol_type = other DNA
aacactctaaagaccaaata

SEQ ID NO: 18922 - DNA, 20 bp, synthetic construct
  misc_feature 1..20: note = Description of Artificial Sequence: Synthetic oligonucleotide
  misc_feature 1..20: note = Target: SCN10A; (-) strand; PAM type: NRG; PAM sequence: AAG
  source 1..20: mol_type = other DNA
cagtttttaaaaacactcta

SEQ ID NO: 18923 - DNA, 20 bp, synthetic construct
  misc_feature 1..20: note = Description of Artificial Sequence: Synthetic oligonucleotide
  misc_feature 1..20: note = Target: SCN10A; (-) strand; PAM type: NRG; PAM sequence: CAG
  source 1..20: mol_type = other DNA
tttaatattggctactaatc

SEQ ID NO: 18924 - DNA, 20 bp, synthetic construct
  misc_feature 1..20: note = Description of Artificial Sequence: Synthetic oligonucleotide
  misc_feature 1..20: note = Target: SCN10A; (-) strand; PAM type: NRG; PAM sequence: TGG
  source 1..20: mol_type = other DNA
tgtgcaaatgtctttaatat

SEQ ID NO: 18925 - DNA, 20 bp, synthetic construct
  misc_feature 1..20: note = Description of Artificial Sequence: Synthetic oligonucleotide
  misc_feature 1..20: note = Target: SCN10A; (-) strand; PAM type: NRG; PAM sequence: CAG
  source 1..20: mol_type = other DNA
ttccaaaaaagtcagaaatc

SEQ ID NO: 18926 - DNA, 20 bp, synthetic construct
  misc_feature 1..20: note = Description of Artificial Sequence: Synthetic oligonucleotide
  misc_feature 1..20: note = Target: SCN10A; (-) strand; PAM type: NRG; PAM sequence: CAG
  source 1..20: mol_type = other DNA
tactaattttccaaaaaagt

SEQ ID NO: 18927 - DNA, 20 bp, synthetic construct
  misc_feature 1..20: note = Description of Artificial Sequence: Synthetic oligonucleotide
  misc_feature 1..20: note = Target: SCN10A; (-) strand; PAM type: NRG; PAM sequence: AAG
  source 1..20: mol_type = other DNA
gagttactaattttccaaaa

SEQ ID NO: 18928 - DNA, 20 bp, synthetic construct
  misc_feature 1..20: note = Description of Artificial Sequence: Synthetic oligonucleotide
  misc_feature 1..20: note = Target: SCN10A; (-) strand; PAM type: NRG; PAM sequence: GAG
  source 1..20: mol_type = other DNA
tggcctgtccattattgtca

SEQ ID NO: 18929 - DNA, 20 bp, synthetic construct
  misc_feature 1..20: note = Description of Artificial Sequence: Synthetic oligonucleotide
  misc_feature 1..20: note = Target: SCN10A; (-) strand; PAM type: NRG; PAM sequence: CAG
  source 1..20: mol_type = other DNA
tatggcctgtccattattgt

SEQ ID NO: 18930 - DNA, 20 bp, synthetic construct
  misc_feature 1..20: note = Description of Artificial Sequence: Synthetic oligonucleotide
  misc_feature 1..20: note = Target: SCN10A; (-) strand; PAM type: NRG; PAM sequence: TGG
  source 1..20: mol_type = other DNA
agggagggaaggacgagcta

SEQ ID NO: 18931 - DNA, 20 bp, synthetic construct
  misc_feature 1..20: note = Description of Artificial Sequence: Synthetic oligonucleotide
  misc_feature 1..20: note = Target: SCN10A; (-) strand; PAM type: NRG; PAM sequence: GAG
  source 1..20: mol_type = other DNA
ggagggagggagggaaggac

SEQ ID NO: 18932 - DNA, 20 bp, synthetic construct
  misc_feature 1..20: note = Description of Artificial Sequence: Synthetic oligonucleotide
  misc_feature 1..20: note = Target: SCN10A; (-) strand; PAM type: NRG; PAM sequence: AGG
  source 1..20: mol_type = other DNA
gagagggagggagggaggga

SEQ ID NO: 18933 - DNA, 20 bp, synthetic construct
  misc_feature 1..20: note = Description of Artificial Sequence: Synthetic oligonucleotide
  misc_feature 1..20: note = Target: SCN10A; (-) strand; PAM type: NRG; PAM sequence: AAG
  source 1..20: mol_type = other DNA
agagagggagggagggaggg

SEQ ID NO: 18934 - DNA, 20 bp, synthetic construct
  misc_feature 1..20: note = Description of Artificial Sequence: Synthetic oligonucleotide
  misc_feature 1..20: note = Target: SCN10A; (-) strand; PAM type: NRG; PAM sequence: GGG
  source 1..20: mol_type = other DNA
gagagagagggagggaggga

SEQ ID NO: 18935 - DNA, 20 bp, synthetic construct
  misc_feature 1..20: note = Description of Artificial Sequence: Synthetic oligonucleotide
  misc_feature 1..20: note = Target: SCN10A; (-) strand; PAM type: NRG; PAM sequence: AGG
  source 1..20: mol_type = other DNA
agagagagagggagggaggg

SEQ ID NO: 18936 - DNA, 20 bp, synthetic construct
  misc_feature 1..20: note = Description of Artificial Sequence: Synthetic oligonucleotide
  misc_feature 1..20: note = Target: SCN10A; (-) strand; PAM type: NRG; PAM sequence: GAG
  source 1..20: mol_type = other DNA
gagagagagagggagggagg

SEQ ID NO: 18937 - DNA, 20 bp, synthetic construct
  misc_feature 1..20: note = Description of Artificial Sequence: Synthetic oligonucleotide
  misc_feature 1..20: note = Target: SCN10A; (-) strand; PAM type: NRG; PAM sequence: GGG
  source 1..20: mol_type = other DNA
gggagagagagagggaggga

SEQ ID NO: 18938 - DNA, 20 bp, synthetic construct
  misc_feature 1..20: note = Description of Artificial Sequence: Synthetic oligonucleotide
  misc_feature 1..20: note = Target: SCN10A; (-) strand; PAM type: NRG; PAM sequence: AGG
  source 1..20: mol_type = other DNA
agggagagagagagggaggg

SEQ ID NO: 18939 - DNA, 20 bp, synthetic construct
  misc_feature 1..20: note = Description of Artificial Sequence: Synthetic oligonucleotide
  misc_feature 1..20: note = Target: SCN10A; (-) strand; PAM type: NRG; PAM sequence: GAG
  source 1..20: mol_type = other DNA
gagggagagagagagggagg

SEQ ID NO: 18940 - DNA, 20 bp, synthetic construct
  misc_feature 1..20: note = Description of Artificial Sequence: Synthetic oligonucleotide
  misc_feature 1..20: note = Target: SCN10A; (-) strand; PAM type: NRG; PAM sequence: GGG
  source 1..20: mol_type = other DNA
gggagggagagagagaggga

SEQ ID NO: 18941 - DNA, 20 bp, synthetic construct
  misc_feature 1..20: note = Description of Artificial Sequence: Synthetic oligonucleotide
  misc_feature 1..20: note = Target: SCN10A; (-) strand; PAM type: NRG; PAM sequence: AGG
  source 1..20: mol_type = other DNA
agggagggagagagagaggg

SEQ ID NO: 18942 - DNA, 20 bp, synthetic construct
  misc_feature 1..20: note = Description of Artificial Sequence: Synthetic oligonucleotide
  misc_feature 1..20: note = Target: SCN10A; (-) strand; PAM type: NRG; PAM sequence: GAG
  source 1..20: mol_type = other DNA
gagggagggagagagagagg

SEQ ID NO: 18943 - DNA, 20 bp, synthetic construct
  misc_feature 1..20: note = Description of Artificial Sequence: Synthetic oligonucleotide
  misc_feature 1..20: note = Target: SCN10A; (-) strand; PAM type: NRG; PAM sequence: GGG
  source 1..20: mol_type = other DNA
gggagggagggagagagaga

SEQ ID NO: 18944 - DNA, 20 bp, synthetic construct
  misc_feature 1..20: note = Description of Artificial Sequence: Synthetic oligonucleotide
  misc_feature 1..20: note = Target: SCN10A; (-) strand; PAM type: NRG; PAM sequence: AGG
  source 1..20: mol_type = other DNA
agggagggagggagagagag

SEQ ID NO: 18945 - DNA, 20 bp, synthetic construct
  misc_feature 1..20: note = Description of Artificial Sequence: Synthetic oligonucleotide
  misc_feature 1..20: note = Target: SCN10A; (-) strand; PAM type: NRG; PAM sequence: GAG
  source 1..20: mol_type = other DNA
gagggagggagggagagaga

SEQ ID NO: 18946 - DNA, 20 bp, synthetic construct
  misc_feature 1..20: note = Description of Artificial Sequence: Synthetic oligonucleotide
  misc_feature 1..20: note = Target: SCN10A; (-) strand; PAM type: NRG; PAM sequence: GAG
  source 1..20: mol_type = other DNA
gggagggagggagggagaga

SEQ ID NO: 18947 - DNA, 20 bp, synthetic construct
  misc_feature 1..20: note = Description of Artificial Sequence: Synthetic oligonucleotide
  misc_feature 1..20: note = Target: SCN10A; (-) strand; PAM type: NRG; PAM sequence: GAG
  source 1..20: mol_type = other DNA
gagggagggagggagggaga

SEQ ID NO: 18948 - DNA, 20 bp, synthetic construct
  misc_feature 1..20: note = Description of Artificial Sequence: Synthetic oligonucleotide
  misc_feature 1..20: note = Target: SCN10A; (-) strand; PAM type: NRG; PAM sequence: GAG
  source 1..20: mol_type = other DNA
gagagggagggagggaggga

SEQ ID NO: 18949 - DNA, 20 bp, synthetic construct
  misc_feature 1..20: note = Description of Artificial Sequence: Synthetic oligonucleotide
  misc_feature 1..20: note = Target: SCN10A; (-) strand; PAM type: NRG; PAM sequence: GAG
  source 1..20: mol_type = other DNA
gagagagggagggagggagg

SEQ ID NO: 18950 - DNA, 20 bp, synthetic construct
  misc_feature 1..20: note = Description of Artificial Sequence: Synthetic oligonucleotide
  misc_feature 1..20: note = Target: SCN10A; (-) strand; PAM type: NRG; PAM sequence: GGG
  source 1..20: mol_type = other DNA
gagagagagggagggaggga

SEQ ID NO: 18951 - DNA, 20 bp, synthetic construct
  misc_feature 1..20: note = Description of Artificial Sequence: Synthetic oligonucleotide
  misc_feature 1..20: note = Target: SCN10A; (-) strand; PAM type: NRG; PAM sequence: AGG
  source 1..20: mol_type = other DNA
agagagagagggagggaggg

SEQ ID NO: 18952 - DNA, 20 bp, synthetic construct
  misc_feature 1..20: note = Description of Artificial Sequence: Synthetic oligonucleotide
  misc_feature 1..20: note = Target: SCN10A; (-) strand; PAM type: NRG; PAM sequence: GAG
  source 1..20: mol_type = other DNA
gagagagagagggagggagg

SEQ ID NO: 18953 - DNA, 20 bp, synthetic construct
  misc_feature 1..20: note = Description of Artificial Sequence: Synthetic oligonucleotide
  misc_feature 1..20: note = Target: SCN10A; (-) strand; PAM type: NRG; PAM sequence: GGG
  source 1..20: mol_type = other DNA
gggagagagagagggaggga

SEQ ID NO: 18954 - DNA, 20 bp, synthetic construct
  misc_feature 1..20: note = Description of Artificial Sequence: Synthetic oligonucleotide
  misc_feature 1..20: note = Target: SCN10A; (-) strand; PAM type: NRG; PAM sequence: AGG
  source 1..20: mol_type = other DNA
agggagagagagagggaggg

SEQ ID NO: 18955 - DNA, 20 bp, synthetic construct
  misc_feature 1..20: note = Description of Artificial Sequence: Synthetic oligonucleotide
  misc_feature 1..20: note = Target: SCN10A; (-) strand; PAM type: NRG; PAM sequence: GAG
  source 1..20: mol_type = other DNA
gagggagagagagagggagg

SEQ ID NO: 18956 - DNA, 20 bp, synthetic construct
  misc_feature 1..20: note = Description of Artificial Sequence: Synthetic oligonucleotide
  misc_feature 1..20: note = Target: SCN10A; (-) strand; PAM type: NRG; PAM sequence: GGG
  source 1..20: mol_type = other DNA
gggagggagagagagaggga

SEQ ID NO: 18957 - DNA, 20 bp, synthetic construct
  misc_feature 1..20: note = Description of Artificial Sequence: Synthetic oligonucleotide
  misc_feature 1..20: note = Target: SCN10A; (-) strand; PAM type: NRG; PAM sequence: AGG
  source 1..20: mol_type = other DNA
agggagggagagagagaggg

SEQ ID NO: 18958 - DNA, 20 bp, synthetic construct
  misc_feature 1..20: note = Description of Artificial Sequence: Synthetic oligonucleotide
  misc_feature 1..20: note = Target: SCN10A; (-) strand; PAM type: NRG; PAM sequence: GAG
  source 1..20: mol_type = other DNA
gagggagggagagagagagg

SEQ ID NO: 18959 - DNA, 20 bp, synthetic construct
  misc_feature 1..20: note = Description of Artificial Sequence: Synthetic oligonucleotide
  misc_feature 1..20: note = Target: SCN10A; (-) strand; PAM type: NRG; PAM sequence: GGG
  source 1..20: mol_type = other DNA
gggagggagggagagagaga

SEQ ID NO: 18960 - DNA, 20 bp, synthetic construct
  misc_feature 1..20: note = Description of Artificial Sequence: Synthetic oligonucleotide
  misc_feature 1..20: note = Target: SCN10A; (-) strand; PAM type: NRG; PAM sequence: AGG
  source 1..20: mol_type = other DNA
agggagggagggagagagag

SEQ ID NO: 18961 - DNA, 20 bp, synthetic construct
  misc_feature 1..20: note = Description of Artificial Sequence: Synthetic oligonucleotide
  misc_feature 1..20: note = Target: SCN10A; (-) strand; PAM type: NRG; PAM sequence: GAG
  source 1..20: mol_type = other DNA
gagggagggagggagagaga

SEQ ID NO: 18962 - DNA, 20 bp, synthetic construct
  misc_feature 1..20: note = Description of Artificial Sequence: Synthetic oligonucleotide
  misc_feature 1..20: note = Target: SCN10A; (-) strand; PAM type: NRG; PAM sequence: GAG
  source 1..20: mol_type = other DNA
gggagggagggagggagaga

SEQ ID NO: 18963 - DNA, 20 bp, synthetic construct
  misc_feature 1..20: note = Description of Artificial Sequence: Synthetic oligonucleotide
  misc_feature 1..20: note = Target: SCN10A; (-) strand; PAM type: NRG; PAM sequence: GAG
  source 1..20: mol_type = other DNA
aagggagggagggagggaga

SEQ ID NO: 18964 - DNA, 20 bp, synthetic construct
  misc_feature 1..20: note = Description of Artificial Sequence: Synthetic oligonucleotide
  misc_feature 1..20: note = Target: SCN10A; (-) strand; PAM type: NRG; PAM sequence: GAG
  source 1..20: mol_type = other DNA
ggaagggagggagggaggga

SEQ ID NO: 18965 - DNA, 20 bp, synthetic construct
  misc_feature 1..20: note = Description of Artificial Sequence: Synthetic oligonucleotide
  misc_feature 1..20: note = Target: SCN10A; (-) strand; PAM type: NRG; PAM sequence: GAG
  source 1..20: mol_type = other DNA
gaggaagggagggagggagg

SEQ ID NO: 18966 - DNA, 20 bp, synthetic construct
  misc_feature 1..20: note = Description of Artificial Sequence: Synthetic oligonucleotide
  misc_feature 1..20: note = Target: SCN10A; (-) strand; PAM type: NRG; PAM sequence: GGG
  source 1..20: mol_type = other DNA
aagaggaagggagggaggga

SEQ ID NO: 18967 - DNA, 20 bp, synthetic construct
  misc_feature 1..20: note = Description of Artificial Sequence: Synthetic oligonucleotide
  misc_feature 1..20: note = Target: SCN10A; (-) strand; PAM type: NRG; PAM sequence: AGG
  source 1..20: mol_type = other DNA
aaagaggaagggagggaggg

SEQ ID NO: 18968 - DNA, 20 bp, synthetic construct
  misc_feature 1..20: note = Description of Artificial Sequence: Synthetic oligonucleotide
  misc_feature 1..20: note = Target: SCN10A; (-) strand; PAM type: NRG; PAM sequence: GAG
  source 1..20: mol_type = other DNA
gaaagaggaagggagggagg

SEQ ID NO: 18969 - DNA, 20 bp, synthetic construct
  misc_feature 1..20: note = Description of Artificial Sequence: Synthetic oligonucleotide
  misc_feature 1..20: note = Target: SCN10A; (-) strand; PAM type: NRG; PAM sequence: GGG
  source 1..20: mol_type = other DNA
aagaaagaggaagggaggga

SEQ ID NO: 18970 - DNA, 20 bp, synthetic construct
  misc_feature 1..20: note = Description of Artificial Sequence: Synthetic oligonucleotide
  misc_feature 1..20: note = Target: SCN10A; (-) strand; PAM type: NRG; PAM sequence: AGG
  source 1..20: mol_type = other DNA
aaagaaagaggaagggaggg

SEQ ID NO: 18971 - DNA, 20 bp, synthetic construct
  misc_feature 1..20: note = Description of Artificial Sequence: Synthetic oligonucleotide
  misc_feature 1..20: note = Target: SCN10A; (-) strand; PAM type: NRG; PAM sequence: GAG
  source 1..20: mol_type = other DNA
gaaagaaagaggaagggagg

SEQ ID NO: 18972 - DNA, 20 bp, synthetic construct
  misc_feature 1..20: note = Description of Artificial Sequence: Synthetic oligonucleotide
  misc_feature 1..20: note = Target: SCN10A; (-) strand; PAM type: NRG; PAM sequence: GGG
  source 1..20: mol_type = other DNA
aagaaagaaagaggaaggga

SEQ ID NO: 18973 - DNA, 20 bp, synthetic construct
  misc_feature 1..20: note = Description of Artificial Sequence: Synthetic oligonucleotide
  misc_feature 1..20: note = Target: SCN10A; (-) strand; PAM type: NRG; PAM sequence: AGG
  source 1..20: mol_type = other DNA
aaagaaagaaagaggaaggg

SEQ ID NO: 18974 - DNA, 20 bp, synthetic construct
  misc_feature 1..20: note = Description of Artificial Sequence: Synthetic oligonucleotide
  misc_feature 1..20: note = Target: SCN10A; (-) strand; PAM type: NRG; PAM sequence: GAG
  source 1..20: mol_type = other DNA
gaaagaaagaaagaggaagg

SEQ ID NO: 18975 - DNA, 20 bp, synthetic construct
  misc_feature 1..20: note = Description of Artificial Sequence: Synthetic oligonucleotide
  misc_feature 1..20: note = Target: SCN10A; (-) strand; PAM type: NRG; PAM sequence: GGG
  source 1..20: mol_type = other DNA
aagaaagaaagaaagaggaa

SEQ ID NO: 18976 - DNA, 20 bp, synthetic construct
  misc_feature 1..20: note = Description of Artificial Sequence: Synthetic oligonucleotide
  misc_feature 1..20: note = Target: SCN10A; (-) strand; PAM type: NRG; PAM sequence: AGG
  source 1..20: mol_type = other DNA
aaagaaagaaagaaagagga

SEQ ID NO: 18977 - DNA, 20 bp, synthetic construct
  misc_feature 1..20: note = Description of Artificial Sequence: Synthetic oligonucleotide
  misc_feature 1..20: note = Target: SCN10A; (-) strand; PAM type: NRG; PAM sequence: AAG
  source 1..20: mol_type = other DNA
gaaagaaagaaagaaagagg

SEQ ID NO: 18978 - DNA, 20 bp, synthetic construct
  misc_feature 1..20: note = Description of Artificial Sequence: Synthetic oligonucleotide
  misc_feature 1..20: note = Target: SCN10A; (-) strand; PAM type: NRG; PAM sequence: AGG
  source 1..20: mol_type = other DNA
aaagaaagaaagaaagaaag

SEQ ID NO: 18979 - DNA, 20 bp, synthetic construct
  misc_feature 1..20: note = Description of Artificial Sequence: Synthetic oligonucleotide
  misc_feature 1..20: note = Target: SCN10A; (-) strand; PAM type: NRG; PAM sequence: GAG
  source 1..20: mol_type = other DNA
gaaagaaagaaagaaagaaa

SEQ ID NO: 18980 - DNA, 20 bp, synthetic construct
  misc_feature 1..20: note = Description of Artificial Sequence: Synthetic oligonucleotide
  misc_feature 1..20: note = Target: SCN10A; (-) strand; PAM type: NRG; PAM sequence: AAG
  source 1..20: mol_type = other DNA
aagaaagaaagaaagaaaga

SEQ ID NO: 18981 - DNA, 20 bp, synthetic construct
  misc_feature 1..20: note = Description of Artificial Sequence: Synthetic oligonucleotide
  misc_feature 1..20: note = Target: SCN10A; (-) strand; PAM type: NRG; PAM sequence: AAG
  source 1..20: mol_type = other DNA
aagaaagaaagaaagaaaga

SEQ ID NO: 18982 - DNA, 20 bp, synthetic construct
  misc_feature 1..20: note = Description of Artificial Sequence: Synthetic oligonucleotide
  misc_feature 1..20: note = Target: SCN10A; (-) strand; PAM type: NRG; PAM sequence: AAG
  source 1..20: mol_type = other DNA
aagaaagaaagaaagaaaga

SEQ ID NO: 18983 - DNA, 20 bp, synthetic construct
  misc_feature 1..20: note = Description of Artificial Sequence: Synthetic oligonucleotide
  misc_feature 1..20: note = Target: SCN10A; (-) strand; PAM type: NRG; PAM sequence: AAG
  source 1..20: mol_type = other DNA
gagaaagaaagaaagaaaga

SEQ ID NO: 18984 - DNA, 20 bp, synthetic construct
  misc_feature 1..20: note = Description of Artificial Sequence: Synthetic oligonucleotide
  misc_feature 1..20: note = Target: SCN10A; (-) strand; PAM type: NRG; PAM sequence: AAG
  source 1..20: mol_type = other DNA
gaaagagaaagaaagaaaga

SEQ ID NO: 18985 - DNA, 20 bp, synthetic construct
  misc_feature 1..20: note = Description of Artificial Sequence: Synthetic oligonucleotide
  misc_feature 1..20: note = Target: SCN10A; (-) strand; PAM type: NRG; PAM sequence: AAG
  source 1..20: mol_type = other DNA
agaagaaagagaaagaaaga

SEQ ID NO: 18986 - DNA, 20 bp, synthetic construct
  misc_feature 1..20: note = Description of Artificial Sequence: Synthetic oligonucleotide
  misc_feature 1..20: note = Target: SCN10A; (-) strand; PAM type: NRG; PAM sequence: AAG
  source 1..20: mol_type = other DNA
agaaagaagaaagagaaaga

SEQ ID NO: 18987 - DNA, 20 bp, synthetic construct
  misc_feature 1..20: note = Description of Artificial Sequence: Synthetic oligonucleotide
  misc_feature 1..20: note = Target: SCN10A; (-) strand; PAM type: NRG; PAM sequence: AAG
  source 1..20: mol_type = other DNA
agaaagaaagaagaaagaga

SEQ ID NO: 18988 - DNA, 20 bp, synthetic construct
  misc_feature 1..20: note = Description of Artificial Sequence: Synthetic oligonucleotide
  misc_feature 1..20: note = Target: SCN10A; (-) strand; PAM type: NRG; PAM sequence: GAG
  source 1..20: mol_type = other DNA
agaaagaaagaaagaagaaa

SEQ ID NO: 18989 - DNA, 20 bp, synthetic construct
  misc_feature 1..20: note = Description of Artificial Sequence: Synthetic oligonucleotide
  misc_feature 1..20: note = Target: SCN10A; (-) strand; PAM type: NRG; PAM sequence: AAG
  source 1..20: mol_type = other DNA
agagaaagaaagaaagaaga

SEQ ID NO: 18990 - DNA, 20 bp, synthetic construct
  misc_feature 1..20: note = Description of Artificial Sequence: Synthetic oligonucleotide
  misc_feature 1..20: note = Target: SCN10A; (-) strand; PAM type: NRG; PAM sequence: AAG
  source 1..20: mol_type = other DNA
aaaaagagaaagaaagaaag

SEQ ID NO: 18991 - DNA, 20 bp, synthetic construct
  misc_feature 1..20: note = Description of Artificial Sequence: Synthetic oligonucleotide
  misc_feature 1..20: note = Target: SCN10A; (-) strand; PAM type: NRG; PAM sequence: AAG
  source 1..20: mol_type = other DNA
aagaaaaagagaaagaaaga

SEQ ID NO: 18992 - DNA, 20 bp, synthetic construct
  misc_feature 1..20: note = Description of Artificial Sequence: Synthetic oligonucleotide
  misc_feature 1..20: note = Target: SCN10A; (-) strand; PAM type: NRG; PAM sequence: AAG
  source 1..20: mol_type = other DNA
gagaaagaaaaagagaaaga

SEQ ID NO: 18993 - DNA, 20 bp, synthetic construct
  misc_feature 1..20: note = Description of Artificial Sequence: Synthetic oligonucleotide
  misc_feature 1..20: note = Target: SCN10A; (-) strand; PAM type: NRG; PAM sequence: AAG
  source 1..20: mol_type = other DNA
gagagagaaagaaaaagaga

SEQ ID NO: 18994 - DNA, 20 bp, synthetic construct
  misc_feature 1..20: note = Description of Artificial Sequence: Synthetic oligonucleotide
  misc_feature 1..20: note = Target: SCN10A; (-) strand; PAM type: NRG; PAM sequence: GAG
  source 1..20: mol_type = other DNA
gagggagagagaaagaaaaa

SEQ ID NO: 18995 - DNA, 20 bp, synthetic construct
  misc_feature 1..20: note = Description of Artificial Sequence: Synthetic oligonucleotide
  misc_feature 1..20: note = Target: SCN10A; (-) strand; PAM type: NRG; PAM sequence: AAG
  source 1..20: mol_type = other DNA
aagagggagagagaaagaaa

SEQ ID NO: 18996 - DNA, 20 bp, synthetic construct
  misc_feature 1..20: note = Description of Artificial Sequence: Synthetic oligonucleotide
  misc_feature 1..20: note = Target: SCN10A; (-) strand; PAM type: NRG; PAM sequence: AAG
  source 1..20: mol_type = other DNA
gagagcaagagggagagaga

SEQ ID NO: 18997 - DNA, 20 bp, synthetic construct
  misc_feature 1..20: note = Description of Artificial Sequence: Synthetic oligonucleotide
  misc_feature 1..20: note = Target: SCN10A; (-) strand; PAM type: NRG; PAM sequence: GAG
  source 1..20: mol_type = other DNA
gagagagagcaagagggaga

SEQ ID NO: 18998 - DNA, 20 bp, synthetic construct
  misc_feature 1..20: note = Description of Artificial Sequence: Synthetic oligonucleotide
  misc_feature 1..20: note = Target: SCN10A; (-) strand; PAM type: NRG; PAM sequence: GAG
  source 1..20: mol_type = other DNA
aagagagagagcaagaggga

SEQ ID NO: 18999 - DNA, 20 bp, synthetic construct
  misc_feature 1..20: note = Description of Artificial Sequence: Synthetic oligonucleotide
  misc_feature 1..20: note = Target: SCN10A; (-) strand; PAM type: NRG; PAM sequence: GAG
  source 1..20: mol_type = other DNA
gaaagagagagagcaagagg

SEQ ID NO: 19000 - DNA, 20 bp, synthetic construct
  misc_feature 1..20: note = Description of Artificial Sequence: Synthetic oligonucleotide
  misc_feature 1..20: note = Target: SCN10A; (-) strand; PAM type: NRG; PAM sequence: GGG
  source 1..20: mol_type = other DNA
aagaaagagagagagcaaga

SEQ ID NO: 19001 - DNA, 20 bp, synthetic construct
  misc_feature 1..20: note = Description of Artificial Sequence: Synthetic oligonucleotide
  misc_feature 1..20: note = Target: SCN10A; (-) strand; PAM type: NRG; PAM sequence: AGG
  source 1..20: mol_type = other DNA
aaagaaagagagagagcaag

SEQ ID NO: 19002 - DNA, 20 bp, synthetic construct
  misc_feature 1..20: note = Description of Artificial Sequence: Synthetic oligonucleotide
  misc_feature 1..20: note = Target: SCN10A; (-) strand; PAM type: NRG; PAM sequence: GAG
  source 1..20: mol_type = other DNA
gaaagaaagagagagagcaa

SEQ ID NO: 19003 - DNA, 20 bp, synthetic construct
  misc_feature 1..20: note = Description of Artificial Sequence: Synthetic oligonucleotide
  misc_feature 1..20: note = Target: SCN10A; (-) strand; PAM type: NRG; PAM sequence: AAG
  source 1..20: mol_type = other DNA
atgaaagaaagagagagagc

SEQ ID NO: 19004 - DNA, 20 bp, synthetic construct
  misc_feature 1..20: note = Description of Artificial Sequence: Synthetic oligonucleotide
  misc_feature 1..20: note = Target: SCN10A; (-) strand; PAM type: NRG; PAM sequence: GAG
  source 1..20: mol_type = other DNA
acagatgaaagaaagagaga

SEQ ID NO: 19005 - DNA, 20 bp, synthetic construct
  misc_feature 1..20: note = Description of Artificial Sequence: Synthetic oligonucleotide
  misc_feature 1..20: note = Target: SCN10A; (-) strand; PAM type: NRG; PAM sequence: GAG
  source 1..20: mol_type = other DNA
agacagatgaaagaaagaga

SEQ ID NO: 19006 - DNA, 20 bp, synthetic construct
  misc_feature 1..20: note = Description of Artificial Sequence: Synthetic oligonucleotide
  misc_feature 1..20: note = Target: SCN10A; (-) strand; PAM type: NRG; PAM sequence: GAG
  source 1..20: mol_type = other DNA
aaagacagatgaaagaaaga

SEQ ID NO: 19007 - DNA, 20 bp, synthetic construct
  misc_feature 1..20: note = Description of Artificial Sequence: Synthetic oligonucleotide
  misc_feature 1..20: note = Target: SCN10A; (-) strand; PAM type: NRG; PAM sequence: GAG
  source 1..20: mol_type = other DNA
agaaagacagatgaaagaaa

SEQ ID NO: 19008 - DNA, 20 bp, synthetic construct
  misc_feature 1..20: note = Description of Artificial Sequence: Synthetic oligonucleotide
  misc_feature 1..20: note = Target: SCN10A; (-) strand; PAM type: NRG; PAM sequence: AAG
  source 1..20: mol_type = other DNA
agagaaagacagatgaaaga

SEQ ID NO: 19009 - DNA, 20 bp, synthetic construct
  misc_feature 1..20: note = Description of Artificial Sequence: Synthetic oligonucleotide
  misc_feature 1..20: note = Target: SCN10A; (-) strand; PAM type: NRG; PAM sequence: AAG
  source 1..20: mol_type = other DNA
agcgagagaaagacagatga

SEQ ID NO: 19010 - DNA, 20 bp, synthetic construct
  misc_feature 1..20: note = Description of Artificial Sequence: Synthetic oligonucleotide
  misc_feature 1..20: note = Target: SCN10A; (-) strand; PAM type: NRG; PAM sequence: CAG
  source 1..20: mol_type = other DNA
tagaaaaagcgagagaaaga

SEQ ID NO: 19011 - DNA, 20 bp, synthetic construct
  misc_feature 1..20: note = Description of Artificial Sequence: Synthetic oligonucleotide
  misc_feature 1..20: note = Target: SCN10A; (-) strand; PAM type: NRG; PAM sequence: AAG
  source 1..20: mol_type = other DNA
aagatagaaaaagcgagaga

SEQ ID NO: 19012 - DNA, 20 bp, synthetic construct
  misc_feature 1..20: note = Description of Artificial Sequence: Synthetic oligonucleotide
  misc_feature 1..20: note = Target: SCN10A; (-) strand; PAM type: NRG; PAM sequence: GAG
  source 1..20: mol_type = other DNA
aataaagatagaaaaagcga

SEQ ID NO: 19013 - DNA, 20 bp, synthetic construct
  misc_feature 1..20: note = Description of Artificial Sequence: Synthetic oligonucleotide
  misc_feature 1..20: note = Target: SCN10A; (-) strand; PAM type: NRG; PAM sequence: GAG
  source 1..20: mol_type = other DNA
ggaataaagatagaaaaagc

SEQ ID NO: 19014 - DNA, 20 bp, synthetic construct
  misc_feature 1..20: note = Description of Artificial Sequence: Synthetic oligonucleotide
  misc_feature 1..20: note = Target: SCN10A; (-) strand; PAM type: NRG; PAM sequence: AAG
  source 1..20: mol_type = other DNA
gagaggaataaagatagaaa

SEQ ID NO: 19015 - DNA, 20 bp, synthetic construct
  misc_feature 1..20: note = Description of Artificial Sequence: Synthetic oligonucleotide
  misc_feature 1..20: note = Target: SCN10A; (-) strand; PAM type: NRG; PAM sequence: TAG
  source 1..20: mol_type = other DNA
cagagagagaggaataaaga

SEQ ID NO: 19016 - DNA, 20 bp, synthetic construct
  misc_feature 1..20: note = Description of Artificial Sequence: Synthetic oligonucleotide
  misc_feature 1..20: note = Target: SCN10A; (-) strand; PAM type: NRG; PAM sequence: AAG
  source 1..20: mol_type = other DNA
gacacagagagagaggaata

SEQ ID NO: 19017 - DNA, 20 bp, synthetic construct
  misc_feature 1..20: note = Description of Artificial Sequence: Synthetic oligonucleotide
  misc_feature 1..20: note = Target: SCN10A; (-) strand; PAM type: NRG; PAM sequence: AGG
  source 1..20: mol_type = other DNA
gaaaggagacacagagagag

SEQ ID NO: 19018 - DNA, 20 bp, synthetic construct
  misc_feature 1..20: note = Description of Artificial Sequence: Synthetic oligonucleotide
  misc_feature 1..20: note = Target: SCN10A; (-) strand; PAM type: NRG; PAM sequence: GAG
  source 1..20: mol_type = other DNA
agaaaggagacacagagaga

SEQ ID NO: 19019 - DNA, 20 bp, synthetic construct
  misc_feature 1..20: note = Description of Artificial Sequence: Synthetic oligonucleotide
  misc_feature 1..20: note = Target: SCN10A; (-) strand; PAM type: NRG; PAM sequence: GAG
  source 1..20: mol_type = other DNA
aaagaaaggagacacagaga

SEQ ID NO: 19020 - DNA, 20 bp, synthetic construct
  misc_feature 1..20: note = Description of Artificial Sequence: Synthetic oligonucleotide
  misc_feature 1..20: note = Target: SCN10A; (-) strand; PAM type: NRG; PAM sequence: GAG
  source 1..20: mol_type = other DNA
aaaaagaaaggagacacaga

SEQ ID NO: 19021 - DNA, 20 bp, synthetic construct
  misc_feature 1..20: note = Description of Artificial Sequence: Synthetic oligonucleotide
  misc_feature 1..20: note = Target: SCN10A; (-) strand; PAM type: NRG; PAM sequence: GAG
  source 1..20: mol_type = other DNA
caaaaaagaaaggagacaca

SEQ ID NO: 19022 - DNA, 20 bp, synthetic construct
  misc_feature 1..20: note = Description of Artificial Sequence: Synthetic oligonucleotide
  misc_feature 1..20: note = Target: SCN10A; (-) strand; PAM type: NRG; PAM sequence: CAG
  source 1..20: mol_type = other DNA
ctcaaaaaagaaaggagaca

SEQ ID NO: 19023 - DNA, 20 bp, synthetic construct
  misc_feature 1..20: note = Description of Artificial Sequence: Synthetic oligonucleotide
  misc_feature 1..20: note = Target: SCN10A; (-) strand; PAM type: NRG; PAM sequence: GAG
  source 1..20: mol_type = other DNA
acctgtctcaaaaaagaaag

SEQ ID NO: 19024 - DNA, 20 bp, synthetic construct
  misc_feature 1..20: note = Description of Artificial Sequence: Synthetic oligonucleotide
  misc_feature 1..20: note = Target: SCN10A; (-) strand; PAM type: NRG; PAM sequence: AGG
  source 1..20: mol_type = other DNA
gaacctgtctcaaaaaagaa

SEQ ID NO: 19025 - DNA, 20 bp, synthetic construct
  misc_feature 1..20: note = Description of Artificial Sequence: Synthetic oligonucleotide
  misc_feature 1..20: note = Target: SCN10A; (-) strand; PAM type: NRG; PAM sequence: AAG
  source 1..20: mol_type = other DNA
agaacctgtctcaaaaaaga

SEQ ID NO: 19026 - DNA, 20 bp, synthetic construct
  misc_feature 1..20: note = Description of Artificial Sequence: Synthetic oligonucleotide
  misc_feature 1..20: note = Target: SCN10A; (-) strand; PAM type: NRG; PAM sequence: AAG
  source 1..20: mol_type = other DNA
agtaagaacctgtctcaaaa

SEQ ID NO: 19027 - DNA, 20 bp, synthetic construct
  misc_feature 1..20: note = Description of Artificial Sequence: Synthetic oligonucleotide
  misc_feature 1..20: note = Target: SCN10A; (-) strand; PAM type: NRG; PAM sequence: AAG
  source 1..20: mol_type = other DNA
tccagcctgggagacagagt

SEQ ID NO: 19028 - DNA, 20 bp, synthetic construct
  misc_feature 1..20: note = Description of Artificial Sequence: Synthetic oligonucleotide
  misc_feature 1..20: note = Target: SCN10A; (-) strand; PAM type: NRG; PAM sequence: GAG
  source 1..20: mol_type = other DNA
gcactccagcctgggagaca

SEQ ID NO: 19029 - DNA, 20 bp, synthetic construct
  misc_feature 1..20: note = Description of Artificial Sequence: Synthetic oligonucleotide
  misc_feature 1..20: note = Target: SCN10A; (-) strand; PAM type: NRG; PAM sequence: CAG
  source 1..20: mol_type = other DNA
ctgcactccagcctgggaga

SEQ ID NO: 19030 - DNA, 20 bp, synthetic construct
  misc_feature 1..20: note = Description of Artificial Sequence: Synthetic oligonucleotide
  misc_feature 1..20: note = Target: SCN10A; (-) strand; PAM type: NRG; PAM sequence: GAG
  source 1..20: mol_type = other DNA
gccactgcactccagcctgg

SEQ ID NO: 19031 - DNA, 20 bp, synthetic construct
  misc_feature 1..20: note = Description of Artificial Sequence: Synthetic oligonucleotide
  misc_feature 1..20: note = Target: SCN10A; (-) strand; PAM type: NRG; PAM sequence: GGG
  source 1..20: mol_type = other DNA
gtgccactgcactccagcct

SEQ ID NO: 19032 - DNA, 20 bp, synthetic construct
  misc_feature 1..20: note = Description of Artificial Sequence: Synthetic oligonucleotide
  misc_feature 1..20: note = Target: SCN10A; (-) strand; PAM type: NRG; PAM sequence: TGG
  source 1..20: mol_type = other DNA
cgtgccactgcactccagcc

SEQ ID NO: 19033 - DNA, 20 bp, synthetic construct
  misc_feature 1..20: note = Description of Artificial Sequence: Synthetic oligonucleotide
  misc_feature 1..20: note = Target: SCN10A; (-) strand; PAM type: NRG; PAM sequence: CAG
  source 1..20: mol_type = other DNA
atgatcgtgccactgcactc

SEQ ID NO: 19034 - DNA, 20 bp, synthetic construct
  misc_feature 1..20: note = Description of Artificial Sequence: Synthetic oligonucleotide
  misc_feature 1..20: note = Target: SCN10A; (-) strand; PAM type: NRG; PAM sequence: CAG
  source 1..20: mol_type = other DNA
gaccagggaggtggaggctg

SEQ ID NO: 19035 - DNA, 20 bp, synthetic construct
  misc_feature 1..20: note = Description of Artificial Sequence: Synthetic oligonucleotide
  misc_feature 1..20: note = Target: SCN10A; (-) strand; PAM type: NRG; PAM sequence: AGG
  source 1..20: mol_type = other DNA
acctgagaccagggaggtgg

SEQ ID NO: 19036 - DNA, 20 bp, synthetic construct
  misc_feature 1..20: note = Description of Artificial Sequence: Synthetic oligonucleotide
  misc_feature 1..20: note = Target: SCN10A; (-) strand; PAM type: NRG; PAM sequence: GAG
  source 1..20: mol_type = other DNA
cacctgagaccagggaggtg

SEQ ID NO: 19037 - DNA, 20 bp, synthetic construct
  misc_feature 1..20: note = Description of Artificial Sequence: Synthetic oligonucleotide
  misc_feature 1..20: note = Target: SCN10A; (-) strand; PAM type: NRG; PAM sequence: TGG
  source 1..20: mol_type = other DNA
atcacctgagaccagggagg

SEQ ID NO: 19038 - DNA, 20 bp, synthetic construct
  misc_feature 1..20: note = Description of Artificial Sequence: Synthetic oligonucleotide
  misc_feature 1..20: note = Target: SCN10A; (-) strand; PAM type: NRG; PAM sequence: AGG
  source 1..20: mol_type = other DNA
aggatcacctgagaccaggg

SEQ ID NO: 19039 - DNA, 20 bp, synthetic construct
  misc_feature 1..20: note = Description of Artificial Sequence: Synthetic oligonucleotide
  misc_feature 1..20: note = Target: SCN10A; (-) strand; PAM type: NRG; PAM sequence: GAG
  source 1..20: mol_type = other DNA
gaggatcacctgagaccagg

SEQ ID NO: 19040 - DNA, 20 bp, synthetic construct
  misc_feature 1..20: note = Description of Artificial Sequence: Synthetic oligonucleotide
  misc_feature 1..20: note = Target: SCN10A; (-) strand; PAM type: NRG; PAM sequence: GGG
  source 1..20: mol_type = other DNA
gggaggatcacctgagacca

SEQ ID NO: 19041 - DNA, 20 bp, synthetic construct
  misc_feature 1..20: note = Description of Artificial Sequence: Synthetic oligonucleotide
  misc_feature 1..20: note = Target: SCN10A; (-) strand; PAM type: NRG; PAM sequence: AGG
  source 1..20: mol_type = other DNA
tgggaggatcacctgagacc

SEQ ID NO: 19042 - DNA, 20 bp, synthetic construct
  misc_feature 1..20: note = Description of Artificial Sequence: Synthetic oligonucleotide
  misc_feature 1..20: note = Target: SCN10A; (-) strand; PAM type: NRG; PAM sequence: CAG
  source 1..20: mol_type = other DNA
gtgggaggatcacctgagac

SEQ ID NO: 19043 - DNA, 20 bp, synthetic construct
  misc_feature 1..20: note = Description of Artificial Sequence: Synthetic oligonucleotide
  misc_feature 1..20: note = Target: SCN10A; (-) strand; PAM type: NRG; PAM sequence: GAG
  source 1..20: mol_type = other DNA
ctgaggtgggaggatcacct

SEQ ID NO: 19044 - DNA, 20 bp, synthetic construct
  misc_feature 1..20: note = Description of Artificial Sequence: Synthetic oligonucleotide
  misc_feature 1..20: note = Target: SCN10A; (-) strand; PAM type: NRG; PAM sequence: AGG
  source 1..20: mol_type = other DNA
actcagaagactgaggtggg

SEQ ID NO: 19045 - DNA, 20 bp, synthetic construct
  misc_feature 1..20: note = Description of Artificial Sequence: Synthetic oligonucleotide
  misc_feature 1..20: note = Target: SCN10A; (-) strand; PAM type: NRG; PAM sequence: GAG
  source 1..20: mol_type = other DNA
tactcagaagactgaggtgg

SEQ ID NO: 19046 - DNA, 20 bp, synthetic construct
  misc_feature 1..20: note = Description of Artificial Sequence: Synthetic oligonucleotide
  misc_feature 1..20: note = Target: SCN10A; (-) strand; PAM type: NRG; PAM sequence: GGG
  source 1..20: mol_type = other DNA
gctactcagaagactgaggt

SEQ ID NO: 19047 - DNA, 20 bp, synthetic construct
  misc_feature 1..20: note = Description of Artificial Sequence: Synthetic oligonucleotide
  misc_feature 1..20: note = Target: SCN10A; (-) strand; PAM type: NRG; PAM sequence: TGG
  source 1..20: mol_type = other DNA
agctactcagaagactgagg

SEQ ID NO: 19048 - DNA, 20 bp, synthetic construct
  misc_feature 1..20: note = Description of Artificial Sequence: Synthetic oligonucleotide
  misc_feature 1..20: note = Target: SCN10A; (-) strand; PAM type: NRG; PAM sequence: AGG
  source 1..20: mol_type = other DNA
cctagctactcagaagactg

SEQ ID NO: 19049 - DNA, 20 bp, synthetic construct
  misc_feature 1..20: note = Description of Artificial Sequence: Synthetic oligonucleotide
  misc_feature 1..20: note = Target: SCN10A; (-) strand; PAM type: NRG; PAM sequence: GAG
  source 1..20: mol_type = other DNA
tcctagctactcagaagact

SEQ ID NO: 19050 - DNA, 20 bp, synthetic construct
  misc_feature 1..20: note = Description of Artificial Sequence: Synthetic oligonucleotide
  misc_feature 1..20: note = Target: SCN10A; (-) strand; PAM type: NRG; PAM sequence: AAG
  source 1..20: mol_type = other DNA
ctgttatcctagctactcag

SEQ ID NO: 19051 - DNA, 20 bp, synthetic construct
  misc_feature 1..20: note = Description of Artificial Sequence: Synthetic oligonucleotide
  misc_feature 1..20: note = Target: SCN10A; (-) strand; PAM type: NRG; PAM sequence: CAG
  source 1..20: mol_type = other DNA
catctgttatcctagctact

SEQ ID NO: 19052 - DNA, 20 bp, synthetic construct
  misc_feature 1..20: note = Description of Artificial Sequence: Synthetic oligonucleotide
  misc_feature 1..20: note = Target: SCN10A; (-) strand; PAM type: NRG; PAM sequence: TAG
  source 1..20: mol_type = other DNA
gtggtgcacatctgttatcc

SEQ ID NO: 19053 - DNA, 20 bp, synthetic construct
  misc_feature 1..20: note = Description of Artificial Sequence: Synthetic oligonucleotide
  misc_feature 1..20: note = Target: SCN10A; (-) strand; PAM type: NRG; PAM sequence: TGG
  source 1..20: mol_type = other DNA
aaaaaattagccaggcatgg

SEQ ID NO: 19054 - DNA, 20 bp, synthetic construct
  misc_feature 1..20: note = Description of Artificial Sequence: Synthetic oligonucleotide
  misc_feature 1..20: note = Target: SCN10A; (-) strand; PAM type: NRG; PAM sequence: TGG
  source 1..20: mol_type = other DNA
atgaaaaaattagccaggca

SEQ ID NO: 19055 - DNA, 20 bp, synthetic construct
  misc_feature 1..20: note = Description of Artificial Sequence: Synthetic oligonucleotide
  misc_feature 1..20: note = Target: SCN10A; (-) strand; PAM type: NRG; PAM sequence: AGG
  source 1..20: mol_type = other DNA
aaaaaatgaaaaaattagcc

SEQ ID NO: 19056 - DNA, 20 bp, synthetic construct
  misc_feature 1..20: note = Description of Artificial Sequence: Synthetic oligonucleotide
  misc_feature 1..20: note = Target: SCN10A; (-) strand; PAM type: NRG; PAM sequence: CAG
  source 1..20: mol_type = other DNA
caaaaaatgaaaaaattagc

SEQ ID NO: 19057 - DNA, 20 bp, synthetic construct
  misc_feature 1..20: note = Description of Artificial Sequence: Synthetic oligonucleotide
  misc_feature 1..20: note = Target: SCN10A; (-) strand; PAM type: NRG; PAM sequence: TAG
  source 1..20: mol_type = other DNA
tctacaaaaaatgaaaaaat

SEQ ID NO: 19058 - DNA, 20 bp, synthetic construct
  misc_feature 1..20: note = Description of Artificial Sequence: Synthetic oligonucleotide
  misc_feature 1..20: note = Target: SCN10A; (-) strand; PAM type: NRG; PAM sequence: TGG
  source 1..20: mol_type = other DNA
ccaggagttcaagggcaaca

SEQ ID NO: 19059 - DNA, 20 bp, synthetic construct
  misc_feature 1..20: note = Description of Artificial Sequence: Synthetic oligonucleotide
  misc_feature 1..20: note = Target: SCN10A; (-) strand; PAM type: NRG; PAM sequence: GGG
  source 1..20: mol_type = other DNA
gcttgagcccaggagttcaa

SEQ ID NO: 19060 - DNA, 20 bp, synthetic construct
  misc_feature 1..20: note = Description of Artificial Sequence: Synthetic oligonucleotide
  misc_feature 1..20: note = Target: SCN10A; (-) strand; PAM type: NRG; PAM sequence: AGG
  source 1..20: mol_type = other DNA
cgcttgagcccaggagttca

SEQ ID NO: 19061 - DNA, 20 bp, synthetic construct
  misc_feature 1..20: note = Description of Artificial Sequence: Synthetic oligonucleotide
  misc_feature 1..20: note = Target: SCN10A; (-) strand; PAM type: NRG; PAM sequence: AAG
  source 1..20: mol_type = other DNA
tcgcttgagcccaggagttc

SEQ ID NO: 19062 - DNA, 20 bp, synthetic construct
  misc_feature 1..20: note = Description of Artificial Sequence: Synthetic oligonucleotide
  misc_feature 1..20: note = Target: SCN10A; (-) strand; PAM type: NRG; PAM sequence: GAG
  source 1..20: mol_type = other DNA
ggcagatcgcttgagcccag

SEQ ID NO: 19063 - DNA, 20 bp, synthetic construct
  misc_feature 1..20: note = Description of Artificial Sequence: Synthetic oligonucleotide
  misc_feature 1..20: note = Target: SCN10A; (-) strand; PAM type: NRG; PAM sequence: AGG
  source 1..20: mol_type = other DNA
caggcagatcgcttgagccc

SEQ ID NO: 19064 - DNA, 20 bp, synthetic construct
  misc_feature 1..20: note = Description of Artificial Sequence: Synthetic oligonucleotide
  misc_feature 1..20: note = Target: SCN10A; (-) strand; PAM type: NRG; PAM sequence: CAG
  source 1..20: mol_type = other DNA
gcaggcagatcgcttgagcc

SEQ ID NO: 19065 - DNA, 20 bp, synthetic construct
  misc_feature 1..20: note = Description of Artificial Sequence: Synthetic oligonucleotide
  misc_feature 1..20: note = Target: SCN10A; (-) strand; PAM type: NRG; PAM sequence: GAG
  source 1..20: mol_type = other DNA
ccgaggcaggcagatcgctt

SEQ ID NO: 19066 - DNA, 20 bp, synthetic construct
  misc_feature 1..20: note = Description of Artificial Sequence: Synthetic oligonucleotide
  misc_feature 1..20: note = Target: SCN10A; (-) strand; PAM type: NRG; PAM sequence: CAG
  source 1..20: mol_type = other DNA
ctttgggaggccgaggcagg

SEQ ID NO: 19067 - DNA, 20 bp, synthetic construct
  misc_feature 1..20: note = Description of Artificial Sequence: Synthetic oligonucleotide
  misc_feature 1..20: note = Target: SCN10A; (-) strand; PAM type: NRG; PAM sequence: AGG
  source 1..20: mol_type = other DNA
gtactttgggaggccgaggc

SEQ ID NO: 19068 - DNA, 20 bp, synthetic construct
  misc_feature 1..20: note = Description of Artificial Sequence: Synthetic oligonucleotide
  misc_feature 1..20: note = Target: SCN10A; (-) strand; PAM type: NRG; PAM sequence: CAG
  source 1..20: mol_type = other DNA
agtactttgggaggccgagg

SEQ ID NO: 19069 - DNA, 20 bp, synthetic construct
  misc_feature 1..20: note = Description of Artificial Sequence: Synthetic oligonucleotide
  misc_feature 1..20: note = Target: SCN10A; (-) strand; PAM type: NRG; PAM sequence: AGG
  source 1..20: mol_type = other DNA
cctagtactttgggaggccg

SEQ ID NO: 19070 - DNA, 20 bp, synthetic construct
  misc_feature 1..20: note = Description of Artificial Sequence: Synthetic oligonucleotide
  misc_feature 1..20: note = Target: SCN10A; (-) strand; PAM type: NRG; PAM sequence: GAG
  source 1..20: mol_type = other DNA
tcctagtactttgggaggcc

SEQ ID NO: 19071 - DNA, 20 bp, synthetic construct
  misc_feature 1..20: note = Description of Artificial Sequence: Synthetic oligonucleotide
  misc_feature 1..20: note = Target: SCN10A; (-) strand; PAM type: NRG; PAM sequence: AGG
  source 1..20: mol_type = other DNA
tgtaatcctagtactttggg

SEQ ID NO: 19072 - DNA, 20 bp, synthetic construct
  misc_feature 1..20: note = Description of Artificial Sequence: Synthetic oligonucleotide
  misc_feature 1..20: note = Target: SCN10A; (-) strand; PAM type: NRG; PAM sequence: GAG
  source 1..20: mol_type = other DNA
ctgtaatcctagtactttgg

SEQ ID NO: 19073 - DNA, 20 bp, synthetic construct
  misc_feature 1..20: note = Description of Artificial Sequence: Synthetic oligonucleotide
  misc_feature 1..20: note = Target: SCN10A; (-) strand; PAM type: NRG; PAM sequence: GGG
  source 1..20: mol_type = other DNA
acctgtaatcctagtacttt

SEQ ID NO: 19074 - DNA, 20 bp, synthetic construct
  misc_feature 1..20: note = Description of Artificial Sequence: Synthetic oligonucleotide
  misc_feature 1..20: note = Target: SCN10A; (-) strand; PAM type: NRG; PAM sequence: TGG
  source 1..20: mol_type = other DNA
cacctgtaatcctagtactt

SEQ ID NO: 19075 - DNA, 20 bp, synthetic construct
  misc_feature 1..20: note = Description of Artificial Sequence: Synthetic oligonucleotide
  misc_feature 1..20: note = Target: SCN10A; (-) strand; PAM type: NRG; PAM sequence: TAG
  source 1..20: mol_type = other DNA
gtggctcacacctgtaatcc

SEQ ID NO: 19076 - DNA, 20 bp, synthetic construct
  misc_feature 1..20: note = Description of Artificial Sequence: Synthetic oligonucleotide
  misc_feature 1..20: note = Target: SCN10A; (-) strand; PAM type: NRG; PAM sequence: TGG
  source 1..20: mol_type = other DNA
ccatctcaggccaggtgcag

SEQ ID NO: 19077 - DNA, 20 bp, synthetic construct
  misc_feature 1..20: note = Description of Artificial Sequence: Synthetic oligonucleotide
  misc_feature 1..20: note = Target: SCN10A; (-) strand; PAM type: NRG; PAM sequence: CAG
  source 1..20: mol_type = other DNA
tgaccatctcaggccaggtg

SEQ ID NO: 19078 - DNA, 20 bp, synthetic construct
  misc_feature 1..20: note = Description of Artificial Sequence: Synthetic oligonucleotide
  misc_feature 1..20: note = Target: SCN10A; (-) strand; PAM type: NRG; PAM sequence: AGG
  source 1..20: mol_type = other DNA
caatgtgaccatctcaggcc

SEQ ID NO: 19079 - DNA, 20 bp, synthetic construct
  misc_feature 1..20: note = Description of Artificial Sequence: Synthetic oligonucleotide
  misc_feature 1..20: note = Target: SCN10A; (-) strand; PAM type: NRG; PAM sequence: CAG
  source 1..20: mol_type = other DNA
tcaatgtgaccatctcaggc

SEQ ID NO: 19080 - DNA, 20 bp, synthetic construct
  misc_feature 1..20: note = Description of Artificial Sequence: Synthetic oligonucleotide
  misc_feature 1..20: note = Target: SCN10A; (-) strand; PAM type: NRG; PAM sequence: AGG
  source 1..20: mol_type = other DNA
gaaatcaatgtgaccatctc

SEQ ID NO: 19081 - DNA, 20 bp, synthetic construct
  misc_feature 1..20: note = Description of Artificial Sequence: Synthetic oligonucleotide
  misc_feature 1..20: note = Target: SCN10A; (-) strand; PAM type: NRG; PAM sequence: CAG
  source 1..20: mol_type = other DNA
agaaatcaatgtgaccatct

SEQ ID NO: 19082 - DNA, 20 bp, synthetic construct
  misc_feature 1..20: note = Description of Artificial Sequence: Synthetic oligonucleotide
  misc_feature 1..20: note = Target: SCN10A; (-) strand; PAM type: NRG; PAM sequence: TAG
  source 1..20: mol_type = other DNA
tcctgggagggatgtttaca

SEQ ID NO: 19083 - DNA, 20 bp, synthetic construct
  misc_feature 1..20: note = Description of Artificial Sequence: Synthetic oligonucleotide
  misc_feature 1..20: note = Target: SCN10A; (-) strand; PAM type: NRG; PAM sequence: GGG
  source 1..20: mol_type = other DNA
gcagtgcacaactcctggga

SEQ ID NO: 19084 - DNA, 20 bp, synthetic construct
  misc_feature 1..20: note = Description of Artificial Sequence: Synthetic oligonucleotide
  misc_feature 1..20: note = Target: SCN10A; (-) strand; PAM type: NRG; PAM sequence: AGG
  source 1..20: mol_type = other DNA
agcagtgcacaactcctggg

SEQ ID NO: 19085 - DNA, 20 bp, synthetic construct
  misc_feature 1..20: note = Description of Artificial Sequence: Synthetic oligonucleotide
  misc_feature 1..20: note = Target: SCN10A; (-) strand; PAM type: NRG; PAM sequence: GAG
  source 1..20: mol_type = other DNA
aagcagtgcacaactcctgg

SEQ ID NO: 19086 - DNA, 20 bp, synthetic construct
  misc_feature 1..20: note = Description of Artificial Sequence: Synthetic oligonucleotide
  misc_feature 1..20: note = Target: SCN10A; (-) strand; PAM type: NRG; PAM sequence: GGG
  source 1..20: mol_type = other DNA
caaagcagtgcacaactcct

SEQ ID NO: 19087 - DNA, 20 bp, synthetic construct
  misc_feature 1..20: note = Description of Artificial Sequence: Synthetic oligonucleotide
  misc_feature 1..20: note = Target: SCN10A; (-) strand; PAM type: NRG; PAM sequence: TGG
  source 1..20: mol_type = other DNA
ccaaagcagtgcacaactcc

SEQ ID NO: 19088 - DNA, 20 bp, synthetic construct
  misc_feature 1..20: note = Description of Artificial Sequence: Synthetic oligonucleotide
  misc_feature 1..20: note = Target: SCN10A; (-) strand; PAM type: NRG; PAM sequence: CAG
  source 1..20: mol_type = other DNA
tcacctaggcagacccaaag

SEQ ID NO: 19089 - DNA, 20 bp, synthetic construct
  misc_feature 1..20: note = Description of Artificial Sequence: Synthetic oligonucleotide
  misc_feature 1..20: note = Target: SCN10A; (-) strand; PAM type: NRG; PAM sequence: AAG
  source 1..20: mol_type = other DNA
atttcacctaggcagaccca

SEQ ID NO: 19090 - DNA, 20 bp, synthetic construct
  misc_feature 1..20: note = Description of Artificial Sequence: Synthetic oligonucleotide
  misc_feature 1..20: note = Target: SCN10A; (-) strand; PAM type: NRG; PAM sequence: CAG
  source 1..20: mol_type = other DNA
atgactccatttcacctagg

SEQ ID NO: 19091 - DNA, 20 bp, synthetic construct
  misc_feature 1..20: note = Description of Artificial Sequence: Synthetic oligonucleotide
  misc_feature 1..20: note = Target: SCN10A; (-) strand; PAM type: NRG; PAM sequence: AGG
  source 1..20: mol_type = other DNA
aagatgactccatttcacct

SEQ ID NO: 19092 - DNA, 20 bp, synthetic construct
  misc_feature 1..20: note = Description of Artificial Sequence: Synthetic oligonucleotide
  misc_feature 1..20: note = Target: SCN10A; (-) strand; PAM type: NRG; PAM sequence: TAG
  source 1..20: mol_type = other DNA
aaagatgactccatttcacc

SEQ ID NO: 19093 - DNA, 20 bp, synthetic construct
  misc_feature 1..20: note = Description of Artificial Sequence: Synthetic oligonucleotide
  misc_feature 1..20: note = Target: SCN10A; (-) strand; PAM type: NRG; PAM sequence: AAG
  source 1..20: mol_type = other DNA
ttgcctcaggtagacaggca

SEQ ID NO: 19094 - DNA, 20 bp, synthetic construct
  misc_feature 1..20: note = Description of Artificial Sequence: Synthetic oligonucleotide
  misc_feature 1..20: note = Target: SCN10A; (-) strand; PAM type: NRG; PAM sequence: AGG
  source 1..20: mol_type = other DNA
gatatttgcctcaggtagac

SEQ ID NO: 19095 - DNA, 20 bp, synthetic construct
  misc_feature 1..20: note = Description of Artificial Sequence: Synthetic oligonucleotide
  misc_feature 1..20: note = Target: SCN10A; (-) strand; PAM type: NRG; PAM sequence: CAG
  source 1..20: mol_type = other DNA
ggatatttgcctcaggtaga

SEQ ID NO: 19096 - DNA, 20 bp, synthetic construct
  misc_feature 1..20: note = Description of Artificial Sequence: Synthetic oligonucleotide
  misc_feature 1..20: note = Target: SCN10A; (-) strand; PAM type: NRG; PAM sequence: TAG
  source 1..20: mol_type = other DNA
cactggatatttgcctcagg

SEQ ID NO: 19097 - DNA, 20 bp, synthetic construct
  misc_feature 1..20: note = Description of Artificial Sequence: Synthetic oligonucleotide
  misc_feature 1..20: note = Target: SCN10A; (-) strand; PAM type: NRG; PAM sequence: AGG
  source 1..20: mol_type = other DNA
gggcactggatatttgcctc

SEQ ID NO: 19098 - DNA, 20 bp, synthetic construct
  misc_feature 1..20: note = Description of Artificial Sequence: Synthetic oligonucleotide
  misc_feature 1..20: note = Target: SCN10A; (-) strand; PAM type: NRG; PAM sequence: CAG
  source 1..20: mol_type = other DNA
tgggcactggatatttgcct

SEQ ID NO: 19099 - DNA, 20 bp, synthetic construct
  misc_feature 1..20: note = Description of Artificial Sequence: Synthetic oligonucleotide
  misc_feature 1..20: note = Target: SCN10A; (-) strand; PAM type: NRG; PAM sequence: TGG
  source 1..20: mol_type = other DNA
catggaagagatgtgggcac

SEQ ID NO: 19100 - DNA, 20 bp, synthetic construct
  misc_feature 1..20: note = Description of Artificial Sequence: Synthetic oligonucleotide
  misc_feature 1..20: note = Target: SCN10A; (-) strand; PAM type: NRG; PAM sequence: GGG
  source 1..20: mol_type = other DNA
gccagccatggaagagatgt

SEQ ID NO: 19101 - DNA, 20 bp, synthetic construct
  misc_feature 1..20: note = Description of Artificial Sequence: Synthetic oligonucleotide
  misc_feature 1..20: note = Target: SCN10A; (-) strand; PAM type: NRG; PAM sequence: TGG
  source 1..20: mol_type = other DNA
agccagccatggaagagatg

SEQ ID NO: 19102 - DNA, 20 bp, synthetic construct
  misc_feature 1..20: note = Description of Artificial Sequence: Synthetic oligonucleotide
  misc_feature 1..20: note = Target: SCN10A; (-) strand; PAM type: NRG; PAM sequence: GAG
  source 1..20: mol_type = other DNA
acatagagccagccatggaa

SEQ ID NO: 19103 - DNA, 20 bp, synthetic construct
  misc_feature 1..20: note = Description of Artificial Sequence: Synthetic oligonucleotide
  misc_feature 1..20: note = Target: SCN10A; (-) strand; PAM type: NRG; PAM sequence: AAG
  source 1..20: mol_type = other DNA
tgacatagagccagccatgg

SEQ ID NO: 19104 - DNA, 20 bp, synthetic construct
  misc_feature 1..20: note = Description of Artificial Sequence: Synthetic oligonucleotide
  misc_feature 1..20: note = Target: SCN10A; (-) strand; PAM type: NRG; PAM sequence: TGG
  source 1..20: mol_type = other DNA
cagtgacatagagccagcca

SEQ ID NO: 19105 - DNA, 20 bp, synthetic construct
  misc_feature 1..20: note = Description of Artificial Sequence: Synthetic oligonucleotide
  misc_feature 1..20: note = Target: SCN10A; (-) strand; PAM type: NRG; PAM sequence: CAG
  source 1..20: mol_type = other DNA
catgtgcagtgacatagagc

SEQ ID NO: 19106 - DNA, 20 bp, synthetic construct
  misc_feature 1..20: note = Description of Artificial Sequence: Synthetic oligonucleotide
  misc_feature 1..20: note = Target: SCN10A; (-) strand; PAM type: NRG; PAM sequence: GAG
  source 1..20: mol_type = other DNA
tgcccatgtgcagtgacata

SEQ ID NO: 19107 - DNA, 20 bp, synthetic construct
  misc_feature 1..20: note = Description of Artificial Sequence: Synthetic oligonucleotide
  misc_feature 1..20: note = Target: SCN10A; (-) strand; PAM type: NRG; PAM sequence: TAG
  source 1..20: mol_type = other DNA
aatgcccatgtgcagtgaca

SEQ ID NO: 19108 - DNA, 20 bp, synthetic construct
  misc_feature 1..20: note = Description of Artificial Sequence: Synthetic oligonucleotide
  misc_feature 1..20: note = Target: SCN10A; (-) strand; PAM type: NRG; PAM sequence: CAG
  source 1..20: mol_type = other DNA
caaactcaaatgcccatgtg

SEQ ID NO: 19109 - DNA, 20 bp, synthetic construct
  misc_feature 1..20: note = Description of Artificial Sequence: Synthetic oligonucleotide
  misc_feature 1..20: note = Target: SCN10A; (-) strand; PAM type: NRG; PAM sequence: TGG
  source 1..20: mol_type = other DNA
tggcgtacctggattagggg

SEQ ID NO: 19110 - DNA, 20 bp, synthetic construct
  misc_feature 1..20: note = Description of Artificial Sequence: Synthetic oligonucleotide
  misc_feature 1..20: note = Target: SCN10A; (-) strand; PAM type: NRG; PAM sequence: GGG
  source 1..20: mol_type = other DNA
acttggcgtacctggattag

SEQ ID NO: 19111 - DNA, 20 bp, synthetic construct
  misc_feature 1..20: note = Description of Artificial Sequence: Synthetic oligonucleotide
  misc_feature 1..20: note = Target: SCN10A; (-) strand; PAM type: NRG; PAM sequence: GGG
  source 1..20: mol_type = other DNA
aacttggcgtacctggatta

SEQ ID NO: 19112 - DNA, 20 bp, synthetic construct
  misc_feature 1..20: note = Description of Artificial Sequence: Synthetic oligonucleotide
  misc_feature 1..20: note = Target: SCN10A; (-) strand; PAM type: NRG; PAM sequence: AGG
  source 1..20: mol_type = other DNA
gaacttggcgtacctggatt

SEQ ID NO: 19113 - DNA, 20 bp, synthetic construct
  misc_feature 1..20: note = Description of Artificial Sequence: Synthetic oligonucleotide
  misc_feature 1..20: note = Target: SCN10A; (-) strand; PAM type: NRG; PAM sequence: TAG
  source 1..20: mol_type = other DNA
tgaacttggcgtacctggat

SEQ ID NO: 19114 - DNA, 20 bp, synthetic construct
  misc_feature 1..20: note = Description of Artificial Sequence: Synthetic oligonucleotide
  misc_feature 1..20: note = Target: SCN10A; (-) strand; PAM type: NRG; PAM sequence: TGG
  source 1..20: mol_type = other DNA
gcccctgaacttggcgtacc

SEQ ID NO: 19115 - DNA, 20 bp, synthetic construct
  misc_feature 1..20: note = Description of Artificial Sequence: Synthetic oligonucleotide
  misc_feature 1..20: note = Target: SCN10A; (-) strand; PAM type: NRG; PAM sequence: TGG
  source 1..20: mol_type = other DNA
cagtgctgagcccctgaact

SEQ ID NO: 19116 - DNA, 20 bp, synthetic construct
  misc_feature 1..20: note = Description of Artificial Sequence: Synthetic oligonucleotide
  misc_feature 1..20: note = Target: SCN10A; (-) strand; PAM type: NRG; PAM sequence: GAG
  source 1..20: mol_type = other DNA
ggggccagtgagacagtgct

SEQ ID NO: 19117 - DNA, 20 bp, synthetic construct
  misc_feature 1..20: note = Description of Artificial Sequence: Synthetic oligonucleotide
  misc_feature 1..20: note = Target: SCN10A; (-) strand; PAM type: NRG; PAM sequence: CAG
  source 1..20: mol_type = other DNA
tatcacaggggccagtgaga

SEQ ID NO: 19118 - DNA, 20 bp, synthetic construct
  misc_feature 1..20: note = Description of Artificial Sequence: Synthetic oligonucleotide
  misc_feature 1..20: note = Target: SCN10A; (-) strand; PAM type: NRG; PAM sequence: GAG
  source 1..20: mol_type = other DNA
accctatcacaggggccagt

SEQ ID NO: 19119 - DNA, 20 bp, synthetic construct
  misc_feature 1..20: note = Description of Artificial Sequence: Synthetic oligonucleotide
  misc_feature 1..20: note = Target: SCN10A; (-) strand; PAM type: NRG; PAM sequence: CAG
  source 1..20: mol_type = other DNA
tgggaccctatcacaggggc

SEQ ID NO: 19120 - DNA, 20 bp, synthetic construct
  misc_feature 1..20: note = Description of Artificial Sequence: Synthetic oligonucleotide
  misc_feature 1..20: note = Target: SCN10A; (-) strand; PAM type: NRG; PAM sequence: GGG
  source 1..20: mol_type = other DNA
tgcttgggaccctatcacag

SEQ ID NO: 19121 - DNA, 20 bp, synthetic construct
  misc_feature 1..20: note = Description of Artificial Sequence: Synthetic oligonucleotide
  misc_feature 1..20: note = Target: SCN10A; (-) strand; PAM type: NRG; PAM sequence: GGG
  source 1..20: mol_type = other DNA
ctgcttgggaccctatcaca

SEQ ID NO: 19122 - DNA, 20 bp, synthetic construct
  misc_feature 1..20: note = Description of Artificial Sequence: Synthetic oligonucleotide
  misc_feature 1..20: note = Target: SCN10A; (-) strand; PAM type: NRG; PAM sequence: AGG
  source 1..20: mol_type = other DNA
tctgcttgggaccctatcac

SEQ ID NO: 19123 - DNA, 20 bp, synthetic construct
  misc_feature 1..20: note = Description of Artificial Sequence: Synthetic oligonucleotide
  misc_feature 1..20: note = Target: SCN10A; (-) strand; PAM type: NRG; PAM sequence: CAG
  source 1..20: mol_type = other DNA
atctgcttgggaccctatca

SEQ ID NO: 19124 - DNA, 20 bp, synthetic construct
  misc_feature 1..20: note = Description of Artificial Sequence: Synthetic oligonucleotide
  misc_feature 1..20: note = Target: SCN10A; (-) strand; PAM type: NRG; PAM sequence: GGG
  source 1..20: mol_type = other DNA
actctaggacagatctgctt

SEQ ID NO: 19125 - DNA, 20 bp, synthetic construct
  misc_feature 1..20: note = Description of Artificial Sequence: Synthetic oligonucleotide
  misc_feature 1..20: note = Target: SCN10A; (-) strand; PAM type: NRG; PAM sequence: TGG
  source 1..20: mol_type = other DNA
gactctaggacagatctgct

SEQ ID NO: 19126 - DNA, 20 bp, synthetic construct
  misc_feature 1..20: note = Description of Artificial Sequence: Synthetic oligonucleotide
  misc_feature 1..20: note = Target: SCN10A; (-) strand; PAM type: NRG; PAM sequence: CAG
  source 1..20: mol_type = other DNA
gaggcaacgagactctagga

SEQ ID NO: 19127 - DNA, 20 bp, synthetic construct
  misc_feature 1..20: note = Description of Artificial Sequence: Synthetic oligonucleotide
  misc_feature 1..20: note = Target: SCN10A; (-) strand; PAM type: NRG; PAM sequence: AGG
  source 1..20: mol_type = other DNA
tcaggaggcaacgagactct

SEQ ID NO: 19128 - DNA, 20 bp, synthetic construct
  misc_feature 1..20: note = Description of Artificial Sequence: Synthetic oligonucleotide
  misc_feature 1..20: note = Target: SCN10A; (-) strand; PAM type: NRG; PAM sequence: TAG
  source 1..20: mol_type = other DNA
ttcaggaggcaacgagactc

SEQ ID NO: 19129 - DNA, 20 bp, synthetic construct
  misc_feature 1..20: note = Description of Artificial Sequence: Synthetic oligonucleotide
  misc_feature 1..20: note = Target: SCN10A; (-) strand; PAM type: NRG; PAM sequence: GAG
  source 1..20: mol_type = other DNA
tgcatggttcaggaggcaac

SEQ ID NO: 19130 - DNA, 20 bp, synthetic construct
  misc_feature 1..20: note = Description of Artificial Sequence: Synthetic oligonucleotide
  misc_feature 1..20: note = Target: SCN10A; (-) strand; PAM type: NRG; PAM sequence: AGG
  source 1..20: mol_type = other DNA
aagggggtgcatggttcagg

SEQ ID NO: 19131 - DNA, 20 bp, synthetic construct
  misc_feature 1..20: note = Description of Artificial Sequence: Synthetic oligonucleotide
  misc_feature 1..20: note = Target: SCN10A; (-) strand; PAM type: NRG; PAM sequence: GAG
  source 1..20: mol_type = other DNA
gaagggggtgcatggttcag

SEQ ID NO: 19132 - DNA, 20 bp, synthetic construct
  misc_feature 1..20: note = Description of Artificial Sequence: Synthetic oligonucleotide
  misc_feature 1..20: note = Target: SCN10A; (-) strand; PAM type: NRG; PAM sequence: AGG
  source 1..20: mol_type = other DNA
ttgaagggggtgcatggttc

SEQ ID NO: 19133 - DNA, 20 bp, synthetic construct
  misc_feature 1..20: note = Description of Artificial Sequence: Synthetic oligonucleotide
  misc_feature 1..20: note = Target: SCN10A; (-) strand; PAM type: NRG; PAM sequence: CAG
  source 1..20: mol_type = other DNA
gttgaagggggtgcatggtt

SEQ ID NO: 19134 - DNA, 20 bp, synthetic construct
  misc_feature 1..20: note = Description of Artificial Sequence: Synthetic oligonucleotide
  misc_feature 1..20: note = Target: SCN10A; (-) strand; PAM type: NRG; PAM sequence: TGG
  source 1..20: mol_type = other DNA
cagaggttgaagggggtgca

SEQ ID NO: 19135 - DNA, 20 bp, synthetic construct
  misc_feature 1..20: note = Description of Artificial Sequence: Synthetic oligonucleotide
  misc_feature 1..20: note = Target: SCN10A; (-) strand; PAM type: NRG; PAM sequence: GGG
  source 1..20: mol_type = other DNA
tggcatccagaggttgaagg

SEQ ID NO: 19136 - DNA, 20 bp, synthetic construct
  misc_feature 1..20: note = Description of Artificial Sequence: Synthetic oligonucleotide
  misc_feature 1..20: note = Target: SCN10A; (-) strand; PAM type: NRG; PAM sequence: GGG
  source 1..20: mol_type = other DNA
ttggcatccagaggttgaag

SEQ ID NO: 19137 - DNA, 20 bp, synthetic construct
  misc_feature 1..20: note = Description of Artificial Sequence: Synthetic oligonucleotide
  misc_feature 1..20: note = Target: SCN10A; (-) strand; PAM type: NRG; PAM sequence: GGG
  source 1..20: mol_type = other DNA
gttggcatccagaggttgaa

SEQ ID NO: 19138 - DNA, 20 bp, synthetic construct
  misc_feature 1..20: note = Description of Artificial Sequence: Synthetic oligonucleotide
  misc_feature 1..20: note = Target: SCN10A; (-) strand; PAM type: NRG; PAM sequence: AGG
  source 1..20: mol_type = other DNA
tgttggcatccagaggttga

SEQ ID NO: 19139 - DNA, 20 bp, synthetic construct
  misc_feature 1..20: note = Description of Artificial Sequence: Synthetic oligonucleotide
  misc_feature 1..20: note = Target: SCN10A; (-) strand; PAM type: NRG; PAM sequence: AAG
  source 1..20: mol_type = other DNA
gtgttggcatccagaggttg

SEQ ID NO: 19140 - DNA, 20 bp, synthetic construct
  misc_feature 1..20: note = Description of Artificial Sequence: Synthetic oligonucleotide
  misc_feature 1..20: note = Target: SCN10A; (-) strand; PAM type: NRG; PAM sequence: AGG
  source 1..20: mol_type = other DNA
tgacaagtgttggcatccag

SEQ ID NO: 19141 - DNA, 20 bp, synthetic construct
  misc_feature 1..20: note = Description of Artificial Sequence: Synthetic oligonucleotide
  misc_feature 1..20: note = Target: SCN10A; (-) strand; PAM type: NRG; PAM sequence: GAG
  source 1..20: mol_type = other DNA
ctgacaagtgttggcatcca

SEQ ID NO: 19142 - DNA, 20 bp, synthetic construct
  misc_feature 1..20: note = Description of Artificial Sequence: Synthetic oligonucleotide
  misc_feature 1..20: note = Target: SCN10A; (-) strand; PAM type: NRG; PAM sequence: CAG
  source 1..20: mol_type = other DNA
tcctgacaagtgttggcatc

SEQ ID NO: 19143 - DNA, 20 bp, synthetic construct
  misc_feature 1..20: note = Description of Artificial Sequence: Synthetic oligonucleotide
  misc_feature 1..20: note = Target: SCN10A; (-) strand; PAM type: NRG; PAM sequence: TGG
  source 1..20: mol_type = other DNA
cccaaggtcctgacaagtgt

SEQ ID NO: 19144 - DNA, 20 bp, synthetic construct
  misc_feature 1..20: note = Description of Artificial Sequence: Synthetic oligonucleotide
  misc_feature 1..20: note = Target: SCN10A; (-) strand; PAM type: NRG; PAM sequence: AAG
  source 1..20: mol_type = other DNA
aatcttcccaaggtcctgac

SEQ ID NO: 19145 - DNA, 20 bp, synthetic construct
  misc_feature 1..20: note = Description of Artificial Sequence: Synthetic oligonucleotide
  misc_feature 1..20: note = Target: SCN10A; (-) strand; PAM type: NRG; PAM sequence: AGG
  source 1..20: mol_type = other DNA
agtatccaacaatcttccca

SEQ ID NO: 19146 - DNA, 20 bp, synthetic construct
  misc_feature 1..20: note = Description of Artificial Sequence: Synthetic oligonucleotide
  misc_feature 1..20: note = Target: SCN10A; (-) strand; PAM type: NRG; PAM sequence: AAG
  source 1..20: mol_type = other DNA
gagtatccaacaatcttccc

SEQ ID NO: 19147 - DNA, 20 bp, synthetic construct
  misc_feature 1..20: note = Description of Artificial Sequence: Synthetic oligonucleotide
  misc_feature 1..20: note = Target: SCN10A; (-) strand; PAM type: NRG; PAM sequence: GAG
  source 1..20: mol_type = other DNA
agaggtgacaaaacaaaggg

SEQ ID NO: 19148 - DNA, 20 bp, synthetic construct
  misc_feature 1..20: note = Description of Artificial Sequence: Synthetic oligonucleotide
  misc_feature 1..20: note = Target: SCN10A; (-) strand; PAM type: NRG; PAM sequence: GGG
  source 1..20: mol_type = other DNA
agagaggtgacaaaacaaag

SEQ ID NO: 19149 - DNA, 20 bp, synthetic construct
  misc_feature 1..20: note = Description of Artificial Sequence: Synthetic oligonucleotide
  misc_feature 1..20: note = Target: SCN10A; (-) strand; PAM type: NRG; PAM sequence: GGG
  source 1..20: mol_type = other DNA
aagagaggtgacaaaacaaa

SEQ ID NO: 19150 - DNA, 20 bp, synthetic construct
  misc_feature 1..20: note = Description of Artificial Sequence: Synthetic oligonucleotide
  misc_feature 1..20: note = Target: SCN10A; (-) strand; PAM type: NRG; PAM sequence: AGG
  source 1..20: mol_type = other DNA
gaagagaggtgacaaaacaa

SEQ ID NO: 19151 - DNA, 20 bp, synthetic construct
  misc_feature 1..20: note = Description of Artificial Sequence: Synthetic oligonucleotide
  misc_feature 1..20: note = Target: SCN10A; (-) strand; PAM type: NRG; PAM sequence: AAG
  source 1..20: mol_type = other DNA
tgaagagaggtgacaaaaca

SEQ ID NO: 19152 - DNA, 20 bp, synthetic construct
  misc_feature 1..20: note = Description of Artificial Sequence: Synthetic oligonucleotide
  misc_feature 1..20: note = Target: SCN10A; (-) strand; PAM type: NRG; PAM sequence: AGG
  source 1..20: mol_type = other DNA
ctgcatctagacttgaagag

SEQ ID NO: 19153 - DNA, 20 bp, synthetic construct
  misc_feature 1..20: note = Description of Artificial Sequence: Synthetic oligonucleotide
  misc_feature 1..20: note = Target: SCN10A; (-) strand; PAM type: NRG; PAM sequence: GAG
  source 1..20: mol_type = other DNA
cctgcatctagacttgaaga

SEQ ID NO: 19154 - DNA, 20 bp, synthetic construct
  misc_feature 1..20: note = Description of Artificial Sequence: Synthetic oligonucleotide
  misc_feature 1..20: note = Target: SCN10A; (-) strand; PAM type: NRG; PAM sequence: GAG
  source 1..20: mol_type = other DNA
gccctgcatctagacttgaa

SEQ ID NO: 19155 - DNA, 20 bp, synthetic construct
  misc_feature 1..20: note = Description of Artificial Sequence: Synthetic oligonucleotide
  misc_feature 1..20: note = Target: SCN10A; (-) strand; PAM type: NRG; PAM sequence: AAG
  source 1..20: mol_type = other DNA
gagccctgcatctagacttg

SEQ ID NO: 19156 - DNA, 20 bp, synthetic construct
  misc_feature 1..20: note = Description of Artificial Sequence: Synthetic oligonucleotide
  misc_feature 1..20: note = Target: SCN10A; (-) strand; PAM type: NRG; PAM sequence: TAG
  source 1..20: mol_type = other DNA
ttaactgggagccctgcatc

SEQ ID NO: 19157 - DNA, 20 bp, synthetic construct
  misc_feature 1..20: note = Description of Artificial Sequence: Synthetic oligonucleotide
  misc_feature 1..20: note = Target: SCN10A; (-) strand; PAM type: NRG; PAM sequence: GAG
  source 1..20: mol_type = other DNA
aatctctcagtattaactgg

SEQ ID NO: 19158 - DNA, 20 bp, synthetic construct
  misc_feature 1..20: note = Description of Artificial Sequence: Synthetic oligonucleotide
  misc_feature 1..20: note = Target: SCN10A; (-) strand; PAM type: NRG; PAM sequence: GGG
  source 1..20: mol_type = other DNA
ggaatctctcagtattaact

SEQ ID NO: 19159 - DNA, 20 bp, synthetic construct
  misc_feature 1..20: note = Description of Artificial Sequence: Synthetic oligonucleotide
  misc_feature 1..20: note = Target: SCN10A; (-) strand; PAM type: NRG; PAM sequence: TGG
  source 1..20: mol_type = other DNA
aggaatctctcagtattaac

SEQ ID NO: 19160 - DNA, 20 bp, synthetic construct
  misc_feature 1..20: note = Description of Artificial Sequence: Synthetic oligonucleotide
  misc_feature 1..20: note = Target: SCN10A; (-) strand; PAM type: NRG; PAM sequence: CAG
  source 1..20: mol_type = other DNA
gcctgctctcaggaatctct

SEQ ID NO: 19161 - DNA, 20 bp, synthetic construct
  misc_feature 1..20: note = Description of Artificial Sequence: Synthetic oligonucleotide
  misc_feature 1..20: note = Target: SCN10A; (-) strand; PAM type: NRG; PAM sequence: AGG
  source 1..20: mol_type = other DNA
agcgcaggccgcctgctctc

SEQ ID NO: 19162 - DNA, 20 bp, synthetic construct
  misc_feature 1..20: note = Description of Artificial Sequence: Synthetic oligonucleotide
  misc_feature 1..20: note = Target: SCN10A; (-) strand; PAM type: NRG; PAM sequence: CAG
  source 1..20: mol_type = other DNA
tagcgcaggccgcctgctct

SEQ ID NO: 19163 - DNA, 20 bp, synthetic construct
  misc_feature 1..20: note = Description of Artificial Sequence: Synthetic oligonucleotide
  misc_feature 1..20: note = Target: SCN10A; (-) strand; PAM type: NRG; PAM sequence: AGG
  source 1..20: mol_type = other DNA
atgtcacggcttgttagcgc

SEQ ID NO: 19164 - DNA, 20 bp, synthetic construct
  misc_feature 1..20: note = Description of Artificial Sequence: Synthetic oligonucleotide
  misc_feature 1..20: note = Target: SCN10A; (-) strand; PAM type: NRG; PAM sequence: CAG
  source 1..20: mol_type = other DNA
aatgtcacggcttgttagcg

SEQ ID NO: 19165 - DNA, 20 bp, synthetic construct
  misc_feature 1..20: note = Description of Artificial Sequence: Synthetic oligonucleotide
  misc_feature 1..20: note = Target: SCN10A; (-) strand; PAM type: NRG; PAM sequence: TAG
  source 1..20: mol_type = other DNA
gaagaaatgtcacggcttgt

SEQ ID NO: 19166 - DNA, 20 bp, synthetic construct
  misc_feature 1..20: note = Description of Artificial Sequence: Synthetic oligonucleotide
  misc_feature 1..20: note = Target: SCN10A; (-) strand; PAM type: NRG; PAM sequence: CGG
  source 1..20: mol_type = other DNA
agaggcctgaagaaatgtca

SEQ ID NO: 19167 - DNA, 20 bp, synthetic construct
  misc_feature 1..20: note = Description of Artificial Sequence: Synthetic oligonucleotide
  misc_feature 1..20: note = Target: SCN10A; (-) strand; PAM type: NRG; PAM sequence: AAG
  source 1..20: mol_type = other DNA
gggaataggaaagaggcctg

SEQ ID NO: 19168 - DNA, 20 bp, synthetic construct
  misc_feature 1..20: note = Description of Artificial Sequence: Synthetic oligonucleotide
  misc_feature 1..20: note = Target: SCN10A; (-) strand; PAM type: NRG; PAM sequence: AGG
  source 1..20: mol_type = other DNA
gactcttgggaataggaaag

SEQ ID NO: 19169 - DNA, 20 bp, synthetic construct
  misc_feature 1..20: note = Description of Artificial Sequence: Synthetic oligonucleotide
  misc_feature 1..20: note = Target: SCN10A; (-) strand; PAM type: NRG; PAM sequence: GAG
  source 1..20: mol_type = other DNA
tgactcttgggaataggaaa

SEQ ID NO: 19170 - DNA, 20 bp, synthetic construct
  misc_feature 1..20: note = Description of Artificial Sequence: Synthetic oligonucleotide
  misc_feature 1..20: note = Target: SCN10A; (-) strand; PAM type: NRG; PAM sequence: AAG
  source 1..20: mol_type = other DNA
actgactcttgggaatagga

SEQ ID NO: 19171 - DNA, 20 bp, synthetic construct
  misc_feature 1..20: note = Description of Artificial Sequence: Synthetic oligonucleotide
  misc_feature 1..20: note = Target: SCN10A; (-) strand; PAM type: NRG; PAM sequence: AGG
  source 1..20: mol_type = other DNA
tctcactgactcttgggaat

SEQ ID NO: 19172 - DNA, 20 bp, synthetic construct
  misc_feature 1..20: note = Description of Artificial Sequence: Synthetic oligonucleotide
  misc_feature 1..20: note = Target: SCN10A; (-) strand; PAM type: NRG; PAM sequence: TAG
  source 1..20: mol_type = other DNA
atctcactgactcttgggaa

SEQ ID NO: 19173 - DNA, 20 bp, synthetic construct
  misc_feature 1..20: note = Description of Artificial Sequence: Synthetic oligonucleotide
  misc_feature 1..20: note = Target: SCN10A; (-) strand; PAM type: NRG; PAM sequence: GGG
  source 1..20: mol_type = other DNA
ttggcatctcactgactctt

SEQ ID NO: 19174 - DNA, 20 bp, synthetic construct
  misc_feature 1..20: note = Description of Artificial Sequence: Synthetic oligonucleotide
  misc_feature 1..20: note = Target: SCN10A; (-) strand; PAM type: NRG; PAM sequence: TGG
  source 1..20: mol_type = other DNA
cttggcatctcactgactct

SEQ ID NO: 19175 - DNA, 20 bp, synthetic construct
  misc_feature 1..20: note = Description of Artificial Sequence: Synthetic oligonucleotide
  misc_feature 1..20: note = Target: SCN10A; (-) strand; PAM type: NRG; PAM sequence: TGG
  source 1..20: mol_type = other DNA
caggccatctggaggaagct

SEQ ID NO: 19176 - DNA, 20 bp, synthetic construct
  misc_feature 1..20: note = Description of Artificial Sequence: Synthetic oligonucleotide
  misc_feature 1..20: note = Target: SCN10A; (-) strand; PAM type: NRG; PAM sequence: AAG
  source 1..20: mol_type = other DNA
gtctccaggccatctggagg

SEQ ID NO: 19177 - DNA, 20 bp, synthetic construct
  misc_feature 1..20: note = Description of Artificial Sequence: Synthetic oligonucleotide
  misc_feature 1..20: note = Target: SCN10A; (-) strand; PAM type: NRG; PAM sequence: AGG
  source 1..20: mol_type = other DNA
taggtctccaggccatctgg

SEQ ID NO: 19178 - DNA, 20 bp, synthetic construct
  misc_feature 1..20: note = Description of Artificial Sequence: Synthetic oligonucleotide
  misc_feature 1..20: note = Target: SCN10A; (-) strand; PAM type: NRG; PAM sequence: GAG
  source 1..20: mol_type = other DNA
ctaggtctccaggccatctg

SEQ ID NO: 19179 - DNA, 20 bp, synthetic construct
  misc_feature 1..20: note = Description of Artificial Sequence: Synthetic oligonucleotide
  misc_feature 1..20: note = Target: SCN10A; (-) strand; PAM type: NRG; PAM sequence: TGG
  source 1..20: mol_type = other DNA
cactaggtctccaggccatc

SEQ ID NO: 19180 - DNA, 20 bp, synthetic construct
  misc_feature 1..20: note = Description of Artificial Sequence: Synthetic oligonucleotide
  misc_feature 1..20: note = Target: SCN10A; (-) strand; PAM type: NRG; PAM sequence: AGG
  source 1..20: mol_type = other DNA
tgtcgggtcactaggtctcc

SEQ ID NO: 19181 - DNA, 20 bp, synthetic construct
  misc_feature 1..20: note = Description of Artificial Sequence: Synthetic oligonucleotide
  misc_feature 1..20: note = Target: SCN10A; (-) strand; PAM type: NRG; PAM sequence: CAG
  source 1..20: mol_type = other DNA
gtgtcgggtcactaggtctc

SEQ ID NO: 19182 - DNA, 20 bp, synthetic construct
  misc_feature 1..20: note = Description of Artificial Sequence: Synthetic oligonucleotide
  misc_feature 1..20: note = Target: SCN10A; (-) strand; PAM type: NRG; PAM sequence: AGG
  source 1..20: mol_type = other DNA
cccaggagtgtcgggtcact

SEQ ID NO: 19183 - DNA, 20 bp, synthetic construct
  misc_feature 1..20: note = Description of Artificial Sequence: Synthetic oligonucleotide
  misc_feature 1..20: note = Target: SCN10A; (-) strand; PAM type: NRG; PAM sequence: TAG
  source 1..20: mol_type = other DNA
tcccaggagtgtcgggtcac

SEQ ID NO: 19184 - DNA, 20 bp, synthetic construct
  misc_feature 1..20: note = Description of Artificial Sequence: Synthetic oligonucleotide
  misc_feature 1..20: note = Target: SCN10A; (-) strand; PAM type: NRG; PAM sequence: GGG
  source 1..20: mol_type = other DNA
gtcagattcccaggagtgtc

SEQ ID NO: 19185 - DNA, 20 bp, synthetic construct
  misc_feature 1..20: note = Description of Artificial Sequence: Synthetic oligonucleotide
  misc_feature 1..20: note = Target: SCN10A; (-) strand; PAM type: NRG; PAM sequence: CGG
  source 1..20: mol_type = other DNA
tgtcagattcccaggagtgt

SEQ ID NO: 19186 - DNA, 20 bp, synthetic construct
  misc_feature 1..20: note = Description of Artificial Sequence: Synthetic oligonucleotide
  misc_feature 1..20: note = Target: SCN10A; (-) strand; PAM type: NRG; PAM sequence: GAG
  source 1..20: mol_type = other DNA
caaacctgtcagattcccag

SEQ ID NO: 19187 - DNA, 20 bp, synthetic construct
  misc_feature 1..20: note = Description of Artificial Sequence: Synthetic oligonucleotide
  misc_feature 1..20: note = Target: SCN10A; (-) strand; PAM type: NRG; PAM sequence: AGG
  source 1..20: mol_type = other DNA
gccaaacctgtcagattccc

SEQ ID NO: 19188 - DNA, 20 bp, synthetic construct
  misc_feature 1..20: note = Description of Artificial Sequence: Synthetic oligonucleotide
  misc_feature 1..20: note = Target: SCN10A; (-) strand; PAM type: NRG; PAM sequence: CAG
  source 1..20: mol_type = other DNA
agccaaacctgtcagattcc

SEQ ID NO: 19189 - DNA, 20 bp, synthetic construct
  misc_feature 1..20: note = Description of Artificial Sequence: Synthetic oligonucleotide
  misc_feature 1..20: note = Target: SCN10A; (-) strand; PAM type: NRG; PAM sequence: CAG
  source 1..20: mol_type = other DNA
ggtttgtcagccaaacctgt

SEQ ID NO: 19190 - DNA, 20 bp, synthetic construct
  misc_feature 1..20: note = Description of Artificial Sequence: Synthetic oligonucleotide
  misc_feature 1..20: note = Target: SCN10A; (-) strand; PAM type: NRG; PAM sequence: CAG
  source 1..20: mol_type = other DNA
tatcagagccacaggtttgt

SEQ ID NO: 19191 - DNA, 20 bp, synthetic construct
  misc_feature 1..20: note = Description of Artificial Sequence: Synthetic oligonucleotide
  misc_feature 1..20: note = Target: SCN10A; (-) strand; PAM type: NRG; PAM sequence: AGG
  source 1..20: mol_type = other DNA
cccacttttatcagagccac

SEQ ID NO: 19192 - DNA, 20 bp, synthetic construct
  misc_feature 1..20: note = Description of Artificial Sequence: Synthetic oligonucleotide
  misc_feature 1..20: note = Target: SCN10A; (-) strand; PAM type: NRG; PAM sequence: CAG
  source 1..20: mol_type = other DNA
acccacttttatcagagcca

SEQ ID NO: 19193 - DNA, 20 bp, synthetic construct
  misc_feature 1..20: note = Description of Artificial Sequence: Synthetic oligonucleotide
  misc_feature 1..20: note = Target: SCN10A; (-) strand; PAM type: NRG; PAM sequence: GAG
  source 1..20: mol_type = other DNA
caggccacccacttttatca

SEQ ID NO: 19194 - DNA, 20 bp, synthetic construct
  misc_feature 1..20: note = Description of Artificial Sequence: Synthetic oligonucleotide
  misc_feature 1..20: note = Target: SCN10A; (-) strand; PAM type: NRG; PAM sequence: CAG
  source 1..20: mol_type = other DNA
cacaggccacccacttttat

SEQ ID NO: 19195 - DNA, 20 bp, synthetic construct
  misc_feature 1..20: note = Description of Artificial Sequence: Synthetic oligonucleotide
  misc_feature 1..20: note = Target: SCN10A; (-) strand; PAM type: NRG; PAM sequence: AGG
  source 1..20: mol_type = other DNA
ctctacaggagaagtgccac

SEQ ID NO: 19196 - DNA, 20 bp, synthetic construct
  misc_feature 1..20: note = Description of Artificial Sequence: Synthetic oligonucleotide
  misc_feature 1..20: note = Target: SCN10A; (-) strand; PAM type: NRG; PAM sequence: CAG
  source 1..20: mol_type = other DNA
cctctacaggagaagtgcca

SEQ ID NO: 19197 - DNA, 20 bp, synthetic construct
  misc_feature 1..20: note = Description of Artificial Sequence: Synthetic oligonucleotide
  misc_feature 1..20: note = Target: SCN10A; (-) strand; PAM type: NRG; PAM sequence: AAG
  source 1..20: mol_type = other DNA
caggacgccctctacaggag

SEQ ID NO: 19198 - DNA, 20 bp, synthetic construct
  misc_feature 1..20: note = Description of Artificial Sequence: Synthetic oligonucleotide
  misc_feature 1..20: note = Target: SCN10A; (-) strand; PAM type: NRG; PAM sequence: GAG
  source 1..20: mol_type = other DNA
ctccaggacgccctctacag

SEQ ID NO: 19199 - DNA, 20 bp, synthetic construct
  misc_feature 1..20: note = Description of Artificial Sequence: Synthetic oligonucleotide
  misc_feature 1..20: note = Target: SCN10A; (-) strand; PAM type: NRG; PAM sequence: AGG
  source 1..20: mol_type = other DNA
agctccaggacgccctctac

SEQ ID NO: 19200 - DNA, 20 bp, synthetic construct
  misc_feature 1..20: note = Description of Artificial Sequence: Synthetic oligonucleotide
  misc_feature 1..20: note = Target: SCN10A; (-) strand; PAM type: NRG; PAM sequence: CAG
  source 1..20: mol_type = other DNA
cagctccaggacgccctcta

SEQ ID NO: 19201 - DNA, 20 bp, synthetic construct
  misc_feature 1..20: note = Description of Artificial Sequence: Synthetic oligonucleotide
  misc_feature 1..20: note = Target: SCN10A; (-) strand; PAM type: NRG; PAM sequence: AGG
  source 1..20: mol_type = other DNA
tcttctctaaactcagctcc

SEQ ID NO: 19202 - DNA, 20 bp, synthetic construct
  misc_feature 1..20: note = Description of Artificial Sequence: Synthetic oligonucleotide
  misc_feature 1..20: note = Target: SCN10A; (-) strand; PAM type: NRG; PAM sequence: CAG
  source 1..20: mol_type = other DNA
ctcttctctaaactcagctc

SEQ ID NO: 19203 - DNA, 20 bp, synthetic construct
  misc_feature 1..20: note = Description of Artificial Sequence: Synthetic oligonucleotide
  misc_feature 1..20: note = Target: SCN10A; (-) strand; PAM type: NRG; PAM sequence: CAG
  source 1..20: mol_type = other DNA
tgatggctcttctctaaact

SEQ ID NO: 19204 - DNA, 20 bp, synthetic construct
  misc_feature 1..20: note = Description of Artificial Sequence: Synthetic oligonucleotide
  misc_feature 1..20: note = Target: SCN10A; (-) strand; PAM type: NRG; PAM sequence: TGG
  source 1..20: mol_type = other DNA
gtctcactcacatgcaatga

SEQ ID NO: 19205 - DNA, 20 bp, synthetic construct
  misc_feature 1..20: note = Description of Artificial Sequence: Synthetic oligonucleotide
  misc_feature 1..20: note = Target: SCN10A; (-) strand; PAM type: NRG; PAM sequence: TAG
  source 1..20: mol_type = other DNA
agcaccttcaacctgcctat

SEQ ID NO: 19206 - DNA, 20 bp, synthetic construct
  misc_feature 1..20: note = Description of Artificial Sequence: Synthetic oligonucleotide
  misc_feature 1..20: note = Target: SCN10A; (-) strand; PAM type: NRG; PAM sequence: AAG
  source 1..20: mol_type = other DNA
aatcacagccccaatgtctc

SEQ ID NO: 19207 - DNA, 20 bp, synthetic construct
  misc_feature 1..20: note = Description of Artificial Sequence: Synthetic oligonucleotide
  misc_feature 1..20: note = Target: SCN10A; (-) strand; PAM type: NRG; PAM sequence: CAG
  source 1..20: mol_type = other DNA
ttcccttgtgcccgaaatca

SEQ ID NO: 19208 - DNA, 20 bp, synthetic construct
  misc_feature 1..20: note = Description of Artificial Sequence: Synthetic oligonucleotide
  misc_feature 1..20: note = Target: SCN10A; (-) strand; PAM type: NRG; PAM sequence: AAG
  source 1..20: mol_type = other DNA
agctccttccagcctcaagg

SEQ ID NO: 19209 - DNA, 20 bp, synthetic construct
  misc_feature 1..20: note = Description of Artificial Sequence: Synthetic oligonucleotide
  misc_feature 1..20: note = Target: SCN10A; (-) strand; PAM type: NRG; PAM sequence: AGG
  source 1..20: mol_type = other DNA
cccagctccttccagcctca

SEQ ID NO: 19210 - DNA, 20 bp, synthetic construct
  misc_feature 1..20: note = Description of Artificial Sequence: Synthetic oligonucleotide
  misc_feature 1..20: note = Target: SCN10A; (-) strand; PAM type: NRG; PAM sequence: AAG
  source 1..20: mol_type = other DNA
ccccagctccttccagcctc

SEQ ID NO: 19211 - DNA, 20 bp, synthetic construct
  misc_feature 1..20: note = Description of Artificial Sequence: Synthetic oligonucleotide
  misc_feature 1..20: note = Target: SCN10A; (-) strand; PAM type: NRG; PAM sequence: CAG
  source 1..20: mol_type = other DNA
tccagagccccagctccttc

SEQ ID NO: 19212 - DNA, 20 bp, synthetic construct
  misc_feature 1..20: note = Description of Artificial Sequence: Synthetic oligonucleotide
  misc_feature 1..20: note = Target: SCN10A; (-) strand; PAM type: NRG; PAM sequence: CAG
  source 1..20: mol_type = other DNA
gttgtctgactccagagccc

SEQ ID NO: 19213 - DNA, 20 bp, synthetic construct
  misc_feature 1..20: note = Description of Artificial Sequence: Synthetic oligonucleotide
  misc_feature 1..20: note = Target: SCN10A; (-) strand; PAM type: NRG; PAM sequence: GAG
  source 1..20: mol_type = other DNA
atccaggttgtctgactcca

SEQ ID NO: 19214 - DNA, 20 bp, synthetic construct
  misc_feature 1..20: note = Description of Artificial Sequence: Synthetic oligonucleotide
  misc_feature 1..20: note = Target: SCN10A; (-) strand; PAM type: NRG; PAM sequence: CAG
  source 1..20: mol_type = other DNA
aaatccaggttgtctgactc

SEQ ID NO: 19215 - DNA, 20 bp, synthetic construct
  misc_feature 1..20: note = Description of Artificial Sequence: Synthetic oligonucleotide
  misc_feature 1..20: note = Target: SCN10A; (-) strand; PAM type: NRG; PAM sequence: AGG
  source 1..20: mol_type = other DNA
cagacctggatctcaaatcc

SEQ ID NO: 19216 - DNA, 20 bp, synthetic construct
  misc_feature 1..20: note = Description of Artificial Sequence: Synthetic oligonucleotide
  misc_feature 1..20: note = Target: SCN10A; (-) strand; PAM type: NRG; PAM sequence: CAG
  source 1..20: mol_type = other DNA
acagacctggatctcaaatc

SEQ ID NO: 19217 - DNA, 20 bp, synthetic construct
  misc_feature 1..20: note = Description of Artificial Sequence: Synthetic oligonucleotide
  misc_feature 1..20: note = Target: SCN10A; (-) strand; PAM type: NRG; PAM sequence: TGG
  source 1..20: mol_type = other DNA
aagcgaataagccacagacc

SEQ ID NO: 19218 - DNA, 20 bp, synthetic construct
  misc_feature 1..20: note = Description of Artificial Sequence: Synthetic oligonucleotide
  misc_feature 1..20: note = Target: SCN10A; (-) strand; PAM type: NRG; PAM sequence: CAG
  source 1..20: mol_type = other DNA
ccaagcaagcgaataagcca

SEQ ID NO: 19219 - DNA, 20 bp, synthetic construct
  misc_feature 1..20: note = Description of Artificial Sequence: Synthetic oligonucleotide
  misc_feature 1..20: note = Target: SCN10A; (-) strand; PAM type: NRG; PAM sequence: AAG
  source 1..20: mol_type = other DNA
catctgccaagcaagcgaat

SEQ ID NO: 19220 - DNA, 20 bp, synthetic construct
  misc_feature 1..20: note = Description of Artificial Sequence: Synthetic oligonucleotide
  misc_feature 1..20: note = Target: SCN10A; (-) strand; PAM type: NRG; PAM sequence: AAG
  source 1..20: mol_type = other DNA
aagtctcccatctgccaagc

SEQ ID NO: 19221 - DNA, 20 bp, synthetic construct
  misc_feature 1..20: note = Description of Artificial Sequence: Synthetic oligonucleotide
  misc_feature 1..20: note = Target: SCN10A; (-) strand; PAM type: NRG; PAM sequence: AAG
  source 1..20: mol_type = other DNA
ccgaaagtctcccatctgcc

SEQ ID NO: 19222 - DNA, 20 bp, synthetic construct
  misc_feature 1..20: note = Description of Artificial Sequence: Synthetic oligonucleotide
  misc_feature 1..20: note = Target: SCN10A; (-) strand; PAM type: NRG; PAM sequence: AAG
  source 1..20: mol_type = other DNA
atggttccatgatgacccga

SEQ ID NO: 19223 - DNA, 20 bp, synthetic construct
  misc_feature 1..20: note = Description of Artificial Sequence: Synthetic oligonucleotide
  misc_feature 1..20: note = Target: SCN10A; (-) strand; PAM type: NRG; PAM sequence: TGG
  source 1..20: mol_type = other DNA
gggtgggtgaggaaaaagaa

SEQ ID NO: 19224 - DNA, 20 bp, synthetic construct
  misc_feature 1..20: note = Description of Artificial Sequence: Synthetic oligonucleotide
  misc_feature 1..20: note = Target: SCN10A; (-) strand; PAM type: NRG; PAM sequence: AAG
  source 1..20: mol_type = other DNA
ctcaggggtgggtgaggaaa

SEQ ID NO: 19225 - DNA, 20 bp, synthetic construct
  misc_feature 1..20: note = Description of Artificial Sequence: Synthetic oligonucleotide
  misc_feature 1..20: note = Target: SCN10A; (-) strand; PAM type: NRG; PAM sequence: AGG
  source 1..20: mol_type = other DNA
aagatcctcaggggtgggtg

SEQ ID NO: 19226 - DNA, 20 bp, synthetic construct
  misc_feature 1..20: note = Description of Artificial Sequence: Synthetic oligonucleotide
  misc_feature 1..20: note = Target: SCN10A; (-) strand; PAM type: NRG; PAM sequence: GAG
  source 1..20: mol_type = other DNA
taagatcctcaggggtgggt

SEQ ID NO: 19227 - DNA, 20 bp, synthetic construct
  misc_feature 1..20: note = Description of Artificial Sequence: Synthetic oligonucleotide
  misc_feature 1..20: note = Target: SCN10A; (-) strand; PAM type: NRG; PAM sequence: GGG
  source 1..20: mol_type = other DNA
tttttaagatcctcaggggt

SEQ ID NO: 19228 - DNA, 20 bp, synthetic construct
  misc_feature 1..20: note = Description of Artificial Sequence: Synthetic oligonucleotide
  misc_feature 1..20: note = Target: SCN10A; (-) strand; PAM type: NRG; PAM sequence: TGG
  source 1..20: mol_type = other DNA
gtttttaagatcctcagggg

SEQ ID NO: 19229 - DNA, 20 bp, synthetic construct
  misc_feature 1..20: note = Description of Artificial Sequence: Synthetic oligonucleotide
  misc_feature 1..20: note = Target: SCN10A; (-) strand; PAM type: NRG; PAM sequence: GGG
  source 1..20: mol_type = other DNA
gtcgtttttaagatcctcag

SEQ ID NO: 19230 - DNA, 20 bp, synthetic construct
  misc_feature 1..20: note = Description of Artificial Sequence: Synthetic oligonucleotide
  misc_feature 1..20: note = Target: SCN10A; (-) strand; PAM type: NRG; PAM sequence: GGG
  source 1..20: mol_type = other DNA
agtcgtttttaagatcctca

SEQ ID NO: 19231 - DNA, 20 bp, synthetic construct
  misc_feature 1..20: note = Description of Artificial Sequence: Synthetic oligonucleotide
  misc_feature 1..20: note = Target: SCN10A; (-) strand; PAM type: NRG; PAM sequence: AGG
  source 1..20: mol_type = other DNA
tagtcgtttttaagatcctc

SEQ ID NO: 19232 - DNA, 20 bp, synthetic construct
  misc_feature 1..20: note = Description of Artificial Sequence: Synthetic oligonucleotide
  misc_feature 1..20: note = Target: SCN10A; (-) strand; PAM type: NRG; PAM sequence: CAG
  source 1..20: mol_type = other DNA
atagtcgtttttaagatcct

SEQ ID NO: 19233 - DNA, 20 bp, synthetic construct
  misc_feature 1..20: note = Description of Artificial Sequence: Synthetic oligonucleotide
  misc_feature 1..20: note = Target: SCN10A; (-) strand; PAM type: NRG; PAM sequence: AAG
  source 1..20: mol_type = other DNA
cctgagagatagtcgttttt

SEQ ID NO: 19234 - DNA, 20 bp, synthetic construct
  misc_feature 1..20: note = Description of Artificial Sequence: Synthetic oligonucleotide
  misc_feature 1..20: note = Target: SCN10A; (-) strand; PAM type: NRG; PAM sequence: TAG
  source 1..20: mol_type = other DNA
ctcacaacaaccctgagaga

SEQ ID NO: 19235 - DNA, 20 bp, synthetic construct
  misc_feature 1..20: note = Description of Artificial Sequence: Synthetic oligonucleotide
  misc_feature 1..20: note = Target: SCN10A; (-) strand; PAM type: NRG; PAM sequence: GAG
  source 1..20: mol_type = other DNA
tatgctcacaacaaccctga

SEQ ID NO: 19236 - DNA, 20 bp, synthetic construct
  misc_feature 1..20: note = Description of Artificial Sequence: Synthetic oligonucleotide
  misc_feature 1..20: note = Target: SCN10A; (-) strand; PAM type: NRG; PAM sequence: GAG
  source 1..20: mol_type = other DNA
tttatgctcacaacaaccct

SEQ ID NO: 19237 - DNA, 20 bp, synthetic construct
  misc_feature 1..20: note = Description of Artificial Sequence: Synthetic oligonucleotide
  misc_feature 1..20: note = Target: SCN10A; (-) strand; PAM type: NRG; PAM sequence: TGG
  source 1..20: mol_type = other DNA
caatgtgtcaggcatagcac

SEQ ID NO: 19238 - DNA, 20 bp, synthetic construct
  misc_feature 1..20: note = Description of Artificial Sequence: Synthetic oligonucleotide
  misc_feature 1..20: note = Target: SCN10A; (-) strand; PAM type: NRG; PAM sequence: TAG
  source 1..20: mol_type = other DNA
cacttacaatgtgtcaggca

SEQ ID NO: 19239 - DNA, 20 bp, synthetic construct
  misc_feature 1..20: note = Description of Artificial Sequence: Synthetic oligonucleotide
  misc_feature 1..20: note = Target: SCN10A; (-) strand; PAM type: NRG; PAM sequence: AGG
  source 1..20: mol_type = other DNA
ctgagcacttacaatgtgtc

SEQ ID NO: 19240 - DNA, 20 bp, synthetic construct
  misc_feature 1..20: note = Description of Artificial Sequence: Synthetic oligonucleotide
  misc_feature 1..20: note = Target: SCN10A; (-) strand; PAM type: NRG; PAM sequence: CAG
  source 1..20: mol_type = other DNA
actgagcacttacaatgtgt

SEQ ID NO: 19241 - DNA, 20 bp, synthetic construct
  misc_feature 1..20: note = Description of Artificial Sequence: Synthetic oligonucleotide
  misc_feature 1..20: note = Target: SCN10A; (-) strand; PAM type: NRG; PAM sequence: GAG
  source 1..20: mol_type = other DNA
cacagcagctaatacttact

SEQ ID NO: 19242 - DNA, 20 bp, synthetic construct
  misc_feature 1..20: note = Description of Artificial Sequence: Synthetic oligonucleotide
  misc_feature 1..20: note = Target: SCN10A; (-) strand; PAM type: NRG; PAM sequence: CAG
  source 1..20: mol_type = other DNA
aataacagcaataatcacag

SEQ ID NO: 19243 - DNA, 20 bp, synthetic construct
  misc_feature 1..20: note = Description of Artificial Sequence: Synthetic oligonucleotide
  misc_feature 1..20: note = Target: SCN10A; (-) strand; PAM type: NRG; PAM sequence: CAG
  source 1..20: mol_type = other DNA
aacaataacagcaataatca

SEQ ID NO: 19244 - DNA, 20 bp, synthetic construct
  misc_feature 1..20: note = Description of Artificial Sequence: Synthetic oligonucleotide
  misc_feature 1..20: note = Target: SCN10A; (-) strand; PAM type: NRG; PAM sequence: CAG
  source 1..20: mol_type = other DNA
ctcttatcaaataacaataa

SEQ ID NO: 19245 - DNA, 20 bp, synthetic construct
  misc_feature 1..20: note = Description of Artificial Sequence: Synthetic oligonucleotide
  misc_feature 1..20: note = Target: SCN10A; (-) strand; PAM type: NRG; PAM sequence: AAG
  source 1..20: mol_type = other DNA
tgcaccaagaggggacttcc

SEQ ID NO: 19246 - DNA, 20 bp, synthetic construct
  misc_feature 1..20: note = Description of Artificial Sequence: Synthetic oligonucleotide
  misc_feature 1..20: note = Target: SCN10A; (-) strand; PAM type: NRG; PAM sequence: GGG
  source 1..20: mol_type = other DNA
tcccttatctgcaccaagag

SEQ ID NO: 19247 - DNA, 20 bp, synthetic construct
  misc_feature 1..20: note = Description of Artificial Sequence: Synthetic oligonucleotide
  misc_feature 1..20: note = Target: SCN10A; (-) strand; PAM type: NRG; PAM sequence: GGG
  source 1..20: mol_type = other DNA
ctcccttatctgcaccaaga

SEQ ID NO: 19248 - DNA, 20 bp, synthetic construct
  misc_feature 1..20: note = Description of Artificial Sequence: Synthetic oligonucleotide
  misc_feature 1..20: note = Target: SCN10A; (-) strand; PAM type: NRG; PAM sequence: AGG
  source 1..20: mol_type = other DNA
gctcccttatctgcaccaag

SEQ ID NO: 19249 - DNA, 20 bp, synthetic construct
  misc_feature 1..20: note = Description of Artificial Sequence: Synthetic oligonucleotide
  misc_feature 1..20: note = Target: SCN10A; (-) strand; PAM type: NRG; PAM sequence: GAG
  source 1..20: mol_type = other DNA
ggctcccttatctgcaccaa

SEQ ID NO: 19250 - DNA, 20 bp, synthetic construct
  misc_feature 1..20: note = Description of Artificial Sequence: Synthetic oligonucleotide
  misc_feature 1..20: note = Target: SCN10A; (-) strand; PAM type: NRG; PAM sequence: AAG
  source 1..20: mol_type = other DNA
ttggctcccttatctgcacc

SEQ ID NO: 19251 - DNA, 20 bp, synthetic construct
  misc_feature 1..20: note = Description of Artificial Sequence: Synthetic oligonucleotide
  misc_feature 1..20: note = Target: SCN10A; (-) strand; PAM type: NRG; PAM sequence: TGG
  source 1..20: mol_type = other DNA
gccttctcctttctgggcct

SEQ ID NO: 19252 - DNA, 20 bp, synthetic construct
  misc_feature 1..20: note = Description of Artificial Sequence: Synthetic oligonucleotide
  misc_feature 1..20: note = Target: SCN10A; (-) strand; PAM type: NRG; PAM sequence: GGG
  source 1..20: mol_type = other DNA
ggacatgccttctcctttct

SEQ ID NO: 19253 - DNA, 20 bp, synthetic construct
  misc_feature 1..20: note = Description of Artificial Sequence: Synthetic oligonucleotide
  misc_feature 1..20: note = Target: SCN10A; (-) strand; PAM type: NRG; PAM sequence: TGG
  source 1..20: mol_type = other DNA
gggacatgccttctcctttc

SEQ ID NO: 19254 - DNA, 20 bp, synthetic construct
  misc_feature 1..20: note = Description of Artificial Sequence: Synthetic oligonucleotide
  misc_feature 1..20: note = Target: SCN10A; (-) strand; PAM type: NRG; PAM sequence: GGG
  source 1..20: mol_type = other DNA
cttttcgctgactcagagtg

SEQ ID NO: 19255 - DNA, 20 bp, synthetic construct
  misc_feature 1..20: note = Description of Artificial Sequence: Synthetic oligonucleotide
  misc_feature 1..20: note = Target: SCN10A; (-) strand; PAM type: NRG; PAM sequence: GGG
  source 1..20: mol_type = other DNA
gcttttcgctgactcagagt

SEQ ID NO: 19256 - DNA, 20 bp, synthetic construct
  misc_feature 1..20: note = Description of Artificial Sequence: Synthetic oligonucleotide
  misc_feature 1..20: note = Target: SCN10A; (-) strand; PAM type: NRG; PAM sequence: TGG
  source 1..20: mol_type = other DNA
agcttttcgctgactcagag

SEQ ID NO: 19257 - DNA, 20 bp, synthetic construct
  misc_feature 1..20: note = Description of Artificial Sequence: Synthetic oligonucleotide
  misc_feature 1..20: note = Target: SCN10A; (-) strand; PAM type: NRG; PAM sequence: GAG
  source 1..20: mol_type = other DNA
cccagcttttcgctgactca

SEQ ID NO: 19258 - DNA, 20 bp, synthetic construct
  misc_feature 1..20: note = Description of Artificial Sequence: Synthetic oligonucleotide
  misc_feature 1..20: note = Target: SCN10A; (-) strand; PAM type: NRG; PAM sequence: CAG
  source 1..20: mol_type = other DNA
gccccagcttttcgctgact

SEQ ID NO: 19259 - DNA, 20 bp, synthetic construct
  misc_feature 1..20: note = Description of Artificial Sequence: Synthetic oligonucleotide
  misc_feature 1..20: note = Target: SCN10A; (-) strand; PAM type: NRG; PAM sequence: CAG
  source 1..20: mol_type = other DNA
gagacttgggtctgtggccc

SEQ ID NO: 19260 - DNA, 20 bp, synthetic construct
  misc_feature 1..20: note = Description of Artificial Sequence: Synthetic oligonucleotide
  misc_feature 1..20: note = Target: SCN10A; (-) strand; PAM type: NRG; PAM sequence: TGG
  source 1..20: mol_type = other DNA
cgactggagacttgggtctg

SEQ ID NO: 19261 - DNA, 20 bp, synthetic construct
  misc_feature 1..20: note = Description of Artificial Sequence: Synthetic oligonucleotide
  misc_feature 1..20: note = Target: SCN10A; (-) strand; PAM type: NRG; PAM sequence: GGG
  source 1..20: mol_type = other DNA
tcctgggcgactggagactt

SEQ ID NO: 19262 - DNA, 20 bp, synthetic construct
  misc_feature 1..20: note = Description of Artificial Sequence: Synthetic oligonucleotide
  misc_feature 1..20: note = Target: SCN10A; (-) strand; PAM type: NRG; PAM sequence: TGG
  source 1..20: mol_type = other DNA
ctcctgggcgactggagact

SEQ ID NO: 19263 - DNA, 20 bp, synthetic construct
  misc_feature 1..20: note = Description of Artificial Sequence: Synthetic oligonucleotide
  misc_feature 1..20: note = Target: SCN10A; (-) strand; PAM type: NRG; PAM sequence: GAG
  source 1..20: mol_type = other DNA
gtctgactcctgggcgactg

SEQ ID NO: 19264 - DNA, 20 bp, synthetic construct
  misc_feature 1..20: note = Description of Artificial Sequence: Synthetic oligonucleotide
  misc_feature 1..20: note = Target: SCN10A; (-) strand; PAM type: NRG; PAM sequence: TGG
  source 1..20: mol_type = other DNA
gggtctgactcctgggcgac

SEQ ID NO: 19265 - DNA, 20 bp, synthetic construct
  misc_feature 1..20: note = Description of Artificial Sequence: Synthetic oligonucleotide
  misc_feature 1..20: note = Target: SCN10A; (-) strand; PAM type: NRG; PAM sequence: GGG
  source 1..20: mol_type = other DNA
gggagcagggtctgactcct

SEQ ID NO: 19266 - DNA, 20 bp, synthetic construct
  misc_feature 1..20: note = Description of Artificial Sequence: Synthetic oligonucleotide
  misc_feature 1..20: note = Target: SCN10A; (-) strand; PAM type: NRG; PAM sequence: TGG
  source 1..20: mol_type = other DNA
agggagcagggtctgactcc

SEQ ID NO: 19267 - DNA, 20 bp, synthetic construct
  misc_feature 1..20: note = Description of Artificial Sequence: Synthetic oligonucleotide
  misc_feature 1..20: note = Target: SCN10A; (-) strand; PAM type: NRG; PAM sequence: GGG
  source 1..20: mol_type = other DNA
tgtccttgtgggagggagca

SEQ ID NO: 19268 - DNA, 20 bp, synthetic construct
  misc_feature 1..20: note = Description of Artificial Sequence: Synthetic oligonucleotide
  misc_feature 1..20: note = Target: SCN10A; (-) strand; PAM type: NRG; PAM sequence: AGG
  source 1..20: mol_type = other DNA
ctgtccttgtgggagggagc

SEQ ID NO: 19269 - DNA, 20 bp, synthetic construct
  misc_feature 1..20: note = Description of Artificial Sequence: Synthetic oligonucleotide
  misc_feature 1..20: note = Target: SCN10A; (-) strand; PAM type: NRG; PAM sequence: CAG
  source 1..20: mol_type = other DNA
cctgtccttgtgggagggag

SEQ ID NO: 19270 - DNA, 20 bp, synthetic construct
  misc_feature 1..20: note = Description of Artificial Sequence: Synthetic oligonucleotide
  misc_feature 1..20: note = Target: SCN10A; (-) strand; PAM type: NRG; PAM sequence: GAG
  source 1..20: mol_type = other DNA
tctcctgtccttgtgggagg

SEQ ID NO: 19271 - DNA, 20 bp, synthetic construct
  misc_feature 1..20: note = Description of Artificial Sequence: Synthetic oligonucleotide
  misc_feature 1..20: note = Target: SCN10A; (-) strand; PAM type: NRG; PAM sequence: GGG
  source 1..20: mol_type = other DNA
cctctcctgtccttgtggga

SEQ ID NO: 19272 - DNA, 20 bp, synthetic construct
  misc_feature 1..20: note = Description of Artificial Sequence: Synthetic oligonucleotide
  misc_feature 1..20: note = Target: SCN10A; (-) strand; PAM type: NRG; PAM sequence: AGG
  source 1..20: mol_type = other DNA
tcctctcctgtccttgtggg

SEQ ID NO: 19273 - DNA, 20 bp, synthetic construct
  misc_feature 1..20: note = Description of Artificial Sequence: Synthetic oligonucleotide
  misc_feature 1..20: note = Target: SCN10A; (-) strand; PAM type: NRG; PAM sequence: GAG
  source 1..20: mol_type = other DNA
ttcctctcctgtccttgtgg

SEQ ID NO: 19274 - DNA, 20 bp, synthetic construct
  misc_feature 1..20: note = Description of Artificial Sequence: Synthetic oligonucleotide
  misc_feature 1..20: note = Target: SCN10A; (-) strand; PAM type: NRG; PAM sequence: GGG
  source 1..20: mol_type = other DNA
ccttcctctcctgtccttgt

SEQ ID NO: 19275 - DNA, 20 bp, synthetic construct
  misc_feature 1..20: note = Description of Artificial Sequence: Synthetic oligonucleotide
  misc_feature 1..20: note = Target: SCN10A; (-) strand; PAM type: NRG; PAM sequence: TGG
  source 1..20: mol_type = other DNA
cccttcctctcctgtccttg

SEQ ID NO: 19276 - DNA, 20 bp, synthetic construct
  misc_feature 1..20: note = Description of Artificial Sequence: Synthetic oligonucleotide
  misc_feature 1..20: note = Target: SCN10A; (-) strand; PAM type: NRG; PAM sequence: CAG
  source 1..20: mol_type = other DNA
gctctggggactgcaccagc

SEQ ID NO: 19277 - DNA, 20 bp, synthetic construct
  misc_feature 1..20: note = Description of Artificial Sequence: Synthetic oligonucleotide
  misc_feature 1..20: note = Target: SCN10A; (-) strand; PAM type: NRG; PAM sequence: CAG
  source 1..20: mol_type = other DNA
ctgtgctctggggactgcac

SEQ ID NO: 19278 - DNA, 20 bp, synthetic construct
  misc_feature 1..20: note = Description of Artificial Sequence: Synthetic oligonucleotide
  misc_feature 1..20: note = Target: SCN10A; (-) strand; PAM type: NRG; PAM sequence: GGG
  source 1..20: mol_type = other DNA
agggaagacactgtgctctg

SEQ ID NO: 19279 - DNA, 20 bp, synthetic construct
  misc_feature 1..20: note = Description of Artificial Sequence: Synthetic oligonucleotide
  misc_feature 1..20: note = Target: SCN10A; (-) strand; PAM type: NRG; PAM sequence: GGG
  source 1..20: mol_type = other DNA
cagggaagacactgtgctct

SEQ ID NO: 19280 - DNA, 20 bp, synthetic construct
  misc_feature 1..20: note = Description of Artificial Sequence: Synthetic oligonucleotide
  misc_feature 1..20: note = Target: SCN10A; (-) strand; PAM type: NRG; PAM sequence: TGG
  source 1..20: mol_type = other DNA
tcagggaagacactgtgctc

SEQ ID NO: 19281 - DNA, 20 bp, synthetic construct
  misc_feature 1..20: note = Description of Artificial Sequence: Synthetic oligonucleotide
  misc_feature 1..20: note = Target: SCN10A; (-) strand; PAM type: NRG; PAM sequence: AAG
  source 1..20: mol_type = other DNA
actcccacccagattcaggg

SEQ ID NO: 19282 - DNA, 20 bp, synthetic construct
  misc_feature 1..20: note = Description of Artificial Sequence: Synthetic oligonucleotide
  misc_feature 1..20: note = Target: SCN10A; (-) strand; PAM type: NRG; PAM sequence: GGG
  source 1..20: mol_type = other DNA
gaaactcccacccagattca

SEQ ID NO: 19283 - DNA, 20 bp, synthetic construct
  misc_feature 1..20: note = Description of Artificial Sequence: Synthetic oligonucleotide
  misc_feature 1..20: note = Target: SCN10A; (-) strand; PAM type: NRG; PAM sequence: AGG
  source 1..20: mol_type = other DNA
ggaaactcccacccagattc

SEQ ID NO: 19284 - DNA, 20 bp, synthetic construct
  misc_feature 1..20: note = Description of Artificial Sequence: Synthetic oligonucleotide
  misc_feature 1..20: note = Target: SCN10A; (-) strand; PAM type: NRG; PAM sequence: CAG
  source 1..20: mol_type = other DNA
gggaaactcccacccagatt

SEQ ID NO: 19285 - DNA, 20 bp, synthetic construct
  misc_feature 1..20: note = Description of Artificial Sequence: Synthetic oligonucleotide
  misc_feature 1..20: note = Target: SCN10A; (-) strand; PAM type: NRG; PAM sequence: CAG
  source 1..20: mol_type = other DNA
ggcttggggaaactcccacc

SEQ ID NO: 19286 - DNA, 20 bp, synthetic construct
  misc_feature 1..20: note = Description of Artificial Sequence: Synthetic oligonucleotide
  misc_feature 1..20: note = Target: SCN10A; (-) strand; PAM type: NRG; PAM sequence: GGG
  source 1..20: mol_type = other DNA
gtttttctcttgatggcttg

SEQ ID NO: 19287 - DNA, 20 bp, synthetic construct
  misc_feature 1..20: note = Description of Artificial Sequence: Synthetic oligonucleotide
  misc_feature 1..20: note = Target: SCN10A; (-) strand; PAM type: NRG; PAM sequence: GGG
  source 1..20: mol_type = other DNA
tgtttttctcttgatggctt

SEQ ID NO: 19288 - DNA, 20 bp, synthetic construct
  misc_feature 1..20: note = Description of Artificial Sequence: Synthetic oligonucleotide
  misc_feature 1..20: note = Target: SCN10A; (-) strand; PAM type: NRG; PAM sequence: TGG
  source 1..20: mol_type = other DNA
atgtttttctcttgatggct

SEQ ID NO: 19289 - DNA, 20 bp, synthetic construct
  misc_feature 1..20: note = Description of Artificial Sequence: Synthetic oligonucleotide
  misc_feature 1..20: note = Target: SCN10A; (-) strand; PAM type: NRG; PAM sequence: TGG
  source 1..20: mol_type = other DNA
tggtaatgtttttctcttga

SEQ ID NO: 19290 - DNA, 20 bp, synthetic construct
  misc_feature 1..20: note = Description of Artificial Sequence: Synthetic oligonucleotide
  misc_feature 1..20: note = Target: SCN10A; (-) strand; PAM type: NRG; PAM sequence: TGG
  source 1..20: mol_type = other DNA
tgtgctgcggagcttccgct

SEQ ID NO: 19291 - DNA, 20 bp, synthetic construct
  misc_feature 1..20: note = Description of Artificial Sequence: Synthetic oligonucleotide
  misc_feature 1..20: note = Target: SCN10A; (-) strand; PAM type: NRG; PAM sequence: GAG
  source 1..20: mol_type = other DNA
ggaagcctgtctgtgctgcg

SEQ ID NO: 19292 - DNA, 20 bp, synthetic construct
  misc_feature 1..20: note = Description of Artificial Sequence: Synthetic oligonucleotide
  misc_feature 1..20: note = Target: SCN10A; (-) strand; PAM type: NRG; PAM sequence: CGG
  source 1..20: mol_type = other DNA
agggaagcctgtctgtgctg

SEQ ID NO: 19293 - DNA, 20 bp, synthetic construct
  misc_feature 1..20: note = Description of Artificial Sequence: Synthetic oligonucleotide
  misc_feature 1..20: note = Target: SCN10A; (-) strand; PAM type: NRG; PAM sequence: AAG
  source 1..20: mol_type = other DNA
ctgggcgtggccaagaaggg

SEQ ID NO: 19294 - DNA, 20 bp, synthetic construct
  misc_feature 1..20: note = Description of Artificial Sequence: Synthetic oligonucleotide
  misc_feature 1..20: note = Target: SCN10A; (-) strand; PAM type: NRG; PAM sequence: GGG
  source 1..20: mol_type = other DNA
gagctgggcgtggccaagaa

SEQ ID NO: 19295 - DNA, 20 bp, synthetic construct
  misc_feature 1..20: note = Description of Artificial Sequence: Synthetic oligonucleotide
  misc_feature 1..20: note = Target: SCN10A; (-) strand; PAM type: NRG; PAM sequence: AGG
  source 1..20: mol_type = other DNA
agagctgggcgtggccaaga

SEQ ID NO: 19296 - DNA, 20 bp, synthetic construct
  misc_feature 1..20: note = Description of Artificial Sequence: Synthetic oligonucleotide
  misc_feature 1..20: note = Target: SCN10A; (-) strand; PAM type: NRG; PAM sequence: AAG
  source 1..20: mol_type = other DNA
tagagctgggcgtggccaag

SEQ ID NO: 19297 - DNA, 20 bp, synthetic construct
  misc_feature 1..20: note = Description of Artificial Sequence: Synthetic oligonucleotide
  misc_feature 1..20: note = Target: SCN10A; (-) strand; PAM type: NRG; PAM sequence: AAG
  source 1..20: mol_type = other DNA
tgctagagctgggcgtggcc

SEQ ID NO: 19298 - DNA, 20 bp, synthetic construct
  misc_feature 1..20: note = Description of Artificial Sequence: Synthetic oligonucleotide
  misc_feature 1..20: note = Target: SCN10A; (-) strand; PAM type: NRG; PAM sequence: TGG
  source 1..20: mol_type = other DNA
gagtctgctagagctgggcg

SEQ ID NO: 19299 - DNA, 20 bp, synthetic construct
  misc_feature 1..20: note = Description of Artificial Sequence: Synthetic oligonucleotide
  misc_feature 1..20: note = Target: SCN10A; (-) strand; PAM type: NRG; PAM sequence: GGG
  source 1..20: mol_type = other DNA
actgtgagtctgctagagct

SEQ ID NO: 19300 - DNA, 20 bp, synthetic construct
  misc_feature 1..20: note = Description of Artificial Sequence: Synthetic oligonucleotide
  misc_feature 1..20: note = Target: SCN10A; (-) strand; PAM type: NRG; PAM sequence: TGG
  source 1..20: mol_type = other DNA
cactgtgagtctgctagagc

SEQ ID NO: 19301 - DNA, 20 bp, synthetic construct
  misc_feature 1..20: note = Description of Artificial Sequence: Synthetic oligonucleotide
  misc_feature 1..20: note = Target: SCN10A; (-) strand; PAM type: NRG; PAM sequence: GAG
  source 1..20: mol_type = other DNA
tcgtcactgtgagtctgcta

SEQ ID NO: 19302 - DNA, 20 bp, synthetic construct
  misc_feature 1..20: note = Description of Artificial Sequence: Synthetic oligonucleotide
  misc_feature 1..20: note = Target: SCN10A; (-) strand; PAM type: NRG; PAM sequence: TAG
  source 1..20: mol_type = other DNA
catcgtcactgtgagtctgc

SEQ ID NO: 19303 - DNA, 20 bp, synthetic construct
  misc_feature 1..20: note = Description of Artificial Sequence: Synthetic oligonucleotide
  misc_feature 1..20: note = Target: SCN10A; (-) strand; PAM type: NRG; PAM sequence: GAG
  source 1..20: mol_type = other DNA
gactgcatcatcgtcactgt

SEQ ID NO: 19304 - DNA, 20 bp, synthetic construct
  misc_feature 1..20: note = Description of Artificial Sequence: Synthetic oligonucleotide
  misc_feature 1..20: note = Target: SCN10A; (-) strand; PAM type: NRG; PAM sequence: TGG
  source 1..20: mol_type = other DNA
actattatttccagaagaag

SEQ ID NO: 19305 - DNA, 20 bp, synthetic construct
  misc_feature 1..20: note = Description of Artificial Sequence: Synthetic oligonucleotide
  misc_feature 1..20: note = Target: SCN10A; (-) strand; PAM type: NRG; PAM sequence: AAG
  source 1..20: mol_type = other DNA
catactattatttccagaag

SEQ ID NO: 19306 - DNA, 20 bp, synthetic construct
  misc_feature 1..20: note = Description of Artificial Sequence: Synthetic oligonucleotide
  misc_feature 1..20: note = Target: SCN10A; (-) strand; PAM type: NRG; PAM sequence: AAG
  source 1..20: mol_type = other DNA
acccatactattatttccag

SEQ ID NO: 19307 - DNA, 20 bp, synthetic construct
  misc_feature 1..20: note = Description of Artificial Sequence: Synthetic oligonucleotide
  misc_feature 1..20: note = Target: SCN10A; (-) strand; PAM type: NRG; PAM sequence: CAG
  source 1..20: mol_type = other DNA
tcgacccatactattatttc

SEQ ID NO: 19308 - DNA, 20 bp, synthetic construct
  misc_feature 1..20: note = Description of Artificial Sequence: Synthetic oligonucleotide
  misc_feature 1..20: note = Target: SCN10A; (-) strand; PAM type: NRG; PAM sequence: TGG
  source 1..20: mol_type = other DNA
catattttttactgctgaaa

SEQ ID NO: 19309 - DNA, 20 bp, synthetic construct
  misc_feature 1..20: note = Description of Artificial Sequence: Synthetic oligonucleotide
  misc_feature 1..20: note = Target: SCN10A; (-) strand; PAM type: NRG; PAM sequence: AGG
  source 1..20: mol_type = other DNA
gaaagcttgtttccactcct

SEQ ID NO: 19310 - DNA, 20 bp, synthetic construct
  misc_feature 1..20: note = Description of Artificial Sequence: Synthetic oligonucleotide
  misc_feature 1..20: note = Target: SCN10A; (-) strand; PAM type: NRG; PAM sequence: TAG
  source 1..20: mol_type = other DNA
tgaaagcttgtttccactcc

SEQ ID NO: 19311 - DNA, 20 bp, synthetic construct
  misc_feature 1..20: note = Description of Artificial Sequence: Synthetic oligonucleotide
  misc_feature 1..20: note = Target: SCN10A; (-) strand; PAM type: NRG; PAM sequence: AAG
  source 1..20: mol_type = other DNA
cacagatcccactgtgatga

SEQ ID NO: 19312 - DNA, 20 bp, synthetic construct
  misc_feature 1..20: note = Description of Artificial Sequence: Synthetic oligonucleotide
  misc_feature 1..20: note = Target: SCN10A; (-) strand; PAM type: NRG; PAM sequence: CAG
  source 1..20: mol_type = other DNA
tatcattgcctccgacccca

SEQ ID NO: 19313 - DNA, 20 bp, synthetic construct
  misc_feature 1..20: note = Description of Artificial Sequence: Synthetic oligonucleotide
  misc_feature 1..20: note = Target: SCN10A; (-) strand; PAM type: NRG; PAM sequence: AAG
  source 1..20: mol_type = other DNA
ggattttctattttgtaaat

SEQ ID NO: 19314 - DNA, 20 bp, synthetic construct
  misc_feature 1..20: note = Description of Artificial Sequence: Synthetic oligonucleotide
  misc_feature 1..20: note = Target: SCN10A; (-) strand; PAM type: NRG; PAM sequence: AGG
  source 1..20: mol_type = other DNA
tagcaactgaacaaaacaaa

SEQ ID NO: 19315 - DNA, 20 bp, synthetic construct
  misc_feature 1..20: note = Description of Artificial Sequence: Synthetic oligonucleotide
  misc_feature 1..20: note = Target: SCN10A; (-) strand; PAM type: NRG; PAM sequence: AAG
  source 1..20: mol_type = other DNA
atagcaactgaacaaaacaa

SEQ ID NO: 19316 - DNA, 20 bp, synthetic construct
  misc_feature 1..20: note = Description of Artificial Sequence: Synthetic oligonucleotide
  misc_feature 1..20: note = Target: SCN10A; (-) strand; PAM type: NRG; PAM sequence: TAG
  source 1..20: mol_type = other DNA
tcaggagcccacagataaca

SEQ ID NO: 19317 - DNA, 20 bp, synthetic construct
  misc_feature 1..20: note = Description of Artificial Sequence: Synthetic oligonucleotide
  misc_feature 1..20: note = Target: SCN10A; (-) strand; PAM type: NRG; PAM sequence: CAG
  source 1..20: mol_type = other DNA
ggccaatcctcaggagccca

SEQ ID NO: 19318 - DNA, 20 bp, synthetic construct
  misc_feature 1..20: note = Description of Artificial Sequence: Synthetic oligonucleotide
  misc_feature 1..20: note = Target: SCN10A; (-) strand; PAM type: NRG; PAM sequence: GAG
  source 1..20: mol_type = other DNA
ttaccctggccaatcctcag

SEQ ID NO: 19319 - DNA, 20 bp, synthetic construct
  misc_feature 1..20: note = Description of Artificial Sequence: Synthetic oligonucleotide
  misc_feature 1..20: note = Target: SCN10A; (-) strand; PAM type: NRG; PAM sequence: AGG
  source 1..20: mol_type = other DNA
tgttaccctggccaatcctc

SEQ ID NO: 19320 - DNA, 20 bp, synthetic construct
  misc_feature 1..20: note = Description of Artificial Sequence: Synthetic oligonucleotide
  misc_feature 1..20: note = Target: SCN10A; (-) strand; PAM type: NRG; PAM sequence: CAG
  source 1..20: mol_type = other DNA
ctgttaccctggccaatcct

SEQ ID NO: 19321 - DNA, 20 bp, synthetic construct
  misc_feature 1..20: note = Description of Artificial Sequence: Synthetic oligonucleotide
  misc_feature 1..20: note = Target: SCN10A; (-) strand; PAM type: NRG; PAM sequence: TGG
  source 1..20: mol_type = other DNA
tgtcacgttgactgttaccc

SEQ ID NO: 19322 - DNA, 20 bp, synthetic construct
  misc_feature 1..20: note = Description of Artificial Sequence: Synthetic oligonucleotide
  misc_feature 1..20: note = Target: SCN10A; (-) strand; PAM type: NRG; PAM sequence: CAG
  source 1..20: mol_type = other DNA
cacagcccctgagaatggtg

SEQ ID NO: 19323 - DNA, 20 bp, synthetic construct
  misc_feature 1..20: note = Description of Artificial Sequence: Synthetic oligonucleotide
  misc_feature 1..20: note = Target: SCN10A; (-) strand; PAM type: NRG; PAM sequence: TGG
  source 1..20: mol_type = other DNA
gcatgcacagcccctgagaa

SEQ ID NO: 19324 - DNA, 20 bp, synthetic construct
  misc_feature 1..20: note = Description of Artificial Sequence: Synthetic oligonucleotide
  misc_feature 1..20: note = Target: SCN10A; (-) strand; PAM type: NRG; PAM sequence: GAG
  source 1..20: mol_type = other DNA
ctgcagcatgcacagcccct

SEQ ID NO: 19325 - DNA, 20 bp, synthetic construct
  misc_feature 1..20: note = Description of Artificial Sequence: Synthetic oligonucleotide
  misc_feature 1..20: note = Target: SCN10A; (-) strand; PAM type: NRG; PAM sequence: CAG
  source 1..20: mol_type = other DNA
tggaaaaactgcagcatgca

SEQ ID NO: 19326 - DNA, 20 bp, synthetic construct
  misc_feature 1..20: note = Description of Artificial Sequence: Synthetic oligonucleotide
  misc_feature 1..20: note = Target: SCN10A; (-) strand; PAM type: NRG; PAM sequence: CAG
  source 1..20: mol_type = other DNA
ccattcacgtggaaaaactg

SEQ ID NO: 19327 - DNA, 20 bp, synthetic construct
  misc_feature 1..20: note = Description of Artificial Sequence: Synthetic oligonucleotide
  misc_feature 1..20: note = Target: SCN10A; (-) strand; PAM type: NRG; PAM sequence: TGG
  source 1..20: mol_type = other DNA
cactcccaccaccattcacg

SEQ ID NO: 19328 - DNA, 20 bp, synthetic construct
  misc_feature 1..20: note = Description of Artificial Sequence: Synthetic oligonucleotide
  misc_feature 1..20: note = Target: SCN10A; (-) strand; PAM type: NRG; PAM sequence: AAG
  source 1..20: mol_type = other DNA
atattataataatgatctta

SEQ ID NO: 19329 - DNA, 20 bp, synthetic construct
  misc_feature 1..20: note = Description of Artificial Sequence: Synthetic oligonucleotide
  misc_feature 1..20: note = Target: SCN10A; (-) strand; PAM type: NRG; PAM sequence: CAG
  source 1..20: mol_type = other DNA
acacgttttaactactgaac

SEQ ID NO: 19330 - DNA, 20 bp, synthetic construct
  misc_feature 1..20: note = Description of Artificial Sequence: Synthetic oligonucleotide
  misc_feature 1..20: note = Target: SCN10A; (-) strand; PAM type: NRG; PAM sequence: AGG
  source 1..20: mol_type = other DNA
ctgggctgggattttaatcc

SEQ ID NO: 19331 - DNA, 20 bp, synthetic construct
  misc_feature 1..20: note = Description of Artificial Sequence: Synthetic oligonucleotide
  misc_feature 1..20: note = Target: SCN10A; (-) strand; PAM type: NRG; PAM sequence: CAG
  source 1..20: mol_type = other DNA
tctgggctgggattttaatc

SEQ ID NO: 19332 - DNA, 20 bp, synthetic construct
  misc_feature 1..20: note = Description of Artificial Sequence: Synthetic oligonucleotide
  misc_feature 1..20: note = Target: SCN10A; (-) strand; PAM type: NRG; PAM sequence: GGG
  source 1..20: mol_type = other DNA
agctaggaaatgtctgggct

SEQ ID NO: 19333 - DNA, 20 bp, synthetic construct
  misc_feature 1..20: note = Description of Artificial Sequence: Synthetic oligonucleotide
  misc_feature 1..20: note = Target: SCN10A; (-) strand; PAM type: NRG; PAM sequence: TGG
  source 1..20: mol_type = other DNA
aagctaggaaatgtctgggc

SEQ ID NO: 19334 - DNA, 20 bp, synthetic construct
  misc_feature 1..20: note = Description of Artificial Sequence: Synthetic oligonucleotide
  misc_feature 1..20: note = Target: SCN10A; (-) strand; PAM type: NRG; PAM sequence: GGG
  source 1..20: mol_type = other DNA
acataagctaggaaatgtct

SEQ ID NO: 19335 - DNA, 20 bp, synthetic construct
  misc_feature 1..20: note = Description of Artificial Sequence: Synthetic oligonucleotide
  misc_feature 1..20: note = Target: SCN10A; (-) strand; PAM type: NRG; PAM sequence: TGG
  source 1..20: mol_type = other DNA
tacataagctaggaaatgtc

SEQ ID NO: 19336 - DNA, 20 bp, synthetic construct
  misc_feature 1..20: note = Description of Artificial Sequence: Synthetic oligonucleotide
  misc_feature 1..20: note = Target: SCN10A; (-) strand; PAM type: NRG; PAM sequence: AGG
  source 1..20: mol_type = other DNA
tgtccaagcttacataagct

SEQ ID NO: 19337 - DNA, 20 bp, synthetic construct
  misc_feature 1..20: note = Description of Artificial Sequence: Synthetic oligonucleotide
  misc_feature 1..20: note = Target: SCN10A; (-) strand; PAM type: NRG; PAM sequence: TAG
  source 1..20: mol_type = other DNA
ttgtccaagcttacataagc

SEQ ID NO: 19338 - DNA, 20 bp, synthetic construct
  misc_feature 1..20: note = Description of Artificial Sequence: Synthetic oligonucleotide
  misc_feature 1..20: note = Target: SCN10A; (-) strand; PAM type: NRG; PAM sequence: AAG
  source 1..20: mol_type = other DNA
ttatttgtccaagcttacat

SEQ ID NO: 19339 - DNA, 20 bp, synthetic construct
  misc_feature 1..20: note = Description of Artificial Sequence: Synthetic oligonucleotide
  misc_feature 1..20: note = Target: SCN10A; (-) strand; PAM type: NRG; PAM sequence: AAG
  source 1..20: mol_type = other DNA
gaaggatgcattatttgtcc

SEQ ID NO: 19340 - DNA, 20 bp, synthetic construct
  misc_feature 1..20: note = Description of Artificial Sequence: Synthetic oligonucleotide
  misc_feature 1..20: note = Target: SCN10A; (-) strand; PAM type: NRG; PAM sequence: AGG
  source 1..20: mol_type = other DNA
gaggaaattgaggtacagga

SEQ ID NO: 19341 - DNA, 20 bp, synthetic construct
  misc_feature 1..20: note = Description of Artificial Sequence: Synthetic oligonucleotide
  misc_feature 1..20: note = Target: SCN10A; (-) strand; PAM type: NRG; PAM sequence: AAG
  source 1..20: mol_type = other DNA
tgaggaaattgaggtacagg

SEQ ID NO: 19342 - DNA, 20 bp, synthetic construct
  misc_feature 1..20: note = Description of Artificial Sequence: Synthetic oligonucleotide
  misc_feature 1..20: note = Target: SCN10A; (-) strand; PAM type: NRG; PAM sequence: AGG
  source 1..20: mol_type = other DNA
agatgaggaaattgaggtac

SEQ ID NO: 19343 - DNA, 20 bp, synthetic construct
  misc_feature 1..20: note = Description of Artificial Sequence: Synthetic oligonucleotide
  misc_feature 1..20: note = Target: SCN10A; (-) strand; PAM type: NRG; PAM sequence: CAG
  source 1..20: mol_type = other DNA
cagatgaggaaattgaggta

SEQ ID NO: 19344 - DNA, 20 bp, synthetic construct
  misc_feature 1..20: note = Description of Artificial Sequence: Synthetic oligonucleotide
  misc_feature 1..20: note = Target: SCN10A; (-) strand; PAM type: NRG; PAM sequence: AGG
  source 1..20: mol_type = other DNA
ttatacagatgaggaaattg

SEQ ID NO: 19345 - DNA, 20 bp, synthetic construct
  misc_feature 1..20: note = Description of Artificial Sequence: Synthetic oligonucleotide
  misc_feature 1..20: note = Target: SCN10A; (-) strand; PAM type: NRG; PAM sequence: GAG
  source 1..20: mol_type = other DNA
attatacagatgaggaaatt

SEQ ID NO: 19346 - DNA, 20 bp, synthetic construct
  misc_feature 1..20: note = Description of Artificial Sequence: Synthetic oligonucleotide
  misc_feature 1..20: note = Target: SCN10A; (-) strand; PAM type: NRG; PAM sequence: AGG
  source 1..20: mol_type = other DNA
ttatgcccattatacagatg

SEQ ID NO: 19347 - DNA, 20 bp, synthetic construct
  misc_feature 1..20: note = Description of Artificial Sequence: Synthetic oligonucleotide
  misc_feature 1..20: note = Target: SCN10A; (-) strand; PAM type: NRG; PAM sequence: GAG
  source 1..20: mol_type = other DNA
tttatgcccattatacagat

SEQ ID NO: 19348 - DNA, 20 bp, synthetic construct
  misc_feature 1..20: note = Description of Artificial Sequence: Synthetic oligonucleotide
  misc_feature 1..20: note = Target: SCN10A; (-) strand; PAM type: NRG; PAM sequence: CAG
  source 1..20: mol_type = other DNA
ctcattttatgcccattata

SEQ ID NO: 19349 - DNA, 20 bp, synthetic construct
  misc_feature 1..20: note = Description of Artificial Sequence: Synthetic oligonucleotide
  misc_feature 1..20: note = Target: SCN10A; (-) strand; PAM type: NRG; PAM sequence: TGG
  source 1..20: mol_type = other DNA
gttaagaactgcacatgcat

SEQ ID NO: 19350 - DNA, 20 bp, synthetic construct
  misc_feature 1..20: note = Description of Artificial Sequence: Synthetic oligonucleotide
  misc_feature 1..20: note = Target: SCN10A; (-) strand; PAM type: NRG; PAM sequence: AAG
  source 1..20: mol_type = other DNA
tgtctgccaggccctttgtt

SEQ ID NO: 19351 - DNA, 20 bp, synthetic construct
  misc_feature 1..20: note = Description of Artificial Sequence: Synthetic oligonucleotide
  misc_feature 1..20: note = Target: SCN10A; (-) strand; PAM type: NRG; PAM sequence: AGG
  source 1..20: mol_type = other DNA
tgaatgaattactgtctgcc

SEQ ID NO: 19352 - DNA, 20 bp, synthetic construct
  misc_feature 1..20: note = Description of Artificial Sequence: Synthetic oligonucleotide
  misc_feature 1..20: note = Target: SCN10A; (-) strand; PAM type: NRG; PAM sequence: CAG
  source 1..20: mol_type = other DNA
atgaatgaattactgtctgc

SEQ ID NO: 19353 - DNA, 20 bp, synthetic construct
  misc_feature 1..20: note = Description of Artificial Sequence: Synthetic oligonucleotide
  misc_feature 1..20: note = Target: SCN10A; (-) strand; PAM type: NRG; PAM sequence: TAG
  source 1..20: mol_type = other DNA
caatgaatcattgttcttac

SEQ ID NO: 19354 - DNA, 20 bp, synthetic construct
  misc_feature 1..20: note = Description of Artificial Sequence: Synthetic oligonucleotide
  misc_feature 1..20: note = Target: SCN10A; (-) strand; PAM type: NRG; PAM sequence: AGG
  source 1..20: mol_type = other DNA
agagcctaaaagaatcttag

SEQ ID NO: 19355 - DNA, 20 bp, synthetic construct
  misc_feature 1..20: note = Description of Artificial Sequence: Synthetic oligonucleotide
  misc_feature 1..20: note = Target: SCN10A; (-) strand; PAM type: NRG; PAM sequence: GAG
  source 1..20: mol_type = other DNA
cagagcctaaaagaatctta

SEQ ID NO: 19356 - DNA, 20 bp, synthetic construct
  misc_feature 1..20: note = Description of Artificial Sequence: Synthetic oligonucleotide
  misc_feature 1..20: note = Target: SCN10A; (-) strand; PAM type: NRG; PAM sequence: TAG
  source 1..20: mol_type = other DNA
cacagagcctaaaagaatct

SEQ ID NO: 19357 - DNA, 20 bp, synthetic construct
  misc_feature 1..20: note = Description of Artificial Sequence: Synthetic oligonucleotide
  misc_feature 1..20: note = Target: SCN10A; (-) strand; PAM type: NRG; PAM sequence: AAG
  source 1..20: mol_type = other DNA
tagagacacacagagcctaa

SEQ ID NO: 19358 - DNA, 20 bp, synthetic construct
  misc_feature 1..20: note = Description of Artificial Sequence: Synthetic oligonucleotide
  misc_feature 1..20: note = Target: SCN10A; (-) strand; PAM type: NRG; PAM sequence: GAG
  source 1..20: mol_type = other DNA
aagacaattagagacacaca

SEQ ID NO: 19359 - DNA, 20 bp, synthetic construct
  misc_feature 1..20: note = Description of Artificial Sequence: Synthetic oligonucleotide
  misc_feature 1..20: note = Target: SCN10A; (-) strand; PAM type: NRG; PAM sequence: CAG
  source 1..20: mol_type = other DNA
ttaagacaattagagacaca

SEQ ID NO: 19360 - DNA, 20 bp, synthetic construct
  misc_feature 1..20: note = Description of Artificial Sequence: Synthetic oligonucleotide
  misc_feature 1..20: note = Target: SCN10A; (-) strand; PAM type: NRG; PAM sequence: GAG
  source 1..20: mol_type = other DNA
tgtcctatttaagacaatta

SEQ ID NO: 19361 - DNA, 20 bp, synthetic construct
  misc_feature 1..20: note = Description of Artificial Sequence: Synthetic oligonucleotide
  misc_feature 1..20: note = Target: SCN10A; (-) strand; PAM type: NRG; PAM sequence: TAG
  source 1..20: mol_type = other DNA
tctgtcctatttaagacaat

SEQ ID NO: 19362 - DNA, 20 bp, synthetic construct
  misc_feature 1..20: note = Description of Artificial Sequence: Synthetic oligonucleotide
  misc_feature 1..20: note = Target: SCN10A; (-) strand; PAM type: NRG; PAM sequence: AAG
  source 1..20: mol_type = other DNA
gtcagaattctgtcctattt

SEQ ID NO: 19363 - DNA, 20 bp, synthetic construct
  misc_feature 1..20: note = Description of Artificial Sequence: Synthetic oligonucleotide
  misc_feature 1..20: note = Target: SCN10A; (-) strand; PAM type: NRG; PAM sequence: CAG
  source 1..20: mol_type = other DNA
gttctgacctctctcagtgt

SEQ ID NO: 19364 - DNA, 20 bp, synthetic construct
  misc_feature 1..20: note = Description of Artificial Sequence: Synthetic oligonucleotide
  misc_feature 1..20: note = Target: SCN10A; (-) strand; PAM type: NRG; PAM sequence: CAG
  source 1..20: mol_type = other DNA
agcctggttctgacctctct

SEQ ID NO: 19365 - DNA, 20 bp, synthetic construct
  misc_feature 1..20: note = Description of Artificial Sequence: Synthetic oligonucleotide
  misc_feature 1..20: note = Target: SCN10A; (-) strand; PAM type: NRG; PAM sequence: TGG
  source 1..20: mol_type = other DNA
gttgttgtgttacccgagcc

SEQ ID NO: 19366 - DNA, 20 bp, synthetic construct
  misc_feature 1..20: note = Description of Artificial Sequence: Synthetic oligonucleotide
  misc_feature 1..20: note = Target: SCN10A; (-) strand; PAM type: NRG; PAM sequence: GAG
  source 1..20: mol_type = other DNA
tgctggttgttgtgttaccc

SEQ ID NO: 19367 - DNA, 20 bp, synthetic construct
  misc_feature 1..20: note = Description of Artificial Sequence: Synthetic oligonucleotide
  misc_feature 1..20: note = Target: SCN10A; (-) strand; PAM type: NRG; PAM sequence: TGG
  source 1..20: mol_type = other DNA
tctctgtctcccttccctgc

SEQ ID NO: 19368 - DNA, 20 bp, synthetic construct
  misc_feature 1..20: note = Description of Artificial Sequence: Synthetic oligonucleotide
  misc_feature 1..20: note = Target: SCN10A; (-) strand; PAM type: NRG; PAM sequence: TGG
  source 1..20: mol_type = other DNA
gaaggaaaagcacctgaccc

SEQ ID NO: 19369 - DNA, 20 bp, synthetic construct
  misc_feature 1..20: note = Description of Artificial Sequence: Synthetic oligonucleotide
  misc_feature 1..20: note = Target: SCN10A; (-) strand; PAM type: NRG; PAM sequence: AAG
  source 1..20: mol_type = other DNA
gataaaaagatatgaaggaa

SEQ ID NO: 19370 - DNA, 20 bp, synthetic construct
  misc_feature 1..20: note = Description of Artificial Sequence: Synthetic oligonucleotide
  misc_feature 1..20: note = Target: SCN10A; (-) strand; PAM type: NRG; PAM sequence: AGG
  source 1..20: mol_type = other DNA
gctcagataaaaagatatga

SEQ ID NO: 19371 - DNA, 20 bp, synthetic construct
  misc_feature 1..20: note = Description of Artificial Sequence: Synthetic oligonucleotide
  misc_feature 1..20: note = Target: SCN10A; (-) strand; PAM type: NRG; PAM sequence: AAG
  source 1..20: mol_type = other DNA
ggctcagataaaaagatatg

SEQ ID NO: 19372 - DNA, 20 bp, synthetic construct
  misc_feature 1..20: note = Description of Artificial Sequence: Synthetic oligonucleotide
  misc_feature 1..20: note = Target: SCN10A; (-) strand; PAM type: NRG; PAM sequence: AAG
  source 1..20: mol_type = other DNA
tggtgaggggctcagataaa

SEQ ID NO: 19373 - DNA, 20 bp, synthetic construct
  misc_feature 1..20: note = Description of Artificial Sequence: Synthetic oligonucleotide
  misc_feature 1..20: note = Target: SCN10A; (-) strand; PAM type: NRG; PAM sequence: CAG
  source 1..20: mol_type = other DNA
tctcaggctggtgaggggct

SEQ ID NO: 19374 - DNA, 20 bp, synthetic construct
  misc_feature 1..20: note = Description of Artificial Sequence: Synthetic oligonucleotide
  misc_feature 1..20: note = Target: SCN10A; (-) strand; PAM type: NRG; PAM sequence: GGG
  source 1..20: mol_type = other DNA
ctgtttctcaggctggtgag

SEQ ID NO: 19375 - DNA, 20 bp, synthetic construct
  misc_feature 1..20: note = Description of Artificial Sequence: Synthetic oligonucleotide
  misc_feature 1..20: note = Target: SCN10A; (-) strand; PAM type: NRG; PAM sequence: GGG
  source 1..20: mol_type = other DNA
tctgtttctcaggctggtga

SEQ ID NO: 19376 - DNA, 20 bp, synthetic construct
  misc_feature 1..20: note = Description of Artificial Sequence: Synthetic oligonucleotide
  misc_feature 1..20: note = Target: SCN10A; (-) strand; PAM type: NRG; PAM sequence: AGG
  source 1..20: mol_type = other DNA
gtctgtttctcaggctggtg

SEQ ID NO: 19377 - DNA, 20 bp, synthetic construct
  misc_feature 1..20: note = Description of Artificial Sequence: Synthetic oligonucleotide
  misc_feature 1..20: note = Target: SCN10A; (-) strand; PAM type: NRG; PAM sequence: GAG
  source 1..20: mol_type = other DNA
tgtctgtttctcaggctggt

SEQ ID NO: 19378 - DNA, 20 bp, synthetic construct
  misc_feature 1..20: note = Description of Artificial Sequence: Synthetic oligonucleotide
  misc_feature 1..20: note = Target: SCN10A; (-) strand; PAM type: NRG; PAM sequence: TGG
  source 1..20: mol_type = other DNA
gcattgtctgtttctcaggc

SEQ ID NO: 19379 - DNA, 20 bp, synthetic construct
  misc_feature 1..20: note = Description of Artificial Sequence: Synthetic oligonucleotide
  misc_feature 1..20: note = Target: SCN10A; (-) strand; PAM type: NRG; PAM sequence: AGG
  source 1..20: mol_type = other DNA
ggatgcattgtctgtttctc

SEQ ID NO: 19380 - DNA, 20 bp, synthetic construct
  misc_feature 1..20: note = Description of Artificial Sequence: Synthetic oligonucleotide
  misc_feature 1..20: note = Target: SCN10A; (-) strand; PAM type: NRG; PAM sequence: CAG
  source 1..20: mol_type = other DNA
aggatgcattgtctgtttct

SEQ ID NO: 19381 - DNA, 20 bp, synthetic construct
  misc_feature 1..20: note = Description of Artificial Sequence: Synthetic oligonucleotide
  misc_feature 1..20: note = Target: SCN10A; (-) strand; PAM type: NRG; PAM sequence: AGG
  source 1..20: mol_type = other DNA
ctgttttcttctccataaga

SEQ ID NO: 19382 - DNA, 20 bp, synthetic construct
  misc_feature 1..20: note = Description of Artificial Sequence: Synthetic oligonucleotide
  misc_feature 1..20: note = Target: SCN10A; (-) strand; PAM type: NRG; PAM sequence: AAG
  source 1..20: mol_type = other DNA
cctgttttcttctccataag

SEQ ID NO: 19383 - DNA, 20 bp, synthetic construct
  misc_feature 1..20: note = Description of Artificial Sequence: Synthetic oligonucleotide
  misc_feature 1..20: note = Target: SCN10A; (-) strand; PAM type: NRG; PAM sequence: AAG
  source 1..20: mol_type = other DNA
cagcctgttttcttctccat

SEQ ID NO: 19384 - DNA, 20 bp, synthetic construct
  misc_feature 1..20: note = Description of Artificial Sequence: Synthetic oligonucleotide
  misc_feature 1..20: note = Target: SCN10A; (-) strand; PAM type: NRG; PAM sequence: CAG
  source 1..20: mol_type = other DNA
gagaaagtcacttaaactct

SEQ ID NO: 19385 - DNA, 20 bp, synthetic construct
  misc_feature 1..20: note = Description of Artificial Sequence: Synthetic oligonucleotide
  misc_feature 1..20: note = Target: SCN10A; (-) strand; PAM type: NRG; PAM sequence: AAG
  source 1..20: mol_type = other DNA
atcagtcttgtggcatgaga

SEQ ID NO: 19386 - DNA, 20 bp, synthetic construct
  misc_feature 1..20: note = Description of Artificial Sequence: Synthetic oligonucleotide
  misc_feature 1..20: note = Target: SCN10A; (-) strand; PAM type: NRG; PAM sequence: GAG
  source 1..20: mol_type = other DNA
ttgaatcagtcttgtggcat

SEQ ID NO: 19387 - DNA, 20 bp, synthetic construct
  misc_feature 1..20: note = Description of Artificial Sequence: Synthetic oligonucleotide
  misc_feature 1..20: note = Target: SCN10A; (-) strand; PAM type: NRG; PAM sequence: TGG
  source 1..20: mol_type = other DNA
tactctttgaatcagtcttg

SEQ ID NO: 19388 - DNA, 20 bp, synthetic construct
  misc_feature 1..20: note = Description of Artificial Sequence: Synthetic oligonucleotide
  misc_feature 1..20: note = Target: SCN10A; (-) strand; PAM type: NRG; PAM sequence: CAG
  source 1..20: mol_type = other DNA
tccatagatactctttgaat

SEQ ID NO: 19389 - DNA, 20 bp, synthetic construct
  misc_feature 1..20: note = Description of Artificial Sequence: Synthetic oligonucleotide
  misc_feature 1..20: note = Target: SCN10A; (-) strand; PAM type: NRG; PAM sequence: TAG
  source 1..20: mol_type = other DNA
tgcctacaagggacactcca

SEQ ID NO: 19390 - DNA, 20 bp, synthetic construct
  misc_feature 1..20: note = Description of Artificial Sequence: Synthetic oligonucleotide
  misc_feature 1..20: note = Target: SCN10A; (-) strand; PAM type: NRG; PAM sequence: GGG
  source 1..20: mol_type = other DNA
ccacactgacttgcctacaa

SEQ ID NO: 19391 - DNA, 20 bp, synthetic construct
  misc_feature 1..20: note = Description of Artificial Sequence: Synthetic oligonucleotide
  misc_feature 1..20: note = Target: SCN10A; (-) strand; PAM type: NRG; PAM sequence: AGG
  source 1..20: mol_type = other DNA
accacactgacttgcctaca

SEQ ID NO: 19392 - DNA, 20 bp, synthetic construct
  misc_feature 1..20: note = Description of Artificial Sequence: Synthetic oligonucleotide
  misc_feature 1..20: note = Target: SCN10A; (-) strand; PAM type: NRG; PAM sequence: AAG
  source 1..20: mol_type = other DNA
caccacactgacttgcctac

SEQ ID NO: 19393 - DNA, 20 bp, synthetic construct
  misc_feature 1..20: note = Description of Artificial Sequence: Synthetic oligonucleotide
  misc_feature 1..20: note = Target: SCN10A; (-) strand; PAM type: NRG; PAM sequence: AAG
  source 1..20: mol_type = other DNA
cccaggtctctggaagacac

SEQ ID NO: 19394 - DNA, 20 bp, synthetic construct
  misc_feature 1..20: note = Description of Artificial Sequence: Synthetic oligonucleotide
  misc_feature 1..20: note = Target: SCN10A; (-) strand; PAM type: NRG; PAM sequence: AAG
  source 1..20: mol_type = other DNA
gggtggacccaggtctctgg

SEQ ID NO: 19395 - DNA, 20 bp, synthetic construct
  misc_feature 1..20: note = Description of Artificial Sequence: Synthetic oligonucleotide
  misc_feature 1..20: note = Target: SCN10A; (-) strand; PAM type: NRG; PAM sequence: TGG
  source 1..20: mol_type = other DNA
ccagggtggacccaggtctc

SEQ ID NO: 19396 - DNA, 20 bp, synthetic construct
  misc_feature 1..20: note = Description of Artificial Sequence: Synthetic oligonucleotide
  misc_feature 1..20: note = Target: SCN10A; (-) strand; PAM type: NRG; PAM sequence: AGG
  source 1..20: mol_type = other DNA
ggtggatccagggtggaccc

SEQ ID NO: 19397 - DNA, 20 bp, synthetic construct
  misc_feature 1..20: note = Description of Artificial Sequence: Synthetic oligonucleotide
  misc_feature 1..20: note = Target: SCN10A; (-) strand; PAM type: NRG; PAM sequence: CAG
  source 1..20: mol_type = other DNA
gggtggatccagggtggacc

SEQ ID NO: 19398 - DNA, 20 bp, synthetic construct
  misc_feature 1..20: note = Description of Artificial Sequence: Synthetic oligonucleotide
  misc_feature 1..20: note = Target: SCN10A; (-) strand; PAM type: NRG; PAM sequence: TGG
  source 1..20: mol_type = other DNA
tggtgagggtggatccaggg

SEQ ID NO: 19399 - DNA, 20 bp, synthetic construct
  misc_feature 1..20: note = Description of Artificial Sequence: Synthetic oligonucleotide
  misc_feature 1..20: note = Target: SCN10A; (-) strand; PAM type: NRG; PAM sequence: GGG
  source 1..20: mol_type = other DNA
agctggtgagggtggatcca

SEQ ID NO: 19400 - DNA, 20 bp, synthetic construct
  misc_feature 1..20: note = Description of Artificial Sequence: Synthetic oligonucleotide
  misc_feature 1..20: note = Target: SCN10A; (-) strand; PAM type: NRG; PAM sequence: AGG
  source 1..20: mol_type = other DNA
tagctggtgagggtggatcc

SEQ ID NO: 19401 - DNA, 20 bp, synthetic construct
  misc_feature 1..20: note = Description of Artificial Sequence: Synthetic oligonucleotide
  misc_feature 1..20: note = Target: SCN10A; (-) strand; PAM type: NRG; PAM sequence: CAG
  source 1..20: mol_type = other DNA
atagctggtgagggtggatc

SEQ ID NO: 19402 - DNA, 20 bp, synthetic construct
  misc_feature 1..20: note = Description of Artificial Sequence: Synthetic oligonucleotide
  misc_feature 1..20: note = Target: SCN10A; (-) strand; PAM type: NRG; PAM sequence: TGG
  source 1..20: mol_type = other DNA
aattgtatagctggtgaggg

SEQ ID NO: 19403 - DNA, 20 bp, synthetic construct
  misc_feature 1..20: note = Description of Artificial Sequence: Synthetic oligonucleotide
  misc_feature 1..20: note = Target: SCN10A; (-) strand; PAM type: NRG; PAM sequence: GGG
  source 1..20: mol_type = other DNA
caaaattgtatagctggtga

SEQ ID NO: 19404 - DNA, 20 bp, synthetic construct
  misc_feature 1..20: note = Description of Artificial Sequence: Synthetic oligonucleotide
  misc_feature 1..20: note = Target: SCN10A; (-) strand; PAM type: NRG; PAM sequence: AGG
  source 1..20: mol_type = other DNA
ccaaaattgtatagctggtg

SEQ ID NO: 19405 - DNA, 20 bp, synthetic construct
  misc_feature 1..20: note = Description of Artificial Sequence: Synthetic oligonucleotide
  misc_feature 1..20: note = Target: SCN10A; (-) strand; PAM type: NRG; PAM sequence: GAG
  source 1..20: mol_type = other DNA
cccaaaattgtatagctggt

SEQ ID NO: 19406 - DNA, 20 bp, synthetic construct
  misc_feature 1..20: note = Description of Artificial Sequence: Synthetic oligonucleotide
  misc_feature 1..20: note = Target: SCN10A; (-) strand; PAM type: NRG; PAM sequence: TGG
  source 1..20: mol_type = other DNA
cctgcccaaaattgtatagc

SEQ ID NO: 19407 - DNA, 20 bp, synthetic construct
  misc_feature 1..20: note = Description of Artificial Sequence: Synthetic oligonucleotide
  misc_feature 1..20: note = Target: SCN10A; (-) strand; PAM type: NRG; PAM sequence: TAG
  source 1..20: mol_type = other DNA
atatcctgcccaaaattgta

SEQ ID NO: 19408 - DNA, 20 bp, synthetic construct
  misc_feature 1..20: note = Description of Artificial Sequence: Synthetic oligonucleotide
  misc_feature 1..20: note = Target: SCN10A; (-) strand; PAM type: NRG; PAM sequence: AGG
  source 1..20: mol_type = other DNA
gagagcactaagactcagag

SEQ ID NO: 19409 - DNA, 20 bp, synthetic construct
  misc_feature 1..20: note = Description of Artificial Sequence: Synthetic oligonucleotide
  misc_feature 1..20: note = Target: SCN10A; (-) strand; PAM type: NRG; PAM sequence: GAG
  source 1..20: mol_type = other DNA
agagagcactaagactcaga

SEQ ID NO: 19410 - DNA, 20 bp, synthetic construct
  misc_feature 1..20: note = Description of Artificial Sequence: Synthetic oligonucleotide
  misc_feature 1..20: note = Target: SCN10A; (-) strand; PAM type: NRG; PAM sequence: GAG
  source 1..20: mol_type = other DNA
aaagagagcactaagactca

SEQ ID NO: 19411 - DNA, 20 bp, synthetic construct
  misc_feature 1..20: note = Description of Artificial Sequence: Synthetic oligonucleotide
  misc_feature 1..20: note = Target: SCN10A; (-) strand; PAM type: NRG; PAM sequence: CAG
  source 1..20: mol_type = other DNA
caaaagagagcactaagact

SEQ ID NO: 19412 - DNA, 20 bp, synthetic construct
  misc_feature 1..20: note = Description of Artificial Sequence: Synthetic oligonucleotide
  misc_feature 1..20: note = Target: SCN10A; (-) strand; PAM type: NRG; PAM sequence: AAG
  source 1..20: mol_type = other DNA
acatgacaaaagagagcact

SEQ ID NO: 19413 - DNA, 20 bp, synthetic construct
  misc_feature 1..20: note = Description of Artificial Sequence: Synthetic oligonucleotide
  misc_feature 1..20: note = Target: SCN10A; (-) strand; PAM type: NRG; PAM sequence: GAG
  source 1..20: mol_type = other DNA
caccctcacatgacaaaaga

SEQ ID NO: 19414 - DNA, 20 bp, synthetic construct
  misc_feature 1..20: note = Description of Artificial Sequence: Synthetic oligonucleotide
  misc_feature 1..20: note = Target: SCN10A; (-) strand; PAM type: NRG; PAM sequence: GAG
  source 1..20: mol_type = other DNA
atcaccctcacatgacaaaa

SEQ ID NO: 19415 - DNA, 20 bp, synthetic construct
  misc_feature 1..20: note = Description of Artificial Sequence: Synthetic oligonucleotide
  misc_feature 1..20: note = Target: SCN10A; (-) strand; PAM type: NRG; PAM sequence: AAG
  source 1..20: mol_type = other DNA
acatcaccctcacatgacaa

SEQ ID NO: 19416 - DNA, 20 bp, synthetic construct
  misc_feature 1..20: note = Description of Artificial Sequence: Synthetic oligonucleotide
  misc_feature 1..20: note = Target: SCN10A; (-) strand; PAM type: NRG; PAM sequence: AGG
  source 1..20: mol_type = other DNA
agtgtcacaacaacattatg

SEQ ID NO: 19417 - DNA, 20 bp, synthetic construct
  misc_feature 1..20: note = Description of Artificial Sequence: Synthetic oligonucleotide
  misc_feature 1..20: note = Target: SCN10A; (-) strand; PAM type: NRG; PAM sequence: GAG
  source 1..20: mol_type = other DNA
cagtgtcacaacaacattat

SEQ ID NO: 19418 - DNA, 20 bp, synthetic construct
  misc_feature 1..20: note = Description of Artificial Sequence: Synthetic oligonucleotide
  misc_feature 1..20: note = Target: SCN10A; (-) strand; PAM type: NRG; PAM sequence: CAG
  source 1..20: mol_type = other DNA
gtgctttatgaatgttattt

SEQ ID NO: 19419 - DNA, 20 bp, synthetic construct
  misc_feature 1..20: note = Description of Artificial Sequence: Synthetic oligonucleotide
  misc_feature 1..20: note = Target: SCN10A; (-) strand; PAM type: NRG; PAM sequence: AGG
  source 1..20: mol_type = other DNA
cttggtgcctgcaatgagtc

SEQ ID NO: 19420 - DNA, 20 bp, synthetic construct
  misc_feature 1..20: note = Description of Artificial Sequence: Synthetic oligonucleotide
  misc_feature 1..20: note = Target: SCN10A; (-) strand; PAM type: NRG; PAM sequence: CAG
  source 1..20: mol_type = other DNA
gcttggtgcctgcaatgagt

SEQ ID NO: 19421 - DNA, 20 bp, synthetic construct
  misc_feature 1..20: note = Description of Artificial Sequence: Synthetic oligonucleotide
  misc_feature 1..20: note = Target: SCN10A; (-) strand; PAM type: NRG; PAM sequence: GAG
  source 1..20: mol_type = other DNA
atgtgcttggtgcctgcaat

SEQ ID NO: 19422 - DNA, 20 bp, synthetic construct
  misc_feature 1..20: note = Description of Artificial Sequence: Synthetic oligonucleotide
  misc_feature 1..20: note = Target: SCN10A; (-) strand; PAM type: NRG; PAM sequence: TGG
  source 1..20: mol_type = other DNA
aagcaagaaagtcatgtgct

SEQ ID NO: 19423 - DNA, 20 bp, synthetic construct
  misc_feature 1..20: note = Description of Artificial Sequence: Synthetic oligonucleotide
  misc_feature 1..20: note = Target: SCN10A; (-) strand; PAM type: NRG; PAM sequence: AAG
  source 1..20: mol_type = other DNA
gccacttttttaaagcaaga

SEQ ID NO: 19424 - DNA, 20 bp, synthetic construct
  misc_feature 1..20: note = Description of Artificial Sequence: Synthetic oligonucleotide
  misc_feature 1..20: note = Target: SCN10A; (-) strand; PAM type: NRG; PAM sequence: AAG
  source 1..20: mol_type = other DNA
aagtgccacttttttaaagc

SEQ ID NO: 19425 - DNA, 20 bp, synthetic construct
  misc_feature 1..20: note = Description of Artificial Sequence: Synthetic oligonucleotide
  misc_feature 1..20: note = Target: SCN10A; (-) strand; PAM type: NRG; PAM sequence: AAG
  source 1..20: mol_type = other DNA
aggaaagtgccactttttta

SEQ ID NO: 19426 - DNA, 20 bp, synthetic construct
  misc_feature 1..20: note = Description of Artificial Sequence: Synthetic oligonucleotide
  misc_feature 1..20: note = Target: SCN10A; (-) strand; PAM type: NRG; PAM sequence: AAG
  source 1..20: mol_type = other DNA
tttcccacagtgtcagagga

SEQ ID NO: 19427 - DNA, 20 bp, synthetic construct
  misc_feature 1..20: note = Description of Artificial Sequence: Synthetic oligonucleotide
  misc_feature 1..20: note = Target: SCN10A; (-) strand; PAM type: NRG; PAM sequence: AGG
  source 1..20: mol_type = other DNA
ggcctttcccacagtgtcag

SEQ ID NO: 19428 - DNA, 20 bp, synthetic construct
  misc_feature 1..20: note = Description of Artificial Sequence: Synthetic oligonucleotide
  misc_feature 1..20: note = Target: SCN10A; (-) strand; PAM type: NRG; PAM sequence: GAG
  source 1..20: mol_type = other DNA
aggcctttcccacagtgtca

SEQ ID NO: 19429 - DNA, 20 bp, synthetic construct
  misc_feature 1..20: note = Description of Artificial Sequence: Synthetic oligonucleotide
  misc_feature 1..20: note = Target: SCN10A; (-) strand; PAM type: NRG; PAM sequence: CAG
  source 1..20: mol_type = other DNA
aaaggcctttcccacagtgt

SEQ ID NO: 19430 - DNA, 20 bp, synthetic construct
  misc_feature 1..20: note = Description of Artificial Sequence: Synthetic oligonucleotide
  misc_feature 1..20: note = Target: SCN10A; (-) strand; PAM type: NRG; PAM sequence: CAG
  source 1..20: mol_type = other DNA
gagagaaaaggcctttccca

SEQ ID NO: 19431 - DNA, 20 bp, synthetic construct
  misc_feature 1..20: note = Description of Artificial Sequence: Synthetic oligonucleotide
  misc_feature 1..20: note = Target: SCN10A; (-) strand; PAM type: NRG; PAM sequence: AGG
  source 1..20: mol_type = other DNA
gtggaagcaagagagagaaa

SEQ ID NO: 19432 - DNA, 20 bp, synthetic construct
  misc_feature 1..20: note = Description of Artificial Sequence: Synthetic oligonucleotide
  misc_feature 1..20: note = Target: SCN10A; (-) strand; PAM type: NRG; PAM sequence: AAG
  source 1..20: mol_type = other DNA
agtggaagcaagagagagaa

SEQ ID NO: 19433 - DNA, 20 bp, synthetic construct
  misc_feature 1..20: note = Description of Artificial Sequence: Synthetic oligonucleotide
  misc_feature 1..20: note = Target: SCN10A; (-) strand; PAM type: NRG; PAM sequence: GAG
  source 1..20: mol_type = other DNA
agaaaagtggaagcaagaga

SEQ ID NO: 19434 - DNA, 20 bp, synthetic construct
  misc_feature 1..20: note = Description of Artificial Sequence: Synthetic oligonucleotide
  misc_feature 1..20: note = Target: SCN10A; (-) strand; PAM type: NRG; PAM sequence: GAG
  source 1..20: mol_type = other DNA
ttagaaaagtggaagcaaga

SEQ ID NO: 19435 - DNA, 20 bp, synthetic construct
  misc_feature 1..20: note = Description of Artificial Sequence: Synthetic oligonucleotide
  misc_feature 1..20: note = Target: SCN10A; (-) strand; PAM type: NRG; PAM sequence: GAG
  source 1..20: mol_type = other DNA
agttagaaaagtggaagcaa

SEQ ID NO: 19436 - DNA, 20 bp, synthetic construct
  misc_feature 1..20: note = Description of Artificial Sequence: Synthetic oligonucleotide
  misc_feature 1..20: note = Target: SCN10A; (-) strand; PAM type: NRG; PAM sequence: AAG
  source 1..20: mol_type = other DNA
acagttagaaaagtggaagc

SEQ ID NO: 19437 - DNA, 20 bp, synthetic construct
  misc_feature 1..20: note = Description of Artificial Sequence: Synthetic oligonucleotide
  misc_feature 1..20: note = Target: SCN10A; (-) strand; PAM type: NRG; PAM sequence: AAG
  source 1..20: mol_type = other DNA
ttctacagttagaaaagtgg

SEQ ID NO: 19438 - DNA, 20 bp, synthetic construct
  misc_feature 1..20: note = Description of Artificial Sequence: Synthetic oligonucleotide
  misc_feature 1..20: note = Target: SCN10A; (-) strand; PAM type: NRG; PAM sequence: TGG
  source 1..20: mol_type = other DNA
tcattctacagttagaaaag

SEQ ID NO: 19439 - DNA, 20 bp, synthetic construct
  misc_feature 1..20: note = Description of Artificial Sequence: Synthetic oligonucleotide
  misc_feature 1..20: note = Target: SCN10A; (-) strand; PAM type: NRG; PAM sequence: AAG
  source 1..20: mol_type = other DNA
ccctcattctacagttagaa

SEQ ID NO: 19440 - DNA, 20 bp, synthetic construct
  misc_feature 1..20: note = Description of Artificial Sequence: Synthetic oligonucleotide
  misc_feature 1..20: note = Target: SCN10A; (-) strand; PAM type: NRG; PAM sequence: TAG
  source 1..20: mol_type = other DNA
ccacaccctcattctacagt

SEQ ID NO: 19441 - DNA, 20 bp, synthetic construct
  misc_feature 1..20: note = Description of Artificial Sequence: Synthetic oligonucleotide
  misc_feature 1..20: note = Target: SCN10A; (-) strand; PAM type: NRG; PAM sequence: CAG
  source 1..20: mol_type = other DNA
gagcccacaccctcattcta

SEQ ID NO: 19442 - DNA, 20 bp, synthetic construct
  misc_feature 1..20: note = Description of Artificial Sequence: Synthetic oligonucleotide
  misc_feature 1..20: note = Target: SCN10A; (-) strand; PAM type: NRG; PAM sequence: GAG
  source 1..20: mol_type = other DNA
gccttatggaatagacattt

SEQ ID NO: 19443 - DNA, 20 bp, synthetic construct
  misc_feature 1..20: note = Description of Artificial Sequence: Synthetic oligonucleotide
  misc_feature 1..20: note = Target: SCN10A; (-) strand; PAM type: NRG; PAM sequence: TAG
  source 1..20: mol_type = other DNA
ccacagagggccttatggaa

SEQ ID NO: 19444 - DNA, 20 bp, synthetic construct
  misc_feature 1..20: note = Description of Artificial Sequence: Synthetic oligonucleotide
  misc_feature 1..20: note = Target: SCN10A; (-) strand; PAM type: NRG; PAM sequence: TGG
  source 1..20: mol_type = other DNA
taagaccacagagggcctta

SEQ ID NO: 19445 - DNA, 20 bp, synthetic construct
  misc_feature 1..20: note = Description of Artificial Sequence: Synthetic oligonucleotide
  misc_feature 1..20: note = Target: SCN10A; (-) strand; PAM type: NRG; PAM sequence: GGG
  source 1..20: mol_type = other DNA
agtcagcctaagaccacaga

SEQ ID NO: 19446 - DNA, 20 bp, synthetic construct
  misc_feature 1..20: note = Description of Artificial Sequence: Synthetic oligonucleotide
  misc_feature 1..20: note = Target: SCN10A; (-) strand; PAM type: NRG; PAM sequence: AGG
  source 1..20: mol_type = other DNA
aagtcagcctaagaccacag

SEQ ID NO: 19447 - DNA, 20 bp, synthetic construct
  misc_feature 1..20: note = Description of Artificial Sequence: Synthetic oligonucleotide
  misc_feature 1..20: note = Target: SCN10A; (-) strand; PAM type: NRG; PAM sequence: GAG
  source 1..20: mol_type = other DNA
gaagtcagcctaagaccaca

SEQ ID NO: 19448 - DNA, 20 bp, synthetic construct
  misc_feature 1..20: note = Description of Artificial Sequence: Synthetic oligonucleotide
  misc_feature 1..20: note = Target: SCN10A; (-) strand; PAM type: NRG; PAM sequence: CAG
  source 1..20: mol_type = other DNA
aagaagtcagcctaagacca

SEQ ID NO: 19449 - DNA, 20 bp, synthetic construct
  misc_feature 1..20: note = Description of Artificial Sequence: Synthetic oligonucleotide
  misc_feature 1..20: note = Target: SCN10A; (-) strand; PAM type: NRG; PAM sequence: AAG
  source 1..20: mol_type = other DNA
tattcccaagaagtcagcct

SEQ ID NO: 19450 - DNA, 20 bp, synthetic construct
  misc_feature 1..20: note = Description of Artificial Sequence: Synthetic oligonucleotide
  misc_feature 1..20: note = Target: SCN10A; (-) strand; PAM type: NRG; PAM sequence: CAG
  source 1..20: mol_type = other DNA
aatgcttattcccaagaagt

SEQ ID NO: 19451 - DNA, 20 bp, synthetic construct
  misc_feature 1..20: note = Description of Artificial Sequence: Synthetic oligonucleotide
  misc_feature 1..20: note = Target: SCN10A; (-) strand; PAM type: NRG; PAM sequence: AAG
  source 1..20: mol_type = other DNA
agagaatgcttattcccaag

SEQ ID NO: 19452 - DNA, 20 bp, synthetic construct
  misc_feature 1..20: note = Description of Artificial Sequence: Synthetic oligonucleotide
  misc_feature 1..20: note = Target: SCN10A; (-) strand; PAM type: NRG; PAM sequence: AAG
  source 1..20: mol_type = other DNA
agaagagaatgcttattccc

SEQ ID NO: 19453 - DNA, 20 bp, synthetic construct
  misc_feature 1..20: note = Description of Artificial Sequence: Synthetic oligonucleotide
  misc_feature 1..20: note = Target: SCN10A; (-) strand; PAM type: NRG; PAM sequence: GAG
  source 1..20: mol_type = other DNA
aaggaaaaatggaaagagaa

SEQ ID NO: 19454 - DNA, 20 bp, synthetic construct
  misc_feature 1..20: note = Description of Artificial Sequence: Synthetic oligonucleotide
  misc_feature 1..20: note = Target: SCN10A; (-) strand; PAM type: NRG; PAM sequence: AAG
  source 1..20: mol_type = other DNA
aaaaggaaaaatggaaagag

SEQ ID NO: 19455 - DNA, 20 bp, synthetic construct
  misc_feature 1..20: note = Description of Artificial Sequence: Synthetic oligonucleotide
  misc_feature 1..20: note = Target: SCN10A; (-) strand; PAM type: NRG; PAM sequence: GAG
  source 1..20: mol_type = other DNA
atgaaaaggaaaaatggaaa

SEQ ID NO: 19456 - DNA, 20 bp, synthetic construct
  misc_feature 1..20: note = Description of Artificial Sequence: Synthetic oligonucleotide
  misc_feature 1..20: note = Target: SCN10A; (-) strand; PAM type: NRG; PAM sequence: AAG
  source 1..20: mol_type = other DNA
atatgaaaaggaaaaatgga

SEQ ID NO: 19457 - DNA, 20 bp, synthetic construct
  misc_feature 1..20: note = Description of Artificial Sequence: Synthetic oligonucleotide
  misc_feature 1..20: note = Target: SCN10A; (-) strand; PAM type: NRG; PAM sequence: TGG
  source 1..20: mol_type = other DNA
gttgatatgaaaaggaaaaa

SEQ ID NO: 19458 - DNA, 20 bp, synthetic construct
  misc_feature 1..20: note = Description of Artificial Sequence: Synthetic oligonucleotide
  misc_feature 1..20: note = Target: SCN10A; (-) strand; PAM type: NRG; PAM sequence: AGG
  source 1..20: mol_type = other DNA
atcctaaagttgatatgaaa

SEQ ID NO: 19459 - DNA, 20 bp, synthetic construct
  misc_feature 1..20: note = Description of Artificial Sequence: Synthetic oligonucleotide
  misc_feature 1..20: note = Target: SCN10A; (-) strand; PAM type: NRG; PAM sequence: AAG
  source 1..20: mol_type = other DNA
catcctaaagttgatatgaa

SEQ ID NO: 19460 - DNA, 20 bp, synthetic construct
  misc_feature 1..20: note = Description of Artificial Sequence: Synthetic oligonucleotide
  misc_feature 1..20: note = Target: SCN10A; (-) strand; PAM type: NRG; PAM sequence: AAG
  source 1..20: mol_type = other DNA
taggctgaggtcacatccta

SEQ ID NO: 19461 - DNA, 20 bp, synthetic construct
  misc_feature 1..20: note = Description of Artificial Sequence: Synthetic oligonucleotide
  misc_feature 1..20: note = Target: SCN10A; (-) strand; PAM type: NRG; PAM sequence: AGG
  source 1..20: mol_type = other DNA
ttttggcagcacctaggctg

SEQ ID NO: 19462 - DNA, 20 bp, synthetic construct
  misc_feature 1..20: note = Description of Artificial Sequence: Synthetic oligonucleotide
  misc_feature 1..20: note = Target: SCN10A; (-) strand; PAM type: NRG; PAM sequence: GAG
  source 1..20: mol_type = other DNA
gttttggcagcacctaggct

SEQ ID NO: 19463 - DNA, 20 bp, synthetic construct
  misc_feature 1..20: note = Description of Artificial Sequence: Synthetic oligonucleotide
  misc_feature 1..20: note = Target: SCN10A; (-) strand; PAM type: NRG; PAM sequence: AGG
  source 1..20: mol_type = other DNA
ctcatgttttggcagcacct

SEQ ID NO: 19464 - DNA, 20 bp, synthetic construct
  misc_feature 1..20: note = Description of Artificial Sequence: Synthetic oligonucleotide
  misc_feature 1..20: note = Target: SCN10A; (-) strand; PAM type: NRG; PAM sequence: TAG
  source 1..20: mol_type = other DNA
cctcatgttttggcagcacc

SEQ ID NO: 19465 - DNA, 20 bp, synthetic construct
  misc_feature 1..20: note = Description of Artificial Sequence: Synthetic oligonucleotide
  misc_feature 1..20: note = Target: SCN10A; (-) strand; PAM type: NRG; PAM sequence: CAG
  source 1..20: mol_type = other DNA
cagcatgcctcatgttttgg

SEQ ID NO: 19466 - DNA, 20 bp, synthetic construct
  misc_feature 1..20: note = Description of Artificial Sequence: Synthetic oligonucleotide
  misc_feature 1..20: note = Target: SCN10A; (-) strand; PAM type: NRG; PAM sequence: TGG
  source 1..20: mol_type = other DNA
aatcagcatgcctcatgttt

SEQ ID NO: 19467 - DNA, 20 bp, synthetic construct
  misc_feature 1..20: note = Description of Artificial Sequence: Synthetic oligonucleotide
  misc_feature 1..20: note = Target: SCN10A; (-) strand; PAM type: NRG; PAM sequence: CAG
  source 1..20: mol_type = other DNA
gttctggaacatggtggaat

SEQ ID NO: 19468 - DNA, 20 bp, synthetic construct
  misc_feature 1..20: note = Description of Artificial Sequence: Synthetic oligonucleotide
  misc_feature 1..20: note = Target: SCN10A; (-) strand; PAM type: NRG; PAM sequence: TGG
  source 1..20: mol_type = other DNA
cagtaggttctggaacatgg

SEQ ID NO: 19469 - DNA, 20 bp, synthetic construct
  misc_feature 1..20: note = Description of Artificial Sequence: Synthetic oligonucleotide
  misc_feature 1..20: note = Target: SCN10A; (-) strand; PAM type: NRG; PAM sequence: TGG
  source 1..20: mol_type = other DNA
cagcagtaggttctggaaca

SEQ ID NO: 19470 - DNA, 20 bp, synthetic construct
  misc_feature 1..20: note = Description of Artificial Sequence: Synthetic oligonucleotide
  misc_feature 1..20: note = Target: SCN10A; (-) strand; PAM type: NRG; PAM sequence: TGG
  source 1..20: mol_type = other DNA
aaaggggcagcagtaggttc

SEQ ID NO: 19471 - DNA, 20 bp, synthetic construct
  misc_feature 1..20: note = Description of Artificial Sequence: Synthetic oligonucleotide
  misc_feature 1..20: note = Target: SCN10A; (-) strand; PAM type: NRG; PAM sequence: AGG
  source 1..20: mol_type = other DNA
gctgtgaaaggggcagcagt

SEQ ID NO: 19472 - DNA, 20 bp, synthetic construct
  misc_feature 1..20: note = Description of Artificial Sequence: Synthetic oligonucleotide
  misc_feature 1..20: note = Target: SCN10A; (-) strand; PAM type: NRG; PAM sequence: TAG
  source 1..20: mol_type = other DNA
ggctgtgaaaggggcagcag

SEQ ID NO: 19473 - DNA, 20 bp, synthetic construct
  misc_feature 1..20: note = Description of Artificial Sequence: Synthetic oligonucleotide
  misc_feature 1..20: note = Target: SCN10A; (-) strand; PAM type: NRG; PAM sequence: CAG
  source 1..20: mol_type = other DNA
cagggctgtgaaaggggcag

SEQ ID NO: 19474 - DNA, 20 bp, synthetic construct
  misc_feature 1..20: note = Description of Artificial Sequence: Synthetic oligonucleotide
  misc_feature 1..20: note = Target: SCN10A; (-) strand; PAM type: NRG; PAM sequence: CAG
  source 1..20: mol_type = other DNA
atccagggctgtgaaagggg

SEQ ID NO: 19475 - DNA, 20 bp, synthetic construct
  misc_feature 1..20: note = Description of Artificial Sequence: Synthetic oligonucleotide
  misc_feature 1..20: note = Target: SCN10A; (-) strand; PAM type: NRG; PAM sequence: GGG
  source 1..20: mol_type = other DNA
ataatccagggctgtgaaag

SEQ ID NO: 19476 - DNA, 20 bp, synthetic construct
  misc_feature 1..20: note = Description of Artificial Sequence: Synthetic oligonucleotide
  misc_feature 1..20: note = Target: SCN10A; (-) strand; PAM type: NRG; PAM sequence: GGG
  source 1..20: mol_type = other DNA
cataatccagggctgtgaaa

SEQ ID NO: 19477 - DNA, 20 bp, synthetic construct
  misc_feature 1..20: note = Description of Artificial Sequence: Synthetic oligonucleotide
  misc_feature 1..20: note = Target: SCN10A; (-) strand; PAM type: NRG; PAM sequence: AGG
  source 1..20: mol_type = other DNA
ccataatccagggctgtgaa

SEQ ID NO: 19478 - DNA, 20 bp, synthetic construct
  misc_feature 1..20: note = Description of Artificial Sequence: Synthetic oligonucleotide
  misc_feature 1..20: note = Target: SCN10A; (-) strand; PAM type: NRG; PAM sequence: AAG
  source 1..20: mol_type = other DNA
gccataatccagggctgtga

SEQ ID NO: 19479 - DNA, 20 bp, synthetic construct
  misc_feature 1..20: note = Description of Artificial Sequence: Synthetic oligonucleotide
  misc_feature 1..20: note = Target: SCN10A; (-) strand; PAM type: NRG; PAM sequence: GGG
  source 1..20: mol_type = other DNA
actccctccgccataatcca

SEQ ID NO: 19480 - DNA, 20 bp, synthetic construct
  misc_feature 1..20: note = Description of Artificial Sequence: Synthetic oligonucleotide
  misc_feature 1..20: note = Target: SCN10A; (-) strand; PAM type: NRG; PAM sequence: AGG
  source 1..20: mol_type = other DNA
cactccctccgccataatcc

SEQ ID NO: 19481 - DNA, 20 bp, synthetic construct
  misc_feature 1..20: note = Description of Artificial Sequence: Synthetic oligonucleotide
  misc_feature 1..20: note = Target: SCN10A; (-) strand; PAM type: NRG; PAM sequence: CAG
  source 1..20: mol_type = other DNA
ccactccctccgccataatc

SEQ ID NO: 19482 - DNA, 20 bp, synthetic construct
  misc_feature 1..20: note = Description of Artificial Sequence: Synthetic oligonucleotide
  misc_feature 1..20: note = Target: SCN10A; (-) strand; PAM type: NRG; PAM sequence: TAG
  source 1..20: mol_type = other DNA
gaaatgtgactacttgtccc

SEQ ID NO: 19483 - DNA, 20 bp, synthetic construct
  misc_feature 1..20: note = Description of Artificial Sequence: Synthetic oligonucleotide
  misc_feature 1..20: note = Target: SCN10A; (-) strand; PAM type: NRG; PAM sequence: AGG
  source 1..20: mol_type = other DNA
ggtggagggggaaggcccag

SEQ ID NO: 19484 - DNA, 20 bp, synthetic construct
  misc_feature 1..20: note = Description of Artificial Sequence: Synthetic oligonucleotide
  misc_feature 1..20: note = Target: SCN10A; (-) strand; PAM type: NRG; PAM sequence: GAG
  source 1..20: mol_type = other DNA
aggtggagggggaaggccca

SEQ ID NO: 19485 - DNA, 20 bp, synthetic construct
  misc_feature 1..20: note = Description of Artificial Sequence: Synthetic oligonucleotide
  misc_feature 1..20: note = Target: SCN10A; (-) strand; PAM type: NRG; PAM sequence: CAG
  source 1..20: mol_type = other DNA
ttaggtggagggggaaggcc

SEQ ID NO: 19486 - DNA, 20 bp, synthetic construct
  misc_feature 1..20: note = Description of Artificial Sequence: Synthetic oligonucleotide
  misc_feature 1..20: note = Target: SCN10A; (-) strand; PAM type: NRG; PAM sequence: AGG
  source 1..20: mol_type = other DNA
cagacttaggtggaggggga

SEQ ID NO: 19487 - DNA, 20 bp, synthetic construct
  misc_feature 1..20: note = Description of Artificial Sequence: Synthetic oligonucleotide
  misc_feature 1..20: note = Target: SCN10A; (-) strand; PAM type: NRG; PAM sequence: AAG
  source 1..20: mol_type = other DNA
gcagacttaggtggaggggg

SEQ ID NO: 19488 - DNA, 20 bp, synthetic construct
  misc_feature 1..20: note = Description of Artificial Sequence: Synthetic oligonucleotide
  misc_feature 1..20: note = Target: SCN10A; (-) strand; PAM type: NRG; PAM sequence: GGG
  source 1..20: mol_type = other DNA
gctgcagacttaggtggagg

SEQ ID NO: 19489 - DNA, 20 bp, synthetic construct
  misc_feature 1..20: note = Description of Artificial Sequence: Synthetic oligonucleotide
  misc_feature 1..20: note = Target: SCN10A; (-) strand; PAM type: NRG; PAM sequence: GGG
  source 1..20: mol_type = other DNA
ggctgcagacttaggtggag

SEQ ID NO: 19490 - DNA, 20 bp, synthetic construct
  misc_feature 1..20: note = Description of Artificial Sequence: Synthetic oligonucleotide
  misc_feature 1..20: note = Target: SCN10A; (-) strand; PAM type: NRG; PAM sequence: GGG
  source 1..20: mol_type = other DNA
aggctgcagacttaggtgga

SEQ ID NO: 19491 - DNA, 20 bp, synthetic construct
  misc_feature 1..20: note = Description of Artificial Sequence: Synthetic oligonucleotide
  misc_feature 1..20: note = Target: SCN10A; (-) strand; PAM type: NRG; PAM sequence: AGG
  source 1..20: mol_type = other DNA
taggctgcagacttaggtgg

SEQ ID NO: 19492 - DNA, 20 bp, synthetic construct
  misc_feature 1..20: note = Description of Artificial Sequence: Synthetic oligonucleotide
  misc_feature 1..20: note = Target: SCN10A; (-) strand; PAM type: NRG; PAM sequence: GAG
  source 1..20: mol_type = other DNA
ataggctgcagacttaggtg

SEQ ID NO: 19493 - DNA, 20 bp, synthetic construct
  misc_feature 1..20: note = Description of Artificial Sequence: Synthetic oligonucleotide
  misc_feature 1..20: note = Target: SCN10A; (-) strand; PAM type: NRG; PAM sequence: TGG
  source 1..20: mol_type = other DNA
ttataggctgcagacttagg

SEQ ID NO: 19494 - DNA, 20 bp, synthetic construct
  misc_feature 1..20: note = Description of Artificial Sequence: Synthetic oligonucleotide
  misc_feature 1..20: note = Target: SCN10A; (-) strand; PAM type: NRG; PAM sequence: AGG
  source 1..20: mol_type = other DNA
ttcttataggctgcagactt

SEQ ID NO: 19495 - DNA, 20 bp, synthetic construct
  misc_feature 1..20: note = Description of Artificial Sequence: Synthetic oligonucleotide
  misc_feature 1..20: note = Target: SCN10A; (-) strand; PAM type: NRG; PAM sequence: TAG
  source 1..20: mol_type = other DNA
cttcttataggctgcagact

SEQ ID NO: 19496 - DNA, 20 bp, synthetic construct
  misc_feature 1..20: note = Description of Artificial Sequence: Synthetic oligonucleotide
  misc_feature 1..20: note = Target: SCN10A; (-) strand; PAM type: NRG; PAM sequence: CAG
  source 1..20: mol_type = other DNA
gtccagcttcttataggctg

SEQ ID NO: 19497 - DNA, 20 bp, synthetic construct
  misc_feature 1..20: note = Description of Artificial Sequence: Synthetic oligonucleotide
  misc_feature 1..20: note = Target: SCN10A; (-) strand; PAM type: NRG; PAM sequence: AGG
  source 1..20: mol_type = other DNA
tttggggtccagcttcttat

SEQ ID NO: 19498 - DNA, 20 bp, synthetic construct
  misc_feature 1..20: note = Description of Artificial Sequence: Synthetic oligonucleotide
  misc_feature 1..20: note = Target: SCN10A; (-) strand; PAM type: NRG; PAM sequence: TAG
  source 1..20: mol_type = other DNA
ctttggggtccagcttctta

SEQ ID NO: 19499 - DNA, 20 bp, synthetic construct
  misc_feature 1..20: note = Description of Artificial Sequence: Synthetic oligonucleotide
  misc_feature 1..20: note = Target: SCN10A; (-) strand; PAM type: NRG; PAM sequence: CAG
  source 1..20: mol_type = other DNA
aactgtctggctttggggtc

SEQ ID NO: 19500 - DNA, 20 bp, synthetic construct
  misc_feature 1..20: note = Description of Artificial Sequence: Synthetic oligonucleotide
  misc_feature 1..20: note = Target: SCN10A; (-) strand; PAM type: NRG; PAM sequence: GGG
  source 1..20: mol_type = other DNA
accagaactgtctggctttg

SEQ ID NO: 19501 - DNA, 20 bp, synthetic construct
  misc_feature 1..20: note = Description of Artificial Sequence: Synthetic oligonucleotide
  misc_feature 1..20: note = Target: SCN10A; (-) strand; PAM type: NRG; PAM sequence: GGG
  source 1..20: mol_type = other DNA
caccagaactgtctggcttt

SEQ ID NO: 19502 - DNA, 20 bp, synthetic construct
  misc_feature 1..20: note = Description of Artificial Sequence: Synthetic oligonucleotide
  misc_feature 1..20: note = Target: SCN10A; (-) strand; PAM type: NRG; PAM sequence: TGG
  source 1..20: mol_type = other DNA
tcaccagaactgtctggctt

SEQ ID NO: 19503 - DNA, 20 bp, synthetic construct
  misc_feature 1..20: note = Description of Artificial Sequence: Synthetic oligonucleotide
  misc_feature 1..20: note = Target: SCN10A; (-) strand; PAM type: NRG; PAM sequence: TGG
  source 1..20: mol_type = other DNA
ctggattcaccagaactgtc

SEQ ID NO: 19504 - DNA, 20 bp, synthetic construct
  misc_feature 1..20: note = Description of Artificial Sequence: Synthetic oligonucleotide
  misc_feature 1..20: note = Target: SCN10A; (-) strand; PAM type: NRG; PAM sequence: CAG
  source 1..20: mol_type = other DNA
aggtgacctactggattcac

SEQ ID NO: 19505 - DNA, 20 bp, synthetic construct
  misc_feature 1..20: note = Description of Artificial Sequence: Synthetic oligonucleotide
  misc_feature 1..20: note = Target: SCN10A; (-) strand; PAM type: NRG; PAM sequence: TGG
  source 1..20: mol_type = other DNA
ccaagctggaggtgacctac

SEQ ID NO: 19506 - DNA, 20 bp, synthetic construct
  misc_feature 1..20: note = Description of Artificial Sequence: Synthetic oligonucleotide
  misc_feature 1..20: note = Target: SCN10A; (-) strand; PAM type: NRG; PAM sequence: AGG
  source 1..20: mol_type = other DNA
agcagggtccaccaagctgg

SEQ ID NO: 19507 - DNA, 20 bp, synthetic construct
  misc_feature 1..20: note = Description of Artificial Sequence: Synthetic oligonucleotide
  misc_feature 1..20: note = Target: SCN10A; (-) strand; PAM type: NRG; PAM sequence: GAG
  source 1..20: mol_type = other DNA
cagcagggtccaccaagctg

SEQ ID NO: 19508 - DNA, 20 bp, synthetic construct
  misc_feature 1..20: note = Description of Artificial Sequence: Synthetic oligonucleotide
  misc_feature 1..20: note = Target: SCN10A; (-) strand; PAM type: NRG; PAM sequence: TGG
  source 1..20: mol_type = other DNA
cgcagcagggtccaccaagc

SEQ ID NO: 19509 - DNA, 20 bp, synthetic construct
  misc_feature 1..20: note = Description of Artificial Sequence: Synthetic oligonucleotide
  misc_feature 1..20: note = Target: SCN10A; (-) strand; PAM type: NRG; PAM sequence: AAG
  source 1..20: mol_type = other DNA
tgtccgcagcagggtccacc

SEQ ID NO: 19510 - DNA, 20 bp, synthetic construct
  misc_feature 1..20: note = Description of Artificial Sequence: Synthetic oligonucleotide
  misc_feature 1..20: note = Target: SCN10A; (-) strand; PAM type: NRG; PAM sequence: GGG
  source 1..20: mol_type = other DNA
ctgccttcatgtccgcagca

SEQ ID NO: 19511 - DNA, 20 bp, synthetic construct
  misc_feature 1..20: note = Description of Artificial Sequence: Synthetic oligonucleotide
  misc_feature 1..20: note = Target: SCN10A; (-) strand; PAM type: NRG; PAM sequence: AGG
  source 1..20: mol_type = other DNA
cctgccttcatgtccgcagc

SEQ ID NO: 19512 - DNA, 20 bp, synthetic construct
  misc_feature 1..20: note = Description of Artificial Sequence: Synthetic oligonucleotide
  misc_feature 1..20: note = Target: SCN10A; (-) strand; PAM type: NRG; PAM sequence: CAG
  source 1..20: mol_type = other DNA
tcctgccttcatgtccgcag

SEQ ID NO: 19513 - DNA, 20 bp, synthetic construct
  misc_feature 1..20: note = Description of Artificial Sequence: Synthetic oligonucleotide
  misc_feature 1..20: note = Target: SCN10A; (-) strand; PAM type: NRG; PAM sequence: CAG
  source 1..20: mol_type = other DNA
gcatcctgccttcatgtccg

SEQ ID NO: 19514 - DNA, 20 bp, synthetic construct
  misc_feature 1..20: note = Description of Artificial Sequence: Synthetic oligonucleotide
  misc_feature 1..20: note = Target: SCN10A; (-) strand; PAM type: NRG; PAM sequence: CAG
  source 1..20: mol_type = other DNA
aggcagaagctagaaagggt

SEQ ID NO: 19515 - DNA, 20 bp, synthetic construct
  misc_feature 1..20: note = Description of Artificial Sequence: Synthetic oligonucleotide
  misc_feature 1..20: note = Target: SCN10A; (-) strand; PAM type: NRG; PAM sequence: GGG
  source 1..20: mol_type = other DNA
tgataggcagaagctagaaa

SEQ ID NO: 19516 - DNA, 20 bp, synthetic construct
  misc_feature 1..20: note = Description of Artificial Sequence: Synthetic oligonucleotide
  misc_feature 1..20: note = Target: SCN10A; (-) strand; PAM type: NRG; PAM sequence: AGG
  source 1..20: mol_type = other DNA
atgataggcagaagctagaa

SEQ ID NO: 19517 - DNA, 20 bp, synthetic construct
  misc_feature 1..20: note = Description of Artificial Sequence: Synthetic oligonucleotide
  misc_feature 1..20: note = Target: SCN10A; (-) strand; PAM type: NRG; PAM sequence: AAG
  source 1..20: mol_type = other DNA
catgataggcagaagctaga

SEQ ID NO: 19518 - DNA, 20 bp, synthetic construct
  misc_feature 1..20: note = Description of Artificial Sequence: Synthetic oligonucleotide
  misc_feature 1..20: note = Target: SCN10A; (-) strand; PAM type: NRG; PAM sequence: TAG
  source 1..20: mol_type = other DNA
cacacatgataggcagaagc

SEQ ID NO: 19519 - DNA, 20 bp, synthetic construct
  misc_feature 1..20: note = Description of Artificial Sequence: Synthetic oligonucleotide
  misc_feature 1..20: note = Target: SCN10A; (-) strand; PAM type: NRG; PAM sequence: AAG
  source 1..20: mol_type = other DNA
cacgcacacatgataggcag

SEQ ID NO: 19520 - DNA, 20 bp, synthetic construct
  misc_feature 1..20: note = Description of Artificial Sequence: Synthetic oligonucleotide
  misc_feature 1..20: note = Target: SCN10A; (-) strand; PAM type: NRG; PAM sequence: CAG
  source 1..20: mol_type = other DNA
acacacgcacacatgatagg

SEQ ID NO: 19521 - DNA, 20 bp, synthetic construct
  misc_feature 1..20: note = Description of Artificial Sequence: Synthetic oligonucleotide
  misc_feature 1..20: note = Target: SCN10A; (-) strand; PAM type: NRG; PAM sequence: AGG
  source 1..20: mol_type = other DNA
caaacacacgcacacatgat

SEQ ID NO: 19522 - DNA, 20 bp, synthetic construct
  misc_feature 1..20: note = Description of Artificial Sequence: Synthetic oligonucleotide
  misc_feature 1..20: note = Target: SCN10A; (-) strand; PAM type: NRG; PAM sequence: TAG
  source 1..20: mol_type = other DNA
tcaaacacacgcacacatga

SEQ ID NO: 19523 - DNA, 20 bp, synthetic construct
  misc_feature 1..20: note = Description of Artificial Sequence: Synthetic oligonucleotide
  misc_feature 1..20: note = Target: SCN10A; (-) strand; PAM type: NRG; PAM sequence: AAG
  source 1..20: mol_type = other DNA
cctgaattaagccacctcac

SEQ ID NO: 19524 - DNA, 20 bp, synthetic construct
  misc_feature 1..20: note = Description of Artificial Sequence: Synthetic oligonucleotide
  misc_feature 1..20: note = Target: SCN10A; (-) strand; PAM type: NRG; PAM sequence: AAG
  source 1..20: mol_type = other DNA
cttttcttaacccctgaatt

SEQ ID NO: 19525 - DNA, 20 bp, synthetic construct
  misc_feature 1..20: note = Description of Artificial Sequence: Synthetic oligonucleotide
  misc_feature 1..20: note = Target: SCN10A; (-) strand; PAM type: NRG; PAM sequence: AAG
  source 1..20: mol_type = other DNA
acccagacagaccggctgcc

SEQ ID NO: 19526 - DNA, 20 bp, synthetic construct
  misc_feature 1..20: note = Description of Artificial Sequence: Synthetic oligonucleotide
  misc_feature 1..20: note = Target: SCN10A; (-) strand; PAM type: NRG; PAM sequence: CGG
  source 1..20: mol_type = other DNA
gaatttgaacccagacagac

SEQ ID NO: 19527 - DNA, 20 bp, synthetic construct
  misc_feature 1..20: note = Description of Artificial Sequence: Synthetic oligonucleotide
  misc_feature 1..20: note = Target: SCN10A; (-) strand; PAM type: NRG; PAM sequence: CAG
  source 1..20: mol_type = other DNA
catcagaatttgaacccaga

SEQ ID NO: 19528 - DNA, 20 bp, synthetic construct
  misc_feature 1..20: note = Description of Artificial Sequence: Synthetic oligonucleotide
  misc_feature 1..20: note = Target: SCN10A; (-) strand; PAM type: NRG; PAM sequence: CAG
  source 1..20: mol_type = other DNA
gccacatcagaatttgaacc

SEQ ID NO: 19529 - DNA, 20 bp, synthetic construct
  misc_feature 1..20: note = Description of Artificial Sequence: Synthetic oligonucleotide
  misc_feature 1..20: note = Target: SCN10A; (-) strand; PAM type: NRG; PAM sequence: CAG
  source 1..20: mol_type = other DNA
gttgagtttagtggccacat

SEQ ID NO: 19530 - DNA, 20 bp, synthetic construct
  misc_feature 1..20: note = Description of Artificial Sequence: Synthetic oligonucleotide
  misc_feature 1..20: note = Target: SCN10A; (-) strand; PAM type: NRG; PAM sequence: TGG
  source 1..20: mol_type = other DNA
gatcatagagttgagtttag

SEQ ID NO: 19531 - DNA, 20 bp, synthetic construct
  misc_feature 1..20: note = Description of Artificial Sequence: Synthetic oligonucleotide
  misc_feature 1..20: note = Target: SCN10A; (-) strand; PAM type: NRG; PAM sequence: TAG
  source 1..20: mol_type = other DNA
caagatcatagagttgagtt

SEQ ID NO: 19532 - DNA, 20 bp, synthetic construct
  misc_feature 1..20: note = Description of Artificial Sequence: Synthetic oligonucleotide
  misc_feature 1..20: note = Target: SCN10A; (-) strand; PAM type: NRG; PAM sequence: GAG
  source 1..20: mol_type = other DNA
cttcccaagatcatagagtt

SEQ ID NO: 19533 - DNA, 20 bp, synthetic construct
  misc_feature 1..20: note = Description of Artificial Sequence: Synthetic oligonucleotide
  misc_feature 1..20: note = Target: SCN10A; (-) strand; PAM type: NRG; PAM sequence: GAG
  source 1..20: mol_type = other DNA
ataatcttcccaagatcata

SEQ ID NO: 19534 - DNA, 20 bp, synthetic construct
  misc_feature 1..20: note = Description of Artificial Sequence: Synthetic oligonucleotide
  misc_feature 1..20: note = Target: SCN10A; (-) strand; PAM type: NRG; PAM sequence: TAG
  source 1..20: mol_type = other DNA
aaataatcttcccaagatca

SEQ ID NO: 19535 - DNA, 20 bp, synthetic construct
  misc_feature 1..20: note = Description of Artificial Sequence: Synthetic oligonucleotide
  misc_feature 1..20: note = Target: SCN10A; (-) strand; PAM type: NRG; PAM sequence: AAG
  source 1..20: mol_type = other DNA
aaaggttaaataatcttccc

SEQ ID NO: 19536 - DNA, 20 bp, synthetic construct
  misc_feature 1..20: note = Description of Artificial Sequence: Synthetic oligonucleotide
  misc_feature 1..20: note = Target: SCN10A; (-) strand; PAM type: NRG; PAM sequence: AGG
  source 1..20: mol_type = other DNA
tggaaaaatggagatgcaaa

SEQ ID NO: 19537 - DNA, 20 bp, synthetic construct
  misc_feature 1..20: note = Description of Artificial Sequence: Synthetic oligonucleotide
  misc_feature 1..20: note = Target: SCN10A; (-) strand; PAM type: NRG; PAM sequence: AAG
  source 1..20: mol_type = other DNA
atggaaaaatggagatgcaa

SEQ ID NO: 19538 - DNA, 20 bp, synthetic construct
  misc_feature 1..20: note = Description of Artificial Sequence: Synthetic oligonucleotide
  misc_feature 1..20: note = Target: SCN10A; (-) strand; PAM type: NRG; PAM sequence: GAG
  source 1..20: mol_type = other DNA
ctttcccagatggaaaaatg

SEQ ID NO: 19539 - DNA, 20 bp, synthetic construct
  misc_feature 1..20: note = Description of Artificial Sequence: Synthetic oligonucleotide
  misc_feature 1..20: note = Target: SCN10A; (-) strand; PAM type: NRG; PAM sequence: TGG
  source 1..20: mol_type = other DNA
ccctttcccagatggaaaaa

SEQ ID NO: 19540 - DNA, 20 bp, synthetic construct
  misc_feature 1..20: note = Description of Artificial Sequence: Synthetic oligonucleotide
  misc_feature 1..20: note = Target: SCN10A; (-) strand; PAM type: NRG; PAM sequence: TGG
  source 1..20: mol_type = other DNA
ttgttattccctttcccaga

SEQ ID NO: 19541 - DNA, 20 bp, synthetic construct
  misc_feature 1..20: note = Description of Artificial Sequence: Synthetic oligonucleotide
  misc_feature 1..20: note = Target: SCN10A; (-) strand; PAM type: NRG; PAM sequence: CAG
  source 1..20: mol_type = other DNA
actcttgttattccctttcc

SEQ ID NO: 19542 - DNA, 20 bp, synthetic construct
  misc_feature 1..20: note = Description of Artificial Sequence: Synthetic oligonucleotide
  misc_feature 1..20: note = Target: SCN10A; (-) strand; PAM type: NRG; PAM sequence: AGG
  source 1..20: mol_type = other DNA
tcacaacaaccctacatggt

SEQ ID NO: 19543 - DNA, 20 bp, synthetic construct
  misc_feature 1..20: note = Description of Artificial Sequence: Synthetic oligonucleotide
  misc_feature 1..20: note = Target: SCN10A; (-) strand; PAM type: NRG; PAM sequence: TAG
  source 1..20: mol_type = other DNA
ttcacaacaaccctacatgg

SEQ ID NO: 19544 - DNA, 20 bp, synthetic construct
  misc_feature 1..20: note = Description of Artificial Sequence: Synthetic oligonucleotide
  misc_feature 1..20: note = Target: SCN10A; (-) strand; PAM type: NRG; PAM sequence: TGG
  source 1..20: mol_type = other DNA
attttcacaacaaccctaca

SEQ ID NO: 19545 - DNA, 20 bp, synthetic construct
  misc_feature 1..20: note = Description of Artificial Sequence: Synthetic oligonucleotide
  misc_feature 1..20: note = Target: SCN10A; (-) strand; PAM type: NRG; PAM sequence: TGG
  source 1..20: mol_type = other DNA
taatactcagatgcttctca

SEQ ID NO: 19546 - DNA, 20 bp, synthetic construct
  misc_feature 1..20: note = Description of Artificial Sequence: Synthetic oligonucleotide
  misc_feature 1..20: note = Target: SCN10A; (-) strand; PAM type: NRG; PAM sequence: CAG
  source 1..20: mol_type = other DNA
acaggaatagtaataatact

SEQ ID NO: 19547 - DNA, 20 bp, synthetic construct
  misc_feature 1..20: note = Description of Artificial Sequence: Synthetic oligonucleotide
  misc_feature 1..20: note = Target: SCN10A; (-) strand; PAM type: NRG; PAM sequence: TAG
  source 1..20: mol_type = other DNA
ccttgccccacccacaggaa

SEQ ID NO: 19548 - DNA, 20 bp, synthetic construct
  misc_feature 1..20: note = Description of Artificial Sequence: Synthetic oligonucleotide
  misc_feature 1..20: note = Target: SCN10A; (-) strand; PAM type: NRG; PAM sequence: AGG
  source 1..20: mol_type = other DNA
tccaaccttgccccacccac

SEQ ID NO: 19549 - DNA, 20 bp, synthetic construct
  misc_feature 1..20: note = Description of Artificial Sequence: Synthetic oligonucleotide
  misc_feature 1..20: note = Target: SCN10A; (-) strand; PAM type: NRG; PAM sequence: CAG
  source 1..20: mol_type = other DNA
ctccaaccttgccccaccca

SEQ ID NO: 19550 - DNA, 20 bp, synthetic construct
  misc_feature 1..20: note = Description of Artificial Sequence: Synthetic oligonucleotide
  misc_feature 1..20: note = Target: SCN10A; (-) strand; PAM type: NRG; PAM sequence: GGG
  source 1..20: mol_type = other DNA
gataaagtatctgactcaga

SEQ ID NO: 19551 - DNA, 20 bp, synthetic construct
  misc_feature 1..20: note = Description of Artificial Sequence: Synthetic oligonucleotide
  misc_feature 1..20: note = Target: SCN10A; (-) strand; PAM type: NRG; PAM sequence: AGG
  source 1..20: mol_type = other DNA
ggataaagtatctgactcag

SEQ ID NO: 19552 - DNA, 20 bp, synthetic construct
  misc_feature 1..20: note = Description of Artificial Sequence: Synthetic oligonucleotide
  misc_feature 1..20: note = Target: SCN10A; (-) strand; PAM type: NRG; PAM sequence: GAG
  source 1..20: mol_type = other DNA
tggataaagtatctgactca

SEQ ID NO: 19553 - DNA, 20 bp, synthetic construct
  misc_feature 1..20: note = Description of Artificial Sequence: Synthetic oligonucleotide
  misc_feature 1..20: note = Target: SCN10A; (-) strand; PAM type: NRG; PAM sequence: CAG
  source 1..20: mol_type = other DNA
actggataaagtatctgact

SEQ ID NO: 19554 - DNA, 20 bp, synthetic construct
  misc_feature 1..20: note = Description of Artificial Sequence: Synthetic oligonucleotide
  misc_feature 1..20: note = Target: SCN10A; (-) strand; PAM type: NRG; PAM sequence: AAG
  source 1..20: mol_type = other DNA
atttcactatatactggata

SEQ ID NO: 19555 - DNA, 20 bp, synthetic construct
  misc_feature 1..20: note = Description of Artificial Sequence: Synthetic oligonucleotide
  misc_feature 1..20: note = Target: SCN10A; (-) strand; PAM type: NRG; PAM sequence: TGG
  source 1..20: mol_type = other DNA
tactggatttcactatatac

SEQ ID NO: 19556 - DNA, 20 bp, synthetic construct
  misc_feature 1..20: note = Description of Artificial Sequence: Synthetic oligonucleotide
  misc_feature 1..20: note = Target: SCN10A; (-) strand; PAM type: NRG; PAM sequence: TGG
  source 1..20: mol_type = other DNA
taacaagatacaatccatac

SEQ ID NO: 19557 - DNA, 20 bp, synthetic construct
  misc_feature 1..20: note = Description of Artificial Sequence: Synthetic oligonucleotide
  misc_feature 1..20: note = Target: SCN10A; (-) strand; PAM type: NRG; PAM sequence: AAG
  source 1..20: mol_type = other DNA
tagtattatttactcttaac

SEQ ID NO: 19558 - DNA, 20 bp, synthetic construct
  misc_feature 1..20: note = Description of Artificial Sequence: Synthetic oligonucleotide
  misc_feature 1..20: note = Target: SCN10A; (-) strand; PAM type: NRG; PAM sequence: TAG
  source 1..20: mol_type = other DNA
aattttcctccatcacttgt

SEQ ID NO: 19559 - DNA, 20 bp, synthetic construct
  misc_feature 1..20: note = Description of Artificial Sequence: Synthetic oligonucleotide
  misc_feature 1..20: note = Target: SCN10A; (-) strand; PAM type: NRG; PAM sequence: TAG
  source 1..20: mol_type = other DNA
cttttctttggcatctagtt

SEQ ID NO: 19560 - DNA, 20 bp, synthetic construct
  misc_feature 1..20: note = Description of Artificial Sequence: Synthetic oligonucleotide
  misc_feature 1..20: note = Target: SCN10A; (-) strand; PAM type: NRG; PAM sequence: TAG
  source 1..20: mol_type = other DNA
cggaacttttctttggcatc

SEQ ID NO: 19561 - DNA, 20 bp, synthetic construct
  misc_feature 1..20: note = Description of Artificial Sequence: Synthetic oligonucleotide
  misc_feature 1..20: note = Target: SCN10A; (-) strand; PAM type: NRG; PAM sequence: TGG
  source 1..20: mol_type = other DNA
aggaagtcggaacttttctt

SEQ ID NO: 19562 - DNA, 20 bp, synthetic construct
  misc_feature 1..20: note = Description of Artificial Sequence: Synthetic oligonucleotide
  misc_feature 1..20: note = Target: SCN10A; (-) strand; PAM type: NRG; PAM sequence: CGG
  source 1..20: mol_type = other DNA
taacaaaagcatcaggaagt

SEQ ID NO: 19563 - DNA, 20 bp, synthetic construct
  misc_feature 1..20: note = Description of Artificial Sequence: Synthetic oligonucleotide
  misc_feature 1..20: note = Target: SCN10A; (-) strand; PAM type: NRG; PAM sequence: AAG
  source 1..20: mol_type = other DNA
gttgtaacaaaagcatcagg

SEQ ID NO: 19564 - DNA, 20 bp, synthetic construct
  misc_feature 1..20: note = Description of Artificial Sequence: Synthetic oligonucleotide
  misc_feature 1..20: note = Target: SCN10A; (-) strand; PAM type: NRG; PAM sequence: AGG
  source 1..20: mol_type = other DNA
gctgttgtaacaaaagcatc

SEQ ID NO: 19565 - DNA, 20 bp, synthetic construct
  misc_feature 1..20: note = Description of Artificial Sequence: Synthetic oligonucleotide
  misc_feature 1..20: note = Target: SCN10A; (-) strand; PAM type: NRG; PAM sequence: CAG
  source 1..20: mol_type = other DNA
tgctgttgtaacaaaagcat

SEQ ID NO: 19566 - DNA, 20 bp, synthetic construct
  misc_feature 1..20: note = Description of Artificial Sequence: Synthetic oligonucleotide
  misc_feature 1..20: note = Target: SCN10A; (-) strand; PAM type: NRG; PAM sequence: AAG
  source 1..20: mol_type = other DNA
caaggttgctgttgtaacaa

SEQ ID NO: 19567 - DNA, 20 bp, synthetic construct
  misc_feature 1..20: note = Description of Artificial Sequence: Synthetic oligonucleotide
  misc_feature 1..20: note = Target: SCN10A; (-) strand; PAM type: NRG; PAM sequence: AGG
  source 1..20: mol_type = other DNA
agggaggaaacatggaaaca

SEQ ID NO: 19568 - DNA, 20 bp, synthetic construct
  misc_feature 1..20: note = Description of Artificial Sequence: Synthetic oligonucleotide
  misc_feature 1..20: note = Target: SCN10A; (-) strand; PAM type: NRG; PAM sequence: AAG
  source 1..20: mol_type = other DNA
aagggaggaaacatggaaac

SEQ ID NO: 19569 - DNA, 20 bp, synthetic construct
  misc_feature 1..20: note = Description of Artificial Sequence: Synthetic oligonucleotide
  misc_feature 1..20: note = Target: SCN10A; (-) strand; PAM type: NRG; PAM sequence: TGG
  source 1..20: mol_type = other DNA
acagtggaagggaggaaaca

SEQ ID NO: 19570 - DNA, 20 bp, synthetic construct
  misc_feature 1..20: note = Description of Artificial Sequence: Synthetic oligonucleotide
  misc_feature 1..20: note = Target: SCN10A; (-) strand; PAM type: NRG; PAM sequence: AGG
  source 1..20: mol_type = other DNA
aggggaagacagtggaaggg

SEQ ID NO: 19571 - DNA, 20 bp, synthetic construct
  misc_feature 1..20: note = Description of Artificial Sequence: Synthetic oligonucleotide
  misc_feature 1..20: note = Target: SCN10A; (-) strand; PAM type: NRG; PAM sequence: GAG
  source 1..20: mol_type = other DNA
aaggggaagacagtggaagg

SEQ ID NO: 19572 - DNA, 20 bp, synthetic construct
  misc_feature 1..20: note = Description of Artificial Sequence: Synthetic oligonucleotide
  misc_feature 1..20: note = Target: SCN10A; (-) strand; PAM type: NRG; PAM sequence: GGG
  source 1..20: mol_type = other DNA
ggaaggggaagacagtggaa

SEQ ID NO: 19573 - DNA, 20 bp, synthetic construct
  misc_feature 1..20: note = Description of Artificial Sequence: Synthetic oligonucleotide
  misc_feature 1..20: note = Target: SCN10A; (-) strand; PAM type: NRG; PAM sequence: AGG
  source 1..20: mol_type = other DNA
gggaaggggaagacagtgga

SEQ ID NO: 19574 - DNA, 20 bp, synthetic construct
  misc_feature 1..20: note = Description of Artificial Sequence: Synthetic oligonucleotide
  misc_feature 1..20: note = Target: SCN10A; (-) strand; PAM type: NRG; PAM sequence: AAG
  source 1..20: mol_type = other DNA
agggaaggggaagacagtgg

SEQ ID NO: 19575 - DNA, 20 bp, synthetic construct
  misc_feature 1..20: note = Description of Artificial Sequence: Synthetic oligonucleotide
  misc_feature 1..20: note = Target: SCN10A; (-) strand; PAM type: NRG; PAM sequence: TGG
  source 1..20: mol_type = other DNA
gggagggaaggggaagacag

SEQ ID NO: 19576 - DNA, 20 bp, synthetic construct
  misc_feature 1..20: note = Description of Artificial Sequence: Synthetic oligonucleotide
  misc_feature 1..20: note = Target: SCN10A; (-) strand; PAM type: NRG; PAM sequence: CAG
  source 1..20: mol_type = other DNA
ttggggagggaaggggaaga

SEQ ID NO: 19577 - DNA, 20 bp, synthetic construct
  misc_feature 1..20: note = Description of Artificial Sequence: Synthetic oligonucleotide
  misc_feature 1..20: note = Target: SCN10A; (-) strand; PAM type: NRG; PAM sequence: AAG
  source 1..20: mol_type = other DNA
agagttggggagggaagggg

SEQ ID NO: 19578 - DNA, 20 bp, synthetic construct
  misc_feature 1..20: note = Description of Artificial Sequence: Synthetic oligonucleotide
  misc_feature 1..20: note = Target: SCN10A; (-) strand; PAM type: NRG; PAM sequence: GGG
  source 1..20: mol_type = other DNA
aaaagagttggggagggaag

SEQ ID NO: 19579 - DNA, 20 bp, synthetic construct
  misc_feature 1..20: note = Description of Artificial Sequence: Synthetic oligonucleotide
  misc_feature 1..20: note = Target: SCN10A; (-) strand; PAM type: NRG; PAM sequence: GGG
  source 1..20: mol_type = other DNA
aaaaagagttggggagggaa

SEQ ID NO: 19580 - DNA, 20 bp, synthetic construct
  misc_feature 1..20: note = Description of Artificial Sequence: Synthetic oligonucleotide
  misc_feature 1..20: note = Target: SCN10A; (-) strand; PAM type: NRG; PAM sequence: AGG
  source 1..20: mol_type = other DNA
gaaaaagagttggggaggga

SEQ ID NO: 19581 - DNA, 20 bp, synthetic construct
  misc_feature 1..20: note = Description of Artificial Sequence: Synthetic oligonucleotide
  misc_feature 1..20: note = Target: SCN10A; (-) strand; PAM type: NRG; PAM sequence: AAG
  source 1..20: mol_type = other DNA
agaaaaagagttggggaggg

SEQ ID NO: 19582 - DNA, 20 bp, synthetic construct
  misc_feature 1..20: note = Description of Artificial Sequence: Synthetic oligonucleotide
  misc_feature 1..20: note = Target: SCN10A; (-) strand; PAM type: NRG; PAM sequence: GGG
  source 1..20: mol_type = other DNA
aggagaaaaagagttgggga

SEQ ID NO: 19583 - DNA, 20 bp, synthetic construct
  misc_feature 1..20: note = Description of Artificial Sequence: Synthetic oligonucleotide
  misc_feature 1..20: note = Target: SCN10A; (-) strand; PAM type: NRG; PAM sequence: AGG
  source 1..20: mol_type = other DNA
aaggagaaaaagagttgggg

SEQ ID NO: 19584 - DNA, 20 bp, synthetic construct
  misc_feature 1..20: note = Description of Artificial Sequence: Synthetic oligonucleotide
  misc_feature 1..20: note = Target: SCN10A; (-) strand; PAM type: NRG; PAM sequence: GAG
  source 1..20: mol_type = other DNA
taaggagaaaaagagttggg

SEQ ID NO: 19585 - DNA, 20 bp, synthetic construct
  misc_feature 1..20: note = Description of Artificial Sequence: Synthetic oligonucleotide
  misc_feature 1..20: note = Target: SCN10A; (-) strand; PAM type: NRG; PAM sequence: GGG
  source 1..20: mol_type = other DNA
cttaaggagaaaaagagttg

SEQ ID NO: 19586 - DNA, 20 bp, synthetic construct
  misc_feature 1..20: note = Description of Artificial Sequence: Synthetic oligonucleotide
  misc_feature 1..20: note = Target: SCN10A; (-) strand; PAM type: NRG; PAM sequence: GGG
  source 1..20: mol_type = other DNA
acttaaggagaaaaagagtt

SEQ ID NO: 19587 - DNA, 20 bp, synthetic construct
  misc_feature 1..20: note = Description of Artificial Sequence: Synthetic oligonucleotide
  misc_feature 1..20: note = Target: SCN10A; (-) strand; PAM type: NRG; PAM sequence: TGG
  source 1..20: mol_type = other DNA
cacttaaggagaaaaagagt

SEQ ID NO: 19588 - DNA, 20 bp, synthetic construct
  misc_feature 1..20: note = Description of Artificial Sequence: Synthetic oligonucleotide
  misc_feature 1..20: note = Target: SCN10A; (-) strand; PAM type: NRG; PAM sequence: GAG
  source 1..20: mol_type = other DNA
ttgtcacttaaggagaaaaa

SEQ ID NO: 19589 - DNA, 20 bp, synthetic construct
  misc_feature 1..20: note = Description of Artificial Sequence: Synthetic oligonucleotide
  misc_feature 1..20: note = Target: SCN10A; (-) strand; PAM type: NRG; PAM sequence: AAG
  source 1..20: mol_type = other DNA
tgttgtcacttaaggagaaa

SEQ ID NO: 19590 - DNA, 20 bp, synthetic construct
  misc_feature 1..20: note = Description of Artificial Sequence: Synthetic oligonucleotide
  misc_feature 1..20: note = Target: SCN10A; (-) strand; PAM type: NRG; PAM sequence: GAG
  source 1..20: mol_type = other DNA
tttcaatgttgtcacttaag

SEQ ID NO: 19591 - DNA, 20 bp, synthetic construct
  misc_feature 1..20: note = Description of Artificial Sequence: Synthetic oligonucleotide
  misc_feature 1..20: note = Target: SCN10A; (-) strand; PAM type: NRG; PAM sequence: AGG
  source 1..20: mol_type = other DNA
attttcaatgttgtcactta

SEQ ID NO: 19592 - DNA, 20 bp, synthetic construct
  misc_feature 1..20: note = Description of Artificial Sequence: Synthetic oligonucleotide
  misc_feature 1..20: note = Target: SCN10A; (-) strand; PAM type: NRG; PAM sequence: AAG
  source 1..20: mol_type = other DNA
gattttcaatgttgtcactt

SEQ ID NO: 19593 - DNA, 20 bp, synthetic construct
  misc_feature 1..20: note = Description of Artificial Sequence: Synthetic oligonucleotide
  misc_feature 1..20: note = Target: SCN10A; (-) strand; PAM type: NRG; PAM sequence: TAG
  source 1..20: mol_type = other DNA
tttatgaccacaattaacag

SEQ ID NO: 19594 - DNA, 20 bp, synthetic construct
  misc_feature 1..20: note = Description of Artificial Sequence: Synthetic oligonucleotide
  misc_feature 1..20: note = Target: SCN10A; (-) strand; PAM type: NRG; PAM sequence: CAG
  source 1..20: mol_type = other DNA
acttttatgaccacaattaa

SEQ ID NO: 19595 - DNA, 20 bp, synthetic construct
  misc_feature 1..20: note = Description of Artificial Sequence: Synthetic oligonucleotide
  misc_feature 1..20: note = Target: SCN10A; (-) strand; PAM type: NRG; PAM sequence: TGG
  source 1..20: mol_type = other DNA
ttttatctaaagacaatctt

SEQ ID NO: 19596 - DNA, 20 bp, synthetic construct
  misc_feature 1..20: note = Description of Artificial Sequence: Synthetic oligonucleotide
  misc_feature 1..20: note = Target: SCN10A; (-) strand; PAM type: NRG; PAM sequence: AAG
  source 1..20: mol_type = other DNA
aaatgtcacttttttatcta

SEQ ID NO: 19597 - DNA, 20 bp, synthetic construct
  misc_feature 1..20: note = Description of Artificial Sequence: Synthetic oligonucleotide
  misc_feature 1..20: note = Target: SCN10A; (-) strand; PAM type: NRG; PAM sequence: AGG
  source 1..20: mol_type = other DNA
gttgcctctaccttgaaatg

SEQ ID NO: 19598 - DNA, 20 bp, synthetic construct
  misc_feature 1..20: note = Description of Artificial Sequence: Synthetic oligonucleotide
  misc_feature 1..20: note = Target: SCN10A; (-) strand; PAM type: NRG; PAM sequence: GAG
  source 1..20: mol_type = other DNA
agttgcctctaccttgaaat

SEQ ID NO: 19599 - DNA, 20 bp, synthetic construct
  misc_feature 1..20: note = Description of Artificial Sequence: Synthetic oligonucleotide
  misc_feature 1..20: note = Target: SCN10A; (-) strand; PAM type: NRG; PAM sequence: CAG
  source 1..20: mol_type = other DNA
cacttgaattttctggatct

SEQ ID NO: 19600 - DNA, 20 bp, synthetic construct
  misc_feature 1..20: note = Description of Artificial Sequence: Synthetic oligonucleotide
  misc_feature 1..20: note = Target: SCN10A; (-) strand; PAM type: NRG; PAM sequence: TGG
  source 1..20: mol_type = other DNA
ggacaaccacttgaattttc

SEQ ID NO: 19601 - DNA, 20 bp, synthetic construct
  misc_feature 1..20: note = Description of Artificial Sequence: Synthetic oligonucleotide
  misc_feature 1..20: note = Target: SCN10A; (-) strand; PAM type: NRG; PAM sequence: AGG
  source 1..20: mol_type = other DNA
agttgccctttacaaaacat

SEQ ID NO: 19602 - DNA, 20 bp, synthetic construct
  misc_feature 1..20: note = Description of Artificial Sequence: Synthetic oligonucleotide
  misc_feature 1..20: note = Target: SCN10A; (-) strand; PAM type: NRG; PAM sequence: TAG
  source 1..20: mol_type = other DNA
tagttgccctttacaaaaca

SEQ ID NO: 19603 - DNA, 20 bp, synthetic construct
  misc_feature 1..20: note = Description of Artificial Sequence: Synthetic oligonucleotide
  misc_feature 1..20: note = Target: SCN10A; (-) strand; PAM type: NRG; PAM sequence: TAG
  source 1..20: mol_type = other DNA
agcctggagccagaggcagc

SEQ ID NO: 19604 - DNA, 20 bp, synthetic construct
  misc_feature 1..20: note = Description of Artificial Sequence: Synthetic oligonucleotide
  misc_feature 1..20: note = Target: SCN10A; (-) strand; PAM type: NRG; PAM sequence: CAG
  source 1..20: mol_type = other DNA
ggagagcctggagccagagg

SEQ ID NO: 19605 - DNA, 20 bp, synthetic construct
  misc_feature 1..20: note = Description of Artificial Sequence: Synthetic oligonucleotide
  misc_feature 1..20: note = Target: SCN10A; (-) strand; PAM type: NRG; PAM sequence: AGG
  source 1..20: mol_type = other DNA
ccaggagagcctggagccag

SEQ ID NO: 19606 - DNA, 20 bp, synthetic construct
  misc_feature 1..20: note = Description of Artificial Sequence: Synthetic oligonucleotide
  misc_feature 1..20: note = Target: SCN10A; (-) strand; PAM type: NRG; PAM sequence: GAG
  source 1..20: mol_type = other DNA
accaggagagcctggagcca

SEQ ID NO: 19607 - DNA, 20 bp, synthetic construct
  misc_feature 1..20: note = Description of Artificial Sequence: Synthetic oligonucleotide
  misc_feature 1..20: note = Target: SCN10A; (-) strand; PAM type: NRG; PAM sequence: CAG
  source 1..20: mol_type = other DNA
gaaccaggagagcctggagc

SEQ ID NO: 19608 - DNA, 20 bp, synthetic construct
  misc_feature 1..20: note = Description of Artificial Sequence: Synthetic oligonucleotide
  misc_feature 1..20: note = Target: SCN10A; (-) strand; PAM type: NRG; PAM sequence: GAG
  source 1..20: mol_type = other DNA
aagtgaaccaggagagcctg

SEQ ID NO: 19609 - DNA, 20 bp, synthetic construct
  misc_feature 1..20: note = Description of Artificial Sequence: Synthetic oligonucleotide
  misc_feature 1..20: note = Target: SCN10A; (-) strand; PAM type: NRG; PAM sequence: TGG
  source 1..20: mol_type = other DNA
gaaagtgaaccaggagagcc

SEQ ID NO: 19610 - DNA, 20 bp, synthetic construct
  misc_feature 1..20: note = Description of Artificial Sequence: Synthetic oligonucleotide
  misc_feature 1..20: note = Target: SCN10A; (-) strand; PAM type: NRG; PAM sequence: GAG
  source 1..20: mol_type = other DNA
cacaggaaagtgaaccagga

SEQ ID NO: 19611 - DNA, 20 bp, synthetic construct
  misc_feature 1..20: note = Description of Artificial Sequence: Synthetic oligonucleotide
  misc_feature 1..20: note = Target: SCN10A; (-) strand; PAM type: NRG; PAM sequence: GAG
  source 1..20: mol_type = other DNA
agcacaggaaagtgaaccag

SEQ ID NO: 19612 - DNA, 20 bp, synthetic construct
  misc_feature 1..20: note = Description of Artificial Sequence: Synthetic oligonucleotide
  misc_feature 1..20: note = Target: SCN10A; (-) strand; PAM type: NRG; PAM sequence: AGG
  source 1..20: mol_type = other DNA
caagcacaggaaagtgaacc

SEQ ID NO: 19613 - DNA, 20 bp, synthetic construct
  misc_feature 1..20: note = Description of Artificial Sequence: Synthetic oligonucleotide
  misc_feature 1..20: note = Target: SCN10A; (-) strand; PAM type: NRG; PAM sequence: CAG
  source 1..20: mol_type = other DNA
acaagcacaggaaagtgaac

SEQ ID NO: 19614 - DNA, 20 bp, synthetic construct
  misc_feature 1..20: note = Description of Artificial Sequence: Synthetic oligonucleotide
  misc_feature 1..20: note = Target: SCN10A; (-) strand; PAM type: NRG; PAM sequence: AAG
  source 1..20: mol_type = other DNA
tgggatgaacaagcacagga

SEQ ID NO: 19615 - DNA, 20 bp, synthetic construct
  misc_feature 1..20: note = Description of Artificial Sequence: Synthetic oligonucleotide
  misc_feature 1..20: note = Target: SCN10A; (-) strand; PAM type: NRG; PAM sequence: AGG
  source 1..20: mol_type = other DNA
gctttgggatgaacaagcac

SEQ ID NO: 19616 - DNA, 20 bp, synthetic construct
  misc_feature 1..20: note = Description of Artificial Sequence: Synthetic oligonucleotide
  misc_feature 1..20: note = Target: SCN10A; (-) strand; PAM type: NRG; PAM sequence: CAG
  source 1..20: mol_type = other DNA
ggctttgggatgaacaagca

SEQ ID NO: 19617 - DNA, 20 bp, synthetic construct
  misc_feature 1..20: note = Description of Artificial Sequence: Synthetic oligonucleotide
  misc_feature 1..20: note = Target: SCN10A; (-) strand; PAM type: NRG; PAM sequence: AAG
  source 1..20: mol_type = other DNA
ggaatggctttgggatgaac

SEQ ID NO: 19618 - DNA, 20 bp, synthetic construct
  misc_feature 1..20: note = Description of Artificial Sequence: Synthetic oligonucleotide
  misc_feature 1..20: note = Target: SCN10A; (-) strand; PAM type: NRG; PAM sequence: GGG
  source 1..20: mol_type = other DNA
gagctggtgggaatggcttt

SEQ ID NO: 19619 - DNA, 20 bp, synthetic construct
  misc_feature 1..20: note = Description of Artificial Sequence: Synthetic oligonucleotide
  misc_feature 1..20: note = Target: SCN10A; (-) strand; PAM type: NRG; PAM sequence: TGG
  source 1..20: mol_type = other DNA
tgagctggtgggaatggctt

SEQ ID NO: 19620 - DNA, 20 bp, synthetic construct
  misc_feature 1..20: note = Description of Artificial Sequence: Synthetic oligonucleotide
  misc_feature 1..20: note = Target: SCN10A; (-) strand; PAM type: NRG; PAM sequence: TGG
  source 1..20: mol_type = other DNA
ccaggctgagctggtgggaa

SEQ ID NO: 19621 - DNA, 20 bp, synthetic construct
  misc_feature 1..20: note = Description of Artificial Sequence: Synthetic oligonucleotide
  misc_feature 1..20: note = Target: SCN10A; (-) strand; PAM type: NRG; PAM sequence: GGG
  source 1..20: mol_type = other DNA
aggacccaggctgagctggt

SEQ ID NO: 19622 - DNA, 20 bp, synthetic construct
  misc_feature 1..20: note = Description of Artificial Sequence: Synthetic oligonucleotide
  misc_feature 1..20: note = Target: SCN10A; (-) strand; PAM type: NRG; PAM sequence: TGG
  source 1..20: mol_type = other DNA
gaggacccaggctgagctgg

SEQ ID NO: 19623 - DNA, 20 bp, synthetic construct
  misc_feature 1..20: note = Description of Artificial Sequence: Synthetic oligonucleotide
  misc_feature 1..20: note = Target: SCN10A; (-) strand; PAM type: NRG; PAM sequence: TGG
  source 1..20: mol_type = other DNA
tgggaggacccaggctgagc

SEQ ID NO: 19624 - DNA, 20 bp, synthetic construct
  misc_feature 1..20: note = Description of Artificial Sequence: Synthetic oligonucleotide
  misc_feature 1..20: note = Target: SCN10A; (-) strand; PAM type: NRG; PAM sequence: GAG
  source 1..20: mol_type = other DNA
agtgtgggaggacccaggct

SEQ ID NO: 19625 - DNA, 20 bp, synthetic construct
  misc_feature 1..20: note = Description of Artificial Sequence: Synthetic oligonucleotide
  misc_feature 1..20: note = Target: SCN10A; (-) strand; PAM type: NRG; PAM sequence: AGG
  source 1..20: mol_type = other DNA
ggtcaagtgtgggaggaccc

SEQ ID NO: 19626 - DNA, 20 bp, synthetic construct
  misc_feature 1..20: note = Description of Artificial Sequence: Synthetic oligonucleotide
  misc_feature 1..20: note = Target: SCN10A; (-) strand; PAM type: NRG; PAM sequence: CAG
  source 1..20: mol_type = other DNA
aggtcaagtgtgggaggacc

SEQ ID NO: 19627 - DNA, 20 bp, synthetic construct
  misc_feature 1..20: note = Description of Artificial Sequence: Synthetic oligonucleotide
  misc_feature 1..20: note = Target: SCN10A; (-) strand; PAM type: NRG; PAM sequence: AGG
  source 1..20: mol_type = other DNA
ttcaggaggtcaagtgtggg

SEQ ID NO: 19628 - DNA, 20 bp, synthetic construct
  misc_feature 1..20: note = Description of Artificial Sequence: Synthetic oligonucleotide
  misc_feature 1..20: note = Target: SCN10A; (-) strand; PAM type: NRG; PAM sequence: GAG
  source 1..20: mol_type = other DNA
gttcaggaggtcaagtgtgg

SEQ ID NO: 19629 - DNA, 20 bp, synthetic construct
  misc_feature 1..20: note = Description of Artificial Sequence: Synthetic oligonucleotide
  misc_feature 1..20: note = Target: SCN10A; (-) strand; PAM type: NRG; PAM sequence: GGG
  source 1..20: mol_type = other DNA
gggttcaggaggtcaagtgt

SEQ ID NO: 19630 - DNA, 20 bp, synthetic construct
  misc_feature 1..20: note = Description of Artificial Sequence: Synthetic oligonucleotide
  misc_feature 1..20: note = Target: SCN10A; (-) strand; PAM type: NRG; PAM sequence: TGG
  source 1..20: mol_type = other DNA
tgggttcaggaggtcaagtg

SEQ ID NO: 19631 - DNA, 20 bp, synthetic construct
  misc_feature 1..20: note = Description of Artificial Sequence: Synthetic oligonucleotide
  misc_feature 1..20: note = Target: SCN10A; (-) strand; PAM type: NRG; PAM sequence: AAG
  source 1..20: mol_type = other DNA
gacactgggttcaggaggtc

SEQ ID NO: 19632 - DNA, 20 bp, synthetic construct
  misc_feature 1..20: note = Description of Artificial Sequence: Synthetic oligonucleotide
  misc_feature 1..20: note = Target: SCN10A; (-) strand; PAM type: NRG; PAM sequence: AGG
  source 1..20: mol_type = other DNA
atgtggacactgggttcagg

SEQ ID NO: 19633 - DNA, 20 bp, synthetic construct
  misc_feature 1..20: note = Description of Artificial Sequence: Synthetic oligonucleotide
  misc_feature 1..20: note = Target: SCN10A; (-) strand; PAM type: NRG; PAM sequence: GAG
  source 1..20: mol_type = other DNA
catgtggacactgggttcag

SEQ ID NO: 19634 - DNA, 20 bp, synthetic construct
  misc_feature 1..20: note = Description of Artificial Sequence: Synthetic oligonucleotide
  misc_feature 1..20: note = Target: SCN10A; (-) strand; PAM type: NRG; PAM sequence: AGG
  source 1..20: mol_type = other DNA
gacatgtggacactgggttc

SEQ ID NO: 19635 - DNA, 20 bp, synthetic construct
  misc_feature 1..20: note = Description of Artificial Sequence: Synthetic oligonucleotide
  misc_feature 1..20: note = Target: SCN10A; (-) strand; PAM type: NRG; PAM sequence: CAG
  source 1..20: mol_type = other DNA
agacatgtggacactgggtt

SEQ ID NO: 19636 - DNA, 20 bp, synthetic construct
  misc_feature 1..20: note = Description of Artificial Sequence: Synthetic oligonucleotide
  misc_feature 1..20: note = Target: SCN10A; (-) strand; PAM type: NRG; PAM sequence: GGG
  source 1..20: mol_type = other DNA
gcaggagacatgtggacact

SEQ ID NO: 19637 - DNA, 20 bp, synthetic construct
  misc_feature 1..20: note = Description of Artificial Sequence: Synthetic oligonucleotide
  misc_feature 1..20: note = Target: SCN10A; (-) strand; PAM type: NRG; PAM sequence: TGG
  source 1..20: mol_type = other DNA
tgcaggagacatgtggacac

SEQ ID NO: 19638 - DNA, 20 bp, synthetic construct
  misc_feature 1..20: note = Description of Artificial Sequence: Synthetic oligonucleotide
  misc_feature 1..20: note = Target: SCN10A; (-) strand; PAM type: NRG; PAM sequence: TGG
  source 1..20: mol_type = other DNA
gcagcagtgcaggagacatg

SEQ ID NO: 19639 - DNA, 20 bp, synthetic construct
  misc_feature 1..20: note = Description of Artificial Sequence: Synthetic oligonucleotide
  misc_feature 1..20: note = Target: SCN10A; (-) strand; PAM type: NRG; PAM sequence: GAG
  source 1..20: mol_type = other DNA
agagcagagcagcagtgcag

SEQ ID NO: 19640 - DNA, 20 bp, synthetic construct
  misc_feature 1..20: note = Description of Artificial Sequence: Synthetic oligonucleotide
  misc_feature 1..20: note = Target: SCN10A; (-) strand; PAM type: NRG; PAM sequence: AGG
  source 1..20: mol_type = other DNA
tgagagcagagcagcagtgc

SEQ ID NO: 19641 - DNA, 20 bp, synthetic construct
  misc_feature 1..20: note = Description of Artificial Sequence: Synthetic oligonucleotide
  misc_feature 1..20: note = Target: SCN10A; (-) strand; PAM type: NRG; PAM sequence: CAG
  source 1..20: mol_type = other DNA
ctgagagcagagcagcagtg

SEQ ID NO: 19642 - DNA, 20 bp, synthetic construct
  misc_feature 1..20: note = Description of Artificial Sequence: Synthetic oligonucleotide
  misc_feature 1..20: note = Target: SCN10A; (-) strand; PAM type: NRG; PAM sequence: CAG
  source 1..20: mol_type = other DNA
gttagctgagagcagagcag

SEQ ID NO: 19643 - DNA, 20 bp, synthetic construct
  misc_feature 1..20: note = Description of Artificial Sequence: Synthetic oligonucleotide
  misc_feature 1..20: note = Target: SCN10A; (-) strand; PAM type: NRG; PAM sequence: CAG
  source 1..20: mol_type = other DNA
ccagttagctgagagcagag

SEQ ID NO: 19644 - DNA, 20 bp, synthetic construct
  misc_feature 1..20: note = Description of Artificial Sequence: Synthetic oligonucleotide
  misc_feature 1..20: note = Target: SCN10A; (-) strand; PAM type: NRG; PAM sequence: GAG
  source 1..20: mol_type = other DNA
gagccagttagctgagagca

SEQ ID NO: 19645 - DNA, 20 bp, synthetic construct
  misc_feature 1..20: note = Description of Artificial Sequence: Synthetic oligonucleotide
  misc_feature 1..20: note = Target: SCN10A; (-) strand; PAM type: NRG; PAM sequence: CAG
  source 1..20: mol_type = other DNA
ttgagccagttagctgagag

SEQ ID NO: 19646 - DNA, 20 bp, synthetic construct
  misc_feature 1..20: note = Description of Artificial Sequence: Synthetic oligonucleotide
  misc_feature 1..20: note = Target: SCN10A; (-) strand; PAM type: NRG; PAM sequence: GAG
  source 1..20: mol_type = other DNA
gtgttgagccagttagctga

SEQ ID NO: 19647 - DNA, 20 bp, synthetic construct
  misc_feature 1..20: note = Description of Artificial Sequence: Synthetic oligonucleotide
  misc_feature 1..20: note = Target: SCN10A; (-) strand; PAM type: NRG; PAM sequence: GAG
  source 1..20: mol_type = other DNA
gtgtgttgagccagttagct

SEQ ID NO: 19648 - DNA, 20 bp, synthetic construct
  misc_feature 1..20: note = Description of Artificial Sequence: Synthetic oligonucleotide
  misc_feature 1..20: note = Target: SCN10A; (-) strand; PAM type: NRG; PAM sequence: TAG
  source 1..20: mol_type = other DNA
ggttagtgtgttgagccagt

SEQ ID NO: 19649 - DNA, 20 bp, synthetic construct
  misc_feature 1..20: note = Description of Artificial Sequence: Synthetic oligonucleotide
  misc_feature 1..20: note = Target: SCN10A; (-) strand; PAM type: NRG; PAM sequence: CAG
  source 1..20: mol_type = other DNA
tattggttagtgtgttgagc

SEQ ID NO: 19650 - DNA, 20 bp, synthetic construct
  misc_feature 1..20: note = Description of Artificial Sequence: Synthetic oligonucleotide
  misc_feature 1..20: note = Target: SCN10A; (-) strand; PAM type: NRG; PAM sequence: GAG
  source 1..20: mol_type = other DNA
cccttattggttagtgtgtt

SEQ ID NO: 19651 - DNA, 20 bp, synthetic construct
  misc_feature 1..20: note = Description of Artificial Sequence: Synthetic oligonucleotide
  misc_feature 1..20: note = Target: SCN10A; (-) strand; PAM type: NRG; PAM sequence: TAG
  source 1..20: mol_type = other DNA
tggggcatgcccttattggt

SEQ ID NO: 19652 - DNA, 20 bp, synthetic construct
  misc_feature 1..20: note = Description of Artificial Sequence: Synthetic oligonucleotide
  misc_feature 1..20: note = Target: SCN10A; (-) strand; PAM type: NRG; PAM sequence: TGG
  source 1..20: mol_type = other DNA
ggggtggggcatgcccttat

SEQ ID NO: 19653 - DNA, 20 bp, synthetic construct
  misc_feature 1..20: note = Description of Artificial Sequence: Synthetic oligonucleotide
  misc_feature 1..20: note = Target: SCN10A; (-) strand; PAM type: NRG; PAM sequence: GGG
  source 1..20: mol_type = other DNA
ggtgcagttcgggtggggtg

SEQ ID NO: 19654 - DNA, 20 bp, synthetic construct
  misc_feature 1..20: note = Description of Artificial Sequence: Synthetic oligonucleotide
  misc_feature 1..20: note = Target: SCN10A; (-) strand; PAM type: NRG; PAM sequence: GGG
  source 1..20: mol_type = other DNA
gggtgcagttcgggtggggt

SEQ ID NO: 19655 - DNA, 20 bp, synthetic construct
  misc_feature 1..20: note = Description of Artificial Sequence: Synthetic oligonucleotide
  misc_feature 1..20: note = Target: SCN10A; (-) strand; PAM type: NRG; PAM sequence: TGG
  source 1..20: mol_type = other DNA
agggtgcagttcgggtgggg

SEQ ID NO: 19656 - DNA, 20 bp, synthetic construct
  misc_feature 1..20: note = Description of Artificial Sequence: Synthetic oligonucleotide
  misc_feature 1..20: note = Target: SCN10A; (-) strand; PAM type: NRG; PAM sequence: GGG
  source 1..20: mol_type = other DNA
ggcagggtgcagttcgggtg

SEQ ID NO: 19657 - DNA, 20 bp, synthetic construct
  misc_feature 1..20: note = Description of Artificial Sequence: Synthetic oligonucleotide
  misc_feature 1..20: note = Target: SCN10A; (-) strand; PAM type: NRG; PAM sequence: GGG
  source 1..20: mol_type = other DNA
tggcagggtgcagttcgggt

SEQ ID NO: 19658 - DNA, 20 bp, synthetic construct
  misc_feature 1..20: note = Description of Artificial Sequence: Synthetic oligonucleotide
  misc_feature 1..20: note = Target: SCN10A; (-) strand; PAM type: NRG; PAM sequence: TGG
  source 1..20: mol_type = other DNA
atggcagggtgcagttcggg

SEQ ID NO: 19659 - DNA, 20 bp, synthetic construct
  misc_feature 1..20: note = Description of Artificial Sequence: Synthetic oligonucleotide
  misc_feature 1..20: note = Target: SCN10A; (-) strand; PAM type: NRG; PAM sequence: GGG
  source 1..20: mol_type = other DNA
atgatggcagggtgcagttc

SEQ ID NO: 19660 - DNA, 20 bp, synthetic construct
  misc_feature 1..20: note = Description of Artificial Sequence: Synthetic oligonucleotide
  misc_feature 1..20: note = Target: SCN10A; (-) strand; PAM type: NRG; PAM sequence: CGG
  source 1..20: mol_type = other DNA
gatgatggcagggtgcagtt

SEQ ID NO: 19661 - DNA, 20 bp, synthetic construct
  misc_feature 1..20: note = Description of Artificial Sequence: Synthetic oligonucleotide
  misc_feature 1..20: note = Target: SCN10A; (-) strand; PAM type: NRG; PAM sequence: CAG
  source 1..20: mol_type = other DNA
gtggggatgatggcagggtg

SEQ ID NO: 19662 - DNA, 20 bp, synthetic construct
  misc_feature 1..20: note = Description of Artificial Sequence: Synthetic oligonucleotide
  misc_feature 1..20: note = Target: SCN10A; (-) strand; PAM type: NRG; PAM sequence: GGG
  source 1..20: mol_type = other DNA
gcggggtggggatgatggca

SEQ ID NO: 19663 - DNA, 20 bp, synthetic construct
  misc_feature 1..20: note = Description of Artificial Sequence: Synthetic oligonucleotide
  misc_feature 1..20: note = Target: SCN10A; (-) strand; PAM type: NRG; PAM sequence: AGG
  source 1..20: mol_type = other DNA
ggcggggtggggatgatggc

SEQ ID NO: 19664 - DNA, 20 bp, synthetic construct
  misc_feature 1..20: note = Description of Artificial Sequence: Synthetic oligonucleotide
  misc_feature 1..20: note = Target: SCN10A; (-) strand; PAM type: NRG; PAM sequence: CAG
  source 1..20: mol_type = other DNA
gggcggggtggggatgatgg

SEQ ID NO: 19665 - DNA, 20 bp, synthetic construct
  misc_feature 1..20: note = Description of Artificial Sequence: Synthetic oligonucleotide
  misc_feature 1..20: note = Target: SCN10A; (-) strand; PAM type: NRG; PAM sequence: TGG
  source 1..20: mol_type = other DNA
tcggggcggggtggggatga

SEQ ID NO: 19666 - DNA, 20 bp, synthetic construct
  misc_feature 1..20: note = Description of Artificial Sequence: Synthetic oligonucleotide
  misc_feature 1..20: note = Target: SCN10A; (-) strand; PAM type: NRG; PAM sequence: GGG
  source 1..20: mol_type = other DNA
ggcgtggtcggggcggggtg

SEQ ID NO: 19667 - DNA, 20 bp, synthetic construct
  misc_feature 1..20: note = Description of Artificial Sequence: Synthetic oligonucleotide
  misc_feature 1..20: note = Target: SCN10A; (-) strand; PAM type: NRG; PAM sequence: GGG
  source 1..20: mol_type = other DNA
tggcgtggtcggggcggggt

SEQ ID NO: 19668 - DNA, 20 bp, synthetic construct
  misc_feature 1..20: note = Description of Artificial Sequence: Synthetic oligonucleotide
  misc_feature 1..20: note = Target: SCN10A; (-) strand; PAM type: NRG; PAM sequence: TGG
  source 1..20: mol_type = other DNA
ctggcgtggtcggggcgggg

SEQ ID NO: 19669 - DNA, 20 bp, synthetic construct
  misc_feature 1..20: note = Description of Artificial Sequence: Synthetic oligonucleotide
  misc_feature 1..20: note = Target: SCN10A; (-) strand; PAM type: NRG; PAM sequence: GGG
  source 1..20: mol_type = other DNA
tcactggcgtggtcggggcg

SEQ ID NO: 19670 - DNA, 20 bp, synthetic construct
  misc_feature 1..20: note = Description of Artificial Sequence: Synthetic oligonucleotide
  misc_feature 1..20: note = Target: SCN10A; (-) strand; PAM type: NRG; PAM sequence: GGG
  source 1..20: mol_type = other DNA
ctcactggcgtggtcggggc

SEQ ID NO: 19671 - DNA, 20 bp, synthetic construct
  misc_feature 1..20: note = Description of Artificial Sequence: Synthetic oligonucleotide
  misc_feature 1..20: note = Target: SCN10A; (-) strand; PAM type: NRG; PAM sequence: CGG
  source 1..20: mol_type = other DNA
cctcactggcgtggtcgggg

SEQ ID NO: 19672 - DNA, 20 bp, synthetic construct
  misc_feature 1..20: note = Description of Artificial Sequence: Synthetic oligonucleotide
  misc_feature 1..20: note = Target: SCN10A; (-) strand; PAM type: NRG; PAM sequence: GGG
  source 1..20: mol_type = other DNA
tgccctcactggcgtggtcg

SEQ ID NO: 19673 - DNA, 20 bp, synthetic construct
  misc_feature 1..20: note = Description of Artificial Sequence: Synthetic oligonucleotide
  misc_feature 1..20: note = Target: SCN10A; (-) strand; PAM type: NRG; PAM sequence: GGG
  source 1..20: mol_type = other DNA
ctgccctcactggcgtggtc

SEQ ID NO: 19674 - DNA, 20 bp, synthetic construct
  misc_feature 1..20: note = Description of Artificial Sequence: Synthetic oligonucleotide
  misc_feature 1..20: note = Target: SCN10A; (-) strand; PAM type: NRG; PAM sequence: CGG
  source 1..20: mol_type = other DNA
actgccctcactggcgtggt

SEQ ID NO: 19675 - DNA, 20 bp, synthetic construct
  misc_feature 1..20: note = Description of Artificial Sequence: Synthetic oligonucleotide
  misc_feature 1..20: note = Target: SCN10A; (-) strand; PAM type: NRG; PAM sequence: TGG
  source 1..20: mol_type = other DNA
tggtactgccctcactggcg

SEQ ID NO: 19676 - DNA, 20 bp, synthetic construct
  misc_feature 1..20: note = Description of Artificial Sequence: Synthetic oligonucleotide
  misc_feature 1..20: note = Target: SCN10A; (-) strand; PAM type: NRG; PAM sequence: TGG
  source 1..20: mol_type = other DNA
ctggctggtactgccctcac

SEQ ID NO: 19677 - DNA, 20 bp, synthetic construct
  misc_feature 1..20: note = Description of Artificial Sequence: Synthetic oligonucleotide
  misc_feature 1..20: note = Target: SCN10A; (-) strand; PAM type: NRG; PAM sequence: TGG
  source 1..20: mol_type = other DNA
aacatcgtgagtgctctggc

SEQ ID NO: 19678 - DNA, 20 bp, synthetic construct
  misc_feature 1..20: note = Description of Artificial Sequence: Synthetic oligonucleotide
  misc_feature 1..20: note = Target: SCN10A; (-) strand; PAM type: NRG; PAM sequence: TGG
  source 1..20: mol_type = other DNA
aggcaacatcgtgagtgctc

SEQ ID NO: 19679 - DNA, 20 bp, synthetic construct
  misc_feature 1..20: note = Description of Artificial Sequence: Synthetic oligonucleotide
  misc_feature 1..20: note = Target: SCN10A; (-) strand; PAM type: NRG; PAM sequence: GAG
  source 1..20: mol_type = other DNA
ctccagataggcaacatcgt

SEQ ID NO: 19680 - DNA, 20 bp, synthetic construct
  misc_feature 1..20: note = Description of Artificial Sequence: Synthetic oligonucleotide
  misc_feature 1..20: note = Target: SCN10A; (-) strand; PAM type: NRG; PAM sequence: AGG
  source 1..20: mol_type = other DNA
ttcgaagccatgctccagat

SEQ ID NO: 19681 - DNA, 20 bp, synthetic construct
  misc_feature 1..20: note = Description of Artificial Sequence: Synthetic oligonucleotide
  misc_feature 1..20: note = Target: SCN10A; (-) strand; PAM type: NRG; PAM sequence: TAG
  source 1..20: mol_type = other DNA
cttcgaagccatgctccaga

SEQ ID NO: 19682 - DNA, 20 bp, synthetic construct
  misc_feature 1..20: note = Description of Artificial Sequence: Synthetic oligonucleotide
  misc_feature 1..20: note = Target: SCN10A; (-) strand; PAM type: NRG; PAM sequence: CAG
  source 1..20: mol_type = other DNA
ctaccttcgaagccatgctc

SEQ ID NO: 19683 - DNA, 20 bp, synthetic construct
  misc_feature 1..20: note = Description of Artificial Sequence: Synthetic oligonucleotide
  misc_feature 1..20: note = Target: SCN10A; (-) strand; PAM type: NRG; PAM sequence: AAG
  source 1..20: mol_type = other DNA
tggcatgagccctaccttcg

SEQ ID NO: 19684 - DNA, 20 bp, synthetic construct
  misc_feature 1..20: note = Description of Artificial Sequence: Synthetic oligonucleotide
  misc_feature 1..20: note = Target: SCN10A; (-) strand; PAM type: NRG; PAM sequence: GAG
  source 1..20: mol_type = other DNA
gccatggagcaccatggcat

SEQ ID NO: 19685 - DNA, 20 bp, synthetic construct
  misc_feature 1..20: note = Description of Artificial Sequence: Synthetic oligonucleotide
  misc_feature 1..20: note = Target: SCN10A; (-) strand; PAM type: NRG; PAM sequence: TGG
  source 1..20: mol_type = other DNA
ttcatggccatggagcacca

SEQ ID NO: 19686 - DNA, 20 bp, synthetic construct
  misc_feature 1..20: note = Description of Artificial Sequence: Synthetic oligonucleotide
  misc_feature 1..20: note = Target: SCN10A; (-) strand; PAM type: NRG; PAM sequence: GAG
  source 1..20: mol_type = other DNA
acaccatcttcatggccatg

SEQ ID NO: 19687 - DNA, 20 bp, synthetic construct
  misc_feature 1..20: note = Description of Artificial Sequence: Synthetic oligonucleotide
  misc_feature 1..20: note = Target: SCN10A; (-) strand; PAM type: NRG; PAM sequence: TGG
  source 1..20: mol_type = other DNA
gaacaccatcttcatggcca

SEQ ID NO: 19688 - DNA, 20 bp, synthetic construct
  misc_feature 1..20: note = Description of Artificial Sequence: Synthetic oligonucleotide
  misc_feature 1..20: note = Target: SCN10A; (-) strand; PAM type: NRG; PAM sequence: TGG
  source 1..20: mol_type = other DNA
cgtggtgaacaccatcttca

SEQ ID NO: 19689 - DNA, 20 bp, synthetic construct
  misc_feature 1..20: note = Description of Artificial Sequence: Synthetic oligonucleotide
  misc_feature 1..20: note = Target: SCN10A; (-) strand; PAM type: NRG; PAM sequence: TGG
  source 1..20: mol_type = other DNA
caccatcaccttgtgcatcg

SEQ ID NO: 19690 - DNA, 20 bp, synthetic construct
  misc_feature 1..20: note = Description of Artificial Sequence: Synthetic oligonucleotide
  misc_feature 1..20: note = Target: SCN10A; (-) strand; PAM type: NRG; PAM sequence: GAG
  source 1..20: mol_type = other DNA
ttgtgacggatccctttgca

SEQ ID NO: 19691 - DNA, 20 bp, synthetic construct
  misc_feature 1..20: note = Description of Artificial Sequence: Synthetic oligonucleotide
  misc_feature 1..20: note = Target: SCN10A; (-) strand; PAM type: NRG; PAM sequence: CAG
  source 1..20: mol_type = other DNA
gcttgtgacggatccctttg

SEQ ID NO: 19692 - DNA, 20 bp, synthetic construct
  misc_feature 1..20: note = Description of Artificial Sequence: Synthetic oligonucleotide
  misc_feature 1..20: note = Target: SCN10A; (-) strand; PAM type: NRG; PAM sequence: CGG
  source 1..20: mol_type = other DNA
aattctctttgggcttgtga

SEQ ID NO: 19693 - DNA, 20 bp, synthetic construct
  misc_feature 1..20: note = Description of Artificial Sequence: Synthetic oligonucleotide
  misc_feature 1..20: note = Target: SCN10A; (-) strand; PAM type: NRG; PAM sequence: GGG
  source 1..20: mol_type = other DNA
agctcaagacaattctcttt

SEQ ID NO: 19694 - DNA, 20 bp, synthetic construct
  misc_feature 1..20: note = Description of Artificial Sequence: Synthetic oligonucleotide
  misc_feature 1..20: note = Target: SCN10A; (-) strand; PAM type: NRG; PAM sequence: TGG
  source 1..20: mol_type = other DNA
aagctcaagacaattctctt

SEQ ID NO: 19695 - DNA, 20 bp, synthetic construct
  misc_feature 1..20: note = Description of Artificial Sequence: Synthetic oligonucleotide
  misc_feature 1..20: note = Target: SCN10A; (-) strand; PAM type: NRG; PAM sequence: AAG
  source 1..20: mol_type = other DNA
gccccatgtgggtgaagctc

SEQ ID NO: 19696 - DNA, 20 bp, synthetic construct
  misc_feature 1..20: note = Description of Artificial Sequence: Synthetic oligonucleotide
  misc_feature 1..20: note = Target: SCN10A; (-) strand; PAM type: NRG; PAM sequence: AAG
  source 1..20: mol_type = other DNA
attgctgccccatgtgggtg

SEQ ID NO: 19697 - DNA, 20 bp, synthetic construct
  misc_feature 1..20: note = Description of Artificial Sequence: Synthetic oligonucleotide
  misc_feature 1..20: note = Target: SCN10A; (-) strand; PAM type: NRG; PAM sequence: GGG
  source 1..20: mol_type = other DNA
ctgggattgctgccccatgt

SEQ ID NO: 19698 - DNA, 20 bp, synthetic construct
  misc_feature 1..20: note = Description of Artificial Sequence: Synthetic oligonucleotide
  misc_feature 1..20: note = Target: SCN10A; (-) strand; PAM type: NRG; PAM sequence: TGG
  source 1..20: mol_type = other DNA
tctgggattgctgccccatg

SEQ ID NO: 19699 - DNA, 20 bp, synthetic construct
  misc_feature 1..20: note = Description of Artificial Sequence: Synthetic oligonucleotide
  misc_feature 1..20: note = Target: SCN10A; (-) strand; PAM type: NRG; PAM sequence: GGG
  source 1..20: mol_type = other DNA
gtctcagaagtatctgatct

SEQ ID NO: 19700 - DNA, 20 bp, synthetic construct
  misc_feature 1..20: note = Description of Artificial Sequence: Synthetic oligonucleotide
  misc_feature 1..20: note = Target: SCN10A; (-) strand; PAM type: NRG; PAM sequence: TGG
  source 1..20: mol_type = other DNA
tgtctcagaagtatctgatc

SEQ ID NO: 19701 - DNA, 20 bp, synthetic construct
  misc_feature 1..20: note = Description of Artificial Sequence: Synthetic oligonucleotide
  misc_feature 1..20: note = Target: SCN10A; (-) strand; PAM type: NRG; PAM sequence: AAG
  source 1..20: mol_type = other DNA
gcttgaccagcttgtctcag

SEQ ID NO: 19702 - DNA, 20 bp, synthetic construct
  misc_feature 1..20: note = Description of Artificial Sequence: Synthetic oligonucleotide
  misc_feature 1..20: note = Target: SCN10A; (-) strand; PAM type: NRG; PAM sequence: CAG
  source 1..20: mol_type = other DNA
cctgcttgaccagcttgtct

SEQ ID NO: 19703 - DNA, 20 bp, synthetic construct
  misc_feature 1..20: note = Description of Artificial Sequence: Synthetic oligonucleotide
  misc_feature 1..20: note = Target: SCN10A; (-) strand; PAM type: NRG; PAM sequence: CAG
  source 1..20: mol_type = other DNA
aagtgcccaccctgcttgac

SEQ ID NO: 19704 - DNA, 20 bp, synthetic construct
  misc_feature 1..20: note = Description of Artificial Sequence: Synthetic oligonucleotide
  misc_feature 1..20: note = Target: SCN10A; (-) strand; PAM type: NRG; PAM sequence: AAG
  source 1..20: mol_type = other DNA
aactcgaggagtctgaacag

SEQ ID NO: 19705 - DNA, 20 bp, synthetic construct
  misc_feature 1..20: note = Description of Artificial Sequence: Synthetic oligonucleotide
  misc_feature 1..20: note = Target: SCN10A; (-) strand; PAM type: NRG; PAM sequence: CAG
  source 1..20: mol_type = other DNA
cagaactcgaggagtctgaa

SEQ ID NO: 19706 - DNA, 20 bp, synthetic construct
  misc_feature 1..20: note = Description of Artificial Sequence: Synthetic oligonucleotide
  misc_feature 1..20: note = Target: SCN10A; (-) strand; PAM type: NRG; PAM sequence: GAG
  source 1..20: mol_type = other DNA
actataatgcagaactcgag

SEQ ID NO: 19707 - DNA, 20 bp, synthetic construct
  misc_feature 1..20: note = Description of Artificial Sequence: Synthetic oligonucleotide
  misc_feature 1..20: note = Target: SCN10A; (-) strand; PAM type: NRG; PAM sequence: AGG
  source 1..20: mol_type = other DNA
acactataatgcagaactcg

SEQ ID NO: 19708 - DNA, 20 bp, synthetic construct
  misc_feature 1..20: note = Description of Artificial Sequence: Synthetic oligonucleotide
  misc_feature 1..20: note = Target: SCN10A; (-) strand; PAM type: NRG; PAM sequence: GAG
  source 1..20: mol_type = other DNA
cacactataatgcagaactc

SEQ ID NO: 19709 - DNA, 20 bp, synthetic construct
  misc_feature 1..20: note = Description of Artificial Sequence: Synthetic oligonucleotide
  misc_feature 1..20: note = Target: SCN10A; (-) strand; PAM type: NRG; PAM sequence: CAG
  source 1..20: mol_type = other DNA
tcattgaccacactataatg

SEQ ID NO: 19710 - DNA, 20 bp, synthetic construct
  misc_feature 1..20: note = Description of Artificial Sequence: Synthetic oligonucleotide
  misc_feature 1..20: note = Target: SCN10A; (-) strand; PAM type: NRG; PAM sequence: CAG
  source 1..20: mol_type = other DNA
ccaaggtgacacatggctga

SEQ ID NO: 19711 - DNA, 20 bp, synthetic construct
  misc_feature 1..20: note = Description of Artificial Sequence: Synthetic oligonucleotide
  misc_feature 1..20: note = Target: SCN10A; (-) strand; PAM type: NRG; PAM sequence: TGG
  source 1..20: mol_type = other DNA
ttggggtccaaggtgacaca

SEQ ID NO: 19712 - DNA, 20 bp, synthetic construct
  misc_feature 1..20: note = Description of Artificial Sequence: Synthetic oligonucleotide
  misc_feature 1..20: note = Target: SCN10A; (-) strand; PAM type: NRG; PAM sequence: AGG
  source 1..20: mol_type = other DNA
gaccgcagaattggggtcca

SEQ ID NO: 19713 - DNA, 20 bp, synthetic construct
  misc_feature 1..20: note = Description of Artificial Sequence: Synthetic oligonucleotide
  misc_feature 1..20: note = Target: SCN10A; (-) strand; PAM type: NRG; PAM sequence: AAG
  source 1..20: mol_type = other DNA
tgaccgcagaattggggtcc

SEQ ID NO: 19714 - DNA, 20 bp, synthetic construct
  misc_feature 1..20: note = Description of Artificial Sequence: Synthetic oligonucleotide
  misc_feature 1..20: note = Target: SCN10A; (-) strand; PAM type: NRG; PAM sequence: GGG
  source 1..20: mol_type = other DNA
agaggatgaccgcagaattg

SEQ ID NO: 19715 - DNA, 20 bp, synthetic construct
  misc_feature 1..20: note = Description of Artificial Sequence: Synthetic oligonucleotide
  misc_feature 1..20: note = Target: SCN10A; (-) strand; PAM type: NRG; PAM sequence: GGG
  source 1..20: mol_type = other DNA
tagaggatgaccgcagaatt

SEQ ID NO: 19716 - DNA, 20 bp, synthetic construct
  misc_feature 1..20: note = Description of Artificial Sequence: Synthetic oligonucleotide
  misc_feature 1..20: note = Target: SCN10A; (-) strand; PAM type: NRG; PAM sequence: TGG
  source 1..20: mol_type = other DNA
ctagaggatgaccgcagaat

SEQ ID NO: 19717 - DNA, 20 bp, synthetic construct
  misc_feature 1..20: note = Description of Artificial Sequence: Synthetic oligonucleotide
  misc_feature 1..20: note = Target: SCN10A; (-) strand; PAM type: NRG; PAM sequence: CAG
  source 1..20: mol_type = other DNA
caaggtctagaggatgaccg

SEQ ID NO: 19718 - DNA, 20 bp, synthetic construct
  misc_feature 1..20: note = Description of Artificial Sequence: Synthetic oligonucleotide
  misc_feature 1..20: note = Target: SCN10A; (-) strand; PAM type: NRG; PAM sequence: AGG
  source 1..20: mol_type = other DNA
ttattaacaacaaggtctag

SEQ ID NO: 19719 - DNA, 20 bp, synthetic construct
  misc_feature 1..20: note = Description of Artificial Sequence: Synthetic oligonucleotide
  misc_feature 1..20: note = Target: SCN10A; (-) strand; PAM type: NRG; PAM sequence: GAG
  source 1..20: mol_type = other DNA
attattaacaacaaggtcta

SEQ ID NO: 19720 - DNA, 20 bp, synthetic construct
  misc_feature 1..20: note = Description of Artificial Sequence: Synthetic oligonucleotide
  misc_feature 1..20: note = Target: SCN10A; (-) strand; PAM type: NRG; PAM sequence: TAG
  source 1..20: mol_type = other DNA
ttattattaacaacaaggtc

SEQ ID NO: 19721 - DNA, 20 bp, synthetic construct
  misc_feature 1..20: note = Description of Artificial Sequence: Synthetic oligonucleotide
  misc_feature 1..20: note = Target: SCN10A; (-) strand; PAM type: NRG; PAM sequence: AGG
  source 1..20: mol_type = other DNA
ggtacttattattaacaaca

SEQ ID NO: 19722 - DNA, 20 bp, synthetic construct
  misc_feature 1..20: note = Description of Artificial Sequence: Synthetic oligonucleotide
  misc_feature 1..20: note = Target: SCN10A; (-) strand; PAM type: NRG; PAM sequence: AAG
  source 1..20: mol_type = other DNA
tggtacttattattaacaac

SEQ ID NO: 19723 - DNA, 20 bp, synthetic construct
  misc_feature 1..20: note = Description of Artificial Sequence: Synthetic oligonucleotide
  misc_feature 1..20: note = Target: SCN10A; (-) strand; PAM type: NRG; PAM sequence: TGG
  source 1..20: mol_type = other DNA
tgaagtcaaaatgttggagg

SEQ ID NO: 19724 - DNA, 20 bp, synthetic construct
  misc_feature 1..20: note = Description of Artificial Sequence: Synthetic oligonucleotide
  misc_feature 1..20: note = Target: SCN10A; (-) strand; PAM type: NRG; PAM sequence: AGG
  source 1..20: mol_type = other DNA
ggctgaagtcaaaatgttgg

SEQ ID NO: 19725 - DNA, 20 bp, synthetic construct
  misc_feature 1..20: note = Description of Artificial Sequence: Synthetic oligonucleotide
  misc_feature 1..20: note = Target: SCN10A; (-) strand; PAM type: NRG; PAM sequence: GAG
  source 1..20: mol_type = other DNA
gggctgaagtcaaaatgttg

SEQ ID NO: 19726 - DNA, 20 bp, synthetic construct
  misc_feature 1..20: note = Description of Artificial Sequence: Synthetic oligonucleotide
  misc_feature 1..20: note = Target: SCN10A; (-) strand; PAM type: NRG; PAM sequence: TGG
  source 1..20: mol_type = other DNA
gagggctgaagtcaaaatgt

SEQ ID NO: 19727 - DNA, 20 bp, synthetic construct
  misc_feature 1..20: note = Description of Artificial Sequence: Synthetic oligonucleotide
  misc_feature 1..20: note = Target: SCN10A; (-) strand; PAM type: NRG; PAM sequence: AAG
  source 1..20: mol_type = other DNA
cagagacagagagagggctg

SEQ ID NO: 19728 - DNA, 20 bp, synthetic construct
  misc_feature 1..20: note = Description of Artificial Sequence: Synthetic oligonucleotide
  misc_feature 1..20: note = Target: SCN10A; (-) strand; PAM type: NRG; PAM sequence: GGG
  source 1..20: mol_type = other DNA
gaataccagagacagagaga

SEQ ID NO: 19729 - DNA, 20 bp, synthetic construct
  misc_feature 1..20: note = Description of Artificial Sequence: Synthetic oligonucleotide
  misc_feature 1..20: note = Target: SCN10A; (-) strand; PAM type: NRG; PAM sequence: AGG
  source 1..20: mol_type = other DNA
tgaataccagagacagagag

SEQ ID NO: 19730 - DNA, 20 bp, synthetic construct
  misc_feature 1..20: note = Description of Artificial Sequence: Synthetic oligonucleotide
  misc_feature 1..20: note = Target: SCN10A; (-) strand; PAM type: NRG; PAM sequence: GAG
  source 1..20: mol_type = other DNA
atgaataccagagacagaga

SEQ ID NO: 19731 - DNA, 20 bp, synthetic construct
  misc_feature 1..20: note = Description of Artificial Sequence: Synthetic oligonucleotide
  misc_feature 1..20: note = Target: SCN10A; (-) strand; PAM type: NRG; PAM sequence: GAG
  source 1..20: mol_type = other DNA
aaatgaataccagagacaga

SEQ ID NO: 19732 - DNA, 20 bp, synthetic construct
  misc_feature 1..20: note = Description of Artificial Sequence: Synthetic oligonucleotide
  misc_feature 1..20: note = Target: SCN10A; (-) strand; PAM type: NRG; PAM sequence: GAG
  source 1..20: mol_type = other DNA
ggaaatgaataccagagaca

SEQ ID NO: 19733 - DNA, 20 bp, synthetic construct
  misc_feature 1..20: note = Description of Artificial Sequence: Synthetic oligonucleotide
  misc_feature 1..20: note = Target: SCN10A; (-) strand; PAM type: NRG; PAM sequence: CAG
  source 1..20: mol_type = other DNA
taggaaatgaataccagaga

SEQ ID NO: 19734 - DNA, 20 bp, synthetic construct
  misc_feature 1..20: note = Description of Artificial Sequence: Synthetic oligonucleotide
  misc_feature 1..20: note = Target: SCN10A; (-) strand; PAM type: NRG; PAM sequence: GAG
  source 1..20: mol_type = other DNA
aatataggaaatgaatacca

SEQ ID NO: 19735 - DNA, 20 bp, synthetic construct
  misc_feature 1..20: note = Description of Artificial Sequence: Synthetic oligonucleotide
  misc_feature 1..20: note = Target: SCN10A; (-) strand; PAM type: NRG; PAM sequence: CAG
  source 1..20: mol_type = other DNA
aaaatataggaaatgaatac

SEQ ID NO: 19736 - DNA, 20 bp, synthetic construct
  misc_feature 1..20: note = Description of Artificial Sequence: Synthetic oligonucleotide
  misc_feature 1..20: note = Target: SCN10A; (-) strand; PAM type: NRG; PAM sequence: AGG
  source 1..20: mol_type = other DNA
actaaaggagttcaaaatat

SEQ ID NO: 19737 - DNA, 20 bp, synthetic construct
  misc_feature 1..20: note = Description of Artificial Sequence: Synthetic oligonucleotide
  misc_feature 1..20: note = Target: SCN10A; (-) strand; PAM type: NRG; PAM sequence: TAG
  source 1..20: mol_type = other DNA
gactaaaggagttcaaaata

SEQ ID NO: 19738 - DNA, 20 bp, synthetic construct
  misc_feature 1..20: note = Description of Artificial Sequence: Synthetic oligonucleotide
  misc_feature 1..20: note = Target: SCN10A; (-) strand; PAM type: NRG; PAM sequence: GAG
  source 1..20: mol_type = other DNA
ttggagttgcaggactaaag

SEQ ID NO: 19739 - DNA, 20 bp, synthetic construct
  misc_feature 1..20: note = Description of Artificial Sequence: Synthetic oligonucleotide
  misc_feature 1..20: note = Target: SCN10A; (-) strand; PAM type: NRG; PAM sequence: AGG
  source 1..20: mol_type = other DNA
aattggagttgcaggactaa

SEQ ID NO: 19740 - DNA, 20 bp, synthetic construct
  misc_feature 1..20: note = Description of Artificial Sequence: Synthetic oligonucleotide
  misc_feature 1..20: note = Target: SCN10A; (-) strand; PAM type: NRG; PAM sequence: AAG
  source 1..20: mol_type = other DNA
taattggagttgcaggacta

SEQ ID NO: 19741 - DNA, 20 bp, synthetic construct
  misc_feature 1..20: note = Description of Artificial Sequence: Synthetic oligonucleotide
  misc_feature 1..20: note = Target: SCN10A; (-) strand; PAM type: NRG; PAM sequence: AGG
  source 1..20: mol_type = other DNA
cagatattaattggagttgc

SEQ ID NO: 19742 - DNA, 20 bp, synthetic construct
  misc_feature 1..20: note = Description of Artificial Sequence: Synthetic oligonucleotide
  misc_feature 1..20: note = Target: SCN10A; (-) strand; PAM type: NRG; PAM sequence: CAG
  source 1..20: mol_type = other DNA
gcagatattaattggagttg

SEQ ID NO: 19743 - DNA, 20 bp, synthetic construct
  misc_feature 1..20: note = Description of Artificial Sequence: Synthetic oligonucleotide
  misc_feature 1..20: note = Target: SCN10A; (-) strand; PAM type: NRG; PAM sequence: GAG
  source 1..20: mol_type = other DNA
gatggggcagatattaattg

SEQ ID NO: 19744 - DNA, 20 bp, synthetic construct
  misc_feature 1..20: note = Description of Artificial Sequence: Synthetic oligonucleotide
  misc_feature 1..20: note = Target: SCN10A; (-) strand; PAM type: NRG; PAM sequence: TGG
  source 1..20: mol_type = other DNA
tggatggggcagatattaat

SEQ ID NO: 19745 - DNA, 20 bp, synthetic construct
  misc_feature 1..20: note = Description of Artificial Sequence: Synthetic oligonucleotide
  misc_feature 1..20: note = Target: SCN10A; (-) strand; PAM type: NRG; PAM sequence: CAG
  source 1..20: mol_type = other DNA
gtttaaaggactggatgggg

SEQ ID NO: 19746 - DNA, 20 bp, synthetic construct
  misc_feature 1..20: note = Description of Artificial Sequence: Synthetic oligonucleotide
  misc_feature 1..20: note = Target: SCN10A; (-) strand; PAM type: NRG; PAM sequence: GGG
  source 1..20: mol_type = other DNA
gcagtttaaaggactggatg

SEQ ID NO: 19747 - DNA, 20 bp, synthetic construct
  misc_feature 1..20: note = Description of Artificial Sequence: Synthetic oligonucleotide
  misc_feature 1..20: note = Target: SCN10A; (-) strand; PAM type: NRG; PAM sequence: GGG
  source 1..20: mol_type = other DNA
agcagtttaaaggactggat

SEQ ID NO: 19748 - DNA, 20 bp, synthetic construct
  misc_feature 1..20: note = Description of Artificial Sequence: Synthetic oligonucleotide
  misc_feature 1..20: note = Target: SCN10A; (-) strand; PAM type: NRG; PAM sequence: TGG
  source 1..20: mol_type = other DNA
cagcagtttaaaggactgga

SEQ ID NO: 19749 - DNA, 20 bp, synthetic construct
  misc_feature 1..20: note = Description of Artificial Sequence: Synthetic oligonucleotide
  misc_feature 1..20: note = Target: SCN10A; (-) strand; PAM type: NRG; PAM sequence: TGG
  source 1..20: mol_type = other DNA
atgtcagcagtttaaaggac

SEQ ID NO: 19750 - DNA, 20 bp, synthetic construct
  misc_feature 1..20: note = Description of Artificial Sequence: Synthetic oligonucleotide
  misc_feature 1..20: note = Target: SCN10A; (-) strand; PAM type: NRG; PAM sequence: AGG
  source 1..20: mol_type = other DNA
atgtaatgtcagcagtttaa

SEQ ID NO: 19751 - DNA, 20 bp, synthetic construct
  misc_feature 1..20: note = Description of Artificial Sequence: Synthetic oligonucleotide
  misc_feature 1..20: note = Target: SCN10A; (-) strand; PAM type: NRG; PAM sequence: AAG
  source 1..20: mol_type = other DNA
tatgtaatgtcagcagttta

SEQ ID NO: 19752 - DNA, 20 bp, synthetic construct
  misc_feature 1..20: note = Description of Artificial Sequence: Synthetic oligonucleotide
  misc_feature 1..20: note = Target: SCN10A; (-) strand; PAM type: NRG; PAM sequence: CAG
  source 1..20: mol_type = other DNA
gtaaaaatatgtaatgtcag

SEQ ID NO: 19753 - DNA, 20 bp, synthetic construct
  misc_feature 1..20: note = Description of Artificial Sequence: Synthetic oligonucleotide
  misc_feature 1..20: note = Target: SCN10A; (-) strand; PAM type: NRG; PAM sequence: CAG
  source 1..20: mol_type = other DNA
gcagtaaaaatatgtaatgt

SEQ ID NO: 19754 - DNA, 20 bp, synthetic construct
  misc_feature 1..20: note = Description of Artificial Sequence: Synthetic oligonucleotide
  misc_feature 1..20: note = Target: SCN10A; (-) strand; PAM type: NRG; PAM sequence: CAG
  source 1..20: mol_type = other DNA
gacatgatataggtgatggg

SEQ ID NO: 19755 - DNA, 20 bp, synthetic construct
  misc_feature 1..20: note = Description of Artificial Sequence: Synthetic oligonucleotide
  misc_feature 1..20: note = Target: SCN10A; (-) strand; PAM type: NRG; PAM sequence: GGG
  source 1..20: mol_type = other DNA
aaggacatgatataggtgat

SEQ ID NO: 19756 - DNA, 20 bp, synthetic construct
  misc_feature 1..20: note = Description of Artificial Sequence: Synthetic oligonucleotide
  misc_feature 1..20: note = Target: SCN10A; (-) strand; PAM type: NRG; PAM sequence: TGG
  source 1..20: mol_type = other DNA
taaggacatgatataggtga

SEQ ID NO: 19757 - DNA, 20 bp, synthetic construct
  misc_feature 1..20: note = Description of Artificial Sequence: Synthetic oligonucleotide
  misc_feature 1..20: note = Target: SCN10A; (-) strand; PAM type: NRG; PAM sequence: AGG
  source 1..20: mol_type = other DNA
gagaagtaaggacatgatat

SEQ ID NO: 19758 - DNA, 20 bp, synthetic construct
  misc_feature 1..20: note = Description of Artificial Sequence: Synthetic oligonucleotide
  misc_feature 1..20: note = Target: SCN10A; (-) strand; PAM type: NRG; PAM sequence: TAG
  source 1..20: mol_type = other DNA
tgagaagtaaggacatgata

SEQ ID NO: 19759 - DNA, 20 bp, synthetic construct
  misc_feature 1..20: note = Description of Artificial Sequence: Synthetic oligonucleotide
  misc_feature 1..20: note = Target: SCN10A; (-) strand; PAM type: NRG; PAM sequence: AGG
  source 1..20: mol_type = other DNA
gctgggcaaattgagaagta

SEQ ID NO: 19760 - DNA, 20 bp, synthetic construct
  misc_feature 1..20: note = Description of Artificial Sequence: Synthetic oligonucleotide
  misc_feature 1..20: note = Target: SCN10A; (-) strand; PAM type: NRG; PAM sequence: AAG
  source 1..20: mol_type = other DNA
agctgggcaaattgagaagt

SEQ ID NO: 19761 - DNA, 20 bp, synthetic construct
  misc_feature 1..20: note = Description of Artificial Sequence: Synthetic oligonucleotide
  misc_feature 1..20: note = Target: SCN10A; (-) strand; PAM type: NRG; PAM sequence: AAG
  source 1..20: mol_type = other DNA
tctaagctgggcaaattgag

SEQ ID NO: 19762 - DNA, 20 bp, synthetic construct
  misc_feature 1..20: note = Description of Artificial Sequence: Synthetic oligonucleotide
  misc_feature 1..20: note = Target: SCN10A; (-) strand; PAM type: NRG; PAM sequence: GAG
  source 1..20: mol_type = other DNA
aaatctaagctgggcaaatt

SEQ ID NO: 19763 - DNA, 20 bp, synthetic construct
  misc_feature 1..20: note = Description of Artificial Sequence: Synthetic oligonucleotide
  misc_feature 1..20: note = Target: SCN10A; (-) strand; PAM type: NRG; PAM sequence: GGG
  source 1..20: mol_type = other DNA
atggatgtgaaatctaagct

SEQ ID NO: 19764 - DNA, 20 bp, synthetic construct
  misc_feature 1..20: note = Description of Artificial Sequence: Synthetic oligonucleotide
  misc_feature 1..20: note = Target: SCN10A; (-) strand; PAM type: NRG; PAM sequence: TGG
  source 1..20: mol_type = other DNA
gatggatgtgaaatctaagc

SEQ ID NO: 19765 - DNA, 20 bp, synthetic construct
  misc_feature 1..20: note = Description of Artificial Sequence: Synthetic oligonucleotide
  misc_feature 1..20: note = Target: SCN10A; (-) strand; PAM type: NRG; PAM sequence: AAG
  source 1..20: mol_type = other DNA
gagagatggatgtgaaatct

SEQ ID NO: 19766 - DNA, 20 bp, synthetic construct
  misc_feature 1..20: note = Description of Artificial Sequence: Synthetic oligonucleotide
  misc_feature 1..20: note = Target: SCN10A; (-) strand; PAM type: NRG; PAM sequence: TGG
  source 1..20: mol_type = other DNA
caagggagtagttagagaga

SEQ ID NO: 19767 - DNA, 20 bp, synthetic construct
  misc_feature 1..20: note = Description of Artificial Sequence: Synthetic oligonucleotide
  misc_feature 1..20: note = Target: SCN10A; (-) strand; PAM type: NRG; PAM sequence: GAG
  source 1..20: mol_type = other DNA
cctacaagggagtagttaga

SEQ ID NO: 19768 - DNA, 20 bp, synthetic construct
  misc_feature 1..20: note = Description of Artificial Sequence: Synthetic oligonucleotide
  misc_feature 1..20: note = Target: SCN10A; (-) strand; PAM type: NRG; PAM sequence: GAG
  source 1..20: mol_type = other DNA
tgcctacaagggagtagtta

SEQ ID NO: 19769 - DNA, 20 bp, synthetic construct
  misc_feature 1..20: note = Description of Artificial Sequence: Synthetic oligonucleotide
  misc_feature 1..20: note = Target: SCN10A; (-) strand; PAM type: NRG; PAM sequence: TAG
  source 1..20: mol_type = other DNA
ggtgcctacaagggagtagt

SEQ ID NO: 19770 - DNA, 20 bp, synthetic construct
  misc_feature 1..20: note = Description of Artificial Sequence: Synthetic oligonucleotide
  misc_feature 1..20: note = Target: SCN10A; (-) strand; PAM type: NRG; PAM sequence: TAG
  source 1..20: mol_type = other DNA
tgagggtgcctacaagggag

SEQ ID NO: 19771 - DNA, 20 bp, synthetic construct
  misc_feature 1..20: note = Description of Artificial Sequence: Synthetic oligonucleotide
  misc_feature 1..20: note = Target: SCN10A; (-) strand; PAM type: NRG; PAM sequence: GAG
  source 1..20: mol_type = other DNA
aattgagggtgcctacaagg

SEQ ID NO: 19772 - DNA, 20 bp, synthetic construct
  misc_feature 1..20: note = Description of Artificial Sequence: Synthetic oligonucleotide
  misc_feature 1..20: note = Target: SCN10A; (-) strand; PAM type: NRG; PAM sequence: GGG
  source 1..20: mol_type = other DNA
ggaattgagggtgcctacaa

SEQ ID NO: 19773 - DNA, 20 bp, synthetic construct
  misc_feature 1..20: note = Description of Artificial Sequence: Synthetic oligonucleotide
  misc_feature 1..20: note = Target: SCN10A; (-) strand; PAM type: NRG; PAM sequence: AGG
  source 1..20: mol_type = other DNA
aggaattgagggtgcctaca

SEQ ID NO: 19774 - DNA, 20 bp, synthetic construct
  misc_feature 1..20: note = Description of Artificial Sequence: Synthetic oligonucleotide
  misc_feature 1..20: note = Target: SCN10A; (-) strand; PAM type: NRG; PAM sequence: AAG
  source 1..20: mol_type = other DNA
aaggaattgagggtgcctac

SEQ ID NO: 19775 - DNA, 20 bp, synthetic construct
  misc_feature 1..20: note = Description of Artificial Sequence: Synthetic oligonucleotide
  misc_feature 1..20: note = Target: SCN10A; (-) strand; PAM type: NRG; PAM sequence: GGG
  source 1..20: mol_type = other DNA
gagaggggcaaaggaattga

SEQ ID NO: 19776 - DNA, 20 bp, synthetic construct
  misc_feature 1..20: note = Description of Artificial Sequence: Synthetic oligonucleotide
  misc_feature 1..20: note = Target: SCN10A; (-) strand; PAM type: NRG; PAM sequence: AGG
  source 1..20: mol_type = other DNA
ggagaggggcaaaggaattg

SEQ ID NO: 19777 - DNA, 20 bp, synthetic construct
  misc_feature 1..20: note = Description of Artificial Sequence: Synthetic oligonucleotide
  misc_feature 1..20: note = Target: SCN10A; (-) strand; PAM type: NRG; PAM sequence: GAG
  source 1..20: mol_type = other DNA
aggagaggggcaaaggaatt

SEQ ID NO: 19778 - DNA, 20 bp, synthetic construct
  misc_feature 1..20: note = Description of Artificial Sequence: Synthetic oligonucleotide
  misc_feature 1..20: note = Target: SCN10A; (-) strand; PAM type: NRG; PAM sequence: AGG
  source 1..20: mol_type = other DNA
atgaaggaggagaggggcaa

SEQ ID NO: 19779 - DNA, 20 bp, synthetic construct
  misc_feature 1..20: note = Description of Artificial Sequence: Synthetic oligonucleotide
  misc_feature 1..20: note = Target: SCN10A; (-) strand; PAM type: NRG; PAM sequence: AAG
  source 1..20: mol_type = other DNA
aatgaaggaggagaggggca

SEQ ID NO: 19780 - DNA, 20 bp, synthetic construct
  misc_feature 1..20: note = Description of Artificial Sequence: Synthetic oligonucleotide
  misc_feature 1..20: note = Target: SCN10A; (-) strand; PAM type: NRG; PAM sequence: GGG
  source 1..20: mol_type = other DNA
agtacaatgaaggaggagag

SEQ ID NO: 19781 - DNA, 20 bp, synthetic construct
  misc_feature 1..20: note = Description of Artificial Sequence: Synthetic oligonucleotide
  misc_feature 1..20: note = Target: SCN10A; (-) strand; PAM type: NRG; PAM sequence: GGG
  source 1..20: mol_type = other DNA
aagtacaatgaaggaggaga

SEQ ID NO: 19782 - DNA, 20 bp, synthetic construct
  misc_feature 1..20: note = Description of Artificial Sequence: Synthetic oligonucleotide
  misc_feature 1..20: note = Target: SCN10A; (-) strand; PAM type: NRG; PAM sequence: AGG
  source 1..20: mol_type = other DNA
caagtacaatgaaggaggag

SEQ ID NO: 19783 - DNA, 20 bp, synthetic construct
  misc_feature 1..20: note = Description of Artificial Sequence: Synthetic oligonucleotide
  misc_feature 1..20: note = Target: SCN10A; (-) strand; PAM type: NRG; PAM sequence: GAG
  source 1..20: mol_type = other DNA
gcaagtacaatgaaggagga

SEQ ID NO: 19784 - DNA, 20 bp, synthetic construct
  misc_feature 1..20: note = Description of Artificial Sequence: Synthetic oligonucleotide
  misc_feature 1..20: note = Target: SCN10A; (-) strand; PAM type: NRG; PAM sequence: GAG
  source 1..20: mol_type = other DNA
aggcaagtacaatgaaggag

SEQ ID NO: 19785 - DNA, 20 bp, synthetic construct
  misc_feature 1..20: note = Description of Artificial Sequence: Synthetic oligonucleotide
  misc_feature 1..20: note = Target: SCN10A; (-) strand; PAM type: NRG; PAM sequence: AGG
  source 1..20: mol_type = other DNA
ccaggcaagtacaatgaagg

SEQ ID NO: 19786 - DNA, 20 bp, synthetic construct
  misc_feature 1..20: note = Description of Artificial Sequence: Synthetic oligonucleotide
  misc_feature 1..20: note = Target: SCN10A; (-) strand; PAM type: NRG; PAM sequence: GAG
  source 1..20: mol_type = other DNA
gccaggcaagtacaatgaag

SEQ ID NO: 19787 - DNA, 20 bp, synthetic construct
  misc_feature 1..20: note = Description of Artificial Sequence: Synthetic oligonucleotide
  misc_feature 1..20: note = Target: SCN10A; (-) strand; PAM type: NRG; PAM sequence: AGG
  source 1..20: mol_type = other DNA
ttgccaggcaagtacaatga

SEQ ID NO: 19788 - DNA, 20 bp, synthetic construct
  misc_feature 1..20: note = Description of Artificial Sequence: Synthetic oligonucleotide
  misc_feature 1..20: note = Target: SCN10A; (-) strand; PAM type: NRG; PAM sequence: AAG
  source 1..20: mol_type = other DNA
tttgccaggcaagtacaatg

SEQ ID NO: 19789 - DNA, 20 bp, synthetic construct
  misc_feature 1..20: note = Description of Artificial Sequence: Synthetic oligonucleotide
  misc_feature 1..20: note = Target: SCN10A; (-) strand; PAM type: NRG; PAM sequence: AAG
  source 1..20: mol_type = other DNA
cagttcaggttttgccaggc

SEQ ID NO: 19790 - DNA, 20 bp, synthetic construct
  misc_feature 1..20: note = Description of Artificial Sequence: Synthetic oligonucleotide
  misc_feature 1..20: note = Target: SCN10A; (-) strand; PAM type: NRG; PAM sequence: AGG
  source 1..20: mol_type = other DNA
ttcacagttcaggttttgcc

SEQ ID NO: 19791 - DNA, 20 bp, synthetic construct
  misc_feature 1..20: note = Description of Artificial Sequence: Synthetic oligonucleotide
  misc_feature 1..20: note = Target: SCN10A; (-) strand; PAM type: NRG; PAM sequence: CAG
  source 1..20: mol_type = other DNA
attcacagttcaggttttgc

SEQ ID NO: 19792 - DNA, 20 bp, synthetic construct
  misc_feature 1..20: note = Description of Artificial Sequence: Synthetic oligonucleotide
  misc_feature 1..20: note = Target: SCN10A; (-) strand; PAM type: NRG; PAM sequence: AGG
  source 1..20: mol_type = other DNA
attgggtctattcacagttc

SEQ ID NO: 19793 - DNA, 20 bp, synthetic construct
  misc_feature 1..20: note = Description of Artificial Sequence: Synthetic oligonucleotide
  misc_feature 1..20: note = Target: SCN10A; (-) strand; PAM type: NRG; PAM sequence: CAG
  source 1..20: mol_type = other DNA
aattgggtctattcacagtt

SEQ ID NO: 19794 - DNA, 20 bp, synthetic construct
  misc_feature 1..20: note = Description of Artificial Sequence: Synthetic oligonucleotide
  misc_feature 1..20: note = Target: SCN10A; (-) strand; PAM type: NRG; PAM sequence: CAG
  source 1..20: mol_type = other DNA
ctacaaattgggtctattca

SEQ ID NO: 19795 - DNA, 20 bp, synthetic construct
  misc_feature 1..20: note = Description of Artificial Sequence: Synthetic oligonucleotide
  misc_feature 1..20: note = Target: SCN10A; (-) strand; PAM type: NRG; PAM sequence: GGG
  source 1..20: mol_type = other DNA
tacagagtagtctacaaatt

SEQ ID NO: 19796 - DNA, 20 bp, synthetic construct
  misc_feature 1..20: note = Description of Artificial Sequence: Synthetic oligonucleotide
  misc_feature 1..20: note = Target: SCN10A; (-) strand; PAM type: NRG; PAM sequence: TGG
  source 1..20: mol_type = other DNA
gtacagagtagtctacaaat

SEQ ID NO: 19797 - DNA, 20 bp, synthetic construct
  misc_feature 1..20: note = Description of Artificial Sequence: Synthetic oligonucleotide
  misc_feature 1..20: note = Target: SCN10A; (-) strand; PAM type: NRG; PAM sequence: TAG
  source 1..20: mol_type = other DNA
ggttgggtgcaagtacagag

SEQ ID NO: 19798 - DNA, 20 bp, synthetic construct
  misc_feature 1..20: note = Description of Artificial Sequence: Synthetic oligonucleotide
  misc_feature 1..20: note = Target: SCN10A; (-) strand; PAM type: NRG; PAM sequence: GAG
  source 1..20: mol_type = other DNA
gctggttgggtgcaagtaca

SEQ ID NO: 19799 - DNA, 20 bp, synthetic construct
  misc_feature 1..20: note = Description of Artificial Sequence: Synthetic oligonucleotide
  misc_feature 1..20: note = Target: SCN10A; (-) strand; PAM type: NRG; PAM sequence: CAG
  source 1..20: mol_type = other DNA
cagctggttgggtgcaagta

SEQ ID NO: 19800 - DNA, 20 bp, synthetic construct
  misc_feature 1..20: note = Description of Artificial Sequence: Synthetic oligonucleotide
  misc_feature 1..20: note = Target: SCN10A; (-) strand; PAM type: NRG; PAM sequence: AAG
  source 1..20: mol_type = other DNA
aggtccagctggttgggtgc

SEQ ID NO: 19801 - DNA, 20 bp, synthetic construct
  misc_feature 1..20: note = Description of Artificial Sequence: Synthetic oligonucleotide
  misc_feature 1..20: note = Target: SCN10A; (-) strand; PAM type: NRG; PAM sequence: GGG
  source 1..20: mol_type = other DNA
ccagccaggtccagctggtt

SEQ ID NO: 19802 - DNA, 20 bp, synthetic construct
  misc_feature 1..20: note = Description of Artificial Sequence: Synthetic oligonucleotide
  misc_feature 1..20: note = Target: SCN10A; (-) strand; PAM type: NRG; PAM sequence: TGG
  source 1..20: mol_type = other DNA
tccagccaggtccagctggt

SEQ ID NO: 19803 - DNA, 20 bp, synthetic construct
  misc_feature 1..20: note = Description of Artificial Sequence: Synthetic oligonucleotide
  misc_feature 1..20: note = Target: SCN10A; (-) strand; PAM type: NRG; PAM sequence: TGG
  source 1..20: mol_type = other DNA
tttttccagccaggtccagc

SEQ ID NO: 19804 - DNA, 20 bp, synthetic construct
  misc_feature 1..20: note = Description of Artificial Sequence: Synthetic oligonucleotide
  misc_feature 1..20: note = Target: SCN10A; (-) strand; PAM type: NRG; PAM sequence: CAG
  source 1..20: mol_type = other DNA
gtattttttccagccaggtc

SEQ ID NO: 19805 - DNA, 20 bp, synthetic construct
  misc_feature 1..20: note = Description of Artificial Sequence: Synthetic oligonucleotide
  misc_feature 1..20: note = Target: SCN10A; (-) strand; PAM type: NRG; PAM sequence: AGG
  source 1..20: mol_type = other DNA
gttgtgtattttttccagcc

SEQ ID NO: 19806 - DNA, 20 bp, synthetic construct
  misc_feature 1..20: note = Description of Artificial Sequence: Synthetic oligonucleotide
  misc_feature 1..20: note = Target: SCN10A; (-) strand; PAM type: NRG; PAM sequence: CAG
  source 1..20: mol_type = other DNA
agttgtgtattttttccagc

SEQ ID NO: 19807 - DNA, 20 bp, synthetic construct
  misc_feature 1..20: note = Description of Artificial Sequence: Synthetic oligonucleotide
  misc_feature 1..20: note = Target: SCN10A; (-) strand; PAM type: NRG; PAM sequence: CAG
  source 1..20: mol_type = other DNA
gcatagttgtgtattttttc

SEQ ID NO: 19808 - DNA, 20 bp, synthetic construct
  misc_feature 1..20: note = Description of Artificial Sequence: Synthetic oligonucleotide
  misc_feature 1..20: note = Target: SCN10A; (-) strand; PAM type: NRG; PAM sequence: TAG
  source 1..20: mol_type = other DNA
tctaggagggttggtaagca

SEQ ID NO: 19809 - DNA, 20 bp, synthetic construct
  misc_feature 1..20: note = Description of Artificial Sequence: Synthetic oligonucleotide
  misc_feature 1..20: note = Target: SCN10A; (-) strand; PAM type: NRG; PAM sequence: AAG
  source 1..20: mol_type = other DNA
agatctctaggagggttggt

SEQ ID NO: 19810 - DNA, 20 bp, synthetic construct
  misc_feature 1..20: note = Description of Artificial Sequence: Synthetic oligonucleotide
  misc_feature 1..20: note = Target: SCN10A; (-) strand; PAM type: NRG; PAM sequence: TGG
  source 1..20: mol_type = other DNA
tcacagatctctaggagggt

SEQ ID NO: 19811 - DNA, 20 bp, synthetic construct
  misc_feature 1..20: note = Description of Artificial Sequence: Synthetic oligonucleotide
  misc_feature 1..20: note = Target: SCN10A; (-) strand; PAM type: NRG; PAM sequence: GGG
  source 1..20: mol_type = other DNA
gggctcacagatctctagga

SEQ ID NO: 19812 - DNA, 20 bp, synthetic construct
  misc_feature 1..20: note = Description of Artificial Sequence: Synthetic oligonucleotide
  misc_feature 1..20: note = Target: SCN10A; (-) strand; PAM type: NRG; PAM sequence: AGG
  source 1..20: mol_type = other DNA
ggggctcacagatctctagg

SEQ ID NO: 19813 - DNA, 20 bp, synthetic construct
  misc_feature 1..20: note = Description of Artificial Sequence: Synthetic oligonucleotide
  misc_feature 1..20: note = Target: SCN10A; (-) strand; PAM type: NRG; PAM sequence: GAG
  source 1..20: mol_type = other DNA
tggggctcacagatctctag

SEQ ID NO: 19814 - DNA, 20 bp, synthetic construct
  misc_feature 1..20: note = Description of Artificial Sequence: Synthetic oligonucleotide
  misc_feature 1..20: note = Target: SCN10A; (-) strand; PAM type: NRG; PAM sequence: AGG
  source 1..20: mol_type = other DNA
gctggggctcacagatctct

SEQ ID NO: 19815 - DNA, 20 bp, synthetic construct
  misc_feature 1..20: note = Description of Artificial Sequence: Synthetic oligonucleotide
  misc_feature 1..20: note = Target: SCN10A; (-) strand; PAM type: NRG; PAM sequence: TAG
  source 1..20: mol_type = other DNA
ggctggggctcacagatctc

SEQ ID NO: 19816 - DNA, 20 bp, synthetic construct
  misc_feature 1..20: note = Description of Artificial Sequence: Synthetic oligonucleotide
  misc_feature 1..20: note = Target: SCN10A; (-) strand; PAM type: NRG; PAM sequence: CAG
  source 1..20: mol_type = other DNA
cagggcaaggctggggctca

SEQ ID NO: 19817 - DNA, 20 bp, synthetic construct
  misc_feature 1..20: note = Description of Artificial Sequence: Synthetic oligonucleotide
  misc_feature 1..20: note = Target: SCN10A; (-) strand; PAM type: NRG; PAM sequence: GGG
  source 1..20: mol_type = other DNA
ttctgggcagggcaaggctg

SEQ ID NO: 19818 - DNA, 20 bp, synthetic construct
  misc_feature 1..20: note = Description of Artificial Sequence: Synthetic oligonucleotide
  misc_feature 1..20: note = Target: SCN10A; (-) strand; PAM type: NRG; PAM sequence: GGG
  source 1..20: mol_type = other DNA
tttctgggcagggcaaggct

SEQ ID NO: 19819 - DNA, 20 bp, synthetic construct
  misc_feature 1..20: note = Description of Artificial Sequence: Synthetic oligonucleotide
  misc_feature 1..20: note = Target: SCN10A; (-) strand; PAM type: NRG; PAM sequence: TGG
  source 1..20: mol_type = other DNA
atttctgggcagggcaaggc

SEQ ID NO: 19820 - DNA, 20 bp, synthetic construct
  misc_feature 1..20: note = Description of Artificial Sequence: Synthetic oligonucleotide
  misc_feature 1..20: note = Target: SCN10A; (-) strand; PAM type: NRG; PAM sequence: AGG
  source 1..20: mol_type = other DNA
ccagatttctgggcagggca

SEQ ID NO: 19821 - DNA, 20 bp, synthetic construct
  misc_feature 1..20: note = Description of Artificial Sequence: Synthetic oligonucleotide
  misc_feature 1..20: note = Target: SCN10A; (-) strand; PAM type: NRG; PAM sequence: AAG
  source 1..20: mol_type = other DNA
gccagatttctgggcagggc

SEQ ID NO: 19822 - DNA, 20 bp, synthetic construct
  misc_feature 1..20: note = Description of Artificial Sequence: Synthetic oligonucleotide
  misc_feature 1..20: note = Target: SCN10A; (-) strand; PAM type: NRG; PAM sequence: GGG
  source 1..20: mol_type = other DNA
cacagccagatttctgggca

SEQ ID NO: 19823 - DNA, 20 bp, synthetic construct
  misc_feature 1..20: note = Description of Artificial Sequence: Synthetic oligonucleotide
  misc_feature 1..20: note = Target: SCN10A; (-) strand; PAM type: NRG; PAM sequence: AGG
  source 1..20: mol_type = other DNA
acacagccagatttctgggc

SEQ ID NO: 19824 - DNA, 20 bp, synthetic construct
  misc_feature 1..20: note = Description of Artificial Sequence: Synthetic oligonucleotide
  misc_feature 1..20: note = Target: SCN10A; (-) strand; PAM type: NRG; PAM sequence: CAG
  source 1..20: mol_type = other DNA
aacacagccagatttctggg

SEQ ID NO: 19825 - DNA, 20 bp, synthetic construct
  misc_feature 1..20: note = Description of Artificial Sequence: Synthetic oligonucleotide
  misc_feature 1..20: note = Target: SCN10A; (-) strand; PAM type: NRG; PAM sequence: GGG
  source 1..20: mol_type = other DNA
agaaacacagccagatttct

SEQ ID NO: 19826 - DNA, 20 bp, synthetic construct
  misc_feature 1..20: note = Description of Artificial Sequence: Synthetic oligonucleotide
  misc_feature 1..20: note = Target: SCN10A; (-) strand; PAM type: NRG; PAM sequence: TGG
  source 1..20: mol_type = other DNA
tagaaacacagccagatttc

SEQ ID NO: 19827 - DNA, 20 bp, synthetic construct
  misc_feature 1..20: note = Description of Artificial Sequence: Synthetic oligonucleotide
  misc_feature 1..20: note = Target: SCN10A; (-) strand; PAM type: NRG; PAM sequence: CAG
  source 1..20: mol_type = other DNA
atataatatagaaacacagc

SEQ ID NO: 19828 - DNA, 20 bp, synthetic construct
  misc_feature 1..20: note = Description of Artificial Sequence: Synthetic oligonucleotide
  misc_feature 1..20: note = Target: SCN10A; (-) strand; PAM type: NRG; PAM sequence: CAG
  source 1..20: mol_type = other DNA
tggaatataatatagaaaca

SEQ ID NO: 19829 - DNA, 20 bp, synthetic construct
  misc_feature 1..20: note = Description of Artificial Sequence: Synthetic oligonucleotide
  misc_feature 1..20: note = Target: SCN10A; (-) strand; PAM type: NRG; PAM sequence: TAG
  source 1..20: mol_type = other DNA
tgaaggaatggaatataata

SEQ ID NO: 19830 - DNA, 20 bp, synthetic construct
  misc_feature 1..20: note = Description of Artificial Sequence: Synthetic oligonucleotide
  misc_feature 1..20: note = Target: SCN10A; (-) strand; PAM type: NRG; PAM sequence: TGG
  source 1..20: mol_type = other DNA
catctggaagaatgaaggaa

SEQ ID NO: 19831 - DNA, 20 bp, synthetic construct
  misc_feature 1..20: note = Description of Artificial Sequence: Synthetic oligonucleotide
  misc_feature 1..20: note = Target: SCN10A; (-) strand; PAM type: NRG; PAM sequence: AGG
  source 1..20: mol_type = other DNA
acagtcatctggaagaatga

SEQ ID NO: 19832 - DNA, 20 bp, synthetic construct
  misc_feature 1..20: note = Description of Artificial Sequence: Synthetic oligonucleotide
  misc_feature 1..20: note = Target: SCN10A; (-) strand; PAM type: NRG; PAM sequence: AAG
  source 1..20: mol_type = other DNA
aacagtcatctggaagaatg

SEQ ID NO: 19833 - DNA, 20 bp, synthetic construct
  misc_feature 1..20: note = Description of Artificial Sequence: Synthetic oligonucleotide
  misc_feature 1..20: note = Target: SCN10A; (-) strand; PAM type: NRG; PAM sequence: AAG
  source 1..20: mol_type = other DNA
agtgagaaacagtcatctgg

SEQ ID NO: 19834 - DNA, 20 bp, synthetic construct
  misc_feature 1..20: note = Description of Artificial Sequence: Synthetic oligonucleotide
  misc_feature 1..20: note = Target: SCN10A; (-) strand; PAM type: NRG; PAM sequence: TGG
  source 1..20: mol_type = other DNA
ggaagtgagaaacagtcatc

SEQ ID NO: 19835 - DNA, 20 bp, synthetic construct
  misc_feature 1..20: note = Description of Artificial Sequence: Synthetic oligonucleotide
  misc_feature 1..20: note = Target: SCN10A; (-) strand; PAM type: NRG; PAM sequence: CAG
  source 1..20: mol_type = other DNA
ggggaagaggaagtgagaaa

SEQ ID NO: 19836 - DNA, 20 bp, synthetic construct
  misc_feature 1..20: note = Description of Artificial Sequence: Synthetic oligonucleotide
  misc_feature 1..20: note = Target: SCN10A; (-) strand; PAM type: NRG; PAM sequence: GAG
  source 1..20: mol_type = other DNA
tagacgggggaagaggaagt

SEQ ID NO: 19837 - DNA, 20 bp, synthetic construct
  misc_feature 1..20: note = Description of Artificial Sequence: Synthetic oligonucleotide
  misc_feature 1..20: note = Target: SCN10A; (-) strand; PAM type: NRG; PAM sequence: AAG
  source 1..20: mol_type = other DNA
aggttagacgggggaagagg

SEQ ID NO: 19838 - DNA, 20 bp, synthetic construct
  misc_feature 1..20: note = Description of Artificial Sequence: Synthetic oligonucleotide
  misc_feature 1..20: note = Target: SCN10A; (-) strand; PAM type: NRG; PAM sequence: AGG
  source 1..20: mol_type = other DNA
cggaggttagacgggggaag

SEQ ID NO: 19839 - DNA, 20 bp, synthetic construct
  misc_feature 1..20: note = Description of Artificial Sequence: Synthetic oligonucleotide
  misc_feature 1..20: note = Target: SCN10A; (-) strand; PAM type: NRG; PAM sequence: GAG
  source 1..20: mol_type = other DNA
ccggaggttagacgggggaa

SEQ ID NO: 19840 - DNA, 20 bp, synthetic construct
  misc_feature 1..20: note = Description of Artificial Sequence: Synthetic oligonucleotide
  misc_feature 1..20: note = Target: SCN10A; (-) strand; PAM type: NRG; PAM sequence: AAG
  source 1..20: mol_type = other DNA
agccggaggttagacggggg

SEQ ID NO: 19841 - DNA, 20 bp, synthetic construct
  misc_feature 1..20: note = Description of Artificial Sequence: Synthetic oligonucleotide
  misc_feature 1..20: note = Target: SCN10A; (-) strand; PAM type: NRG; PAM sequence: GGG
  source 1..20: mol_type = other DNA
aagagccggaggttagacgg

SEQ ID NO: 19842 - DNA, 20 bp, synthetic construct
  misc_feature 1..20: note = Description of Artificial Sequence: Synthetic oligonucleotide
  misc_feature 1..20: note = Target: SCN10A; (-) strand; PAM type: NRG; PAM sequence: GGG
  source 1..20: mol_type = other DNA
gaagagccggaggttagacg

SEQ ID NO: 19843 - DNA, 20 bp, synthetic construct
  misc_feature 1..20: note = Description of Artificial Sequence: Synthetic oligonucleotide
  misc_feature 1..20: note = Target: SCN10A; (-) strand; PAM type: NRG; PAM sequence: GGG
  source 1..20: mol_type = other DNA
agaagagccggaggttagac

SEQ ID NO: 19844 - DNA, 20 bp, synthetic construct
  misc_feature 1..20: note = Description of Artificial Sequence: Synthetic oligonucleotide
  misc_feature 1..20: note = Target: SCN10A; (-) strand; PAM type: NRG; PAM sequence: CGG
  source 1..20: mol_type = other DNA
aagaagagccggaggttaga

SEQ ID NO: 19845 - DNA, 20 bp, synthetic construct
  misc_feature 1..20: note = Description of Artificial Sequence: Synthetic oligonucleotide
  misc_feature 1..20: note = Target: SCN10A; (-) strand; PAM type: NRG; PAM sequence: TAG
  source 1..20: mol_type = other DNA
tagaaagaagagccggaggt

SEQ ID NO: 19846 - DNA, 20 bp, synthetic construct
  misc_feature 1..20: note = Description of Artificial Sequence: Synthetic oligonucleotide
  misc_feature 1..20: note = Target: SCN10A; (-) strand; PAM type: NRG; PAM sequence: AGG
  source 1..20: mol_type = other DNA
taagtagaaagaagagccgg

SEQ ID NO: 19847 - DNA, 20 bp, synthetic construct
  misc_feature 1..20: note = Description of Artificial Sequence: Synthetic oligonucleotide
  misc_feature 1..20: note = Target: SCN10A; (-) strand; PAM type: NRG; PAM sequence: GAG
  source 1..20: mol_type = other DNA
gtaagtagaaagaagagccg

SEQ ID NO: 19848 - DNA, 20 bp, synthetic construct
  misc_feature 1..20: note = Description of Artificial Sequence: Synthetic oligonucleotide
  misc_feature 1..20: note = Target: SCN10A; (-) strand; PAM type: NRG; PAM sequence: CGG
  source 1..20: mol_type = other DNA
gagtaagtagaaagaagagc

SEQ ID NO: 19849 - DNA, 20 bp, synthetic construct
  misc_feature 1..20: note = Description of Artificial Sequence: Synthetic oligonucleotide
  misc_feature 1..20: note = Target: SCN10A; (-) strand; PAM type: NRG; PAM sequence: GAG
  source 1..20: mol_type = other DNA
cagagagtaagtagaaagaa

SEQ ID NO: 19850 - DNA, 20 bp, synthetic construct
  misc_feature 1..20: note = Description of Artificial Sequence: Synthetic oligonucleotide
  misc_feature 1..20: note = Target: SCN10A; (-) strand; PAM type: NRG; PAM sequence: AAG
  source 1..20: mol_type = other DNA
aacagagagtaagtagaaag

SEQ ID NO: 19851 - DNA, 20 bp, synthetic construct
  misc_feature 1..20: note = Description of Artificial Sequence: Synthetic oligonucleotide
  misc_feature 1..20: note = Target: SCN10A; (-) strand; PAM type: NRG; PAM sequence: AAG
  source 1..20: mol_type = other DNA
atcaacagagagtaagtaga

SEQ ID NO: 19852 - DNA, 20 bp, synthetic construct
  misc_feature 1..20: note = Description of Artificial Sequence: Synthetic oligonucleotide
  misc_feature 1..20: note = Target: SCN10A; (-) strand; PAM type: NRG; PAM sequence: TAG
  source 1..20: mol_type = other DNA
gctcatcaacagagagtaag

SEQ ID NO: 19853 - DNA, 20 bp, synthetic construct
  misc_feature 1..20: note = Description of Artificial Sequence: Synthetic oligonucleotide
  misc_feature 1..20: note = Target: SCN10A; (-) strand; PAM type: NRG; PAM sequence: AAG
  source 1..20: mol_type = other DNA
ggagctcatcaacagagagt

SEQ ID NO: 19854 - DNA, 20 bp, synthetic construct
  misc_feature 1..20: note = Description of Artificial Sequence: Synthetic oligonucleotide
  misc_feature 1..20: note = Target: SCN10A; (-) strand; PAM type: NRG; PAM sequence: GAG
  source 1..20: mol_type = other DNA
aaagggagctcatcaacaga

SEQ ID NO: 19855 - DNA, 20 bp, synthetic construct
  misc_feature 1..20: note = Description of Artificial Sequence: Synthetic oligonucleotide
  misc_feature 1..20: note = Target: SCN10A; (-) strand; PAM type: NRG; PAM sequence: GAG
  source 1..20: mol_type = other DNA
taaaagggagctcatcaaca

SEQ ID NO: 19856 - DNA, 20 bp, synthetic construct
  misc_feature 1..20: note = Description of Artificial Sequence: Synthetic oligonucleotide
  misc_feature 1..20: note = Target: SCN10A; (-) strand; PAM type: NRG; PAM sequence: CAG
  source 1..20: mol_type = other DNA
aataaaagggagctcatcaa

SEQ ID NO: 19857 - DNA, 20 bp, synthetic construct
  misc_feature 1..20: note = Description of Artificial Sequence: Synthetic oligonucleotide
  misc_feature 1..20: note = Target: SCN10A; (-) strand; PAM type: NRG; PAM sequence: GAG
  source 1..20: mol_type = other DNA
attctgagtgaaataaaagg

SEQ ID NO: 19858 - DNA, 20 bp, synthetic construct
  misc_feature 1..20: note = Description of Artificial Sequence: Synthetic oligonucleotide
  misc_feature 1..20: note = Target: SCN10A; (-) strand; PAM type: NRG; PAM sequence: GGG
  source 1..20: mol_type = other DNA
atattctgagtgaaataaaa

SEQ ID NO: 19859 - DNA, 20 bp, synthetic construct
  misc_feature 1..20: note = Description of Artificial Sequence: Synthetic oligonucleotide
  misc_feature 1..20: note = Target: SCN10A; (-) strand; PAM type: NRG; PAM sequence: AGG
  source 1..20: mol_type = other DNA
tatattctgagtgaaataaa

SEQ ID NO: 19860 - DNA, 20 bp, synthetic construct
  misc_feature 1..20: note = Description of Artificial Sequence: Synthetic oligonucleotide
  misc_feature 1..20: note = Target: SCN10A; (-) strand; PAM type: NRG; PAM sequence: AAG
  source 1..20: mol_type = other DNA
ctatattctgagtgaaataa

SEQ ID NO: 19861 - DNA, 20 bp, synthetic construct
  misc_feature 1..20: note = Description of Artificial Sequence: Synthetic oligonucleotide
  misc_feature 1..20: note = Target: SCN10A; (-) strand; PAM type: NRG; PAM sequence: GAG
  source 1..20: mol_type = other DNA
tgtgaactagtctatattct

SEQ ID NO: 19862 - DNA, 20 bp, synthetic construct
  misc_feature 1..20: note = Description of Artificial Sequence: Synthetic oligonucleotide
  misc_feature 1..20: note = Target: SCN10A; (-) strand; PAM type: NRG; PAM sequence: TAG
  source 1..20: mol_type = other DNA
ggggaagttcttttgtgaac

SEQ ID NO: 19863 - DNA, 20 bp, synthetic construct
  misc_feature 1..20: note = Description of Artificial Sequence: Synthetic oligonucleotide
  misc_feature 1..20: note = Target: SCN10A; (-) strand; PAM type: NRG; PAM sequence: AAG
  source 1..20: mol_type = other DNA
ttagtggtaggaagaagggg

SEQ ID NO: 19864 - DNA, 20 bp, synthetic construct
  misc_feature 1..20: note = Description of Artificial Sequence: Synthetic oligonucleotide
  misc_feature 1..20: note = Target: SCN10A; (-) strand; PAM type: NRG; PAM sequence: GGG
  source 1..20: mol_type = other DNA
gatttagtggtaggaagaag

SEQ ID NO: 19865 - DNA, 20 bp, synthetic construct
  misc_feature 1..20: note = Description of Artificial Sequence: Synthetic oligonucleotide
  misc_feature 1..20: note = Target: SCN10A; (-) strand; PAM type: NRG; PAM sequence: GGG
  source 1..20: mol_type = other DNA
agatttagtggtaggaagaa

SEQ ID NO: 19866 - DNA, 20 bp, synthetic construct
  misc_feature 1..20: note = Description of Artificial Sequence: Synthetic oligonucleotide
  misc_feature 1..20: note = Target: SCN10A; (-) strand; PAM type: NRG; PAM sequence: AGG
  source 1..20: mol_type = other DNA
gagatttagtggtaggaaga

SEQ ID NO: 19867 - DNA, 20 bp, synthetic construct
  misc_feature 1..20: note = Description of Artificial Sequence: Synthetic oligonucleotide
  misc_feature 1..20: note = Target: SCN10A; (-) strand; PAM type: NRG; PAM sequence: AAG
  source 1..20: mol_type = other DNA
agagatttagtggtaggaag

SEQ ID NO: 19868 - DNA, 20 bp, synthetic construct
  misc_feature 1..20: note = Description of Artificial Sequence: Synthetic oligonucleotide
  misc_feature 1..20: note = Target: SCN10A; (-) strand; PAM type: NRG; PAM sequence: AAG
  source 1..20: mol_type = other DNA
gccagagatttagtggtagg

SEQ ID NO: 19869 - DNA, 20 bp, synthetic construct
  misc_feature 1..20: note = Description of Artificial Sequence: Synthetic oligonucleotide
  misc_feature 1..20: note = Target: SCN10A; (-) strand; PAM type: NRG; PAM sequence: AGG
  source 1..20: mol_type = other DNA
tatgccagagatttagtggt

SEQ ID NO: 19870 - DNA, 20 bp, synthetic construct
  misc_feature 1..20: note = Description of Artificial Sequence: Synthetic oligonucleotide
  misc_feature 1..20: note = Target: SCN10A; (-) strand; PAM type: NRG; PAM sequence: TAG
  source 1..20: mol_type = other DNA
atatgccagagatttagtgg

SEQ ID NO: 19871 - DNA, 20 bp, synthetic construct
  misc_feature 1..20: note = Description of Artificial Sequence: Synthetic oligonucleotide
  misc_feature 1..20: note = Target: SCN10A; (-) strand; PAM type: NRG; PAM sequence: TGG
  source 1..20: mol_type = other DNA
cagatatgccagagatttag

SEQ ID NO: 19872 - DNA, 20 bp, synthetic construct
  misc_feature 1..20: note = Description of Artificial Sequence: Synthetic oligonucleotide
  misc_feature 1..20: note = Target: SCN10A; (-) strand; PAM type: NRG; PAM sequence: TAG
  source 1..20: mol_type = other DNA
ttgcagatatgccagagatt

SEQ ID NO: 19873 - DNA, 20 bp, synthetic construct
  misc_feature 1..20: note = Description of Artificial Sequence: Synthetic oligonucleotide
  misc_feature 1..20: note = Target: SCN10A; (-) strand; PAM type: NRG; PAM sequence: GAG
  source 1..20: mol_type = other DNA
gtggacttgcagatatgcca

SEQ ID NO: 19874 - DNA, 20 bp, synthetic construct
  misc_feature 1..20: note = Description of Artificial Sequence: Synthetic oligonucleotide
  misc_feature 1..20: note = Target: SCN10A; (-) strand; PAM type: NRG; PAM sequence: CAG
  source 1..20: mol_type = other DNA
aggtggacttgcagatatgc

SEQ ID NO: 19875 - DNA, 20 bp, synthetic construct
  misc_feature 1..20: note = Description of Artificial Sequence: Synthetic oligonucleotide
  misc_feature 1..20: note = Target: SCN10A; (-) strand; PAM type: NRG; PAM sequence: CAG
  source 1..20: mol_type = other DNA
cagaataccaggtggacttg

SEQ ID NO: 19876 - DNA, 20 bp, synthetic construct
  misc_feature 1..20: note = Description of Artificial Sequence: Synthetic oligonucleotide
  misc_feature 1..20: note = Target: SCN10A; (-) strand; PAM type: NRG; PAM sequence: TGG
  source 1..20: mol_type = other DNA
cacgaagacagaataccagg

SEQ ID NO: 19877 - DNA, 20 bp, synthetic construct
  misc_feature 1..20: note = Description of Artificial Sequence: Synthetic oligonucleotide
  misc_feature 1..20: note = Target: SCN10A; (-) strand; PAM type: NRG; PAM sequence: AGG
  source 1..20: mol_type = other DNA
gggcacgaagacagaatacc

SEQ ID NO: 19878 - DNA, 20 bp, synthetic construct
  misc_feature 1..20: note = Description of Artificial Sequence: Synthetic oligonucleotide
  misc_feature 1..20: note = Target: SCN10A; (-) strand; PAM type: NRG; PAM sequence: CAG
  source 1..20: mol_type = other DNA
ggggcacgaagacagaatac

SEQ ID NO: 19879 - DNA, 20 bp, synthetic construct
  misc_feature 1..20: note = Description of Artificial Sequence: Synthetic oligonucleotide
  misc_feature 1..20: note = Target: SCN10A; (-) strand; PAM type: NRG; PAM sequence: CAG
  source 1..20: mol_type = other DNA
cactgtgtggggcacgaaga

SEQ ID NO: 19880 - DNA, 20 bp, synthetic construct
  misc_feature 1..20: note = Description of Artificial Sequence: Synthetic oligonucleotide
  misc_feature 1..20: note = Target: SCN10A; (-) strand; PAM type: NRG; PAM sequence: AAG
  source 1..20: mol_type = other DNA
cacgcactgtgtggggcacg

SEQ ID NO: 19881 - DNA, 20 bp, synthetic construct
  misc_feature 1..20: note = Description of Artificial Sequence: Synthetic oligonucleotide
  misc_feature 1..20: note = Target: SCN10A; (-) strand; PAM type: NRG; PAM sequence: GGG
  source 1..20: mol_type = other DNA
agccacccacgcactgtgtg

SEQ ID NO: 19882 - DNA, 20 bp, synthetic construct
  misc_feature 1..20: note = Description of Artificial Sequence: Synthetic oligonucleotide
  misc_feature 1..20: note = Target: SCN10A; (-) strand; PAM type: NRG; PAM sequence: GGG
  source 1..20: mol_type = other DNA
gagccacccacgcactgtgt

SEQ ID NO: 19883 - DNA, 20 bp, synthetic construct
  misc_feature 1..20: note = Description of Artificial Sequence: Synthetic oligonucleotide
  misc_feature 1..20: note = Target: SCN10A; (-) strand; PAM type: NRG; PAM sequence: TGG
  source 1..20: mol_type = other DNA
agagccacccacgcactgtg

SEQ ID NO: 19884 - DNA, 20 bp, synthetic construct
  misc_feature 1..20: note = Description of Artificial Sequence: Synthetic oligonucleotide
  misc_feature 1..20: note = Target: SCN10A; (-) strand; PAM type: NRG; PAM sequence: GAG
  source 1..20: mol_type = other DNA
cggcacaagtgggaggggta

SEQ ID NO: 19885 - DNA, 20 bp, synthetic construct
  misc_feature 1..20: note = Description of Artificial Sequence: Synthetic oligonucleotide
  misc_feature 1..20: note = Target: SCN10A; (-) strand; PAM type: NRG; PAM sequence: TAG
  source 1..20: mol_type = other DNA
cccggcacaagtgggagggg

SEQ ID NO: 19886 - DNA, 20 bp, synthetic construct
  misc_feature 1..20: note = Description of Artificial Sequence: Synthetic oligonucleotide
  misc_feature 1..20: note = Target: SCN10A; (-) strand; PAM type: NRG; PAM sequence: GGG
  source 1..20: mol_type = other DNA
gagcccggcacaagtgggag

SEQ ID NO: 19887 - DNA, 20 bp, synthetic construct
  misc_feature 1..20: note = Description of Artificial Sequence: Synthetic oligonucleotide
  misc_feature 1..20: note = Target: SCN10A; (-) strand; PAM type: NRG; PAM sequence: GGG
  source 1..20: mol_type = other DNA
agagcccggcacaagtggga

SEQ ID NO: 19888 - DNA, 20 bp, synthetic construct
  misc_feature 1..20: note = Description of Artificial Sequence: Synthetic oligonucleotide
  misc_feature 1..20: note = Target: SCN10A; (-) strand; PAM type: NRG; PAM sequence: AGG
  source 1..20: mol_type = other DNA
aagagcccggcacaagtggg

SEQ ID NO: 19889 - DNA, 20 bp, synthetic construct
  misc_feature 1..20: note = Description of Artificial Sequence: Synthetic oligonucleotide
  misc_feature 1..20: note = Target: SCN10A; (-) strand; PAM type: NRG; PAM sequence: GAG
  source 1..20: mol_type = other DNA
aaagagcccggcacaagtgg

SEQ ID NO: 19890 - DNA, 20 bp, synthetic construct
  misc_feature 1..20: note = Description of Artificial Sequence: Synthetic oligonucleotide
  misc_feature 1..20: note = Target: SCN10A; (-) strand; PAM type: NRG; PAM sequence: GGG
  source 1..20: mol_type = other DNA
ggaaagagcccggcacaagt

SEQ ID NO: 19891 - DNA, 20 bp, synthetic construct
  misc_feature 1..20: note = Description of Artificial Sequence: Synthetic oligonucleotide
  misc_feature 1..20: note = Target: SCN10A; (-) strand; PAM type: NRG; PAM sequence: TGG
  source 1..20: mol_type = other DNA
aggaaagagcccggcacaag

SEQ ID NO: 19892 - DNA, 20 bp, synthetic construct
  misc_feature 1..20: note = Description of Artificial Sequence: Synthetic oligonucleotide
  misc_feature 1..20: note = Target: SCN10A; (-) strand; PAM type: NRG; PAM sequence: AAG
  source 1..20: mol_type = other DNA
gagaggaaagagcccggcac

SEQ ID NO: 19893 - DNA, 20 bp, synthetic construct
  misc_feature 1..20: note = Description of Artificial Sequence: Synthetic oligonucleotide
  misc_feature 1..20: note = Target: SCN10A; (-) strand; PAM type: NRG; PAM sequence: CGG
  source 1..20: mol_type = other DNA
aggtgggagaggaaagagcc

SEQ ID NO: 19894 - DNA, 20 bp, synthetic construct
  misc_feature 1..20: note = Description of Artificial Sequence: Synthetic oligonucleotide
  misc_feature 1..20: note = Target: SCN10A; (-) strand; PAM type: NRG; PAM sequence: GAG
  source 1..20: mol_type = other DNA
tgaataggtgggagaggaaa

SEQ ID NO: 19895 - DNA, 20 bp, synthetic construct
  misc_feature 1..20: note = Description of Artificial Sequence: Synthetic oligonucleotide
  misc_feature 1..20: note = Target: SCN10A; (-) strand; PAM type: NRG; PAM sequence: AAG
  source 1..20: mol_type = other DNA
cttgaataggtgggagagga

SEQ ID NO: 19896 - DNA, 20 bp, synthetic construct
  misc_feature 1..20: note = Description of Artificial Sequence: Synthetic oligonucleotide
  misc_feature 1..20: note = Target: SCN10A; (-) strand; PAM type: NRG; PAM sequence: AGG
  source 1..20: mol_type = other DNA
aggccttgaataggtgggag

SEQ ID NO: 19897 - DNA, 20 bp, synthetic construct
  misc_feature 1..20: note = Description of Artificial Sequence: Synthetic oligonucleotide
  misc_feature 1..20: note = Target: SCN10A; (-) strand; PAM type: NRG; PAM sequence: GAG
  source 1..20: mol_type = other DNA
caggccttgaataggtggga

SEQ ID NO: 19898 - DNA, 20 bp, synthetic construct
  misc_feature 1..20: note = Description of Artificial Sequence: Synthetic oligonucleotide
  misc_feature 1..20: note = Target: SCN10A; (-) strand; PAM type: NRG; PAM sequence: GAG
  source 1..20: mol_type = other DNA
tgcaggccttgaataggtgg

SEQ ID NO: 19899 - DNA, 20 bp, synthetic construct
  misc_feature 1..20: note = Description of Artificial Sequence: Synthetic oligonucleotide
  misc_feature 1..20: note = Target: SCN10A; (-) strand; PAM type: NRG; PAM sequence: GGG
  source 1..20: mol_type = other DNA
gatgcaggccttgaataggt

SEQ ID NO: 19900 - DNA, 20 bp, synthetic construct
  misc_feature 1..20: note = Description of Artificial Sequence: Synthetic oligonucleotide
  misc_feature 1..20: note = Target: SCN10A; (-) strand; PAM type: NRG; PAM sequence: TGG
  source 1..20: mol_type = other DNA
tgatgcaggccttgaatagg

SEQ ID NO: 19901 - DNA, 20 bp, synthetic construct
  misc_feature 1..20: note = Description of Artificial Sequence: Synthetic oligonucleotide
  misc_feature 1..20: note = Target: SCN10A; (-) strand; PAM type: NRG; PAM sequence: AGG
  source 1..20: mol_type = other DNA
ggatgatgcaggccttgaat

SEQ ID NO: 19902 - DNA, 20 bp, synthetic construct
  misc_feature 1..20: note = Description of Artificial Sequence: Synthetic oligonucleotide
  misc_feature 1..20: note = Target: SCN10A; (-) strand; PAM type: NRG; PAM sequence: TAG
  source 1..20: mol_type = other DNA
tggatgatgcaggccttgaa

SEQ ID NO: 19903 - DNA, 20 bp, synthetic construct
  misc_feature 1..20: note = Description of Artificial Sequence: Synthetic oligonucleotide
  misc_feature 1..20: note = Target: SCN10A; (-) strand; PAM type: NRG; PAM sequence: AGG
  source 1..20: mol_type = other DNA
gagacaggtctggatgatgc

SEQ ID NO: 19904 - DNA, 20 bp, synthetic construct
  misc_feature 1..20: note = Description of Artificial Sequence: Synthetic oligonucleotide
  misc_feature 1..20: note = Target: SCN10A; (-) strand; PAM type: NRG; PAM sequence: CAG
  source 1..20: mol_type = other DNA
ggagacaggtctggatgatg

SEQ ID NO: 19905 - DNA, 20 bp, synthetic construct
  misc_feature 1..20: note = Description of Artificial Sequence: Synthetic oligonucleotide
  misc_feature 1..20: note = Target: SCN10A; (-) strand; PAM type: NRG; PAM sequence: TGG
  source 1..20: mol_type = other DNA
gtctggaagggagacaggtc

SEQ ID NO: 19906 - DNA, 20 bp, synthetic construct
  misc_feature 1..20: note = Description of Artificial Sequence: Synthetic oligonucleotide
  misc_feature 1..20: note = Target: SCN10A; (-) strand; PAM type: NRG; PAM sequence: AGG
  source 1..20: mol_type = other DNA
caatggtctggaagggagac

SEQ ID NO: 19907 - DNA, 20 bp, synthetic construct
  misc_feature 1..20: note = Description of Artificial Sequence: Synthetic oligonucleotide
  misc_feature 1..20: note = Target: SCN10A; (-) strand; PAM type: NRG; PAM sequence: CAG
  source 1..20: mol_type = other DNA
gcaatggtctggaagggaga

SEQ ID NO: 19908 - DNA, 20 bp, synthetic construct
  misc_feature 1..20: note = Description of Artificial Sequence: Synthetic oligonucleotide
  misc_feature 1..20: note = Target: SCN10A; (-) strand; PAM type: NRG; PAM sequence: GAG
  source 1..20: mol_type = other DNA
catggcaatggtctggaagg

SEQ ID NO: 19909 - DNA, 20 bp, synthetic construct
  misc_feature 1..20: note = Description of Artificial Sequence: Synthetic oligonucleotide
  misc_feature 1..20: note = Target: SCN10A; (-) strand; PAM type: NRG; PAM sequence: GGG
  source 1..20: mol_type = other DNA
ctcatggcaatggtctggaa

SEQ ID NO: 19910 - DNA, 20 bp, synthetic construct
  misc_feature 1..20: note = Description of Artificial Sequence: Synthetic oligonucleotide
  misc_feature 1..20: note = Target: SCN10A; (-) strand; PAM type: NRG; PAM sequence: AGG
  source 1..20: mol_type = other DNA
gctcatggcaatggtctgga

SEQ ID NO: 19911 - DNA, 20 bp, synthetic construct
  misc_feature 1..20: note = Description of Artificial Sequence: Synthetic oligonucleotide
  misc_feature 1..20: note = Target: SCN10A; (-) strand; PAM type: NRG; PAM sequence: AAG
  source 1..20: mol_type = other DNA
tgctcatggcaatggtctgg

SEQ ID NO: 19912 - DNA, 20 bp, synthetic construct
  misc_feature 1..20: note = Description of Artificial Sequence: Synthetic oligonucleotide
  misc_feature 1..20: note = Target: SCN10A; (-) strand; PAM type: NRG; PAM sequence: TGG
  source 1..20: mol_type = other DNA
acctgctcatggcaatggtc

SEQ ID NO: 19913 - DNA, 20 bp, synthetic construct
  misc_feature 1..20: note = Description of Artificial Sequence: Synthetic oligonucleotide
  misc_feature 1..20: note = Target: SCN10A; (-) strand; PAM type: NRG; PAM sequence: TGG
  source 1..20: mol_type = other DNA
tgtttacctgctcatggcaa

SEQ ID NO: 19914 - DNA, 20 bp, synthetic construct
  misc_feature 1..20: note = Description of Artificial Sequence: Synthetic oligonucleotide
  misc_feature 1..20: note = Target: SCN10A; (-) strand; PAM type: NRG; PAM sequence: TGG
  source 1..20: mol_type = other DNA
aaagcatgtttacctgctca

SEQ ID NO: 19915 - DNA, 20 bp, synthetic construct
  misc_feature 1..20: note = Description of Artificial Sequence: Synthetic oligonucleotide
  misc_feature 1..20: note = Target: SCN10A; (-) strand; PAM type: NRG; PAM sequence: AAG
  source 1..20: mol_type = other DNA
tcaaagccgcgagataatta

SEQ ID NO: 19916 - DNA, 20 bp, synthetic construct
  misc_feature 1..20: note = Description of Artificial Sequence: Synthetic oligonucleotide
  misc_feature 1..20: note = Target: SCN10A; (-) strand; PAM type: NRG; PAM sequence: GAG
  source 1..20: mol_type = other DNA
agagactttttcaaagccgc

SEQ ID NO: 19917 - DNA, 20 bp, synthetic construct
  misc_feature 1..20: note = Description of Artificial Sequence: Synthetic oligonucleotide
  misc_feature 1..20: note = Target: SCN10A; (-) strand; PAM type: NRG; PAM sequence: AAG
  source 1..20: mol_type = other DNA
ggtccagagagactttttca

SEQ ID NO: 19918 - DNA, 20 bp, synthetic construct
  misc_feature 1..20: note = Description of Artificial Sequence: Synthetic oligonucleotide
  misc_feature 1..20: note = Target: SCN10A; (-) strand; PAM type: NRG; PAM sequence: GAG
  source 1..20: mol_type = other DNA
aagagagcatggggtccaga

SEQ ID NO: 19919 - DNA, 20 bp, synthetic construct
  misc_feature 1..20: note = Description of Artificial Sequence: Synthetic oligonucleotide
  misc_feature 1..20: note = Target: SCN10A; (-) strand; PAM type: NRG; PAM sequence: GAG
  source 1..20: mol_type = other DNA
gaaagagagcatggggtcca

SEQ ID NO: 19920 - DNA, 20 bp, synthetic construct
  misc_feature 1..20: note = Description of Artificial Sequence: Synthetic oligonucleotide
  misc_feature 1..20: note = Target: SCN10A; (-) strand; PAM type: NRG; PAM sequence: CAG
  source 1..20: mol_type = other DNA
atgaaagagagcatggggtc

SEQ ID NO: 19921 - DNA, 20 bp, synthetic construct
  misc_feature 1..20: note = Description of Artificial Sequence: Synthetic oligonucleotide
  misc_feature 1..20: note = Target: SCN10A; (-) strand; PAM type: NRG; PAM sequence: GGG
  source 1..20: mol_type = other DNA
cagtaatgaaagagagcatg

SEQ ID NO: 19922 - DNA, 20 bp, synthetic construct
  misc_feature 1..20: note = Description of Artificial Sequence: Synthetic oligonucleotide
  misc_feature 1..20: note = Target: SCN10A; (-) strand; PAM type: NRG; PAM sequence: GGG
  source 1..20: mol_type = other DNA
gcagtaatgaaagagagcat

SEQ ID NO: 19923 - DNA, 20 bp, synthetic construct
  misc_feature 1..20: note = Description of Artificial Sequence: Synthetic oligonucleotide
  misc_feature 1..20: note = Target: SCN10A; (-) strand; PAM type: NRG; PAM sequence: TGG
  source 1..20: mol_type = other DNA
agcagtaatgaaagagagca

SEQ ID NO: 19924 - DNA, 20 bp, synthetic construct
  misc_feature 1..20: note = Description of Artificial Sequence: Synthetic oligonucleotide
  misc_feature 1..20: note = Target: SCN10A; (-) strand; PAM type: NRG; PAM sequence: GAG
  source 1..20: mol_type = other DNA
aaagaagcagtaatgaaaga

SEQ ID NO: 19925 - DNA, 20 bp, synthetic construct
  misc_feature 1..20: note = Description of Artificial Sequence: Synthetic oligonucleotide
  misc_feature 1..20: note = Target: SCN10A; (-) strand; PAM type: NRG; PAM sequence: GAG
  source 1..20: mol_type = other DNA
tcaaagaagcagtaatgaaa

SEQ ID NO: 19926 - DNA, 20 bp, synthetic construct
  misc_feature 1..20: note = Description of Artificial Sequence: Synthetic oligonucleotide
  misc_feature 1..20: note = Target: SCN10A; (-) strand; PAM type: NRG; PAM sequence: AAG
  source 1..20: mol_type = other DNA
tgtcaaagaagcagtaatga

SEQ ID NO: 19927 - DNA, 20 bp, synthetic construct
  misc_feature 1..20: note = Description of Artificial Sequence: Synthetic oligonucleotide
  misc_feature 1..20: note = Target: SCN10A; (-) strand; PAM type: NRG; PAM sequence: CAG
  source 1..20: mol_type = other DNA
gaattttactgtcaaagaag

SEQ ID NO: 19928 - DNA, 20 bp, synthetic construct
  misc_feature 1..20: note = Description of Artificial Sequence: Synthetic oligonucleotide
  misc_feature 1..20: note = Target: SCN10A; (-) strand; PAM type: NRG; PAM sequence: AAG
  source 1..20: mol_type = other DNA
aaggaattttactgtcaaag

SEQ ID NO: 19929 - DNA, 20 bp, synthetic construct
  misc_feature 1..20: note = Description of Artificial Sequence: Synthetic oligonucleotide
  misc_feature 1..20: note = Target: SCN10A; (-) strand; PAM type: NRG; PAM sequence: AAG
  source 1..20: mol_type = other DNA
tgcaaggaattttactgtca

SEQ ID NO: 19930 - DNA, 20 bp, synthetic construct
  misc_feature 1..20: note = Description of Artificial Sequence: Synthetic oligonucleotide
  misc_feature 1..20: note = Target: SCN10A; (-) strand; PAM type: NRG; PAM sequence: AGG
  source 1..20: mol_type = other DNA
aagtgtagaaaactcttgca

SEQ ID NO: 19931 - DNA, 20 bp, synthetic construct
  misc_feature 1..20: note = Description of Artificial Sequence: Synthetic oligonucleotide
  misc_feature 1..20: note = Target: SCN10A; (-) strand; PAM type: NRG; PAM sequence: AAG
  source 1..20: mol_type = other DNA
taagtgtagaaaactcttgc

SEQ ID NO: 19932 - DNA, 20 bp, synthetic construct
  misc_feature 1..20: note = Description of Artificial Sequence: Synthetic oligonucleotide
  misc_feature 1..20: note = Target: SCN10A; (-) strand; PAM type: NRG; PAM sequence: TAG
  source 1..20: mol_type = other DNA
gagctgtagaaggttaagtg

SEQ ID NO: 19933 - DNA, 20 bp, synthetic construct
  misc_feature 1..20: note = Description of Artificial Sequence: Synthetic oligonucleotide
  misc_feature 1..20: note = Target: SCN10A; (-) strand; PAM type: NRG; PAM sequence: AAG
  source 1..20: mol_type = other DNA
gtaaggagctgtagaaggtt

SEQ ID NO: 19934 - DNA, 20 bp, synthetic construct
  misc_feature 1..20: note = Description of Artificial Sequence: Synthetic oligonucleotide
  misc_feature 1..20: note = Target: SCN10A; (-) strand; PAM type: NRG; PAM sequence: AGG
  source 1..20: mol_type = other DNA
aagaggtaaggagctgtaga

SEQ ID NO: 19935 - DNA, 20 bp, synthetic construct
  misc_feature 1..20: note = Description of Artificial Sequence: Synthetic oligonucleotide
  misc_feature 1..20: note = Target: SCN10A; (-) strand; PAM type: NRG; PAM sequence: AAG
  source 1..20: mol_type = other DNA
aaagaggtaaggagctgtag

SEQ ID NO: 19936 - DNA, 20 bp, synthetic construct
  misc_feature 1..20: note = Description of Artificial Sequence: Synthetic oligonucleotide
  misc_feature 1..20: note = Target: SCN10A; (-) strand; PAM type: NRG; PAM sequence: TAG
  source 1..20: mol_type = other DNA
aaaaaagaggtaaggagctg

SEQ ID NO: 19937 - DNA, 20 bp, synthetic construct
  misc_feature 1..20: note = Description of Artificial Sequence: Synthetic oligonucleotide
  misc_feature 1..20: note = Target: SCN10A; (-) strand; PAM type: NRG; PAM sequence: GAG
  source 1..20: mol_type = other DNA
cagagaaaaaaagaggtaag

SEQ ID NO: 19938 - DNA, 20 bp, synthetic construct
  misc_feature 1..20: note = Description of Artificial Sequence: Synthetic oligonucleotide
  misc_feature 1..20: note = Target: SCN10A; (-) strand; PAM type: NRG; PAM sequence: AGG
  source 1..20: mol_type = other DNA
tgcagagaaaaaaagaggta

SEQ ID NO: 19939 - DNA, 20 bp, synthetic construct
  misc_feature 1..20: note = Description of Artificial Sequence: Synthetic oligonucleotide
  misc_feature 1..20: note = Target: SCN10A; (-) strand; PAM type: NRG; PAM sequence: AAG
  source 1..20: mol_type = other DNA
ctgcagagaaaaaaagaggt

SEQ ID NO: 19940 - DNA, 20 bp, synthetic construct
  misc_feature 1..20: note = Description of Artificial Sequence: Synthetic oligonucleotide
  misc_feature 1..20: note = Target: SCN10A; (-) strand; PAM type: NRG; PAM sequence: AGG
  source 1..20: mol_type = other DNA
ggggctgcagagaaaaaaag

SEQ ID NO: 19941 - DNA, 20 bp, synthetic construct
  misc_feature 1..20: note = Description of Artificial Sequence: Synthetic oligonucleotide
  misc_feature 1..20: note = Target: SCN10A; (-) strand; PAM type: NRG; PAM sequence: GAG
  source 1..20: mol_type = other DNA
aggggctgcagagaaaaaaa

SEQ ID NO: 19942 - DNA, 20 bp, synthetic construct
  misc_feature 1..20: note = Description of Artificial Sequence: Synthetic oligonucleotide
  misc_feature 1..20: note = Target: SCN10A; (-) strand; PAM type: NRG; PAM sequence: AAG
  source 1..20: mol_type = other DNA
ccaggggctgcagagaaaaa

SEQ ID NO: 19943 - DNA, 20 bp, synthetic construct
  misc_feature 1..20: note = Description of Artificial Sequence: Synthetic oligonucleotide
  misc_feature 1..20: note = Target: SCN10A; (-) strand; PAM type: NRG; PAM sequence: GAG
  source 1..20: mol_type = other DNA
gtcagattccaggggctgca

SEQ ID NO: 19944 - DNA, 20 bp, synthetic construct
  misc_feature 1..20: note = Description of Artificial Sequence: Synthetic oligonucleotide
  misc_feature 1..20: note = Target: SCN10A; (-) strand; PAM type: NRG; PAM sequence: CAG
  source 1..20: mol_type = other DNA
aagtcagattccaggggctg

SEQ ID NO: 19945 - DNA, 20 bp, synthetic construct
  misc_feature 1..20: note = Description of Artificial Sequence: Synthetic oligonucleotide
  misc_feature 1..20: note = Target: SCN10A; (-) strand; PAM type: NRG; PAM sequence: GGG
  source 1..20: mol_type = other DNA
cagttaaagtcagattccag

SEQ ID NO: 19946 - DNA, 20 bp, synthetic construct
  misc_feature 1..20: note = Description of Artificial Sequence: Synthetic oligonucleotide
  misc_feature 1..20: note = Target: SCN10A; (-) strand; PAM type: NRG; PAM sequence: GGG
  source 1..20: mol_type = other DNA
gcagttaaagtcagattcca

SEQ ID NO: 19947 - DNA, 20 bp, synthetic construct
  misc_feature 1..20: note = Description of Artificial Sequence: Synthetic oligonucleotide
  misc_feature 1..20: note = Target: SCN10A; (-) strand; PAM type: NRG; PAM sequence: AGG
  source 1..20: mol_type = other DNA
agcagttaaagtcagattcc

SEQ ID NO: 19948 - DNA, 20 bp, synthetic construct
  misc_feature 1..20: note = Description of Artificial Sequence: Synthetic oligonucleotide
  misc_feature 1..20: note = Target: SCN10A; (-) strand; PAM type: NRG; PAM sequence: CAG
  source 1..20: mol_type = other DNA
aagcagttaaagtcagattc

SEQ ID NO: 19949 - DNA, 20 bp, synthetic construct
  misc_feature 1..20: note = Description of Artificial Sequence: Synthetic oligonucleotide
  misc_feature 1..20: note = Target: SCN10A; (-) strand; PAM type: NRG; PAM sequence: CAG
  source 1..20: mol_type = other DNA
aatttggaagcagttaaagt

SEQ ID NO: 19950 - DNA, 20 bp, synthetic construct
  misc_feature 1..20: note = Description of Artificial Sequence: Synthetic oligonucleotide
  misc_feature 1..20: note = Target: SCN10A; (-) strand; PAM type: NRG; PAM sequence: AAG
  source 1..20: mol_type = other DNA
tttgaatttggaagcagtta

SEQ ID NO: 19951 - DNA, 20 bp, synthetic construct
  misc_feature 1..20: note = Description of Artificial Sequence: Synthetic oligonucleotide
  misc_feature 1..20: note = Target: SCN10A; (-) strand; PAM type: NRG; PAM sequence: CAG
  source 1..20: mol_type = other DNA
caattatttgaatttggaag

SEQ ID NO: 19952 - DNA, 20 bp, synthetic construct
  misc_feature 1..20: note = Description of Artificial Sequence: Synthetic oligonucleotide
  misc_feature 1..20: note = Target: SCN10A; (-) strand; PAM type: NRG; PAM sequence: AAG
  source 1..20: mol_type = other DNA
aatcaattatttgaatttgg

SEQ ID NO: 19953 - DNA, 20 bp, synthetic construct
  misc_feature 1..20: note = Description of Artificial Sequence: Synthetic oligonucleotide
  misc_feature 1..20: note = Target: SCN10A; (-) strand; PAM type: NRG; PAM sequence: TGG
  source 1..20: mol_type = other DNA
ggaaatcaattatttgaatt

SEQ ID NO: 19954 - DNA, 20 bp, synthetic construct
  misc_feature 1..20: note = Description of Artificial Sequence: Synthetic oligonucleotide
  misc_feature 1..20: note = Target: SCN10A; (-) strand; PAM type: NRG; PAM sequence: TGG
  source 1..20: mol_type = other DNA
tataagggtaagatgagaac

SEQ ID NO: 19955 - DNA, 20 bp, synthetic construct
  misc_feature 1..20: note = Description of Artificial Sequence: Synthetic oligonucleotide
  misc_feature 1..20: note = Target: SCN10A; (-) strand; PAM type: NRG; PAM sequence: GAG
  source 1..20: mol_type = other DNA
aaatgttataagggtaagat

SEQ ID NO: 19956 - DNA, 20 bp, synthetic construct
  misc_feature 1..20: note = Description of Artificial Sequence: Synthetic oligonucleotide
  misc_feature 1..20: note = Target: SCN10A; (-) strand; PAM type: NRG; PAM sequence: AAG
  source 1..20: mol_type = other DNA
ctgtcaaatgttataagggt

SEQ ID NO: 19957 - DNA, 20 bp, synthetic construct
  misc_feature 1..20: note = Description of Artificial Sequence: Synthetic oligonucleotide
  misc_feature 1..20: note = Target: SCN10A; (-) strand; PAM type: NRG; PAM sequence: GGG
  source 1..20: mol_type = other DNA
aattctgtcaaatgttataa

SEQ ID NO: 19958 - DNA, 20 bp, synthetic construct
  misc_feature 1..20: note = Description of Artificial Sequence: Synthetic oligonucleotide
  misc_feature 1..20: note = Target: SCN10A; (-) strand; PAM type: NRG; PAM sequence: AGG
  source 1..20: mol_type = other DNA
aaattctgtcaaatgttata

SEQ ID NO: 19959 - DNA, 20 bp, synthetic construct
  misc_feature 1..20: note = Description of Artificial Sequence: Synthetic oligonucleotide
  misc_feature 1..20: note = Target: SCN10A; (-) strand; PAM type: NRG; PAM sequence: AAG
  source 1..20: mol_type = other DNA
taaattctgtcaaatgttat

SEQ ID NO: 19960 - DNA, 20 bp, synthetic construct
  misc_feature 1..20: note = Description of Artificial Sequence: Synthetic oligonucleotide
  misc_feature 1..20: note = Target: SCN10A; (-) strand; PAM type: NRG; PAM sequence: GAG
  source 1..20: mol_type = other DNA
aaatgaacactggtttcaaa

SEQ ID NO: 19961 - DNA, 20 bp, synthetic construct
  misc_feature 1..20: note = Description of Artificial Sequence: Synthetic oligonucleotide
  misc_feature 1..20: note = Target: SCN10A; (-) strand; PAM type: NRG; PAM sequence: AAG
  source 1..20: mol_type = other DNA
ccaaatgaacactggtttca

SEQ ID NO: 19962 - DNA, 20 bp, synthetic construct
  misc_feature 1..20: note = Description of Artificial Sequence: Synthetic oligonucleotide
  misc_feature 1..20: note = Target: SCN10A; (-) strand; PAM type: NRG; PAM sequence: TGG
  source 1..20: mol_type = other DNA
ccccagagccaaatgaacac

SEQ ID NO: 19963 - DNA, 20 bp, synthetic construct
  misc_feature 1..20: note = Description of Artificial Sequence: Synthetic oligonucleotide
  misc_feature 1..20: note = Target: SCN10A; (-) strand; PAM type: NRG; PAM sequence: GAG
  source 1..20: mol_type = other DNA
aagagatgatgcagtcccca

SEQ ID NO: 19964 - DNA, 20 bp, synthetic construct
  misc_feature 1..20: note = Description of Artificial Sequence: Synthetic oligonucleotide
  misc_feature 1..20: note = Target: SCN10A; (-) strand; PAM type: NRG; PAM sequence: CAG
  source 1..20: mol_type = other DNA
gcaagagatgatgcagtccc

SEQ ID NO: 19965 - DNA, 20 bp, synthetic construct
  misc_feature 1..20: note = Description of Artificial Sequence: Synthetic oligonucleotide
  misc_feature 1..20: note = Target: SCN10A; (-) strand; PAM type: NRG; PAM sequence: CAG
  source 1..20: mol_type = other DNA
agaaaaagcaagagatgatg

SEQ ID NO: 19966 - DNA, 20 bp, synthetic construct
  misc_feature 1..20: note = Description of Artificial Sequence: Synthetic oligonucleotide
  misc_feature 1..20: note = Target: SCN10A; (-) strand; PAM type: NRG; PAM sequence: GAG
  source 1..20: mol_type = other DNA
aaatatgggagaaaaagcaa

SEQ ID NO: 19967 - DNA, 20 bp, synthetic construct
  misc_feature 1..20: note = Description of Artificial Sequence: Synthetic oligonucleotide
  misc_feature 1..20: note = Target: SCN10A; (-) strand; PAM type: NRG; PAM sequence: AAG
  source 1..20: mol_type = other DNA
agaaatatgggagaaaaagc

SEQ ID NO: 19968 - DNA, 20 bp, synthetic construct
  misc_feature 1..20: note = Description of Artificial Sequence: Synthetic oligonucleotide
  misc_feature 1..20: note = Target: SCN10A; (-) strand; PAM type: NRG; PAM sequence: AAG
  source 1..20: mol_type = other DNA
gtggagaaatatgggagaaa

SEQ ID NO: 19969 - DNA, 20 bp, synthetic construct
  misc_feature 1..20: note = Description of Artificial Sequence: Synthetic oligonucleotide
  misc_feature 1..20: note = Target: SCN10A; (-) strand; PAM type: NRG; PAM sequence: GAG
  source 1..20: mol_type = other DNA
aaagaagtggagaaatatgg

SEQ ID NO: 19970 - DNA, 20 bp, synthetic construct
  misc_feature 1..20: note = Description of Artificial Sequence: Synthetic oligonucleotide
  misc_feature 1..20: note = Target: SCN10A; (-) strand; PAM type: NRG; PAM sequence: GGG
  source 1..20: mol_type = other DNA
gaaaagaagtggagaaatat

SEQ ID NO: 19971 - DNA, 20 bp, synthetic construct
  misc_feature 1..20: note = Description of Artificial Sequence: Synthetic oligonucleotide
  misc_feature 1..20: note = Target: SCN10A; (-) strand; PAM type: NRG; PAM sequence: TGG
  source 1..20: mol_type = other DNA
tgaaaagaagtggagaaata

SEQ ID NO: 19972 - DNA, 20 bp, synthetic construct
  misc_feature 1..20: note = Description of Artificial Sequence: Synthetic oligonucleotide
  misc_feature 1..20: note = Target: SCN10A; (-) strand; PAM type: NRG; PAM sequence: GAG
  source 1..20: mol_type = other DNA
acagaaagtgaaaagaagtg

SEQ ID NO: 19973 - DNA, 20 bp, synthetic construct
  misc_feature 1..20: note = Description of Artificial Sequence: Synthetic oligonucleotide
  misc_feature 1..20: note = Target: SCN10A; (-) strand; PAM type: NRG; PAM sequence: TGG
  source 1..20: mol_type = other DNA
aaacagaaagtgaaaagaag

SEQ ID NO: 19974 - DNA, 20 bp, synthetic construct
  misc_feature 1..20: note = Description of Artificial Sequence: Synthetic oligonucleotide
  misc_feature 1..20: note = Target: SCN10A; (-) strand; PAM type: NRG; PAM sequence: AAG
  source 1..20: mol_type = other DNA
caaaaacagaaagtgaaaag

SEQ ID NO: 19975 - DNA, 20 bp, synthetic construct
  misc_feature 1..20: note = Description of Artificial Sequence: Synthetic oligonucleotide
  misc_feature 1..20: note = Target: SCN10A; (-) strand; PAM type: NRG; PAM sequence: AAG
  source 1..20: mol_type = other DNA
agacaaaaacagaaagtgaa

SEQ ID NO: 19976 - DNA, 20 bp, synthetic construct
  misc_feature 1..20: note = Description of Artificial Sequence: Synthetic oligonucleotide
  misc_feature 1..20: note = Target: SCN10A; (-) strand; PAM type: NRG; PAM sequence: AAG
  source 1..20: mol_type = other DNA
aaaagggagacaaaaacaga

SEQ ID NO: 19977 - DNA, 20 bp, synthetic construct
  misc_feature 1..20: note = Description of Artificial Sequence: Synthetic oligonucleotide
  misc_feature 1..20: note = Target: SCN10A; (-) strand; PAM type: NRG; PAM sequence: CAG
  source 1..20: mol_type = other DNA
aaggaaaagggagacaaaaa

SEQ ID NO: 19978 - DNA, 20 bp, synthetic construct
  misc_feature 1..20: note = Description of Artificial Sequence: Synthetic oligonucleotide
  misc_feature 1..20: note = Target: SCN10A; (-) strand; PAM type: NRG; PAM sequence: GAG
  source 1..20: mol_type = other DNA
acaagcaggaaaggaaaagg

SEQ ID NO: 19979 - DNA, 20 bp, synthetic construct
  misc_feature 1..20: note = Description of Artificial Sequence: Synthetic oligonucleotide
  misc_feature 1..20: note = Target: SCN10A; (-) strand; PAM type: NRG; PAM sequence: GGG
  source 1..20: mol_type = other DNA
ttacaagcaggaaaggaaaa

SEQ ID NO: 19980 - DNA, 20 bp, synthetic construct
  misc_feature 1..20: note = Description of Artificial Sequence: Synthetic oligonucleotide
  misc_feature 1..20: note = Target: SCN10A; (-) strand; PAM type: NRG; PAM sequence: AGG
  source 1..20: mol_type = other DNA
tttacaagcaggaaaggaaa

SEQ ID NO: 19981 - DNA, 20 bp, synthetic construct
  misc_feature 1..20: note = Description of Artificial Sequence: Synthetic oligonucleotide
  misc_feature 1..20: note = Target: SCN10A; (-) strand; PAM type: NRG; PAM sequence: AAG
  source 1..20: mol_type = other DNA
atttacaagcaggaaaggaa

SEQ ID NO: 19982 - DNA, 20 bp, synthetic construct
  misc_feature 1..20: note = Description of Artificial Sequence: Synthetic oligonucleotide
  misc_feature 1..20: note = Target: SCN10A; (-) strand; PAM type: NRG; PAM sequence: AGG
  source 1..20: mol_type = other DNA
tcaacatttacaagcaggaa

SEQ ID NO: 19983 - DNA, 20 bp, synthetic construct
  misc_feature 1..20: note = Description of Artificial Sequence: Synthetic oligonucleotide
  misc_feature 1..20: note = Target: SCN10A; (-) strand; PAM type: NRG; PAM sequence: AAG
  source 1..20: mol_type = other DNA
ttcaacatttacaagcagga

SEQ ID NO: 19984 - DNA, 20 bp, synthetic construct
  misc_feature 1..20: note = Description of Artificial Sequence: Synthetic oligonucleotide
  misc_feature 1..20: note = Target: SCN10A; (-) strand; PAM type: NRG; PAM sequence: AGG
  source 1..20: mol_type = other DNA
gttattcaacatttacaagc

SEQ ID NO: 19985 - DNA, 20 bp, synthetic construct
  misc_feature 1..20: note = Description of Artificial Sequence: Synthetic oligonucleotide
  misc_feature 1..20: note = Target: SCN10A; (-) strand; PAM type: NRG; PAM sequence: CAG
  source 1..20: mol_type = other DNA
agttattcaacatttacaag

SEQ ID NO: 19986 - DNA, 20 bp, synthetic construct
  misc_feature 1..20: note = Description of Artificial Sequence: Synthetic oligonucleotide
  misc_feature 1..20: note = Target: SCN10A; (-) strand; PAM type: NRG; PAM sequence: AAG
  source 1..20: mol_type = other DNA
ttgagttattcaacatttac

SEQ ID NO: 19987 - DNA, 20 bp, synthetic construct
  misc_feature 1..20: note = Description of Artificial Sequence: Synthetic oligonucleotide
  misc_feature 1..20: note = Target: SCN10A; (-) strand; PAM type: NRG; PAM sequence: GAG
  source 1..20: mol_type = other DNA
aagctaaggtgagaatgctt

SEQ ID NO: 19988 - DNA, 20 bp, synthetic construct
  misc_feature 1..20: note = Description of Artificial Sequence: Synthetic oligonucleotide
  misc_feature 1..20: note = Target: SCN10A; (-) strand; PAM type: NRG; PAM sequence: GAG
  source 1..20: mol_type = other DNA
aaacacagagaagctaaggt

SEQ ID NO: 19989 - DNA, 20 bp, synthetic construct
  misc_feature 1..20: note = Description of Artificial Sequence: Synthetic oligonucleotide
  misc_feature 1..20: note = Target: SCN10A; (-) strand; PAM type: NRG; PAM sequence: AGG
  source 1..20: mol_type = other DNA
tcaaaaacacagagaagcta

SEQ ID NO: 19990 - DNA, 20 bp, synthetic construct
  misc_feature 1..20: note = Description of Artificial Sequence: Synthetic oligonucleotide
  misc_feature 1..20: note = Target: SCN10A; (-) strand; PAM type: NRG; PAM sequence: AAG
  source 1..20: mol_type = other DNA
ttcaaaaacacagagaagct

SEQ ID NO: 19991 - DNA, 20 bp, synthetic construct
  misc_feature 1..20: note = Description of Artificial Sequence: Synthetic oligonucleotide
  misc_feature 1..20: note = Target: SCN10A; (-) strand; PAM type: NRG; PAM sequence: AAG
  source 1..20: mol_type = other DNA
tgagattcaaaaacacagag

SEQ ID NO: 19992 - DNA, 20 bp, synthetic construct
  misc_feature 1..20: note = Description of Artificial Sequence: Synthetic oligonucleotide
  misc_feature 1..20: note = Target: SCN10A; (-) strand; PAM type: NRG; PAM sequence: GAG
  source 1..20: mol_type = other DNA
ctatgagattcaaaaacaca

SEQ ID NO: 19993 - DNA, 20 bp, synthetic construct
  misc_feature 1..20: note = Description of Artificial Sequence: Synthetic oligonucleotide
  misc_feature 1..20: note = Target: SCN10A; (-) strand; PAM type: NRG; PAM sequence: CAG
  source 1..20: mol_type = other DNA
ggctatgagattcaaaaaca

SEQ ID NO: 19994 - DNA, 20 bp, synthetic construct
  misc_feature 1..20: note = Description of Artificial Sequence: Synthetic oligonucleotide
  misc_feature 1..20: note = Target: SCN10A; (-) strand; PAM type: NRG; PAM sequence: GAG
  source 1..20: mol_type = other DNA
agatggttttttagggctat

SEQ ID NO: 19995 - DNA, 20 bp, synthetic construct
  misc_feature 1..20: note = Description of Artificial Sequence: Synthetic oligonucleotide
  misc_feature 1..20: note = Target: SCN10A; (-) strand; PAM type: NRG; PAM sequence: GGG
  source 1..20: mol_type = other DNA
ggcatagagatggtttttta

SEQ ID NO: 19996 - DNA, 20 bp, synthetic construct
  misc_feature 1..20: note = Description of Artificial Sequence: Synthetic oligonucleotide
  misc_feature 1..20: note = Target: SCN10A; (-) strand; PAM type: NRG; PAM sequence: AGG
  source 1..20: mol_type = other DNA
tggcatagagatggtttttt

SEQ ID NO: 19997 - DNA, 20 bp, synthetic construct
  misc_feature 1..20: note = Description of Artificial Sequence: Synthetic oligonucleotide
  misc_feature 1..20: note = Target: SCN10A; (-) strand; PAM type: NRG; PAM sequence: TAG
  source 1..20: mol_type = other DNA
ttggcatagagatggttttt

SEQ ID NO: 19998 - DNA, 20 bp, synthetic construct
  misc_feature 1..20: note = Description of Artificial Sequence: Synthetic oligonucleotide
  misc_feature 1..20: note = Target: SCN10A; (-) strand; PAM type: NRG; PAM sequence: TGG
  source 1..20: mol_type = other DNA
ggtgggaattggcatagaga

SEQ ID NO: 19999 - DNA, 20 bp, synthetic construct
  misc_feature 1..20: note = Description of Artificial Sequence: Synthetic oligonucleotide
  misc_feature 1..20: note = Target: SCN10A; (-) strand; PAM type: NRG; PAM sequence: GAG
  source 1..20: mol_type = other DNA
atttggtgggaattggcata

SEQ ID NO: 20000 - DNA, 20 bp, synthetic construct
  misc_feature 1..20: note = Description of Artificial Sequence: Synthetic oligonucleotide
  misc_feature 1..20: note = Target: SCN10A; (-) strand; PAM type: NRG; PAM sequence: TAG
  source 1..20: mol_type = other DNA
taatttggtgggaattggca

SEQ ID NO: 20001 - DNA, 20 bp, synthetic construct
  misc_feature 1..20: note = Description of Artificial Sequence: Synthetic oligonucleotide
  misc_feature 1..20: note = Target: SCN10A; (-) strand; PAM type: NRG; PAM sequence: TGG
  source 1..20: mol_type = other DNA
acacataatttggtgggaat

SEQ ID NO: 20002 - DNA, 20 bp, synthetic construct
  misc_feature 1..20: note = Description of Artificial Sequence: Synthetic oligonucleotide
  misc_feature 1..20: note = Target: SCN10A; (-) strand; PAM type: NRG; PAM sequence: GGG
  source 1..20: mol_type = other DNA
aattggacacataatttggt

SEQ ID NO: 20003 - DNA, 20 bp, synthetic construct
  misc_feature 1..20: note = Description of Artificial Sequence: Synthetic oligonucleotide
  misc_feature 1..20: note = Target: SCN10A; (-) strand; PAM type: NRG; PAM sequence: TGG
  source 1..20: mol_type = other DNA
aaattggacacataatttgg

SEQ ID NO: 20004 - DNA, 20 bp, synthetic construct
  misc_feature 1..20: note = Description of Artificial Sequence: Synthetic oligonucleotide
  misc_feature 1..20: note = Target: SCN10A; (-) strand; PAM type: NRG; PAM sequence: TGG
  source 1..20: mol_type = other DNA
cagaaattggacacataatt

SEQ ID NO: 20005 - DNA, 20 bp, synthetic construct
  misc_feature 1..20: note = Description of Artificial Sequence: Synthetic oligonucleotide
  misc_feature 1..20: note = Target: SCN10A; (-) strand; PAM type: NRG; PAM sequence: TGG
  source 1..20: mol_type = other DNA
ttcaggaagggatcagaaat

SEQ ID NO: 20006 - DNA, 20 bp, synthetic construct
  misc_feature 1..20: note = Description of Artificial Sequence: Synthetic oligonucleotide
  misc_feature 1..20: note = Target: SCN10A; (-) strand; PAM type: NRG; PAM sequence: CAG
  source 1..20: mol_type = other DNA
cctagtgttcaggaagggat

SEQ ID NO: 20007 - DNA, 20 bp, synthetic construct
  misc_feature 1..20: note = Description of Artificial Sequence: Synthetic oligonucleotide
  misc_feature 1..20: note = Target: SCN10A; (-) strand; PAM type: NRG; PAM sequence: GGG
  source 1..20: mol_type = other DNA
ataagcctagtgttcaggaa

SEQ ID NO: 20008 - DNA, 20 bp, synthetic construct
  misc_feature 1..20: note = Description of Artificial Sequence: Synthetic oligonucleotide
  misc_feature 1..20: note = Target: SCN10A; (-) strand; PAM type: NRG; PAM sequence: AGG
  source 1..20: mol_type = other DNA
gataagcctagtgttcagga

SEQ ID NO: 20009 - DNA, 20 bp, synthetic construct
  misc_feature 1..20: note = Description of Artificial Sequence: Synthetic oligonucleotide
  misc_feature 1..20: note = Target: SCN10A; (-) strand; PAM type: NRG; PAM sequence: AAG
  source 1..20: mol_type = other DNA
agataagcctagtgttcagg

SEQ ID NO: 20010 - DNA, 20 bp, synthetic construct
  misc_feature 1..20: note = Description of Artificial Sequence: Synthetic oligonucleotide
  misc_feature 1..20: note = Target: SCN10A; (-) strand; PAM type: NRG; PAM sequence: AGG
  source 1..20: mol_type = other DNA
gagagataagcctagtgttc

SEQ ID NO: 20011 - DNA, 20 bp, synthetic construct
  misc_feature 1..20: note = Description of Artificial Sequence: Synthetic oligonucleotide
  misc_feature 1..20: note = Target: SCN10A; (-) strand; PAM type: NRG; PAM sequence: CAG
  source 1..20: mol_type = other DNA
agagagataagcctagtgtt

SEQ ID NO: 20012 - DNA, 20 bp, synthetic construct
  misc_feature 1..20: note = Description of Artificial Sequence: Synthetic oligonucleotide
  misc_feature 1..20: note = Target: SCN10A; (-) strand; PAM type: NRG; PAM sequence: TAG
  source 1..20: mol_type = other DNA
ggcaggtagagagataagcc

SEQ ID NO: 20013 - DNA, 20 bp, synthetic construct
  misc_feature 1..20: note = Description of Artificial Sequence: Synthetic oligonucleotide
  misc_feature 1..20: note = Target: SCN10A; (-) strand; PAM type: NRG; PAM sequence: AAG
  source 1..20: mol_type = other DNA
acggaggcaggtagagagat

SEQ ID NO: 20014 - DNA, 20 bp, synthetic construct
  misc_feature 1..20: note = Description of Artificial Sequence: Synthetic oligonucleotide
  misc_feature 1..20: note = Target: SCN10A; (-) strand; PAM type: NRG; PAM sequence: GAG
  source 1..20: mol_type = other DNA
atttaacggaggcaggtaga

SEQ ID NO: 20015 - DNA, 20 bp, synthetic construct
  misc_feature 1..20: note = Description of Artificial Sequence: Synthetic oligonucleotide
  misc_feature 1..20: note = Target: SCN10A; (-) strand; PAM type: NRG; PAM sequence: GAG
  source 1..20: mol_type = other DNA
agatttaacggaggcaggta

SEQ ID NO: 20016 - DNA, 20 bp, synthetic construct
  misc_feature 1..20: note = Description of Artificial Sequence: Synthetic oligonucleotide
  misc_feature 1..20: note = Target: SCN10A; (-) strand; PAM type: NRG; PAM sequence: TAG
  source 1..20: mol_type = other DNA
ggagatttaacggaggcagg

SEQ ID NO: 20017 - DNA, 20 bp, synthetic construct
  misc_feature 1..20: note = Description of Artificial Sequence: Synthetic oligonucleotide
  misc_feature 1..20: note = Target: SCN10A; (-) strand; PAM type: NRG; PAM sequence: AGG
  source 1..20: mol_type = other DNA
catggagatttaacggaggc

SEQ ID NO: 20018 - DNA, 20 bp, synthetic construct
  misc_feature 1..20: note = Description of Artificial Sequence: Synthetic oligonucleotide
  misc_feature 1..20: note = Target: SCN10A; (-) strand; PAM type: NRG; PAM sequence: CAG
  source 1..20: mol_type = other DNA
acatggagatttaacggagg

SEQ ID NO: 20019 - DNA, 20 bp, synthetic construct
  misc_feature 1..20: note = Description of Artificial Sequence: Synthetic oligonucleotide
  misc_feature 1..20: note = Target: SCN10A; (-) strand; PAM type: NRG; PAM sequence: AGG
  source 1..20: mol_type = other DNA
tccacatggagatttaacgg

SEQ ID NO: 20020 - DNA, 20 bp, synthetic construct
  misc_feature 1..20: note = Description of Artificial Sequence: Synthetic oligonucleotide
  misc_feature 1..20: note = Target: SCN10A; (-) strand; PAM type: NRG; PAM sequence: GAG
  source 1..20: mol_type = other DNA
atccacatggagatttaacg

SEQ ID NO: 20021 - DNA, 20 bp, synthetic construct
  misc_feature 1..20: note = Description of Artificial Sequence: Synthetic oligonucleotide
  misc_feature 1..20: note = Target: SCN10A; (-) strand; PAM type: NRG; PAM sequence: CGG
  source 1..20: mol_type = other DNA
acatccacatggagatttaa

SEQ ID NO: 20022 - DNA, 20 bp, synthetic construct
  misc_feature 1..20: note = Description of Artificial Sequence: Synthetic oligonucleotide
  misc_feature 1..20: note = Target: SCN10A; (-) strand; PAM type: NRG; PAM sequence: GAG
  source 1..20: mol_type = other DNA
cacagttacacatccacatg

SEQ ID NO: 20023 - DNA, 20 bp, synthetic construct
  misc_feature 1..20: note = Description of Artificial Sequence: Synthetic oligonucleotide
  misc_feature 1..20: note = Target: SCN10A; (-) strand; PAM type: NRG; PAM sequence: TGG
  source 1..20: mol_type = other DNA
aacacagttacacatccaca

SEQ ID NO: 20024 - DNA, 20 bp, synthetic construct
  misc_feature 1..20: note = Description of Artificial Sequence: Synthetic oligonucleotide
  misc_feature 1..20: note = Target: SCN10A; (-) strand; PAM type: NRG; PAM sequence: CAG
  source 1..20: mol_type = other DNA
gccctccatcgaggtgaaca

SEQ ID NO: 20025 - DNA, 20 bp, synthetic construct
  misc_feature 1..20: note = Description of Artificial Sequence: Synthetic oligonucleotide
  misc_feature 1..20: note = Target: SCN10A; (-) strand; PAM type: NRG; PAM sequence: AGG
  source 1..20: mol_type = other DNA
taagaaattgccctccatcg

SEQ ID NO: 20026 - DNA, 20 bp, synthetic construct
  misc_feature 1..20: note = Description of Artificial Sequence: Synthetic oligonucleotide
  misc_feature 1..20: note = Target: SCN10A; (-) strand; PAM type: NRG; PAM sequence: GAG
  source 1..20: mol_type = other DNA
ctaagaaattgccctccatc

SEQ ID NO: 20027 - DNA, 20 bp, synthetic construct
  misc_feature 1..20: note = Description of Artificial Sequence: Synthetic oligonucleotide
  misc_feature 1..20: note = Target: SCN10A; (-) strand; PAM type: NRG; PAM sequence: AAG
  source 1..20: mol_type = other DNA
ttatagataaacctaaagct

SEQ ID NO: 20028 - DNA, 20 bp, synthetic construct
  misc_feature 1..20: note = Description of Artificial Sequence: Synthetic oligonucleotide
  misc_feature 1..20: note = Target: SCN10A; (-) strand; PAM type: NRG; PAM sequence: AAG
  source 1..20: mol_type = other DNA
ggaatttatagataaaccta

SEQ ID NO: 20029 - DNA, 20 bp, synthetic construct
  misc_feature 1..20: note = Description of Artificial Sequence: Synthetic oligonucleotide
  misc_feature 1..20: note = Target: SCN10A; (-) strand; PAM type: NRG; PAM sequence: TAG
  source 1..20: mol_type = other DNA
atgtcttgccgaggaattta

SEQ ID NO: 20030 - DNA, 20 bp, synthetic construct
  misc_feature 1..20: note = Description of Artificial Sequence: Synthetic oligonucleotide
  misc_feature 1..20: note = Target: SCN10A; (-) strand; PAM type: NRG; PAM sequence: AGG
  source 1..20: mol_type = other DNA
tcaagatgcatgtcttgccg

SEQ ID NO: 20031 - DNA, 20 bp, synthetic construct
  misc_feature 1..20: note = Description of Artificial Sequence: Synthetic oligonucleotide
  misc_feature 1..20: note = Target: SCN10A; (-) strand; PAM type: NRG; PAM sequence: GAG
  source 1..20: mol_type = other DNA
ttcaagatgcatgtcttgcc

SEQ ID NO: 20032 - DNA, 20 bp, synthetic construct
  misc_feature 1..20: note = Description of Artificial Sequence: Synthetic oligonucleotide
  misc_feature 1..20: note = Target: SCN10A; (-) strand; PAM type: NRG; PAM sequence: AAG
  source 1..20: mol_type = other DNA
acataggctgatatctgttc

SEQ ID NO: 20033 - DNA, 20 bp, synthetic construct
  misc_feature 1..20: note = Description of Artificial Sequence: Synthetic oligonucleotide
  misc_feature 1..20: note = Target: SCN10A; (-) strand; PAM type: NRG; PAM sequence: AGG
  source 1..20: mol_type = other DNA
tcatctttctttgcccacat

SEQ ID NO: 20034 - DNA, 20 bp, synthetic construct
  misc_feature 1..20: note = Description of Artificial Sequence: Synthetic oligonucleotide
  misc_feature 1..20: note = Target: SCN10A; (-) strand; PAM type: NRG; PAM sequence: TAG
  source 1..20: mol_type = other DNA
atcatctttctttgcccaca

SEQ ID NO: 20035 - DNA, 20 bp, synthetic construct
  misc_feature 1..20: note = Description of Artificial Sequence: Synthetic oligonucleotide
  misc_feature 1..20: note = Target: SCN10A; (-) strand; PAM type: NRG; PAM sequence: TGG
  source 1..20: mol_type = other DNA
tccattattattataaacaa

SEQ ID NO: 20036 - DNA, 20 bp, synthetic construct
  misc_feature 1..20: note = Description of Artificial Sequence: Synthetic oligonucleotide
  misc_feature 1..20: note = Target: SCN10A; (-) strand; PAM type: NRG; PAM sequence: CAG
  source 1..20: mol_type = other DNA
cacaatgtattatgctttat

SEQ ID NO: 20037 - DNA, 20 bp, synthetic construct
  misc_feature 1..20: note = Description of Artificial Sequence: Synthetic oligonucleotide
  misc_feature 1..20: note = Target: SCN10A; (-) strand; PAM type: NRG; PAM sequence: AAG
  source 1..20: mol_type = other DNA
gcaatgttctatgcatatat

SEQ ID NO: 20038 - DNA, 20 bp, synthetic construct
  misc_feature 1..20: note = Description of Artificial Sequence: Synthetic oligonucleotide
  misc_feature 1..20: note = Target: SCN10A; (-) strand; PAM type: NRG; PAM sequence: AAG
  source 1..20: mol_type = other DNA
cagtttatcttatattcttc

SEQ ID NO: 20039 - DNA, 20 bp, synthetic construct
  misc_feature 1..20: note = Description of Artificial Sequence: Synthetic oligonucleotide
  misc_feature 1..20: note = Target: SCN10A; (-) strand; PAM type: NRG; PAM sequence: CAG
  source 1..20: mol_type = other DNA
ggtgcacccccctcccactc

SEQ ID NO: 20040 - DNA, 20 bp, synthetic construct
  misc_feature 1..20: note = Description of Artificial Sequence: Synthetic oligonucleotide
  misc_feature 1..20: note = Target: SCN10A; (-) strand; PAM type: NRG; PAM sequence: TGG
  source 1..20: mol_type = other DNA
cttcctgctccccagactcc

SEQ ID NO: 20041 - DNA, 20 bp, synthetic construct
  misc_feature 1..20: note = Description of Artificial Sequence: Synthetic oligonucleotide
  misc_feature 1..20: note = Target: SCN10A; (-) strand; PAM type: NRG; PAM sequence: CAG
  source 1..20: mol_type = other DNA
tatagacccttcctgctccc

SEQ ID NO: 20042 - DNA, 20 bp, synthetic construct
  misc_feature 1..20: note = Description of Artificial Sequence: Synthetic oligonucleotide
  misc_feature 1..20: note = Target: SCN10A; (-) strand; PAM type: NRG; PAM sequence: TAG
  source 1..20: mol_type = other DNA
actatgtctccttcccacta

SEQ ID NO: 20043 - DNA, 20 bp, synthetic construct
  misc_feature 1..20: note = Description of Artificial Sequence: Synthetic oligonucleotide
  misc_feature 1..20: note = Target: SCN10A; (-) strand; PAM type: NRG; PAM sequence: AAG
  source 1..20: mol_type = other DNA
aaaaaaaccctaaacactgc

SEQ ID NO: 20044 - DNA, 20 bp, synthetic construct
  misc_feature 1..20: note = Description of Artificial Sequence: Synthetic oligonucleotide
  misc_feature 1..20: note = Target: SCN10A; (-) strand; PAM type: NRG; PAM sequence: TAG
  source 1..20: mol_type = other DNA
actgatttttcaagtgcata

SEQ ID NO: 20045 - DNA, 20 bp, synthetic construct
  misc_feature 1..20: note = Description of Artificial Sequence: Synthetic oligonucleotide
  misc_feature 1..20: note = Target: SCN10A; (-) strand; PAM type: NRG; PAM sequence: AAG
  source 1..20: mol_type = other DNA
tttctctaaactgatttttc

SEQ ID NO: 20046 - DNA, 20 bp, synthetic construct
  misc_feature 1..20: note = Description of Artificial Sequence: Synthetic oligonucleotide
  misc_feature 1..20: note = Target: SCN10A; (-) strand; PAM type: NRG; PAM sequence: CAG
  source 1..20: mol_type = other DNA
tagcaaaatttgggggcaca

SEQ ID NO: 20047 - DNA, 20 bp, synthetic construct
  misc_feature 1..20: note = Description of Artificial Sequence: Synthetic oligonucleotide
  misc_feature 1..20: note = Target: SCN10A; (-) strand; PAM type: NRG; PAM sequence: GGG
  source 1..20: mol_type = other DNA
acactgttagcaaaatttgg

SEQ ID NO: 20048 - DNA, 20 bp, synthetic construct
  misc_feature 1..20: note = Description of Artificial Sequence: Synthetic oligonucleotide
  misc_feature 1..20: note = Target: SCN10A; (-) strand; PAM type: NRG; PAM sequence: GGG
  source 1..20: mol_type = other DNA
aacactgttagcaaaatttg

SEQ ID NO: 20049 - DNA, 20 bp, synthetic construct
  misc_feature 1..20: note = Description of Artificial Sequence: Synthetic oligonucleotide
  misc_feature 1..20: note = Target: SCN10A; (-) strand; PAM type: NRG; PAM sequence: GGG
  source 1..20: mol_type = other DNA
aaacactgttagcaaaattt

SEQ ID NO: 20050 - DNA, 20 bp, synthetic construct
  misc_feature 1..20: note = Description of Artificial Sequence: Synthetic oligonucleotide
  misc_feature 1..20: note = Target: SCN10A; (-) strand; PAM type: NRG; PAM sequence: TGG
  source 1..20: mol_type = other DNA
aaaacactgttagcaaaatt

SEQ ID NO: 20051 - DNA, 20 bp, synthetic construct
  misc_feature 1..20: note = Description of Artificial Sequence: Synthetic oligonucleotide
  misc_feature 1..20: note = Target: SCN10A; (-) strand; PAM type: NRG; PAM sequence: TAG
  source 1..20: mol_type = other DNA
ttatcaggaaaaaacactgt

SEQ ID NO: 20052 - DNA, 20 bp, synthetic construct
  misc_feature 1..20: note = Description of Artificial Sequence: Synthetic oligonucleotide
  misc_feature 1..20: note = Target: SCN10A; (-) strand; PAM type: NRG; PAM sequence: AGG
  source 1..20: mol_type = other DNA
atacacatttttaaattatc

SEQ ID NO: 20053 - DNA, 20 bp, synthetic construct
  misc_feature 1..20: note = Description of Artificial Sequence: Synthetic oligonucleotide
  misc_feature 1..20: note = Target: SCN10A; (-) strand; PAM type: NRG; PAM sequence: CAG
  source 1..20: mol_type = other DNA
catacacatttttaaattat

SEQ ID NO: 20054 - DNA, 20 bp, synthetic construct
  misc_feature 1..20: note = Description of Artificial Sequence: Synthetic oligonucleotide
  misc_feature 1..20: note = Target: SCN10A; (-) strand; PAM type: NRG; PAM sequence: AAG
  source 1..20: mol_type = other DNA
atgaagaaaattgaaaaaaa

SEQ ID NO: 20055 - DNA, 20 bp, synthetic construct
  misc_feature 1..20: note = Description of Artificial Sequence: Synthetic oligonucleotide
  misc_feature 1..20: note = Target: SCN10A; (-) strand; PAM type: NRG; PAM sequence: AAG
  source 1..20: mol_type = other DNA
aaatttaaaataaaaaaatg

SEQ ID NO: 20056 - DNA, 20 bp, synthetic construct
  misc_feature 1..20: note = Description of Artificial Sequence: Synthetic oligonucleotide
  misc_feature 1..20: note = Target: SCN10A; (-) strand; PAM type: NRG; PAM sequence: AAG
  source 1..20: mol_type = other DNA
cttaaagtataatttaaaaa

SEQ ID NO: 20057 - DNA, 20 bp, synthetic construct
  misc_feature 1..20: note = Description of Artificial Sequence: Synthetic oligonucleotide
  misc_feature 1..20: note = Target: SCN10A; (-) strand; PAM type: NRG; PAM sequence: AAG
  source 1..20: mol_type = other DNA
cacatttaccctaaaactta

SEQ ID NO: 20058 - DNA, 20 bp, synthetic construct
  misc_feature 1..20: note = Description of Artificial Sequence: Synthetic oligonucleotide
  misc_feature 1..20: note = Target: SCN10A; (-) strand; PAM type: NRG; PAM sequence: TGG
  source 1..20: mol_type = other DNA
gtaaggcatgtatgcatatg

SEQ ID NO: 20059 - DNA, 20 bp, synthetic construct
  misc_feature 1..20: note = Description of Artificial Sequence: Synthetic oligonucleotide
  misc_feature 1..20: note = Target: SCN10A; (-) strand; PAM type: NRG; PAM sequence: AGG
  source 1..20: mol_type = other DNA
tgagaaaagcttcatatgta

SEQ ID NO: 20060 - DNA, 20 bp, synthetic construct
  misc_feature 1..20: note = Description of Artificial Sequence: Synthetic oligonucleotide
  misc_feature 1..20: note = Target: SCN10A; (-) strand; PAM type: NRG; PAM sequence: AAG
  source 1..20: mol_type = other DNA
gtgagaaaagcttcatatgt

SEQ ID NO: 20061 - DNA, 20 bp, synthetic construct
  misc_feature 1..20: note = Description of Artificial Sequence: Synthetic oligonucleotide
  misc_feature 1..20: note = Target: SCN10A; (-) strand; PAM type: NRG; PAM sequence: AAG
  source 1..20: mol_type = other DNA
tccaagccttgtagtgagaa

SEQ ID NO: 20062 - DNA, 20 bp, synthetic construct
  misc_feature 1..20: note = Description of Artificial Sequence: Synthetic oligonucleotide
  misc_feature 1..20: note = Target: SCN10A; (-) strand; PAM type: NRG; PAM sequence: GAG
  source 1..20: mol_type = other DNA
tattttccaagccttgtagt

SEQ ID NO: 20063 - DNA, 20 bp, synthetic construct
  misc_feature 1..20: note = Description of Artificial Sequence: Synthetic oligonucleotide
  misc_feature 1..20: note = Target: SCN10A; (-) strand; PAM type: NRG; PAM sequence: TAG
  source 1..20: mol_type = other DNA
aaggtattttccaagccttg

SEQ ID NO: 20064 - DNA, 20 bp, synthetic construct
  misc_feature 1..20: note = Description of Artificial Sequence: Synthetic oligonucleotide
  misc_feature 1..20: note = Target: SCN10A; (-) strand; PAM type: NRG; PAM sequence: AAG
  source 1..20: mol_type = other DNA
acatggagaaggtattttcc

SEQ ID NO: 20065 - DNA, 20 bp, synthetic construct
  misc_feature 1..20: note = Description of Artificial Sequence: Synthetic oligonucleotide
  misc_feature 1..20: note = Target: SCN10A; (-) strand; PAM type: NRG; PAM sequence: AGG
  source 1..20: mol_type = other DNA
gaaagaaaaaaacatggaga

SEQ ID NO: 20066 - DNA, 20 bp, synthetic construct
  misc_feature 1..20: note = Description of Artificial Sequence: Synthetic oligonucleotide
  misc_feature 1..20: note = Target: SCN10A; (-) strand; PAM type: NRG; PAM sequence: AAG
  source 1..20: mol_type = other DNA
agaaagaaaaaaacatggag

SEQ ID NO: 20067 - DNA, 20 bp, synthetic construct
  misc_feature 1..20: note = Description of Artificial Sequence: Synthetic oligonucleotide
  misc_feature 1..20: note = Target: SCN10A; (-) strand; PAM type: NRG; PAM sequence: GAG
  source 1..20: mol_type = other DNA
aaaagaaagaaaaaaacatg

SEQ ID NO: 20068 - DNA, 20 bp, synthetic construct
  misc_feature 1..20: note = Description of Artificial Sequence: Synthetic oligonucleotide
  misc_feature 1..20: note = Target: SCN10A; (-) strand; PAM type: NRG; PAM sequence: TGG
  source 1..20: mol_type = other DNA
acaaaagaaagaaaaaaaca

SEQ ID NO: 20069 - DNA, 20 bp, synthetic construct
  misc_feature 1..20: note = Description of Artificial Sequence: Synthetic oligonucleotide
  misc_feature 1..20: note = Target: SCN10A; (-) strand; PAM type: NRG; PAM sequence: AAG
  source 1..20: mol_type = other DNA
aaaagtgaaactacaaaaga

SEQ ID NO: 20070 - DNA, 20 bp, synthetic construct
  misc_feature 1..20: note = Description of Artificial Sequence: Synthetic oligonucleotide
  misc_feature 1..20: note = Target: SCN10A; (-) strand; PAM type: NRG; PAM sequence: AAG
  source 1..20: mol_type = other DNA
tgaaaaaagtgaaactacaa

SEQ ID NO: 20071 - DNA, 20 bp, synthetic construct
  misc_feature 1..20: note = Description of Artificial Sequence: Synthetic oligonucleotide
  misc_feature 1..20: note = Target: SCN10A; (-) strand; PAM type: NRG; PAM sequence: AAG
  source 1..20: mol_type = other DNA
accaaagttttaagtgaaaa

SEQ ID NO: 20072 - DNA, 20 bp, synthetic construct
  misc_feature 1..20: note = Description of Artificial Sequence: Synthetic oligonucleotide
  misc_feature 1..20: note = Target: SCN10A; (-) strand; PAM type: NRG; PAM sequence: AAG
  source 1..20: mol_type = other DNA
ttcaaatgcaccaaagtttt

SEQ ID NO: 20073 - DNA, 20 bp, synthetic construct
  misc_feature 1..20: note = Description of Artificial Sequence: Synthetic oligonucleotide
  misc_feature 1..20: note = Target: SCN10A; (-) strand; PAM type: NRG; PAM sequence: AAG
  source 1..20: mol_type = other DNA
aataaatttcaaatgcacca

SEQ ID NO: 20074 - DNA, 20 bp, synthetic construct
  misc_feature 1..20: note = Description of Artificial Sequence: Synthetic oligonucleotide
  misc_feature 1..20: note = Target: SCN10A; (-) strand; PAM type: NRG; PAM sequence: AGG
  source 1..20: mol_type = other DNA
tgatataaataatcagagac

SEQ ID NO: 20075 - DNA, 20 bp, synthetic construct
  misc_feature 1..20: note = Description of Artificial Sequence: Synthetic oligonucleotide
  misc_feature 1..20: note = Target: SCN10A; (-) strand; PAM type: NRG; PAM sequence: CAG
  source 1..20: mol_type = other DNA
ttgatataaataatcagaga

SEQ ID NO: 20076 - DNA, 20 bp, synthetic construct
  misc_feature 1..20: note = Description of Artificial Sequence: Synthetic oligonucleotide
  misc_feature 1..20: note = Target: SCN10A; (-) strand; PAM type: NRG; PAM sequence: GAG
  source 1..20: mol_type = other DNA
aatgttgatataaataatca

SEQ ID NO: 20077 - DNA, 20 bp, synthetic construct
  misc_feature 1..20: note = Description of Artificial Sequence: Synthetic oligonucleotide
  misc_feature 1..20: note = Target: SCN10A; (-) strand; PAM type: NRG; PAM sequence: CAG
  source 1..20: mol_type = other DNA
gtaatgttgatataaataat

SEQ ID NO: 20078 - DNA, 20 bp, synthetic construct
  misc_feature 1..20: note = Description of Artificial Sequence: Synthetic oligonucleotide
  misc_feature 1..20: note = Target: SCN10A; (-) strand; PAM type: NRG; PAM sequence: AAG
  source 1..20: mol_type = other DNA
aaaatgaaaaattattcaat

SEQ ID NO: 20079 - DNA, 20 bp, synthetic construct
  misc_feature 1..20: note = Description of Artificial Sequence: Synthetic oligonucleotide
  misc_feature 1..20: note = Target: SCN10A; (-) strand; PAM type: NRG; PAM sequence: GGG
  source 1..20: mol_type = other DNA
aaaatgacatttcaaatctt

SEQ ID NO: 20080 - DNA, 20 bp, synthetic construct
  misc_feature 1..20: note = Description of Artificial Sequence: Synthetic oligonucleotide
  misc_feature 1..20: note = Target: SCN10A; (-) strand; PAM type: NRG; PAM sequence: TGG
  source 1..20: mol_type = other DNA
aaaaatgacatttcaaatct

SEQ ID NO: 20081 - DNA, 20 bp, synthetic construct
  misc_feature 1..20: note = Description of Artificial Sequence: Synthetic oligonucleotide
  misc_feature 1..20: note = Target: SCN10A; (-) strand; PAM type: NRG; PAM sequence: TGG
  source 1..20: mol_type = other DNA
tgaaaacacatgaacataaa

SEQ ID NO: 20082 - DNA, 20 bp, synthetic construct
  misc_feature 1..20: note = Description of Artificial Sequence: Synthetic oligonucleotide
  misc_feature 1..20: note = Target: SCN10A; (-) strand; PAM type: NRG; PAM sequence: TGG
  source 1..20: mol_type = other DNA
tctgatctgtggaagagaaa

SEQ ID NO: 20083 - DNA, 20 bp, synthetic construct
  misc_feature 1..20: note = Description of Artificial Sequence: Synthetic oligonucleotide
  misc_feature 1..20: note = Target: SCN10A; (-) strand; PAM type: NRG; PAM sequence: GAG
  source 1..20: mol_type = other DNA
aaatagtctgatctgtggaa

SEQ ID NO: 20084 - DNA, 20 bp, synthetic construct
  misc_feature 1..20: note = Description of Artificial Sequence: Synthetic oligonucleotide
  misc_feature 1..20: note = Target: SCN10A; (-) strand; PAM type: NRG; PAM sequence: AAG
  source 1..20: mol_type = other DNA
ataaatagtctgatctgtgg

SEQ ID NO: 20085 - DNA, 20 bp, synthetic construct
  misc_feature 1..20: note = Description of Artificial Sequence: Synthetic oligonucleotide
  misc_feature 1..20: note = Target: SCN10A; (-) strand; PAM type: NRG; PAM sequence: TGG
  source 1..20: mol_type = other DNA
aaaataaatagtctgatctg

SEQ ID NO: 20086 - DNA, 20 bp, synthetic construct
  misc_feature 1..20: note = Description of Artificial Sequence: Synthetic oligonucleotide
  misc_feature 1..20: note = Target: SCN10A; (-) strand; PAM type: NRG; PAM sequence: TAG
  source 1..20: mol_type = other DNA
agcatgacagtgaaaataaa

SEQ ID NO: 20087 - DNA, 20 bp, synthetic construct
  misc_feature 1..20: note = Description of Artificial Sequence: Synthetic oligonucleotide
  misc_feature 1..20: note = Target: SCN10A; (-) strand; PAM type: NRG; PAM sequence: CAG
  source 1..20: mol_type = other DNA
cagtgattaaaacagcatga

SEQ ID NO: 20088 - DNA, 20 bp, synthetic construct
  misc_feature 1..20: note = Description of Artificial Sequence: Synthetic oligonucleotide
  misc_feature 1..20: note = Target: SCN10A; (-) strand; PAM type: NRG; PAM sequence: CAG
  source 1..20: mol_type = other DNA
aatccagtcagtgattaaaa

SEQ ID NO: 20089 - DNA, 20 bp, synthetic construct
  misc_feature 1..20: note = Description of Artificial Sequence: Synthetic oligonucleotide
  misc_feature 1..20: note = Target: SCN10A; (-) strand; PAM type: NRG; PAM sequence: CAG
  source 1..20: mol_type = other DNA
tgtagtttctaaaatccagt

SEQ ID NO: 20090 - DNA, 20 bp, synthetic construct
  misc_feature 1..20: note = Description of Artificial Sequence: Synthetic oligonucleotide
  misc_feature 1..20: note = Target: SCN10A; (-) strand; PAM type: NRG; PAM sequence: CAG
  source 1..20: mol_type = other DNA
catctgtagtttctaaaatc

SEQ ID NO: 20091 - DNA, 20 bp, synthetic construct
  misc_feature 1..20: note = Description of Artificial Sequence: Synthetic oligonucleotide
  misc_feature 1..20: note = Target: SCN10A; (-) strand; PAM type: NRG; PAM sequence: TAG
  source 1..20: mol_type = other DNA
tttgccagtttggacatctg

SEQ ID NO: 20092 - DNA, 20 bp, synthetic construct
  misc_feature 1..20: note = Description of Artificial Sequence: Synthetic oligonucleotide
  misc_feature 1..20: note = Target: SCN10A; (-) strand; PAM type: NRG; PAM sequence: TGG
  source 1..20: mol_type = other DNA
agaactatgctttgccagtt

SEQ ID NO: 20093 - DNA, 20 bp, synthetic construct
  misc_feature 1..20: note = Description of Artificial Sequence: Synthetic oligonucleotide
  misc_feature 1..20: note = Target: SCN10A; (-) strand; PAM type: NRG; PAM sequence: CAG
  source 1..20: mol_type = other DNA
tttagagaactatgctttgc

SEQ ID NO: 20094 - DNA, 20 bp, synthetic construct
  misc_feature 1..20: note = Description of Artificial Sequence: Synthetic oligonucleotide
  misc_feature 1..20: note = Target: SCN10A; (-) strand; PAM type: NRG; PAM sequence: GAG
  source 1..20: mol_type = other DNA
aggatgtgccaacttcttta

SEQ ID NO: 20095 - DNA, 20 bp, synthetic construct
  misc_feature 1..20: note = Description of Artificial Sequence: Synthetic oligonucleotide
  misc_feature 1..20: note = Target: SCN10A; (-) strand; PAM type: NRG; PAM sequence: TAG
  source 1..20: mol_type = other DNA
ccaggatgtgccaacttctt

SEQ ID NO: 20096 - DNA, 20 bp, synthetic construct
  misc_feature 1..20: note = Description of Artificial Sequence: Synthetic oligonucleotide
  misc_feature 1..20: note = Target: SCN10A; (-) strand; PAM type: NRG; PAM sequence: AGG
  source 1..20: mol_type = other DNA
ggattgttgattttggtccc

SEQ ID NO: 20097 - DNA, 20 bp, synthetic construct
  misc_feature 1..20: note = Description of Artificial Sequence: Synthetic oligonucleotide
  misc_feature 1..20: note = Target: SCN10A; (-) strand; PAM type: NRG; PAM sequence: CAG
  source 1..20: mol_type = other DNA
gggattgttgattttggtcc

SEQ ID NO: 20098 - DNA, 20 bp, synthetic construct
  misc_feature 1..20: note = Description of Artificial Sequence: Synthetic oligonucleotide
  misc_feature 1..20: note = Target: SCN10A; (-) strand; PAM type: NRG; PAM sequence: TGG
  source 1..20: mol_type = other DNA
caaacagggattgttgattt

SEQ ID NO: 20099 - DNA, 20 bp, synthetic construct
  misc_feature 1..20: note = Description of Artificial Sequence: Synthetic oligonucleotide
  misc_feature 1..20: note = Target: SCN10A; (-) strand; PAM type: NRG; PAM sequence: GGG
  source 1..20: mol_type = other DNA
tcttgcttttgttccaaaca

SEQ ID NO: 20100 - DNA, 20 bp, synthetic construct
  misc_feature 1..20: note = Description of Artificial Sequence: Synthetic oligonucleotide
  misc_feature 1..20: note = Target: SCN10A; (-) strand; PAM type: NRG; PAM sequence: AGG
  source 1..20: mol_type = other DNA
ttcttgcttttgttccaaac

SEQ ID NO: 20101 - DNA, 20 bp, synthetic construct
  misc_feature 1..20: note = Description of Artificial Sequence: Synthetic oligonucleotide
  misc_feature 1..20: note = Target: SCN10A; (-) strand; PAM type: NRG; PAM sequence: CAG
  source 1..20: mol_type = other DNA
gttcttgcttttgttccaaa

SEQ ID NO: 20102 - DNA, 20 bp, synthetic construct
  misc_feature 1..20: note = Description of Artificial Sequence: Synthetic oligonucleotide
  misc_feature 1..20: note = Target: SCN10A; (-) strand; PAM type: NRG; PAM sequence: AAG
  source 1..20: mol_type = other DNA
gtgccaaaataggtccaggg

SEQ ID NO: 20103 - DNA, 20 bp, synthetic construct
  misc_feature 1..20: note = Description of Artificial Sequence: Synthetic oligonucleotide
  misc_feature 1..20: note = Target: SCN10A; (-) strand; PAM type: NRG; PAM sequence: GGG
  source 1..20: mol_type = other DNA
ttagtgccaaaataggtcca

SEQ ID NO: 20104 - DNA, 20 bp, synthetic construct
  misc_feature 1..20: note = Description of Artificial Sequence: Synthetic oligonucleotide
  misc_feature 1..20: note = Target: SCN10A; (-) strand; PAM type: NRG; PAM sequence: AGG
  source 1..20: mol_type = other DNA
tttagtgccaaaataggtcc

SEQ ID NO: 20105 - DNA, 20 bp, synthetic construct
  misc_feature 1..20: note = Description of Artificial Sequence: Synthetic oligonucleotide
  misc_feature 1..20: note = Target: SCN10A; (-) strand; PAM type: NRG; PAM sequence: CAG
  source 1..20: mol_type = other DNA
ttttagtgccaaaataggtc

SEQ ID NO: 20106 - DNA, 20 bp, synthetic construct
  misc_feature 1..20: note = Description of Artificial Sequence: Synthetic oligonucleotide
  misc_feature 1..20: note = Target: SCN10A; (-) strand; PAM type: NRG; PAM sequence: AGG
  source 1..20: mol_type = other DNA
cttctttttagtgccaaaat

SEQ ID NO: 20107 - DNA, 20 bp, synthetic construct
  misc_feature 1..20: note = Description of Artificial Sequence: Synthetic oligonucleotide
  misc_feature 1..20: note = Target: SCN10A; (-) strand; PAM type: NRG; PAM sequence: TAG
  source 1..20: mol_type = other DNA
gcttctttttagtgccaaaa

SEQ ID NO: 20108 - DNA, 20 bp, synthetic construct
  misc_feature 1..20: note = Description of Artificial Sequence: Synthetic oligonucleotide
  misc_feature 1..20: note = Target: SCN10A; (-) strand; PAM type: NRG; PAM sequence: TAG
  source 1..20: mol_type = other DNA
ctacttcctgtgcttctttt

SEQ ID NO: 20109 - DNA, 20 bp, synthetic construct
  misc_feature 1..20: note = Description of Artificial Sequence: Synthetic oligonucleotide
  misc_feature 1..20: note = Target: SCN10A; (-) strand; PAM type: NRG; PAM sequence: AAG
  source 1..20: mol_type = other DNA
ctgccaaaatggcacatcta

SEQ ID NO: 20110 - DNA, 20 bp, synthetic construct
  misc_feature 1..20: note = Description of Artificial Sequence: Synthetic oligonucleotide
  misc_feature 1..20: note = Target: SCN10A; (-) strand; PAM type: NRG; PAM sequence: TGG
  source 1..20: mol_type = other DNA
gtggctgcttcctgccaaaa

SEQ ID NO: 20111 - DNA, 20 bp, synthetic construct
  misc_feature 1..20: note = Description of Artificial Sequence: Synthetic oligonucleotide
  misc_feature 1..20: note = Target: SCN10A; (-) strand; PAM type: NRG; PAM sequence: TGG
  source 1..20: mol_type = other DNA
ttcccatcatgcctcacagg

SEQ ID NO: 20112 - DNA, 20 bp, synthetic construct
  misc_feature 1..20: note = Description of Artificial Sequence: Synthetic oligonucleotide
  misc_feature 1..20: note = Target: SCN10A; (-) strand; PAM type: NRG; PAM sequence: AGG
  source 1..20: mol_type = other DNA
cttttcccatcatgcctcac

SEQ ID NO: 20113 - DNA, 20 bp, synthetic construct
  misc_feature 1..20: note = Description of Artificial Sequence: Synthetic oligonucleotide
  misc_feature 1..20: note = Target: SCN10A; (-) strand; PAM type: NRG; PAM sequence: CAG
  source 1..20: mol_type = other DNA
tcttttcccatcatgcctca

SEQ ID NO: 20114 - DNA, 20 bp, synthetic construct
  misc_feature 1..20: note = Description of Artificial Sequence: Synthetic oligonucleotide
  misc_feature 1..20: note = Target: SCN10A; (-) strand; PAM type: NRG; PAM sequence: AAG
  source 1..20: mol_type = other DNA
caatgtcaaggctgtttaca

SEQ ID NO: 20115 - DNA, 20 bp, synthetic construct
  misc_feature 1..20: note = Description of Artificial Sequence: Synthetic oligonucleotide
  misc_feature 1..20: note = Target: SCN10A; (-) strand; PAM type: NRG; PAM sequence: AGG
  source 1..20: mol_type = other DNA
aatcaagttcaacaatgtca

SEQ ID NO: 20116 - DNA, 20 bp, synthetic construct
  misc_feature 1..20: note = Description of Artificial Sequence: Synthetic oligonucleotide
  misc_feature 1..20: note = Target: SCN10A; (-) strand; PAM type: NRG; PAM sequence: AAG
  source 1..20: mol_type = other DNA
caatcaagttcaacaatgtc

SEQ ID NO: 20117 - DNA, 20 bp, synthetic construct
  misc_feature 1..20: note = Description of Artificial Sequence: Synthetic oligonucleotide
  misc_feature 1..20: note = Target: SCN10A; (-) strand; PAM type: NRG; PAM sequence: AAG
  source 1..20: mol_type = other DNA
ctgtgtctctgcaatcaatc

SEQ ID NO: 20118 - DNA, 20 bp, synthetic construct
  misc_feature 1..20: note = Description of Artificial Sequence: Synthetic oligonucleotide
  misc_feature 1..20: note = Target: SCN10A; (-) strand; PAM type: NRG; PAM sequence: TAG
  source 1..20: mol_type = other DNA
agctggcaagtagatacttt

SEQ ID NO: 20119 - DNA, 20 bp, synthetic construct
  misc_feature 1..20: note = Description of Artificial Sequence: Synthetic oligonucleotide
  misc_feature 1..20: note = Target: SCN10A; (-) strand; PAM type: NRG; PAM sequence: TAG
  source 1..20: mol_type = other DNA
tcatgttttaagctggcaag

SEQ ID NO: 20120 - DNA, 20 bp, synthetic construct
  misc_feature 1..20: note = Description of Artificial Sequence: Synthetic oligonucleotide
  misc_feature 1..20: note = Target: SCN10A; (-) strand; PAM type: NRG; PAM sequence: AAG
  source 1..20: mol_type = other DNA
tggtcatgttttaagctggc

SEQ ID NO: 20121 - DNA, 20 bp, synthetic construct
  misc_feature 1..20: note = Description of Artificial Sequence: Synthetic oligonucleotide
  misc_feature 1..20: note = Target: SCN10A; (-) strand; PAM type: NRG; PAM sequence: TGG
  source 1..20: mol_type = other DNA
gccatggtcatgttttaagc

SEQ ID NO: 20122 - DNA, 20 bp, synthetic construct
  misc_feature 1..20: note = Description of Artificial Sequence: Synthetic oligonucleotide
  misc_feature 1..20: note = Target: SCN10A; (-) strand; PAM type: NRG; PAM sequence: AAG
  source 1..20: mol_type = other DNA
tggggccatggtcatgtttt

SEQ ID NO: 20123 - DNA, 20 bp, synthetic construct
  misc_feature 1..20: note = Description of Artificial Sequence: Synthetic oligonucleotide
  misc_feature 1..20: note = Target: SCN10A; (-) strand; PAM type: NRG; PAM sequence: TGG
  source 1..20: mol_type = other DNA
atccttttgaggtggggcca

SEQ ID NO: 20124 - DNA, 20 bp, synthetic construct
  misc_feature 1..20: note = Description of Artificial Sequence: Synthetic oligonucleotide
  misc_feature 1..20: note = Target: SCN10A; (-) strand; PAM type: NRG; PAM sequence: GGG
  source 1..20: mol_type = other DNA
taggagatccttttgaggtg

SEQ ID NO: 20125 - DNA, 20 bp, synthetic construct
  misc_feature 1..20: note = Description of Artificial Sequence: Synthetic oligonucleotide
  misc_feature 1..20: note = Target: SCN10A; (-) strand; PAM type: NRG; PAM sequence: GGG
  source 1..20: mol_type = other DNA
ataggagatccttttgaggt

SEQ ID NO: 20126 - DNA, 20 bp, synthetic construct
  misc_feature 1..20: note = Description of Artificial Sequence: Synthetic oligonucleotide
  misc_feature 1..20: note = Target: SCN10A; (-) strand; PAM type: NRG; PAM sequence: TGG
  source 1..20: mol_type = other DNA
tataggagatccttttgagg

SEQ ID NO: 20127 - DNA, 20 bp, synthetic construct
  misc_feature 1..20: note = Description of Artificial Sequence: Synthetic oligonucleotide
  misc_feature 1..20: note = Target: SCN10A; (-) strand; PAM type: NRG; PAM sequence: AGG
  source 1..20: mol_type = other DNA
ttatataggagatccttttg

SEQ ID NO: 20128 - DNA, 20 bp, synthetic construct
  misc_feature 1..20: note = Description of Artificial Sequence: Synthetic oligonucleotide
  misc_feature 1..20: note = Target: SCN10A; (-) strand; PAM type: NRG; PAM sequence: GAG
  source 1..20: mol_type = other DNA
tttatataggagatcctttt

SEQ ID NO: 20129 - DNA, 20 bp, synthetic construct
  misc_feature 1..20: note = Description of Artificial Sequence: Synthetic oligonucleotide
  misc_feature 1..20: note = Target: SCN10A; (-) strand; PAM type: NRG; PAM sequence: GAG
  source 1..20: mol_type = other DNA
ctgttatcaattttatatag

SEQ ID NO: 20130 - DNA, 20 bp, synthetic construct
  misc_feature 1..20: note = Description of Artificial Sequence: Synthetic oligonucleotide
  misc_feature 1..20: note = Target: SCN10A; (-) strand; PAM type: NRG; PAM sequence: AGG
  source 1..20: mol_type = other DNA
ctctgttatcaattttatat

SEQ ID NO: 20131 - DNA, 20 bp, synthetic construct
  misc_feature 1..20: note = Description of Artificial Sequence: Synthetic oligonucleotide
  misc_feature 1..20: note = Target: SCN10A; (-) strand; PAM type: NRG; PAM sequence: TAG
  source 1..20: mol_type = other DNA
tctctgttatcaattttata

SEQ ID NO: 20132 - DNA, 20 bp, synthetic construct
  misc_feature 1..20: note = Description of Artificial Sequence: Synthetic oligonucleotide
  misc_feature 1..20: note = Target: SCN10A; (-) strand; PAM type: NRG; PAM sequence: AAG
  source 1..20: mol_type = other DNA
gtaacaggatgaagggagga

SEQ ID NO: 20133 - DNA, 20 bp, synthetic construct
  misc_feature 1..20: note = Description of Artificial Sequence: Synthetic oligonucleotide
  misc_feature 1..20: note = Target: SCN10A; (-) strand; PAM type: NRG; PAM sequence: AGG
  source 1..20: mol_type = other DNA
aagcgtaacaggatgaaggg

SEQ ID NO: 20134 - DNA, 20 bp, synthetic construct
  misc_feature 1..20: note = Description of Artificial Sequence: Synthetic oligonucleotide
  misc_feature 1..20: note = Target: SCN10A; (-) strand; PAM type: NRG; PAM sequence: GAG
  source 1..20: mol_type = other DNA
taagcgtaacaggatgaagg

SEQ ID NO: 20135 - DNA, 20 bp, synthetic construct
  misc_feature 1..20: note = Description of Artificial Sequence: Synthetic oligonucleotide
  misc_feature 1..20: note = Target: SCN10A; (-) strand; PAM type: NRG; PAM sequence: GGG
  source 1..20: mol_type = other DNA
tttaagcgtaacaggatgaa

SEQ ID NO: 20136 - DNA, 20 bp, synthetic construct
  misc_feature 1..20: note = Description of Artificial Sequence: Synthetic oligonucleotide
  misc_feature 1..20: note = Target: SCN10A; (-) strand; PAM type: NRG; PAM sequence: AGG
  source 1..20: mol_type = other DNA
ctttaagcgtaacaggatga

SEQ ID NO: 20137 - DNA, 20 bp, synthetic construct
  misc_feature 1..20: note = Description of Artificial Sequence: Synthetic oligonucleotide
  misc_feature 1..20: note = Target: SCN10A; (-) strand; PAM type: NRG; PAM sequence: AAG
  source 1..20: mol_type = other DNA
tctttaagcgtaacaggatg

SEQ ID NO: 20138 - DNA, 20 bp, synthetic construct
  misc_feature 1..20: note = Description of Artificial Sequence: Synthetic oligonucleotide
  misc_feature 1..20: note = Target: SCN10A; (-) strand; PAM type: NRG; PAM sequence: AGG
  source 1..20: mol_type = other DNA
gggacctctttaagcgtaac

SEQ ID NO: 20139 - DNA, 20 bp, synthetic construct
  misc_feature 1..20: note = Description of Artificial Sequence: Synthetic oligonucleotide
  misc_feature 1..20: note = Target: SCN10A; (-) strand; PAM type: NRG; PAM sequence: CAG
  source 1..20: mol_type = other DNA
ggggacctctttaagcgtaa

SEQ ID NO: 20140 - DNA, 20 bp, synthetic construct
  misc_feature 1..20: note = Description of Artificial Sequence: Synthetic oligonucleotide
  misc_feature 1..20: note = Target: SCN10A; (-) strand; PAM type: NRG; PAM sequence: AAG
  source 1..20: mol_type = other DNA
aggagcagggggacctcttt

SEQ ID NO: 20141 - DNA, 20 bp, synthetic construct
  misc_feature 1..20: note = Description of Artificial Sequence: Synthetic oligonucleotide
  misc_feature 1..20: note = Target: SCN10A; (-) strand; PAM type: NRG; PAM sequence: GGG
  source 1..20: mol_type = other DNA
ctggtgttaacaggagcagg

SEQ ID NO: 20142 - DNA, 20 bp, synthetic construct
  misc_feature 1..20: note = Description of Artificial Sequence: Synthetic oligonucleotide
  misc_feature 1..20: note = Target: SCN10A; (-) strand; PAM type: NRG; PAM sequence: GGG
  source 1..20: mol_type = other DNA
actggtgttaacaggagcag

SEQ ID NO: 20143 - DNA, 20 bp, synthetic construct
  misc_feature 1..20: note = Description of Artificial Sequence: Synthetic oligonucleotide
  misc_feature 1..20: note = Target: SCN10A; (-) strand; PAM type: NRG; PAM sequence: GGG
  source 1..20: mol_type = other DNA
cactggtgttaacaggagca

SEQ ID NO: 20144 - DNA, 20 bp, synthetic construct
  misc_feature 1..20: note = Description of Artificial Sequence: Synthetic oligonucleotide
  misc_feature 1..20: note = Target: SCN10A; (-) strand; PAM type: NRG; PAM sequence: AGG
  source 1..20: mol_type = other DNA
acactggtgttaacaggagc

SEQ ID NO: 20145 - DNA, 20 bp, synthetic construct
  misc_feature 1..20: note = Description of Artificial Sequence: Synthetic oligonucleotide
  misc_feature 1..20: note = Target: SCN10A; (-) strand; PAM type: NRG; PAM sequence: CAG
  source 1..20: mol_type = other DNA
gacactggtgttaacaggag

SEQ ID NO: 20146 - DNA, 20 bp, synthetic construct
  misc_feature 1..20: note = Description of Artificial Sequence: Synthetic oligonucleotide
  misc_feature 1..20: note = Target: SCN10A; (-) strand; PAM type: NRG; PAM sequence: GAG
  source 1..20: mol_type = other DNA
ggagacactggtgttaacag

SEQ ID NO: 20147 - DNA, 20 bp, synthetic construct
  misc_feature 1..20: note = Description of Artificial Sequence: Synthetic oligonucleotide
  misc_feature 1..20: note = Target: SCN10A; (-) strand; PAM type: NRG; PAM sequence: AGG
  source 1..20: mol_type = other DNA
gtggagacactggtgttaac

SEQ ID NO: 20148 - DNA, 20 bp, synthetic construct
  misc_feature 1..20: note = Description of Artificial Sequence: Synthetic oligonucleotide
  misc_feature 1..20: note = Target: SCN10A; (-) strand; PAM type: NRG; PAM sequence: CAG
  source 1..20: mol_type = other DNA
agtggagacactggtgttaa

SEQ ID NO: 20149 - DNA, 20 bp, synthetic construct
  misc_feature 1..20: note = Description of Artificial Sequence: Synthetic oligonucleotide
  misc_feature 1..20: note = Target: SCN10A; (-) strand; PAM type: NRG; PAM sequence: TGG
  source 1..20: mol_type = other DNA
agaatgcacagtggagacac

SEQ ID NO: 20150 - DNA, 20 bp, synthetic construct
  misc_feature 1..20: note = Description of Artificial Sequence: Synthetic oligonucleotide
  misc_feature 1..20: note = Target: SCN10A; (-) strand; PAM type: NRG; PAM sequence: GAG
  source 1..20: mol_type = other DNA
gcaggagagaatgcacagtg

SEQ ID NO: 20151 - DNA, 20 bp, synthetic construct
  misc_feature 1..20: note = Description of Artificial Sequence: Synthetic oligonucleotide
  misc_feature 1..20: note = Target: SCN10A; (-) strand; PAM type: NRG; PAM sequence: TGG
  source 1..20: mol_type = other DNA
tggcaggagagaatgcacag

SEQ ID NO: 20152 - DNA, 20 bp, synthetic construct
  misc_feature 1..20: note = Description of Artificial Sequence: Synthetic oligonucleotide
  misc_feature 1..20: note = Target: SCN10A; (-) strand; PAM type: NRG; PAM sequence: CAG
  source 1..20: mol_type = other DNA
cagtggcaggagagaatgca

SEQ ID NO: 20153 - DNA, 20 bp, synthetic construct
  misc_feature 1..20: note = Description of Artificial Sequence: Synthetic oligonucleotide
  misc_feature 1..20: note = Target: SCN10A; (-) strand; PAM type: NRG; PAM sequence: GAG
  source 1..20: mol_type = other DNA
agactcctgcagtggcagga

SEQ ID NO: 20154 - DNA, 20 bp, synthetic construct
  misc_feature 1..20: note = Description of Artificial Sequence: Synthetic oligonucleotide
  misc_feature 1..20: note = Target: SCN10A; (-) strand; PAM type: NRG; PAM sequence: GAG
  source 1..20: mol_type = other DNA
acagactcctgcagtggcag

SEQ ID NO: 20155 - DNA, 20 bp, synthetic construct
  misc_feature 1..20: note = Description of Artificial Sequence: Synthetic oligonucleotide
  misc_feature 1..20: note = Target: SCN10A; (-) strand; PAM type: NRG; PAM sequence: AGG
  source 1..20: mol_type = other DNA
caacagactcctgcagtggc

SEQ ID NO: 20156 - DNA, 20 bp, synthetic construct
  misc_feature 1..20: note = Description of Artificial Sequence: Synthetic oligonucleotide
  misc_feature 1..20: note = Target: SCN10A; (-) strand; PAM type: NRG; PAM sequence: CAG
  source 1..20: mol_type = other DNA
tcaacagactcctgcagtgg

SEQ ID NO: 20157 - DNA, 20 bp, synthetic construct
  misc_feature 1..20: note = Description of Artificial Sequence: Synthetic oligonucleotide
  misc_feature 1..20: note = Target: SCN10A; (-) strand; PAM type: NRG; PAM sequence: TGG
  source 1..20: mol_type = other DNA
tattcaacagactcctgcag

SEQ ID NO: 20158 - DNA, 20 bp, synthetic construct
  misc_feature 1..20: note = Description of Artificial Sequence: Synthetic oligonucleotide
  misc_feature 1..20: note = Target: SCN10A; (-) strand; PAM type: NRG; PAM sequence: CAG
  source 1..20: mol_type = other DNA
gtatattcaacagactcctg

SEQ ID NO: 20159 - DNA, 20 bp, synthetic construct
  misc_feature 1..20: note = Description of Artificial Sequence: Synthetic oligonucleotide
  misc_feature 1..20: note = Target: SCN10A; (-) strand; PAM type: NRG; PAM sequence: CAG
  source 1..20: mol_type = other DNA
ggaagaaagggtatattcaa

SEQ ID NO: 20160 - DNA, 20 bp, synthetic construct
  misc_feature 1..20: note = Description of Artificial Sequence: Synthetic oligonucleotide
  misc_feature 1..20: note = Target: SCN10A; (-) strand; PAM type: NRG; PAM sequence: GGG
  source 1..20: mol_type = other DNA
ctgaagattaagggaagaaa

SEQ ID NO: 20161 - DNA, 20 bp, synthetic construct
  misc_feature 1..20: note = Description of Artificial Sequence: Synthetic oligonucleotide
  misc_feature 1..20: note = Target: SCN10A; (-) strand; PAM type: NRG; PAM sequence: AGG
  source 1..20: mol_type = other DNA
actgaagattaagggaagaa

SEQ ID NO: 20162 - DNA, 20 bp, synthetic construct
  misc_feature 1..20: note = Description of Artificial Sequence: Synthetic oligonucleotide
  misc_feature 1..20: note = Target: SCN10A; (-) strand; PAM type: NRG; PAM sequence: AAG
  source 1..20: mol_type = other DNA
gactgaagattaagggaaga

SEQ ID NO: 20163 - DNA, 20 bp, synthetic construct
  misc_feature 1..20: note = Description of Artificial Sequence: Synthetic oligonucleotide
  misc_feature 1..20: note = Target: SCN10A; (-) strand; PAM type: NRG; PAM sequence: AAG
  source 1..20: mol_type = other DNA
gagagactgaagattaaggg

SEQ ID NO: 20164 - DNA, 20 bp, synthetic construct
  misc_feature 1..20: note = Description of Artificial Sequence: Synthetic oligonucleotide
  misc_feature 1..20: note = Target: SCN10A; (-) strand; PAM type: NRG; PAM sequence: GGG
  source 1..20: mol_type = other DNA
taagagagactgaagattaa

SEQ ID NO: 20165 - DNA, 20 bp, synthetic construct
  misc_feature 1..20: note = Description of Artificial Sequence: Synthetic oligonucleotide
  misc_feature 1..20: note = Target: SCN10A; (-) strand; PAM type: NRG; PAM sequence: AGG
  source 1..20: mol_type = other DNA
ataagagagactgaagatta

SEQ ID NO: 20166 - DNA, 20 bp, synthetic construct
  misc_feature 1..20: note = Description of Artificial Sequence: Synthetic oligonucleotide
  misc_feature 1..20: note = Target: SCN10A; (-) strand; PAM type: NRG; PAM sequence: AAG
  source 1..20: mol_type = other DNA
aataagagagactgaagatt

SEQ ID NO: 20167 - DNA, 20 bp, synthetic construct
  misc_feature 1..20: note = Description of Artificial Sequence: Synthetic oligonucleotide
  misc_feature 1..20: note = Target: SCN10A; (-) strand; PAM type: NRG; PAM sequence: AAG
  source 1..20: mol_type = other DNA
tgggagaataagagagactg

SEQ ID NO: 20168 - DNA, 20 bp, synthetic construct
  misc_feature 1..20: note = Description of Artificial Sequence: Synthetic oligonucleotide
  misc_feature 1..20: note = Target: SCN10A; (-) strand; PAM type: NRG; PAM sequence: GAG
  source 1..20: mol_type = other DNA
aaggatctgggagaataaga

SEQ ID NO: 20169 - DNA, 20 bp, synthetic construct
  misc_feature 1..20: note = Description of Artificial Sequence: Synthetic oligonucleotide
  misc_feature 1..20: note = Target: SCN10A; (-) strand; PAM type: NRG; PAM sequence: GAG
  source 1..20: mol_type = other DNA
ggaaggatctgggagaataa

SEQ ID NO: 20170 - DNA, 20 bp, synthetic construct
  misc_feature 1..20: note = Description of Artificial Sequence: Synthetic oligonucleotide
  misc_feature 1..20: note = Target: SCN10A; (-) strand; PAM type: NRG; PAM sequence: AAG
  source 1..20: mol_type = other DNA
tgggaaggatctgggagaat

SEQ ID NO: 20171 - DNA, 20 bp, synthetic construct
  misc_feature 1..20: note = Description of Artificial Sequence: Synthetic oligonucleotide
  misc_feature 1..20: note = Target: SCN10A; (-) strand; PAM type: NRG; PAM sequence: GAG
  source 1..20: mol_type = other DNA
tgctaatgggaaggatctgg

SEQ ID NO: 20172 - DNA, 20 bp, synthetic construct
  misc_feature 1..20: note = Description of Artificial Sequence: Synthetic oligonucleotide
  misc_feature 1..20: note = Target: SCN10A; (-) strand; PAM type: NRG; PAM sequence: GGG
  source 1..20: mol_type = other DNA
catgctaatgggaaggatct

SEQ ID NO: 20173 - DNA, 20 bp, synthetic construct
  misc_feature 1..20: note = Description of Artificial Sequence: Synthetic oligonucleotide
  misc_feature 1..20: note = Target: SCN10A; (-) strand; PAM type: NRG; PAM sequence: TGG
  source 1..20: mol_type = other DNA
gcatgctaatgggaaggatc

SEQ ID NO: 20174 - DNA, 20 bp, synthetic construct
  misc_feature 1..20: note = Description of Artificial Sequence: Synthetic oligonucleotide
  misc_feature 1..20: note = Target: SCN10A; (-) strand; PAM type: NRG; PAM sequence: AGG
  source 1..20: mol_type = other DNA
atatttgcatgctaatggga

SEQ ID NO: 20175 - DNA, 20 bp, synthetic construct
  misc_feature 1..20: note = Description of Artificial Sequence: Synthetic oligonucleotide
  misc_feature 1..20: note = Target: SCN10A; (-) strand; PAM type: NRG; PAM sequence: AAG
  source 1..20: mol_type = other DNA
catatttgcatgctaatggg

SEQ ID NO: 20176 - DNA, 20 bp, synthetic construct
  misc_feature 1..20: note = Description of Artificial Sequence: Synthetic oligonucleotide
  misc_feature 1..20: note = Target: SCN10A; (-) strand; PAM type: NRG; PAM sequence: GGG
  source 1..20: mol_type = other DNA
gagcatatttgcatgctaat

SEQ ID NO: 20177 - DNA, 20 bp, synthetic construct
  misc_feature 1..20: note = Description of Artificial Sequence: Synthetic oligonucleotide
  misc_feature 1..20: note = Target: SCN10A; (-) strand; PAM type: NRG; PAM sequence: TGG
  source 1..20: mol_type = other DNA
tgagcatatttgcatgctaa

SEQ ID NO: 20178 - DNA, 20 bp, synthetic construct
  misc_feature 1..20: note = Description of Artificial Sequence: Synthetic oligonucleotide
  misc_feature 1..20: note = Target: SCN10A; (-) strand; PAM type: NRG; PAM sequence: GAG
  source 1..20: mol_type = other DNA
tttgtttgtttgtttgtttt

SEQ ID NO: 20179 - DNA, 20 bp, synthetic construct
  misc_feature 1..20: note = Description of Artificial Sequence: Synthetic oligonucleotide
  misc_feature 1..20: note = Target: SCN10A; (-) strand; PAM type: NRG; PAM sequence: GAG
  source 1..20: mol_type = other DNA
tttggtttttgtgtttgggg

SEQ ID NO: 20180 - DNA, 20 bp, synthetic construct
  misc_feature 1..20: note = Description of Artificial Sequence: Synthetic oligonucleotide
  misc_feature 1..20: note = Target: SCN10A; (-) strand; PAM type: NRG; PAM sequence: GGG
  source 1..20: mol_type = other DNA
tttttggtttttgtgtttgg

SEQ ID NO: 20181 - DNA, 20 bp, synthetic construct
  misc_feature 1..20: note = Description of Artificial Sequence: Synthetic oligonucleotide
  misc_feature 1..20: note = Target: SCN10A; (-) strand; PAM type: NRG; PAM sequence: GGG
  source 1..20: mol_type = other DNA
ctttttggtttttgtgtttg

SEQ ID NO: 20182 - DNA, 20 bp, synthetic construct
  misc_feature 1..20: note = Description of Artificial Sequence: Synthetic oligonucleotide
  misc_feature 1..20: note = Target: SCN10A; (-) strand; PAM type: NRG; PAM sequence: GGG
  source 1..20: mol_type = other DNA
actttttggtttttgtgttt

SEQ ID NO: 20183 - DNA, 20 bp, synthetic construct
  misc_feature 1..20: note = Description of Artificial Sequence: Synthetic oligonucleotide
  misc_feature 1..20: note = Target: SCN10A; (-) strand; PAM type: NRG; PAM sequence: TGG
  source 1..20: mol_type = other DNA
gactttttggtttttgtgtt

SEQ ID NO: 20184 - DNA, 20 bp, synthetic construct
  misc_feature 1..20: note = Description of Artificial Sequence: Synthetic oligonucleotide
  misc_feature 1..20: note = Target: SCN10A; (-) strand; PAM type: NRG; PAM sequence: TGG
  source 1..20: mol_type = other DNA
agaattgaaagaagactttt

SEQ ID NO: 20185 - DNA, 20 bp, synthetic construct
  misc_feature 1..20: note = Description of Artificial Sequence: Synthetic oligonucleotide
  misc_feature 1..20: note = Target: SCN10A; (-) strand; PAM type: NRG; PAM sequence: AAG
  source 1..20: mol_type = other DNA
ggagtagggagaattgaaag

SEQ ID NO: 20186 - DNA, 20 bp, synthetic construct
  misc_feature 1..20: note = Description of Artificial Sequence: Synthetic oligonucleotide
  misc_feature 1..20: note = Target: SCN10A; (-) strand; PAM type: NRG; PAM sequence: AAG
  source 1..20: mol_type = other DNA
tagggagtagggagaattga

SEQ ID NO: 20187 - DNA, 20 bp, synthetic construct
  misc_feature 1..20: note = Description of Artificial Sequence: Synthetic oligonucleotide
  misc_feature 1..20: note = Target: SCN10A; (-) strand; PAM type: NRG; PAM sequence: GAG
  source 1..20: mol_type = other DNA
agatggcactagggagtagg

SEQ ID NO: 20188 - DNA, 20 bp, synthetic construct
  misc_feature 1..20: note = Description of Artificial Sequence: Synthetic oligonucleotide
  misc_feature 1..20: note = Target: SCN10A; (-) strand; PAM type: NRG; PAM sequence: GGG
  source 1..20: mol_type = other DNA
taagatggcactagggagta

SEQ ID NO: 20189 - DNA, 20 bp, synthetic construct
  misc_feature 1..20: note = Description of Artificial Sequence: Synthetic oligonucleotide
  misc_feature 1..20: note = Target: SCN10A; (-) strand; PAM type: NRG; PAM sequence: AGG
  source 1..20: mol_type = other DNA
gtaagatggcactagggagt

SEQ ID NO: 20190 - DNA, 20 bp, synthetic construct
  misc_feature 1..20: note = Description of Artificial Sequence: Synthetic oligonucleotide
  misc_feature 1..20: note = Target: SCN10A; (-) strand; PAM type: NRG; PAM sequence: TAG
  source 1..20: mol_type = other DNA
agtaagatggcactagggag

SEQ ID NO: 20191 - DNA, 20 bp, synthetic construct
  misc_feature 1..20: note = Description of Artificial Sequence: Synthetic oligonucleotide
  misc_feature 1..20: note = Target: SCN10A; (-) strand; PAM type: NRG; PAM sequence: GAG
  source 1..20: mol_type = other DNA
gatagtaagatggcactagg

SEQ ID NO: 20192 - DNA, 20 bp, synthetic construct
  misc_feature 1..20: note = Description of Artificial Sequence: Synthetic oligonucleotide
  misc_feature 1..20: note = Target: SCN10A; (-) strand; PAM type: NRG; PAM sequence: GGG
  source 1..20: mol_type = other DNA
gagatagtaagatggcacta

SEQ ID NO: 20193 - DNA, 20 bp, synthetic construct
  misc_feature 1..20: note = Description of Artificial Sequence: Synthetic oligonucleotide
  misc_feature 1..20: note = Target: SCN10A; (-) strand; PAM type: NRG; PAM sequence: AGG
  source 1..20: mol_type = other DNA
ggagatagtaagatggcact

SEQ ID NO: 20194 - DNA, 20 bp, synthetic construct
  misc_feature 1..20: note = Description of Artificial Sequence: Synthetic oligonucleotide
  misc_feature 1..20: note = Target: SCN10A; (-) strand; PAM type: NRG; PAM sequence: TAG
  source 1..20: mol_type = other DNA
aggagatagtaagatggcac

SEQ ID NO: 20195 - DNA, 20 bp, synthetic construct
  misc_feature 1..20: note = Description of Artificial Sequence: Synthetic oligonucleotide
  misc_feature 1..20: note = Target: SCN10A; (-) strand; PAM type: NRG; PAM sequence: TGG
  source 1..20: mol_type = other DNA
aggaaaaggagatagtaaga

SEQ ID NO: 20196 - DNA, 20 bp, synthetic construct
  misc_feature 1..20: note = Description of Artificial Sequence: Synthetic oligonucleotide
  misc_feature 1..20: note = Target: SCN10A; (-) strand; PAM type: NRG; PAM sequence: AAG
  source 1..20: mol_type = other DNA
tgtgaggaaaaggagatagt

SEQ ID NO: 20197 - DNA, 20 bp, synthetic construct
  misc_feature 1..20: note = Description of Artificial Sequence: Synthetic oligonucleotide
  misc_feature 1..20: note = Target: SCN10A; (-) strand; PAM type: NRG; PAM sequence: TAG
  source 1..20: mol_type = other DNA
tgcctgtgaggaaaaggaga

SEQ ID NO: 20198 - DNA, 20 bp, synthetic construct
  misc_feature 1..20: note = Description of Artificial Sequence: Synthetic oligonucleotide
  misc_feature 1..20: note = Target: SCN10A; (-) strand; PAM type: NRG; PAM sequence: GAG
  source 1..20: mol_type = other DNA
agtttgcctgtgaggaaaag

SEQ ID NO: 20199 - DNA, 20 bp, synthetic construct
  misc_feature 1..20: note = Description of Artificial Sequence: Synthetic oligonucleotide
  misc_feature 1..20: note = Target: SCN10A; (-) strand; PAM type: NRG; PAM sequence: AGG
  source 1..20: mol_type = other DNA
gaagtttgcctgtgaggaaa

SEQ ID NO: 20200 - DNA, 20 bp, synthetic construct
  misc_feature 1..20: note = Description of Artificial Sequence: Synthetic oligonucleotide
  misc_feature 1..20: note = Target: SCN10A; (-) strand; PAM type: NRG; PAM sequence: AAG
  source 1..20: mol_type = other DNA
agaagtttgcctgtgaggaa

SEQ ID NO: 20201 - DNA, 20 bp, synthetic construct
  misc_feature 1..20: note = Description of Artificial Sequence: Synthetic oligonucleotide
  misc_feature 1..20: note = Target: SCN10A; (-) strand; PAM type: NRG; PAM sequence: AGG
  source 1..20: mol_type = other DNA
tttcaagaagtttgcctgtg

SEQ ID NO: 20202 - DNA, 20 bp, synthetic construct
  misc_feature 1..20: note = Description of Artificial Sequence: Synthetic oligonucleotide
  misc_feature 1..20: note = Target: SCN10A; (-) strand; PAM type: NRG; PAM sequence: GAG
  source 1..20: mol_type = other DNA
ttttcaagaagtttgcctgt

SEQ ID NO: 20203 - DNA, 20 bp, synthetic construct
  misc_feature 1..20: note = Description of Artificial Sequence: Synthetic oligonucleotide
  misc_feature 1..20: note = Target: SCN10A; (-) strand; PAM type: NRG; PAM sequence: AAG
  source 1..20: mol_type = other DNA
gtacagacaattttttcaag

SEQ ID NO: 20204 - DNA, 20 bp, synthetic construct
  misc_feature 1..20: note = Description of Artificial Sequence: Synthetic oligonucleotide
  misc_feature 1..20: note = Target: SCN10A; (-) strand; PAM type: NRG; PAM sequence: AAG
  source 1..20: mol_type = other DNA
ggtgtacagacaattttttc

SEQ ID NO: 20205 - DNA, 20 bp, synthetic construct
  misc_feature 1..20: note = Description of Artificial Sequence: Synthetic oligonucleotide
  misc_feature 1..20: note = Target: SCN10A; (-) strand; PAM type: NRG; PAM sequence: CAG
  source 1..20: mol_type = other DNA
agaaatggagatatggtgta

SEQ ID NO: 20206 - DNA, 20 bp, synthetic construct
  misc_feature 1..20: note = Description of Artificial Sequence: Synthetic oligonucleotide
  misc_feature 1..20: note = Target: SCN10A; (-) strand; PAM type: NRG; PAM sequence: TGG
  source 1..20: mol_type = other DNA
gaggtgaagaaatggagata

SEQ ID NO: 20207 - DNA, 20 bp, synthetic construct
  misc_feature 1..20: note = Description of Artificial Sequence: Synthetic oligonucleotide
  misc_feature 1..20: note = Target: SCN10A; (-) strand; PAM type: NRG; PAM sequence: GAG
  source 1..20: mol_type = other DNA
gggtgagaggtgaagaaatg

SEQ ID NO: 20208 - DNA, 20 bp, synthetic construct
  misc_feature 1..20: note = Description of Artificial Sequence: Synthetic oligonucleotide
  misc_feature 1..20: note = Target: SCN10A; (-) strand; PAM type: NRG; PAM sequence: TGG
  source 1..20: mol_type = other DNA
gcgggtgagaggtgaagaaa

SEQ ID NO: 20209 - DNA, 20 bp, synthetic construct
  misc_feature 1..20: note = Description of Artificial Sequence: Synthetic oligonucleotide
  misc_feature 1..20: note = Target: SCN10A; (-) strand; PAM type: NRG; PAM sequence: AAG
  source 1..20: mol_type = other DNA
taaagagcgggtgagaggtg

SEQ ID NO: 20210 - DNA, 20 bp, synthetic construct
  misc_feature 1..20: note = Description of Artificial Sequence: Synthetic oligonucleotide
  misc_feature 1..20: note = Target: SCN10A; (-) strand; PAM type: NRG; PAM sequence: AGG
  source 1..20: mol_type = other DNA
gggcttaaagagcgggtgag

SEQ ID NO: 20211 - DNA, 20 bp, synthetic construct
  misc_feature 1..20: note = Description of Artificial Sequence: Synthetic oligonucleotide
  misc_feature 1..20: note = Target: SCN10A; (-) strand; PAM type: NRG; PAM sequence: GAG
  source 1..20: mol_type = other DNA
ggggcttaaagagcgggtga

SEQ ID NO: 20212 - DNA, 20 bp, synthetic construct
  misc_feature 1..20: note = Description of Artificial Sequence: Synthetic oligonucleotide
  misc_feature 1..20: note = Target: SCN10A; (-) strand; PAM type: NRG; PAM sequence: GAG
  source 1..20: mol_type = other DNA
aaggggcttaaagagcgggt

SEQ ID NO: 20213 - DNA, 20 bp, synthetic construct
  misc_feature 1..20: note = Description of Artificial Sequence: Synthetic oligonucleotide
  misc_feature 1..20: note = Target: SCN10A; (-) strand; PAM type: NRG; PAM sequence: GGG
  source 1..20: mol_type = other DNA
attgaaggggcttaaagagc

SEQ ID NO: 20214 - DNA, 20 bp, synthetic construct
  misc_feature 1..20: note = Description of Artificial Sequence: Synthetic oligonucleotide
  misc_feature 1..20: note = Target: SCN10A; (-) strand; PAM type: NRG; PAM sequence: CGG
  source 1..20: mol_type = other DNA
tattgaaggggcttaaagag

SEQ ID NO: 20215 - DNA, 20 bp, synthetic construct
  misc_feature 1..20: note = Description of Artificial Sequence: Synthetic oligonucleotide
  misc_feature 1..20: note = Target: SCN10A; (-) strand; PAM type: NRG; PAM sequence: GAG
  source 1..20: mol_type = other DNA
tcatattgaaggggcttaaa

SEQ ID NO: 20216 - DNA, 20 bp, synthetic construct
  misc_feature 1..20: note = Description of Artificial Sequence: Synthetic oligonucleotide
  misc_feature 1..20: note = Target: SCN10A; (-) strand; PAM type: NRG; PAM sequence: AAG
  source 1..20: mol_type = other DNA
ggtcatattgaaggggctta

SEQ ID NO: 20217 - DNA, 20 bp, synthetic construct
  misc_feature 1..20: note = Description of Artificial Sequence: Synthetic oligonucleotide
  misc_feature 1..20: note = Target: SCN10A; (-) strand; PAM type: NRG; PAM sequence: GGG
  source 1..20: mol_type = other DNA
aggcagaggtcatattgaag

SEQ ID NO: 20218 - DNA, 20 bp, synthetic construct
  misc_feature 1..20: note = Description of Artificial Sequence: Synthetic oligonucleotide
  misc_feature 1..20: note = Target: SCN10A; (-) strand; PAM type: NRG; PAM sequence: GGG
  source 1..20: mol_type = other DNA
taggcagaggtcatattgaa

SEQ ID NO: 20219 - DNA, 20 bp, synthetic construct
  misc_feature 1..20: note = Description of Artificial Sequence: Synthetic oligonucleotide
  misc_feature 1..20: note = Target: SCN10A; (-) strand; PAM type: NRG; PAM sequence: AGG
  source 1..20: mol_type = other DNA
gtaggcagaggtcatattga

SEQ ID NO: 20220 - DNA, 20 bp, synthetic construct
  misc_feature 1..20: note = Description of Artificial Sequence: Synthetic oligonucleotide
  misc_feature 1..20: note = Target: SCN10A; (-) strand; PAM type: NRG; PAM sequence: AAG
  source 1..20: mol_type = other DNA
ggtaggcagaggtcatattg

SEQ ID NO: 20221 - DNA, 20 bp, synthetic construct
  misc_feature 1..20: note = Description of Artificial Sequence: Synthetic oligonucleotide
  misc_feature 1..20: note = Target: SCN10A; (-) strand; PAM type: NRG; PAM sequence: AGG
  source 1..20: mol_type = other DNA
tggagtaaaagggtaggcag

SEQ ID NO: 20222 - DNA, 20 bp, synthetic construct
  misc_feature 1..20: note = Description of Artificial Sequence: Synthetic oligonucleotide
  misc_feature 1..20: note = Target: SCN10A; (-) strand; PAM type: NRG; PAM sequence: GAG
  source 1..20: mol_type = other DNA
atggagtaaaagggtaggca

SEQ ID NO: 20223 - DNA, 20 bp, synthetic construct
  misc_feature 1..20: note = Description of Artificial Sequence: Synthetic oligonucleotide
  misc_feature 1..20: note = Target: SCN10A; (-) strand; PAM type: NRG; PAM sequence: CAG
  source 1..20: mol_type = other DNA
taatggagtaaaagggtagg

SEQ ID NO: 20224 - DNA, 20 bp, synthetic construct
  misc_feature 1..20: note = Description of Artificial Sequence: Synthetic oligonucleotide
  misc_feature 1..20: note = Target: SCN10A; (-) strand; PAM type: NRG; PAM sequence: AGG
  source 1..20: mol_type = other DNA
gattaatggagtaaaagggt

SEQ ID NO: 20225 - DNA, 20 bp, synthetic construct
  misc_feature 1..20: note = Description of Artificial Sequence: Synthetic oligonucleotide
  misc_feature 1..20: note = Target: SCN10A; (-) strand; PAM type: NRG; PAM sequence: TAG
  source 1..20: mol_type = other DNA
ggattaatggagtaaaaggg

SEQ ID NO: 20226 - DNA, 20 bp, synthetic construct
  misc_feature 1..20: note = Description of Artificial Sequence: Synthetic oligonucleotide
  misc_feature 1..20: note = Target: SCN10A; (-) strand; PAM type: NRG; PAM sequence: GGG
  source 1..20: mol_type = other DNA
agaggattaatggagtaaaa

SEQ ID NO: 20227 - DNA, 20 bp, synthetic construct
  misc_feature 1..20: note = Description of Artificial Sequence: Synthetic oligonucleotide
  misc_feature 1..20: note = Target: SCN10A; (-) strand; PAM type: NRG; PAM sequence: AGG
  source 1..20: mol_type = other DNA
aagaggattaatggagtaaa

SEQ ID NO: 20228 - DNA, 20 bp, synthetic construct
  misc_feature 1..20: note = Description of Artificial Sequence: Synthetic oligonucleotide
  misc_feature 1..20: note = Target: SCN10A; (-) strand; PAM type: NRG; PAM sequence: AAG
  source 1..20: mol_type = other DNA
aaagaggattaatggagtaa

SEQ ID NO: 20229 - DNA, 20 bp, synthetic construct
  misc_feature 1..20: note = Description of Artificial Sequence: Synthetic oligonucleotide
  misc_feature 1..20: note = Target: SCN10A; (-) strand; PAM type: NRG; PAM sequence: GAG
  source 1..20: mol_type = other DNA
taagcaaaagaggattaatg

SEQ ID NO: 20230 - DNA, 20 bp, synthetic construct
  misc_feature 1..20: note = Description of Artificial Sequence: Synthetic oligonucleotide
  misc_feature 1..20: note = Target: SCN10A; (-) strand; PAM type: NRG; PAM sequence: TGG
  source 1..20: mol_type = other DNA
tctaagcaaaagaggattaa

SEQ ID NO: 20231 - DNA, 20 bp, synthetic construct
  misc_feature 1..20: note = Description of Artificial Sequence: Synthetic oligonucleotide
  misc_feature 1..20: note = Target: SCN10A; (-) strand; PAM type: NRG; PAM sequence: AGG
  source 1..20: mol_type = other DNA
tttggtgatctaagcaaaag

SEQ ID NO: 20232 - DNA, 20 bp, synthetic construct
  misc_feature 1..20: note = Description of Artificial Sequence: Synthetic oligonucleotide
  misc_feature 1..20: note = Target: SCN10A; (-) strand; PAM type: NRG; PAM sequence: GAG
  source 1..20: mol_type = other DNA
ctttggtgatctaagcaaaa

SEQ ID NO: 20233 - DNA, 20 bp, synthetic construct
  misc_feature 1..20: note = Description of Artificial Sequence: Synthetic oligonucleotide
  misc_feature 1..20: note = Target: SCN10A; (-) strand; PAM type: NRG; PAM sequence: AAG
  source 1..20: mol_type = other DNA
gtctttggtgatctaagcaa

SEQ ID NO: 20234 - DNA, 20 bp, synthetic construct
  misc_feature 1..20: note = Description of Artificial Sequence: Synthetic oligonucleotide
  misc_feature 1..20: note = Target: SCN10A; (-) strand; PAM type: NRG; PAM sequence: AAG
  source 1..20: mol_type = other DNA
atggatgtctttggtgatct

SEQ ID NO: 20235 - DNA, 20 bp, synthetic construct
  misc_feature 1..20: note = Description of Artificial Sequence: Synthetic oligonucleotide
  misc_feature 1..20: note = Target: SCN10A; (-) strand; PAM type: NRG; PAM sequence: TGG
  source 1..20: mol_type = other DNA
tttagtcacatggatgtctt

SEQ ID NO: 20236 - DNA, 20 bp, synthetic construct
  misc_feature 1..20: note = Description of Artificial Sequence: Synthetic oligonucleotide
  misc_feature 1..20: note = Target: SCN10A; (-) strand; PAM type: NRG; PAM sequence: TGG
  source 1..20: mol_type = other DNA
gtccaggggctttagtcaca

SEQ ID NO: 20237 - DNA, 20 bp, synthetic construct
  misc_feature 1..20: note = Description of Artificial Sequence: Synthetic oligonucleotide
  misc_feature 1..20: note = Target: SCN10A; (-) strand; PAM type: NRG; PAM sequence: TAG
  source 1..20: mol_type = other DNA
atgaaaaggtccaggggctt

SEQ ID NO: 20238 - DNA, 20 bp, synthetic construct
  misc_feature 1..20: note = Description of Artificial Sequence: Synthetic oligonucleotide
  misc_feature 1..20: note = Target: SCN10A; (-) strand; PAM type: NRG; PAM sequence: GGG
  source 1..20: mol_type = other DNA
tgaaacatgaaaaggtccag

SEQ ID NO: 20239 - DNA, 20 bp, synthetic construct
  misc_feature 1..20: note = Description of Artificial Sequence: Synthetic oligonucleotide
  misc_feature 1..20: note = Target: SCN10A; (-) strand; PAM type: NRG; PAM sequence: GGG
  source 1..20: mol_type = other DNA
atgaaacatgaaaaggtcca

SEQ ID NO: 20240 - DNA, 20 bp, synthetic construct
  misc_feature 1..20: note = Description of Artificial Sequence: Synthetic oligonucleotide
  misc_feature 1..20: note = Target: SCN10A; (-) strand; PAM type: NRG; PAM sequence: AGG
  source 1..20: mol_type = other DNA
aatgaaacatgaaaaggtcc

SEQ ID NO: 20241 - DNA, 20 bp, synthetic construct
  misc_feature 1..20: note = Description of Artificial Sequence: Synthetic oligonucleotide
  misc_feature 1..20: note = Target: SCN10A; (-) strand; PAM type: NRG; PAM sequence: CAG
  source 1..20: mol_type = other DNA
aaatgaaacatgaaaaggtc

SEQ ID NO: 20242 - DNA, 20 bp, synthetic construct
  misc_feature 1..20: note = Description of Artificial Sequence: Synthetic oligonucleotide
  misc_feature 1..20: note = Target: SCN10A; (-) strand; PAM type: NRG; PAM sequence: AGG
  source 1..20: mol_type = other DNA
aggtaaaatgaaacatgaaa

SEQ ID NO: 20243 - DNA, 20 bp, synthetic construct
  misc_feature 1..20: note = Description of Artificial Sequence: Synthetic oligonucleotide
  misc_feature 1..20: note = Target: SCN10A; (-) strand; PAM type: NRG; PAM sequence: AAG
  source 1..20: mol_type = other DNA
caggtaaaatgaaacatgaa

SEQ ID NO: 20244 - DNA, 20 bp, synthetic construct
  misc_feature 1..20: note = Description of Artificial Sequence: Synthetic oligonucleotide
  misc_feature 1..20: note = Target: SCN10A; (-) strand; PAM type: NRG; PAM sequence: AGG
  source 1..20: mol_type = other DNA
ggcaatgctgtggaaaggtc

SEQ ID NO: 20245 - DNA, 20 bp, synthetic construct
  misc_feature 1..20: note = Description of Artificial Sequence: Synthetic oligonucleotide
  misc_feature 1..20: note = Target: SCN10A; (-) strand; PAM type: NRG; PAM sequence: CAG
  source 1..20: mol_type = other DNA
aggcaatgctgtggaaaggt

SEQ ID NO: 20246 - DNA, 20 bp, synthetic construct
  misc_feature 1..20: note = Description of Artificial Sequence: Synthetic oligonucleotide
  misc_feature 1..20: note = Target: SCN10A; (-) strand; PAM type: NRG; PAM sequence: AGG
  source 1..20: mol_type = other DNA
acagaggcaatgctgtggaa

SEQ ID NO: 20247 - DNA, 20 bp, synthetic construct
  misc_feature 1..20: note = Description of Artificial Sequence: Synthetic oligonucleotide
  misc_feature 1..20: note = Target: SCN10A; (-) strand; PAM type: NRG; PAM sequence: AAG
  source 1..20: mol_type = other DNA
aacagaggcaatgctgtgga

SEQ ID NO: 20248 - DNA, 20 bp, synthetic construct
  misc_feature 1..20: note = Description of Artificial Sequence: Synthetic oligonucleotide
  misc_feature 1..20: note = Target: SCN10A; (-) strand; PAM type: NRG; PAM sequence: TGG
  source 1..20: mol_type = other DNA
ggccaacagaggcaatgctg

SEQ ID NO: 20249 - DNA, 20 bp, synthetic construct
  misc_feature 1..20: note = Description of Artificial Sequence: Synthetic oligonucleotide
  misc_feature 1..20: note = Target: SCN10A; (-) strand; PAM type: NRG; PAM sequence: AGG
  source 1..20: mol_type = other DNA
aagaatagaaaggccaacag

SEQ ID NO: 20250 - DNA, 20 bp, synthetic construct
  misc_feature 1..20: note = Description of Artificial Sequence: Synthetic oligonucleotide
  misc_feature 1..20: note = Target: SCN10A; (-) strand; PAM type: NRG; PAM sequence: GAG
  source 1..20: mol_type = other DNA
aaagaatagaaaggccaaca

SEQ ID NO: 20251 - DNA, 20 bp, synthetic construct
  misc_feature 1..20: note = Description of Artificial Sequence: Synthetic oligonucleotide
  misc_feature 1..20: note = Target: SCN10A; (-) strand; PAM type: NRG; PAM sequence: CAG
  source 1..20: mol_type = other DNA
agaaagaatagaaaggccaa

SEQ ID NO: 20252 - DNA, 20 bp, synthetic construct
  misc_feature 1..20: note = Description of Artificial Sequence: Synthetic oligonucleotide
  misc_feature 1..20: note = Target: SCN10A; (-) strand; PAM type: NRG; PAM sequence: AGG
  source 1..20: mol_type = other DNA
tttcttcagaaagaatagaa

SEQ ID NO: 20253 - DNA, 20 bp, synthetic construct
  misc_feature 1..20: note = Description of Artificial Sequence: Synthetic oligonucleotide
  misc_feature 1..20: note = Target: SCN10A; (-) strand; PAM type: NRG; PAM sequence: AAG
  source 1..20: mol_type = other DNA
atttcttcagaaagaataga

SEQ ID NO: 20254 - DNA, 20 bp, synthetic construct
  misc_feature 1..20: note = Description of Artificial Sequence: Synthetic oligonucleotide
  misc_feature 1..20: note = Target: SCN10A; (-) strand; PAM type: NRG; PAM sequence: TAG
  source 1..20: mol_type = other DNA
aaaaatttcttcagaaagaa

SEQ ID NO: 20255 - DNA, 20 bp, synthetic construct
  misc_feature 1..20: note = Description of Artificial Sequence: Synthetic oligonucleotide
  misc_feature 1..20: note = Target: SCN10A; (-) strand; PAM type: NRG; PAM sequence: AAG
  source 1..20: mol_type = other DNA
agagtaaaaatttcttcaga

SEQ ID NO: 20256 - DNA, 20 bp, synthetic construct
  misc_feature 1..20: note = Description of Artificial Sequence: Synthetic oligonucleotide
  misc_feature 1..20: note = Target: SCN10A; (-) strand; PAM type: NRG; PAM sequence: CAG
  source 1..20: mol_type = other DNA
gccaagagtaaaaatttctt

SEQ ID NO: 20257 - DNA, 20 bp, synthetic construct
  misc_feature 1..20: note = Description of Artificial Sequence: Synthetic oligonucleotide
  misc_feature 1..20: note = Target: SCN10A; (-) strand; PAM type: NRG; PAM sequence: GAG
  source 1..20: mol_type = other DNA
agaatacaatgcagagccaa

SEQ ID NO: 20258 - DNA, 20 bp, synthetic construct
  misc_feature 1..20: note = Description of Artificial Sequence: Synthetic oligonucleotide
  misc_feature 1..20: note = Target: SCN10A; (-) strand; PAM type: NRG; PAM sequence: AAG
  source 1..20: mol_type = other DNA
gaagaatacaatgcagagcc

SEQ ID NO: 20259 - DNA, 20 bp, synthetic construct
  misc_feature 1..20: note = Description of Artificial Sequence: Synthetic oligonucleotide
  misc_feature 1..20: note = Target: SCN10A; (-) strand; PAM type: NRG; PAM sequence: GAG
  source 1..20: mol_type = other DNA
atctagaagaatacaatgca

SEQ ID NO: 20260 - DNA, 20 bp, synthetic construct
  misc_feature 1..20: note = Description of Artificial Sequence: Synthetic oligonucleotide
  misc_feature 1..20: note = Target: SCN10A; (-) strand; PAM type: NRG; PAM sequence: CAG
  source 1..20: mol_type = other DNA
agatctagaagaatacaatg

SEQ ID NO: 20261 - DNA, 20 bp, synthetic construct
  misc_feature 1..20: note = Description of Artificial Sequence: Synthetic oligonucleotide
  misc_feature 1..20: note = Target: SCN10A; (-) strand; PAM type: NRG; PAM sequence: AAG
  source 1..20: mol_type = other DNA
agaaataggaaaagatctag

SEQ ID NO: 20262 - DNA, 20 bp, synthetic construct
  misc_feature 1..20: note = Description of Artificial Sequence: Synthetic oligonucleotide
  misc_feature 1..20: note = Target: SCN10A; (-) strand; PAM type: NRG; PAM sequence: TAG
  source 1..20: mol_type = other DNA
tacagaaataggaaaagatc

SEQ ID NO: 20263 - DNA, 20 bp, synthetic construct
  misc_feature 1..20: note = Description of Artificial Sequence: Synthetic oligonucleotide
  misc_feature 1..20: note = Target: SCN10A; (-) strand; PAM type: NRG; PAM sequence: AAG
  source 1..20: mol_type = other DNA
ggaaggtacagaaataggaa

SEQ ID NO: 20264 - DNA, 20 bp, synthetic construct
  misc_feature 1..20: note = Description of Artificial Sequence: Synthetic oligonucleotide
  misc_feature 1..20: note = Target: SCN10A; (-) strand; PAM type: NRG; PAM sequence: AGG
  source 1..20: mol_type = other DNA
gaaaaggaaggtacagaaat

SEQ ID NO: 20265 - DNA, 20 bp, synthetic construct
  misc_feature 1..20: note = Description of Artificial Sequence: Synthetic oligonucleotide
  misc_feature 1..20: note = Target: SCN10A; (-) strand; PAM type: NRG; PAM sequence: TAG
  source 1..20: mol_type = other DNA
tgaaaaggaaggtacagaaa

SEQ ID NO: 20266 - DNA, 20 bp, synthetic construct
  misc_feature 1..20: note = Description of Artificial Sequence: Synthetic oligonucleotide
  misc_feature 1..20: note = Target: SCN10A; (-) strand; PAM type: NRG; PAM sequence: CAG
  source 1..20: mol_type = other DNA
ggagactgaaaaggaaggta

SEQ ID NO: 20267 - DNA, 20 bp, synthetic construct
  misc_feature 1..20: note = Description of Artificial Sequence: Synthetic oligonucleotide
  misc_feature 1..20: note = Target: SCN10A; (-) strand; PAM type: NRG; PAM sequence: AGG
  source 1..20: mol_type = other DNA
gcagaggagactgaaaagga

SEQ ID NO: 20268 - DNA, 20 bp, synthetic construct
  misc_feature 1..20: note = Description of Artificial Sequence: Synthetic oligonucleotide
  misc_feature 1..20: note = Target: SCN10A; (-) strand; PAM type: NRG; PAM sequence: AAG
  source 1..20: mol_type = other DNA
agcagaggagactgaaaagg

SEQ ID NO: 20269 - DNA, 20 bp, synthetic construct
  misc_feature 1..20: note = Description of Artificial Sequence: Synthetic oligonucleotide
  misc_feature 1..20: note = Target: SCN10A; (-) strand; PAM type: NRG; PAM sequence: AGG
  source 1..20: mol_type = other DNA
cccagcagaggagactgaaa

SEQ ID NO: 20270 - DNA, 20 bp, synthetic construct
  misc_feature 1..20: note = Description of Artificial Sequence: Synthetic oligonucleotide
  misc_feature 1..20: note = Target: SCN10A; (-) strand; PAM type: NRG; PAM sequence: AAG
  source 1..20: mol_type = other DNA
acccagcagaggagactgaa

SEQ ID NO: 20271 - DNA, 20 bp, synthetic construct
  misc_feature 1..20: note = Description of Artificial Sequence: Synthetic oligonucleotide
  misc_feature 1..20: note = Target: SCN10A; (-) strand; PAM type: NRG; PAM sequence: GAG
  source 1..20: mol_type = other DNA
aagagatggacccagcagag

SEQ ID NO: 20272 - DNA, 20 bp, synthetic construct
  misc_feature 1..20: note = Description of Artificial Sequence: Synthetic oligonucleotide
  misc_feature 1..20: note = Target: SCN10A; (-) strand; PAM type: NRG; PAM sequence: AGG
  source 1..20: mol_type = other DNA
agaagagatggacccagcag

SEQ ID NO: 20273 - DNA, 20 bp, synthetic construct
  misc_feature 1..20: note = Description of Artificial Sequence: Synthetic oligonucleotide
  misc_feature 1..20: note = Target: SCN10A; (-) strand; PAM type: NRG; PAM sequence: GAG
  source 1..20: mol_type = other DNA
cagaagagatggacccagca

SEQ ID NO: 20274 - DNA, 20 bp, synthetic construct
  misc_feature 1..20: note = Description of Artificial Sequence: Synthetic oligonucleotide
  misc_feature 1..20: note = Target: SCN10A; (-) strand; PAM type: NRG; PAM sequence: CAG
  source 1..20: mol_type = other DNA
agcagaagagatggacccag

SEQ ID NO: 20275 - DNA, 20 bp, synthetic construct
  misc_feature 1..20: note = Description of Artificial Sequence: Synthetic oligonucleotide
  misc_feature 1..20: note = Target: SCN10A; (-) strand; PAM type: NRG; PAM sequence: CAG
  source 1..20: mol_type = other DNA
ttaagcagaagagatggacc

SEQ ID NO: 20276 - DNA, 20 bp, synthetic construct
  misc_feature 1..20: note = Description of Artificial Sequence: Synthetic oligonucleotide
  misc_feature 1..20: note = Target: SCN10A; (-) strand; PAM type: NRG; PAM sequence: TGG
  source 1..20: mol_type = other DNA
taatagttaagcagaagaga

SEQ ID NO: 20277 - DNA, 20 bp, synthetic construct
  misc_feature 1..20: note = Description of Artificial Sequence: Synthetic oligonucleotide
  misc_feature 1..20: note = Target: SCN10A; (-) strand; PAM type: NRG; PAM sequence: GAG
  source 1..20: mol_type = other DNA
tgtttaatagttaagcagaa

SEQ ID NO: 20278 - DNA, 20 bp, synthetic construct
  misc_feature 1..20: note = Description of Artificial Sequence: Synthetic oligonucleotide
  misc_feature 1..20: note = Target: SCN10A; (-) strand; PAM type: NRG; PAM sequence: AAG
  source 1..20: mol_type = other DNA
aatgtttaatagttaagcag

SEQ ID NO: 20279 - DNA, 20 bp, synthetic construct
  misc_feature 1..20: note = Description of Artificial Sequence: Synthetic oligonucleotide
  misc_feature 1..20: note = Target: SCN10A; (-) strand; PAM type: NRG; PAM sequence: CAG
  source 1..20: mol_type = other DNA
ctaaatgtttaatagttaag

SEQ ID NO: 20280 - DNA, 20 bp, synthetic construct
  misc_feature 1..20: note = Description of Artificial Sequence: Synthetic oligonucleotide
  misc_feature 1..20: note = Target: SCN10A; (-) strand; PAM type: NRG; PAM sequence: AAG
  source 1..20: mol_type = other DNA
aaactaaatgtttaatagtt

SEQ ID NO: 20281 - DNA, 20 bp, synthetic construct
  misc_feature 1..20: note = Description of Artificial Sequence: Synthetic oligonucleotide
  misc_feature 1..20: note = Target: SCN10A; (-) strand; PAM type: NRG; PAM sequence: TAG
  source 1..20: mol_type = other DNA
ctaacaaactaaatgtttaa

SEQ ID NO: 20282 - DNA, 20 bp, synthetic construct
  misc_feature 1..20: note = Description of Artificial Sequence: Synthetic oligonucleotide
  misc_feature 1..20: note = Target: SCN10A; (-) strand; PAM type: NRG; PAM sequence: CAG
  source 1..20: mol_type = other DNA
agagaagaaggcctcagaca

SEQ ID NO: 20283 - DNA, 20 bp, synthetic construct
  misc_feature 1..20: note = Description of Artificial Sequence: Synthetic oligonucleotide
  misc_feature 1..20: note = Target: SCN10A; (-) strand; PAM type: NRG; PAM sequence: CAG
  source 1..20: mol_type = other DNA
gtaagaagagaagaaggcct

SEQ ID NO: 20284 - DNA, 20 bp, synthetic construct
  misc_feature 1..20: note = Description of Artificial Sequence: Synthetic oligonucleotide
  misc_feature 1..20: note = Target: SCN10A; (-) strand; PAM type: NRG; PAM sequence: AGG
  source 1..20: mol_type = other DNA
gttgaagtaagaagagaaga

SEQ ID NO: 20285 - DNA, 20 bp, synthetic construct
  misc_feature 1..20: note = Description of Artificial Sequence: Synthetic oligonucleotide
  misc_feature 1..20: note = Target: SCN10A; (-) strand; PAM type: NRG; PAM sequence: AAG
  source 1..20: mol_type = other DNA
ggttgaagtaagaagagaag

SEQ ID NO: 20286 - DNA, 20 bp, synthetic construct
  misc_feature 1..20: note = Description of Artificial Sequence: Synthetic oligonucleotide
  misc_feature 1..20: note = Target: SCN10A; (-) strand; PAM type: NRG; PAM sequence: AAG
  source 1..20: mol_type = other DNA
aagggttgaagtaagaagag

SEQ ID NO: 20287 - DNA, 20 bp, synthetic construct
  misc_feature 1..20: note = Description of Artificial Sequence: Synthetic oligonucleotide
  misc_feature 1..20: note = Target: SCN10A; (-) strand; PAM type: NRG; PAM sequence: GAG
  source 1..20: mol_type = other DNA
cagaagggttgaagtaagaa

SEQ ID NO: 20288 - DNA, 20 bp, synthetic construct
  misc_feature 1..20: note = Description of Artificial Sequence: Synthetic oligonucleotide
  misc_feature 1..20: note = Target: SCN10A; (-) strand; PAM type: NRG; PAM sequence: AAG
  source 1..20: mol_type = other DNA
cacagaagggttgaagtaag

SEQ ID NO: 20289 - DNA, 20 bp, synthetic construct
  misc_feature 1..20: note = Description of Artificial Sequence: Synthetic oligonucleotide
  misc_feature 1..20: note = Target: SCN10A; (-) strand; PAM type: NRG; PAM sequence: AAG
  source 1..20: mol_type = other DNA
taacacagaagggttgaagt

SEQ ID NO: 20290 - DNA, 20 bp, synthetic construct
  misc_feature 1..20: note = Description of Artificial Sequence: Synthetic oligonucleotide
  misc_feature 1..20: note = Target: SCN10A; (-) strand; PAM type: NRG; PAM sequence: AAG
  source 1..20: mol_type = other DNA
gagttaacacagaagggttg

SEQ ID NO: 20291 - DNA, 20 bp, synthetic construct
  misc_feature 1..20: note = Description of Artificial Sequence: Synthetic oligonucleotide
  misc_feature 1..20: note = Target: SCN10A; (-) strand; PAM type: NRG; PAM sequence: GGG
  source 1..20: mol_type = other DNA
ctggatgagttaacacagaa

SEQ ID NO: 20292 - DNA, 20 bp, synthetic construct
  misc_feature 1..20: note = Description of Artificial Sequence: Synthetic oligonucleotide
  misc_feature 1..20: note = Target: SCN10A; (-) strand; PAM type: NRG; PAM sequence: AGG
  source 1..20: mol_type = other DNA
actggatgagttaacacaga

SEQ ID NO: 20293 - DNA, 20 bp, synthetic construct
  misc_feature 1..20: note = Description of Artificial Sequence: Synthetic oligonucleotide
  misc_feature 1..20: note = Target: SCN10A; (-) strand; PAM type: NRG; PAM sequence: AAG
  source 1..20: mol_type = other DNA
aactggatgagttaacacag

SEQ ID NO: 20294 - DNA, 20 bp, synthetic construct
  misc_feature 1..20: note = Description of Artificial Sequence: Synthetic oligonucleotide
  misc_feature 1..20: note = Target: SCN10A; (-) strand; PAM type: NRG; PAM sequence: CAG
  source 1..20: mol_type = other DNA
tgcaactggatgagttaaca

SEQ ID NO: 20295 - DNA, 20 bp, synthetic construct
  misc_feature 1..20: note = Description of Artificial Sequence: Synthetic oligonucleotide
  misc_feature 1..20: note = Target: SCN10A; (-) strand; PAM type: NRG; PAM sequence: GAG
  source 1..20: mol_type = other DNA
ttgaaaagatgcaactggat

SEQ ID NO: 20296 - DNA, 20 bp, synthetic construct
  misc_feature 1..20: note = Description of Artificial Sequence: Synthetic oligonucleotide
  misc_feature 1..20: note = Target: SCN10A; (-) strand; PAM type: NRG; PAM sequence: TGG
  source 1..20: mol_type = other DNA
taattttgaaaagatgcaac

SEQ ID NO: 20297 - DNA, 20 bp, synthetic construct
  misc_feature 1..20: note = Description of Artificial Sequence: Synthetic oligonucleotide
  misc_feature 1..20: note = Target: SCN10A; (-) strand; PAM type: NRG; PAM sequence: AAG
  source 1..20: mol_type = other DNA
atgtaagtggtaattttgaa

SEQ ID NO: 20298 - DNA, 20 bp, synthetic construct
  misc_feature 1..20: note = Description of Artificial Sequence: Synthetic oligonucleotide
  misc_feature 1..20: note = Target: SCN10A; (-) strand; PAM type: NRG; PAM sequence: TGG
  source 1..20: mol_type = other DNA
gaaagcagtttgaatgtaag

SEQ ID NO: 20299 - DNA, 20 bp, synthetic construct
  misc_feature 1..20: note = Description of Artificial Sequence: Synthetic oligonucleotide
  misc_feature 1..20: note = Target: SCN10A; (-) strand; PAM type: NRG; PAM sequence: AAG
  source 1..20: mol_type = other DNA
tttgaaagcagtttgaatgt

SEQ ID NO: 20300 - DNA, 20 bp, synthetic construct
  misc_feature 1..20: note = Description of Artificial Sequence: Synthetic oligonucleotide
  misc_feature 1..20: note = Target: SCN10A; (-) strand; PAM type: NRG; PAM sequence: CAG
  source 1..20: mol_type = other DNA
tatatatatatatttgaaag

SEQ ID NO: 20301 - DNA, 20 bp, synthetic construct
  misc_feature 1..20: note = Description of Artificial Sequence: Synthetic oligonucleotide
  misc_feature 1..20: note = Target: SCN10A; (-) strand; PAM type: NRG; PAM sequence: AAG
  source 1..20: mol_type = other DNA
atgtatatatatatatttga

SEQ ID NO: 20302 - DNA, 20 bp, synthetic construct
  misc_feature 1..20: note = Description of Artificial Sequence: Synthetic oligonucleotide
  misc_feature 1..20: note = Target: SCN10A; (-) strand; PAM type: NRG; PAM sequence: TGG
  source 1..20: mol_type = other DNA
tagaacttagatgacaaaga

SEQ ID NO: 20303 - DNA, 20 bp, synthetic construct
  misc_feature 1..20: note = Description of Artificial Sequence: Synthetic oligonucleotide
  misc_feature 1..20: note = Target: SCN10A; (-) strand; PAM type: NRG; PAM sequence: AAG
  source 1..20: mol_type = other DNA
ggtctagaacttagatgaca

SEQ ID NO: 20304 - DNA, 20 bp, synthetic construct
  misc_feature 1..20: note = Description of Artificial Sequence: Synthetic oligonucleotide
  misc_feature 1..20: note = Target: SCN10A; (-) strand; PAM type: NRG; PAM sequence: TAG
  source 1..20: mol_type = other DNA
ggatataggggtctagaact

SEQ ID NO: 20305 - DNA, 20 bp, synthetic construct
  misc_feature 1..20: note = Description of Artificial Sequence: Synthetic oligonucleotide
  misc_feature 1..20: note = Target: SCN10A; (-) strand; PAM type: NRG; PAM sequence: TAG
  source 1..20: mol_type = other DNA
gactttaggatataggggtc

SEQ ID NO: 20306 - DNA, 20 bp, synthetic construct
  misc_feature 1..20: note = Description of Artificial Sequence: Synthetic oligonucleotide
  misc_feature 1..20: note = Target: SCN10A; (-) strand; PAM type: NRG; PAM sequence: GGG
  source 1..20: mol_type = other DNA
aagttgactttaggatatag

SEQ ID NO: 20307 - DNA, 20 bp, synthetic construct
  misc_feature 1..20: note = Description of Artificial Sequence: Synthetic oligonucleotide
  misc_feature 1..20: note = Target: SCN10A; (-) strand; PAM type: NRG; PAM sequence: GGG
  source 1..20: mol_type = other DNA
gaagttgactttaggatata

SEQ ID NO: 20308 - DNA, 20 bp, synthetic construct
  misc_feature 1..20: note = Description of Artificial Sequence: Synthetic oligonucleotide
  misc_feature 1..20: note = Target: SCN10A; (-) strand; PAM type: NRG; PAM sequence: AGG
  source 1..20: mol_type = other DNA
ggaagttgactttaggatat

SEQ ID NO: 20309 - DNA, 20 bp, synthetic construct
  misc_feature 1..20: note = Description of Artificial Sequence: Synthetic oligonucleotide
  misc_feature 1..20: note = Target: SCN10A; (-) strand; PAM type: NRG; PAM sequence: TAG
  source 1..20: mol_type = other DNA
aggaagttgactttaggata

SEQ ID NO: 20310 - DNA, 20 bp, synthetic construct
  misc_feature 1..20: note = Description of Artificial Sequence: Synthetic oligonucleotide
  misc_feature 1..20: note = Target: SCN10A; (-) strand; PAM type: NRG; PAM sequence: AGG
  source 1..20: mol_type = other DNA
tccagtaggaagttgacttt

SEQ ID NO: 20311 - DNA, 20 bp, synthetic construct
  misc_feature 1..20: note = Description of Artificial Sequence: Synthetic oligonucleotide
  misc_feature 1..20: note = Target: SCN10A; (-) strand; PAM type: NRG; PAM sequence: TAG
  source 1..20: mol_type = other DNA
gtccagtaggaagttgactt

SEQ ID NO: 20312 - DNA, 20 bp, synthetic construct
  misc_feature 1..20: note = Description of Artificial Sequence: Synthetic oligonucleotide
  misc_feature 1..20: note = Target: SCN10A; (-) strand; PAM type: NRG; PAM sequence: AAG
  source 1..20: mol_type = other DNA
aggtaggggtgtccagtagg

SEQ ID NO: 20313 - DNA, 20 bp, synthetic construct
  misc_feature 1..20: note = Description of Artificial Sequence: Synthetic oligonucleotide
  misc_feature 1..20: note = Target: SCN10A; (-) strand; PAM type: NRG; PAM sequence: AGG
  source 1..20: mol_type = other DNA
tctaggtaggggtgtccagt

SEQ ID NO: 20314 - DNA, 20 bp, synthetic construct
  misc_feature 1..20: note = Description of Artificial Sequence: Synthetic oligonucleotide
  misc_feature 1..20: note = Target: SCN10A; (-) strand; PAM type: NRG; PAM sequence: TAG
  source 1..20: mol_type = other DNA
atctaggtaggggtgtccag

SEQ ID NO: 20315 - DNA, 20 bp, synthetic construct
  misc_feature 1..20: note = Description of Artificial Sequence: Synthetic oligonucleotide
  misc_feature 1..20: note = Target: SCN10A; (-) strand; PAM type: NRG; PAM sequence: CAG
  source 1..20: mol_type = other DNA
agcatctaggtaggggtgtc

SEQ ID NO: 20316 - DNA, 20 bp, synthetic construct
  misc_feature 1..20: note = Description of Artificial Sequence: Synthetic oligonucleotide
  misc_feature 1..20: note = Target: SCN10A; (-) strand; PAM type: NRG; PAM sequence: GGG
  source 1..20: mol_type = other DNA
cccttggagcatctaggtag

SEQ ID NO: 20317 - DNA, 20 bp, synthetic construct
  misc_feature 1..20: note = Description of Artificial Sequence: Synthetic oligonucleotide
  misc_feature 1..20: note = Target: SCN10A; (-) strand; PAM type: NRG; PAM sequence: GGG
  source 1..20: mol_type = other DNA
gcccttggagcatctaggta

SEQ ID NO: 20318 - DNA, 20 bp, synthetic construct
  misc_feature 1..20: note = Description of Artificial Sequence: Synthetic oligonucleotide
  misc_feature 1..20: note = Target: SCN10A; (-) strand; PAM type: NRG; PAM sequence: AGG
  source 1..20: mol_type = other DNA
tgcccttggagcatctaggt

SEQ ID NO: 20319 - DNA, 20 bp, synthetic construct
  misc_feature 1..20: note = Description of Artificial Sequence: Synthetic oligonucleotide
  misc_feature 1..20: note = Target: SCN10A; (-) strand; PAM type: NRG; PAM sequence: TAG
  source 1..20: mol_type = other DNA
gtgcccttggagcatctagg

SEQ ID NO: 20320 - DNA, 20 bp, synthetic construct
  misc_feature 1..20: note = Description of Artificial Sequence: Synthetic oligonucleotide
  misc_feature 1..20: note = Target: SCN10A; (-) strand; PAM type: NRG; PAM sequence: AGG
  source 1..20: mol_type = other DNA
caggtgcccttggagcatct

SEQ ID NO: 20321 - DNA, 20 bp, synthetic construct
  misc_feature 1..20: note = Description of Artificial Sequence: Synthetic oligonucleotide
  misc_feature 1..20: note = Target: SCN10A; (-) strand; PAM type: NRG; PAM sequence: TAG
  source 1..20: mol_type = other DNA
tcaggtgcccttggagcatc

SEQ ID NO: 20322 - DNA, 20 bp, synthetic construct
  misc_feature 1..20: note = Description of Artificial Sequence: Synthetic oligonucleotide
  misc_feature 1..20: note = Target: SCN10A; (-) strand; PAM type: NRG; PAM sequence: GAG
  source 1..20: mol_type = other DNA
ttgggtttcaggtgcccttg

SEQ ID NO: 20323 - DNA, 20 bp, synthetic construct
  misc_feature 1..20: note = Description of Artificial Sequence: Synthetic oligonucleotide
  misc_feature 1..20: note = Target: SCN10A; (-) strand; PAM type: NRG; PAM sequence: TGG
  source 1..20: mol_type = other DNA
tattgggtttcaggtgccct

SEQ ID NO: 20324 - DNA, 20 bp, synthetic construct
  misc_feature 1..20: note = Description of Artificial Sequence: Synthetic oligonucleotide
  misc_feature 1..20: note = Target: SCN10A; (-) strand; PAM type: NRG; PAM sequence: AGG
  source 1..20: mol_type = other DNA
tctgggatatattgggtttc

SEQ ID NO: 20325 - DNA, 20 bp, synthetic construct
  misc_feature 1..20: note = Description of Artificial Sequence: Synthetic oligonucleotide
  misc_feature 1..20: note = Target: SCN10A; (-) strand; PAM type: NRG; PAM sequence: CAG
  source 1..20: mol_type = other DNA
gtctgggatatattgggttt

SEQ ID NO: 20326 - DNA, 20 bp, synthetic construct
  misc_feature 1..20: note = Description of Artificial Sequence: Synthetic oligonucleotide
  misc_feature 1..20: note = Target: SCN10A; (-) strand; PAM type: NRG; PAM sequence: GGG
  source 1..20: mol_type = other DNA
agttgagtctgggatatatt

SEQ ID NO: 20327 - DNA, 20 bp, synthetic construct
  misc_feature 1..20: note = Description of Artificial Sequence: Synthetic oligonucleotide
  misc_feature 1..20: note = Target: SCN10A; (-) strand; PAM type: NRG; PAM sequence: TGG
  source 1..20: mol_type = other DNA
gagttgagtctgggatatat

SEQ ID NO: 20328 - DNA, 20 bp, synthetic construct
  misc_feature 1..20: note = Description of Artificial Sequence: Synthetic oligonucleotide
  misc_feature 1..20: note = Target: SCN10A; (-) strand; PAM type: NRG; PAM sequence: GGG
  source 1..20: mol_type = other DNA
gaagattatgagttgagtct

SEQ ID NO: 20329 - DNA, 20 bp, synthetic construct
  misc_feature 1..20: note = Description of Artificial Sequence: Synthetic oligonucleotide
  misc_feature 1..20: note = Target: SCN10A; (-) strand; PAM type: NRG; PAM sequence: TGG
  source 1..20: mol_type = other DNA
agaagattatgagttgagtc

SEQ ID NO: 20330 - DNA, 20 bp, synthetic construct
  misc_feature 1..20: note = Description of Artificial Sequence: Synthetic oligonucleotide
  misc_feature 1..20: note = Target: SCN10A; (-) strand; PAM type: NRG; PAM sequence: GAG
  source 1..20: mol_type = other DNA
atgaaagaagattatgagtt

SEQ ID NO: 20331 - DNA, 20 bp, synthetic construct
  misc_feature 1..20: note = Description of Artificial Sequence: Synthetic oligonucleotide
  misc_feature 1..20: note = Target: SCN10A; (-) strand; PAM type: NRG; PAM sequence: GAG
  source 1..20: mol_type = other DNA
gaaagatgaaagaagattat

SEQ ID NO: 20332 - DNA, 20 bp, synthetic construct
  misc_feature 1..20: note = Description of Artificial Sequence: Synthetic oligonucleotide
  misc_feature 1..20: note = Target: SCN10A; (-) strand; PAM type: NRG; PAM sequence: AAG
  source 1..20: mol_type = other DNA
ttaatggggaaagatgaaag

SEQ ID NO: 20333 - DNA, 20 bp, synthetic construct
  misc_feature 1..20: note = Description of Artificial Sequence: Synthetic oligonucleotide
  misc_feature 1..20: note = Target: SCN10A; (-) strand; PAM type: NRG; PAM sequence: AAG
  source 1..20: mol_type = other DNA
gctttaatggggaaagatga

SEQ ID NO: 20334 - DNA, 20 bp, synthetic construct
  misc_feature 1..20: note = Description of Artificial Sequence: Synthetic oligonucleotide
  misc_feature 1..20: note = Target: SCN10A; (-) strand; PAM type: NRG; PAM sequence: AAG
  source 1..20: mol_type = other DNA
gaagggggctttaatgggga

SEQ ID NO: 20335 - DNA, 20 bp, synthetic construct
  misc_feature 1..20: note = Description of Artificial Sequence: Synthetic oligonucleotide
  misc_feature 1..20: note = Target: SCN10A; (-) strand; PAM type: NRG; PAM sequence: GGG
  source 1..20: mol_type = other DNA
ggaagaagggggctttaatg

SEQ ID NO: 20336 - DNA, 20 bp, synthetic construct
  misc_feature 1..20: note = Description of Artificial Sequence: Synthetic oligonucleotide
  misc_feature 1..20: note = Target: SCN10A; (-) strand; PAM type: NRG; PAM sequence: GGG
  source 1..20: mol_type = other DNA
gggaagaagggggctttaat

SEQ ID NO: 20337 - DNA, 20 bp, synthetic construct
  misc_feature 1..20: note = Description of Artificial Sequence: Synthetic oligonucleotide
  misc_feature 1..20: note = Target: SCN10A; (-) strand; PAM type: NRG; PAM sequence: TGG
  source 1..20: mol_type = other DNA
ggggaagaagggggctttaa

SEQ ID NO: 20338 - DNA, 20 bp, synthetic construct
  misc_feature 1..20: note = Description of Artificial Sequence: Synthetic oligonucleotide
  misc_feature 1..20: note = Target: SCN10A; (-) strand; PAM type: NRG; PAM sequence: GGG
  source 1..20: mol_type = other DNA
agcattttaggggaagaagg

SEQ ID NO: 20339 - DNA, 20 bp, synthetic construct
  misc_feature 1..20: note = Description of Artificial Sequence: Synthetic oligonucleotide
  misc_feature 1..20: note = Target: SCN10A; (-) strand; PAM type: NRG; PAM sequence: GGG
  source 1..20: mol_type = other DNA
gagcattttaggggaagaag

SEQ ID NO: 20340 - DNA, 20 bp, synthetic construct
  misc_feature 1..20: note = Description of Artificial Sequence: Synthetic oligonucleotide
  misc_feature 1..20: note = Target: SCN10A; (-) strand; PAM type: NRG; PAM sequence: GGG
  source 1..20: mol_type = other DNA
ggagcattttaggggaagaa

SEQ ID NO: 20341 - DNA, 20 bp, synthetic construct
  misc_feature 1..20: note = Description of Artificial Sequence: Synthetic oligonucleotide
  misc_feature 1..20: note = Target: SCN10A; (-) strand; PAM type: NRG; PAM sequence: AGG
  source 1..20: mol_type = other DNA
gggagcattttaggggaaga

SEQ ID NO: 20342 - DNA, 20 bp, synthetic construct
  misc_feature 1..20: note = Description of Artificial Sequence: Synthetic oligonucleotide
  misc_feature 1..20: note = Target: SCN10A; (-) strand; PAM type: NRG; PAM sequence: AAG
  source 1..20: mol_type = other DNA
agggagcattttaggggaag

SEQ ID NO: 20343 - DNA, 20 bp, synthetic construct
  misc_feature 1..20: note = Description of Artificial Sequence: Synthetic oligonucleotide
  misc_feature 1..20: note = Target: SCN10A; (-) strand; PAM type: NRG; PAM sequence: AAG
  source 1..20: mol_type = other DNA
taaagggagcattttagggg

SEQ ID NO: 20344 - DNA, 20 bp, synthetic construct
  misc_feature 1..20: note = Description of Artificial Sequence: Synthetic oligonucleotide
  misc_feature 1..20: note = Target: SCN10A; (-) strand; PAM type: NRG; PAM sequence: GGG
  source 1..20: mol_type = other DNA
tcataaagggagcattttag

SEQ ID NO: 20345 - DNA, 20 bp, synthetic construct
  misc_feature 1..20: note = Description of Artificial Sequence: Synthetic oligonucleotide
  misc_feature 1..20: note = Target: SCN10A; (-) strand; PAM type: NRG; PAM sequence: GGG
  source 1..20: mol_type = other DNA
ctcataaagggagcatttta

SEQ ID NO: 20346 - DNA, 20 bp, synthetic construct
  misc_feature 1..20: note = Description of Artificial Sequence: Synthetic oligonucleotide
  misc_feature 1..20: note = Target: SCN10A; (-) strand; PAM type: NRG; PAM sequence: AGG
  source 1..20: mol_type = other DNA
actcataaagggagcatttt

SEQ ID NO: 20347 - DNA, 20 bp, synthetic construct
  misc_feature 1..20: note = Description of Artificial Sequence: Synthetic oligonucleotide
  misc_feature 1..20: note = Target: SCN10A; (-) strand; PAM type: NRG; PAM sequence: TAG
  source 1..20: mol_type = other DNA
aactcataaagggagcattt

SEQ ID NO: 20348 - DNA, 20 bp, synthetic construct
  misc_feature 1..20: note = Description of Artificial Sequence: Synthetic oligonucleotide
  misc_feature 1..20: note = Target: SCN10A; (-) strand; PAM type: NRG; PAM sequence: GAG
  source 1..20: mol_type = other DNA
gatacaataactcataaagg

SEQ ID NO: 20349 - DNA, 20 bp, synthetic construct
  misc_feature 1..20: note = Description of Artificial Sequence: Synthetic oligonucleotide
  misc_feature 1..20: note = Target: SCN10A; (-) strand; PAM type: NRG; PAM sequence: GGG
  source 1..20: mol_type = other DNA
ctgatacaataactcataaa

SEQ ID NO: 20350 - DNA, 20 bp, synthetic construct
  misc_feature 1..20: note = Description of Artificial Sequence: Synthetic oligonucleotide
  misc_feature 1..20: note = Target: SCN10A; (-) strand; PAM type: NRG; PAM sequence: AGG
  source 1..20: mol_type = other DNA
gctgatacaataactcataa

SEQ ID NO: 20351 - DNA, 20 bp, synthetic construct
  misc_feature 1..20: note = Description of Artificial Sequence: Synthetic oligonucleotide
  misc_feature 1..20: note = Target: SCN10A; (-) strand; PAM type: NRG; PAM sequence: AAG
  source 1..20: mol_type = other DNA
tgctgatacaataactcata

SEQ ID NO: 20352 - DNA, 20 bp, synthetic construct
  misc_feature 1..20: note = Description of Artificial Sequence: Synthetic oligonucleotide
  misc_feature 1..20: note = Target: SCN10A; (-) strand; PAM type: NRG; PAM sequence: AAG
  source 1..20: mol_type = other DNA
ggttctggtataagtgcctt

SEQ ID NO: 20353 - DNA, 20 bp, synthetic construct
  misc_feature 1..20: note = Description of Artificial Sequence: Synthetic oligonucleotide
  misc_feature 1..20: note = Target: SCN10A; (-) strand; PAM type: NRG; PAM sequence: AAG
  source 1..20: mol_type = other DNA
gatgcatatggttctggtat

SEQ ID NO: 20354 - DNA, 20 bp, synthetic construct
  misc_feature 1..20: note = Description of Artificial Sequence: Synthetic oligonucleotide
  misc_feature 1..20: note = Target: SCN10A; (-) strand; PAM type: NRG; PAM sequence: TGG
  source 1..20: mol_type = other DNA
cttgatgatgcatatggttc

SEQ ID NO: 20355 - DNA, 20 bp, synthetic construct
  misc_feature 1..20: note = Description of Artificial Sequence: Synthetic oligonucleotide
  misc_feature 1..20: note = Target: SCN10A; (-) strand; PAM type: NRG; PAM sequence: TGG
  source 1..20: mol_type = other DNA
tcaggacttgatgatgcata

SEQ ID NO: 20356 - DNA, 20 bp, synthetic construct
  misc_feature 1..20: note = Description of Artificial Sequence: Synthetic oligonucleotide
  misc_feature 1..20: note = Target: SCN10A; (-) strand; PAM type: NRG; PAM sequence: AGG
  source 1..20: mol_type = other DNA
atctaaggggcataagattc

SEQ ID NO: 20357 - DNA, 20 bp, synthetic construct
  misc_feature 1..20: note = Description of Artificial Sequence: Synthetic oligonucleotide
  misc_feature 1..20: note = Target: SCN10A; (-) strand; PAM type: NRG; PAM sequence: CAG
  source 1..20: mol_type = other DNA
tatctaaggggcataagatt

SEQ ID NO: 20358 - DNA, 20 bp, synthetic construct
  misc_feature 1..20: note = Description of Artificial Sequence: Synthetic oligonucleotide
  misc_feature 1..20: note = Target: SCN10A; (-) strand; PAM type: NRG; PAM sequence: AAG
  source 1..20: mol_type = other DNA
gagagctatctaaggggcat

SEQ ID NO: 20359 - DNA, 20 bp, synthetic construct
  misc_feature 1..20: note = Description of Artificial Sequence: Synthetic oligonucleotide
  misc_feature 1..20: note = Target: SCN10A; (-) strand; PAM type: NRG; PAM sequence: GGG
  source 1..20: mol_type = other DNA
ggatatgagagctatctaag

SEQ ID NO: 20360 - DNA, 20 bp, synthetic construct
  misc_feature 1..20: note = Description of Artificial Sequence: Synthetic oligonucleotide
  misc_feature 1..20: note = Target: SCN10A; (-) strand; PAM type: NRG; PAM sequence: GGG
  source 1..20: mol_type = other DNA
aggatatgagagctatctaa

SEQ ID NO: 20361 - DNA, 20 bp, synthetic construct
  misc_feature 1..20: note = Description of Artificial Sequence: Synthetic oligonucleotide
  misc_feature 1..20: note = Target: SCN10A; (-) strand; PAM type: NRG; PAM sequence: AGG
  source 1..20: mol_type = other DNA
aaggatatgagagctatcta

SEQ ID NO: 20362 - DNA, 20 bp, synthetic construct
  misc_feature 1..20: note = Description of Artificial Sequence: Synthetic oligonucleotide
  misc_feature 1..20: note = Target: SCN10A; (-) strand; PAM type: NRG; PAM sequence: AAG
  source 1..20: mol_type = other DNA
gaaggatatgagagctatct

SEQ ID NO: 20363 - DNA, 20 bp, synthetic construct
  misc_feature 1..20: note = Description of Artificial Sequence: Synthetic oligonucleotide
  misc_feature 1..20: note = Target: SCN10A; (-) strand; PAM type: NRG; PAM sequence: GAG
  source 1..20: mol_type = other DNA
tgggaaatggaaggatatga

SEQ ID NO: 20364 - DNA, 20 bp, synthetic construct
  misc_feature 1..20: note = Description of Artificial Sequence: Synthetic oligonucleotide
  misc_feature 1..20: note = Target: SCN10A; (-) strand; PAM type: NRG; PAM sequence: GAG
  source 1..20: mol_type = other DNA
gatgggaaatggaaggatat

SEQ ID NO: 20365 - DNA, 20 bp, synthetic construct
  misc_feature 1..20: note = Description of Artificial Sequence: Synthetic oligonucleotide
  misc_feature 1..20: note = Target: SCN10A; (-) strand; PAM type: NRG; PAM sequence: AGG
  source 1..20: mol_type = other DNA
tggggctgatgggaaatgga

SEQ ID NO: 20366 - DNA, 20 bp, synthetic construct
  misc_feature 1..20: note = Description of Artificial Sequence: Synthetic oligonucleotide
  misc_feature 1..20: note = Target: SCN10A; (-) strand; PAM type: NRG; PAM sequence: AAG
  source 1..20: mol_type = other DNA
gtggggctgatgggaaatgg

SEQ ID NO: 20367 - DNA, 20 bp, synthetic construct
  misc_feature 1..20: note = Description of Artificial Sequence: Synthetic oligonucleotide
  misc_feature 1..20: note = Target: SCN10A; (-) strand; PAM type: NRG; PAM sequence: TGG
  source 1..20: mol_type = other DNA
acagtggggctgatgggaaa

SEQ ID NO: 20368 - DNA, 20 bp, synthetic construct
  misc_feature 1..20: note = Description of Artificial Sequence: Synthetic oligonucleotide
  misc_feature 1..20: note = Target: SCN10A; (-) strand; PAM type: NRG; PAM sequence: GGG
  source 1..20: mol_type = other DNA
gtagtgacagtggggctgat

SEQ ID NO: 20369 - DNA, 20 bp, synthetic construct
  misc_feature 1..20: note = Description of Artificial Sequence: Synthetic oligonucleotide
  misc_feature 1..20: note = Target: SCN10A; (-) strand; PAM type: NRG; PAM sequence: TGG
  source 1..20: mol_type = other DNA
ggtagtgacagtggggctga

SEQ ID NO: 20370 - DNA, 20 bp, synthetic construct
  misc_feature 1..20: note = Description of Artificial Sequence: Synthetic oligonucleotide
  misc_feature 1..20: note = Target: SCN10A; (-) strand; PAM type: NRG; PAM sequence: GGG
  source 1..20: mol_type = other DNA
actctggggtagtgacagtg

SEQ ID NO: 20371 - DNA, 20 bp, synthetic construct
  misc_feature 1..20: note = Description of Artificial Sequence: Synthetic oligonucleotide
  misc_feature 1..20: note = Target: SCN10A; (-) strand; PAM type: NRG; PAM sequence: GGG
  source 1..20: mol_type = other DNA
aactctggggtagtgacagt

SEQ ID NO: 20372 - DNA, 20 bp, synthetic construct
  misc_feature 1..20: note = Description of Artificial Sequence: Synthetic oligonucleotide
  misc_feature 1..20: note = Target: SCN10A; (-) strand; PAM type: NRG; PAM sequence: TGG
  source 1..20: mol_type = other DNA
gaactctggggtagtgacag

SEQ ID NO: 20373 - DNA, 20 bp, synthetic construct
  misc_feature 1..20: note = Description of Artificial Sequence: Synthetic oligonucleotide
  misc_feature 1..20: note = Target: SCN10A; (-) strand; PAM type: NRG; PAM sequence: CAG
  source 1..20: mol_type = other DNA
cttgaactctggggtagtga

SEQ ID NO: 20374 - DNA, 20 bp, synthetic construct
  misc_feature 1..20: note = Description of Artificial Sequence: Synthetic oligonucleotide
  misc_feature 1..20: note = Target: SCN10A; (-) strand; PAM type: NRG; PAM sequence: TAG
  source 1..20: mol_type = other DNA
gcagtgcttgaactctgggg

SEQ ID NO: 20375 - DNA, 20 bp, synthetic construct
  misc_feature 1..20: note = Description of Artificial Sequence: Synthetic oligonucleotide
  misc_feature 1..20: note = Target: SCN10A; (-) strand; PAM type: NRG; PAM sequence: GGG
  source 1..20: mol_type = other DNA
atggcagtgcttgaactctg

SEQ ID NO: 20376 - DNA, 20 bp, synthetic construct
  misc_feature 1..20: note = Description of Artificial Sequence: Synthetic oligonucleotide
  misc_feature 1..20: note = Target: SCN10A; (-) strand; PAM type: NRG; PAM sequence: GGG
  source 1..20: mol_type = other DNA
gatggcagtgcttgaactct

SEQ ID NO: 20377 - DNA, 20 bp, synthetic construct
  misc_feature 1..20: note = Description of Artificial Sequence: Synthetic oligonucleotide
  misc_feature 1..20: note = Target: SCN10A; (-) strand; PAM type: NRG; PAM sequence: TGG
  source 1..20: mol_type = other DNA
agatggcagtgcttgaactc

SEQ ID NO: 20378 - DNA, 20 bp, synthetic construct
  misc_feature 1..20: note = Description of Artificial Sequence: Synthetic oligonucleotide
  misc_feature 1..20: note = Target: SCN10A; (-) strand; PAM type: NRG; PAM sequence: CAG
  source 1..20: mol_type = other DNA
ggaagccaagtacaagatgg

SEQ ID NO: 20379 - DNA, 20 bp, synthetic construct
  misc_feature 1..20: note = Description of Artificial Sequence: Synthetic oligonucleotide
  misc_feature 1..20: note = Target: SCN10A; (-) strand; PAM type: NRG; PAM sequence: TGG
  source 1..20: mol_type = other DNA
ggaggaagccaagtacaaga

SEQ ID NO: 20380 - DNA, 20 bp, synthetic construct
  misc_feature 1..20: note = Description of Artificial Sequence: Synthetic oligonucleotide
  misc_feature 1..20: note = Target: SCN10A; (-) strand; PAM type: NRG; PAM sequence: AAG
  source 1..20: mol_type = other DNA
gttaggaggaagccaagtac

SEQ ID NO: 20381 - DNA, 20 bp, synthetic construct
  misc_feature 1..20: note = Description of Artificial Sequence: Synthetic oligonucleotide
  misc_feature 1..20: note = Target: SCN10A; (-) strand; PAM type: NRG; PAM sequence: AAG
  source 1..20: mol_type = other DNA
aaaccagttaggaggaagcc

SEQ ID NO: 20382 - DNA, 20 bp, synthetic construct
  misc_feature 1..20: note = Description of Artificial Sequence: Synthetic oligonucleotide
  misc_feature 1..20: note = Target: SCN10A; (-) strand; PAM type: NRG; PAM sequence: AAG
  source 1..20: mol_type = other DNA
cagggaaaccagttaggagg

SEQ ID NO: 20383 - DNA, 20 bp, synthetic construct
  misc_feature 1..20: note = Description of Artificial Sequence: Synthetic oligonucleotide
  misc_feature 1..20: note = Target: SCN10A; (-) strand; PAM type: NRG; PAM sequence: AGG
  source 1..20: mol_type = other DNA
tgtcagggaaaccagttagg

SEQ ID NO: 20384 - DNA, 20 bp, synthetic construct
  misc_feature 1..20: note = Description of Artificial Sequence: Synthetic oligonucleotide
  misc_feature 1..20: note = Target: SCN10A; (-) strand; PAM type: NRG; PAM sequence: GAG
  source 1..20: mol_type = other DNA
ttgtcagggaaaccagttag

SEQ ID NO: 20385 - DNA, 20 bp, synthetic construct
  misc_feature 1..20: note = Description of Artificial Sequence: Synthetic oligonucleotide
  misc_feature 1..20: note = Target: SCN10A; (-) strand; PAM type: NRG; PAM sequence: AGG
  source 1..20: mol_type = other DNA
tgttgtcagggaaaccagtt

SEQ ID NO: 20386 - DNA, 20 bp, synthetic construct
  misc_feature 1..20: note = Description of Artificial Sequence: Synthetic oligonucleotide
  misc_feature 1..20: note = Target: SCN10A; (-) strand; PAM type: NRG; PAM sequence: TAG
  source 1..20: mol_type = other DNA
atgttgtcagggaaaccagt

SEQ ID NO: 20387 - DNA, 20 bp, synthetic construct
  misc_feature 1..20: note = Description of Artificial Sequence: Synthetic oligonucleotide
  misc_feature 1..20: note = Target: SCN10A; (-) strand; PAM type: NRG; PAM sequence: CAG
  source 1..20: mol_type = other DNA
aagtatgttgtcagggaaac

SEQ ID NO: 20388 - DNA, 20 bp, synthetic construct
  misc_feature 1..20: note = Description of Artificial Sequence: Synthetic oligonucleotide
  misc_feature 1..20: note = Target: SCN10A; (-) strand; PAM type: NRG; PAM sequence: GGG
  source 1..20: mol_type = other DNA
agaggggaagtatgttgtca

SEQ ID NO: 20389 - DNA, 20 bp, synthetic construct
  misc_feature 1..20: note = Description of Artificial Sequence: Synthetic oligonucleotide
  misc_feature 1..20: note = Target: SCN10A; (-) strand; PAM type: NRG; PAM sequence: AGG
  source 1..20: mol_type = other DNA
aagaggggaagtatgttgtc

SEQ ID NO: 20390 - DNA, 20 bp, synthetic construct
  misc_feature 1..20: note = Description of Artificial Sequence: Synthetic oligonucleotide
  misc_feature 1..20: note = Target: SCN10A; (-) strand; PAM type: NRG; PAM sequence: CAG
  source 1..20: mol_type = other DNA
taagaggggaagtatgttgt

SEQ ID NO: 20391 - DNA, 20 bp, synthetic construct
  misc_feature 1..20: note = Description of Artificial Sequence: Synthetic oligonucleotide
  misc_feature 1..20: note = Target: SCN10A; (-) strand; PAM type: NRG; PAM sequence: AAG
  source 1..20: mol_type = other DNA
acttgtagatataagagggg

SEQ ID NO: 20392 - DNA, 20 bp, synthetic construct
  misc_feature 1..20: note = Description of Artificial Sequence: Synthetic oligonucleotide
  misc_feature 1..20: note = Target: SCN10A; (-) strand; PAM type: NRG; PAM sequence: GGG
  source 1..20: mol_type = other DNA
gatacttgtagatataagag

SEQ ID NO: 20393 - DNA, 20 bp, synthetic construct
  misc_feature 1..20: note = Description of Artificial Sequence: Synthetic oligonucleotide
  misc_feature 1..20: note = Target: SCN10A; (-) strand; PAM type: NRG; PAM sequence: GGG
  source 1..20: mol_type = other DNA
ggatacttgtagatataaga

SEQ ID NO: 20394 - DNA, 20 bp, synthetic construct
  misc_feature 1..20: note = Description of Artificial Sequence: Synthetic oligonucleotide
  misc_feature 1..20: note = Target: SCN10A; (-) strand; PAM type: NRG; PAM sequence: AGG
  source 1..20: mol_type = other DNA
tggatacttgtagatataag

SEQ ID NO: 20395 - DNA, 20 bp, synthetic construct
  misc_feature 1..20: note = Description of Artificial Sequence: Synthetic oligonucleotide
  misc_feature 1..20: note = Target: SCN10A; (-) strand; PAM type: NRG; PAM sequence: GAG
  source 1..20: mol_type = other DNA
ctggatacttgtagatataa

SEQ ID NO: 20396 - DNA, 20 bp, synthetic construct
  misc_feature 1..20: note = Description of Artificial Sequence: Synthetic oligonucleotide
  misc_feature 1..20: note = Target: SCN10A; (-) strand; PAM type: NRG; PAM sequence: AAG
  source 1..20: mol_type = other DNA
ctctggatacttgtagatat

SEQ ID NO: 20397 - DNA, 20 bp, synthetic construct
  misc_feature 1..20: note = Description of Artificial Sequence: Synthetic oligonucleotide
  misc_feature 1..20: note = Target: SCN10A; (-) strand; PAM type: NRG; PAM sequence: TAG
  source 1..20: mol_type = other DNA
aaagttactctggatacttg

SEQ ID NO: 20398 - DNA, 20 bp, synthetic construct
  misc_feature 1..20: note = Description of Artificial Sequence: Synthetic oligonucleotide
  misc_feature 1..20: note = Target: SCN10A; (-) strand; PAM type: NRG; PAM sequence: TGG
  source 1..20: mol_type = other DNA
gcattttataaaagttactc

SEQ ID NO: 20399 - DNA, 20 bp, synthetic construct
  misc_feature 1..20: note = Description of Artificial Sequence: Synthetic oligonucleotide
  misc_feature 1..20: note = Target: SCN10A; (-) strand; PAM type: NRG; PAM sequence: AAG
  source 1..20: mol_type = other DNA
gttacatttgcattttataa

SEQ ID NO: 20400 - DNA, 20 bp, synthetic construct
  misc_feature 1..20: note = Description of Artificial Sequence: Synthetic oligonucleotide
  misc_feature 1..20: note = Target: SCN10A; (-) strand; PAM type: NRG; PAM sequence: AAG
  source 1..20: mol_type = other DNA
ttaaaggattggaggcaggg

SEQ ID NO: 20401 - DNA, 20 bp, synthetic construct
  misc_feature 1..20: note = Description of Artificial Sequence: Synthetic oligonucleotide
  misc_feature 1..20: note = Target: SCN10A; (-) strand; PAM type: NRG; PAM sequence: GGG
  source 1..20: mol_type = other DNA
ccattaaaggattggaggca

SEQ ID NO: 20402 - DNA, 20 bp, synthetic construct
  misc_feature 1..20: note = Description of Artificial Sequence: Synthetic oligonucleotide
  misc_feature 1..20: note = Target: SCN10A; (-) strand; PAM type: NRG; PAM sequence: AGG
  source 1..20: mol_type = other DNA
gccattaaaggattggaggc

SEQ ID NO: 20403 - DNA, 20 bp, synthetic construct
  misc_feature 1..20: note = Description of Artificial Sequence: Synthetic oligonucleotide
  misc_feature 1..20: note = Target: SCN10A; (-) strand; PAM type: NRG; PAM sequence: CAG
  source 1..20: mol_type = other DNA
tgccattaaaggattggagg

SEQ ID NO: 20404 - DNA, 20 bp, synthetic construct
  misc_feature 1..20: note = Description of Artificial Sequence: Synthetic oligonucleotide
  misc_feature 1..20: note = Target: SCN10A; (-) strand; PAM type: NRG; PAM sequence: AGG
  source 1..20: mol_type = other DNA
aggtgccattaaaggattgg

SEQ ID NO: 20405 - DNA, 20 bp, synthetic construct
  misc_feature 1..20: note = Description of Artificial Sequence: Synthetic oligonucleotide
  misc_feature 1..20: note = Target: SCN10A; (-) strand; PAM type: NRG; PAM sequence: GAG
  source 1..20: mol_type = other DNA
gaggtgccattaaaggattg

SEQ ID NO: 20406 - DNA, 20 bp, synthetic construct
  misc_feature 1..20: note = Description of Artificial Sequence: Synthetic oligonucleotide
  misc_feature 1..20: note = Target: SCN10A; (-) strand; PAM type: NRG; PAM sequence: TGG
  source 1..20: mol_type = other DNA
gtgaggtgccattaaaggat

SEQ ID NO: 20407 - DNA, 20 bp, synthetic construct
  misc_feature 1..20: note = Description of Artificial Sequence: Synthetic oligonucleotide
  misc_feature 1..20: note = Target: SCN10A; (-) strand; PAM type: NRG; PAM sequence: AGG
  source 1..20: mol_type = other DNA
gaggagtgaggtgccattaa

SEQ ID NO: 20408 - DNA, 20 bp, synthetic construct
  misc_feature 1..20: note = Description of Artificial Sequence: Synthetic oligonucleotide
  misc_feature 1..20: note = Target: SCN10A; (-) strand; PAM type: NRG; PAM sequence: AAG
  source 1..20: mol_type = other DNA
agaggagtgaggtgccatta

SEQ ID NO: 20409 - DNA, 20 bp, synthetic construct
  misc_feature 1..20: note = Description of Artificial Sequence: Synthetic oligonucleotide
  misc_feature 1..20: note = Target: SCN10A; (-) strand; PAM type: NRG; PAM sequence: AGG
  source 1..20: mol_type = other DNA
acttcatgctaagaggagtg

SEQ ID NO: 20410 - DNA, 20 bp, synthetic construct
  misc_feature 1..20: note = Description of Artificial Sequence: Synthetic oligonucleotide
  misc_feature 1..20: note = Target: SCN10A; (-) strand; PAM type: NRG; PAM sequence: GAG
  source 1..20: mol_type = other DNA
gacttcatgctaagaggagt

SEQ ID NO: 20411 - DNA, 20 bp, synthetic construct
  misc_feature 1..20: note = Description of Artificial Sequence: Synthetic oligonucleotide
  misc_feature 1..20: note = Target: SCN10A; (-) strand; PAM type: NRG; PAM sequence: GAG
  source 1..20: mol_type = other DNA
atgggacttcatgctaagag

SEQ ID NO: 20412 - DNA, 20 bp, synthetic construct
  misc_feature 1..20: note = Description of Artificial Sequence: Synthetic oligonucleotide
  misc_feature 1..20: note = Target: SCN10A; (-) strand; PAM type: NRG; PAM sequence: AGG
  source 1..20: mol_type = other DNA
atatgggacttcatgctaag

SEQ ID NO: 20413 - DNA, 20 bp, synthetic construct
  misc_feature 1..20: note = Description of Artificial Sequence: Synthetic oligonucleotide
  misc_feature 1..20: note = Target: SCN10A; (-) strand; PAM type: NRG; PAM sequence: GAG
  source 1..20: mol_type = other DNA
gatatgggacttcatgctaa

SEQ ID NO: 20414 - DNA, 20 bp, synthetic construct
  misc_feature 1..20: note = Description of Artificial Sequence: Synthetic oligonucleotide
  misc_feature 1..20: note = Target: SCN10A; (-) strand; PAM type: NRG; PAM sequence: AAG
  source 1..20: mol_type = other DNA
aggatatgggacttcatgct

SEQ ID NO: 20415 - DNA, 20 bp, synthetic construct
  misc_feature 1..20: note = Description of Artificial Sequence: Synthetic oligonucleotide
  misc_feature 1..20: note = Target: SCN10A; (-) strand; PAM type: NRG; PAM sequence: GGG
  source 1..20: mol_type = other DNA
ctagactgcattaaggatat

SEQ ID NO: 20416 - DNA, 20 bp, synthetic construct
  misc_feature 1..20: note = Description of Artificial Sequence: Synthetic oligonucleotide
  misc_feature 1..20: note = Target: SCN10A; (-) strand; PAM type: NRG; PAM sequence: TGG
  source 1..20: mol_type = other DNA
cctagactgcattaaggata

SEQ ID NO: 20417 - DNA, 20 bp, synthetic construct
  misc_feature 1..20: note = Description of Artificial Sequence: Synthetic oligonucleotide
  misc_feature 1..20: note = Target: SCN10A; (-) strand; PAM type: NRG; PAM sequence: AGG
  source 1..20: mol_type = other DNA
gaaactcctagactgcatta

SEQ ID NO: 20418 - DNA, 20 bp, synthetic construct
  misc_feature 1..20: note = Description of Artificial Sequence: Synthetic oligonucleotide
  misc_feature 1..20: note = Target: SCN10A; (-) strand; PAM type: NRG; PAM sequence: AAG
  source 1..20: mol_type = other DNA
agaaactcctagactgcatt

SEQ ID NO: 20419 - DNA, 20 bp, synthetic construct
  misc_feature 1..20: note = Description of Artificial Sequence: Synthetic oligonucleotide
  misc_feature 1..20: note = Target: SCN10A; (-) strand; PAM type: NRG; PAM sequence: TAG
  source 1..20: mol_type = other DNA
gccagatcccaagaaactcc

SEQ ID NO: 20420 - DNA, 20 bp, synthetic construct
  misc_feature 1..20: note = Description of Artificial Sequence: Synthetic oligonucleotide
  misc_feature 1..20: note = Target: SCN10A; (-) strand; PAM type: NRG; PAM sequence: AAG
  source 1..20: mol_type = other DNA
atgagttggggccagatccc

SEQ ID NO: 20421 - DNA, 20 bp, synthetic construct
  misc_feature 1..20: note = Description of Artificial Sequence: Synthetic oligonucleotide
  misc_feature 1..20: note = Target: SCN10A; (-) strand; PAM type: NRG; PAM sequence: CAG
  source 1..20: mol_type = other DNA
ctagagggatgagttggggc

SEQ ID NO: 20422 - DNA, 20 bp, synthetic construct
  misc_feature 1..20: note = Description of Artificial Sequence: Synthetic oligonucleotide
  misc_feature 1..20: note = Target: SCN10A; (-) strand; PAM type: NRG; PAM sequence: GGG
  source 1..20: mol_type = other DNA
aaggctagagggatgagttg

SEQ ID NO: 20423 - DNA, 20 bp, synthetic construct
  misc_feature 1..20: note = Description of Artificial Sequence: Synthetic oligonucleotide
  misc_feature 1..20: note = Target: SCN10A; (-) strand; PAM type: NRG; PAM sequence: GGG
  source 1..20: mol_type = other DNA
taaggctagagggatgagtt

SEQ ID NO: 20424 - DNA, 20 bp, synthetic construct
  misc_feature 1..20: note = Description of Artificial Sequence: Synthetic oligonucleotide
  misc_feature 1..20: note = Target: SCN10A; (-) strand; PAM type: NRG; PAM sequence: TGG
  source 1..20: mol_type = other DNA
ataaggctagagggatgagt

SEQ ID NO: 20425 - DNA, 20 bp, synthetic construct
  misc_feature 1..20: note = Description of Artificial Sequence: Synthetic oligonucleotide
  misc_feature 1..20: note = Target: SCN10A; (-) strand; PAM type: NRG; PAM sequence: GAG
  source 1..20: mol_type = other DNA
gaaaataaggctagagggat

SEQ ID NO: 20426 - DNA, 20 bp, synthetic construct
  misc_feature 1..20: note = Description of Artificial Sequence: Synthetic oligonucleotide
  misc_feature 1..20: note = Target: SCN10A; (-) strand; PAM type: NRG; PAM sequence: GGG
  source 1..20: mol_type = other DNA
gaactgaaaataaggctaga

SEQ ID NO: 20427 - DNA, 20 bp, synthetic construct
  misc_feature 1..20: note = Description of Artificial Sequence: Synthetic oligonucleotide
  misc_feature 1..20: note = Target: SCN10A; (-) strand; PAM type: NRG; PAM sequence: AGG
  source 1..20: mol_type = other DNA
agaactgaaaataaggctag

SEQ ID NO: 20428 - DNA, 20 bp, synthetic construct
  misc_feature 1..20: note = Description of Artificial Sequence: Synthetic oligonucleotide
  misc_feature 1..20: note = Target: SCN10A; (-) strand; PAM type: NRG; PAM sequence: GAG
  source 1..20: mol_type = other DNA
gagaactgaaaataaggcta

SEQ ID NO: 20429 - DNA, 20 bp, synthetic construct
  misc_feature 1..20: note = Description of Artificial Sequence: Synthetic oligonucleotide
  misc_feature 1..20: note = Target: SCN10A; (-) strand; PAM type: NRG; PAM sequence: TAG
  source 1..20: mol_type = other DNA
aggagaactgaaaataaggc

SEQ ID NO: 20430 - DNA, 20 bp, synthetic construct
  misc_feature 1..20: note = Description of Artificial Sequence: Synthetic oligonucleotide
  misc_feature 1..20: note = Target: SCN10A; (-) strand; PAM type: NRG; PAM sequence: AGG
  source 1..20: mol_type = other DNA
aaccaggagaactgaaaata

SEQ ID NO: 20431 - DNA, 20 bp, synthetic construct
  misc_feature 1..20: note = Description of Artificial Sequence: Synthetic oligonucleotide
  misc_feature 1..20: note = Target: SCN10A; (-) strand; PAM type: NRG; PAM sequence: AAG
  source 1..20: mol_type = other DNA
gaaccaggagaactgaaaat

SEQ ID NO: 20432 - DNA, 20 bp, synthetic construct
  misc_feature 1..20: note = Description of Artificial Sequence: Synthetic oligonucleotide
  misc_feature 1..20: note = Target: SCN10A; (-) strand; PAM type: NRG; PAM sequence: GAG
  source 1..20: mol_type = other DNA
gctgtaacctagagaaccag

SEQ ID NO: 20433 - DNA, 20 bp, synthetic construct
  misc_feature 1..20: note = Description of Artificial Sequence: Synthetic oligonucleotide
  misc_feature 1..20: note = Target: SCN10A; (-) strand; PAM type: NRG; PAM sequence: AGG
  source 1..20: mol_type = other DNA
tagctgtaacctagagaacc

SEQ ID NO: 20434 - DNA, 20 bp, synthetic construct
  misc_feature 1..20: note = Description of Artificial Sequence: Synthetic oligonucleotide
  misc_feature 1..20: note = Target: SCN10A; (-) strand; PAM type: NRG; PAM sequence: CAG
  source 1..20: mol_type = other DNA
gtagctgtaacctagagaac

SEQ ID NO: 20435 - DNA, 20 bp, synthetic construct
  misc_feature 1..20: note = Description of Artificial Sequence: Synthetic oligonucleotide
  misc_feature 1..20: note = Target: SCN10A; (-) strand; PAM type: NRG; PAM sequence: GAG
  source 1..20: mol_type = other DNA
cctaatgtagctgtaaccta

SEQ ID NO: 20436 - DNA, 20 bp, synthetic construct
  misc_feature 1..20: note = Description of Artificial Sequence: Synthetic oligonucleotide
  misc_feature 1..20: note = Target: SCN10A; (-) strand; PAM type: NRG; PAM sequence: TAG
  source 1..20: mol_type = other DNA
agcctaatgtagctgtaacc

SEQ ID NO: 20437 - DNA, 20 bp, synthetic construct
  misc_feature 1..20: note = Description of Artificial Sequence: Synthetic oligonucleotide
  misc_feature 1..20: note = Target: SCN10A; (-) strand; PAM type: NRG; PAM sequence: TAG
  source 1..20: mol_type = other DNA
aggaatgaaaaagcctaatg

SEQ ID NO: 20438 - DNA, 20 bp, synthetic construct
  misc_feature 1..20: note = Description of Artificial Sequence: Synthetic oligonucleotide
  misc_feature 1..20: note = Target: SCN10A; (-) strand; PAM type: NRG; PAM sequence: AAG
  source 1..20: mol_type = other DNA
taacatttgaaggaatgaaa

SEQ ID NO: 20439 - DNA, 20 bp, synthetic construct
  misc_feature 1..20: note = Description of Artificial Sequence: Synthetic oligonucleotide
  misc_feature 1..20: note = Target: SCN10A; (-) strand; PAM type: NRG; PAM sequence: AGG
  source 1..20: mol_type = other DNA
gaagagagaataacatttga

SEQ ID NO: 20440 - DNA, 20 bp, synthetic construct
  misc_feature 1..20: note = Description of Artificial Sequence: Synthetic oligonucleotide
  misc_feature 1..20: note = Target: SCN10A; (-) strand; PAM type: NRG; PAM sequence: AAG
  source 1..20: mol_type = other DNA
agaagagagaataacatttg

SEQ ID NO: 20441 - DNA, 20 bp, synthetic construct
  misc_feature 1..20: note = Description of Artificial Sequence: Synthetic oligonucleotide
  misc_feature 1..20: note = Target: SCN10A; (-) strand; PAM type: NRG; PAM sequence: GAG
  source 1..20: mol_type = other DNA
aaggactgcaaagcagaaga

SEQ ID NO: 20442 - DNA, 20 bp, synthetic construct
  misc_feature 1..20: note = Description of Artificial Sequence: Synthetic oligonucleotide
  misc_feature 1..20: note = Target: SCN10A; (-) strand; PAM type: NRG; PAM sequence: GAG
  source 1..20: mol_type = other DNA
gaaaggactgcaaagcagaa

SEQ ID NO: 20443 - DNA, 20 bp, synthetic construct
  misc_feature 1..20: note = Description of Artificial Sequence: Synthetic oligonucleotide
  misc_feature 1..20: note = Target: SCN10A; (-) strand; PAM type: NRG; PAM sequence: AAG
  source 1..20: mol_type = other DNA
ctgaaaggactgcaaagcag

SEQ ID NO: 20444 - DNA, 20 bp, synthetic construct
  misc_feature 1..20: note = Description of Artificial Sequence: Synthetic oligonucleotide
  misc_feature 1..20: note = Target: SCN10A; (-) strand; PAM type: NRG; PAM sequence: CAG
  source 1..20: mol_type = other DNA
aggctgaaaggactgcaaag

SEQ ID NO: 20445 - DNA, 20 bp, synthetic construct
  misc_feature 1..20: note = Description of Artificial Sequence: Synthetic oligonucleotide
  misc_feature 1..20: note = Target: SCN10A; (-) strand; PAM type: NRG; PAM sequence: AAG
  source 1..20: mol_type = other DNA
cccaggctgaaaggactgca

SEQ ID NO: 20446 - DNA, 20 bp, synthetic construct
  misc_feature 1..20: note = Description of Artificial Sequence: Synthetic oligonucleotide
  misc_feature 1..20: note = Target: SCN10A; (-) strand; PAM type: NRG; PAM sequence: AGG
  source 1..20: mol_type = other DNA
gggaattatcccaggctgaa

SEQ ID NO: 20447 - DNA, 20 bp, synthetic construct
  misc_feature 1..20: note = Description of Artificial Sequence: Synthetic oligonucleotide
  misc_feature 1..20: note = Target: SCN10A; (-) strand; PAM type: NRG; PAM sequence: AAG
  source 1..20: mol_type = other DNA
agggaattatcccaggctga

SEQ ID NO: 20448 - DNA, 20 bp, synthetic construct
  misc_feature 1..20: note = Description of Artificial Sequence: Synthetic oligonucleotide
  misc_feature 1..20: note = Target: SCN10A; (-) strand; PAM type: NRG; PAM sequence: AGG
  source 1..20: mol_type = other DNA
tggagccagggaattatccc

SEQ ID NO: 20449 - DNA, 20 bp, synthetic construct
  misc_feature 1..20: note = Description of Artificial Sequence: Synthetic oligonucleotide
  misc_feature 1..20: note = Target: SCN10A; (-) strand; PAM type: NRG; PAM sequence: CAG
  source 1..20: mol_type = other DNA
ctggagccagggaattatcc

SEQ ID NO: 20450 - DNA, 20 bp, synthetic construct
  misc_feature 1..20: note = Description of Artificial Sequence: Synthetic oligonucleotide
  misc_feature 1..20: note = Target: SCN10A; (-) strand; PAM type: NRG; PAM sequence: GGG
  source 1..20: mol_type = other DNA
gtaagatttgcctggagcca

SEQ ID NO: 20451 - DNA, 20 bp, synthetic construct
  misc_feature 1..20: note = Description of Artificial Sequence: Synthetic oligonucleotide
  misc_feature 1..20: note = Target: SCN10A; (-) strand; PAM type: NRG; PAM sequence: AGG
  source 1..20: mol_type = other DNA
ggtaagatttgcctggagcc

SEQ ID NO: 20452 - DNA, 20 bp, synthetic construct
  misc_feature 1..20: note = Description of Artificial Sequence: Synthetic oligonucleotide
  misc_feature 1..20: note = Target: SCN10A; (-) strand; PAM type: NRG; PAM sequence: CAG
  source 1..20: mol_type = other DNA
tggtaagatttgcctggagc

SEQ ID NO: 20453 - DNA, 20 bp, synthetic construct
  misc_feature 1..20: note = Description of Artificial Sequence: Synthetic oligonucleotide
  misc_feature 1..20: note = Target: SCN10A; (-) strand; PAM type: NRG; PAM sequence: GAG
  source 1..20: mol_type = other DNA
aatatggtaagatttgcctg

SEQ ID NO: 20454 - DNA, 20 bp, synthetic construct
  misc_feature 1..20: note = Description of Artificial Sequence: Synthetic oligonucleotide
  misc_feature 1..20: note = Target: SCN10A; (-) strand; PAM type: NRG; PAM sequence: TGG
  source 1..20: mol_type = other DNA
gaaatatggtaagatttgcc

SEQ ID NO: 20455 - DNA, 20 bp, synthetic construct
  misc_feature 1..20: note = Description of Artificial Sequence: Synthetic oligonucleotide
  misc_feature 1..20: note = Target: SCN10A; (-) strand; PAM type: NRG; PAM sequence: AAG
  source 1..20: mol_type = other DNA
gatactaagtgaaatatggt

SEQ ID NO: 20456 - DNA, 20 bp, synthetic construct
  misc_feature 1..20: note = Description of Artificial Sequence: Synthetic oligonucleotide
  misc_feature 1..20: note = Target: SCN10A; (-) strand; PAM type: NRG; PAM sequence: TGG
  source 1..20: mol_type = other DNA
gcaggatactaagtgaaata

SEQ ID NO: 20457 - DNA, 20 bp, synthetic construct
  misc_feature 1..20: note = Description of Artificial Sequence: Synthetic oligonucleotide
  misc_feature 1..20: note = Target: SCN10A; (-) strand; PAM type: NRG; PAM sequence: AAG
  source 1..20: mol_type = other DNA
aagaggaagtgcaggatact

SEQ ID NO: 20458 - DNA, 20 bp, synthetic construct
  misc_feature 1..20: note = Description of Artificial Sequence: Synthetic oligonucleotide
  misc_feature 1..20: note = Target: SCN10A; (-) strand; PAM type: NRG; PAM sequence: AGG
  source 1..20: mol_type = other DNA
gtgccttaaagaggaagtgc

SEQ ID NO: 20459 - DNA, 20 bp, synthetic construct
  misc_feature 1..20: note = Description of Artificial Sequence: Synthetic oligonucleotide
  misc_feature 1..20: note = Target: SCN10A; (-) strand; PAM type: NRG; PAM sequence: CAG
  source 1..20: mol_type = other DNA
agtgccttaaagaggaagtg

SEQ ID NO: 20460 - DNA, 20 bp, synthetic construct
  misc_feature 1..20: note = Description of Artificial Sequence: Synthetic oligonucleotide
  misc_feature 1..20: note = Target: SCN10A; (-) strand; PAM type: NRG; PAM sequence: AAG
  source 1..20: mol_type = other DNA
tggtgagtgccttaaagagg

SEQ ID NO: 20461 - DNA, 20 bp, synthetic construct
  misc_feature 1..20: note = Description of Artificial Sequence: Synthetic oligonucleotide
  misc_feature 1..20: note = Target: SCN10A; (-) strand; PAM type: NRG; PAM sequence: AGG
  source 1..20: mol_type = other DNA
gagtggtgagtgccttaaag

SEQ ID NO: 20462 - DNA, 20 bp, synthetic construct
  misc_feature 1..20: note = Description of Artificial Sequence: Synthetic oligonucleotide
  misc_feature 1..20: note = Target: SCN10A; (-) strand; PAM type: NRG; PAM sequence: GAG
  source 1..20: mol_type = other DNA
ggagtggtgagtgccttaaa

SEQ ID NO: 20463 - DNA, 20 bp, synthetic construct
  misc_feature 1..20: note = Description of Artificial Sequence: Synthetic oligonucleotide
  misc_feature 1..20: note = Target: SCN10A; (-) strand; PAM type: NRG; PAM sequence: AAG
  source 1..20: mol_type = other DNA
ctggagtggtgagtgcctta

SEQ ID NO: 20464 - DNA, 20 bp, synthetic construct
  misc_feature 1..20: note = Description of Artificial Sequence: Synthetic oligonucleotide
  misc_feature 1..20: note = Target: SCN10A; (-) strand; PAM type: NRG; PAM sequence: GAG
  source 1..20: mol_type = other DNA
agtgagcttactggagtggt

SEQ ID NO: 20465 - DNA, 20 bp, synthetic construct
  misc_feature 1..20: note = Description of Artificial Sequence: Synthetic oligonucleotide
  misc_feature 1..20: note = Target: SCN10A; (-) strand; PAM type: NRG; PAM sequence: TGG
  source 1..20: mol_type = other DNA
cagcagtgagcttactggag

SEQ ID NO: 20466 - DNA, 20 bp, synthetic construct
  misc_feature 1..20: note = Description of Artificial Sequence: Synthetic oligonucleotide
  misc_feature 1..20: note = Target: SCN10A; (-) strand; PAM type: NRG; PAM sequence: GAG
  source 1..20: mol_type = other DNA
tcacagcagtgagcttactg

SEQ ID NO: 20467 - DNA, 20 bp, synthetic construct
  misc_feature 1..20: note = Description of Artificial Sequence: Synthetic oligonucleotide
  misc_feature 1..20: note = Target: SCN10A; (-) strand; PAM type: NRG; PAM sequence: TGG
  source 1..20: mol_type = other DNA
ggtcacagcagtgagcttac

SEQ ID NO: 20468 - DNA, 20 bp, synthetic construct
  misc_feature 1..20: note = Description of Artificial Sequence: Synthetic oligonucleotide
  misc_feature 1..20: note = Target: SCN10A; (-) strand; PAM type: NRG; PAM sequence: GAG
  source 1..20: mol_type = other DNA
agaagctgggtcacagcagt

SEQ ID NO: 20469 - DNA, 20 bp, synthetic construct
  misc_feature 1..20: note = Description of Artificial Sequence: Synthetic oligonucleotide
  misc_feature 1..20: note = Target: SCN10A; (-) strand; PAM type: NRG; PAM sequence: CAG
  source 1..20: mol_type = other DNA
ttccagaagctgggtcacag

SEQ ID NO: 20470 - DNA, 20 bp, synthetic construct
  misc_feature 1..20: note = Description of Artificial Sequence: Synthetic oligonucleotide
  misc_feature 1..20: note = Target: SCN10A; (-) strand; PAM type: NRG; PAM sequence: CAG
  source 1..20: mol_type = other DNA
gaattccagaagctgggtca

SEQ ID NO: 20471 - DNA, 20 bp, synthetic construct
  misc_feature 1..20: note = Description of Artificial Sequence: Synthetic oligonucleotide
  misc_feature 1..20: note = Target: SCN10A; (-) strand; PAM type: NRG; PAM sequence: GGG
  source 1..20: mol_type = other DNA
aagccagaattccagaagct

SEQ ID NO: 20472 - DNA, 20 bp, synthetic construct
  misc_feature 1..20: note = Description of Artificial Sequence: Synthetic oligonucleotide
  misc_feature 1..20: note = Target: SCN10A; (-) strand; PAM type: NRG; PAM sequence: TGG
  source 1..20: mol_type = other DNA
caagccagaattccagaagc

SEQ ID NO: 20473 - DNA, 20 bp, synthetic construct
  misc_feature 1..20: note = Description of Artificial Sequence: Synthetic oligonucleotide
  misc_feature 1..20: note = Target: SCN10A; (-) strand; PAM type: NRG; PAM sequence: AAG
  source 1..20: mol_type = other DNA
tgtccaagccagaattccag

SEQ ID NO: 20474 - DNA, 20 bp, synthetic construct
  misc_feature 1..20: note = Description of Artificial Sequence: Synthetic oligonucleotide
  misc_feature 1..20: note = Target: SCN10A; (-) strand; PAM type: NRG; PAM sequence: CAG
  source 1..20: mol_type = other DNA
tgttgtccaagccagaattc

SEQ ID NO: 20475 - DNA, 20 bp, synthetic construct
  misc_feature 1..20: note = Description of Artificial Sequence: Synthetic oligonucleotide
  misc_feature 1..20: note = Target: SCN10A; (-) strand; PAM type: NRG; PAM sequence: CAG
  source 1..20: mol_type = other DNA
gatttcactgttgtccaagc

SEQ ID NO: 20476 - DNA, 20 bp, synthetic construct
  misc_feature 1..20: note = Description of Artificial Sequence: Synthetic oligonucleotide
  misc_feature 1..20: note = Target: SCN10A; (-) strand; PAM type: NRG; PAM sequence: AAG
  source 1..20: mol_type = other DNA
ctgagatttcactgttgtcc

SEQ ID NO: 20477 - DNA, 20 bp, synthetic construct
  misc_feature 1..20: note = Description of Artificial Sequence: Synthetic oligonucleotide
  misc_feature 1..20: note = Target: SCN10A; (-) strand; PAM type: NRG; PAM sequence: GAG
  source 1..20: mol_type = other DNA
ctatgcttggcatgcaagct

SEQ ID NO: 20478 - DNA, 20 bp, synthetic construct
  misc_feature 1..20: note = Description of Artificial Sequence: Synthetic oligonucleotide
  misc_feature 1..20: note = Target: SCN10A; (-) strand; PAM type: NRG; PAM sequence: AAG
  source 1..20: mol_type = other DNA
accttctatgcttggcatgc

SEQ ID NO: 20479 - DNA, 20 bp, synthetic construct
  misc_feature 1..20: note = Description of Artificial Sequence: Synthetic oligonucleotide
  misc_feature 1..20: note = Target: SCN10A; (-) strand; PAM type: NRG; PAM sequence: TGG
  source 1..20: mol_type = other DNA
gcatgtgaaccttctatgct

SEQ ID NO: 20480 - DNA, 20 bp, synthetic construct
  misc_feature 1..20: note = Description of Artificial Sequence: Synthetic oligonucleotide
  misc_feature 1..20: note = Target: SCN10A; (-) strand; PAM type: NRG; PAM sequence: AAG
  source 1..20: mol_type = other DNA
ttgacaattcactgaactca

SEQ ID NO: 20481 - DNA, 20 bp, synthetic construct
  misc_feature 1..20: note = Description of Artificial Sequence: Synthetic oligonucleotide
  misc_feature 1..20: note = Target: SCN10A; (-) strand; PAM type: NRG; PAM sequence: GAG
  source 1..20: mol_type = other DNA
agtttggcccaaaccaacag

SEQ ID NO: 20482 - DNA, 20 bp, synthetic construct
  misc_feature 1..20: note = Description of Artificial Sequence: Synthetic oligonucleotide
  misc_feature 1..20: note = Target: SCN10A; (-) strand; PAM type: NRG; PAM sequence: AGG
  source 1..20: mol_type = other DNA
aaagtttggcccaaaccaac

SEQ ID NO: 20483 - DNA, 20 bp, synthetic construct
  misc_feature 1..20: note = Description of Artificial Sequence: Synthetic oligonucleotide
  misc_feature 1..20: note = Target: SCN10A; (-) strand; PAM type: NRG; PAM sequence: CAG
  source 1..20: mol_type = other DNA
gaaagtttggcccaaaccaa

SEQ ID NO: 20484 - DNA, 20 bp, synthetic construct
  misc_feature 1..20: note = Description of Artificial Sequence: Synthetic oligonucleotide
  misc_feature 1..20: note = Target: SCN10A; (-) strand; PAM type: NRG; PAM sequence: TGG
  source 1..20: mol_type = other DNA
ggattatgcttaagaaagtt

SEQ ID NO: 20485 - DNA, 20 bp, synthetic construct
  misc_feature 1..20: note = Description of Artificial Sequence: Synthetic oligonucleotide
  misc_feature 1..20: note = Target: SCN10A; (-) strand; PAM type: NRG; PAM sequence: AAG
  source 1..20: mol_type = other DNA
aagagggattatgcttaaga

SEQ ID NO: 20486 - DNA, 20 bp, synthetic construct
  misc_feature 1..20: note = Description of Artificial Sequence: Synthetic oligonucleotide
  misc_feature 1..20: note = Target: SCN10A; (-) strand; PAM type: NRG; PAM sequence: AAG
  source 1..20: mol_type = other DNA
ctttaagagggattatgctt

SEQ ID NO: 20487 - DNA, 20 bp, synthetic construct
  misc_feature 1..20: note = Description of Artificial Sequence: Synthetic oligonucleotide
  misc_feature 1..20: note = Target: SCN10A; (-) strand; PAM type: NRG; PAM sequence: GGG
  source 1..20: mol_type = other DNA
taaaggccacctctttaaga

SEQ ID NO: 20488 - DNA, 20 bp, synthetic construct
  misc_feature 1..20: note = Description of Artificial Sequence: Synthetic oligonucleotide
  misc_feature 1..20: note = Target: SCN10A; (-) strand; PAM type: NRG; PAM sequence: AGG
  source 1..20: mol_type = other DNA
ataaaggccacctctttaag

SEQ ID NO: 20489 - DNA, 20 bp, synthetic construct
  misc_feature 1..20: note = Description of Artificial Sequence: Synthetic oligonucleotide
  misc_feature 1..20: note = Target: SCN10A; (-) strand; PAM type: NRG; PAM sequence: GAG
  source 1..20: mol_type = other DNA
tataaaggccacctctttaa

SEQ ID NO: 20490 - DNA, 20 bp, synthetic construct
  misc_feature 1..20: note = Description of Artificial Sequence: Synthetic oligonucleotide
  misc_feature 1..20: note = Target: SCN10A; (-) strand; PAM type: NRG; PAM sequence: AAG
  source 1..20: mol_type = other DNA
tttataaaggccacctcttt

SEQ ID NO: 20491 - DNA, 20 bp, synthetic construct
  misc_feature 1..20: note = Description of Artificial Sequence: Synthetic oligonucleotide
  misc_feature 1..20: note = Target: SCN10A; (-) strand; PAM type: NRG; PAM sequence: AGG
  source 1..20: mol_type = other DNA
agtcgtaataggatttataa

SEQ ID NO: 20492 - DNA, 20 bp, synthetic construct
  misc_feature 1..20: note = Description of Artificial Sequence: Synthetic oligonucleotide
  misc_feature 1..20: note = Target: SCN10A; (-) strand; PAM type: NRG; PAM sequence: AAG
  source 1..20: mol_type = other DNA
gagtcgtaataggatttata

SEQ ID NO: 20493 - DNA, 20 bp, synthetic construct
  misc_feature 1..20: note = Description of Artificial Sequence: Synthetic oligonucleotide
  misc_feature 1..20: note = Target: SCN10A; (-) strand; PAM type: NRG; PAM sequence: AGG
  source 1..20: mol_type = other DNA
catgctgccagagtcgtaat

SEQ ID NO: 20494 - DNA, 20 bp, synthetic construct
  misc_feature 1..20: note = Description of Artificial Sequence: Synthetic oligonucleotide
  misc_feature 1..20: note = Target: SCN10A; (-) strand; PAM type: NRG; PAM sequence: TAG
  source 1..20: mol_type = other DNA
tcatgctgccagagtcgtaa

SEQ ID NO: 20495 - DNA, 20 bp, synthetic construct
  misc_feature 1..20: note = Description of Artificial Sequence: Synthetic oligonucleotide
  misc_feature 1..20: note = Target: SCN10A; (-) strand; PAM type: NRG; PAM sequence: GAG
  source 1..20: mol_type = other DNA
aaggatgcttcatgctgcca

SEQ ID NO: 20496 - DNA, 20 bp, synthetic construct
  misc_feature 1..20: note = Description of Artificial Sequence: Synthetic oligonucleotide
  misc_feature 1..20: note = Target: SCN10A; (-) strand; PAM type: NRG; PAM sequence: CAG
  source 1..20: mol_type = other DNA
tgaaggatgcttcatgctgc

SEQ ID NO: 20497 - DNA, 20 bp, synthetic construct
  misc_feature 1..20: note = Description of Artificial Sequence: Synthetic oligonucleotide
  misc_feature 1..20: note = Target: SCN10A; (-) strand; PAM type: NRG; PAM sequence: AGG
  source 1..20: mol_type = other DNA
tacacacatgagacacctga

SEQ ID NO: 20498 - DNA, 20 bp, synthetic construct
  misc_feature 1..20: note = Description of Artificial Sequence: Synthetic oligonucleotide
  misc_feature 1..20: note = Target: SCN10A; (-) strand; PAM type: NRG; PAM sequence: AAG
  source 1..20: mol_type = other DNA
ttacacacatgagacacctg

SEQ ID NO: 20499 - DNA, 20 bp, synthetic construct
  misc_feature 1..20: note = Description of Artificial Sequence: Synthetic oligonucleotide
  misc_feature 1..20: note = Target: SCN10A; (-) strand; PAM type: NRG; PAM sequence: GAG
  source 1..20: mol_type = other DNA
gttatattcattacacacat

SEQ ID NO: 20500 - DNA, 20 bp, synthetic construct
  misc_feature 1..20: note = Description of Artificial Sequence: Synthetic oligonucleotide
  misc_feature 1..20: note = Target: SCN10A; (-) strand; PAM type: NRG; PAM sequence: TGG
  source 1..20: mol_type = other DNA
ggcacatcatcttctctggt

SEQ ID NO: 20501 - DNA, 20 bp, synthetic construct
  misc_feature 1..20: note = Description of Artificial Sequence: Synthetic oligonucleotide
  misc_feature 1..20: note = Target: SCN10A; (-) strand; PAM type: NRG; PAM sequence: TGG
  source 1..20: mol_type = other DNA
atagggcacatcatcttctc

SEQ ID NO: 20502 - DNA, 20 bp, synthetic construct
  misc_feature 1..20: note = Description of Artificial Sequence: Synthetic oligonucleotide
  misc_feature 1..20: note = Target: SCN10A; (-) strand; PAM type: NRG; PAM sequence: GGG
  source 1..20: mol_type = other DNA
gtcaaagttttctgagcata

SEQ ID NO: 20503 - DNA, 20 bp, synthetic construct
  misc_feature 1..20: note = Description of Artificial Sequence: Synthetic oligonucleotide
  misc_feature 1..20: note = Target: SCN10A; (-) strand; PAM type: NRG; PAM sequence: AGG
  source 1..20: mol_type = other DNA
ggtcaaagttttctgagcat

SEQ ID NO: 20504 - DNA, 20 bp, synthetic construct
  misc_feature 1..20: note = Description of Artificial Sequence: Synthetic oligonucleotide
  misc_feature 1..20: note = Target: SCN10A; (-) strand; PAM type: NRG; PAM sequence: TAG
  source 1..20: mol_type = other DNA
aggtcaaagttttctgagca

SEQ ID NO: 20505 - DNA, 20 bp, synthetic construct
  misc_feature 1..20: note = Description of Artificial Sequence: Synthetic oligonucleotide
  misc_feature 1..20: note = Target: SCN10A; (-) strand; PAM type: NRG; PAM sequence: GAG
  source 1..20: mol_type = other DNA
aaaagaggtcaaagttttct

SEQ ID NO: 20506 - DNA, 20 bp, synthetic construct
  misc_feature 1..20: note = Description of Artificial Sequence: Synthetic oligonucleotide
  misc_feature 1..20: note = Target: SCN10A; (-) strand; PAM type: NRG; PAM sequence: AAG
  source 1..20: mol_type = other DNA
aggttaaataaaagaggtca

SEQ ID NO: 20507 - DNA, 20 bp, synthetic construct
  misc_feature 1..20: note = Description of Artificial Sequence: Synthetic oligonucleotide
  misc_feature 1..20: note = Target: SCN10A; (-) strand; PAM type: NRG; PAM sequence: AGG
  source 1..20: mol_type = other DNA
aaccttaggttaaataaaag

SEQ ID NO: 20508 - DNA, 20 bp, synthetic construct
  misc_feature 1..20: note = Description of Artificial Sequence: Synthetic oligonucleotide
  misc_feature 1..20: note = Target: SCN10A; (-) strand; PAM type: NRG; PAM sequence: GAG
  source 1..20: mol_type = other DNA
aaaccttaggttaaataaaa

SEQ ID NO: 20509 - DNA, 20 bp, synthetic construct
  misc_feature 1..20: note = Description of Artificial Sequence: Synthetic oligonucleotide
  misc_feature 1..20: note = Target: SCN10A; (-) strand; PAM type: NRG; PAM sequence: AAG
  source 1..20: mol_type = other DNA
ggaaaccttaggttaaataa

SEQ ID NO: 20510 - DNA, 20 bp, synthetic construct
  misc_feature 1..20: note = Description of Artificial Sequence: Synthetic oligonucleotide
  misc_feature 1..20: note = Target: SCN10A; (-) strand; PAM type: NRG; PAM sequence: AGG
  source 1..20: mol_type = other DNA
atctgaggagaggaaacctt

SEQ ID NO: 20511 - DNA, 20 bp, synthetic construct
  misc_feature 1..20: note = Description of Artificial Sequence: Synthetic oligonucleotide
  misc_feature 1..20: note = Target: SCN10A; (-) strand; PAM type: NRG; PAM sequence: TAG
  source 1..20: mol_type = other DNA
aatctgaggagaggaaacct

SEQ ID NO: 20512 - DNA, 20 bp, synthetic construct
  misc_feature 1..20: note = Description of Artificial Sequence: Synthetic oligonucleotide
  misc_feature 1..20: note = Target: SCN10A; (-) strand; PAM type: NRG; PAM sequence: AGG
  source 1..20: mol_type = other DNA
tttaaagaaaatctgaggag

SEQ ID NO: 20513 - DNA, 20 bp, synthetic construct
  misc_feature 1..20: note = Description of Artificial Sequence: Synthetic oligonucleotide
  misc_feature 1..20: note = Target: SCN10A; (-) strand; PAM type: NRG; PAM sequence: GAG
  source 1..20: mol_type = other DNA
ttttaaagaaaatctgagga

SEQ ID NO: 20514 - DNA, 20 bp, synthetic construct
  misc_feature 1..20: note = Description of Artificial Sequence: Synthetic oligonucleotide
  misc_feature 1..20: note = Target: SCN10A; (-) strand; PAM type: NRG; PAM sequence: GAG
  source 1..20: mol_type = other DNA
tgttttaaagaaaatctgag

SEQ ID NO: 20515 - DNA, 20 bp, synthetic construct
  misc_feature 1..20: note = Description of Artificial Sequence: Synthetic oligonucleotide
  misc_feature 1..20: note = Target: SCN10A; (-) strand; PAM type: NRG; PAM sequence: AGG
  source 1..20: mol_type = other DNA
gatgttttaaagaaaatctg

SEQ ID NO: 20516 - DNA, 20 bp, synthetic construct
  misc_feature 1..20: note = Description of Artificial Sequence: Synthetic oligonucleotide
  misc_feature 1..20: note = Target: SCN10A; (-) strand; PAM type: NRG; PAM sequence: GAG
  source 1..20: mol_type = other DNA
tgatgttttaaagaaaatct

SEQ ID NO: 20517 - DNA, 20 bp, synthetic construct
  misc_feature 1..20: note = Description of Artificial Sequence: Synthetic oligonucleotide
  misc_feature 1..20: note = Target: SCN10A; (-) strand; PAM type: NRG; PAM sequence: AAG
  source 1..20: mol_type = other DNA
agagaaacaatgatgtttta

SEQ ID NO: 20518 - DNA, 20 bp, synthetic construct
  misc_feature 1..20: note = Description of Artificial Sequence: Synthetic oligonucleotide
  misc_feature 1..20: note = Target: SCN10A; (-) strand; PAM type: NRG; PAM sequence: GAG
  source 1..20: mol_type = other DNA
cagtagagtaagaaaggcca

SEQ ID NO: 20519 - DNA, 20 bp, synthetic construct
  misc_feature 1..20: note = Description of Artificial Sequence: Synthetic oligonucleotide
  misc_feature 1..20: note = Target: SCN10A; (-) strand; PAM type: NRG; PAM sequence: CAG
  source 1..20: mol_type = other DNA
gacagtagagtaagaaaggc

SEQ ID NO: 20520 - DNA, 20 bp, synthetic construct
  misc_feature 1..20: note = Description of Artificial Sequence: Synthetic oligonucleotide
  misc_feature 1..20: note = Target: SCN10A; (-) strand; PAM type: NRG; PAM sequence: AGG
  source 1..20: mol_type = other DNA
ctgtgacagtagagtaagaa

SEQ ID NO: 20521 - DNA, 20 bp, synthetic construct
  misc_feature 1..20: note = Description of Artificial Sequence: Synthetic oligonucleotide
  misc_feature 1..20: note = Target: SCN10A; (-) strand; PAM type: NRG; PAM sequence: AAG
  source 1..20: mol_type = other DNA
gctgtgacagtagagtaaga

SEQ ID NO: 20522 - DNA, 20 bp, synthetic construct
  misc_feature 1..20: note = Description of Artificial Sequence: Synthetic oligonucleotide
  misc_feature 1..20: note = Target: SCN10A; (-) strand; PAM type: NRG; PAM sequence: AAG
  source 1..20: mol_type = other DNA
agatgctgtgacagtagagt

SEQ ID NO: 20523 - DNA, 20 bp, synthetic construct
  misc_feature 1..20: note = Description of Artificial Sequence: Synthetic oligonucleotide
  misc_feature 1..20: note = Target: SCN10A; (-) strand; PAM type: NRG; PAM sequence: GAG
  source 1..20: mol_type = other DNA
aggaagatgctgtgacagta

SEQ ID NO: 20524 - DNA, 20 bp, synthetic construct
  misc_feature 1..20: note = Description of Artificial Sequence: Synthetic oligonucleotide
  misc_feature 1..20: note = Target: SCN10A; (-) strand; PAM type: NRG; PAM sequence: TAG
  source 1..20: mol_type = other DNA
caaggaagatgctgtgacag

SEQ ID NO: 20525 - DNA, 20 bp, synthetic construct
  misc_feature 1..20: note = Description of Artificial Sequence: Synthetic oligonucleotide
  misc_feature 1..20: note = Target: SCN10A; (-) strand; PAM type: NRG; PAM sequence: CAG
  source 1..20: mol_type = other DNA
cctcaaggaagatgctgtga

SEQ ID NO: 20526 - DNA, 20 bp, synthetic construct
  misc_feature 1..20: note = Description of Artificial Sequence: Synthetic oligonucleotide
  misc_feature 1..20: note = Target: SCN10A; (-) strand; PAM type: NRG; PAM sequence: AAG
  source 1..20: mol_type = other DNA
gggtagacttcccctcaagg

SEQ ID NO: 20527 - DNA, 20 bp, synthetic construct
  misc_feature 1..20: note = Description of Artificial Sequence: Synthetic oligonucleotide
  misc_feature 1..20: note = Target: SCN10A; (-) strand; PAM type: NRG; PAM sequence: AGG
  source 1..20: mol_type = other DNA
gtagggtagacttcccctca

SEQ ID NO: 20528 - DNA, 20 bp, synthetic construct
  misc_feature 1..20: note = Description of Artificial Sequence: Synthetic oligonucleotide
  misc_feature 1..20: note = Target: SCN10A; (-) strand; PAM type: NRG; PAM sequence: AAG
  source 1..20: mol_type = other DNA
ggtagggtagacttcccctc

SEQ ID NO: 20529 - DNA, 20 bp, synthetic construct
  misc_feature 1..20: note = Description of Artificial Sequence: Synthetic oligonucleotide
  misc_feature 1..20: note = Target: SCN10A; (-) strand; PAM type: NRG; PAM sequence: TAG
  source 1..20: mol_type = other DNA
gcaaatatgttggggtaggg

SEQ ID NO: 20530 - DNA, 20 bp, synthetic construct
  misc_feature 1..20: note = Description of Artificial Sequence: Synthetic oligonucleotide
  misc_feature 1..20: note = Target: SCN10A; (-) strand; PAM type: NRG; PAM sequence: GGG
  source 1..20: mol_type = other DNA
taggcaaatatgttggggta

SEQ ID NO: 20531 - DNA, 20 bp, synthetic construct
  misc_feature 1..20: note = Description of Artificial Sequence: Synthetic oligonucleotide
  misc_feature 1..20: note = Target: SCN10A; (-) strand; PAM type: NRG; PAM sequence: AGG
  source 1..20: mol_type = other DNA
ataggcaaatatgttggggt

SEQ ID NO: 20532 - DNA, 20 bp, synthetic construct
  misc_feature 1..20: note = Description of Artificial Sequence: Synthetic oligonucleotide
  misc_feature 1..20: note = Target: SCN10A; (-) strand; PAM type: NRG; PAM sequence: TAG
  source 1..20: mol_type = other DNA
aataggcaaatatgttgggg

SEQ ID NO: 20533 - DNA, 20 bp, synthetic construct
  misc_feature 1..20: note = Description of Artificial Sequence: Synthetic oligonucleotide
  misc_feature 1..20: note = Target: SCN10A; (-) strand; PAM type: NRG; PAM sequence: GGG
  source 1..20: mol_type = other DNA
agtaataggcaaatatgttg

SEQ ID NO: 20534 - DNA, 20 bp, synthetic construct
  misc_feature 1..20: note = Description of Artificial Sequence: Synthetic oligonucleotide
  misc_feature 1..20: note = Target: SCN10A; (-) strand; PAM type: NRG; PAM sequence: GGG
  source 1..20: mol_type = other DNA
aagtaataggcaaatatgtt

SEQ ID NO: 20535 - DNA, 20 bp, synthetic construct
  misc_feature 1..20: note = Description of Artificial Sequence: Synthetic oligonucleotide
  misc_feature 1..20: note = Target: SCN10A; (-) strand; PAM type: NRG; PAM sequence: TGG
  source 1..20: mol_type = other DNA
taagtaataggcaaatatgt

SEQ ID NO: 20536 - DNA, 20 bp, synthetic construct
  misc_feature 1..20: note = Description of Artificial Sequence: Synthetic oligonucleotide
  misc_feature 1..20: note = Target: SCN10A; (-) strand; PAM type: NRG; PAM sequence: AGG
  source 1..20: mol_type = other DNA
aaaggaagaaaataagtaat

SEQ ID NO: 20537 - DNA, 20 bp, synthetic construct
  misc_feature 1..20: note = Description of Artificial Sequence: Synthetic oligonucleotide
  misc_feature 1..20: note = Target: SCN10A; (-) strand; PAM type: NRG; PAM sequence: TAG
  source 1..20: mol_type = other DNA
aaaaggaagaaaataagtaa

SEQ ID NO: 20538 - DNA, 20 bp, synthetic construct
  misc_feature 1..20: note = Description of Artificial Sequence: Synthetic oligonucleotide
  misc_feature 1..20: note = Target: SCN10A; (-) strand; PAM type: NRG; PAM sequence: AAG
  source 1..20: mol_type = other DNA
ctgataaaaaggaagaaaat

SEQ ID NO: 20539 - DNA, 20 bp, synthetic construct
  misc_feature 1..20: note = Description of Artificial Sequence: Synthetic oligonucleotide
  misc_feature 1..20: note = Target: SCN10A; (-) strand; PAM type: NRG; PAM sequence: AAG
  source 1..20: mol_type = other DNA
agtgtgaactgataaaaagg

SEQ ID NO: 20540 - DNA, 20 bp, synthetic construct
  misc_feature 1..20: note = Description of Artificial Sequence: Synthetic oligonucleotide
  misc_feature 1..20: note = Target: SCN10A; (-) strand; PAM type: NRG; PAM sequence: AGG
  source 1..20: mol_type = other DNA
aacagtgtgaactgataaaa

SEQ ID NO: 20541 - DNA, 20 bp, synthetic construct
  misc_feature 1..20: note = Description of Artificial Sequence: Synthetic oligonucleotide
  misc_feature 1..20: note = Target: SCN10A; (-) strand; PAM type: NRG; PAM sequence: AAG
  source 1..20: mol_type = other DNA
taacagtgtgaactgataaa

SEQ ID NO: 20542 - DNA, 20 bp, synthetic construct
  misc_feature 1..20: note = Description of Artificial Sequence: Synthetic oligonucleotide
  misc_feature 1..20: note = Target: SCN10A; (-) strand; PAM type: NRG; PAM sequence: CAG
  source 1..20: mol_type = other DNA
ggagtgatgctaatttataa

SEQ ID NO: 20543 - DNA, 20 bp, synthetic construct
  misc_feature 1..20: note = Description of Artificial Sequence: Synthetic oligonucleotide
  misc_feature 1..20: note = Target: SCN10A; (-) strand; PAM type: NRG; PAM sequence: GAG
  source 1..20: mol_type = other DNA
atttgggtggttggcggcgg

SEQ ID NO: 20544 - DNA, 20 bp, synthetic construct
  misc_feature 1..20: note = Description of Artificial Sequence: Synthetic oligonucleotide
  misc_feature 1..20: note = Target: SCN10A; (-) strand; PAM type: NRG; PAM sequence: GGG
  source 1..20: mol_type = other DNA
atatttgggtggttggcggc

SEQ ID NO: 20545 - DNA, 20 bp, synthetic construct
  misc_feature 1..20: note = Description of Artificial Sequence: Synthetic oligonucleotide
  misc_feature 1..20: note = Target: SCN10A; (-) strand; PAM type: NRG; PAM sequence: CGG
  source 1..20: mol_type = other DNA
gatatttgggtggttggcgg

SEQ ID NO: 20546 - DNA, 20 bp, synthetic construct
  misc_feature 1..20: note = Description of Artificial Sequence: Synthetic oligonucleotide
  misc_feature 1..20: note = Target: SCN10A; (-) strand; PAM type: NRG; PAM sequence: CGG
  source 1..20: mol_type = other DNA
ggtgatatttgggtggttgg

SEQ ID NO: 20547 - DNA, 20 bp, synthetic construct
  misc_feature 1..20: note = Description of Artificial Sequence: Synthetic oligonucleotide
  misc_feature 1..20: note = Target: SCN10A; (-) strand; PAM type: NRG; PAM sequence: TGG
  source 1..20: mol_type = other DNA
aaaggtgatatttgggtggt

SEQ ID NO: 20548 - DNA, 20 bp, synthetic construct
  misc_feature 1..20: note = Description of Artificial Sequence: Synthetic oligonucleotide
  misc_feature 1..20: note = Target: SCN10A; (-) strand; PAM type: NRG; PAM sequence: TGG
  source 1..20: mol_type = other DNA
gcacaaaggtgatatttggg

SEQ ID NO: 20549 - DNA, 20 bp, synthetic construct
  misc_feature 1..20: note = Description of Artificial Sequence: Synthetic oligonucleotide
  misc_feature 1..20: note = Target: SCN10A; (-) strand; PAM type: NRG; PAM sequence: GGG
  source 1..20: mol_type = other DNA
catgcacaaaggtgatattt

SEQ ID NO: 20550 - DNA, 20 bp, synthetic construct
  misc_feature 1..20: note = Description of Artificial Sequence: Synthetic oligonucleotide
  misc_feature 1..20: note = Target: SCN10A; (-) strand; PAM type: NRG; PAM sequence: TGG
  source 1..20: mol_type = other DNA
gcatgcacaaaggtgatatt

SEQ ID NO: 20551 - DNA, 20 bp, synthetic construct
  misc_feature 1..20: note = Description of Artificial Sequence: Synthetic oligonucleotide
  misc_feature 1..20: note = Target: SCN10A; (-) strand; PAM type: NRG; PAM sequence: AGG
  source 1..20: mol_type = other DNA
gaagacaagtgcatgcacaa

SEQ ID NO: 20552 - DNA, 20 bp, synthetic construct
  misc_feature 1..20: note = Description of Artificial Sequence: Synthetic oligonucleotide
  misc_feature 1..20: note = Target: SCN10A; (-) strand; PAM type: NRG; PAM sequence: AAG
  source 1..20: mol_type = other DNA
agaagacaagtgcatgcaca

SEQ ID NO: 20553 - DNA, 20 bp, synthetic construct
  misc_feature 1..20: note = Description of Artificial Sequence: Synthetic oligonucleotide
  misc_feature 1..20: note = Target: SCN10A; (-) strand; PAM type: NRG; PAM sequence: AAG
  source 1..20: mol_type = other DNA
acctccattacccagaagac

SEQ ID NO: 20554 - DNA, 20 bp, synthetic construct
  misc_feature 1..20: note = Description of Artificial Sequence: Synthetic oligonucleotide
  misc_feature 1..20: note = Target: SCN10A; (-) strand; PAM type: NRG; PAM sequence: AAG
  source 1..20: mol_type = other DNA
gcctgacctccattacccag

SEQ ID NO: 20555 - DNA, 20 bp, synthetic construct
  misc_feature 1..20: note = Description of Artificial Sequence: Synthetic oligonucleotide
  misc_feature 1..20: note = Target: SCN10A; (-) strand; PAM type: NRG; PAM sequence: CAG
  source 1..20: mol_type = other DNA
acagcctgacctccattacc

SEQ ID NO: 20556 - DNA, 20 bp, synthetic construct
  misc_feature 1..20: note = Description of Artificial Sequence: Synthetic oligonucleotide
  misc_feature 1..20: note = Target: SCN10A; (-) strand; PAM type: NRG; PAM sequence: CAG
  source 1..20: mol_type = other DNA
agatgtgtctgttttgctca

SEQ ID NO: 20557 - DNA, 20 bp, synthetic construct
  misc_feature 1..20: note = Description of Artificial Sequence: Synthetic oligonucleotide
  misc_feature 1..20: note = Target: SCN10A; (-) strand; PAM type: NRG; PAM sequence: GAG
  source 1..20: mol_type = other DNA
ttgtaaaatctatgagggcg

SEQ ID NO: 20558 - DNA, 20 bp, synthetic construct
  misc_feature 1..20: note = Description of Artificial Sequence: Synthetic oligonucleotide
  misc_feature 1..20: note = Target: SCN10A; (-) strand; PAM type: NRG; PAM sequence: CGG
  source 1..20: mol_type = other DNA
ggttgtaaaatctatgaggg

SEQ ID NO: 20559 - DNA, 20 bp, synthetic construct
  misc_feature 1..20: note = Description of Artificial Sequence: Synthetic oligonucleotide
  misc_feature 1..20: note = Target: SCN10A; (-) strand; PAM type: NRG; PAM sequence: GGG
  source 1..20: mol_type = other DNA
ctaggttgtaaaatctatga

SEQ ID NO: 20560 - DNA, 20 bp, synthetic construct
  misc_feature 1..20: note = Description of Artificial Sequence: Synthetic oligonucleotide
  misc_feature 1..20: note = Target: SCN10A; (-) strand; PAM type: NRG; PAM sequence: AGG
  source 1..20: mol_type = other DNA
actaggttgtaaaatctatg

SEQ ID NO: 20561 - DNA, 20 bp, synthetic construct
  misc_feature 1..20: note = Description of Artificial Sequence: Synthetic oligonucleotide
  misc_feature 1..20: note = Target: SCN10A; (-) strand; PAM type: NRG; PAM sequence: GAG
  source 1..20: mol_type = other DNA
tactaggttgtaaaatctat

SEQ ID NO: 20562 - DNA, 20 bp, synthetic construct
  misc_feature 1..20: note = Description of Artificial Sequence: Synthetic oligonucleotide
  misc_feature 1..20: note = Target: SCN10A; (-) strand; PAM type: NRG; PAM sequence: AGG
  source 1..20: mol_type = other DNA
tttggctattatgatttact

SEQ ID NO: 20563 - DNA, 20 bp, synthetic construct
  misc_feature 1..20: note = Description of Artificial Sequence: Synthetic oligonucleotide
  misc_feature 1..20: note = Target: SCN10A; (-) strand; PAM type: NRG; PAM sequence: TAG
  source 1..20: mol_type = other DNA
atttggctattatgatttac

SEQ ID NO: 20564 - DNA, 20 bp, synthetic construct
  misc_feature 1..20: note = Description of Artificial Sequence: Synthetic oligonucleotide
  misc_feature 1..20: note = Target: SCN10A; (-) strand; PAM type: NRG; PAM sequence: TGG
  source 1..20: mol_type = other DNA
tagtaaatactcatcacatt

SEQ ID NO: 20565 - DNA, 20 bp, synthetic construct
  misc_feature 1..20: note = Description of Artificial Sequence: Synthetic oligonucleotide
  misc_feature 1..20: note = Target: SCN10A; (-) strand; PAM type: NRG; PAM sequence: TAG
  source 1..20: mol_type = other DNA
ttagaaccacgactggcatg

SEQ ID NO: 20566 - DNA, 20 bp, synthetic construct
  misc_feature 1..20: note = Description of Artificial Sequence: Synthetic oligonucleotide
  misc_feature 1..20: note = Target: SCN10A; (-) strand; PAM type: NRG; PAM sequence: TGG
  source 1..20: mol_type = other DNA
aaaatgcttagaaccacgac

SEQ ID NO: 20567 - DNA, 20 bp, synthetic construct
  misc_feature 1..20: note = Description of Artificial Sequence: Synthetic oligonucleotide
  misc_feature 1..20: note = Target: SCN10A; (-) strand; PAM type: NRG; PAM sequence: TAG
  source 1..20: mol_type = other DNA
gtcaggtcaagcaaaatgct

SEQ ID NO: 20568 - DNA, 20 bp, synthetic construct
  misc_feature 1..20: note = Description of Artificial Sequence: Synthetic oligonucleotide
  misc_feature 1..20: note = Target: SCN10A; (-) strand; PAM type: NRG; PAM sequence: AAG
  source 1..20: mol_type = other DNA
aggattaaatgagtcaggtc

SEQ ID NO: 20569 - DNA, 20 bp, synthetic construct
  misc_feature 1..20: note = Description of Artificial Sequence: Synthetic oligonucleotide
  misc_feature 1..20: note = Target: SCN10A; (-) strand; PAM type: NRG; PAM sequence: AGG
  source 1..20: mol_type = other DNA
ttgtgaggattaaatgagtc

SEQ ID NO: 20570 - DNA, 20 bp, synthetic construct
  misc_feature 1..20: note = Description of Artificial Sequence: Synthetic oligonucleotide
  misc_feature 1..20: note = Target: SCN10A; (-) strand; PAM type: NRG; PAM sequence: CAG
  source 1..20: mol_type = other DNA
tttgtgaggattaaatgagt

SEQ ID NO: 20571 - DNA, 20 bp, synthetic construct
  misc_feature 1..20: note = Description of Artificial Sequence: Synthetic oligonucleotide
  misc_feature 1..20: note = Target: SCN10A; (-) strand; PAM type: NRG; PAM sequence: GAG
  source 1..20: mol_type = other DNA
gagttttgtgaggattaaat

SEQ ID NO: 20572 - DNA, 20 bp, synthetic construct
  misc_feature 1..20: note = Description of Artificial Sequence: Synthetic oligonucleotide
  misc_feature 1..20: note = Target: SCN10A; (-) strand; PAM type: NRG; PAM sequence: AGG
  source 1..20: mol_type = other DNA
ttatcttgtagagttttgtg

SEQ ID NO: 20573 - DNA, 20 bp, synthetic construct
  misc_feature 1..20: note = Description of Artificial Sequence: Synthetic oligonucleotide
  misc_feature 1..20: note = Target: SCN10A; (-) strand; PAM type: NRG; PAM sequence: GAG
  source 1..20: mol_type = other DNA
cttatcttgtagagttttgt

SEQ ID NO: 20574 - DNA, 20 bp, synthetic construct
  misc_feature 1..20: note = Description of Artificial Sequence: Synthetic oligonucleotide
  misc_feature 1..20: note = Target: SCN10A; (-) strand; PAM type: NRG; PAM sequence: GAG
  source 1..20: mol_type = other DNA
gagaatatacttatcttgta

SEQ ID NO: 20575 - DNA, 20 bp, synthetic construct
  misc_feature 1..20: note = Description of Artificial Sequence: Synthetic oligonucleotide
  misc_feature 1..20: note = Target: SCN10A; (-) strand; PAM type: NRG; PAM sequence: TAG
  source 1..20: mol_type = other DNA
gtgagaatatacttatcttg

SEQ ID NO: 20576 - DNA, 20 bp, synthetic construct
  misc_feature 1..20: note = Description of Artificial Sequence: Synthetic oligonucleotide
  misc_feature 1..20: note = Target: SCN10A; (-) strand; PAM type: NRG; PAM sequence: GAG
  source 1..20: mol_type = other DNA
tttttagcctgtaaagtagt

SEQ ID NO: 20577 - DNA, 20 bp, synthetic construct
  misc_feature 1..20: note = Description of Artificial Sequence: Synthetic oligonucleotide
  misc_feature 1..20: note = Target: SCN10A; (-) strand; PAM type: NRG; PAM sequence: TAG
  source 1..20: mol_type = other DNA
cagatttttagcctgtaaag

SEQ ID NO: 20578 - DNA, 20 bp, synthetic construct
  misc_feature 1..20: note = Description of Artificial Sequence: Synthetic oligonucleotide
  misc_feature 1..20: note = Target: SCN10A; (-) strand; PAM type: NRG; PAM sequence: AAG
  source 1..20: mol_type = other DNA
cctcagatttttagcctgta

SEQ ID NO: 20579 - DNA, 20 bp, synthetic construct
  misc_feature 1..20: note = Description of Artificial Sequence: Synthetic oligonucleotide
  misc_feature 1..20: note = Target: SCN10A; (-) strand; PAM type: NRG; PAM sequence: TAG
  source 1..20: mol_type = other DNA
ttttctgtgcctcagatttt

SEQ ID NO: 20580 - DNA, 20 bp, synthetic construct
  misc_feature 1..20: note = Description of Artificial Sequence: Synthetic oligonucleotide
  misc_feature 1..20: note = Target: SCN10A; (-) strand; PAM type: NRG; PAM sequence: CAG
  source 1..20: mol_type = other DNA
tcagtaacttttctgtgcct

SEQ ID NO: 20581 - DNA, 20 bp, synthetic construct
  misc_feature 1..20: note = Description of Artificial Sequence: Synthetic oligonucleotide
  misc_feature 1..20: note = Target: SCN10A; (-) strand; PAM type: NRG; PAM sequence: CAG
  source 1..20: mol_type = other DNA
acagtgtgaccttggagctt

SEQ ID NO: 20582 - DNA, 20 bp, synthetic construct
  misc_feature 1..20: note = Description of Artificial Sequence: Synthetic oligonucleotide
  misc_feature 1..20: note = Target: SCN10A; (-) strand; PAM type: NRG; PAM sequence: GAG
  source 1..20: mol_type = other DNA
tggtacacagtgtgaccttg

SEQ ID NO: 20583 - DNA, 20 bp, synthetic construct
  misc_feature 1..20: note = Description of Artificial Sequence: Synthetic oligonucleotide
  misc_feature 1..20: note = Target: SCN10A; (-) strand; PAM type: NRG; PAM sequence: TGG
  source 1..20: mol_type = other DNA
tatggtacacagtgtgacct

SEQ ID NO: 20584 - DNA, 20 bp, synthetic construct
  misc_feature 1..20: note = Description of Artificial Sequence: Synthetic oligonucleotide
  misc_feature 1..20: note = Target: SCN10A; (-) strand; PAM type: NRG; PAM sequence: CAG
  source 1..20: mol_type = other DNA
gctcttccacttatggtaca

SEQ ID NO: 20585 - DNA, 20 bp, synthetic construct
  misc_feature 1..20: note = Description of Artificial Sequence: Synthetic oligonucleotide
  misc_feature 1..20: note = Target: SCN10A; (-) strand; PAM type: NRG; PAM sequence: TGG
  source 1..20: mol_type = other DNA
catcctagctcttccactta

SEQ ID NO: 20586 - DNA, 20 bp, synthetic construct
  misc_feature 1..20: note = Description of Artificial Sequence: Synthetic oligonucleotide
  misc_feature 1..20: note = Target: SCN10A; (-) strand; PAM type: NRG; PAM sequence: TAG
  source 1..20: mol_type = other DNA
ggctgcctgggtttgcatcc

SEQ ID NO: 20587 - DNA, 20 bp, synthetic construct
  misc_feature 1..20: note = Description of Artificial Sequence: Synthetic oligonucleotide
  misc_feature 1..20: note = Target: SCN10A; (-) strand; PAM type: NRG; PAM sequence: GGG
  source 1..20: mol_type = other DNA
gctctggaacccggctgcct

SEQ ID NO: 20588 - DNA, 20 bp, synthetic construct
  misc_feature 1..20: note = Description of Artificial Sequence: Synthetic oligonucleotide
  misc_feature 1..20: note = Target: SCN10A; (-) strand; PAM type: NRG; PAM sequence: TGG
  source 1..20: mol_type = other DNA
tgctctggaacccggctgcc

SEQ ID NO: 20589 - DNA, 20 bp, synthetic construct
  misc_feature 1..20: note = Description of Artificial Sequence: Synthetic oligonucleotide
  misc_feature 1..20: note = Target: SCN10A; (-) strand; PAM type: NRG; PAM sequence: CGG
  source 1..20: mol_type = other DNA
tagaacactgctctggaacc

SEQ ID NO: 20590 - DNA, 20 bp, synthetic construct
  misc_feature 1..20: note = Description of Artificial Sequence: Synthetic oligonucleotide
  misc_feature 1..20: note = Target: SCN10A; (-) strand; PAM type: NRG; PAM sequence: TGG
  source 1..20: mol_type = other DNA
tagtagttagaacactgctc

SEQ ID NO: 20591 - DNA, 20 bp, synthetic construct
  misc_feature 1..20: note = Description of Artificial Sequence: Synthetic oligonucleotide
  misc_feature 1..20: note = Target: SCN10A; (-) strand; PAM type: NRG; PAM sequence: TAG
  source 1..20: mol_type = other DNA
aggcaacagagggtagtagt

SEQ ID NO: 20592 - DNA, 20 bp, synthetic construct
  misc_feature 1..20: note = Description of Artificial Sequence: Synthetic oligonucleotide
  misc_feature 1..20: note = Target: SCN10A; (-) strand; PAM type: NRG; PAM sequence: TAG
  source 1..20: mol_type = other DNA
tgagaggcaacagagggtag

SEQ ID NO: 20593 - DNA, 20 bp, synthetic construct
  misc_feature 1..20: note = Description of Artificial Sequence: Synthetic oligonucleotide
  misc_feature 1..20: note = Target: SCN10A; (-) strand; PAM type: NRG; PAM sequence: TAG
  source 1..20: mol_type = other DNA
gaatgagaggcaacagaggg

SEQ ID NO: 20594 - DNA, 20 bp, synthetic construct
  misc_feature 1..20: note = Description of Artificial Sequence: Synthetic oligonucleotide
  misc_feature 1..20: note = Target: SCN10A; (-) strand; PAM type: NRG; PAM sequence: GGG
  source 1..20: mol_type = other DNA
gatgaatgagaggcaacaga

SEQ ID NO: 20595 - DNA, 20 bp, synthetic construct
  misc_feature 1..20: note = Description of Artificial Sequence: Synthetic oligonucleotide
  misc_feature 1..20: note = Target: SCN10A; (-) strand; PAM type: NRG; PAM sequence: AGG
  source 1..20: mol_type = other DNA
ggatgaatgagaggcaacag

SEQ ID NO: 20596 - DNA, 20 bp, synthetic construct
  misc_feature 1..20: note = Description of Artificial Sequence: Synthetic oligonucleotide
  misc_feature 1..20: note = Target: SCN10A; (-) strand; PAM type: NRG; PAM sequence: GAG
  source 1..20: mol_type = other DNA
gggatgaatgagaggcaaca

SEQ ID NO: 20597 - DNA, 20 bp, synthetic construct
  misc_feature 1..20: note = Description of Artificial Sequence: Synthetic oligonucleotide
  misc_feature 1..20: note = Target: SCN10A; (-) strand; PAM type: NRG; PAM sequence: CAG
  source 1..20: mol_type = other DNA
atgggatgaatgagaggcaa

SEQ ID NO: 20598 - DNA, 20 bp, synthetic construct
  misc_feature 1..20: note = Description of Artificial Sequence: Synthetic oligonucleotide
  misc_feature 1..20: note = Target: SCN10A; (-) strand; PAM type: NRG; PAM sequence: AGG
  source 1..20: mol_type = other DNA
aaggtcatgggatgaatgag

SEQ ID NO: 20599 - DNA, 20 bp, synthetic construct
  misc_feature 1..20: note = Description of Artificial Sequence: Synthetic oligonucleotide
  misc_feature 1..20: note = Target: SCN10A; (-) strand; PAM type: NRG; PAM sequence: GAG
  source 1..20: mol_type = other DNA
gaaggtcatgggatgaatga

SEQ ID NO: 20600 - DNA, 20 bp, synthetic construct
  misc_feature 1..20: note = Description of Artificial Sequence: Synthetic oligonucleotide
  misc_feature 1..20: note = Target: SCN10A; (-) strand; PAM type: NRG; PAM sequence: GAG
  source 1..20: mol_type = other DNA
aagaaggtcatgggatgaat

SEQ ID NO: 20601 - DNA, 20 bp, synthetic construct
  misc_feature 1..20: note = Description of Artificial Sequence: Synthetic oligonucleotide
  misc_feature 1..20: note = Target: SCN10A; (-) strand; PAM type: NRG; PAM sequence: GGG
  source 1..20: mol_type = other DNA
gtaagacaaaagaaggtcat

SEQ ID NO: 20602 - DNA, 20 bp, synthetic construct
  misc_feature 1..20: note = Description of Artificial Sequence: Synthetic oligonucleotide
  misc_feature 1..20: note = Target: SCN10A; (-) strand; PAM type: NRG; PAM sequence: TGG
  source 1..20: mol_type = other DNA
ggtaagacaaaagaaggtca

SEQ ID NO: 20603 - DNA, 20 bp, synthetic construct
  misc_feature 1..20: note = Description of Artificial Sequence: Synthetic oligonucleotide
  misc_feature 1..20: note = Target: SCN10A; (-) strand; PAM type: NRG; PAM sequence: AGG
  source 1..20: mol_type = other DNA
agtgtaggtaagacaaaaga

SEQ ID NO: 20604 - DNA, 20 bp, synthetic construct
  misc_feature 1..20: note = Description of Artificial Sequence: Synthetic oligonucleotide
  misc_feature 1..20: note = Target: SCN10A; (-) strand; PAM type: NRG; PAM sequence: AAG
  source 1..20: mol_type = other DNA
cagtgtaggtaagacaaaag

SEQ ID NO: 20605 - DNA, 20 bp, synthetic construct
  misc_feature 1..20: note = Description of Artificial Sequence: Synthetic oligonucleotide
  misc_feature 1..20: note = Target: SCN10A; (-) strand; PAM type: NRG; PAM sequence: AAG
  source 1..20: mol_type = other DNA
tcccagtgtaggtaagacaa

SEQ ID NO: 20606 - DNA, 20 bp, synthetic construct
  misc_feature 1..20: note = Description of Artificial Sequence: Synthetic oligonucleotide
  misc_feature 1..20: note = Target: SCN10A; (-) strand; PAM type: NRG; PAM sequence: AAG
  source 1..20: mol_type = other DNA
aaacacatcccagtgtaggt

SEQ ID NO: 20607 - DNA, 20 bp, synthetic construct
  misc_feature 1..20: note = Description of Artificial Sequence: Synthetic oligonucleotide
  misc_feature 1..20: note = Target: SCN10A; (-) strand; PAM type: NRG; PAM sequence: AGG
  source 1..20: mol_type = other DNA
tcccaaacacatcccagtgt

SEQ ID NO: 20608 - DNA, 20 bp, synthetic construct
  misc_feature 1..20: note = Description of Artificial Sequence: Synthetic oligonucleotide
  misc_feature 1..20: note = Target: SCN10A; (-) strand; PAM type: NRG; PAM sequence: TAG
  source 1..20: mol_type = other DNA
gtcccaaacacatcccagtg

SEQ ID NO: 20609 - DNA, 20 bp, synthetic construct
  misc_feature 1..20: note = Description of Artificial Sequence: Synthetic oligonucleotide
  misc_feature 1..20: note = Target: SCN10A; (-) strand; PAM type: NRG; PAM sequence: CAG
  source 1..20: mol_type = other DNA
tgcatgtcccaaacacatcc

SEQ ID NO: 20610 - DNA, 20 bp, synthetic construct
  misc_feature 1..20: note = Description of Artificial Sequence: Synthetic oligonucleotide
  misc_feature 1..20: note = Target: SCN10A; (-) strand; PAM type: NRG; PAM sequence: AAG
  source 1..20: mol_type = other DNA
tgcaagaatgagatagcaac

SEQ ID NO: 20611 - DNA, 20 bp, synthetic construct
  misc_feature 1..20: note = Description of Artificial Sequence: Synthetic oligonucleotide
  misc_feature 1..20: note = Target: SCN10A; (-) strand; PAM type: NRG; PAM sequence: TAG
  source 1..20: mol_type = other DNA
tgcattctgcaagaatgaga

SEQ ID NO: 20612 - DNA, 20 bp, synthetic construct
  misc_feature 1..20: note = Description of Artificial Sequence: Synthetic oligonucleotide
  misc_feature 1..20: note = Target: SCN10A; (-) strand; PAM type: NRG; PAM sequence: GAG
  source 1..20: mol_type = other DNA
acaatgcattctgcaagaat

SEQ ID NO: 20613 - DNA, 20 bp, synthetic construct
  misc_feature 1..20: note = Description of Artificial Sequence: Synthetic oligonucleotide
  misc_feature 1..20: note = Target: SCN10A; (-) strand; PAM type: NRG; PAM sequence: AAG
  source 1..20: mol_type = other DNA
gcaagtacaatgcattctgc

SEQ ID NO: 20614 - DNA, 20 bp, synthetic construct
  misc_feature 1..20: note = Description of Artificial Sequence: Synthetic oligonucleotide
  misc_feature 1..20: note = Target: SCN10A; (-) strand; PAM type: NRG; PAM sequence: AAG
  source 1..20: mol_type = other DNA
agttcgcagacacaaatagc

SEQ ID NO: 20615 - DNA, 20 bp, synthetic construct
  misc_feature 1..20: note = Description of Artificial Sequence: Synthetic oligonucleotide
  misc_feature 1..20: note = Target: SCN10A; (-) strand; PAM type: NRG; PAM sequence: TAG
  source 1..20: mol_type = other DNA
agaaagttcgcagacacaaa

SEQ ID NO: 20616 - DNA, 20 bp, synthetic construct
  misc_feature 1..20: note = Description of Artificial Sequence: Synthetic oligonucleotide
  misc_feature 1..20: note = Target: SCN10A; (-) strand; PAM type: NRG; PAM sequence: CAG
  source 1..20: mol_type = other DNA
gaagctgaggagaaagttcg

SEQ ID NO: 20617 - DNA, 20 bp, synthetic construct
  misc_feature 1..20: note = Description of Artificial Sequence: Synthetic oligonucleotide
  misc_feature 1..20: note = Target: SCN10A; (-) strand; PAM type: NRG; PAM sequence: AAG
  source 1..20: mol_type = other DNA
tatgtaagaagctgaggaga

SEQ ID NO: 20618 - DNA, 20 bp, synthetic construct
  misc_feature 1..20: note = Description of Artificial Sequence: Synthetic oligonucleotide
  misc_feature 1..20: note = Target: SCN10A; (-) strand; PAM type: NRG; PAM sequence: GAG
  source 1..20: mol_type = other DNA
cagctatgtaagaagctgag

SEQ ID NO: 20619 - DNA, 20 bp, synthetic construct
  misc_feature 1..20: note = Description of Artificial Sequence: Synthetic oligonucleotide
  misc_feature 1..20: note = Target: SCN10A; (-) strand; PAM type: NRG; PAM sequence: AGG
  source 1..20: mol_type = other DNA
atcagctatgtaagaagctg

SEQ ID NO: 20620 - DNA, 20 bp, synthetic construct
  misc_feature 1..20: note = Description of Artificial Sequence: Synthetic oligonucleotide
  misc_feature 1..20: note = Target: SCN10A; (-) strand; PAM type: NRG; PAM sequence: GAG
  source 1..20: mol_type = other DNA
aatcagctatgtaagaagct

SEQ ID NO: 20621 - DNA, 20 bp, synthetic construct
  misc_feature 1..20: note = Description of Artificial Sequence: Synthetic oligonucleotide
  misc_feature 1..20: note = Target: SCN10A; (-) strand; PAM type: NRG; PAM sequence: AAG
  source 1..20: mol_type = other DNA
aaaggaatcagctatgtaag

SEQ ID NO: 20622 - DNA, 20 bp, synthetic construct
  misc_feature 1..20: note = Description of Artificial Sequence: Synthetic oligonucleotide
  misc_feature 1..20: note = Target: SCN10A; (-) strand; PAM type: NRG; PAM sequence: AAG
  source 1..20: mol_type = other DNA
aataaaggaatcagctatgt

SEQ ID NO: 20623 - DNA, 20 bp, synthetic construct
  misc_feature 1..20: note = Description of Artificial Sequence: Synthetic oligonucleotide
  misc_feature 1..20: note = Target: SCN10A; (-) strand; PAM type: NRG; PAM sequence: CAG
  source 1..20: mol_type = other DNA
tttgaattaaataaaggaat

SEQ ID NO: 20624 - DNA, 20 bp, synthetic construct
  misc_feature 1..20: note = Description of Artificial Sequence: Synthetic oligonucleotide
  misc_feature 1..20: note = Target: SCN10A; (-) strand; PAM type: NRG; PAM sequence: AGG
  source 1..20: mol_type = other DNA
cagaaatttgaattaaataa

SEQ ID NO: 20625 - DNA, 20 bp, synthetic construct
  misc_feature 1..20: note = Description of Artificial Sequence: Synthetic oligonucleotide
  misc_feature 1..20: note = Target: SCN10A; (-) strand; PAM type: NRG; PAM sequence: AAG
  source 1..20: mol_type = other DNA
acagaaatttgaattaaata

SEQ ID NO: 20626 - DNA, 20 bp, synthetic construct
  misc_feature 1..20: note = Description of Artificial Sequence: Synthetic oligonucleotide
  misc_feature 1..20: note = Target: SCN10A; (-) strand; PAM type: NRG; PAM sequence: CAG
  source 1..20: mol_type = other DNA
aaaattctctccaagaagaa

SEQ ID NO: 20627 - DNA, 20 bp, synthetic construct
  misc_feature 1..20: note = Description of Artificial Sequence: Synthetic oligonucleotide
  misc_feature 1..20: note = Target: SCN10A; (-) strand; PAM type: NRG; PAM sequence: AAG
  source 1..20: mol_type = other DNA
gatggaaaattctctccaag

SEQ ID NO: 20628 - DNA, 20 bp, synthetic construct
  misc_feature 1..20: note = Description of Artificial Sequence: Synthetic oligonucleotide
  misc_feature 1..20: note = Target: SCN10A; (-) strand; PAM type: NRG; PAM sequence: AAG
  source 1..20: mol_type = other DNA
ggagatggaaaattctctcc

SEQ ID NO: 20629 - DNA, 20 bp, synthetic construct
  misc_feature 1..20: note = Description of Artificial Sequence: Synthetic oligonucleotide
  misc_feature 1..20: note = Target: SCN10A; (-) strand; PAM type: NRG; PAM sequence: TGG
  source 1..20: mol_type = other DNA
aaataaagtaggaaaggaga

SEQ ID NO: 20630 - DNA, 20 bp, synthetic construct
  misc_feature 1..20: note = Description of Artificial Sequence: Synthetic oligonucleotide
  misc_feature 1..20: note = Target: SCN10A; (-) strand; PAM type: NRG; PAM sequence: GAG
  source 1..20: mol_type = other DNA
gaaaaaataaagtaggaaag

SEQ ID NO: 20631 - DNA, 20 bp, synthetic construct
  misc_feature 1..20: note = Description of Artificial Sequence: Synthetic oligonucleotide
  misc_feature 1..20: note = Target: SCN10A; (-) strand; PAM type: NRG; PAM sequence: AGG
  source 1..20: mol_type = other DNA
gagaaaaaataaagtaggaa

SEQ ID NO: 20632 - DNA, 20 bp, synthetic construct
  misc_feature 1..20: note = Description of Artificial Sequence: Synthetic oligonucleotide
  misc_feature 1..20: note = Target: SCN10A; (-) strand; PAM type: NRG; PAM sequence: AAG
  source 1..20: mol_type = other DNA
ggagaaaaaataaagtagga

SEQ ID NO: 20633 - DNA, 20 bp, synthetic construct
  misc_feature 1..20: note = Description of Artificial Sequence: Synthetic oligonucleotide
  misc_feature 1..20: note = Target: SCN10A; (-) strand; PAM type: NRG; PAM sequence: AGG
  source 1..20: mol_type = other DNA
agtaggagaaaaaataaagt

SEQ ID NO: 20634 - DNA, 20 bp, synthetic construct
  misc_feature 1..20: note = Description of Artificial Sequence: Synthetic oligonucleotide
  misc_feature 1..20: note = Target: SCN10A; (-) strand; PAM type: NRG; PAM sequence: TAG
  source 1..20: mol_type = other DNA
aagtaggagaaaaaataaag

SEQ ID NO: 20635 - DNA, 20 bp, synthetic construct
  misc_feature 1..20: note = Description of Artificial Sequence: Synthetic oligonucleotide
  misc_feature 1..20: note = Target: SCN10A; (-) strand; PAM type: NRG; PAM sequence: AAG
  source 1..20: mol_type = other DNA
aagaagtaggagaaaaaata

SEQ ID NO: 20636 - DNA, 20 bp, synthetic construct
  misc_feature 1..20: note = Description of Artificial Sequence: Synthetic oligonucleotide
  misc_feature 1..20: note = Target: SCN10A; (-) strand; PAM type: NRG; PAM sequence: GAG
  source 1..20: mol_type = other DNA
tattcagatataagaagtag

SEQ ID NO: 20637 - DNA, 20 bp, synthetic construct
  misc_feature 1..20: note = Description of Artificial Sequence: Synthetic oligonucleotide
  misc_feature 1..20: note = Target: SCN10A; (-) strand; PAM type: NRG; PAM sequence: AGG
  source 1..20: mol_type = other DNA
gatattcagatataagaagt

SEQ ID NO: 20638 - DNA, 20 bp, synthetic construct
  misc_feature 1..20: note = Description of Artificial Sequence: Synthetic oligonucleotide
  misc_feature 1..20: note = Target: SCN10A; (-) strand; PAM type: NRG; PAM sequence: TAG
  source 1..20: mol_type = other DNA
agatattcagatataagaag

SEQ ID NO: 20639 - DNA, 20 bp, synthetic construct
  misc_feature 1..20: note = Description of Artificial Sequence: Synthetic oligonucleotide
  misc_feature 1..20: note = Target: SCN10A; (-) strand; PAM type: NRG; PAM sequence: AAG
  source 1..20: mol_type = other DNA
aatagatattcagatataag

SEQ ID NO: 20640 - DNA, 20 bp, synthetic construct
  misc_feature 1..20: note = Description of Artificial Sequence: Synthetic oligonucleotide
  misc_feature 1..20: note = Target: SCN10A; (-) strand; PAM type: NRG; PAM sequence: AAG
  source 1..20: mol_type = other DNA
atgaatagatattcagatat

SEQ ID NO: 20641 - DNA, 20 bp, synthetic construct
  misc_feature 1..20: note = Description of Artificial Sequence: Synthetic oligonucleotide
  misc_feature 1..20: note = Target: SCN10A; (-) strand; PAM type: NRG; PAM sequence: CAG
  source 1..20: mol_type = other DNA
atgaaagatgaatagatatt

SEQ ID NO: 20642 - DNA, 20 bp, synthetic construct
  misc_feature 1..20: note = Description of Artificial Sequence: Synthetic oligonucleotide
  misc_feature 1..20: note = Target: SCN10A; (-) strand; PAM type: NRG; PAM sequence: TAG
  source 1..20: mol_type = other DNA
aaggggacatgaaagatgaa

SEQ ID NO: 20643 - DNA, 20 bp, synthetic construct
  misc_feature 1..20: note = Description of Artificial Sequence: Synthetic oligonucleotide
  misc_feature 1..20: note = Target: SCN10A; (-) strand; PAM type: NRG; PAM sequence: AAG
  source 1..20: mol_type = other DNA
tagcagggaaggggacatga

SEQ ID NO: 20644 - DNA, 20 bp, synthetic construct
  misc_feature 1..20: note = Description of Artificial Sequence: Synthetic oligonucleotide
  misc_feature 1..20: note = Target: SCN10A; (-) strand; PAM type: NRG; PAM sequence: GGG
  source 1..20: mol_type = other DNA
tctacatcctagcagggaag

SEQ ID NO: 20645 - DNA, 20 bp, synthetic construct
  misc_feature 1..20: note = Description of Artificial Sequence: Synthetic oligonucleotide
  misc_feature 1..20: note = Target: SCN10A; (-) strand; PAM type: NRG; PAM sequence: GGG
  source 1..20: mol_type = other DNA
atctacatcctagcagggaa

SEQ ID NO: 20646 - DNA, 20 bp, synthetic construct
  misc_feature 1..20: note = Description of Artificial Sequence: Synthetic oligonucleotide
  misc_feature 1..20: note = Target: SCN10A; (-) strand; PAM type: NRG; PAM sequence: AGG
  source 1..20: mol_type = other DNA
aatctacatcctagcaggga

SEQ ID NO: 20647 - DNA, 20 bp, synthetic construct
  misc_feature 1..20: note = Description of Artificial Sequence: Synthetic oligonucleotide
  misc_feature 1..20: note = Target: SCN10A; (-) strand; PAM type: NRG; PAM sequence: AAG
  source 1..20: mol_type = other DNA
gaatctacatcctagcaggg

SEQ ID NO: 20648 - DNA, 20 bp, synthetic construct
  misc_feature 1..20: note = Description of Artificial Sequence: Synthetic oligonucleotide
  misc_feature 1..20: note = Target: SCN10A; (-) strand; PAM type: NRG; PAM sequence: GGG
  source 1..20: mol_type = other DNA
atggaatctacatcctagca

SEQ ID NO: 20649 - DNA, 20 bp, synthetic construct
  misc_feature 1..20: note = Description of Artificial Sequence: Synthetic oligonucleotide
  misc_feature 1..20: note = Target: SCN10A; (-) strand; PAM type: NRG; PAM sequence: AGG
  source 1..20: mol_type = other DNA
catggaatctacatcctagc

SEQ ID NO: 20650 - DNA, 20 bp, synthetic construct
  misc_feature 1..20: note = Description of Artificial Sequence: Synthetic oligonucleotide
  misc_feature 1..20: note = Target: SCN10A; (-) strand; PAM type: NRG; PAM sequence: CAG
  source 1..20: mol_type = other DNA
tcatggaatctacatcctag

SEQ ID NO: 20651 - DNA, 20 bp, synthetic construct
  misc_feature 1..20: note = Description of Artificial Sequence: Synthetic oligonucleotide
  misc_feature 1..20: note = Target: SCN10A; (-) strand; PAM type: NRG; PAM sequence: TAG
  source 1..20: mol_type = other DNA
cgctcatggaatctacatcc

SEQ ID NO: 20652 - DNA, 20 bp, synthetic construct
  misc_feature 1..20: note = Description of Artificial Sequence: Synthetic oligonucleotide
  misc_feature 1..20: note = Target: SCN10A; (-) strand; PAM type: NRG; PAM sequence: TGG
  source 1..20: mol_type = other DNA
ctgatataagcttgcgctca

SEQ ID NO: 20653 - DNA, 20 bp, synthetic construct
  misc_feature 1..20: note = Description of Artificial Sequence: Synthetic oligonucleotide
  misc_feature 1..20: note = Target: SCN10A; (-) strand; PAM type: NRG; PAM sequence: AAG
  source 1..20: mol_type = other DNA
attcagtggtgaactgatat

SEQ ID NO: 20654 - DNA, 20 bp, synthetic construct
  misc_feature 1..20: note = Description of Artificial Sequence: Synthetic oligonucleotide
  misc_feature 1..20: note = Target: SCN10A; (-) strand; PAM type: NRG; PAM sequence: TGG
  source 1..20: mol_type = other DNA
cttcaggtgctgggattcag

SEQ ID NO: 20655 - DNA, 20 bp, synthetic construct
  misc_feature 1..20: note = Description of Artificial Sequence: Synthetic oligonucleotide
  misc_feature 1..20: note = Target: SCN10A; (-) strand; PAM type: NRG; PAM sequence: CAG
  source 1..20: mol_type = other DNA
ttgcttcaggtgctgggatt

SEQ ID NO: 20656 - DNA, 20 bp, synthetic construct
  misc_feature 1..20: note = Description of Artificial Sequence: Synthetic oligonucleotide
  misc_feature 1..20: note = Target: SCN10A; (-) strand; PAM type: NRG; PAM sequence: GGG
  source 1..20: mol_type = other DNA
gtggcattgcttcaggtgct

SEQ ID NO: 20657 - DNA, 20 bp, synthetic construct
  misc_feature 1..20: note = Description of Artificial Sequence: Synthetic oligonucleotide
  misc_feature 1..20: note = Target: SCN10A; (-) strand; PAM type: NRG; PAM sequence: TGG
  source 1..20: mol_type = other DNA
tgtggcattgcttcaggtgc

SEQ ID NO: 20658 - DNA, 20 bp, synthetic construct
  misc_feature 1..20: note = Description of Artificial Sequence: Synthetic oligonucleotide
  misc_feature 1..20: note = Target: SCN10A; (-) strand; PAM type: NRG; PAM sequence: AGG
  source 1..20: mol_type = other DNA
tgtgtgtgtggcattgcttc

SEQ ID NO: 20659 - DNA, 20 bp, synthetic construct
  misc_feature 1..20: note = Description of Artificial Sequence: Synthetic oligonucleotide
  misc_feature 1..20: note = Target: SCN10A; (-) strand; PAM type: NRG; PAM sequence: CAG
  source 1..20: mol_type = other DNA
ttgtgtgtgtggcattgctt

SEQ ID NO: 20660 - DNA, 20 bp, synthetic construct
  misc_feature 1..20: note = Description of Artificial Sequence: Synthetic oligonucleotide
  misc_feature 1..20: note = Target: SCN10A; (-) strand; PAM type: NRG; PAM sequence: TGG
  source 1..20: mol_type = other DNA
ttgagcccctgttgtgtgtg

SEQ ID NO: 20661 - DNA, 20 bp, synthetic construct
  misc_feature 1..20: note = Description of Artificial Sequence: Synthetic oligonucleotide
  misc_feature 1..20: note = Target: SCN10A; (-) strand; PAM type: NRG; PAM sequence: GAG
  source 1..20: mol_type = other DNA
cttatcaacaagcatttgtt

SEQ ID NO: 20662 - DNA, 20 bp, synthetic construct
  misc_feature 1..20: note = Description of Artificial Sequence: Synthetic oligonucleotide
  misc_feature 1..20: note = Target: SCN10A; (-) strand; PAM type: NRG; PAM sequence: AAG
  source 1..20: mol_type = other DNA
tcatttattctcttatcaac

SEQ ID NO: 20663 - DNA, 20 bp, synthetic construct
  misc_feature 1..20: note = Description of Artificial Sequence: Synthetic oligonucleotide
  misc_feature 1..20: note = Target: SCN10A; (-) strand; PAM type: NRG; PAM sequence: AAG
  source 1..20: mol_type = other DNA
atttattctcgaaaactgtt

SEQ ID NO: 20664 - DNA, 20 bp, synthetic construct
  misc_feature 1..20: note = Description of Artificial Sequence: Synthetic oligonucleotide
  misc_feature 1..20: note = Target: SCN10A; (-) strand; PAM type: NRG; PAM sequence: CAG
  source 1..20: mol_type = other DNA
cagcaaacattgaatacaaa

SEQ ID NO: 20665 - DNA, 20 bp, synthetic construct
  misc_feature 1..20: note = Description of Artificial Sequence: Synthetic oligonucleotide
  misc_feature 1..20: note = Target: SCN10A; (-) strand; PAM type: NRG; PAM sequence: CAG
  source 1..20: mol_type = other DNA
ttttgctattagtcatcaaa

SEQ ID NO: 20666 - DNA, 20 bp, synthetic construct
  misc_feature 1..20: note = Description of Artificial Sequence: Synthetic oligonucleotide
  misc_feature 1..20: note = Target: SCN10A; (-) strand; PAM type: NRG; PAM sequence: TAG
  source 1..20: mol_type = other DNA
tttggtttttgttttgctat

SEQ ID NO: 20667 - DNA, 20 bp, synthetic construct
  misc_feature 1..20: note = Description of Artificial Sequence: Synthetic oligonucleotide
  misc_feature 1..20: note = Target: SCN10A; (-) strand; PAM type: NRG; PAM sequence: TGG
  source 1..20: mol_type = other DNA
tggtttttgtttgtttgttt

SEQ ID NO: 20668 - DNA, 20 bp, synthetic construct
  misc_feature 1..20: note = Description of Artificial Sequence: Synthetic oligonucleotide
  misc_feature 1..20: note = Target: SCN10A; (-) strand; PAM type: NRG; PAM sequence: TGG
  source 1..20: mol_type = other DNA
tcttggccagataggtttct

SEQ ID NO: 20669 - DNA, 20 bp, synthetic construct
  misc_feature 1..20: note = Description of Artificial Sequence: Synthetic oligonucleotide
  misc_feature 1..20: note = Target: SCN10A; (-) strand; PAM type: NRG; PAM sequence: AGG
  source 1..20: mol_type = other DNA
aatttctttcttggccagat

SEQ ID NO: 20670 - DNA, 20 bp, synthetic construct
  misc_feature 1..20: note = Description of Artificial Sequence: Synthetic oligonucleotide
  misc_feature 1..20: note = Target: SCN10A; (-) strand; PAM type: NRG; PAM sequence: TAG
  source 1..20: mol_type = other DNA
caatttctttcttggccaga

SEQ ID NO: 20671 - DNA, 20 bp, synthetic construct
  misc_feature 1..20: note = Description of Artificial Sequence: Synthetic oligonucleotide
  misc_feature 1..20: note = Target: SCN10A; (-) strand; PAM type: NRG; PAM sequence: CAG
  source 1..20: mol_type = other DNA
cccacaatttctttcttggc

SEQ ID NO: 20672 - DNA, 20 bp, synthetic construct
  misc_feature 1..20: note = Description of Artificial Sequence: Synthetic oligonucleotide
  misc_feature 1..20: note = Target: SCN10A; (-) strand; PAM type: NRG; PAM sequence: TGG
  source 1..20: mol_type = other DNA
tattcccacaatttctttct

SEQ ID NO: 20673 - DNA, 20 bp, synthetic construct
  misc_feature 1..20: note = Description of Artificial Sequence: Synthetic oligonucleotide
  misc_feature 1..20: note = Target: SCN10A; (-) strand; PAM type: NRG; PAM sequence: AAG
  source 1..20: mol_type = other DNA
tcatggcatagaatttgacc

SEQ ID NO: 20674 - DNA, 20 bp, synthetic construct
  misc_feature 1..20: note = Description of Artificial Sequence: Synthetic oligonucleotide
  misc_feature 1..20: note = Target: SCN10A; (-) strand; PAM type: NRG; PAM sequence: TAG
  source 1..20: mol_type = other DNA
ttctaacatttttcatggca

SEQ ID NO: 20675 - DNA, 20 bp, synthetic construct
  misc_feature 1..20: note = Description of Artificial Sequence: Synthetic oligonucleotide
  misc_feature 1..20: note = Target: SCN10A; (-) strand; PAM type: NRG; PAM sequence: TGG
  source 1..20: mol_type = other DNA
tgtacttctaacatttttca

SEQ ID NO: 20676 - DNA, 20 bp, synthetic construct
  misc_feature 1..20: note = Description of Artificial Sequence: Synthetic oligonucleotide
  misc_feature 1..20: note = Target: SCN10A; (-) strand; PAM type: NRG; PAM sequence: GAG
  source 1..20: mol_type = other DNA
tatcactgttcattgtaata

SEQ ID NO: 20677 - DNA, 20 bp, synthetic construct
  misc_feature 1..20: note = Description of Artificial Sequence: Synthetic oligonucleotide
  misc_feature 1..20: note = Target: SCN10A; (-) strand; PAM type: NRG; PAM sequence: TAG
  source 1..20: mol_type = other DNA
aatatcactgttcattgtaa

SEQ ID NO: 20678 - DNA, 20 bp, synthetic construct
  misc_feature 1..20: note = Description of Artificial Sequence: Synthetic oligonucleotide
  misc_feature 1..20: note = Target: SCN10A; (-) strand; PAM type: NRG; PAM sequence: CAG
  source 1..20: mol_type = other DNA
tttctcaacaacaacgtgta

SEQ ID NO: 20679 - DNA, 20 bp, synthetic construct
  misc_feature 1..20: note = Description of Artificial Sequence: Synthetic oligonucleotide
  misc_feature 1..20: note = Target: SCN10A; (-) strand; PAM type: NRG; PAM sequence: GAG
  source 1..20: mol_type = other DNA
catacctgagtttgtgcttt

SEQ ID NO: 20680 - DNA, 20 bp, synthetic construct
  misc_feature 1..20: note = Description of Artificial Sequence: Synthetic oligonucleotide
  misc_feature 1..20: note = Target: SCN10A; (-) strand; PAM type: NRG; PAM sequence: GAG
  source 1..20: mol_type = other DNA
gttacatttcttgcatacct

SEQ ID NO: 20681 - DNA, 20 bp, synthetic construct
  misc_feature 1..20: note = Description of Artificial Sequence: Synthetic oligonucleotide
  misc_feature 1..20: note = Target: SCN10A; (-) strand; PAM type: NRG; PAM sequence: AAG
  source 1..20: mol_type = other DNA
agcataaattgaattcaact

SEQ ID NO: 20682 - DNA, 20 bp, synthetic construct
  misc_feature 1..20: note = Description of Artificial Sequence: Synthetic oligonucleotide
  misc_feature 1..20: note = Target: SCN10A; (-) strand; PAM type: NRG; PAM sequence: AAG
  source 1..20: mol_type = other DNA
gttcccatggtgaggacttg

SEQ ID NO: 20683 - DNA, 20 bp, synthetic construct
  misc_feature 1..20: note = Description of Artificial Sequence: Synthetic oligonucleotide
  misc_feature 1..20: note = Target: SCN10A; (-) strand; PAM type: NRG; PAM sequence: AGG
  source 1..20: mol_type = other DNA
aagagacagttcccatggtg

SEQ ID NO: 20684 - DNA, 20 bp, synthetic construct
  misc_feature 1..20: note = Description of Artificial Sequence: Synthetic oligonucleotide
  misc_feature 1..20: note = Target: SCN10A; (-) strand; PAM type: NRG; PAM sequence: GAG
  source 1..20: mol_type = other DNA
caagagacagttcccatggt

SEQ ID NO: 20685 - DNA, 20 bp, synthetic construct
  misc_feature 1..20: note = Description of Artificial Sequence: Synthetic oligonucleotide
  misc_feature 1..20: note = Target: SCN10A; (-) strand; PAM type: NRG; PAM sequence: TGG
  source 1..20: mol_type = other DNA
ttaacaagagacagttccca

SEQ ID NO: 20686 - DNA, 20 bp, synthetic construct
  misc_feature 1..20: note = Description of Artificial Sequence: Synthetic oligonucleotide
  misc_feature 1..20: note = Target: SCN10A; (-) strand; PAM type: NRG; PAM sequence: CAG
  source 1..20: mol_type = other DNA
aacattgacttaacaagaga

SEQ ID NO: 20687 - DNA, 20 bp, synthetic construct
  misc_feature 1..20: note = Description of Artificial Sequence: Synthetic oligonucleotide
  misc_feature 1..20: note = Target: SCN10A; (-) strand; PAM type: NRG; PAM sequence: GAG
  source 1..20: mol_type = other DNA
acccaacattgacttaacaa

SEQ ID NO: 20688 - DNA, 20 bp, synthetic construct
  misc_feature 1..20: note = Description of Artificial Sequence: Synthetic oligonucleotide
  misc_feature 1..20: note = Target: SCN10A; (-) strand; PAM type: NRG; PAM sequence: AAG
  source 1..20: mol_type = other DNA
gtacccaacattgacttaac

SEQ ID NO: 20689 - DNA, 20 bp, synthetic construct
  misc_feature 1..20: note = Description of Artificial Sequence: Synthetic oligonucleotide
  misc_feature 1..20: note = Target: SCN10A; (-) strand; PAM type: NRG; PAM sequence: TAG
  source 1..20: mol_type = other DNA
cacagactcagatattgaaa

SEQ ID NO: 20690 - DNA, 20 bp, synthetic construct
  misc_feature 1..20: note = Description of Artificial Sequence: Synthetic oligonucleotide
  misc_feature 1..20: note = Target: SCN10A; (-) strand; PAM type: NRG; PAM sequence: CAG
  source 1..20: mol_type = other DNA
acaaaactcagacacagact

SEQ ID NO: 20691 - DNA, 20 bp, synthetic construct
  misc_feature 1..20: note = Description of Artificial Sequence: Synthetic oligonucleotide
  misc_feature 1..20: note = Target: SCN10A; (-) strand; PAM type: NRG; PAM sequence: CAG
  source 1..20: mol_type = other DNA
agccctacaaaactcagaca

SEQ ID NO: 20692 - DNA, 20 bp, synthetic construct
  misc_feature 1..20: note = Description of Artificial Sequence: Synthetic oligonucleotide
  misc_feature 1..20: note = Target: SCN10A; (-) strand; PAM type: NRG; PAM sequence: CAG
  source 1..20: mol_type = other DNA
ggtttgagccctacaaaact

SEQ ID NO: 20693 - DNA, 20 bp, synthetic construct
  misc_feature 1..20: note = Description of Artificial Sequence: Synthetic oligonucleotide
  misc_feature 1..20: note = Target: SCN10A; (-) strand; PAM type: NRG; PAM sequence: GAG
  source 1..20: mol_type = other DNA
ctcaactctcctccaggttt

SEQ ID NO: 20694 - DNA, 20 bp, synthetic construct
  misc_feature 1..20: note = Description of Artificial Sequence: Synthetic oligonucleotide
  misc_feature 1..20: note = Target: SCN10A; (-) strand; PAM type: NRG; PAM sequence: AGG
  source 1..20: mol_type = other DNA
gaccagctcaactctcctcc

SEQ ID NO: 20695 - DNA, 20 bp, synthetic construct
  misc_feature 1..20: note = Description of Artificial Sequence: Synthetic oligonucleotide
  misc_feature 1..20: note = Target: SCN10A; (-) strand; PAM type: NRG; PAM sequence: CAG
  source 1..20: mol_type = other DNA
ggaccagctcaactctcctc

SEQ ID NO: 20696 - DNA, 20 bp, synthetic construct
  misc_feature 1..20: note = Description of Artificial Sequence: Synthetic oligonucleotide
  misc_feature 1..20: note = Target: SCN10A; (-) strand; PAM type: NRG; PAM sequence: CAG
  source 1..20: mol_type = other DNA
gcttagcaatgacaaaggac

SEQ ID NO: 20697 - DNA, 20 bp, synthetic construct
  misc_feature 1..20: note = Description of Artificial Sequence: Synthetic oligonucleotide
  misc_feature 1..20: note = Target: SCN10A; (-) strand; PAM type: NRG; PAM sequence: AGG
  source 1..20: mol_type = other DNA
aatacgcttagcaatgacaa

SEQ ID NO: 20698 - DNA, 20 bp, synthetic construct
  misc_feature 1..20: note = Description of Artificial Sequence: Synthetic oligonucleotide
  misc_feature 1..20: note = Target: SCN10A; (-) strand; PAM type: NRG; PAM sequence: AAG
  source 1..20: mol_type = other DNA
aaatacgcttagcaatgaca

SEQ ID NO: 20699 - DNA, 20 bp, synthetic construct
  misc_feature 1..20: note = Description of Artificial Sequence: Synthetic oligonucleotide
  misc_feature 1..20: note = Target: SCN10A; (-) strand; PAM type: NRG; PAM sequence: TAG
  source 1..20: mol_type = other DNA
caactcaggcaaaatacgct

SEQ ID NO: 20700 - DNA, 20 bp, synthetic construct
  misc_feature 1..20: note = Description of Artificial Sequence: Synthetic oligonucleotide
  misc_feature 1..20: note = Target: SCN10A; (-) strand; PAM type: NRG; PAM sequence: AGG
  source 1..20: mol_type = other DNA
ccagatgggagctacaactc

SEQ ID NO: 20701 - DNA, 20 bp, synthetic construct
  misc_feature 1..20: note = Description of Artificial Sequence: Synthetic oligonucleotide
  misc_feature 1..20: note = Target: SCN10A; (-) strand; PAM type: NRG; PAM sequence: CAG
  source 1..20: mol_type = other DNA
accagatgggagctacaact

SEQ ID NO: 20702 - DNA, 20 bp, synthetic construct
  misc_feature 1..20: note = Description of Artificial Sequence: Synthetic oligonucleotide
  misc_feature 1..20: note = Target: SCN10A; (-) strand; PAM type: NRG; PAM sequence: GAG
  source 1..20: mol_type = other DNA
tcccaccagggaccagatgg

SEQ ID NO: 20703 - DNA, 20 bp, synthetic construct
  misc_feature 1..20: note = Description of Artificial Sequence: Synthetic oligonucleotide
  misc_feature 1..20: note = Target: SCN10A; (-) strand; PAM type: NRG; PAM sequence: GGG
  source 1..20: mol_type = other DNA
tctcccaccagggaccagat

SEQ ID NO: 20704 - DNA, 20 bp, synthetic construct
  misc_feature 1..20: note = Description of Artificial Sequence: Synthetic oligonucleotide
  misc_feature 1..20: note = Target: SCN10A; (-) strand; PAM type: NRG; PAM sequence: TGG
  source 1..20: mol_type = other DNA
ctctcccaccagggaccaga

SEQ ID NO: 20705 - DNA, 20 bp, synthetic construct
  misc_feature 1..20: note = Description of Artificial Sequence: Synthetic oligonucleotide
  misc_feature 1..20: note = Target: SCN10A; (-) strand; PAM type: NRG; PAM sequence: CAG
  source 1..20: mol_type = other DNA
tggactctcccaccagggac

SEQ ID NO: 20706 - DNA, 20 bp, synthetic construct
  misc_feature 1..20: note = Description of Artificial Sequence: Synthetic oligonucleotide
  misc_feature 1..20: note = Target: SCN10A; (-) strand; PAM type: NRG; PAM sequence: GGG
  source 1..20: mol_type = other DNA
cttcatggactctcccacca

SEQ ID NO: 20707 - DNA, 20 bp, synthetic construct
  misc_feature 1..20: note = Description of Artificial Sequence: Synthetic oligonucleotide
  misc_feature 1..20: note = Target: SCN10A; (-) strand; PAM type: NRG; PAM sequence: AGG
  source 1..20: mol_type = other DNA
tcttcatggactctcccacc

SEQ ID NO: 20708 - DNA, 20 bp, synthetic construct
  misc_feature 1..20: note = Description of Artificial Sequence: Synthetic oligonucleotide
  misc_feature 1..20: note = Target: SCN10A; (-) strand; PAM type: NRG; PAM sequence: CAG
  source 1..20: mol_type = other DNA
atcttcatggactctcccac

SEQ ID NO: 20709 - DNA, 20 bp, synthetic construct
  misc_feature 1..20: note = Description of Artificial Sequence: Synthetic oligonucleotide
  misc_feature 1..20: note = Target: SCN10A; (-) strand; PAM type: NRG; PAM sequence: TGG
  source 1..20: mol_type = other DNA
agagagaagagccatcttca

SEQ ID NO: 20710 - DNA, 20 bp, synthetic construct
  misc_feature 1..20: note = Description of Artificial Sequence: Synthetic oligonucleotide
  misc_feature 1..20: note = Target: SCN10A; (-) strand; PAM type: NRG; PAM sequence: GAG
  source 1..20: mol_type = other DNA
gagggaaactagagagagaa

SEQ ID NO: 20711 - DNA, 20 bp, synthetic construct
  misc_feature 1..20: note = Description of Artificial Sequence: Synthetic oligonucleotide
  misc_feature 1..20: note = Target: SCN10A; (-) strand; PAM type: NRG; PAM sequence: AAG
  source 1..20: mol_type = other DNA
tagagggaaactagagagag

SEQ ID NO: 20712 - DNA, 20 bp, synthetic construct
  misc_feature 1..20: note = Description of Artificial Sequence: Synthetic oligonucleotide
  misc_feature 1..20: note = Target: SCN10A; (-) strand; PAM type: NRG; PAM sequence: GAG
  source 1..20: mol_type = other DNA
ccatagagggaaactagaga

SEQ ID NO: 20713 - DNA, 20 bp, synthetic construct
  misc_feature 1..20: note = Description of Artificial Sequence: Synthetic oligonucleotide
  misc_feature 1..20: note = Target: SCN10A; (-) strand; PAM type: NRG; PAM sequence: GAG
  source 1..20: mol_type = other DNA
acccatagagggaaactaga

SEQ ID NO: 20714 - DNA, 20 bp, synthetic construct
  misc_feature 1..20: note = Description of Artificial Sequence: Synthetic oligonucleotide
  misc_feature 1..20: note = Target: SCN10A; (-) strand; PAM type: NRG; PAM sequence: GAG
  source 1..20: mol_type = other DNA
agacccatagagggaaacta

SEQ ID NO: 20715 - DNA, 20 bp, synthetic construct
  misc_feature 1..20: note = Description of Artificial Sequence: Synthetic oligonucleotide
  misc_feature 1..20: note = Target: SCN10A; (-) strand; PAM type: NRG; PAM sequence: TAG
  source 1..20: mol_type = other DNA
tgagacccatagagggaaac

SEQ ID NO: 20716 - DNA, 20 bp, synthetic construct
  misc_feature 1..20: note = Description of Artificial Sequence: Synthetic oligonucleotide
  misc_feature 1..20: note = Target: SCN10A; (-) strand; PAM type: NRG; PAM sequence: GGG
  source 1..20: mol_type = other DNA
agatgagtgagacccataga

SEQ ID NO: 20717 - DNA, 20 bp, synthetic construct
  misc_feature 1..20: note = Description of Artificial Sequence: Synthetic oligonucleotide
  misc_feature 1..20: note = Target: SCN10A; (-) strand; PAM type: NRG; PAM sequence: AGG
  source 1..20: mol_type = other DNA
aagatgagtgagacccatag

SEQ ID NO: 20718 - DNA, 20 bp, synthetic construct
  misc_feature 1..20: note = Description of Artificial Sequence: Synthetic oligonucleotide
  misc_feature 1..20: note = Target: SCN10A; (-) strand; PAM type: NRG; PAM sequence: GAG
  source 1..20: mol_type = other DNA
aaagatgagtgagacccata

SEQ ID NO: 20719 - DNA, 20 bp, synthetic construct
  misc_feature 1..20: note = Description of Artificial Sequence: Synthetic oligonucleotide
  misc_feature 1..20: note = Target: SCN10A; (-) strand; PAM type: NRG; PAM sequence: TAG
  source 1..20: mol_type = other DNA
aaaaagatgagtgagaccca

SEQ ID NO: 20720 - DNA, 20 bp, synthetic construct
  misc_feature 1..20: note = Description of Artificial Sequence: Synthetic oligonucleotide
  misc_feature 1..20: note = Target: SCN10A; (-) strand; PAM type: NRG; PAM sequence: GAG
  source 1..20: mol_type = other DNA
ggctatggaaaaagatgagt

SEQ ID NO: 20721 - DNA, 20 bp, synthetic construct
  misc_feature 1..20: note = Description of Artificial Sequence: Synthetic oligonucleotide
  misc_feature 1..20: note = Target: SCN10A; (-) strand; PAM type: NRG; PAM sequence: GAG
  source 1..20: mol_type = other DNA
tgaaggctatggaaaaagat

SEQ ID NO: 20722 - DNA, 20 bp, synthetic construct
  misc_feature 1..20: note = Description of Artificial Sequence: Synthetic oligonucleotide
  misc_feature 1..20: note = Target: SCN10A; (-) strand; PAM type: NRG; PAM sequence: AAG
  source 1..20: mol_type = other DNA
cccagtgaaggctatggaaa

SEQ ID NO: 20723 - DNA, 20 bp, synthetic construct
  misc_feature 1..20: note = Description of Artificial Sequence: Synthetic oligonucleotide
  misc_feature 1..20: note = Target: SCN10A; (-) strand; PAM type: NRG; PAM sequence: TGG
  source 1..20: mol_type = other DNA
ttagcccccagtgaaggcta

SEQ ID NO: 20724 - DNA, 20 bp, synthetic construct
  misc_feature 1..20: note = Description of Artificial Sequence: Synthetic oligonucleotide
  misc_feature 1..20: note = Target: SCN10A; (-) strand; PAM type: NRG; PAM sequence: AGG
  source 1..20: mol_type = other DNA
gatgacttagcccccagtga

SEQ ID NO: 20725 - DNA, 20 bp, synthetic construct
  misc_feature 1..20: note = Description of Artificial Sequence: Synthetic oligonucleotide
  misc_feature 1..20: note = Target: SCN10A; (-) strand; PAM type: NRG; PAM sequence: AAG
  source 1..20: mol_type = other DNA
tgatgacttagcccccagtg

SEQ ID NO: 20726 - DNA, 20 bp, synthetic construct
  misc_feature 1..20: note = Description of Artificial Sequence: Synthetic oligonucleotide
  misc_feature 1..20: note = Target: SCN10A; (-) strand; PAM type: NRG; PAM sequence: CAG
  source 1..20: mol_type = other DNA
ctgggtgatgacttagcccc

SEQ ID NO: 20727 - DNA, 20 bp, synthetic construct
  misc_feature 1..20: note = Description of Artificial Sequence: Synthetic oligonucleotide
  misc_feature 1..20: note = Target: SCN10A; (-) strand; PAM type: NRG; PAM sequence: TAG
  source 1..20: mol_type = other DNA
agaggagctgggtgatgact

SEQ ID NO: 20728 - DNA, 20 bp, synthetic construct
  misc_feature 1..20: note = Description of Artificial Sequence: Synthetic oligonucleotide
  misc_feature 1..20: note = Target: SCN10A; (-) strand; PAM type: NRG; PAM sequence: GGG
  source 1..20: mol_type = other DNA
cagaatggcagagaggagct

SEQ ID NO: 20729 - DNA, 20 bp, synthetic construct
  misc_feature 1..20: note = Description of Artificial Sequence: Synthetic oligonucleotide
  misc_feature 1..20: note = Target: SCN10A; (-) strand; PAM type: NRG; PAM sequence: TGG
  source 1..20: mol_type = other DNA
ccagaatggcagagaggagc

SEQ ID NO: 20730 - DNA, 20 bp, synthetic construct
  misc_feature 1..20: note = Description of Artificial Sequence: Synthetic oligonucleotide
  misc_feature 1..20: note = Target: SCN10A; (-) strand; PAM type: NRG; PAM sequence: GAG
  source 1..20: mol_type = other DNA
ggctccagaatggcagagag

SEQ ID NO: 20731 - DNA, 20 bp, synthetic construct
  misc_feature 1..20: note = Description of Artificial Sequence: Synthetic oligonucleotide
  misc_feature 1..20: note = Target: SCN10A; (-) strand; PAM type: NRG; PAM sequence: AGG
  source 1..20: mol_type = other DNA
gtggctccagaatggcagag

SEQ ID NO: 20732 - DNA, 20 bp, synthetic construct
  misc_feature 1..20: note = Description of Artificial Sequence: Synthetic oligonucleotide
  misc_feature 1..20: note = Target: SCN10A; (-) strand; PAM type: NRG; PAM sequence: GAG
  source 1..20: mol_type = other DNA
tgtggctccagaatggcaga

SEQ ID NO: 20733 - DNA, 20 bp, synthetic construct
  misc_feature 1..20: note = Description of Artificial Sequence: Synthetic oligonucleotide
  misc_feature 1..20: note = Target: SCN10A; (-) strand; PAM type: NRG; PAM sequence: GAG
  source 1..20: mol_type = other DNA
cctgtggctccagaatggca

SEQ ID NO: 20734 - DNA, 20 bp, synthetic construct
  misc_feature 1..20: note = Description of Artificial Sequence: Synthetic oligonucleotide
  misc_feature 1..20: note = Target: SCN10A; (-) strand; PAM type: NRG; PAM sequence: CAG
  source 1..20: mol_type = other DNA
gccctgtggctccagaatgg

SEQ ID NO: 20735 - DNA, 20 bp, synthetic construct
  misc_feature 1..20: note = Description of Artificial Sequence: Synthetic oligonucleotide
  misc_feature 1..20: note = Target: SCN10A; (-) strand; PAM type: NRG; PAM sequence: TGG
  source 1..20: mol_type = other DNA
agagccctgtggctccagaa

SEQ ID NO: 20736 - DNA, 20 bp, synthetic construct
  misc_feature 1..20: note = Description of Artificial Sequence: Synthetic oligonucleotide
  misc_feature 1..20: note = Target: SCN10A; (-) strand; PAM type: NRG; PAM sequence: CAG
  source 1..20: mol_type = other DNA
cagagagagccctgtggctc

SEQ ID NO: 20737 - DNA, 20 bp, synthetic construct
  misc_feature 1..20: note = Description of Artificial Sequence: Synthetic oligonucleotide
  misc_feature 1..20: note = Target: SCN10A; (-) strand; PAM type: NRG; PAM sequence: TGG
  source 1..20: mol_type = other DNA
cagcctcagagagagccctg

SEQ ID NO: 20738 - DNA, 20 bp, synthetic construct
  misc_feature 1..20: note = Description of Artificial Sequence: Synthetic oligonucleotide
  misc_feature 1..20: note = Target: SCN10A; (-) strand; PAM type: NRG; PAM sequence: GAG
  source 1..20: mol_type = other DNA
gcctgaagcagcctcagaga

SEQ ID NO: 20739 - DNA, 20 bp, synthetic construct
  misc_feature 1..20: note = Description of Artificial Sequence: Synthetic oligonucleotide
  misc_feature 1..20: note = Target: SCN10A; (-) strand; PAM type: NRG; PAM sequence: GAG
  source 1..20: mol_type = other DNA
aggcctgaagcagcctcaga

SEQ ID NO: 20740 - DNA, 20 bp, synthetic construct
  misc_feature 1..20: note = Description of Artificial Sequence: Synthetic oligonucleotide
  misc_feature 1..20: note = Target: SCN10A; (-) strand; PAM type: NRG; PAM sequence: GAG
  source 1..20: mol_type = other DNA
gaaggcctgaagcagcctca

SEQ ID NO: 20741 - DNA, 20 bp, synthetic construct
  misc_feature 1..20: note = Description of Artificial Sequence: Synthetic oligonucleotide
  misc_feature 1..20: note = Target: SCN10A; (-) strand; PAM type: NRG; PAM sequence: CAG
  source 1..20: mol_type = other DNA
gagaaggcctgaagcagcct

SEQ ID NO: 20742 - DNA, 20 bp, synthetic construct
  misc_feature 1..20: note = Description of Artificial Sequence: Synthetic oligonucleotide
  misc_feature 1..20: note = Target: SCN10A; (-) strand; PAM type: NRG; PAM sequence: CAG
  source 1..20: mol_type = other DNA
aggttagagaaggcctgaag

SEQ ID NO: 20743 - DNA, 20 bp, synthetic construct
  misc_feature 1..20: note = Description of Artificial Sequence: Synthetic oligonucleotide
  misc_feature 1..20: note = Target: SCN10A; (-) strand; PAM type: NRG; PAM sequence: AAG
  source 1..20: mol_type = other DNA
cttaggttagagaaggcctg

SEQ ID NO: 20744 - DNA, 20 bp, synthetic construct
  misc_feature 1..20: note = Description of Artificial Sequence: Synthetic oligonucleotide
  misc_feature 1..20: note = Target: SCN10A; (-) strand; PAM type: NRG; PAM sequence: AGG
  source 1..20: mol_type = other DNA
ggtcaaccttaggttagaga

SEQ ID NO: 20745 - DNA, 20 bp, synthetic construct
  misc_feature 1..20: note = Description of Artificial Sequence: Synthetic oligonucleotide
  misc_feature 1..20: note = Target: SCN10A; (-) strand; PAM type: NRG; PAM sequence: AAG
  source 1..20: mol_type = other DNA
aggtcaaccttaggttagag

SEQ ID NO: 20746 - DNA, 20 bp, synthetic construct
  misc_feature 1..20: note = Description of Artificial Sequence: Synthetic oligonucleotide
  misc_feature 1..20: note = Target: SCN10A; (-) strand; PAM type: NRG; PAM sequence: GAG
  source 1..20: mol_type = other DNA
cttaggtcaaccttaggtta

SEQ ID NO: 20747 - DNA, 20 bp, synthetic construct
  misc_feature 1..20: note = Description of Artificial Sequence: Synthetic oligonucleotide
  misc_feature 1..20: note = Target: SCN10A; (-) strand; PAM type: NRG; PAM sequence: TAG
  source 1..20: mol_type = other DNA
agcttaggtcaaccttaggt

SEQ ID NO: 20748 - DNA, 20 bp, synthetic construct
  misc_feature 1..20: note = Description of Artificial Sequence: Synthetic oligonucleotide
  misc_feature 1..20: note = Target: SCN10A; (-) strand; PAM type: NRG; PAM sequence: AGG
  source 1..20: mol_type = other DNA
ccttagcttaggtcaacctt

SEQ ID NO: 20749 - DNA, 20 bp, synthetic construct
  misc_feature 1..20: note = Description of Artificial Sequence: Synthetic oligonucleotide
  misc_feature 1..20: note = Target: SCN10A; (-) strand; PAM type: NRG; PAM sequence: TAG
  source 1..20: mol_type = other DNA
accttagcttaggtcaacct

SEQ ID NO: 20750 - DNA, 20 bp, synthetic construct
  misc_feature 1..20: note = Description of Artificial Sequence: Synthetic oligonucleotide
  misc_feature 1..20: note = Target: SCN10A; (-) strand; PAM type: NRG; PAM sequence: AGG
  source 1..20: mol_type = other DNA
gggaaaggcaaccttagctt

SEQ ID NO: 20751 - DNA, 20 bp, synthetic construct
  misc_feature 1..20: note = Description of Artificial Sequence: Synthetic oligonucleotide
  misc_feature 1..20: note = Target: SCN10A; (-) strand; PAM type: NRG; PAM sequence: TAG
  source 1..20: mol_type = other DNA
ggggaaaggcaaccttagct

SEQ ID NO: 20752 - DNA, 20 bp, synthetic construct
  misc_feature 1..20: note = Description of Artificial Sequence: Synthetic oligonucleotide
  misc_feature 1..20: note = Target: SCN10A; (-) strand; PAM type: NRG; PAM sequence: TAG
  source 1..20: mol_type = other DNA
aatctggggaaaggcaacct

SEQ ID NO: 20753 - DNA, 20 bp, synthetic construct
  misc_feature 1..20: note = Description of Artificial Sequence: Synthetic oligonucleotide
  misc_feature 1..20: note = Target: SCN10A; (-) strand; PAM type: NRG; PAM sequence: AGG
  source 1..20: mol_type = other DNA
ttttaagaaaatctggggaa

SEQ ID NO: 20754 - DNA, 20 bp, synthetic construct
  misc_feature 1..20: note = Description of Artificial Sequence: Synthetic oligonucleotide
  misc_feature 1..20: note = Target: SCN10A; (-) strand; PAM type: NRG; PAM sequence: AAG
  source 1..20: mol_type = other DNA
tttttaagaaaatctgggga

SEQ ID NO: 20755 - DNA, 20 bp, synthetic construct
  misc_feature 1..20: note = Description of Artificial Sequence: Synthetic oligonucleotide
  misc_feature 1..20: note = Target: SCN10A; (-) strand; PAM type: NRG; PAM sequence: GGG
  source 1..20: mol_type = other DNA
gacgtttttaagaaaatctg

SEQ ID NO: 20756 - DNA, 20 bp, synthetic construct
  misc_feature 1..20: note = Description of Artificial Sequence: Synthetic oligonucleotide
  misc_feature 1..20: note = Target: SCN10A; (-) strand; PAM type: NRG; PAM sequence: GGG
  source 1..20: mol_type = other DNA
agacgtttttaagaaaatct

SEQ ID NO: 20757 - DNA, 20 bp, synthetic construct
  misc_feature 1..20: note = Description of Artificial Sequence: Synthetic oligonucleotide
  misc_feature 1..20: note = Target: SCN10A; (-) strand; PAM type: NRG; PAM sequence: TGG
  source 1..20: mol_type = other DNA
aagacgtttttaagaaaatc

SEQ ID NO: 20758 - DNA, 20 bp, synthetic construct
  misc_feature 1..20: note = Description of Artificial Sequence: Synthetic oligonucleotide
  misc_feature 1..20: note = Target: SCN10A; (-) strand; PAM type: NRG; PAM sequence: AAG
  source 1..20: mol_type = other DNA
ggagaaacaaagacgttttt

SEQ ID NO: 20759 - DNA, 20 bp, synthetic construct
  misc_feature 1..20: note = Description of Artificial Sequence: Synthetic oligonucleotide
  misc_feature 1..20: note = Target: SCN10A; (-) strand; PAM type: NRG; PAM sequence: AAG
  source 1..20: mol_type = other DNA
taagaaaggcaggagaaaca

SEQ ID NO: 20760 - DNA, 20 bp, synthetic construct
  misc_feature 1..20: note = Description of Artificial Sequence: Synthetic oligonucleotide
  misc_feature 1..20: note = Target: SCN10A; (-) strand; PAM type: NRG; PAM sequence: GAG
  source 1..20: mol_type = other DNA
gagtagagtaagaaaggcag

SEQ ID NO: 20761 - DNA, 20 bp, synthetic construct
  misc_feature 1..20: note = Description of Artificial Sequence: Synthetic oligonucleotide
  misc_feature 1..20: note = Target: SCN10A; (-) strand; PAM type: NRG; PAM sequence: AGG
  source 1..20: mol_type = other DNA
gagagtagagtaagaaaggc

SEQ ID NO: 20762 - DNA, 20 bp, synthetic construct
  misc_feature 1..20: note = Description of Artificial Sequence: Synthetic oligonucleotide
  misc_feature 1..20: note = Target: SCN10A; (-) strand; PAM type: NRG; PAM sequence: CAG
  source 1..20: mol_type = other DNA
tgagagtagagtaagaaagg

SEQ ID NO: 20763 - DNA, 20 bp, synthetic construct
  misc_feature 1..20: note = Description of Artificial Sequence: Synthetic oligonucleotide
  misc_feature 1..20: note = Target: SCN10A; (-) strand; PAM type: NRG; PAM sequence: AGG
  source 1..20: mol_type = other DNA
ctgtgagagtagagtaagaa

SEQ ID NO: 20764 - DNA, 20 bp, synthetic construct
  misc_feature 1..20: note = Description of Artificial Sequence: Synthetic oligonucleotide
  misc_feature 1..20: note = Target: SCN10A; (-) strand; PAM type: NRG; PAM sequence: AAG
  source 1..20: mol_type = other DNA
actgtgagagtagagtaaga

SEQ ID NO: 20765 - DNA, 20 bp, synthetic construct
  misc_feature 1..20: note = Description of Artificial Sequence: Synthetic oligonucleotide
  misc_feature 1..20: note = Target: SCN10A; (-) strand; PAM type: NRG; PAM sequence: AAG
  source 1..20: mol_type = other DNA
agatactgtgagagtagagt

SEQ ID NO: 20766 - DNA, 20 bp, synthetic construct
  misc_feature 1..20: note = Description of Artificial Sequence: Synthetic oligonucleotide
  misc_feature 1..20: note = Target: SCN10A; (-) strand; PAM type: NRG; PAM sequence: GAG
  source 1..20: mol_type = other DNA
aggaagatactgtgagagta

SEQ ID NO: 20767 - DNA, 20 bp, synthetic construct
  misc_feature 1..20: note = Description of Artificial Sequence: Synthetic oligonucleotide
  misc_feature 1..20: note = Target: SCN10A; (-) strand; PAM type: NRG; PAM sequence: TAG
  source 1..20: mol_type = other DNA
caaggaagatactgtgagag

SEQ ID NO: 20768 - DNA, 20 bp, synthetic construct
  misc_feature 1..20: note = Description of Artificial Sequence: Synthetic oligonucleotide
  misc_feature 1..20: note = Target: SCN10A; (-) strand; PAM type: NRG; PAM sequence: GAG
  source 1..20: mol_type = other DNA
gctcaaggaagatactgtga

SEQ ID NO: 20769 - DNA, 20 bp, synthetic construct
  misc_feature 1..20: note = Description of Artificial Sequence: Synthetic oligonucleotide
  misc_feature 1..20: note = Target: SCN10A; (-) strand; PAM type: NRG; PAM sequence: GAG
  source 1..20: mol_type = other DNA
ccgctcaaggaagatactgt

SEQ ID NO: 20770 - DNA, 20 bp, synthetic construct
  misc_feature 1..20: note = Description of Artificial Sequence: Synthetic oligonucleotide
  misc_feature 1..20: note = Target: SCN10A; (-) strand; PAM type: NRG; PAM sequence: AAG
  source 1..20: mol_type = other DNA
ggatagacttccgctcaagg

SEQ ID NO: 20771 - DNA, 20 bp, synthetic construct
  misc_feature 1..20: note = Description of Artificial Sequence: Synthetic oligonucleotide
  misc_feature 1..20: note = Target: SCN10A; (-) strand; PAM type: NRG; PAM sequence: AGG
  source 1..20: mol_type = other DNA
gtaggatagacttccgctca

SEQ ID NO: 20772 - DNA, 20 bp, synthetic construct
  misc_feature 1..20: note = Description of Artificial Sequence: Synthetic oligonucleotide
  misc_feature 1..20: note = Target: SCN10A; (-) strand; PAM type: NRG; PAM sequence: AAG
  source 1..20: mol_type = other DNA
ggtaggatagacttccgctc

SEQ ID NO: 20773 - DNA, 20 bp, synthetic construct
  misc_feature 1..20: note = Description of Artificial Sequence: Synthetic oligonucleotide
  misc_feature 1..20: note = Target: SCN10A; (-) strand; PAM type: NRG; PAM sequence: TAG
  source 1..20: mol_type = other DNA
tcaggtatcttggggtagga

SEQ ID NO: 20774 - DNA, 20 bp, synthetic construct
  misc_feature 1..20: note = Description of Artificial Sequence: Synthetic oligonucleotide
  misc_feature 1..20: note = Target: SCN10A; (-) strand; PAM type: NRG; PAM sequence: AGG
  source 1..20: mol_type = other DNA
atagtcaggtatcttggggt

SEQ ID NO: 20775 - DNA, 20 bp, synthetic construct
  misc_feature 1..20: note = Description of Artificial Sequence: Synthetic oligonucleotide
  misc_feature 1..20: note = Target: SCN10A; (-) strand; PAM type: NRG; PAM sequence: TAG
  source 1..20: mol_type = other DNA
aatagtcaggtatcttgggg

SEQ ID NO: 20776 - DNA, 20 bp, synthetic construct
  misc_feature 1..20: note = Description of Artificial Sequence: Synthetic oligonucleotide
  misc_feature 1..20: note = Target: SCN10A; (-) strand; PAM type: NRG; PAM sequence: GGG
  source 1..20: mol_type = other DNA
aggaatagtcaggtatcttg

SEQ ID NO: 20777 - DNA, 20 bp, synthetic construct
  misc_feature 1..20: note = Description of Artificial Sequence: Synthetic oligonucleotide
  misc_feature 1..20: note = Target: SCN10A; (-) strand; PAM type: NRG; PAM sequence: GGG
  source 1..20: mol_type = other DNA
aaggaatagtcaggtatctt

SEQ ID NO: 20778 - DNA, 20 bp, synthetic construct
  misc_feature 1..20: note = Description of Artificial Sequence: Synthetic oligonucleotide
  misc_feature 1..20: note = Target: SCN10A; (-) strand; PAM type: NRG; PAM sequence: TGG
  source 1..20: mol_type = other DNA
taaggaatagtcaggtatct

SEQ ID NO: 20779 - DNA, 20 bp, synthetic construct
  misc_feature 1..20: note = Description of Artificial Sequence: Synthetic oligonucleotide
  misc_feature 1..20: note = Target: SCN10A; (-) strand; PAM type: NRG; PAM sequence: AGG
  source 1..20: mol_type = other DNA
gaagaaaataaggaatagtc

SEQ ID NO: 20780 - DNA, 20 bp, synthetic construct
  misc_feature 1..20: note = Description of Artificial Sequence: Synthetic oligonucleotide
  misc_feature 1..20: note = Target: SCN10A; (-) strand; PAM type: NRG; PAM sequence: CAG
  source 1..20: mol_type = other DNA
ggaagaaaataaggaatagt

SEQ ID NO: 20781 - DNA, 20 bp, synthetic construct
  misc_feature 1..20: note = Description of Artificial Sequence: Synthetic oligonucleotide
  misc_feature 1..20: note = Target: SCN10A; (-) strand; PAM type: NRG; PAM sequence: TAG
  source 1..20: mol_type = other DNA
aaaaggaagaaaataaggaa

SEQ ID NO: 20782 - DNA, 20 bp, synthetic construct
  misc_feature 1..20: note = Description of Artificial Sequence: Synthetic oligonucleotide
  misc_feature 1..20: note = Target: SCN10A; (-) strand; PAM type: NRG; PAM sequence: AGG
  source 1..20: mol_type = other DNA
tgataaaaaggaagaaaata

SEQ ID NO: 20783 - DNA, 20 bp, synthetic construct
  misc_feature 1..20: note = Description of Artificial Sequence: Synthetic oligonucleotide
  misc_feature 1..20: note = Target: SCN10A; (-) strand; PAM type: NRG; PAM sequence: AAG
  source 1..20: mol_type = other DNA
ctgataaaaaggaagaaaat

SEQ ID NO: 20784 - DNA, 20 bp, synthetic construct
  misc_feature 1..20: note = Description of Artificial Sequence: Synthetic oligonucleotide
  misc_feature 1..20: note = Target: SCN10A; (-) strand; PAM type: NRG; PAM sequence: AAG
  source 1..20: mol_type = other DNA
ggtgtaaactgataaaaagg

SEQ ID NO: 20785 - DNA, 20 bp, synthetic construct
  misc_feature 1..20: note = Description of Artificial Sequence: Synthetic oligonucleotide
  misc_feature 1..20: note = Target: SCN10A; (-) strand; PAM type: NRG; PAM sequence: AGG
  source 1..20: mol_type = other DNA
agtggtgtaaactgataaaa

SEQ ID NO: 20786 - DNA, 20 bp, synthetic construct
  misc_feature 1..20: note = Description of Artificial Sequence: Synthetic oligonucleotide
  misc_feature 1..20: note = Target: SCN10A; (-) strand; PAM type: NRG; PAM sequence: AAG
  source 1..20: mol_type = other DNA
tagtggtgtaaactgataaa

SEQ ID NO: 20787 - DNA, 20 bp, synthetic construct
  misc_feature 1..20: note = Description of Artificial Sequence: Synthetic oligonucleotide
  misc_feature 1..20: note = Target: SCN10A; (-) strand; PAM type: NRG; PAM sequence: TGG
  source 1..20: mol_type = other DNA
ggggtgatgctactttatag

SEQ ID NO: 20788 - DNA, 20 bp, synthetic construct
  misc_feature 1..20: note = Description of Artificial Sequence: Synthetic oligonucleotide
  misc_feature 1..20: note = Target: SCN10A; (-) strand; PAM type: NRG; PAM sequence: TAG
  source 1..20: mol_type = other DNA
tggggggtgatgctacttta

SEQ ID NO: 20789 - DNA, 20 bp, synthetic construct
  misc_feature 1..20: note = Description of Artificial Sequence: Synthetic oligonucleotide
  misc_feature 1..20: note = Target: SCN10A; (-) strand; PAM type: NRG; PAM sequence: GGG
  source 1..20: mol_type = other DNA
taacaaaggtgatatctggg

SEQ ID NO: 20790 - DNA, 20 bp, synthetic construct
  misc_feature 1..20: note = Description of Artificial Sequence: Synthetic oligonucleotide
  misc_feature 1..20: note = Target: SCN10A; (-) strand; PAM type: NRG; PAM sequence: GGG
  source 1..20: mol_type = other DNA
ttaacaaaggtgatatctgg

SEQ ID NO: 20791 - DNA, 20 bp, synthetic construct
  misc_feature 1..20: note = Description of Artificial Sequence: Synthetic oligonucleotide
  misc_feature 1..20: note = Target: SCN10A; (-) strand; PAM type: NRG; PAM sequence: GGG
  source 1..20: mol_type = other DNA
attaacaaaggtgatatctg

SEQ ID NO: 20792 - DNA, 20 bp, synthetic construct
  misc_feature 1..20: note = Description of Artificial Sequence: Synthetic oligonucleotide
  misc_feature 1..20: note = Target: SCN10A; (-) strand; PAM type: NRG; PAM sequence: GGG
  source 1..20: mol_type = other DNA
cattaacaaaggtgatatct

SEQ ID NO: 20793 - DNA, 20 bp, synthetic construct
  misc_feature 1..20: note = Description of Artificial Sequence: Synthetic oligonucleotide
  misc_feature 1..20: note = Target: SCN10A; (-) strand; PAM type: NRG; PAM sequence: TGG
  source 1..20: mol_type = other DNA
gcattaacaaaggtgatatc

SEQ ID NO: 20794 - DNA, 20 bp, synthetic construct
  misc_feature 1..20: note = Description of Artificial Sequence: Synthetic oligonucleotide
  misc_feature 1..20: note = Target: SCN10A; (-) strand; PAM type: NRG; PAM sequence: AGG
  source 1..20: mol_type = other DNA
gaagagcagtgcattaacaa

SEQ ID NO: 20795 - DNA, 20 bp, synthetic construct
  misc_feature 1..20: note = Description of Artificial Sequence: Synthetic oligonucleotide
  misc_feature 1..20: note = Target: SCN10A; (-) strand; PAM type: NRG; PAM sequence: AAG
  source 1..20: mol_type = other DNA
agaagagcagtgcattaaca

SEQ ID NO: 20796 - DNA, 20 bp, synthetic construct
  misc_feature 1..20: note = Description of Artificial Sequence: Synthetic oligonucleotide
  misc_feature 1..20: note = Target: SCN10A; (-) strand; PAM type: NRG; PAM sequence: CAG
  source 1..20: mol_type = other DNA
atctccattacctagaagag

SEQ ID NO: 20797 - DNA, 20 bp, synthetic construct
  misc_feature 1..20: note = Description of Artificial Sequence: Synthetic oligonucleotide
  misc_feature 1..20: note = Target: SCN10A; (-) strand; PAM type: NRG; PAM sequence: GAG
  source 1..20: mol_type = other DNA
tggatctccattacctagaa

SEQ ID NO: 20798 - DNA, 20 bp, synthetic construct
  misc_feature 1..20: note = Description of Artificial Sequence: Synthetic oligonucleotide
  misc_feature 1..20: note = Target: SCN10A; (-) strand; PAM type: NRG; PAM sequence: AAG
  source 1..20: mol_type = other DNA
gctggatctccattacctag

SEQ ID NO: 20799 - DNA, 20 bp, synthetic construct
  misc_feature 1..20: note = Description of Artificial Sequence: Synthetic oligonucleotide
  misc_feature 1..20: note = Target: SCN10A; (-) strand; PAM type: NRG; PAM sequence: TAG
  source 1..20: mol_type = other DNA
acagctggatctccattacc

SEQ ID NO: 20800 - DNA, 20 bp, synthetic construct
  misc_feature 1..20: note = Description of Artificial Sequence: Synthetic oligonucleotide
  misc_feature 1..20: note = Target: SCN10A; (-) strand; PAM type: NRG; PAM sequence: TGG
  source 1..20: mol_type = other DNA
gtatctgttttgctcacagc

SEQ ID NO: 20801 - DNA, 20 bp, synthetic construct
  misc_feature 1..20: note = Description of Artificial Sequence: Synthetic oligonucleotide
  misc_feature 1..20: note = Target: SCN10A; (-) strand; PAM type: NRG; PAM sequence: CAG
  source 1..20: mol_type = other DNA
agatgtatctgttttgctca

SEQ ID NO: 20802 - DNA, 20 bp, synthetic construct
  misc_feature 1..20: note = Description of Artificial Sequence: Synthetic oligonucleotide
  misc_feature 1..20: note = Target: SCN10A; (-) strand; PAM type: NRG; PAM sequence: GAG
  source 1..20: mol_type = other DNA
agtaatttaccagatatgca

SEQ ID NO: 20803 - DNA, 20 bp, synthetic construct
  misc_feature 1..20: note = Description of Artificial Sequence: Synthetic oligonucleotide
  misc_feature 1..20: note = Target: SCN10A; (-) strand; PAM type: NRG; PAM sequence: CAG
  source 1..20: mol_type = other DNA
ccagtaatttaccagatatg

SEQ ID NO: 20804 - DNA, 20 bp, synthetic construct
  misc_feature 1..20: note = Description of Artificial Sequence: Synthetic oligonucleotide
  misc_feature 1..20: note = Target: SCN10A; (-) strand; PAM type: NRG; PAM sequence: CAG
  source 1..20: mol_type = other DNA
agaactagccagtaatttac

SEQ ID NO: 20805 - DNA, 20 bp, synthetic construct
  misc_feature 1..20: note = Description of Artificial Sequence: Synthetic oligonucleotide
  misc_feature 1..20: note = Target: SCN10A; (-) strand; PAM type: NRG; PAM sequence: CAG
  source 1..20: mol_type = other DNA
aactgtagagtagaactagc

SEQ ID NO: 20806 - DNA, 20 bp, synthetic construct
  misc_feature 1..20: note = Description of Artificial Sequence: Synthetic oligonucleotide
  misc_feature 1..20: note = Target: SCN10A; (-) strand; PAM type: NRG; PAM sequence: TAG
  source 1..20: mol_type = other DNA
cagaaactgtagagtagaac

SEQ ID NO: 20807 - DNA, 20 bp, synthetic construct
  misc_feature 1..20: note = Description of Artificial Sequence: Synthetic oligonucleotide
  misc_feature 1..20: note = Target: SCN10A; (-) strand; PAM type: NRG; PAM sequence: TAG
  source 1..20: mol_type = other DNA
catgcacagaaactgtagag

SEQ ID NO: 20808 - DNA, 20 bp, synthetic construct
  misc_feature 1..20: note = Description of Artificial Sequence: Synthetic oligonucleotide
  misc_feature 1..20: note = Target: SCN10A; (-) strand; PAM type: NRG; PAM sequence: GAG
  source 1..20: mol_type = other DNA
tcacatgcacagaaactgta

SEQ ID NO: 20809 - DNA, 20 bp, synthetic construct
  misc_feature 1..20: note = Description of Artificial Sequence: Synthetic oligonucleotide
  misc_feature 1..20: note = Target: SCN10A; (-) strand; PAM type: NRG; PAM sequence: TAG
  source 1..20: mol_type = other DNA
attcacatgcacagaaactg

SEQ ID NO: 20810 - DNA, 20 bp, synthetic construct
  misc_feature 1..20: note = Description of Artificial Sequence: Synthetic oligonucleotide
  misc_feature 1..20: note = Target: SCN10A; (-) strand; PAM type: NRG; PAM sequence: CAG
  source 1..20: mol_type = other DNA
tagagagagattcacatgca

SEQ ID NO: 20811 - DNA, 20 bp, synthetic construct
  misc_feature 1..20: note = Description of Artificial Sequence: Synthetic oligonucleotide
  misc_feature 1..20: note = Target: SCN10A; (-) strand; PAM type: NRG; PAM sequence: GAG
  source 1..20: mol_type = other DNA
gaggtggcaagccttagaga

SEQ ID NO: 20812 - DNA, 20 bp, synthetic construct
  misc_feature 1..20: note = Description of Artificial Sequence: Synthetic oligonucleotide
  misc_feature 1..20: note = Target: SCN10A; (-) strand; PAM type: NRG; PAM sequence: GAG
  source 1..20: mol_type = other DNA
cagaggtggcaagccttaga

SEQ ID NO: 20813 - DNA, 20 bp, synthetic construct
  misc_feature 1..20: note = Description of Artificial Sequence: Synthetic oligonucleotide
  misc_feature 1..20: note = Target: SCN10A; (-) strand; PAM type: NRG; PAM sequence: GAG
  source 1..20: mol_type = other DNA
gccagaggtggcaagcctta

SEQ ID NO: 20814 - DNA, 20 bp, synthetic construct
  misc_feature 1..20: note = Description of Artificial Sequence: Synthetic oligonucleotide
  misc_feature 1..20: note = Target: SCN10A; (-) strand; PAM type: NRG; PAM sequence: TAG
  source 1..20: mol_type = other DNA
aagccagaggtggcaagcct

SEQ ID NO: 20815 - DNA, 20 bp, synthetic construct
  misc_feature 1..20: note = Description of Artificial Sequence: Synthetic oligonucleotide
  misc_feature 1..20: note = Target: SCN10A; (-) strand; PAM type: NRG; PAM sequence: AAG
  source 1..20: mol_type = other DNA
taggtaaagccagaggtggc

SEQ ID NO: 20816 - DNA, 20 bp, synthetic construct
  misc_feature 1..20: note = Description of Artificial Sequence: Synthetic oligonucleotide
  misc_feature 1..20: note = Target: SCN10A; (-) strand; PAM type: NRG; PAM sequence: TGG
  source 1..20: mol_type = other DNA
tttctaggtaaagccagagg

SEQ ID NO: 20817 - DNA, 20 bp, synthetic construct
  misc_feature 1..20: note = Description of Artificial Sequence: Synthetic oligonucleotide
  misc_feature 1..20: note = Target: SCN10A; (-) strand; PAM type: NRG; PAM sequence: AGG
  source 1..20: mol_type = other DNA
tactttctaggtaaagccag

SEQ ID NO: 20818 - DNA, 20 bp, synthetic construct
  misc_feature 1..20: note = Description of Artificial Sequence: Synthetic oligonucleotide
  misc_feature 1..20: note = Target: SCN10A; (-) strand; PAM type: NRG; PAM sequence: GAG
  source 1..20: mol_type = other DNA
ctactttctaggtaaagcca

SEQ ID NO: 20819 - DNA, 20 bp, synthetic construct
  misc_feature 1..20: note = Description of Artificial Sequence: Synthetic oligonucleotide
  misc_feature 1..20: note = Target: SCN10A; (-) strand; PAM type: NRG; PAM sequence: CAG
  source 1..20: mol_type = other DNA
ccctactttctaggtaaagc

SEQ ID NO: 20820 - DNA, 20 bp, synthetic construct
  misc_feature 1..20: note = Description of Artificial Sequence: Synthetic oligonucleotide
  misc_feature 1..20: note = Target: SCN10A; (-) strand; PAM type: NRG; PAM sequence: AAG
  source 1..20: mol_type = other DNA
tgtgccctactttctaggta

SEQ ID NO: 20821 - DNA, 20 bp, synthetic construct
  misc_feature 1..20: note = Description of Artificial Sequence: Synthetic oligonucleotide
  misc_feature 1..20: note = Target: SCN10A; (-) strand; PAM type: NRG; PAM sequence: AGG
  source 1..20: mol_type = other DNA
caatgtgtgccctactttct

SEQ ID NO: 20822 - DNA, 20 bp, synthetic construct
  misc_feature 1..20: note = Description of Artificial Sequence: Synthetic oligonucleotide
  misc_feature 1..20: note = Target: SCN10A; (-) strand; PAM type: NRG; PAM sequence: TAG
  source 1..20: mol_type = other DNA
ccaatgtgtgccctactttc

SEQ ID NO: 20823 - DNA, 20 bp, synthetic construct
  misc_feature 1..20: note = Description of Artificial Sequence: Synthetic oligonucleotide
  misc_feature 1..20: note = Target: SCN10A; (-) strand; PAM type: NRG; PAM sequence: GAG
  source 1..20: mol_type = other DNA
gtttgagggatttcaaaaca

SEQ ID NO: 20824 - DNA, 20 bp, synthetic construct
  misc_feature 1..20: note = Description of Artificial Sequence: Synthetic oligonucleotide
  misc_feature 1..20: note = Target: SCN10A; (-) strand; PAM type: NRG; PAM sequence: CAG
  source 1..20: mol_type = other DNA
atgtttgagggatttcaaaa

SEQ ID NO: 20825 - DNA, 20 bp, synthetic construct
  misc_feature 1..20: note = Description of Artificial Sequence: Synthetic oligonucleotide
  misc_feature 1..20: note = Target: SCN10A; (-) strand; PAM type: NRG; PAM sequence: GGG
  source 1..20: mol_type = other DNA
gaaaccaaaaaaatgtttga

SEQ ID NO: 20826 - DNA, 20 bp, synthetic construct
  misc_feature 1..20: note = Description of Artificial Sequence: Synthetic oligonucleotide
  misc_feature 1..20: note = Target: SCN10A; (-) strand; PAM type: NRG; PAM sequence: AGG
  source 1..20: mol_type = other DNA
agaaaccaaaaaaatgtttg

SEQ ID NO: 20827 - DNA, 20 bp, synthetic construct
  misc_feature 1..20: note = Description of Artificial Sequence: Synthetic oligonucleotide
  misc_feature 1..20: note = Target: SCN10A; (-) strand; PAM type: NRG; PAM sequence: GAG
  source 1..20: mol_type = other DNA
tagaaaccaaaaaaatgttt

SEQ ID NO: 20828 - DNA, 20 bp, synthetic construct
  misc_feature 1..20: note = Description of Artificial Sequence: Synthetic oligonucleotide
  misc_feature 1..20: note = Target: SCN10A; (-) strand; PAM type: NRG; PAM sequence: TAG
  source 1..20: mol_type = other DNA
ggggaagaagtggtgagcaa

SEQ ID NO: 20829 - DNA, 20 bp, synthetic construct
  misc_feature 1..20: note = Description of Artificial Sequence: Synthetic oligonucleotide
  misc_feature 1..20: note = Target: SCN10A; (-) strand; PAM type: NRG; PAM sequence: GAG
  source 1..20: mol_type = other DNA
atttgaggggaagaagtggt

SEQ ID NO: 20830 - DNA, 20 bp, synthetic construct
  misc_feature 1..20: note = Description of Artificial Sequence: Synthetic oligonucleotide
  misc_feature 1..20: note = Target: SCN10A; (-) strand; PAM type: NRG; PAM sequence: TGG
  source 1..20: mol_type = other DNA
cctaatttgaggggaagaag

SEQ ID NO: 20831 - DNA, 20 bp, synthetic construct
  misc_feature 1..20: note = Description of Artificial Sequence: Synthetic oligonucleotide
  misc_feature 1..20: note = Target: SCN10A; (-) strand; PAM type: NRG; PAM sequence: AAG
  source 1..20: mol_type = other DNA
aatcctaatttgaggggaag

SEQ ID NO: 20832 - DNA, 20 bp, synthetic construct
  misc_feature 1..20: note = Description of Artificial Sequence: Synthetic oligonucleotide
  misc_feature 1..20: note = Target: SCN10A; (-) strand; PAM type: NRG; PAM sequence: AAG
  source 1..20: mol_type = other DNA
ctgaatcctaatttgagggg

SEQ ID NO: 20833 - DNA, 20 bp, synthetic construct
  misc_feature 1..20: note = Description of Artificial Sequence: Synthetic oligonucleotide
  misc_feature 1..20: note = Target: SCN10A; (-) strand; PAM type: NRG; PAM sequence: GGG
  source 1..20: mol_type = other DNA
aggctgaatcctaatttgag

SEQ ID NO: 20834 - DNA, 20 bp, synthetic construct
  misc_feature 1..20: note = Description of Artificial Sequence: Synthetic oligonucleotide
  misc_feature 1..20: note = Target: SCN10A; (-) strand; PAM type: NRG; PAM sequence: GGG
  source 1..20: mol_type = other DNA
taggctgaatcctaatttga

SEQ ID NO: 20835 - DNA, 20 bp, synthetic construct
  misc_feature 1..20: note = Description of Artificial Sequence: Synthetic oligonucleotide
  misc_feature 1..20: note = Target: SCN10A; (-) strand; PAM type: NRG; PAM sequence: AGG
  source 1..20: mol_type = other DNA
ctaggctgaatcctaatttg

SEQ ID NO: 20836 - DNA, 20 bp, synthetic construct
  misc_feature 1..20: note = Description of Artificial Sequence: Synthetic oligonucleotide
  misc_feature 1..20: note = Target: SCN10A; (-) strand; PAM type: NRG; PAM sequence: GAG
  source 1..20: mol_type = other DNA
cctaggctgaatcctaattt

SEQ ID NO: 20837 - DNA, 20 bp, synthetic construct
  misc_feature 1..20: note = Description of Artificial Sequence: Synthetic oligonucleotide
  misc_feature 1..20: note = Target: SCN10A; (-) strand; PAM type: NRG; PAM sequence: AGG
  source 1..20: mol_type = other DNA
tgtgttttcctcccagccct

SEQ ID NO: 20838 - DNA, 20 bp, synthetic construct
  misc_feature 1..20: note = Description of Artificial Sequence: Synthetic oligonucleotide
  misc_feature 1..20: note = Target: SCN10A; (-) strand; PAM type: NRG; PAM sequence: TAG
  source 1..20: mol_type = other DNA
gtgtgttttcctcccagccc

SEQ ID NO: 20839 - DNA, 20 bp, synthetic construct
  misc_feature 1..20: note = Description of Artificial Sequence: Synthetic oligonucleotide
  misc_feature 1..20: note = Target: SCN10A; (-) strand; PAM type: NRG; PAM sequence: CAG
  source 1..20: mol_type = other DNA
agtcctgtgtgttttcctcc

SEQ ID NO: 20840 - DNA, 20 bp, synthetic construct
  misc_feature 1..20: note = Description of Artificial Sequence: Synthetic oligonucleotide
  misc_feature 1..20: note = Target: SCN10A; (-) strand; PAM type: NRG; PAM sequence: GAG
  source 1..20: mol_type = other DNA
gctggtgtgcccctgagaag

SEQ ID NO: 20841 - DNA, 20 bp, synthetic construct
  misc_feature 1..20: note = Description of Artificial Sequence: Synthetic oligonucleotide
  misc_feature 1..20: note = Target: SCN10A; (-) strand; PAM type: NRG; PAM sequence: AGG
  source 1..20: mol_type = other DNA
gtgctggtgtgcccctgaga

SEQ ID NO: 20842 - DNA, 20 bp, synthetic construct
  misc_feature 1..20: note = Description of Artificial Sequence: Synthetic oligonucleotide
  misc_feature 1..20: note = Target: SCN10A; (-) strand; PAM type: NRG; PAM sequence: AAG
  source 1..20: mol_type = other DNA
agtgctggtgtgcccctgag

SEQ ID NO: 20843 - DNA, 20 bp, synthetic construct
  misc_feature 1..20: note = Description of Artificial Sequence: Synthetic oligonucleotide
  misc_feature 1..20: note = Target: SCN10A; (-) strand; PAM type: NRG; PAM sequence: GAG
  source 1..20: mol_type = other DNA
ttgagtgctggtgtgcccct

SEQ ID NO: 20844 - DNA, 20 bp, synthetic construct
  misc_feature 1..20: note = Description of Artificial Sequence: Synthetic oligonucleotide
  misc_feature 1..20: note = Target: SCN10A; (-) strand; PAM type: NRG; PAM sequence: TGG
  source 1..20: mol_type = other DNA
ttgtaagggagcttgagtgc

SEQ ID NO: 20845 - DNA, 20 bp, synthetic construct
  misc_feature 1..20: note = Description of Artificial Sequence: Synthetic oligonucleotide
  misc_feature 1..20: note = Target: SCN10A; (-) strand; PAM type: NRG; PAM sequence: GAG
  source 1..20: mol_type = other DNA
gaggagttgtaagggagctt

SEQ ID NO: 20846 - DNA, 20 bp, synthetic construct
  misc_feature 1..20: note = Description of Artificial Sequence: Synthetic oligonucleotide
  misc_feature 1..20: note = Target: SCN10A; (-) strand; PAM type: NRG; PAM sequence: GAG
  source 1..20: mol_type = other DNA
aggctggaggagttgtaagg

SEQ ID NO: 20847 - DNA, 20 bp, synthetic construct
  misc_feature 1..20: note = Description of Artificial Sequence: Synthetic oligonucleotide
  misc_feature 1..20: note = Target: SCN10A; (-) strand; PAM type: NRG; PAM sequence: GGG
  source 1..20: mol_type = other DNA
ctaggctggaggagttgtaa

SEQ ID NO: 20848 - DNA, 20 bp, synthetic construct
  misc_feature 1..20: note = Description of Artificial Sequence: Synthetic oligonucleotide
  misc_feature 1..20: note = Target: SCN10A; (-) strand; PAM type: NRG; PAM sequence: AGG
  source 1..20: mol_type = other DNA
cctaggctggaggagttgta

SEQ ID NO: 20849 - DNA, 20 bp, synthetic construct
  misc_feature 1..20: note = Description of Artificial Sequence: Synthetic oligonucleotide
  misc_feature 1..20: note = Target: SCN10A; (-) strand; PAM type: NRG; PAM sequence: AAG
  source 1..20: mol_type = other DNA
acctaggctggaggagttgt

SEQ ID NO: 20850 - DNA, 20 bp, synthetic construct
  misc_feature 1..20: note = Description of Artificial Sequence: Synthetic oligonucleotide
  misc_feature 1..20: note = Target: SCN10A; (-) strand; PAM type: NRG; PAM sequence: GAG
  source 1..20: mol_type = other DNA
taaactgacctaggctggag

SEQ ID NO: 20851 - DNA, 20 bp, synthetic construct
  misc_feature 1..20: note = Description of Artificial Sequence: Synthetic oligonucleotide
  misc_feature 1..20: note = Target: SCN10A; (-) strand; PAM type: NRG; PAM sequence: AGG
  source 1..20: mol_type = other DNA
attaaactgacctaggctgg

SEQ ID NO: 20852 - DNA, 20 bp, synthetic construct
  misc_feature 1..20: note = Description of Artificial Sequence: Synthetic oligonucleotide
  misc_feature 1..20: note = Target: SCN10A; (-) strand; PAM type: NRG; PAM sequence: GAG
  source 1..20: mol_type = other DNA
aattaaactgacctaggctg

SEQ ID NO: 20853 - DNA, 20 bp, synthetic construct
  misc_feature 1..20: note = Description of Artificial Sequence: Synthetic oligonucleotide
  misc_feature 1..20: note = Target: SCN10A; (-) strand; PAM type: NRG; PAM sequence: TGG
  source 1..20: mol_type = other DNA
caaattaaactgacctaggc

SEQ ID NO: 20854 - DNA, 20 bp, synthetic construct
  misc_feature 1..20: note = Description of Artificial Sequence: Synthetic oligonucleotide
  misc_feature 1..20: note = Target: SCN10A; (-) strand; PAM type: NRG; PAM sequence: AGG
  source 1..20: mol_type = other DNA
tagacaaattaaactgacct

SEQ ID NO: 20855 - DNA, 20 bp, synthetic construct
  misc_feature 1..20: note = Description of Artificial Sequence: Synthetic oligonucleotide
  misc_feature 1..20: note = Target: SCN10A; (-) strand; PAM type: NRG; PAM sequence: TAG
  source 1..20: mol_type = other DNA
ctagacaaattaaactgacc

SEQ ID NO: 20856 - DNA, 20 bp, synthetic construct
  misc_feature 1..20: note = Description of Artificial Sequence: Synthetic oligonucleotide
  misc_feature 1..20: note = Target: SCN10A; (-) strand; PAM type: NRG; PAM sequence: TAG
  source 1..20: mol_type = other DNA
ttccagttatcttactcccc

SEQ ID NO: 20857 - DNA, 20 bp, synthetic construct
  misc_feature 1..20: note = Description of Artificial Sequence: Synthetic oligonucleotide
  misc_feature 1..20: note = Target: SCN10A; (-) strand; PAM type: NRG; PAM sequence: CAG
  source 1..20: mol_type = other DNA
aatgcaaccttcatcatttc

SEQ ID NO: 20858 - DNA, 20 bp, synthetic construct
  misc_feature 1..20: note = Description of Artificial Sequence: Synthetic oligonucleotide
  misc_feature 1..20: note = Target: SCN10A; (-) strand; PAM type: NRG; PAM sequence: GAG
  source 1..20: mol_type = other DNA
tttttttgccttagggtatg

SEQ ID NO: 20859 - DNA, 20 bp, synthetic construct
  misc_feature 1..20: note = Description of Artificial Sequence: Synthetic oligonucleotide
  misc_feature 1..20: note = Target: SCN10A; (-) strand; PAM type: NRG; PAM sequence: TGG
  source 1..20: mol_type = other DNA
cctttttttgccttagggta

SEQ ID NO: 20860 - DNA, 20 bp, synthetic construct
  misc_feature 1..20: note = Description of Artificial Sequence: Synthetic oligonucleotide
  misc_feature 1..20: note = Target: SCN10A; (-) strand; PAM type: NRG; PAM sequence: GGG
  source 1..20: mol_type = other DNA
tccagcctttttttgcctta

SEQ ID NO: 20861 - DNA, 20 bp, synthetic construct
  misc_feature 1..20: note = Description of Artificial Sequence: Synthetic oligonucleotide
  misc_feature 1..20: note = Target: SCN10A; (-) strand; PAM type: NRG; PAM sequence: AGG
  source 1..20: mol_type = other DNA
atccagcctttttttgcctt

SEQ ID NO: 20862 - DNA, 20 bp, synthetic construct
  misc_feature 1..20: note = Description of Artificial Sequence: Synthetic oligonucleotide
  misc_feature 1..20: note = Target: SCN10A; (-) strand; PAM type: NRG; PAM sequence: TAG
  source 1..20: mol_type = other DNA
aatccagcctttttttgcct

SEQ ID NO: 20863 - DNA, 20 bp, synthetic construct
  misc_feature 1..20: note = Description of Artificial Sequence: Synthetic oligonucleotide
  misc_feature 1..20: note = Target: SCN10A; (-) strand; PAM type: NRG; PAM sequence: CAG
  source 1..20: mol_type = other DNA
gcaggaggtctgttctaatc

SEQ ID NO: 20864 - DNA, 20 bp, synthetic construct
  misc_feature 1..20: note = Description of Artificial Sequence: Synthetic oligonucleotide
  misc_feature 1..20: note = Target: SCN10A; (-) strand; PAM type: NRG; PAM sequence: AGG
  source 1..20: mol_type = other DNA
tccctctaaccttgagcagg

SEQ ID NO: 20865 - DNA, 20 bp, synthetic construct
  misc_feature 1..20: note = Description of Artificial Sequence: Synthetic oligonucleotide
  misc_feature 1..20: note = Target: SCN10A; (-) strand; PAM type: NRG; PAM sequence: GAG
  source 1..20: mol_type = other DNA
atccctctaaccttgagcag

SEQ ID NO: 20866 - DNA, 20 bp, synthetic construct
  misc_feature 1..20: note = Description of Artificial Sequence: Synthetic oligonucleotide
  misc_feature 1..20: note = Target: SCN10A; (-) strand; PAM type: NRG; PAM sequence: AGG
  source 1..20: mol_type = other DNA
gcatccctctaaccttgagc

SEQ ID NO: 20867 - DNA, 20 bp, synthetic construct
  misc_feature 1..20: note = Description of Artificial Sequence: Synthetic oligonucleotide
  misc_feature 1..20: note = Target: SCN10A; (-) strand; PAM type: NRG; PAM sequence: CAG
  source 1..20: mol_type = other DNA
tgcatccctctaaccttgag

SEQ ID NO: 20868 - DNA, 20 bp, synthetic construct
  misc_feature 1..20: note = Description of Artificial Sequence: Synthetic oligonucleotide
  misc_feature 1..20: note = Target: SCN10A; (-) strand; PAM type: NRG; PAM sequence: GAG
  source 1..20: mol_type = other DNA
gattgcatccctctaacctt

SEQ ID NO: 20869 - DNA, 20 bp, synthetic construct
  misc_feature 1..20: note = Description of Artificial Sequence: Synthetic oligonucleotide
  misc_feature 1..20: note = Target: SCN10A; (-) strand; PAM type: NRG; PAM sequence: GAG
  source 1..20: mol_type = other DNA
tatccacacactttgccata

SEQ ID NO: 20870 - DNA, 20 bp, synthetic construct
  misc_feature 1..20: note = Description of Artificial Sequence: Synthetic oligonucleotide
  misc_feature 1..20: note = Target: SCN10A; (-) strand; PAM type: NRG; PAM sequence: TAG
  source 1..20: mol_type = other DNA
cctatccacacactttgcca

SEQ ID NO: 20871 - DNA, 20 bp, synthetic construct
  misc_feature 1..20: note = Description of Artificial Sequence: Synthetic oligonucleotide
  misc_feature 1..20: note = Target: SCN10A; (-) strand; PAM type: NRG; PAM sequence: TGG
  source 1..20: mol_type = other DNA
gaagagagtggcaatggtca

SEQ ID NO: 20872 - DNA, 20 bp, synthetic construct
  misc_feature 1..20: note = Description of Artificial Sequence: Synthetic oligonucleotide
  misc_feature 1..20: note = Target: SCN10A; (-) strand; PAM type: NRG; PAM sequence: TGG
  source 1..20: mol_type = other DNA
gtagaggaagagagtggcaa

SEQ ID NO: 20873 - DNA, 20 bp, synthetic construct
  misc_feature 1..20: note = Description of Artificial Sequence: Synthetic oligonucleotide
  misc_feature 1..20: note = Target: SCN10A; (-) strand; PAM type: NRG; PAM sequence: TGG
  source 1..20: mol_type = other DNA
caaagggtagaggaagagag

SEQ ID NO: 20874 - DNA, 20 bp, synthetic construct
  misc_feature 1..20: note = Description of Artificial Sequence: Synthetic oligonucleotide
  misc_feature 1..20: note = Target: SCN10A; (-) strand; PAM type: NRG; PAM sequence: GAG
  source 1..20: mol_type = other DNA
agccaaagggtagaggaaga

SEQ ID NO: 20875 - DNA, 20 bp, synthetic construct
  misc_feature 1..20: note = Description of Artificial Sequence: Synthetic oligonucleotide
  misc_feature 1..20: note = Target: SCN10A; (-) strand; PAM type: NRG; PAM sequence: GAG
  source 1..20: mol_type = other DNA
caagccaaagggtagaggaa

SEQ ID NO: 20876 - DNA, 20 bp, synthetic construct
  misc_feature 1..20: note = Description of Artificial Sequence: Synthetic oligonucleotide
  misc_feature 1..20: note = Target: SCN10A; (-) strand; PAM type: NRG; PAM sequence: AAG
  source 1..20: mol_type = other DNA
tccaagccaaagggtagagg

SEQ ID NO: 20877 - DNA, 20 bp, synthetic construct
  misc_feature 1..20: note = Description of Artificial Sequence: Synthetic oligonucleotide
  misc_feature 1..20: note = Target: SCN10A; (-) strand; PAM type: NRG; PAM sequence: AGG
  source 1..20: mol_type = other DNA
agttccaagccaaagggtag

SEQ ID NO: 20878 - DNA, 20 bp, synthetic construct
  misc_feature 1..20: note = Description of Artificial Sequence: Synthetic oligonucleotide
  misc_feature 1..20: note = Target: SCN10A; (-) strand; PAM type: NRG; PAM sequence: GAG
  source 1..20: mol_type = other DNA
aagttccaagccaaagggta

SEQ ID NO: 20879 - DNA, 20 bp, synthetic construct
  misc_feature 1..20: note = Description of Artificial Sequence: Synthetic oligonucleotide
  misc_feature 1..20: note = Target: SCN10A; (-) strand; PAM type: NRG; PAM sequence: TAG
  source 1..20: mol_type = other DNA
ctaagttccaagccaaaggg

SEQ ID NO: 20880 - DNA, 20 bp, synthetic construct
  misc_feature 1..20: note = Description of Artificial Sequence: Synthetic oligonucleotide
  misc_feature 1..20: note = Target: SCN10A; (-) strand; PAM type: NRG; PAM sequence: GGG
  source 1..20: mol_type = other DNA
tatctaagttccaagccaaa

SEQ ID NO: 20881 - DNA, 20 bp, synthetic construct
  misc_feature 1..20: note = Description of Artificial Sequence: Synthetic oligonucleotide
  misc_feature 1..20: note = Target: SCN10A; (-) strand; PAM type: NRG; PAM sequence: AGG
  source 1..20: mol_type = other DNA
gtatctaagttccaagccaa

SEQ ID NO: 20882 - DNA, 20 bp, synthetic construct
  misc_feature 1..20: note = Description of Artificial Sequence: Synthetic oligonucleotide
  misc_feature 1..20: note = Target: SCN10A; (-) strand; PAM type: NRG; PAM sequence: AAG
  source 1..20: mol_type = other DNA
tgtatctaagttccaagcca

SEQ ID NO: 20883 - DNA, 20 bp, synthetic construct
  misc_feature 1..20: note = Description of Artificial Sequence: Synthetic oligonucleotide
  misc_feature 1..20: note = Target: SCN10A; (-) strand; PAM type: NRG; PAM sequence: AAG
  source 1..20: mol_type = other DNA
cagcaatgtatctaagttcc

SEQ ID NO: 20884 - DNA, 20 bp, synthetic construct
  misc_feature 1..20: note = Description of Artificial Sequence: Synthetic oligonucleotide
  misc_feature 1..20: note = Target: SCN10A; (-) strand; PAM type: NRG; PAM sequence: AAG
  source 1..20: mol_type = other DNA
gtctccccagcaatgtatct

SEQ ID NO: 20885 - DNA, 20 bp, synthetic construct
  misc_feature 1..20: note = Description of Artificial Sequence: Synthetic oligonucleotide
  misc_feature 1..20: note = Target: SCN10A; (-) strand; PAM type: NRG; PAM sequence: CAG
  source 1..20: mol_type = other DNA
gggaatccactcagtctccc

SEQ ID NO: 20886 - DNA, 20 bp, synthetic construct
  misc_feature 1..20: note = Description of Artificial Sequence: Synthetic oligonucleotide
  misc_feature 1..20: note = Target: SCN10A; (-) strand; PAM type: NRG; PAM sequence: CAG
  source 1..20: mol_type = other DNA
caatcaagtgggaatccact

SEQ ID NO: 20887 - DNA, 20 bp, synthetic construct
  misc_feature 1..20: note = Description of Artificial Sequence: Synthetic oligonucleotide
  misc_feature 1..20: note = Target: SCN10A; (-) strand; PAM type: NRG; PAM sequence: GGG
  source 1..20: mol_type = other DNA
tagaattctaccaatcaagt

SEQ ID NO: 20888 - DNA, 20 bp, synthetic construct
  misc_feature 1..20: note = Description of Artificial Sequence: Synthetic oligonucleotide
  misc_feature 1..20: note = Target: SCN10A; (-) strand; PAM type: NRG; PAM sequence: TGG
  source 1..20: mol_type = other DNA
ttagaattctaccaatcaag

SEQ ID NO: 20889 - DNA, 20 bp, synthetic construct
  misc_feature 1..20: note = Description of Artificial Sequence: Synthetic oligonucleotide
  misc_feature 1..20: note = Target: SCN10A; (-) strand; PAM type: NRG; PAM sequence: AAG
  source 1..20: mol_type = other DNA
aatttagaattctaccaatc

SEQ ID NO: 20890 - DNA, 20 bp, synthetic construct
  misc_feature 1..20: note = Description of Artificial Sequence: Synthetic oligonucleotide
  misc_feature 1..20: note = Target: SCN10A; (-) strand; PAM type: NRG; PAM sequence: TAG
  source 1..20: mol_type = other DNA
taactaagtccttgttaatt

SEQ ID NO: 20891 - DNA, 20 bp, synthetic construct
  misc_feature 1..20: note = Description of Artificial Sequence: Synthetic oligonucleotide
  misc_feature 1..20: note = Target: SCN10A; (-) strand; PAM type: NRG; PAM sequence: AAG
  source 1..20: mol_type = other DNA
attaatcagtcaatttaact

SEQ ID NO: 20892 - DNA, 20 bp, synthetic construct
  misc_feature 1..20: note = Description of Artificial Sequence: Synthetic oligonucleotide
  misc_feature 1..20: note = Target: SCN10A; (-) strand; PAM type: NRG; PAM sequence: CAG
  source 1..20: mol_type = other DNA
gacaatttaagtccattaat

SEQ ID NO: 20893 - DNA, 20 bp, synthetic construct
  misc_feature 1..20: note = Description of Artificial Sequence: Synthetic oligonucleotide
  misc_feature 1..20: note = Target: SCN10A; (-) strand; PAM type: NRG; PAM sequence: AAG
  source 1..20: mol_type = other DNA
tgaatattggtagacaattt

SEQ ID NO: 20894 - DNA, 20 bp, synthetic construct
  misc_feature 1..20: note = Description of Artificial Sequence: Synthetic oligonucleotide
  misc_feature 1..20: note = Target: SCN10A; (-) strand; PAM type: NRG; PAM sequence: TAG
  source 1..20: mol_type = other DNA
cacattatgctgaatattgg

SEQ ID NO: 20895 - DNA, 20 bp, synthetic construct
  misc_feature 1..20: note = Description of Artificial Sequence: Synthetic oligonucleotide
  misc_feature 1..20: note = Target: SCN10A; (-) strand; PAM type: NRG; PAM sequence: TGG
  source 1..20: mol_type = other DNA
gcccacattatgctgaatat

SEQ ID NO: 20896 - DNA, 20 bp, synthetic construct
  misc_feature 1..20: note = Description of Artificial Sequence: Synthetic oligonucleotide
  misc_feature 1..20: note = Target: SCN10A; (-) strand; PAM type: NRG; PAM sequence: AAG
  source 1..20: mol_type = other DNA
tgtaatttaatttcttgttc

SEQ ID NO: 20897 - DNA, 20 bp, synthetic construct
  misc_feature 1..20: note = Description of Artificial Sequence: Synthetic oligonucleotide
  misc_feature 1..20: note = Target: SCN10A; (-) strand; PAM type: NRG; PAM sequence: CAG
  source 1..20: mol_type = other DNA
tttcatggttgtaacttaca

SEQ ID NO: 20898 - DNA, 20 bp, synthetic construct
  misc_feature 1..20: note = Description of Artificial Sequence: Synthetic oligonucleotide
  misc_feature 1..20: note = Target: SCN10A; (-) strand; PAM type: NRG; PAM sequence: TGG
  source 1..20: mol_type = other DNA
tttcataattatatttttca

SEQ ID NO: 20899 - DNA, 20 bp, synthetic construct
  misc_feature 1..20: note = Description of Artificial Sequence: Synthetic oligonucleotide
  misc_feature 1..20: note = Target: SCN10A; (-) strand; PAM type: NRG; PAM sequence: TGG
  source 1..20: mol_type = other DNA
tggcaaaattatccttttca

SEQ ID NO: 20900 - DNA, 20 bp, synthetic construct
  misc_feature 1..20: note = Description of Artificial Sequence: Synthetic oligonucleotide
  misc_feature 1..20: note = Target: SCN10A; (-) strand; PAM type: NRG; PAM sequence: TGG
  source 1..20: mol_type = other DNA
ccatccttaattttccaaca

SEQ ID NO: 20901 - DNA, 20 bp, synthetic construct
  misc_feature 1..20: note = Description of Artificial Sequence: Synthetic oligonucleotide
  misc_feature 1..20: note = Target: SCN10A; (-) strand; PAM type: NRG; PAM sequence: AAG
  source 1..20: mol_type = other DNA
aggccagctctccggtgtac

SEQ ID NO: 20902 - DNA, 20 bp, synthetic construct
  misc_feature 1..20: note = Description of Artificial Sequence: Synthetic oligonucleotide
  misc_feature 1..20: note = Target: SCN10A; (-) strand; PAM type: NRG; PAM sequence: CGG
  source 1..20: mol_type = other DNA
agaatttcaggccagctctc

SEQ ID NO: 20903 - DNA, 20 bp, synthetic construct
  misc_feature 1..20: note = Description of Artificial Sequence: Synthetic oligonucleotide
  misc_feature 1..20: note = Target: SCN10A; (-) strand; PAM type: NRG; PAM sequence: CAG
  source 1..20: mol_type = other DNA
ggcatcagagaatttcaggc

SEQ ID NO: 20904 - DNA, 20 bp, synthetic construct
  misc_feature 1..20: note = Description of Artificial Sequence: Synthetic oligonucleotide
  misc_feature 1..20: note = Target: SCN10A; (-) strand; PAM type: NRG; PAM sequence: AGG
  source 1..20: mol_type = other DNA
ggcaggcatcagagaatttc

SEQ ID NO: 20905 - DNA, 20 bp, synthetic construct
  misc_feature 1..20: note = Description of Artificial Sequence: Synthetic oligonucleotide
  misc_feature 1..20: note = Target: SCN10A; (-) strand; PAM type: NRG; PAM sequence: CAG
  source 1..20: mol_type = other DNA
tggcaggcatcagagaattt

SEQ ID NO: 20906 - DNA, 20 bp, synthetic construct
  misc_feature 1..20: note = Description of Artificial Sequence: Synthetic oligonucleotide
  misc_feature 1..20: note = Target: SCN10A; (-) strand; PAM type: NRG; PAM sequence: GAG
  source 1..20: mol_type = other DNA
aagtgatctggcaggcatca

SEQ ID NO: 20907 - DNA, 20 bp, synthetic construct
  misc_feature 1..20: note = Description of Artificial Sequence: Synthetic oligonucleotide
  misc_feature 1..20: note = Target: SCN10A; (-) strand; PAM type: NRG; PAM sequence: CAG
  source 1..20: mol_type = other DNA
aaaagtgatctggcaggcat

SEQ ID NO: 20908 - DNA, 20 bp, synthetic construct
  misc_feature 1..20: note = Description of Artificial Sequence: Synthetic oligonucleotide
  misc_feature 1..20: note = Target: SCN10A; (-) strand; PAM type: NRG; PAM sequence: AGG
  source 1..20: mol_type = other DNA
atttttaaaagtgatctggc

SEQ ID NO: 20909 - DNA, 20 bp, synthetic construct
  misc_feature 1..20: note = Description of Artificial Sequence: Synthetic oligonucleotide
  misc_feature 1..20: note = Target: SCN10A; (-) strand; PAM type: NRG; PAM sequence: CAG
  source 1..20: mol_type = other DNA
gatttttaaaagtgatctgg

SEQ ID NO: 20910 - DNA, 20 bp, synthetic construct
  misc_feature 1..20: note = Description of Artificial Sequence: Synthetic oligonucleotide
  misc_feature 1..20: note = Target: SCN10A; (-) strand; PAM type: NRG; PAM sequence: TGG
  source 1..20: mol_type = other DNA
ctagatttttaaaagtgatc

SEQ ID NO: 20911 - DNA, 20 bp, synthetic construct
  misc_feature 1..20: note = Description of Artificial Sequence: Synthetic oligonucleotide
  misc_feature 1..20: note = Target: SCN10A; (-) strand; PAM type: NRG; PAM sequence: AAG
  source 1..20: mol_type = other DNA
tcacaaaactagatttttaa

SEQ ID NO: 20912 - DNA, 20 bp, synthetic construct
  misc_feature 1..20: note = Description of Artificial Sequence: Synthetic oligonucleotide
  misc_feature 1..20: note = Target: SCN10A; (-) strand; PAM type: NRG; PAM sequence: TAG
  source 1..20: mol_type = other DNA
ctttgcatgcatcacaaaac

SEQ ID NO: 20913 - DNA, 20 bp, synthetic construct
  misc_feature 1..20: note = Description of Artificial Sequence: Synthetic oligonucleotide
  misc_feature 1..20: note = Target: SCN10A; (-) strand; PAM type: NRG; PAM sequence: TAG
  source 1..20: mol_type = other DNA
agctcatctcttgttcaaat

SEQ ID NO: 20914 - DNA, 20 bp, synthetic construct
  misc_feature 1..20: note = Description of Artificial Sequence: Synthetic oligonucleotide
  misc_feature 1..20: note = Target: SCN10A; (-) strand; PAM type: NRG; PAM sequence: TAG
  source 1..20: mol_type = other DNA
atttgatgaataaaatatcc

SEQ ID NO: 20915 - DNA, 20 bp, synthetic construct
  misc_feature 1..20: note = Description of Artificial Sequence: Synthetic oligonucleotide
  misc_feature 1..20: note = Target: SCN10A; (-) strand; PAM type: NRG; PAM sequence: TAG
  source 1..20: mol_type = other DNA
cttttatcaatgtggttttt

SEQ ID NO: 20916 - DNA, 20 bp, synthetic construct
  misc_feature 1..20: note = Description of Artificial Sequence: Synthetic oligonucleotide
  misc_feature 1..20: note = Target: SCN10A; (-) strand; PAM type: NRG; PAM sequence: TGG
  source 1..20: mol_type = other DNA
cccaccatcttttatcaatg

SEQ ID NO: 20917 - DNA, 20 bp, synthetic construct
  misc_feature 1..20: note = Description of Artificial Sequence: Synthetic oligonucleotide
  misc_feature 1..20: note = Target: SCN10A; (-) strand; PAM type: NRG; PAM sequence: AGG
  source 1..20: mol_type = other DNA
actcctcattcttatgtctt

SEQ ID NO: 20918 - DNA, 20 bp, synthetic construct
  misc_feature 1..20: note = Description of Artificial Sequence: Synthetic oligonucleotide
  misc_feature 1..20: note = Target: SCN10A; (-) strand; PAM type: NRG; PAM sequence: TAG
  source 1..20: mol_type = other DNA
tactcctcattcttatgtct

SEQ ID NO: 20919 - DNA, 20 bp, synthetic construct
  misc_feature 1..20: note = Description of Artificial Sequence: Synthetic oligonucleotide
  misc_feature 1..20: note = Target: SCN10A; (-) strand; PAM type: NRG; PAM sequence: TGG
  source 1..20: mol_type = other DNA
aagcgtccatctctgtgtac

SEQ ID NO: 20920 - DNA, 20 bp, synthetic construct
  misc_feature 1..20: note = Description of Artificial Sequence: Synthetic oligonucleotide
  misc_feature 1..20: note = Target: SCN10A; (-) strand; PAM type: NRG; PAM sequence: AAG
  source 1..20: mol_type = other DNA
aatgtctctaactcgtgtca

SEQ ID NO: 20921 - DNA, 20 bp, synthetic construct
  misc_feature 1..20: note = Description of Artificial Sequence: Synthetic oligonucleotide
  misc_feature 1..20: note = Target: SCN10A; (-) strand; PAM type: NRG; PAM sequence: AAG
  source 1..20: mol_type = other DNA
aattcccatgtgagcagcag

SEQ ID NO: 20922 - DNA, 20 bp, synthetic construct
  misc_feature 1..20: note = Description of Artificial Sequence: Synthetic oligonucleotide
  misc_feature 1..20: note = Target: SCN10A; (-) strand; PAM type: NRG; PAM sequence: CAG
  source 1..20: mol_type = other DNA
atgaattcccatgtgagcag

SEQ ID NO: 20923 - DNA, 20 bp, synthetic construct
  misc_feature 1..20: note = Description of Artificial Sequence: Synthetic oligonucleotide
  misc_feature 1..20: note = Target: SCN10A; (-) strand; PAM type: NRG; PAM sequence: CAG
  source 1..20: mol_type = other DNA
atgatgaattcccatgtgag

SEQ ID NO: 20924 - DNA, 20 bp, synthetic construct
  misc_feature 1..20: note = Description of Artificial Sequence: Synthetic oligonucleotide
  misc_feature 1..20: note = Target: SCN10A; (-) strand; PAM type: NRG; PAM sequence: GAG
  source 1..20: mol_type = other DNA
gtcatgatgaattcccatgt

SEQ ID NO: 20925 - DNA, 20 bp, synthetic construct
  misc_feature 1..20: note = Description of Artificial Sequence: Synthetic oligonucleotide
  misc_feature 1..20: note = Target: SCN10A; (-) strand; PAM type: NRG; PAM sequence: AAG
  source 1..20: mol_type = other DNA
taacctccgtccttgagggt

SEQ ID NO: 20926 - DNA, 20 bp, synthetic construct
  misc_feature 1..20: note = Description of Artificial Sequence: Synthetic oligonucleotide
  misc_feature 1..20: note = Target: SCN10A; (-) strand; PAM type: NRG; PAM sequence: GGG
  source 1..20: mol_type = other DNA
atcataacctccgtccttga

SEQ ID NO: 20927 - DNA, 20 bp, synthetic construct
  misc_feature 1..20: note = Description of Artificial Sequence: Synthetic oligonucleotide
  misc_feature 1..20: note = Target: SCN10A; (-) strand; PAM type: NRG; PAM sequence: AGG
  source 1..20: mol_type = other DNA
tatcataacctccgtccttg

SEQ ID NO: 20928 - DNA, 20 bp, synthetic construct
  misc_feature 1..20: note = Description of Artificial Sequence: Synthetic oligonucleotide
  misc_feature 1..20: note = Target: SCN10A; (-) strand; PAM type: NRG; PAM sequence: GAG
  source 1..20: mol_type = other DNA
gtatcataacctccgtcctt

SEQ ID NO: 20929 - DNA, 20 bp, synthetic construct
  misc_feature 1..20: note = Description of Artificial Sequence: Synthetic oligonucleotide
  misc_feature 1..20: note = Target: SCN10A; (-) strand; PAM type: NRG; PAM sequence: CAG
  source 1..20: mol_type = other DNA
caaagggcaatgagtgttgt

SEQ ID NO: 20930 - DNA, 20 bp, synthetic construct
  misc_feature 1..20: note = Description of Artificial Sequence: Synthetic oligonucleotide
  misc_feature 1..20: note = Target: SCN10A; (-) strand; PAM type: NRG; PAM sequence: GAG
  source 1..20: mol_type = other DNA
ttccgggcccaaagggcaat

SEQ ID NO: 20931 - DNA, 20 bp, synthetic construct
  misc_feature 1..20: note = Description of Artificial Sequence: Synthetic oligonucleotide
  misc_feature 1..20: note = Target: SCN10A; (-) strand; PAM type: NRG; PAM sequence: GGG
  source 1..20: mol_type = other DNA
tgaacctttccgggcccaaa

SEQ ID NO: 20932 - DNA, 20 bp, synthetic construct
  misc_feature 1..20: note = Description of Artificial Sequence: Synthetic oligonucleotide
  misc_feature 1..20: note = Target: SCN10A; (-) strand; PAM type: NRG; PAM sequence: AGG
  source 1..20: mol_type = other DNA
atgaacctttccgggcccaa

SEQ ID NO: 20933 - DNA, 20 bp, synthetic construct
  misc_feature 1..20: note = Description of Artificial Sequence: Synthetic oligonucleotide
  misc_feature 1..20: note = Target: SCN10A; (-) strand; PAM type: NRG; PAM sequence: AAG
  source 1..20: mol_type = other DNA
gatgaacctttccgggccca

SEQ ID NO: 20934 - DNA, 20 bp, synthetic construct
  misc_feature 1..20: note = Description of Artificial Sequence: Synthetic oligonucleotide
  misc_feature 1..20: note = Target: SCN10A; (-) strand; PAM type: NRG; PAM sequence: GGG
  source 1..20: mol_type = other DNA
atacttagatgaacctttcc

SEQ ID NO: 20935 - DNA, 20 bp, synthetic construct
  misc_feature 1..20: note = Description of Artificial Sequence: Synthetic oligonucleotide
  misc_feature 1..20: note = Target: SCN10A; (-) strand; PAM type: NRG; PAM sequence: CGG
  source 1..20: mol_type = other DNA
aatacttagatgaacctttc

SEQ ID NO: 20936 - DNA, 20 bp, synthetic construct
  misc_feature 1..20: note = Description of Artificial Sequence: Synthetic oligonucleotide
  misc_feature 1..20: note = Target: SCN10A; (-) strand; PAM type: NRG; PAM sequence: TAG
  source 1..20: mol_type = other DNA
tttcttgtcagcagaatact

SEQ ID NO: 20937 - DNA, 20 bp, synthetic construct
  misc_feature 1..20: note = Description of Artificial Sequence: Synthetic oligonucleotide
  misc_feature 1..20: note = Target: SCN10A; (-) strand; PAM type: NRG; PAM sequence: CAG
  source 1..20: mol_type = other DNA
aaagaagactttcttgtcag

SEQ ID NO: 20938 - DNA, 20 bp, synthetic construct
  misc_feature 1..20: note = Description of Artificial Sequence: Synthetic oligonucleotide
  misc_feature 1..20: note = Target: SCN10A; (-) strand; PAM type: NRG; PAM sequence: CAG
  source 1..20: mol_type = other DNA
acaaaagaagactttcttgt

SEQ ID NO: 20939 - DNA, 20 bp, synthetic construct
  misc_feature 1..20: note = Description of Artificial Sequence: Synthetic oligonucleotide
  misc_feature 1..20: note = Target: SCN10A; (-) strand; PAM type: NRG; PAM sequence: AAG
  source 1..20: mol_type = other DNA
cattcgatgcaggacaaaag

SEQ ID NO: 20940 - DNA, 20 bp, synthetic construct
  misc_feature 1..20: note = Description of Artificial Sequence: Synthetic oligonucleotide
  misc_feature 1..20: note = Target: SCN10A; (-) strand; PAM type: NRG; PAM sequence: AAG
  source 1..20: mol_type = other DNA
aggcattcgatgcaggacaa

SEQ ID NO: 20941 - DNA, 20 bp, synthetic construct
  misc_feature 1..20: note = Description of Artificial Sequence: Synthetic oligonucleotide
  misc_feature 1..20: note = Target: SCN10A; (-) strand; PAM type: NRG; PAM sequence: AGG
  source 1..20: mol_type = other DNA
tctcaacaggcattcgatgc

SEQ ID NO: 20942 - DNA, 20 bp, synthetic construct
  misc_feature 1..20: note = Description of Artificial Sequence: Synthetic oligonucleotide
  misc_feature 1..20: note = Target: SCN10A; (-) strand; PAM type: NRG; PAM sequence: CAG
  source 1..20: mol_type = other DNA
gtctcaacaggcattcgatg

SEQ ID NO: 20943 - DNA, 20 bp, synthetic construct
  misc_feature 1..20: note = Description of Artificial Sequence: Synthetic oligonucleotide
  misc_feature 1..20: note = Target: SCN10A; (-) strand; PAM type: NRG; PAM sequence: AGG
  source 1..20: mol_type = other DNA
gactctgtttgtgtctcaac

SEQ ID NO: 20944 - DNA, 20 bp, synthetic construct
  misc_feature 1..20: note = Description of Artificial Sequence: Synthetic oligonucleotide
  misc_feature 1..20: note = Target: SCN10A; (-) strand; PAM type: NRG; PAM sequence: CAG
  source 1..20: mol_type = other DNA
tgactctgtttgtgtctcaa

SEQ ID NO: 20945 - DNA, 20 bp, synthetic construct
  misc_feature 1..20: note = Description of Artificial Sequence: Synthetic oligonucleotide
  misc_feature 1..20: note = Target: SCN10A; (-) strand; PAM type: NRG; PAM sequence: GAG
  source 1..20: mol_type = other DNA
atgaagatgtcaggttaaag

SEQ ID NO: 20946 - DNA, 20 bp, synthetic construct
  misc_feature 1..20: note = Description of Artificial Sequence: Synthetic oligonucleotide
  misc_feature 1..20: note = Target: SCN10A; (-) strand; PAM type: NRG; PAM sequence: AGG
  source 1..20: mol_type = other DNA
ccatgaagatgtcaggttaa

SEQ ID NO: 20947 - DNA, 20 bp, synthetic construct
  misc_feature 1..20: note = Description of Artificial Sequence: Synthetic oligonucleotide
  misc_feature 1..20: note = Target: SCN10A; (-) strand; PAM type: NRG; PAM sequence: AAG
  source 1..20: mol_type = other DNA
gccatgaagatgtcaggtta

SEQ ID NO: 20948 - DNA, 20 bp, synthetic construct
  misc_feature 1..20: note = Description of Artificial Sequence: Synthetic oligonucleotide
  misc_feature 1..20: note = Target: SCN10A; (-) strand; PAM type: NRG; PAM sequence: AGG
  source 1..20: mol_type = other DNA
aactttgccatgaagatgtc

SEQ ID NO: 20949 - DNA, 20 bp, synthetic construct
  misc_feature 1..20: note = Description of Artificial Sequence: Synthetic oligonucleotide
  misc_feature 1..20: note = Target: SCN10A; (-) strand; PAM type: NRG; PAM sequence: CAG
  source 1..20: mol_type = other DNA
caactttgccatgaagatgt

SEQ ID NO: 20950 - DNA, 20 bp, synthetic construct
  misc_feature 1..20: note = Description of Artificial Sequence: Synthetic oligonucleotide
  misc_feature 1..20: note = Target: SCN10A; (-) strand; PAM type: NRG; PAM sequence: AAG
  source 1..20: mol_type = other DNA
aatgatccaactttgccatg

SEQ ID NO: 20951 - DNA, 20 bp, synthetic construct
  misc_feature 1..20: note = Description of Artificial Sequence: Synthetic oligonucleotide
  misc_feature 1..20: note = Target: SCN10A; (-) strand; PAM type: NRG; PAM sequence: AGG
  source 1..20: mol_type = other DNA
atatgagattggccaataag

SEQ ID NO: 20952 - DNA, 20 bp, synthetic construct
  misc_feature 1..20: note = Description of Artificial Sequence: Synthetic oligonucleotide
  misc_feature 1..20: note = Target: SCN10A; (-) strand; PAM type: NRG; PAM sequence: GAG
  source 1..20: mol_type = other DNA
tatatgagattggccaataa

SEQ ID NO: 20953 - DNA, 20 bp, synthetic construct
  misc_feature 1..20: note = Description of Artificial Sequence: Synthetic oligonucleotide
  misc_feature 1..20: note = Target: SCN10A; (-) strand; PAM type: NRG; PAM sequence: AAG
  source 1..20: mol_type = other DNA
tatatatgagattggccaat

SEQ ID NO: 20954 - DNA, 20 bp, synthetic construct
  misc_feature 1..20: note = Description of Artificial Sequence: Synthetic oligonucleotide
  misc_feature 1..20: note = Target: SCN10A; (-) strand; PAM type: NRG; PAM sequence: TGG
  source 1..20: mol_type = other DNA
catatgactatatatgagat

SEQ ID NO: 20955 - DNA, 20 bp, synthetic construct
  misc_feature 1..20: note = Description of Artificial Sequence: Synthetic oligonucleotide
  misc_feature 1..20: note = Target: SCN10A; (-) strand; PAM type: NRG; PAM sequence: GAG
  source 1..20: mol_type = other DNA
agtgacatatgactatatat

SEQ ID NO: 20956 - DNA, 20 bp, synthetic construct
  misc_feature 1..20: note = Description of Artificial Sequence: Synthetic oligonucleotide
  misc_feature 1..20: note = Target: SCN10A; (-) strand; PAM type: NRG; PAM sequence: AAG
  source 1..20: mol_type = other DNA
cagaacatatctctatctgt

SEQ ID NO: 20957 - DNA, 20 bp, synthetic construct
  misc_feature 1..20: note = Description of Artificial Sequence: Synthetic oligonucleotide
  misc_feature 1..20: note = Target: SCN10A; (-) strand; PAM type: NRG; PAM sequence: CAG
  source 1..20: mol_type = other DNA
tcacctaatgatgtatttgt

SEQ ID NO: 20958 - DNA, 20 bp, synthetic construct
  misc_feature 1..20: note = Description of Artificial Sequence: Synthetic oligonucleotide
  misc_feature 1..20: note = Target: SCN10A; (-) strand; PAM type: NRG; PAM sequence: CAG
  source 1..20: mol_type = other DNA
aatacaatgtaggatattca

SEQ ID NO: 20959 - DNA, 20 bp, synthetic construct
  misc_feature 1..20: note = Description of Artificial Sequence: Synthetic oligonucleotide
  misc_feature 1..20: note = Target: SCN10A; (-) strand; PAM type: NRG; PAM sequence: AGG
  source 1..20: mol_type = other DNA
tgtttgtgtaaatacaatgt

SEQ ID NO: 20960 - DNA, 20 bp, synthetic construct
  misc_feature 1..20: note = Description of Artificial Sequence: Synthetic oligonucleotide
  misc_feature 1..20: note = Target: SCN10A; (-) strand; PAM type: NRG; PAM sequence: TAG
  source 1..20: mol_type = other DNA
ttgtttgtgtaaatacaatg

SEQ ID NO: 20961 - DNA, 20 bp, synthetic construct
  misc_feature 1..20: note = Description of Artificial Sequence: Synthetic oligonucleotide
  misc_feature 1..20: note = Target: SCN10A; (-) strand; PAM type: NRG; PAM sequence: TAG
  source 1..20: mol_type = other DNA
cctagatgtatagaaggcta

SEQ ID NO: 20962 - DNA, 20 bp, synthetic construct
  misc_feature 1..20: note = Description of Artificial Sequence: Synthetic oligonucleotide
  misc_feature 1..20: note = Target: SCN10A; (-) strand; PAM type: NRG; PAM sequence: AGG
  source 1..20: mol_type = other DNA
atttagcctagatgtataga

SEQ ID NO: 20963 - DNA, 20 bp, synthetic construct
  misc_feature 1..20: note = Description of Artificial Sequence: Synthetic oligonucleotide
  misc_feature 1..20: note = Target: SCN10A; (-) strand; PAM type: NRG; PAM sequence: AAG
  source 1..20: mol_type = other DNA
tatttagcctagatgtatag

SEQ ID NO: 20964 - DNA, 20 bp, synthetic construct
  misc_feature 1..20: note = Description of Artificial Sequence: Synthetic oligonucleotide
  misc_feature 1..20: note = Target: SCN10A; (-) strand; PAM type: NRG; PAM sequence: TAG
  source 1..20: mol_type = other DNA
cactatttagcctagatgta

SEQ ID NO: 20965 - DNA, 20 bp, synthetic construct
  misc_feature 1..20: note = Description of Artificial Sequence: Synthetic oligonucleotide
  misc_feature 1..20: note = Target: SCN10A; (-) strand; PAM type: NRG; PAM sequence: TAG
  source 1..20: mol_type = other DNA
ataggccacactatttagcc

SEQ ID NO: 20966 - DNA, 20 bp, synthetic construct
  misc_feature 1..20: note = Description of Artificial Sequence: Synthetic oligonucleotide
  misc_feature 1..20: note = Target: SCN10A; (-) strand; PAM type: NRG; PAM sequence: TAG
  source 1..20: mol_type = other DNA
gagcaataggccacactatt

SEQ ID NO: 20967 - DNA, 20 bp, synthetic construct
  misc_feature 1..20: note = Description of Artificial Sequence: Synthetic oligonucleotide
  misc_feature 1..20: note = Target: SCN10A; (-) strand; PAM type: NRG; PAM sequence: AGG
  source 1..20: mol_type = other DNA
atttgtagcctaggagcaat

SEQ ID NO: 20968 - DNA, 20 bp, synthetic construct
  misc_feature 1..20: note = Description of Artificial Sequence: Synthetic oligonucleotide
  misc_feature 1..20: note = Target: SCN10A; (-) strand; PAM type: NRG; PAM sequence: TAG
  source 1..20: mol_type = other DNA
gatttgtagcctaggagcaa

SEQ ID NO: 20969 - DNA, 20 bp, synthetic construct
  misc_feature 1..20: note = Description of Artificial Sequence: Synthetic oligonucleotide
  misc_feature 1..20: note = Target: SCN10A; (-) strand; PAM type: NRG; PAM sequence: GAG
  source 1..20: mol_type = other DNA
tgtacagatttgtagcctag

SEQ ID NO: 20970 - DNA, 20 bp, synthetic construct
  misc_feature 1..20: note = Description of Artificial Sequence: Synthetic oligonucleotide
  misc_feature 1..20: note = Target: SCN10A; (-) strand; PAM type: NRG; PAM sequence: AGG
  source 1..20: mol_type = other DNA
gctgtacagatttgtagcct

SEQ ID NO: 20971 - DNA, 20 bp, synthetic construct
  misc_feature 1..20: note = Description of Artificial Sequence: Synthetic oligonucleotide
  misc_feature 1..20: note = Target: SCN10A; (-) strand; PAM type: NRG; PAM sequence: TAG
  source 1..20: mol_type = other DNA
tgctgtacagatttgtagcc

SEQ ID NO: 20972 - DNA, 20 bp, synthetic construct
  misc_feature 1..20: note = Description of Artificial Sequence: Synthetic oligonucleotide
  misc_feature 1..20: note = Target: SCN10A; (-) strand; PAM type: NRG; PAM sequence: TAG
  source 1..20: mol_type = other DNA
taacatgctgtacagatttg

SEQ ID NO: 20973 - DNA, 20 bp, synthetic construct
  misc_feature 1..20: note = Description of Artificial Sequence: Synthetic oligonucleotide
  misc_feature 1..20: note = Target: SCN10A; (-) strand; PAM type: NRG; PAM sequence: CAG
  source 1..20: mol_type = other DNA
ttcagcaataacatgctgta

SEQ ID NO: 20974 - DNA, 20 bp, synthetic construct
  misc_feature 1..20: note = Description of Artificial Sequence: Synthetic oligonucleotide
  misc_feature 1..20: note = Target: SCN10A; (-) strand; PAM type: NRG; PAM sequence: CAG
  source 1..20: mol_type = other DNA
ctgtttatacttacagtatt

SEQ ID NO: 20975 - DNA, 20 bp, synthetic construct
  misc_feature 1..20: note = Description of Artificial Sequence: Synthetic oligonucleotide
  misc_feature 1..20: note = Target: SCN10A; (-) strand; PAM type: NRG; PAM sequence: CAG
  source 1..20: mol_type = other DNA
ttattaactgtttatactta

SEQ ID NO: 20976 - DNA, 20 bp, synthetic construct
  misc_feature 1..20: note = Description of Artificial Sequence: Synthetic oligonucleotide
  misc_feature 1..20: note = Target: SCN10A; (-) strand; PAM type: NRG; PAM sequence: AAG
  source 1..20: mol_type = other DNA
tgcttagtcctcatggttgg

SEQ ID NO: 20977 - DNA, 20 bp, synthetic construct
  misc_feature 1..20: note = Description of Artificial Sequence: Synthetic oligonucleotide
  misc_feature 1..20: note = Target: SCN10A; (-) strand; PAM type: NRG; PAM sequence: TGG
  source 1..20: mol_type = other DNA
atttgcttagtcctcatggt

SEQ ID NO: 20978 - DNA, 20 bp, synthetic construct
  misc_feature 1..20: note = Description of Artificial Sequence: Synthetic oligonucleotide
  misc_feature 1..20: note = Target: SCN10A; (-) strand; PAM type: NRG; PAM sequence: TGG
  source 1..20: mol_type = other DNA
tatcatttgcttagtcctca

SEQ ID NO: 20979 - DNA, 20 bp, synthetic construct
  misc_feature 1..20: note = Description of Artificial Sequence: Synthetic oligonucleotide
  misc_feature 1..20: note = Target: SCN10A; (-) strand; PAM type: NRG; PAM sequence: TAG
  source 1..20: mol_type = other DNA
gactactagtatcatttgct

SEQ ID NO: 20980 - DNA, 20 bp, synthetic construct
  misc_feature 1..20: note = Description of Artificial Sequence: Synthetic oligonucleotide
  misc_feature 1..20: note = Target: SCN10A; (-) strand; PAM type: NRG; PAM sequence: TAG
  source 1..20: mol_type = other DNA
taacaataaatagtgactac

SEQ ID NO: 20981 - DNA, 20 bp, synthetic construct
  misc_feature 1..20: note = Description of Artificial Sequence: Synthetic oligonucleotide
  misc_feature 1..20: note = Target: SCN10A; (-) strand; PAM type: NRG; PAM sequence: TAG
  source 1..20: mol_type = other DNA
gtctgacagataacaataaa

SEQ ID NO: 20982 - DNA, 20 bp, synthetic construct
  misc_feature 1..20: note = Description of Artificial Sequence: Synthetic oligonucleotide
  misc_feature 1..20: note = Target: SCN10A; (-) strand; PAM type: NRG; PAM sequence: CAG
  source 1..20: mol_type = other DNA
acatttttatacatgtctga

SEQ ID NO: 20983 - DNA, 20 bp, synthetic construct
  misc_feature 1..20: note = Description of Artificial Sequence: Synthetic oligonucleotide
  misc_feature 1..20: note = Target: SCN10A; (-) strand; PAM type: NRG; PAM sequence: AAG
  source 1..20: mol_type = other DNA
gagggttaaatgaaataaca

SEQ ID NO: 20984 - DNA, 20 bp, synthetic construct
  misc_feature 1..20: note = Description of Artificial Sequence: Synthetic oligonucleotide
  misc_feature 1..20: note = Target: SCN10A; (-) strand; PAM type: NRG; PAM sequence: GGG
  source 1..20: mol_type = other DNA
aaggtttctaaatagctgga

SEQ ID NO: 20985 - DNA, 20 bp, synthetic construct
  misc_feature 1..20: note = Description of Artificial Sequence: Synthetic oligonucleotide
  misc_feature 1..20: note = Target: SCN10A; (-) strand; PAM type: NRG; PAM sequence: AGG
  source 1..20: mol_type = other DNA
aaaggtttctaaatagctgg

SEQ ID NO: 20986 - DNA, 20 bp, synthetic construct
  misc_feature 1..20: note = Description of Artificial Sequence: Synthetic oligonucleotide
  misc_feature 1..20: note = Target: SCN10A; (-) strand; PAM type: NRG; PAM sequence: GAG
  source 1..20: mol_type = other DNA
aaaaggtttctaaatagctg

SEQ ID NO: 20987 - DNA, 20 bp, synthetic construct
  misc_feature 1..20: note = Description of Artificial Sequence: Synthetic oligonucleotide
  misc_feature 1..20: note = Target: SCN10A; (-) strand; PAM type: NRG; PAM sequence: TGG
  source 1..20: mol_type = other DNA
taaaaaggtttctaaatagc

SEQ ID NO: 20988 - DNA, 20 bp, synthetic construct
  misc_feature 1..20: note = Description of Artificial Sequence: Synthetic oligonucleotide
  misc_feature 1..20: note = Target: SCN10A; (-) strand; PAM type: NRG; PAM sequence: TAG
  source 1..20: mol_type = other DNA
cttgtaaaaaggtttctaaa

SEQ ID NO: 20989 - DNA, 20 bp, synthetic construct
  misc_feature 1..20: note = Description of Artificial Sequence: Synthetic oligonucleotide
  misc_feature 1..20: note = Target: SCN10A; (-) strand; PAM type: NRG; PAM sequence: AGG
  source 1..20: mol_type = other DNA
ccttatctccccttgtaaaa

SEQ ID NO: 20990 - DNA, 20 bp, synthetic construct
  misc_feature 1..20: note = Description of Artificial Sequence: Synthetic oligonucleotide
  misc_feature 1..20: note = Target: SCN10A; (-) strand; PAM type: NRG; PAM sequence: AAG
  source 1..20: mol_type = other DNA
tccttatctccccttgtaaa

SEQ ID NO: 20991 - DNA, 20 bp, synthetic construct
  misc_feature 1..20: note = Description of Artificial Sequence: Synthetic oligonucleotide
  misc_feature 1..20: note = Target: SCN10A; (-) strand; PAM type: NRG; PAM sequence: AAG
  source 1..20: mol_type = other DNA
gcaagtcctttaaattatcc

SEQ ID NO: 20992 - DNA, 20 bp, synthetic construct
  misc_feature 1..20: note = Description of Artificial Sequence: Synthetic oligonucleotide
  misc_feature 1..20: note = Target: SCN10A; (-) strand; PAM type: NRG; PAM sequence: AAG
  source 1..20: mol_type = other DNA
ccacctgagtcacatttagc

SEQ ID NO: 20993 - DNA, 20 bp, synthetic construct
  misc_feature 1..20: note = Description of Artificial Sequence: Synthetic oligonucleotide
  misc_feature 1..20: note = Target: SCN10A; (-) strand; PAM type: NRG; PAM sequence: TAG
  source 1..20: mol_type = other DNA
gttaccacctgagtcacatt

SEQ ID NO: 20994 - DNA, 20 bp, synthetic construct
  misc_feature 1..20: note = Description of Artificial Sequence: Synthetic oligonucleotide
  misc_feature 1..20: note = Target: SCN10A; (-) strand; PAM type: NRG; PAM sequence: GAG
  source 1..20: mol_type = other DNA
aactgtgccagttaccacct

SEQ ID NO: 20995 - DNA, 20 bp, synthetic construct
  misc_feature 1..20: note = Description of Artificial Sequence: Synthetic oligonucleotide
  misc_feature 1..20: note = Target: SCN10A; (-) strand; PAM type: NRG; PAM sequence: CAG
  source 1..20: mol_type = other DNA
tattttagtcccaactgtgc

SEQ ID NO: 20996 - DNA, 20 bp, synthetic construct
  misc_feature 1..20: note = Description of Artificial Sequence: Synthetic oligonucleotide
  misc_feature 1..20: note = Target: SCN10A; (-) strand; PAM type: NRG; PAM sequence: TAG
  source 1..20: mol_type = other DNA
tttagtatggacctatattt

SEQ ID NO: 20997 - DNA, 20 bp, synthetic construct
  misc_feature 1..20: note = Description of Artificial Sequence: Synthetic oligonucleotide
  misc_feature 1..20: note = Target: SCN10A; (-) strand; PAM type: NRG; PAM sequence: TGG
  source 1..20: mol_type = other DNA
ttaggcccttctgtttagta

SEQ ID NO: 20998 - DNA, 20 bp, synthetic construct
  misc_feature 1..20: note = Description of Artificial Sequence: Synthetic oligonucleotide
  misc_feature 1..20: note = Target: SCN10A; (-) strand; PAM type: NRG; PAM sequence: TAG
  source 1..20: mol_type = other DNA
actctttaggcccttctgtt

SEQ ID NO: 20999 - DNA, 20 bp, synthetic construct
  misc_feature 1..20: note = Description of Artificial Sequence: Synthetic oligonucleotide
  misc_feature 1..20: note = Target: SCN10A; (-) strand; PAM type: NRG; PAM sequence: AGG
  source 1..20: mol_type = other DNA
tagtgaaagattgactcttt

SEQ ID NO: 21000 - DNA, 20 bp, synthetic construct
  misc_feature 1..20: note = Description of Artificial Sequence: Synthetic oligonucleotide
  misc_feature 1..20: note = Target: SCN10A; (-) strand; PAM type: NRG; PAM sequence: TAG
  source 1..20: mol_type = other DNA
ctagtgaaagattgactctt

SEQ ID NO: 21001 - DNA, 20 bp, synthetic construct
  misc_feature 1..20: note = Description of Artificial Sequence: Synthetic oligonucleotide
  misc_feature 1..20: note = Target: SCN10A; (-) strand; PAM type: NRG; PAM sequence: AAG
  source 1..20: mol_type = other DNA
ttaaattaccaggctagtga

SEQ ID NO: 21002 - DNA, 20 bp, synthetic construct
  misc_feature 1..20: note = Description of Artificial Sequence: Synthetic oligonucleotide
  misc_feature 1..20: note = Target: SCN10A; (-) strand; PAM type: NRG; PAM sequence: TAG
  source 1..20: mol_type = other DNA
ttctagttaaattaccaggc

SEQ ID NO: 21003 - DNA, 20 bp, synthetic construct
  misc_feature 1..20: note = Description of Artificial Sequence: Synthetic oligonucleotide
  misc_feature 1..20: note = Target: SCN10A; (-) strand; PAM type: NRG; PAM sequence: AGG
  source 1..20: mol_type = other DNA
ttcattctagttaaattacc

SEQ ID NO: 21004 - DNA, 20 bp, synthetic construct
  misc_feature 1..20: note = Description of Artificial Sequence: Synthetic oligonucleotide
  misc_feature 1..20: note = Target: SCN10A; (-) strand; PAM type: NRG; PAM sequence: CAG
  source 1..20: mol_type = other DNA
attcattctagttaaattac

SEQ ID NO: 21005 - DNA, 20 bp, synthetic construct
  misc_feature 1..20: note = Description of Artificial Sequence: Synthetic oligonucleotide
  misc_feature 1..20: note = Target: SCN10A; (-) strand; PAM type: NRG; PAM sequence: TAG
  source 1..20: mol_type = other DNA
attctgaccttgattcattc

SEQ ID NO: 21006 - DNA, 20 bp, synthetic construct
  misc_feature 1..20: note = Description of Artificial Sequence: Synthetic oligonucleotide
  misc_feature 1..20: note = Target: SCN10A; (-) strand; PAM type: NRG; PAM sequence: TAG
  source 1..20: mol_type = other DNA
tcctgagattatcatgtgtc

SEQ ID NO: 21007 - DNA, 20 bp, synthetic construct
  misc_feature 1..20: note = Description of Artificial Sequence: Synthetic oligonucleotide
  misc_feature 1..20: note = Target: SCN10A; (-) strand; PAM type: NRG; PAM sequence: GAG
  source 1..20: mol_type = other DNA
accctcctttctctgttcct

SEQ ID NO: 21008 - DNA, 20 bp, synthetic construct
  misc_feature 1..20: note = Description of Artificial Sequence: Synthetic oligonucleotide
  misc_feature 1..20: note = Target: SCN10A; (-) strand; PAM type: NRG; PAM sequence: GGG
  source 1..20: mol_type = other DNA
atttatgcctctcttgtgat

SEQ ID NO: 21009 - DNA, 20 bp, synthetic construct
  misc_feature 1..20: note = Description of Artificial Sequence: Synthetic oligonucleotide
  misc_feature 1..20: note = Target: SCN10A; (-) strand; PAM type: NRG; PAM sequence: TGG
  source 1..20: mol_type = other DNA
catttatgcctctcttgtga

SEQ ID NO: 21010 - DNA, 20 bp, synthetic construct
  misc_feature 1..20: note = Description of Artificial Sequence: Synthetic oligonucleotide
  misc_feature 1..20: note = Target: SCN10A; (-) strand; PAM type: NRG; PAM sequence: AGG
  source 1..20: mol_type = other DNA
tctagaaaatgcctcactga

SEQ ID NO: 21011 - DNA, 20 bp, synthetic construct
  misc_feature 1..20: note = Description of Artificial Sequence: Synthetic oligonucleotide
  misc_feature 1..20: note = Target: SCN10A; (-) strand; PAM type: NRG; PAM sequence: AAG
  source 1..20: mol_type = other DNA
ctctagaaaatgcctcactg

SEQ ID NO: 21012 - DNA, 20 bp, synthetic construct
  misc_feature 1..20: note = Description of Artificial Sequence: Synthetic oligonucleotide
  misc_feature 1..20: note = Target: SCN10A; (-) strand; PAM type: NRG; PAM sequence: TAG
  source 1..20: mol_type = other DNA
ctgggagtgcattagcactc

SEQ ID NO: 21013 - DNA, 20 bp, synthetic construct
  misc_feature 1..20: note = Description of Artificial Sequence: Synthetic oligonucleotide
  misc_feature 1..20: note = Target: SCN10A; (-) strand; PAM type: NRG; PAM sequence: TAG
  source 1..20: mol_type = other DNA
agggctcgctgggagtgcat

SEQ ID NO: 21014 - DNA, 20 bp, synthetic construct
  misc_feature 1..20: note = Description of Artificial Sequence: Synthetic oligonucleotide
  misc_feature 1..20: note = Target: SCN10A; (-) strand; PAM type: NRG; PAM sequence: GAG
  source 1..20: mol_type = other DNA
catcctgcagggctcgctgg

SEQ ID NO: 21015 - DNA, 20 bp, synthetic construct
  misc_feature 1..20: note = Description of Artificial Sequence: Synthetic oligonucleotide
  misc_feature 1..20: note = Target: SCN10A; (-) strand; PAM type: NRG; PAM sequence: GGG
  source 1..20: mol_type = other DNA
ggcatcctgcagggctcgct

SEQ ID NO: 21016 - DNA, 20 bp, synthetic construct
  misc_feature 1..20: note = Description of Artificial Sequence: Synthetic oligonucleotide
  misc_feature 1..20: note = Target: SCN10A; (-) strand; PAM type: NRG; PAM sequence: TGG
  source 1..20: mol_type = other DNA
aggcatcctgcagggctcgc

SEQ ID NO: 21017 - DNA, 20 bp, synthetic construct
  misc_feature 1..20: note = Description of Artificial Sequence: Synthetic oligonucleotide
  misc_feature 1..20: note = Target: SCN10A; (-) strand; PAM type: NRG; PAM sequence: GGG
  source 1..20: mol_type = other DNA
aaagtcaaaggcatcctgca

SEQ ID NO: 21018 - DNA, 20 bp, synthetic construct
  misc_feature 1..20: note = Description of Artificial Sequence: Synthetic oligonucleotide
  misc_feature 1..20: note = Target: SCN10A; (-) strand; PAM type: NRG; PAM sequence: AGG
  source 1..20: mol_type = other DNA
taaagtcaaaggcatcctgc

SEQ ID NO: 21019 - DNA, 20 bp, synthetic construct
  misc_feature 1..20: note = Description of Artificial Sequence: Synthetic oligonucleotide
  misc_feature 1..20: note = Target: SCN10A; (-) strand; PAM type: NRG; PAM sequence: CAG
  source 1..20: mol_type = other DNA
ttaaagtcaaaggcatcctg

SEQ ID NO: 21020 - DNA, 20 bp, synthetic construct
  misc_feature 1..20: note = Description of Artificial Sequence: Synthetic oligonucleotide
  misc_feature 1..20: note = Target: SCN10A; (-) strand; PAM type: NRG; PAM sequence: AGG
  source 1..20: mol_type = other DNA
aaacagagccttaaagtcaa

SEQ ID NO: 21021 - DNA, 20 bp, synthetic construct
  misc_feature 1..20: note = Description of Artificial Sequence: Synthetic oligonucleotide
  misc_feature 1..20: note = Target: SCN10A; (-) strand; PAM type: NRG; PAM sequence: AAG
  source 1..20: mol_type = other DNA
aaaacagagccttaaagtca

SEQ ID NO: 21022 - DNA, 20 bp, synthetic construct
  misc_feature 1..20: note = Description of Artificial Sequence: Synthetic oligonucleotide
  misc_feature 1..20: note = Target: SCN10A; (-) strand; PAM type: NRG; PAM sequence: AAG
  source 1..20: mol_type = other DNA
atcaccaaaacagagcctta

SEQ ID NO: 21023 - DNA, 20 bp, synthetic construct
  misc_feature 1..20: note = Description of Artificial Sequence: Synthetic oligonucleotide
  misc_feature 1..20: note = Target: SCN10A; (-) strand; PAM type: NRG; PAM sequence: GAG
  source 1..20: mol_type = other DNA
caaatggaatcaccaaaaca

SEQ ID NO: 21024 - DNA, 20 bp, synthetic construct
  misc_feature 1..20: note = Description of Artificial Sequence: Synthetic oligonucleotide
  misc_feature 1..20: note = Target: SCN10A; (-) strand; PAM type: NRG; PAM sequence: CAG
  source 1..20: mol_type = other DNA
ggcaaatggaatcaccaaaa

SEQ ID NO: 21025 - DNA, 20 bp, synthetic construct
  misc_feature 1..20: note = Description of Artificial Sequence: Synthetic oligonucleotide
  misc_feature 1..20: note = Target: SCN10A; (-) strand; PAM type: NRG; PAM sequence: TGG
  source 1..20: mol_type = other DNA
gagtaggtctccagggcaaa

SEQ ID NO: 21026 - DNA, 20 bp, synthetic construct
  misc_feature 1..20: note = Description of Artificial Sequence: Synthetic oligonucleotide
  misc_feature 1..20: note = Target: SCN10A; (-) strand; PAM type: NRG; PAM sequence: GGG
  source 1..20: mol_type = other DNA
aggtagagagtaggtctcca

SEQ ID NO: 21027 - DNA, 20 bp, synthetic construct
  misc_feature 1..20: note = Description of Artificial Sequence: Synthetic oligonucleotide
  misc_feature 1..20: note = Target: SCN10A; (-) strand; PAM type: NRG; PAM sequence: AGG
  source 1..20: mol_type = other DNA
aaggtagagagtaggtctcc

SEQ ID NO: 21028 - DNA, 20 bp, synthetic construct
  misc_feature 1..20: note = Description of Artificial Sequence: Synthetic oligonucleotide
  misc_feature 1..20: note = Target: SCN10A; (-) strand; PAM type: NRG; PAM sequence: CAG
  source 1..20: mol_type = other DNA
gaaggtagagagtaggtctc

SEQ ID NO: 21029 - DNA, 20 bp, synthetic construct
  misc_feature 1..20: note = Description of Artificial Sequence: Synthetic oligonucleotide
  misc_feature 1..20: note = Target: SCN10A; (-) strand; PAM type: NRG; PAM sequence: AGG
  source 1..20: mol_type = other DNA
cagtggagaaggtagagagt

SEQ ID NO: 21030 - DNA, 20 bp, synthetic construct
  misc_feature 1..20: note = Description of Artificial Sequence: Synthetic oligonucleotide
  misc_feature 1..20: note = Target: SCN10A; (-) strand; PAM type: NRG; PAM sequence: TAG
  source 1..20: mol_type = other DNA
acagtggagaaggtagagag

SEQ ID NO: 21031 - DNA, 20 bp, synthetic construct
  misc_feature 1..20: note = Description of Artificial Sequence: Synthetic oligonucleotide
  misc_feature 1..20: note = Target: SCN10A; (-) strand; PAM type: NRG; PAM sequence: GAG
  source 1..20: mol_type = other DNA
gagacagtggagaaggtaga

SEQ ID NO: 21032 - DNA, 20 bp, synthetic construct
  misc_feature 1..20: note = Description of Artificial Sequence: Synthetic oligonucleotide
  misc_feature 1..20: note = Target: SCN10A; (-) strand; PAM type: NRG; PAM sequence: GAG
  source 1..20: mol_type = other DNA
cagagacagtggagaaggta

SEQ ID NO: 21033 - DNA, 20 bp, synthetic construct
  misc_feature 1..20: note = Description of Artificial Sequence: Synthetic oligonucleotide
  misc_feature 1..20: note = Target: SCN10A; (-) strand; PAM type: NRG; PAM sequence: TAG
  source 1..20: mol_type = other DNA
aacagagacagtggagaagg

SEQ ID NO: 21034 - DNA, 20 bp, synthetic construct
  misc_feature 1..20: note = Description of Artificial Sequence: Synthetic oligonucleotide
  misc_feature 1..20: note = Target: SCN10A; (-) strand; PAM type: NRG; PAM sequence: AGG
  source 1..20: mol_type = other DNA
aggaacagagacagtggaga

SEQ ID NO: 21035 - DNA, 20 bp, synthetic construct
  misc_feature 1..20: note = Description of Artificial Sequence: Synthetic oligonucleotide
  misc_feature 1..20: note = Target: SCN10A; (-) strand; PAM type: NRG; PAM sequence: AAG
  source 1..20: mol_type = other DNA
caggaacagagacagtggag

SEQ ID NO: 21036 - DNA, 20 bp, synthetic construct
  misc_feature 1..20: note = Description of Artificial Sequence: Synthetic oligonucleotide
  misc_feature 1..20: note = Target: SCN10A; (-) strand; PAM type: NRG; PAM sequence: GAG
  source 1..20: mol_type = other DNA
ccccaggaacagagacagtg

SEQ ID NO: 21037 - DNA, 20 bp, synthetic construct
  misc_feature 1..20: note = Description of Artificial Sequence: Synthetic oligonucleotide
  misc_feature 1..20: note = Target: SCN10A; (-) strand; PAM type: NRG; PAM sequence: TGG
  source 1..20: mol_type = other DNA
ctccccaggaacagagacag

SEQ ID NO: 21038 - DNA, 20 bp, synthetic construct
  misc_feature 1..20: note = Description of Artificial Sequence: Synthetic oligonucleotide
  misc_feature 1..20: note = Target: SCN10A; (-) strand; PAM type: NRG; PAM sequence: CAG
  source 1..20: mol_type = other DNA
tccctccccaggaacagaga

SEQ ID NO: 21039 - DNA, 20 bp, synthetic construct
  misc_feature 1..20: note = Description of Artificial Sequence: Synthetic oligonucleotide
  misc_feature 1..20: note = Target: SCN10A; (-) strand; PAM type: NRG; PAM sequence: GAG
  source 1..20: mol_type = other DNA
ggtctccctccccaggaaca

SEQ ID NO: 21040 - DNA, 20 bp, synthetic construct
  misc_feature 1..20: note = Description of Artificial Sequence: Synthetic oligonucleotide
  misc_feature 1..20: note = Target: SCN10A; (-) strand; PAM type: NRG; PAM sequence: CAG
  source 1..20: mol_type = other DNA
caggtctccctccccaggaa

SEQ ID NO: 21041 - DNA, 20 bp, synthetic construct
  misc_feature 1..20: note = Description of Artificial Sequence: Synthetic oligonucleotide
  misc_feature 1..20: note = Target: SCN10A; (-) strand; PAM type: NRG; PAM sequence: AGG
  source 1..20: mol_type = other DNA
ttgtacaggtctccctcccc

SEQ ID NO: 21042 - DNA, 20 bp, synthetic construct
  misc_feature 1..20: note = Description of Artificial Sequence: Synthetic oligonucleotide
  misc_feature 1..20: note = Target: SCN10A; (-) strand; PAM type: NRG; PAM sequence: CAG
  source 1..20: mol_type = other DNA
tttgtacaggtctccctccc

SEQ ID NO: 21043 - DNA, 20 bp, synthetic construct
  misc_feature 1..20: note = Description of Artificial Sequence: Synthetic oligonucleotide
  misc_feature 1..20: note = Target: SCN10A; (-) strand; PAM type: NRG; PAM sequence: AGG
  source 1..20: mol_type = other DNA
aaggataacacattttgtac

SEQ ID NO: 21044 - DNA, 20 bp, synthetic construct
  misc_feature 1..20: note = Description of Artificial Sequence: Synthetic oligonucleotide
  misc_feature 1..20: note = Target: SCN10A; (-) strand; PAM type: NRG; PAM sequence: CAG
  source 1..20: mol_type = other DNA
taaggataacacattttgta

SEQ ID NO: 21045 - DNA, 20 bp, synthetic construct
  misc_feature 1..20: note = Description of Artificial Sequence: Synthetic oligonucleotide
  misc_feature 1..20: note = Target: SCN10A; (-) strand; PAM type: NRG; PAM sequence: AGG
  source 1..20: mol_type = other DNA
ctggccagaaccagagggta

SEQ ID NO: 21046 - DNA, 20 bp, synthetic construct
  misc_feature 1..20: note = Description of Artificial Sequence: Synthetic oligonucleotide
  misc_feature 1..20: note = Target: SCN10A; (-) strand; PAM type: NRG; PAM sequence: AAG
  source 1..20: mol_type = other DNA
cctggccagaaccagagggt

SEQ ID NO: 21047 - DNA, 20 bp, synthetic construct
  misc_feature 1..20: note = Description of Artificial Sequence: Synthetic oligonucleotide
  misc_feature 1..20: note = Target: SCN10A; (-) strand; PAM type: NRG; PAM sequence: GGG
  source 1..20: mol_type = other DNA
caaacctggccagaaccaga

SEQ ID NO: 21048 - DNA, 20 bp, synthetic construct
  misc_feature 1..20: note = Description of Artificial Sequence: Synthetic oligonucleotide
  misc_feature 1..20: note = Target: SCN10A; (-) strand; PAM type: NRG; PAM sequence: AGG
  source 1..20: mol_type = other DNA
ccaaacctggccagaaccag

SEQ ID NO: 21049 - DNA, 20 bp, synthetic construct
  misc_feature 1..20: note = Description of Artificial Sequence: Synthetic oligonucleotide
  misc_feature 1..20: note = Target: SCN10A; (-) strand; PAM type: NRG; PAM sequence: GAG
  source 1..20: mol_type = other DNA
accaaacctggccagaacca

SEQ ID NO: 21050 - DNA, 20 bp, synthetic construct
  misc_feature 1..20: note = Description of Artificial Sequence: Synthetic oligonucleotide
  misc_feature 1..20: note = Target: SCN10A; (-) strand; PAM type: NRG; PAM sequence: CAG
  source 1..20: mol_type = other DNA
taaccaaacctggccagaac

SEQ ID NO: 21051 - DNA, 20 bp, synthetic construct
  misc_feature 1..20: note = Description of Artificial Sequence: Synthetic oligonucleotide
  misc_feature 1..20: note = Target: SCN10A; (-) strand; PAM type: NRG; PAM sequence: CAG
  source 1..20: mol_type = other DNA
tcccattaaccaaacctggc

SEQ ID NO: 21052 - DNA, 20 bp, synthetic construct
  misc_feature 1..20: note = Description of Artificial Sequence: Synthetic oligonucleotide
  misc_feature 1..20: note = Target: SCN10A; (-) strand; PAM type: NRG; PAM sequence: TGG
  source 1..20: mol_type = other DNA
tgtctcccattaaccaaacc

SEQ ID NO: 21053 - DNA, 20 bp, synthetic construct
  misc_feature 1..20: note = Description of Artificial Sequence: Synthetic oligonucleotide
  misc_feature 1..20: note = Target: SCN10A; (-) strand; PAM type: NRG; PAM sequence: GGG
  source 1..20: mol_type = other DNA
cacaggagagaagaagccag

SEQ ID NO: 21054 - DNA, 20 bp, synthetic construct
  misc_feature 1..20: note = Description of Artificial Sequence: Synthetic oligonucleotide
  misc_feature 1..20: note = Target: SCN10A; (-) strand; PAM type: NRG; PAM sequence: GGG
  source 1..20: mol_type = other DNA
gcacaggagagaagaagcca

SEQ ID NO: 21055 - DNA, 20 bp, synthetic construct
  misc_feature 1..20: note = Description of Artificial Sequence: Synthetic oligonucleotide
  misc_feature 1..20: note = Target: SCN10A; (-) strand; PAM type: NRG; PAM sequence: AGG
  source 1..20: mol_type = other DNA
agcacaggagagaagaagcc

SEQ ID NO: 21056 - DNA, 20 bp, synthetic construct
  misc_feature 1..20: note = Description of Artificial Sequence: Synthetic oligonucleotide
  misc_feature 1..20: note = Target: SCN10A; (-) strand; PAM type: NRG; PAM sequence: CAG
  source 1..20: mol_type = other DNA
tagcacaggagagaagaagc

SEQ ID NO: 21057 - DNA, 20 bp, synthetic construct
  misc_feature 1..20: note = Description of Artificial Sequence: Synthetic oligonucleotide
  misc_feature 1..20: note = Target: SCN10A; (-) strand; PAM type: NRG; PAM sequence: AAG
  source 1..20: mol_type = other DNA
gccatagcacaggagagaag

SEQ ID NO: 21058 - DNA, 20 bp, synthetic construct
  misc_feature 1..20: note = Description of Artificial Sequence: Synthetic oligonucleotide
  misc_feature 1..20: note = Target: SCN10A; (-) strand; PAM type: NRG; PAM sequence: AAG
  source 1..20: mol_type = other DNA
tcagccatagcacaggagag

SEQ ID NO: 21059 - DNA, 20 bp, synthetic construct
  misc_feature 1..20: note = Description of Artificial Sequence: Synthetic oligonucleotide
  misc_feature 1..20: note = Target: SCN10A; (-) strand; PAM type: NRG; PAM sequence: GAG
  source 1..20: mol_type = other DNA
tactcagccatagcacagga

SEQ ID NO: 21060 - DNA, 20 bp, synthetic construct
  misc_feature 1..20: note = Description of Artificial Sequence: Synthetic oligonucleotide
  misc_feature 1..20: note = Target: SCN10A; (-) strand; PAM type: NRG; PAM sequence: GAG
  source 1..20: mol_type = other DNA
gctactcagccatagcacag

SEQ ID NO: 21061 - DNA, 20 bp, synthetic construct
  misc_feature 1..20: note = Description of Artificial Sequence: Synthetic oligonucleotide
  misc_feature 1..20: note = Target: SCN10A; (-) strand; PAM type: NRG; PAM sequence: AGG
  source 1..20: mol_type = other DNA
ctgctactcagccatagcac

SEQ ID NO: 21062 - DNA, 20 bp, synthetic construct
  misc_feature 1..20: note = Description of Artificial Sequence: Synthetic oligonucleotide
  misc_feature 1..20: note = Target: SCN10A; (-) strand; PAM type: NRG; PAM sequence: CAG
  source 1..20: mol_type = other DNA
tctgctactcagccatagca

SEQ ID NO: 21063 - DNA, 20 bp, synthetic construct
  misc_feature 1..20: note = Description of Artificial Sequence: Synthetic oligonucleotide
  misc_feature 1..20: note = Target: SCN10A; (-) strand; PAM type: NRG; PAM sequence: TAG
  source 1..20: mol_type = other DNA
acagctctgctactcagcca

SEQ ID NO: 21064 - DNA, 20 bp, synthetic construct
  misc_feature 1..20: note = Description of Artificial Sequence: Synthetic oligonucleotide
  misc_feature 1..20: note = Target: SCN10A; (-) strand; PAM type: NRG; PAM sequence: CAG
  source 1..20: mol_type = other DNA
aggatcacagctctgctact

SEQ ID NO: 21065 - DNA, 20 bp, synthetic construct
  misc_feature 1..20: note = Description of Artificial Sequence: Synthetic oligonucleotide
  misc_feature 1..20: note = Target: SCN10A; (-) strand; PAM type: NRG; PAM sequence: CAG
  source 1..20: mol_type = other DNA
gtgatcttagtagaggatca

SEQ ID NO: 21066 - DNA, 20 bp, synthetic construct
  misc_feature 1..20: note = Description of Artificial Sequence: Synthetic oligonucleotide
  misc_feature 1..20: note = Target: SCN10A; (-) strand; PAM type: NRG; PAM sequence: AGG
  source 1..20: mol_type = other DNA
agaacttgtgatcttagtag

SEQ ID NO: 21067 - DNA, 20 bp, synthetic construct
  misc_feature 1..20: note = Description of Artificial Sequence: Synthetic oligonucleotide
  misc_feature 1..20: note = Target: SCN10A; (-) strand; PAM type: NRG; PAM sequence: GAG
  source 1..20: mol_type = other DNA
cagaacttgtgatcttagta

SEQ ID NO: 21068 - DNA, 20 bp, synthetic construct
  misc_feature 1..20: note = Description of Artificial Sequence: Synthetic oligonucleotide
  misc_feature 1..20: note = Target: SCN10A; (-) strand; PAM type: NRG; PAM sequence: TAG
  source 1..20: mol_type = other DNA
ggcagaacttgtgatcttag

SEQ ID NO: 21069 - DNA, 20 bp, synthetic construct
  misc_feature 1..20: note = Description of Artificial Sequence: Synthetic oligonucleotide
  misc_feature 1..20: note = Target: SCN10A; (-) strand; PAM type: NRG; PAM sequence: TAG
  source 1..20: mol_type = other DNA
cctggcagaacttgtgatct

SEQ ID NO: 21070 - DNA, 20 bp, synthetic construct
  misc_feature 1..20: note = Description of Artificial Sequence: Synthetic oligonucleotide
  misc_feature 1..20: note = Target: SCN10A; (-) strand; PAM type: NRG; PAM sequence: CAG
  source 1..20: mol_type = other DNA
gtgtcagagaggctgcctgg

SEQ ID NO: 21071 - DNA, 20 bp, synthetic construct
  misc_feature 1..20: note = Description of Artificial Sequence: Synthetic oligonucleotide
  misc_feature 1..20: note = Target: SCN10A; (-) strand; PAM type: NRG; PAM sequence: TGG
  source 1..20: mol_type = other DNA
catgtgtcagagaggctgcc

SEQ ID NO: 21072 - DNA, 20 bp, synthetic construct
  misc_feature 1..20: note = Description of Artificial Sequence: Synthetic oligonucleotide
  misc_feature 1..20: note = Target: SCN10A; (-) strand; PAM type: NRG; PAM sequence: AGG
  source 1..20: mol_type = other DNA
gctgccctcatgtgtcagag

SEQ ID NO: 21073 - DNA, 20 bp, synthetic construct
  misc_feature 1..20: note = Description of Artificial Sequence: Synthetic oligonucleotide
  misc_feature 1..20: note = Target: SCN10A; (-) strand; PAM type: NRG; PAM sequence: GAG
  source 1..20: mol_type = other DNA
agctgccctcatgtgtcaga

SEQ ID NO: 21074 - DNA, 20 bp, synthetic construct
  misc_feature 1..20: note = Description of Artificial Sequence: Synthetic oligonucleotide
  misc_feature 1..20: note = Target: SCN10A; (-) strand; PAM type: NRG; PAM sequence: GAG
  source 1..20: mol_type = other DNA
gcagctgccctcatgtgtca

SEQ ID NO: 21075 - DNA, 20 bp, synthetic construct
  misc_feature 1..20: note = Description of Artificial Sequence: Synthetic oligonucleotide
  misc_feature 1..20: note = Target: SCN10A; (-) strand; PAM type: NRG; PAM sequence: CAG
  source 1..20: mol_type = other DNA
cagcagctgccctcatgtgt

SEQ ID NO: 21076 - DNA, 20 bp, synthetic construct
  misc_feature 1..20: note = Description of Artificial Sequence: Synthetic oligonucleotide
  misc_feature 1..20: note = Target: SCN10A; (-) strand; PAM type: NRG; PAM sequence: CAG
  source 1..20: mol_type = other DNA
ccagaattagactacagcag

SEQ ID NO: 21077 - DNA, 20 bp, synthetic construct
  misc_feature 1..20: note = Description of Artificial Sequence: Synthetic oligonucleotide
  misc_feature 1..20: note = Target: SCN10A; (-) strand; PAM type: NRG; PAM sequence: CAG
  source 1..20: mol_type = other DNA
ggaccagaattagactacag

SEQ ID NO: 21078 - DNA, 20 bp, synthetic construct
  misc_feature 1..20: note = Description of Artificial Sequence: Synthetic oligonucleotide
  misc_feature 1..20: note = Target: SCN10A; (-) strand; PAM type: NRG; PAM sequence: CAG
  source 1..20: mol_type = other DNA
aaaggaccagaattagacta

SEQ ID NO: 21079 - DNA, 20 bp, synthetic construct
  misc_feature 1..20: note = Description of Artificial Sequence: Synthetic oligonucleotide
  misc_feature 1..20: note = Target: SCN10A; (-) strand; PAM type: NRG; PAM sequence: TAG
  source 1..20: mol_type = other DNA
atgaaggaaaggaccagaat

SEQ ID NO: 21080 - DNA, 20 bp, synthetic construct
  misc_feature 1..20: note = Description of Artificial Sequence: Synthetic oligonucleotide
  misc_feature 1..20: note = Target: SCN10A; (-) strand; PAM type: NRG; PAM sequence: CAG
  source 1..20: mol_type = other DNA
gaagggatgaaggaaaggac

SEQ ID NO: 21081 - DNA, 20 bp, synthetic construct
  misc_feature 1..20: note = Description of Artificial Sequence: Synthetic oligonucleotide
  misc_feature 1..20: note = Target: SCN10A; (-) strand; PAM type: NRG; PAM sequence: AGG
  source 1..20: mol_type = other DNA
aggctgaagggatgaaggaa

SEQ ID NO: 21082 - DNA, 20 bp, synthetic construct
  misc_feature 1..20: note = Description of Artificial Sequence: Synthetic oligonucleotide
  misc_feature 1..20: note = Target: SCN10A; (-) strand; PAM type: NRG; PAM sequence: AAG
  source 1..20: mol_type = other DNA
taggctgaagggatgaagga

SEQ ID NO: 21083 - DNA, 20 bp, synthetic construct
  misc_feature 1..20: note = Description of Artificial Sequence: Synthetic oligonucleotide
  misc_feature 1..20: note = Target: SCN10A; (-) strand; PAM type: NRG; PAM sequence: AGG
  source 1..20: mol_type = other DNA
tgcctaggctgaagggatga

SEQ ID NO: 21084 - DNA, 20 bp, synthetic construct
  misc_feature 1..20: note = Description of Artificial Sequence: Synthetic oligonucleotide
  misc_feature 1..20: note = Target: SCN10A; (-) strand; PAM type: NRG; PAM sequence: AAG
  source 1..20: mol_type = other DNA
atgcctaggctgaagggatg

SEQ ID NO: 21085 - DNA, 20 bp, synthetic construct
  misc_feature 1..20: note = Description of Artificial Sequence: Synthetic oligonucleotide
  misc_feature 1..20: note = Target: SCN10A; (-) strand; PAM type: NRG; PAM sequence: GGG
  source 1..20: mol_type = other DNA
tgttacatgcctaggctgaa

SEQ ID NO: 21086 - DNA, 20 bp, synthetic construct
  misc_feature 1..20: note = Description of Artificial Sequence: Synthetic oligonucleotide
  misc_feature 1..20: note = Target: SCN10A; (-) strand; PAM type: NRG; PAM sequence: AGG
  source 1..20: mol_type = other DNA
ctgttacatgcctaggctga

SEQ ID NO: 21087 - DNA, 20 bp, synthetic construct
  misc_feature 1..20: note = Description of Artificial Sequence: Synthetic oligonucleotide
  misc_feature 1..20: note = Target: SCN10A; (-) strand; PAM type: NRG; PAM sequence: AAG
  source 1..20: mol_type = other DNA
gctgttacatgcctaggctg

SEQ ID NO: 21088 - DNA, 20 bp, synthetic construct
  misc_feature 1..20: note = Description of Artificial Sequence: Synthetic oligonucleotide
  misc_feature 1..20: note = Target: SCN10A; (-) strand; PAM type: NRG; PAM sequence: AGG
  source 1..20: mol_type = other DNA
ggggaagctgttacatgcct

SEQ ID NO: 21089 - DNA, 20 bp, synthetic construct
  misc_feature 1..20: note = Description of Artificial Sequence: Synthetic oligonucleotide
  misc_feature 1..20: note = Target: SCN10A; (-) strand; PAM type: NRG; PAM sequence: TAG
  source 1..20: mol_type = other DNA
gggggaagctgttacatgcc

SEQ ID NO: 21090 - DNA, 20 bp, synthetic construct
  misc_feature 1..20: note = Description of Artificial Sequence: Synthetic oligonucleotide
  misc_feature 1..20: note = Target: SCN10A; (-) strand; PAM type: NRG; PAM sequence: AAG
  source 1..20: mol_type = other DNA
tagaaactagtaacaggggg

SEQ ID NO: 21091 - DNA, 20 bp, synthetic construct
  misc_feature 1..20: note = Description of Artificial Sequence: Synthetic oligonucleotide
  misc_feature 1..20: note = Target: SCN10A; (-) strand; PAM type: NRG; PAM sequence: GGG
  source 1..20: mol_type = other DNA
acctagaaactagtaacagg

SEQ ID NO: 21092 - DNA, 20 bp, synthetic construct
  misc_feature 1..20: note = Description of Artificial Sequence: Synthetic oligonucleotide
  misc_feature 1..20: note = Target: SCN10A; (-) strand; PAM type: NRG; PAM sequence: GGG
  source 1..20: mol_type = other DNA
cacctagaaactagtaacag

SEQ ID NO: 21093 - DNA, 20 bp, synthetic construct
  misc_feature 1..20: note = Description of Artificial Sequence: Synthetic oligonucleotide
  misc_feature 1..20: note = Target: SCN10A; (-) strand; PAM type: NRG; PAM sequence: GGG
  source 1..20: mol_type = other DNA
gcacctagaaactagtaaca

SEQ ID NO: 21094 - DNA, 20 bp, synthetic construct
  misc_feature 1..20: note = Description of Artificial Sequence: Synthetic oligonucleotide
  misc_feature 1..20: note = Target: SCN10A; (-) strand; PAM type: NRG; PAM sequence: AGG
  source 1..20: mol_type = other DNA
ggcacctagaaactagtaac

SEQ ID NO: 21095 - DNA, 20 bp, synthetic construct
  misc_feature 1..20: note = Description of Artificial Sequence: Synthetic oligonucleotide
  misc_feature 1..20: note = Target: SCN10A; (-) strand; PAM type: NRG; PAM sequence: CAG
  source 1..20: mol_type = other DNA
aggcacctagaaactagtaa

SEQ ID NO: 21096 - DNA, 20 bp, synthetic construct
  misc_feature 1..20: note = Description of Artificial Sequence: Synthetic oligonucleotide
  misc_feature 1..20: note = Target: SCN10A; (-) strand; PAM type: NRG; PAM sequence: TAG
  source 1..20: mol_type = other DNA
acagtgaggcacctagaaac

SEQ ID NO: 21097 - DNA, 20 bp, synthetic construct
  misc_feature 1..20: note = Description of Artificial Sequence: Synthetic oligonucleotide
  misc_feature 1..20: note = Target: SCN10A; (-) strand; PAM type: NRG; PAM sequence: TAG
  source 1..20: mol_type = other DNA
ataagggacagtgaggcacc

SEQ ID NO: 21098 - DNA, 20 bp, synthetic construct
  misc_feature 1..20: note = Description of Artificial Sequence: Synthetic oligonucleotide
  misc_feature 1..20: note = Target: SCN10A; (-) strand; PAM type: NRG; PAM sequence: AGG
  source 1..20: mol_type = other DNA
ggaatgaataagggacagtg

SEQ ID NO: 21099 - DNA, 20 bp, synthetic construct
  misc_feature 1..20: note = Description of Artificial Sequence: Synthetic oligonucleotide
  misc_feature 1..20: note = Target: SCN10A; (-) strand; PAM type: NRG; PAM sequence: GAG
  source 1..20: mol_type = other DNA
gggaatgaataagggacagt

SEQ ID NO: 21100 - DNA, 20 bp, synthetic construct
  misc_feature 1..20: note = Description of Artificial Sequence: Synthetic oligonucleotide
  misc_feature 1..20: note = Target: SCN10A; (-) strand; PAM type: NRG; PAM sequence: CAG
  source 1..20: mol_type = other DNA
cttagggaatgaataaggga

SEQ ID NO: 21101 - DNA, 20 bp, synthetic construct
  misc_feature 1..20: note = Description of Artificial Sequence: Synthetic oligonucleotide
  misc_feature 1..20: note = Target: SCN10A; (-) strand; PAM type: NRG; PAM sequence: GGG
  source 1..20: mol_type = other DNA
tgggcttagggaatgaataa

SEQ ID NO: 21102 - DNA, 20 bp, synthetic construct
  misc_feature 1..20: note = Description of Artificial Sequence: Synthetic oligonucleotide
  misc_feature 1..20: note = Target: SCN10A; (-) strand; PAM type: NRG; PAM sequence: AGG
  source 1..20: mol_type = other DNA
ctgggcttagggaatgaata

SEQ ID NO: 21103 - DNA, 20 bp, synthetic construct
  misc_feature 1..20: note = Description of Artificial Sequence: Synthetic oligonucleotide
  misc_feature 1..20: note = Target: SCN10A; (-) strand; PAM type: NRG; PAM sequence: AAG
  source 1..20: mol_type = other DNA
gctgggcttagggaatgaat

SEQ ID NO: 21104 - DNA, 20 bp, synthetic construct
  misc_feature 1..20: note = Description of Artificial Sequence: Synthetic oligonucleotide
  misc_feature 1..20: note = Target: SCN10A; (-) strand; PAM type: NRG; PAM sequence: GGG
  source 1..20: mol_type = other DNA
agaggtgtgggctgggctta

SEQ ID NO: 21105 - DNA, 20 bp, synthetic construct
  misc_feature 1..20: note = Description of Artificial Sequence: Synthetic oligonucleotide
  misc_feature 1..20: note = Target: SCN10A; (-) strand; PAM type: NRG; PAM sequence: AGG
  source 1..20: mol_type = other DNA
cagaggtgtgggctgggctt

SEQ ID NO: 21106 - DNA, 20 bp, synthetic construct
  misc_feature 1..20: note = Description of Artificial Sequence: Synthetic oligonucleotide
  misc_feature 1..20: note = Target: SCN10A; (-) strand; PAM type: NRG; PAM sequence: TAG
  source 1..20: mol_type = other DNA
acagaggtgtgggctgggct

SEQ ID NO: 21107 - DNA, 20 bp, synthetic construct
  misc_feature 1..20: note = Description of Artificial Sequence: Synthetic oligonucleotide
  misc_feature 1..20: note = Target: SCN10A; (-) strand; PAM type: NRG; PAM sequence: GGG
  source 1..20: mol_type = other DNA
tatttacagaggtgtgggct

SEQ ID NO: 21108 - DNA, 20 bp, synthetic construct
  misc_feature 1..20: note = Description of Artificial Sequence: Synthetic oligonucleotide
  misc_feature 1..20: note = Target: SCN10A; (-) strand; PAM type: NRG; PAM sequence: TGG
  source 1..20: mol_type = other DNA
gtatttacagaggtgtgggc

SEQ ID NO: 21109 - DNA, 20 bp, synthetic construct
  misc_feature 1..20: note = Description of Artificial Sequence: Synthetic oligonucleotide
  misc_feature 1..20: note = Target: SCN10A; (-) strand; PAM type: NRG; PAM sequence: GGG
  source 1..20: mol_type = other DNA
taaagtatttacagaggtgt

SEQ ID NO: 21110 - DNA, 20 bp, synthetic construct
  misc_feature 1..20: note = Description of Artificial Sequence: Synthetic oligonucleotide
  misc_feature 1..20: note = Target: SCN10A; (-) strand; PAM type: NRG; PAM sequence: TGG
  source 1..20: mol_type = other DNA
gtaaagtatttacagaggtg

SEQ ID NO: 21111 - DNA, 20 bp, synthetic construct
  misc_feature 1..20: note = Description of Artificial Sequence: Synthetic oligonucleotide
  misc_feature 1..20: note = Target: SCN10A; (-) strand; PAM type: NRG; PAM sequence: AGG
  source 1..20: mol_type = other DNA
gtttagtaaagtatttacag

SEQ ID NO: 21112 - DNA, 20 bp, synthetic construct
  misc_feature 1..20: note = Description of Artificial Sequence: Synthetic oligonucleotide
  misc_feature 1..20: note = Target: SCN10A; (-) strand; PAM type: NRG; PAM sequence: GAG
  source 1..20: mol_type = other DNA
agtttagtaaagtatttaca

SEQ ID NO: 21113 - DNA, 20 bp, synthetic construct
  misc_feature 1..20: note = Description of Artificial Sequence: Synthetic oligonucleotide
  misc_feature 1..20: note = Target: SCN10A; (-) strand; PAM type: NRG; PAM sequence: CAG
  source 1..20: mol_type = other DNA
agagtttagtaaagtattta

SEQ ID NO: 21114 - DNA, 20 bp, synthetic construct
  misc_feature 1..20: note = Description of Artificial Sequence: Synthetic oligonucleotide
  misc_feature 1..20: note = Target: SCN10A; (-) strand; PAM type: NRG; PAM sequence: AAG
  source 1..20: mol_type = other DNA
ctaatagagagagtttagta

SEQ ID NO: 21115 - DNA, 20 bp, synthetic construct
  misc_feature 1..20: note = Description of Artificial Sequence: Synthetic oligonucleotide
  misc_feature 1..20: note = Target: SCN10A; (-) strand; PAM type: NRG; PAM sequence: TAG
  source 1..20: mol_type = other DNA
atgggctaatagagagagtt

SEQ ID NO: 21116 - DNA, 20 bp, synthetic construct
  misc_feature 1..20: note = Description of Artificial Sequence: Synthetic oligonucleotide
  misc_feature 1..20: note = Target: SCN10A; (-) strand; PAM type: NRG; PAM sequence: GAG
  source 1..20: mol_type = other DNA
ctccgatgggctaatagaga

SEQ ID NO: 21117 - DNA, 20 bp, synthetic construct
  misc_feature 1..20: note = Description of Artificial Sequence: Synthetic oligonucleotide
  misc_feature 1..20: note = Target: SCN10A; (-) strand; PAM type: NRG; PAM sequence: GAG
  source 1..20: mol_type = other DNA
cactccgatgggctaataga

SEQ ID NO: 21118 - DNA, 20 bp, synthetic construct
  misc_feature 1..20: note = Description of Artificial Sequence: Synthetic oligonucleotide
  misc_feature 1..20: note = Target: SCN10A; (-) strand; PAM type: NRG; PAM sequence: GAG
  source 1..20: mol_type = other DNA
accactccgatgggctaata

SEQ ID NO: 21119 - DNA, 20 bp, synthetic construct
  misc_feature 1..20: note = Description of Artificial Sequence: Synthetic oligonucleotide
  misc_feature 1..20: note = Target: SCN10A; (-) strand; PAM type: NRG; PAM sequence: TAG
  source 1..20: mol_type = other DNA
ggaccactccgatgggctaa

SEQ ID NO: 21120 - DNA, 20 bp, synthetic construct
  misc_feature 1..20: note = Description of Artificial Sequence: Synthetic oligonucleotide
  misc_feature 1..20: note = Target: SCN10A; (-) strand; PAM type: NRG; PAM sequence: GGG
  source 1..20: mol_type = other DNA
aacagatggaccactccgat

SEQ ID NO: 21121 - DNA, 20 bp, synthetic construct
  misc_feature 1..20: note = Description of Artificial Sequence: Synthetic oligonucleotide
  misc_feature 1..20: note = Target: SCN10A; (-) strand; PAM type: NRG; PAM sequence: TGG
  source 1..20: mol_type = other DNA
aaacagatggaccactccga

SEQ ID NO: 21122 - DNA, 20 bp, synthetic construct
  misc_feature 1..20: note = Description of Artificial Sequence: Synthetic oligonucleotide
  misc_feature 1..20: note = Target: SCN10A; (-) strand; PAM type: NRG; PAM sequence: TGG
  source 1..20: mol_type = other DNA
gggtcccagcaagaaacaga

SEQ ID NO: 21123 - DNA, 20 bp, synthetic construct
  misc_feature 1..20: note = Description of Artificial Sequence: Synthetic oligonucleotide
  misc_feature 1..20: note = Target: SCN10A; (-) strand; PAM type: NRG; PAM sequence: CAG
  source 1..20: mol_type = other DNA
ttcagggtcccagcaagaaa

SEQ ID NO: 21124 - DNA, 20 bp, synthetic construct
  misc_feature 1..20: note = Description of Artificial Sequence: Synthetic oligonucleotide
  misc_feature 1..20: note = Target: SCN10A; (-) strand; PAM type: NRG; PAM sequence: AAG
  source 1..20: mol_type = other DNA
atgtgattcagggtcccagc

SEQ ID NO: 21125 - DNA, 20 bp, synthetic construct
  misc_feature 1..20: note = Description of Artificial Sequence: Synthetic oligonucleotide
  misc_feature 1..20: note = Target: SCN10A; (-) strand; PAM type: NRG; PAM sequence: CAG
  source 1..20: mol_type = other DNA
tgtcatgtgattcagggtcc

SEQ ID NO: 21126 - DNA, 20 bp, synthetic construct
  misc_feature 1..20: note = Description of Artificial Sequence: Synthetic oligonucleotide
  misc_feature 1..20: note = Target: SCN10A; (-) strand; PAM type: NRG; PAM sequence: GGG
  source 1..20: mol_type = other DNA
actcaatgtcatgtgattca

SEQ ID NO: 21127 - DNA, 20 bp, synthetic construct
  misc_feature 1..20: note = Description of Artificial Sequence: Synthetic oligonucleotide
  misc_feature 1..20: note = Target: SCN10A; (-) strand; PAM type: NRG; PAM sequence: AGG
  source 1..20: mol_type = other DNA
gactcaatgtcatgtgattc

SEQ ID NO: 21128 - DNA, 20 bp, synthetic construct
  misc_feature 1..20: note = Description of Artificial Sequence: Synthetic oligonucleotide
  misc_feature 1..20: note = Target: SCN10A; (-) strand; PAM type: NRG; PAM sequence: CAG
  source 1..20: mol_type = other DNA
tgactcaatgtcatgtgatt

SEQ ID NO: 21129 - DNA, 20 bp, synthetic construct
  misc_feature 1..20: note = Description of Artificial Sequence: Synthetic oligonucleotide
  misc_feature 1..20: note = Target: SCN10A; (-) strand; PAM type: NRG; PAM sequence: CAG
  source 1..20: mol_type = other DNA
gtcttagagttgccttagct

SEQ ID NO: 21130 - DNA, 20 bp, synthetic construct
  misc_feature 1..20: note = Description of Artificial Sequence: Synthetic oligonucleotide
  misc_feature 1..20: note = Target: SCN10A; (-) strand; PAM type: NRG; PAM sequence: TAG
  source 1..20: mol_type = other DNA
gataagtcttagagttgcct

SEQ ID NO: 21131 - DNA, 20 bp, synthetic construct
  misc_feature 1..20: note = Description of Artificial Sequence: Synthetic oligonucleotide
  misc_feature 1..20: note = Target: SCN10A; (-) strand; PAM type: NRG; PAM sequence: GAG
  source 1..20: mol_type = other DNA
actgatacagataagtctta

SEQ ID NO: 21132 - DNA, 20 bp, synthetic construct
  misc_feature 1..20: note = Description of Artificial Sequence: Synthetic oligonucleotide
  misc_feature 1..20: note = Target: SCN10A; (-) strand; PAM type: NRG; PAM sequence: TAG
  source 1..20: mol_type = other DNA
ccactgatacagataagtct

SEQ ID NO: 21133 - DNA, 20 bp, synthetic construct
  misc_feature 1..20: note = Description of Artificial Sequence: Synthetic oligonucleotide
  misc_feature 1..20: note = Target: SCN10A; (-) strand; PAM type: NRG; PAM sequence: AAG
  source 1..20: mol_type = other DNA
atggttccactgatacagat

SEQ ID NO: 21134 - DNA, 20 bp, synthetic construct
  misc_feature 1..20: note = Description of Artificial Sequence: Synthetic oligonucleotide
  misc_feature 1..20: note = Target: SCN10A; (-) strand; PAM type: NRG; PAM sequence: CAG
  source 1..20: mol_type = other DNA
aataaatggttccactgata

SEQ ID NO: 21135 - DNA, 20 bp, synthetic construct
  misc_feature 1..20: note = Description of Artificial Sequence: Synthetic oligonucleotide
  misc_feature 1..20: note = Target: SCN10A; (-) strand; PAM type: NRG; PAM sequence: TGG
  source 1..20: mol_type = other DNA
attgtaaagagaccaataaa

SEQ ID NO: 21136 - DNA, 20 bp, synthetic construct
  misc_feature 1..20: note = Description of Artificial Sequence: Synthetic oligonucleotide
  misc_feature 1..20: note = Target: SCN10A; (-) strand; PAM type: NRG; PAM sequence: GAG
  source 1..20: mol_type = other DNA
attgcagacagaattgtaaa

SEQ ID NO: 21137 - DNA, 20 bp, synthetic construct
  misc_feature 1..20: note = Description of Artificial Sequence: Synthetic oligonucleotide
  misc_feature 1..20: note = Target: SCN10A; (-) strand; PAM type: NRG; PAM sequence: AAG
  source 1..20: mol_type = other DNA
caattgcagacagaattgta

SEQ ID NO: 21138 - DNA, 20 bp, synthetic construct
  misc_feature 1..20: note = Description of Artificial Sequence: Synthetic oligonucleotide
  misc_feature 1..20: note = Target: SCN10A; (-) strand; PAM type: NRG; PAM sequence: CAG
  source 1..20: mol_type = other DNA
ggatacagcgcaattgcaga

SEQ ID NO: 21139 - DNA, 20 bp, synthetic construct
  misc_feature 1..20: note = Description of Artificial Sequence: Synthetic oligonucleotide
  misc_feature 1..20: note = Target: SCN10A; (-) strand; PAM type: NRG; PAM sequence: CAG
  source 1..20: mol_type = other DNA
ccagggatacagcgcaattg

SEQ ID NO: 21140 - DNA, 20 bp, synthetic construct
  misc_feature 1..20: note = Description of Artificial Sequence: Synthetic oligonucleotide
  misc_feature 1..20: note = Target: SCN10A; (-) strand; PAM type: NRG; PAM sequence: CAG
  source 1..20: mol_type = other DNA
tctctggctagccagggata

SEQ ID NO: 21141 - DNA, 20 bp, synthetic construct
  misc_feature 1..20: note = Description of Artificial Sequence: Synthetic oligonucleotide
  misc_feature 1..20: note = Target: SCN10A; (-) strand; PAM type: NRG; PAM sequence: GGG
  source 1..20: mol_type = other DNA
ttgccctctctggctagcca

SEQ ID NO: 21142 - DNA, 20 bp, synthetic construct
  misc_feature 1..20: note = Description of Artificial Sequence: Synthetic oligonucleotide
  misc_feature 1..20: note = Target: SCN10A; (-) strand; PAM type: NRG; PAM sequence: AGG
  source 1..20: mol_type = other DNA
tttgccctctctggctagcc

SEQ ID NO: 21143 - DNA, 20 bp, synthetic construct
  misc_feature 1..20: note = Description of Artificial Sequence: Synthetic oligonucleotide
  misc_feature 1..20: note = Target: SCN10A; (-) strand; PAM type: NRG; PAM sequence: CAG
  source 1..20: mol_type = other DNA
atttgccctctctggctagc

SEQ ID NO: 21144 - DNA, 20 bp, synthetic construct
  misc_feature 1..20: note = Description of Artificial Sequence: Synthetic oligonucleotide
  misc_feature 1..20: note = Target: SCN10A; (-) strand; PAM type: NRG; PAM sequence: TAG
  source 1..20: mol_type = other DNA
tttcatttgccctctctggc

SEQ ID NO: 21145 - DNA, 20 bp, synthetic construct
  misc_feature 1..20: note = Description of Artificial Sequence: Synthetic oligonucleotide
  misc_feature 1..20: note = Target: SCN10A; (-) strand; PAM type: NRG; PAM sequence: TGG
  source 1..20: mol_type = other DNA
tgtttttcatttgccctctc

SEQ ID NO: 21146 - DNA, 20 bp, synthetic construct
  misc_feature 1..20: note = Description of Artificial Sequence: Synthetic oligonucleotide
  misc_feature 1..20: note = Target: SCN10A; (-) strand; PAM type: NRG; PAM sequence: TAG
  source 1..20: mol_type = other DNA
agtttcagcaatgatgtttc

SEQ ID NO: 21147 - DNA, 20 bp, synthetic construct
  misc_feature 1..20: note = Description of Artificial Sequence: Synthetic oligonucleotide
  misc_feature 1..20: note = Target: SCN10A; (-) strand; PAM type: NRG; PAM sequence: CAG
  source 1..20: mol_type = other DNA
tgagctctcccctccagttt

SEQ ID NO: 21148 - DNA, 20 bp, synthetic construct
  misc_feature 1..20: note = Description of Artificial Sequence: Synthetic oligonucleotide
  misc_feature 1..20: note = Target: SCN10A; (-) strand; PAM type: NRG; PAM sequence: CAG
  source 1..20: mol_type = other DNA
ttaatgtgagctctcccctc

SEQ ID NO: 21149 - DNA, 20 bp, synthetic construct
  misc_feature 1..20: note = Description of Artificial Sequence: Synthetic oligonucleotide
  misc_feature 1..20: note = Target: SCN10A; (-) strand; PAM type: NRG; PAM sequence: GAG
  source 1..20: mol_type = other DNA
tgggagctgtgagttaatgt

SEQ ID NO: 21150 - DNA, 20 bp, synthetic construct
  misc_feature 1..20: note = Description of Artificial Sequence: Synthetic oligonucleotide
  misc_feature 1..20: note = Target: SCN10A; (-) strand; PAM type: NRG; PAM sequence: GAG
  source 1..20: mol_type = other DNA
ctcattggattgggagctgt

SEQ ID NO: 21151 - DNA, 20 bp, synthetic construct
  misc_feature 1..20: note = Description of Artificial Sequence: Synthetic oligonucleotide
  misc_feature 1..20: note = Target: SCN10A; (-) strand; PAM type: NRG; PAM sequence: GAG
  source 1..20: mol_type = other DNA
gggattcctcattggattgg

SEQ ID NO: 21152 - DNA, 20 bp, synthetic construct
  misc_feature 1..20: note = Description of Artificial Sequence: Synthetic oligonucleotide
  misc_feature 1..20: note = Target: SCN10A; (-) strand; PAM type: NRG; PAM sequence: GGG
  source 1..20: mol_type = other DNA
cagggattcctcattggatt

SEQ ID NO: 21153 - DNA, 20 bp, synthetic construct
  misc_feature 1..20: note = Description of Artificial Sequence: Synthetic oligonucleotide
  misc_feature 1..20: note = Target: SCN10A; (-) strand; PAM type: NRG; PAM sequence: TGG
  source 1..20: mol_type = other DNA
tcagggattcctcattggat

SEQ ID NO: 21154 - DNA, 20 bp, synthetic construct
  misc_feature 1..20: note = Description of Artificial Sequence: Synthetic oligonucleotide
  misc_feature 1..20: note = Target: SCN10A; (-) strand; PAM type: NRG; PAM sequence: TGG
  source 1..20: mol_type = other DNA
gcaagtcagggattcctcat

SEQ ID NO: 21155 - DNA, 20 bp, synthetic construct
  misc_feature 1..20: note = Description of Artificial Sequence: Synthetic oligonucleotide
  misc_feature 1..20: note = Target: SCN10A; (-) strand; PAM type: NRG; PAM sequence: GGG
  source 1..20: mol_type = other DNA
cagagtgtaatggcaagtca

SEQ ID NO: 21156 - DNA, 20 bp, synthetic construct
  misc_feature 1..20: note = Description of Artificial Sequence: Synthetic oligonucleotide
  misc_feature 1..20: note = Target: SCN10A; (-) strand; PAM type: NRG; PAM sequence: AGG
  source 1..20: mol_type = other DNA
gcagagtgtaatggcaagtc

SEQ ID NO: 21157 - DNA, 20 bp, synthetic construct
  misc_feature 1..20: note = Description of Artificial Sequence: Synthetic oligonucleotide
  misc_feature 1..20: note = Target: SCN10A; (-) strand; PAM type: NRG; PAM sequence: CAG
  source 1..20: mol_type = other DNA
cgcagagtgtaatggcaagt

SEQ ID NO: 21158 - DNA, 20 bp, synthetic construct
  misc_feature 1..20: note = Description of Artificial Sequence: Synthetic oligonucleotide
  misc_feature 1..20: note = Target: SCN10A; (-) strand; PAM type: NRG; PAM sequence: AAG
  source 1..20: mol_type = other DNA
taatcgcagagtgtaatggc

SEQ ID NO: 21159 - DNA, 20 bp, synthetic construct
  misc_feature 1..20: note = Description of Artificial Sequence: Synthetic oligonucleotide
  misc_feature 1..20: note = Target: SCN10A; (-) strand; PAM type: NRG; PAM sequence: TGG
  source 1..20: mol_type = other DNA
agaataatcgcagagtgtaa

SEQ ID NO: 21160 - DNA, 20 bp, synthetic construct
  misc_feature 1..20: note = Description of Artificial Sequence: Synthetic oligonucleotide
  misc_feature 1..20: note = Target: SCN10A; (-) strand; PAM type: NRG; PAM sequence: GAG
  source 1..20: mol_type = other DNA
tctttaatagaataatcgca

SEQ ID NO: 21161 - DNA, 20 bp, synthetic construct
  misc_feature 1..20: note = Description of Artificial Sequence: Synthetic oligonucleotide
  misc_feature 1..20: note = Target: SCN10A; (-) strand; PAM type: NRG; PAM sequence: CAG
  source 1..20: mol_type = other DNA
actctttaatagaataatcg

SEQ ID NO: 21162 - DNA, 20 bp, synthetic construct
  misc_feature 1..20: note = Description of Artificial Sequence: Synthetic oligonucleotide
  misc_feature 1..20: note = Target: SCN10A; (-) strand; PAM type: NRG; PAM sequence: TAG
  source 1..20: mol_type = other DNA
aactggccagcactctttaa

SEQ ID NO: 21163 - DNA, 20 bp, synthetic construct
  misc_feature 1..20: note = Description of Artificial Sequence: Synthetic oligonucleotide
  misc_feature 1..20: note = Target: SCN10A; (-) strand; PAM type: NRG; PAM sequence: CAG
  source 1..20: mol_type = other DNA
ggcaacagtgactaactggc

SEQ ID NO: 21164 - DNA, 20 bp, synthetic construct
  misc_feature 1..20: note = Description of Artificial Sequence: Synthetic oligonucleotide
  misc_feature 1..20: note = Target: SCN10A; (-) strand; PAM type: NRG; PAM sequence: TGG
  source 1..20: mol_type = other DNA
attaggcaacagtgactaac

SEQ ID NO: 21165 - DNA, 20 bp, synthetic construct
  misc_feature 1..20: note = Description of Artificial Sequence: Synthetic oligonucleotide
  misc_feature 1..20: note = Target: SCN10A; (-) strand; PAM type: NRG; PAM sequence: CAG
  source 1..20: mol_type = other DNA
aaaatgagcaaattaggcaa

SEQ ID NO: 21166 - DNA, 20 bp, synthetic construct
  misc_feature 1..20: note = Description of Artificial Sequence: Synthetic oligonucleotide
  misc_feature 1..20: note = Target: SCN10A; (-) strand; PAM type: NRG; PAM sequence: AGG
  source 1..20: mol_type = other DNA
tttgccaaaatgagcaaatt

SEQ ID NO: 21167 - DNA, 20 bp, synthetic construct
  misc_feature 1..20: note = Description of Artificial Sequence: Synthetic oligonucleotide
  misc_feature 1..20: note = Target: SCN10A; (-) strand; PAM type: NRG; PAM sequence: TAG
  source 1..20: mol_type = other DNA
atttgccaaaatgagcaaat

SEQ ID NO: 21168 - DNA, 20 bp, synthetic construct
  misc_feature 1..20: note = Description of Artificial Sequence: Synthetic oligonucleotide
  misc_feature 1..20: note = Target: SCN10A; (-) strand; PAM type: NRG; PAM sequence: GAG
  source 1..20: mol_type = other DNA
aagaaataatttgccaaaat

SEQ ID NO: 21169 - DNA, 20 bp, synthetic construct
  misc_feature 1..20: note = Description of Artificial Sequence: Synthetic oligonucleotide
  misc_feature 1..20: note = Target: SCN10A; (-) strand; PAM type: NRG; PAM sequence: AAG
  source 1..20: mol_type = other DNA
attccttgctttactcacag

SEQ ID NO: 21170 - DNA, 20 bp, synthetic construct
  misc_feature 1..20: note = Description of Artificial Sequence: Synthetic oligonucleotide
  misc_feature 1..20: note = Target: SCN10A; (-) strand; PAM type: NRG; PAM sequence: CAG
  source 1..20: mol_type = other DNA
agtattccttgctttactca

SEQ ID NO: 21171 - DNA, 20 bp, synthetic construct
  misc_feature 1..20: note = Description of Artificial Sequence: Synthetic oligonucleotide
  misc_feature 1..20: note = Target: SCN10A; (-) strand; PAM type: NRG; PAM sequence: CAG
  source 1..20: mol_type = other DNA
gacagatctgaatagaagca

SEQ ID NO: 21172 - DNA, 20 bp, synthetic construct
  misc_feature 1..20: note = Description of Artificial Sequence: Synthetic oligonucleotide
  misc_feature 1..20: note = Target: SCN10A; (-) strand; PAM type: NRG; PAM sequence: AAG
  source 1..20: mol_type = other DNA
cttaggacagatctgaatag

SEQ ID NO: 21173 - DNA, 20 bp, synthetic construct
  misc_feature 1..20: note = Description of Artificial Sequence: Synthetic oligonucleotide
  misc_feature 1..20: note = Target: SCN10A; (-) strand; PAM type: NRG; PAM sequence: TAG
  source 1..20: mol_type = other DNA
tttcttaggacagatctgaa

SEQ ID NO: 21174 - DNA, 20 bp, synthetic construct
  misc_feature 1..20: note = Description of Artificial Sequence: Synthetic oligonucleotide
  misc_feature 1..20: note = Target: SCN10A; (-) strand; PAM type: NRG; PAM sequence: CAG
  source 1..20: mol_type = other DNA
attcaggaagtttcttagga

SEQ ID NO: 21175 - DNA, 20 bp, synthetic construct
  misc_feature 1..20: note = Description of Artificial Sequence: Synthetic oligonucleotide
  misc_feature 1..20: note = Target: SCN10A; (-) strand; PAM type: NRG; PAM sequence: AGG
  source 1..20: mol_type = other DNA
agaaattcaggaagtttctt

SEQ ID NO: 21176 - DNA, 20 bp, synthetic construct
  misc_feature 1..20: note = Description of Artificial Sequence: Synthetic oligonucleotide
  misc_feature 1..20: note = Target: SCN10A; (-) strand; PAM type: NRG; PAM sequence: TAG
  source 1..20: mol_type = other DNA
gagaaattcaggaagtttct

SEQ ID NO: 21177 - DNA, 20 bp, synthetic construct
  misc_feature 1..20: note = Description of Artificial Sequence: Synthetic oligonucleotide
  misc_feature 1..20: note = Target: SCN10A; (-) strand; PAM type: NRG; PAM sequence: AAG
  source 1..20: mol_type = other DNA
ggcacccagagaaattcagg

SEQ ID NO: 21178 - DNA, 20 bp, synthetic construct
  misc_feature 1..20: note = Description of Artificial Sequence: Synthetic oligonucleotide
  misc_feature 1..20: note = Target: SCN10A; (-) strand; PAM type: NRG; PAM sequence: AGG
  source 1..20: mol_type = other DNA
aatggcacccagagaaattc

SEQ ID NO: 21179 - DNA, 20 bp, synthetic construct
  misc_feature 1..20: note = Description of Artificial Sequence: Synthetic oligonucleotide
  misc_feature 1..20: note = Target: SCN10A; (-) strand; PAM type: NRG; PAM sequence: CAG
  source 1..20: mol_type = other DNA
aaatggcacccagagaaatt

SEQ ID NO: 21180 - DNA, 20 bp, synthetic construct
  misc_feature 1..20: note = Description of Artificial Sequence: Synthetic oligonucleotide
  misc_feature 1..20: note = Target: SCN10A; (-) strand; PAM type: NRG; PAM sequence: GAG
  source 1..20: mol_type = other DNA
ggctgggcaaatggcaccca

SEQ ID NO: 21181 - DNA, 20 bp, synthetic construct
  misc_feature 1..20: note = Description of Artificial Sequence: Synthetic oligonucleotide
  misc_feature 1..20: note = Target: SCN10A; (-) strand; PAM type: NRG; PAM sequence: CAG
  source 1..20: mol_type = other DNA
taggctgggcaaatggcacc

SEQ ID NO: 21182 - DNA, 20 bp, synthetic construct
  misc_feature 1..20: note = Description of Artificial Sequence: Synthetic oligonucleotide
  misc_feature 1..20: note = Target: SCN10A; (-) strand; PAM type: NRG; PAM sequence: TGG
  source 1..20: mol_type = other DNA
actcttctaggctgggcaaa

SEQ ID NO: 21183 - DNA, 20 bp, synthetic construct
  misc_feature 1..20: note = Description of Artificial Sequence: Synthetic oligonucleotide
  misc_feature 1..20: note = Target: SCN10A; (-) strand; PAM type: NRG; PAM sequence: GGG
  source 1..20: mol_type = other DNA
tatgcaaactcttctaggct

SEQ ID NO: 21184 - DNA, 20 bp, synthetic construct
  misc_feature 1..20: note = Description of Artificial Sequence: Synthetic oligonucleotide
  misc_feature 1..20: note = Target: SCN10A; (-) strand; PAM type: NRG; PAM sequence: TGG
  source 1..20: mol_type = other DNA
ctatgcaaactcttctaggc

SEQ ID NO: 21185 - DNA, 20 bp, synthetic construct
  misc_feature 1..20: note = Description of Artificial Sequence: Synthetic oligonucleotide
  misc_feature 1..20: note = Target: SCN10A; (-) strand; PAM type: NRG; PAM sequence: AGG
  source 1..20: mol_type = other DNA
ggctctatgcaaactcttct

SEQ ID NO: 21186 - DNA, 20 bp, synthetic construct
  misc_feature 1..20: note = Description of Artificial Sequence: Synthetic oligonucleotide
  misc_feature 1..20: note = Target: SCN10A; (-) strand; PAM type: NRG; PAM sequence: TAG
  source 1..20: mol_type = other DNA
tggctctatgcaaactcttc

SEQ ID NO: 21187 - DNA, 20 bp, synthetic construct
  misc_feature 1..20: note = Description of Artificial Sequence: Synthetic oligonucleotide
  misc_feature 1..20: note = Target: SCN10A; (-) strand; PAM type: NRG; PAM sequence: TGG
  source 1..20: mol_type = other DNA
gacccttctcttcctgctta

SEQ ID NO: 21188 - DNA, 20 bp, synthetic construct
  misc_feature 1..20: note = Description of Artificial Sequence: Synthetic oligonucleotide
  misc_feature 1..20: note = Target: SCN10A; (-) strand; PAM type: NRG; PAM sequence: AGG
  source 1..20: mol_type = other DNA
acaggtatgagaaaaactga

SEQ ID NO: 21189 - DNA, 20 bp, synthetic construct
  misc_feature 1..20: note = Description of Artificial Sequence: Synthetic oligonucleotide
  misc_feature 1..20: note = Target: SCN10A; (-) strand; PAM type: NRG; PAM sequence: AAG
  source 1..20: mol_type = other DNA
gacaggtatgagaaaaactg

SEQ ID NO: 21190 - DNA, 20 bp, synthetic construct
  misc_feature 1..20: note = Description of Artificial Sequence: Synthetic oligonucleotide
  misc_feature 1..20: note = Target: SCN10A; (-) strand; PAM type: NRG; PAM sequence: GAG
  source 1..20: mol_type = other DNA
ctttcttgttggacaggtat

SEQ ID NO: 21191 - DNA, 20 bp, synthetic construct
  misc_feature 1..20: note = Description of Artificial Sequence: Synthetic oligonucleotide
  misc_feature 1..20: note = Target: SCN10A; (-) strand; PAM type: NRG; PAM sequence: AGG
  source 1..20: mol_type = other DNA
ggcctgctttcttgttggac

SEQ ID NO: 21192 - DNA, 20 bp, synthetic construct
  misc_feature 1..20: note = Description of Artificial Sequence: Synthetic oligonucleotide
  misc_feature 1..20: note = Target: SCN10A; (-) strand; PAM type: NRG; PAM sequence: CAG
  source 1..20: mol_type = other DNA
aggcctgctttcttgttgga

SEQ ID NO: 21193 - DNA, 20 bp, synthetic construct
  misc_feature 1..20: note = Description of Artificial Sequence: Synthetic oligonucleotide
  misc_feature 1..20: note = Target: SCN10A; (-) strand; PAM type: NRG; PAM sequence: TGG
  source 1..20: mol_type = other DNA
tgataggcctgctttcttgt

SEQ ID NO: 21194 - DNA, 20 bp, synthetic construct
  misc_feature 1..20: note = Description of Artificial Sequence: Synthetic oligonucleotide
  misc_feature 1..20: note = Target: SCN10A; (-) strand; PAM type: NRG; PAM sequence: AGG
  source 1..20: mol_type = other DNA
aacatcactgcctcagtgat

SEQ ID NO: 21195 - DNA, 20 bp, synthetic construct
  misc_feature 1..20: note = Description of Artificial Sequence: Synthetic oligonucleotide
  misc_feature 1..20: note = Target: SCN10A; (-) strand; PAM type: NRG; PAM sequence: TAG
  source 1..20: mol_type = other DNA
caacatcactgcctcagtga

SEQ ID NO: 21196 - DNA, 20 bp, synthetic construct
  misc_feature 1..20: note = Description of Artificial Sequence: Synthetic oligonucleotide
  misc_feature 1..20: note = Target: SCN10A; (-) strand; PAM type: NRG; PAM sequence: CAG
  source 1..20: mol_type = other DNA
cccactcaacatcactgcct

SEQ ID NO: 21197 - DNA, 20 bp, synthetic construct
  misc_feature 1..20: note = Description of Artificial Sequence: Synthetic oligonucleotide
  misc_feature 1..20: note = Target: SCN10A; (-) strand; PAM type: NRG; PAM sequence: CAG
  source 1..20: mol_type = other DNA
tttgaccccatatttcttat

SEQ ID NO: 21198 - DNA, 20 bp, synthetic construct
  misc_feature 1..20: note = Description of Artificial Sequence: Synthetic oligonucleotide
  misc_feature 1..20: note = Target: SCN10A; (-) strand; PAM type: NRG; PAM sequence: TAG
  source 1..20: mol_type = other DNA
tttcctggtttattctgcag

SEQ ID NO: 21199 - DNA, 20 bp, synthetic construct
  misc_feature 1..20: note = Description of Artificial Sequence: Synthetic oligonucleotide
  misc_feature 1..20: note = Target: SCN10A; (-) strand; PAM type: NRG; PAM sequence: CAG
  source 1..20: mol_type = other DNA
aggtttcctggtttattctg

SEQ ID NO: 21200 - DNA, 20 bp, synthetic construct
  misc_feature 1..20: note = Description of Artificial Sequence: Synthetic oligonucleotide
  misc_feature 1..20: note = Target: SCN10A; (-) strand; PAM type: NRG; PAM sequence: TGG
  source 1..20: mol_type = other DNA
ctgaggtcaaacaggtttcc

SEQ ID NO: 21201 - DNA, 20 bp, synthetic construct
  misc_feature 1..20: note = Description of Artificial Sequence: Synthetic oligonucleotide
  misc_feature 1..20: note = Target: SCN10A; (-) strand; PAM type: NRG; PAM sequence: AGG
  source 1..20: mol_type = other DNA
gagttggcctgaggtcaaac

SEQ ID NO: 21202 - DNA, 20 bp, synthetic construct
  misc_feature 1..20: note = Description of Artificial Sequence: Synthetic oligonucleotide
  misc_feature 1..20: note = Target: SCN10A; (-) strand; PAM type: NRG; PAM sequence: CAG
  source 1..20: mol_type = other DNA
tgagttggcctgaggtcaaa

SEQ ID NO: 21203 - DNA, 20 bp, synthetic construct
  misc_feature 1..20: note = Description of Artificial Sequence: Synthetic oligonucleotide
  misc_feature 1..20: note = Target: SCN10A; (-) strand; PAM type: NRG; PAM sequence: AGG
  source 1..20: mol_type = other DNA
agagagattgagttggcctg

SEQ ID NO: 21204 - DNA, 20 bp, synthetic construct
  misc_feature 1..20: note = Description of Artificial Sequence: Synthetic oligonucleotide
  misc_feature 1..20: note = Target: SCN10A; (-) strand; PAM type: NRG; PAM sequence: GAG
  source 1..20: mol_type = other DNA
gagagagattgagttggcct

SEQ ID NO: 21205 - DNA, 20 bp, synthetic construct
  misc_feature 1..20: note = Description of Artificial Sequence: Synthetic oligonucleotide
  misc_feature 1..20: note = Target: SCN10A; (-) strand; PAM type: NRG; PAM sequence: TGG
  source 1..20: mol_type = other DNA
gagagagagagagattgagt

SEQ ID NO: 21206 - DNA, 20 bp, synthetic construct
  misc_feature 1..20: note = Description of Artificial Sequence: Synthetic oligonucleotide
  misc_feature 1..20: note = Target: SCN10A; (-) strand; PAM type: NRG; PAM sequence: GAG
  source 1..20: mol_type = other DNA
cccagagagagagagagatt

SEQ ID NO: 21207 - DNA, 20 bp, synthetic construct
  misc_feature 1..20: note = Description of Artificial Sequence: Synthetic oligonucleotide
  misc_feature 1..20: note = Target: SCN10A; (-) strand; PAM type: NRG; PAM sequence: GAG
  source 1..20: mol_type = other DNA
atgagacccagagagagaga

SEQ ID NO: 21208 - DNA, 20 bp, synthetic construct
  misc_feature 1..20: note = Description of Artificial Sequence: Synthetic oligonucleotide
  misc_feature 1..20: note = Target: SCN10A; (-) strand; PAM type: NRG; PAM sequence: GAG
  source 1..20: mol_type = other DNA
agatgagacccagagagaga

SEQ ID NO: 21209 - DNA, 20 bp, synthetic construct
  misc_feature 1..20: note = Description of Artificial Sequence: Synthetic oligonucleotide
  misc_feature 1..20: note = Target: SCN10A; (-) strand; PAM type: NRG; PAM sequence: GAG
  source 1..20: mol_type = other DNA
gaagatgagacccagagaga

SEQ ID NO: 21210 - DNA, 20 bp, synthetic construct
  misc_feature 1..20: note = Description of Artificial Sequence: Synthetic oligonucleotide
  misc_feature 1..20: note = Target: SCN10A; (-) strand; PAM type: NRG; PAM sequence: GAG
  source 1..20: mol_type = other DNA
tagaagatgagacccagaga

SEQ ID NO: 21211 - DNA, 20 bp, synthetic construct
  misc_feature 1..20: note = Description of Artificial Sequence: Synthetic oligonucleotide
  misc_feature 1..20: note = Target: SCN10A; (-) strand; PAM type: NRG; PAM sequence: GAG
  source 1..20: mol_type = other DNA
catagaagatgagacccaga

SEQ ID NO: 21212 - DNA, 20 bp, synthetic construct
  misc_feature 1..20: note = Description of Artificial Sequence: Synthetic oligonucleotide
  misc_feature 1..20: note = Target: SCN10A; (-) strand; PAM type: NRG; PAM sequence: GAG
  source 1..20: mol_type = other DNA
gacatagaagatgagaccca

SEQ ID NO: 21213 - DNA, 20 bp, synthetic construct
  misc_feature 1..20: note = Description of Artificial Sequence: Synthetic oligonucleotide
  misc_feature 1..20: note = Target: SCN10A; (-) strand; PAM type: NRG; PAM sequence: CAG
  source 1..20: mol_type = other DNA
cagacatagaagatgagacc

SEQ ID NO: 21214 - DNA, 20 bp, synthetic construct
  misc_feature 1..20: note = Description of Artificial Sequence: Synthetic oligonucleotide
  misc_feature 1..20: note = Target: SCN10A; (-) strand; PAM type: NRG; PAM sequence: GAG
  source 1..20: mol_type = other DNA
tttttacagacatagaagat

SEQ ID NO: 21215 - DNA, 20 bp, synthetic construct
  misc_feature 1..20: note = Description of Artificial Sequence: Synthetic oligonucleotide
  misc_feature 1..20: note = Target: SCN10A; (-) strand; PAM type: NRG; PAM sequence: AAG
  source 1..20: mol_type = other DNA
ctccttttttacagacatag

SEQ ID NO: 21216 - DNA, 20 bp, synthetic construct
  misc_feature 1..20: note = Description of Artificial Sequence: Synthetic oligonucleotide
  misc_feature 1..20: note = Target: SCN10A; (-) strand; PAM type: NRG; PAM sequence: TAG
  source 1..20: mol_type = other DNA
ctactccttttttacagaca

SEQ ID NO: 21217 - DNA, 20 bp, synthetic construct
  misc_feature 1..20: note = Description of Artificial Sequence: Synthetic oligonucleotide
  misc_feature 1..20: note = Target: SCN10A; (-) strand; PAM type: NRG; PAM sequence: CAG
  source 1..20: mol_type = other DNA
cccattctactcctttttta

SEQ ID NO: 21218 - DNA, 20 bp, synthetic construct
  misc_feature 1..20: note = Description of Artificial Sequence: Synthetic oligonucleotide
  misc_feature 1..20: note = Target: SCN10A; (-) strand; PAM type: NRG; PAM sequence: TAG
  source 1..20: mol_type = other DNA
tcaccaatggaagggatctt

SEQ ID NO: 21219 - DNA, 20 bp, synthetic construct
  misc_feature 1..20: note = Description of Artificial Sequence: Synthetic oligonucleotide
  misc_feature 1..20: note = Target: SCN10A; (-) strand; PAM type: NRG; PAM sequence: GGG
  source 1..20: mol_type = other DNA
cctgagtatcaccaatggaa

SEQ ID NO: 21220 - DNA, 20 bp, synthetic construct
  misc_feature 1..20: note = Description of Artificial Sequence: Synthetic oligonucleotide
  misc_feature 1..20: note = Target: SCN10A; (-) strand; PAM type: NRG; PAM sequence: AGG
  source 1..20: mol_type = other DNA
gcctgagtatcaccaatgga

SEQ ID NO: 21221 - DNA, 20 bp, synthetic construct
  misc_feature 1..20: note = Description of Artificial Sequence: Synthetic oligonucleotide
  misc_feature 1..20: note = Target: SCN10A; (-) strand; PAM type: NRG; PAM sequence: AAG
  source 1..20: mol_type = other DNA
agcctgagtatcaccaatgg

SEQ ID NO: 21222 - DNA, 20 bp, synthetic construct
  misc_feature 1..20: note = Description of Artificial Sequence: Synthetic oligonucleotide
  misc_feature 1..20: note = Target: SCN10A; (-) strand; PAM type: NRG; PAM sequence: TGG
  source 1..20: mol_type = other DNA
agaagcctgagtatcaccaa

SEQ ID NO: 21223 - DNA, 20 bp, synthetic construct
  misc_feature 1..20: note = Description of Artificial Sequence: Synthetic oligonucleotide
  misc_feature 1..20: note = Target: SCN10A; (-) strand; PAM type: NRG; PAM sequence: GAG
  source 1..20: mol_type = other DNA
agccttgagccaagaagcct

SEQ ID NO: 21224 - DNA, 20 bp, synthetic construct
  misc_feature 1..20: note = Description of Artificial Sequence: Synthetic oligonucleotide
  misc_feature 1..20: note = Target: SCN10A; (-) strand; PAM type: NRG; PAM sequence: AAG
  source 1..20: mol_type = other DNA
cctagaagccttgagccaag

SEQ ID NO: 21225 - DNA, 20 bp, synthetic construct
  misc_feature 1..20: note = Description of Artificial Sequence: Synthetic oligonucleotide
  misc_feature 1..20: note = Target: SCN10A; (-) strand; PAM type: NRG; PAM sequence: AAG
  source 1..20: mol_type = other DNA
ccacctagaagccttgagcc

SEQ ID NO: 21226 - DNA, 20 bp, synthetic construct
  misc_feature 1..20: note = Description of Artificial Sequence: Synthetic oligonucleotide
  misc_feature 1..20: note = Target: SCN10A; (-) strand; PAM type: NRG; PAM sequence: GAG
  source 1..20: mol_type = other DNA
gtcttccacctagaagcctt

SEQ ID NO: 21227 - DNA, 20 bp, synthetic construct
  misc_feature 1..20: note = Description of Artificial Sequence: Synthetic oligonucleotide
  misc_feature 1..20: note = Target: SCN10A; (-) strand; PAM type: NRG; PAM sequence: AAG
  source 1..20: mol_type = other DNA
tcaggctgtcttccacctag

SEQ ID NO: 21228 - DNA, 20 bp, synthetic construct
  misc_feature 1..20: note = Description of Artificial Sequence: Synthetic oligonucleotide
  misc_feature 1..20: note = Target: SCN10A; (-) strand; PAM type: NRG; PAM sequence: TAG
  source 1..20: mol_type = other DNA
ccctcaggctgtcttccacc

SEQ ID NO: 21229 - DNA, 20 bp, synthetic construct
  misc_feature 1..20: note = Description of Artificial Sequence: Synthetic oligonucleotide
  misc_feature 1..20: note = Target: SCN10A; (-) strand; PAM type: NRG; PAM sequence: AGG
  source 1..20: mol_type = other DNA
tgaatgcttcagactccctc

SEQ ID NO: 21230 - DNA, 20 bp, synthetic construct
  misc_feature 1..20: note = Description of Artificial Sequence: Synthetic oligonucleotide
  misc_feature 1..20: note = Target: SCN10A; (-) strand; PAM type: NRG; PAM sequence: CAG
  source 1..20: mol_type = other DNA
gtgaatgcttcagactccct

SEQ ID NO: 21231 - DNA, 20 bp, synthetic construct
  misc_feature 1..20: note = Description of Artificial Sequence: Synthetic oligonucleotide
  misc_feature 1..20: note = Target: SCN10A; (-) strand; PAM type: NRG; PAM sequence: CAG
  source 1..20: mol_type = other DNA
cggtgagtttgtgaatgctt

SEQ ID NO: 21232 - DNA, 20 bp, synthetic construct
  misc_feature 1..20: note = Description of Artificial Sequence: Synthetic oligonucleotide
  misc_feature 1..20: note = Target: SCN10A; (-) strand; PAM type: NRG; PAM sequence: GAG
  source 1..20: mol_type = other DNA
ggagctgtcgatgtctcggt

SEQ ID NO: 21233 - DNA, 20 bp, synthetic construct
  misc_feature 1..20: note = Description of Artificial Sequence: Synthetic oligonucleotide
  misc_feature 1..20: note = Target: SCN10A; (-) strand; PAM type: NRG; PAM sequence: CGG
  source 1..20: mol_type = other DNA
ccctggagctgtcgatgtct

SEQ ID NO: 21234 - DNA, 20 bp, synthetic construct
  misc_feature 1..20: note = Description of Artificial Sequence: Synthetic oligonucleotide
  misc_feature 1..20: note = Target: SCN10A; (-) strand; PAM type: NRG; PAM sequence: GAG
  source 1..20: mol_type = other DNA
cactagtgagcttgcccctg

SEQ ID NO: 21235 - DNA, 20 bp, synthetic construct
  misc_feature 1..20: note = Description of Artificial Sequence: Synthetic oligonucleotide
  misc_feature 1..20: note = Target: SCN10A; (-) strand; PAM type: NRG; PAM sequence: TGG
  source 1..20: mol_type = other DNA
cccactagtgagcttgcccc

SEQ ID NO: 21236 - DNA, 20 bp, synthetic construct
  misc_feature 1..20: note = Description of Artificial Sequence: Synthetic oligonucleotide
  misc_feature 1..20: note = Target: SCN10A; (-) strand; PAM type: NRG; PAM sequence: GAG
  source 1..20: mol_type = other DNA
accaaccgccgcccactagt

SEQ ID NO: 21237 - DNA, 20 bp, synthetic construct
  misc_feature 1..20: note = Description of Artificial Sequence: Synthetic oligonucleotide
  misc_feature 1..20: note = Target: SCN10A; (-) strand; PAM type: NRG; PAM sequence: TAG
  source 1..20: mol_type = other DNA
gaacaccaaccgccgcccac

SEQ ID NO: 21238 - DNA, 20 bp, synthetic construct
  misc_feature 1..20: note = Description of Artificial Sequence: Synthetic oligonucleotide
  misc_feature 1..20: note = Target: SCN10A; (-) strand; PAM type: NRG; PAM sequence: AAG
  source 1..20: mol_type = other DNA
ccctgactccaggcatggag

SEQ ID NO: 21239 - DNA, 20 bp, synthetic construct
  misc_feature 1..20: note = Description of Artificial Sequence: Synthetic oligonucleotide
  misc_feature 1..20: note = Target: SCN10A; (-) strand; PAM type: NRG; PAM sequence: GAG
  source 1..20: mol_type = other DNA
caaccctgactccaggcatg

SEQ ID NO: 21240 - DNA, 20 bp, synthetic construct
  misc_feature 1..20: note = Description of Artificial Sequence: Synthetic oligonucleotide
  misc_feature 1..20: note = Target: SCN10A; (-) strand; PAM type: NRG; PAM sequence: TGG
  source 1..20: mol_type = other DNA
agcaaccctgactccaggca

SEQ ID NO: 21241 - DNA, 20 bp, synthetic construct
  misc_feature 1..20: note = Description of Artificial Sequence: Synthetic oligonucleotide
  misc_feature 1..20: note = Target: SCN10A; (-) strand; PAM type: NRG; PAM sequence: AGG
  source 1..20: mol_type = other DNA
aacccagcaaccctgactcc

SEQ ID NO: 21242 - DNA, 20 bp, synthetic construct
  misc_feature 1..20: note = Description of Artificial Sequence: Synthetic oligonucleotide
  misc_feature 1..20: note = Target: SCN10A; (-) strand; PAM type: NRG; PAM sequence: CAG
  source 1..20: mol_type = other DNA
caacccagcaaccctgactc

SEQ ID NO: 21243 - DNA, 20 bp, synthetic construct
  misc_feature 1..20: note = Description of Artificial Sequence: Synthetic oligonucleotide
  misc_feature 1..20: note = Target: SCN10A; (-) strand; PAM type: NRG; PAM sequence: CAG
  source 1..20: mol_type = other DNA
agaagccctcttcctcaacc

SEQ ID NO: 21244 - DNA, 20 bp, synthetic construct
  misc_feature 1..20: note = Description of Artificial Sequence: Synthetic oligonucleotide
  misc_feature 1..20: note = Target: SCN10A; (-) strand; PAM type: NRG; PAM sequence: AAG
  source 1..20: mol_type = other DNA
cagcaaggccccctccctag

SEQ ID NO: 21245 - DNA, 20 bp, synthetic construct
  misc_feature 1..20: note = Description of Artificial Sequence: Synthetic oligonucleotide
  misc_feature 1..20: note = Target: SCN10A; (-) strand; PAM type: NRG; PAM sequence: TAG
  source 1..20: mol_type = other DNA
ggccagcaaggccccctccc

SEQ ID NO: 21246 - DNA, 20 bp, synthetic construct
  misc_feature 1..20: note = Description of Artificial Sequence: Synthetic oligonucleotide
  misc_feature 1..20: note = Target: SCN10A; (-) strand; PAM type: NRG; PAM sequence: AGG
  source 1..20: mol_type = other DNA
ggtgggggtgctggccagca

SEQ ID NO: 21247 - DNA, 20 bp, synthetic construct
  misc_feature 1..20: note = Description of Artificial Sequence: Synthetic oligonucleotide
  misc_feature 1..20: note = Target: SCN10A; (-) strand; PAM type: NRG; PAM sequence: AAG
  source 1..20: mol_type = other DNA
gggtgggggtgctggccagc

SEQ ID NO: 21248 - DNA, 20 bp, synthetic construct
  misc_feature 1..20: note = Description of Artificial Sequence: Synthetic oligonucleotide
  misc_feature 1..20: note = Target: SCN10A; (-) strand; PAM type: NRG; PAM sequence: CAG
  source 1..20: mol_type = other DNA
tgctgggtgggggtgctggc

SEQ ID NO: 21249 - DNA, 20 bp, synthetic construct
  misc_feature 1..20: note = Description of Artificial Sequence: Synthetic oligonucleotide
  misc_feature 1..20: note = Target: SCN10A; (-) strand; PAM type: NRG; PAM sequence: TGG
  source 1..20: mol_type = other DNA
ctgctgctgggtgggggtgc

SEQ ID NO: 21250 - DNA, 20 bp, synthetic construct
  misc_feature 1..20: note = Description of Artificial Sequence: Synthetic oligonucleotide
  misc_feature 1..20: note = Target: SCN10A; (-) strand; PAM type: NRG; PAM sequence: GGG
  source 1..20: mol_type = other DNA
ggctctctgctgctgggtgg

SEQ ID NO: 21251 - DNA, 20 bp, synthetic construct
  misc_feature 1..20: note = Description of Artificial Sequence: Synthetic oligonucleotide
  misc_feature 1..20: note = Target: SCN10A; (-) strand; PAM type: NRG; PAM sequence: GGG
  source 1..20: mol_type = other DNA
gggctctctgctgctgggtg

SEQ ID NO: 21252 - DNA, 20 bp, synthetic construct
  misc_feature 1..20: note = Description of Artificial Sequence: Synthetic oligonucleotide
  misc_feature 1..20: note = Target: SCN10A; (-) strand; PAM type: NRG; PAM sequence: GGG
  source 1..20: mol_type = other DNA
ggggctctctgctgctgggt

SEQ ID NO: 21253 - DNA, 20 bp, synthetic construct
  misc_feature 1..20: note = Description of Artificial Sequence: Synthetic oligonucleotide
  misc_feature 1..20: note = Target: SCN10A; (-) strand; PAM type: NRG; PAM sequence: TGG
  source 1..20: mol_type = other DNA
cggggctctctgctgctggg

SEQ ID NO: 21254 - DNA, 20 bp, synthetic construct
  misc_feature 1..20: note = Description of Artificial Sequence: Synthetic oligonucleotide
  misc_feature 1..20: note = Target: SCN10A; (-) strand; PAM type: NRG; PAM sequence: GGG
  source 1..20: mol_type = other DNA
catcggggctctctgctgct

SEQ ID NO: 21255 - DNA, 20 bp, synthetic construct
  misc_feature 1..20: note = Description of Artificial Sequence: Synthetic oligonucleotide
  misc_feature 1..20: note = Target: SCN10A; (-) strand; PAM type: NRG; PAM sequence: TGG
  source 1..20: mol_type = other DNA
ccatcggggctctctgctgc

SEQ ID NO: 21256 - DNA, 20 bp, synthetic construct
  misc_feature 1..20: note = Description of Artificial Sequence: Synthetic oligonucleotide
  misc_feature 1..20: note = Target: SCN10A; (-) strand; PAM type: NRG; PAM sequence: GGG
  source 1..20: mol_type = other DNA
ggagaccacgaaagccatcg

SEQ ID NO: 21257 - DNA, 20 bp, synthetic construct
  misc_feature 1..20: note = Description of Artificial Sequence: Synthetic oligonucleotide
  misc_feature 1..20: note = Target: SCN10A; (-) strand; PAM type: NRG; PAM sequence: GGG
  source 1..20: mol_type = other DNA
tggagaccacgaaagccatc

SEQ ID NO: 21258 - DNA, 20 bp, synthetic construct
  misc_feature 1..20: note = Description of Artificial Sequence: Synthetic oligonucleotide
  misc_feature 1..20: note = Target: SCN10A; (-) strand; PAM type: NRG; PAM sequence: CGG
  source 1..20: mol_type = other DNA
ctggagaccacgaaagccat

SEQ ID NO: 21259 - DNA, 20 bp, synthetic construct
  misc_feature 1..20: note = Description of Artificial Sequence: Synthetic oligonucleotide
  misc_feature 1..20: note = Target: SCN10A; (-) strand; PAM type: NRG; PAM sequence: AAG
  source 1..20: mol_type = other DNA
gtctttcctggagaccacga

SEQ ID NO: 21260 - DNA, 20 bp, synthetic construct
  misc_feature 1..20: note = Description of Artificial Sequence: Synthetic oligonucleotide
  misc_feature 1..20: note = Target: SCN10A; (-) strand; PAM type: NRG; PAM sequence: GAG
  source 1..20: mol_type = other DNA
agatgatggagtctttcctg

SEQ ID NO: 21261 - DNA, 20 bp, synthetic construct
  misc_feature 1..20: note = Description of Artificial Sequence: Synthetic oligonucleotide
  misc_feature 1..20: note = Target: SCN10A; (-) strand; PAM type: NRG; PAM sequence: TGG
  source 1..20: mol_type = other DNA
acagatgatggagtctttcc

SEQ ID NO: 21262 - DNA, 20 bp, synthetic construct
  misc_feature 1..20: note = Description of Artificial Sequence: Synthetic oligonucleotide
  misc_feature 1..20: note = Target: SCN10A; (-) strand; PAM type: NRG; PAM sequence: GAG
  source 1..20: mol_type = other DNA
tgagggagtcacagatgatg

SEQ ID NO: 21263 - DNA, 20 bp, synthetic construct
  misc_feature 1..20: note = Description of Artificial Sequence: Synthetic oligonucleotide
  misc_feature 1..20: note = Target: SCN10A; (-) strand; PAM type: NRG; PAM sequence: TGG
  source 1..20: mol_type = other DNA
cctgagggagtcacagatga

SEQ ID NO: 21264 - DNA, 20 bp, synthetic construct
  misc_feature 1..20: note = Description of Artificial Sequence: Synthetic oligonucleotide
  misc_feature 1..20: note = Target: SCN10A; (-) strand; PAM type: NRG; PAM sequence: CAG
  source 1..20: mol_type = other DNA
ctcactccctgagggagtca

SEQ ID NO: 21265 - DNA, 20 bp, synthetic construct
  misc_feature 1..20: note = Description of Artificial Sequence: Synthetic oligonucleotide
  misc_feature 1..20: note = Target: SCN10A; (-) strand; PAM type: NRG; PAM sequence: GAG
  source 1..20: mol_type = other DNA
agatatctcactccctgagg

SEQ ID NO: 21266 - DNA, 20 bp, synthetic construct
  misc_feature 1..20: note = Description of Artificial Sequence: Synthetic oligonucleotide
  misc_feature 1..20: note = Target: SCN10A; (-) strand; PAM type: NRG; PAM sequence: GGG
  source 1..20: mol_type = other DNA
cgagatatctcactccctga

SEQ ID NO: 21267 - DNA, 20 bp, synthetic construct
  misc_feature 1..20: note = Description of Artificial Sequence: Synthetic oligonucleotide
  misc_feature 1..20: note = Target: SCN10A; (-) strand; PAM type: NRG; PAM sequence: AGG
  source 1..20: mol_type = other DNA
ccgagatatctcactccctg

SEQ ID NO: 21268 - DNA, 20 bp, synthetic construct
  misc_feature 1..20: note = Description of Artificial Sequence: Synthetic oligonucleotide
  misc_feature 1..20: note = Target: SCN10A; (-) strand; PAM type: NRG; PAM sequence: GAG
  source 1..20: mol_type = other DNA
gccgagatatctcactccct

SEQ ID NO: 21269 - DNA, 20 bp, synthetic construct
  misc_feature 1..20: note = Description of Artificial Sequence: Synthetic oligonucleotide
  misc_feature 1..20: note = Target: SCN10A; (-) strand; PAM type: NRG; PAM sequence: GAG
  source 1..20: mol_type = other DNA
ccatttccggtcccctggcc

SEQ ID NO: 21270 - DNA, 20 bp, synthetic construct
  misc_feature 1..20: note = Description of Artificial Sequence: Synthetic oligonucleotide
  misc_feature 1..20: note = Target: SCN10A; (-) strand; PAM type: NRG; PAM sequence: TGG
  source 1..20: mol_type = other DNA
gtgttccatttccggtcccc

SEQ ID NO: 21271 - DNA, 20 bp, synthetic construct
  misc_feature 1..20: note = Description of Artificial Sequence: Synthetic oligonucleotide
  misc_feature 1..20: note = Target: SCN10A; (-) strand; PAM type: NRG; PAM sequence: CGG
  source 1..20: mol_type = other DNA
atggcagtgtgttccatttc

SEQ ID NO: 21272 - DNA, 20 bp, synthetic construct
  misc_feature 1..20: note = Description of Artificial Sequence: Synthetic oligonucleotide
  misc_feature 1..20: note = Target: SCN10A; (-) strand; PAM type: NRG; PAM sequence: CAG
  source 1..20: mol_type = other DNA
aaacgccgggctagtcatgg

SEQ ID NO: 21273 - DNA, 20 bp, synthetic construct
  misc_feature 1..20: note = Description of Artificial Sequence: Synthetic oligonucleotide
  misc_feature 1..20: note = Target: SCN10A; (-) strand; PAM type: NRG; PAM sequence: TGG
  source 1..20: mol_type = other DNA
ggaaaacgccgggctagtca

SEQ ID NO: 21274 - DNA, 20 bp, synthetic construct
  misc_feature 1..20: note = Description of Artificial Sequence: Synthetic oligonucleotide
  misc_feature 1..20: note = Target: SCN10A; (-) strand; PAM type: NRG; PAM sequence: TAG
  source 1..20: mol_type = other DNA
gcctctggaaaacgccgggc

SEQ ID NO: 21275 - DNA, 20 bp, synthetic construct
  misc_feature 1..20: note = Description of Artificial Sequence: Synthetic oligonucleotide
  misc_feature 1..20: note = Target: SCN10A; (-) strand; PAM type: NRG; PAM sequence: GGG
  source 1..20: mol_type = other DNA
cctcgcctctggaaaacgcc

SEQ ID NO: 21276 - DNA, 20 bp, synthetic construct
  misc_feature 1..20: note = Description of Artificial Sequence: Synthetic oligonucleotide
  misc_feature 1..20: note = Target: SCN10A; (-) strand; PAM type: NRG; PAM sequence: CGG
  source 1..20: mol_type = other DNA
gcctcgcctctggaaaacgc

SEQ ID NO: 21277 - DNA, 20 bp, synthetic construct
  misc_feature 1..20: note = Description of Artificial Sequence: Synthetic oligonucleotide
  misc_feature 1..20: note = Target: SCN10A; (-) strand; PAM type: NRG; PAM sequence: TGG
  source 1..20: mol_type = other DNA
tcttttctaggcctcgcctc

SEQ ID NO: 21278 - DNA, 20 bp, synthetic construct
  misc_feature 1..20: note = Description of Artificial Sequence: Synthetic oligonucleotide
  misc_feature 1..20: note = Target: SCN10A; (-) strand; PAM type: NRG; PAM sequence: AGG
  source 1..20: mol_type = other DNA
ggcaatgcccagtcttttct

SEQ ID NO: 21279 - DNA, 20 bp, synthetic construct
  misc_feature 1..20: note = Description of Artificial Sequence: Synthetic oligonucleotide
  misc_feature 1..20: note = Target: SCN10A; (-) strand; PAM type: NRG; PAM sequence: TAG
  source 1..20: mol_type = other DNA
gggcaatgcccagtcttttc

SEQ ID NO: 21280 - DNA, 20 bp, synthetic construct
  misc_feature 1..20: note = Description of Artificial Sequence: Synthetic oligonucleotide
  misc_feature 1..20: note = Target: SCN10A; (-) strand; PAM type: NRG; PAM sequence: CAG
  source 1..20: mol_type = other DNA
tgctcctttggggcaatgcc

SEQ ID NO: 21281 - DNA, 20 bp, synthetic construct
  misc_feature 1..20: note = Description of Artificial Sequence: Synthetic oligonucleotide
  misc_feature 1..20: note = Target: SCN10A; (-) strand; PAM type: NRG; PAM sequence: GGG
  source 1..20: mol_type = other DNA
ccagccttcttgctcctttg

SEQ ID NO: 21282 - DNA, 20 bp, synthetic construct
  misc_feature 1..20: note = Description of Artificial Sequence: Synthetic oligonucleotide
  misc_feature 1..20: note = Target: SCN10A; (-) strand; PAM type: NRG; PAM sequence: GGG
  source 1..20: mol_type = other DNA
tccagccttcttgctccttt

SEQ ID NO: 21283 - DNA, 20 bp, synthetic construct
  misc_feature 1..20: note = Description of Artificial Sequence: Synthetic oligonucleotide
  misc_feature 1..20: note = Target: SCN10A; (-) strand; PAM type: NRG; PAM sequence: TGG
  source 1..20: mol_type = other DNA
ttccagccttcttgctcctt

SEQ ID NO: 21284 - DNA, 20 bp, synthetic construct
  misc_feature 1..20: note = Description of Artificial Sequence: Synthetic oligonucleotide
  misc_feature 1..20: note = Target: SCN10A; (-) strand; PAM type: NRG; PAM sequence: CAG
  source 1..20: mol_type = other DNA
tttcccagaggaccagtttc

SEQ ID NO: 21285 - DNA, 20 bp, synthetic construct
  misc_feature 1..20: note = Description of Artificial Sequence: Synthetic oligonucleotide
  misc_feature 1..20: note = Target: SCN10A; (-) strand; PAM type: NRG; PAM sequence: CAG
  source 1..20: mol_type = other DNA
ctctagatttcccagaggac

SEQ ID NO: 21286 - DNA, 20 bp, synthetic construct
  misc_feature 1..20: note = Description of Artificial Sequence: Synthetic oligonucleotide
  misc_feature 1..20: note = Target: SCN10A; (-) strand; PAM type: NRG; PAM sequence: AGG
  source 1..20: mol_type = other DNA
ttgggctctagatttcccag

SEQ ID NO: 21287 - DNA, 20 bp, synthetic construct
  misc_feature 1..20: note = Description of Artificial Sequence: Synthetic oligonucleotide
  misc_feature 1..20: note = Target: SCN10A; (-) strand; PAM type: NRG; PAM sequence: GAG
  source 1..20: mol_type = other DNA
gttgggctctagatttccca

SEQ ID NO: 21288 - DNA, 20 bp, synthetic construct
  misc_feature 1..20: note = Description of Artificial Sequence: Synthetic oligonucleotide
  misc_feature 1..20: note = Target: SCN10A; (-) strand; PAM type: NRG; PAM sequence: CAG
  source 1..20: mol_type = other DNA
gtgttgggctctagatttcc

SEQ ID NO: 21289 - DNA, 20 bp, synthetic construct
  misc_feature 1..20: note = Description of Artificial Sequence: Synthetic oligonucleotide
  misc_feature 1..20: note = Target: SCN10A; (-) strand; PAM type: NRG; PAM sequence: TAG
  source 1..20: mol_type = other DNA
tagagggaagtgttgggctc

SEQ ID NO: 21290 - DNA, 20 bp, synthetic construct
  misc_feature 1..20: note = Description of Artificial Sequence: Synthetic oligonucleotide
  misc_feature 1..20: note = Target: SCN10A; (-) strand; PAM type: NRG; PAM sequence: GGG
  source 1..20: mol_type = other DNA
agtaggtagagggaagtgtt

SEQ ID NO: 21291 - DNA, 20 bp, synthetic construct
  misc_feature 1..20: note = Description of Artificial Sequence: Synthetic oligonucleotide
  misc_feature 1..20: note = Target: SCN10A; (-) strand; PAM type: NRG; PAM sequence: TGG
  source 1..20: mol_type = other DNA
gagtaggtagagggaagtgt

SEQ ID NO: 21292 - DNA, 20 bp, synthetic construct
  misc_feature 1..20: note = Description of Artificial Sequence: Synthetic oligonucleotide
  misc_feature 1..20: note = Target: SCN10A; (-) strand; PAM type: NRG; PAM sequence: AAG
  source 1..20: mol_type = other DNA
aaatgggagtaggtagaggg

SEQ ID NO: 21293 - DNA, 20 bp, synthetic construct
  misc_feature 1..20: note = Description of Artificial Sequence: Synthetic oligonucleotide
  misc_feature 1..20: note = Target: SCN10A; (-) strand; PAM type: NRG; PAM sequence: GGG
  source 1..20: mol_type = other DNA
gggaaatgggagtaggtaga

SEQ ID NO: 21294 - DNA, 20 bp, synthetic construct
  misc_feature 1..20: note = Description of Artificial Sequence: Synthetic oligonucleotide
  misc_feature 1..20: note = Target: SCN10A; (-) strand; PAM type: NRG; PAM sequence: AGG
  source 1..20: mol_type = other DNA
agggaaatgggagtaggtag

SEQ ID NO: 21295 - DNA, 20 bp, synthetic construct
  misc_feature 1..20: note = Description of Artificial Sequence: Synthetic oligonucleotide
  misc_feature 1..20: note = Target: SCN10A; (-) strand; PAM type: NRG; PAM sequence: GAG
  source 1..20: mol_type = other DNA
cagggaaatgggagtaggta

SEQ ID NO: 21296 - DNA, 20 bp, synthetic construct
  misc_feature 1..20: note = Description of Artificial Sequence: Synthetic oligonucleotide
  misc_feature 1..20: note = Target: SCN10A; (-) strand; PAM type: NRG; PAM sequence: TAG
  source 1..20: mol_type = other DNA
ggcagggaaatgggagtagg

SEQ ID NO: 21297 - DNA, 20 bp, synthetic construct
  misc_feature 1..20: note = Description of Artificial Sequence: Synthetic oligonucleotide
  misc_feature 1..20: note = Target: SCN10A; (-) strand; PAM type: NRG; PAM sequence: AGG
  source 1..20: mol_type = other DNA
aggggcagggaaatgggagt

SEQ ID NO: 21298 - DNA, 20 bp, synthetic construct
  misc_feature 1..20: note = Description of Artificial Sequence: Synthetic oligonucleotide
  misc_feature 1..20: note = Target: SCN10A; (-) strand; PAM type: NRG; PAM sequence: TAG
  source 1..20: mol_type = other DNA
caggggcagggaaatgggag

SEQ ID NO: 21299 - DNA, 20 bp, synthetic construct
  misc_feature 1..20: note = Description of Artificial Sequence: Synthetic oligonucleotide
  misc_feature 1..20: note = Target: SCN10A; (-) strand; PAM type: NRG; PAM sequence: GAG
  source 1..20: mol_type = other DNA
agacaggggcagggaaatgg

SEQ ID NO: 21300 - DNA, 20 bp, synthetic construct
  misc_feature 1..20: note = Description of Artificial Sequence: Synthetic oligonucleotide
  misc_feature 1..20: note = Target: SCN10A; (-) strand; PAM type: NRG; PAM sequence: GGG
  source 1..20: mol_type = other DNA
aaagacaggggcagggaaat

SEQ ID NO: 21301 - DNA, 20 bp, synthetic construct
  misc_feature 1..20: note = Description of Artificial Sequence: Synthetic oligonucleotide
  misc_feature 1..20: note = Target: SCN10A; (-) strand; PAM type: NRG; PAM sequence: TGG
  source 1..20: mol_type = other DNA
taaagacaggggcagggaaa

SEQ ID NO: 21302 - DNA, 20 bp, synthetic construct
  misc_feature 1..20: note = Description of Artificial Sequence: Synthetic oligonucleotide
  misc_feature 1..20: note = Target: SCN10A; (-) strand; PAM type: NRG; PAM sequence: GGG
  source 1..20: mol_type = other DNA
aggtcataaagacaggggca

SEQ ID NO: 21303 - DNA, 20 bp, synthetic construct
  misc_feature 1..20: note = Description of Artificial Sequence: Synthetic oligonucleotide
  misc_feature 1..20: note = Target: SCN10A; (-) strand; PAM type: NRG; PAM sequence: AGG
  source 1..20: mol_type = other DNA
aaggtcataaagacaggggc

SEQ ID NO: 21304 - DNA, 20 bp, synthetic construct
  misc_feature 1..20: note = Description of Artificial Sequence: Synthetic oligonucleotide
  misc_feature 1..20: note = Target: SCN10A; (-) strand; PAM type: NRG; PAM sequence: CAG
  source 1..20: mol_type = other DNA
aaaggtcataaagacagggg

SEQ ID NO: 21305 - DNA, 20 bp, synthetic construct
  misc_feature 1..20: note = Description of Artificial Sequence: Synthetic oligonucleotide
  misc_feature 1..20: note = Target: SCN10A; (-) strand; PAM type: NRG; PAM sequence: GGG
  source 1..20: mol_type = other DNA
ctgaaaggtcataaagacag

SEQ ID NO: 21306 - DNA, 20 bp, synthetic construct
  misc_feature 1..20: note = Description of Artificial Sequence: Synthetic oligonucleotide
  misc_feature 1..20: note = Target: SCN10A; (-) strand; PAM type: NRG; PAM sequence: GGG
  source 1..20: mol_type = other DNA
actgaaaggtcataaagaca

SEQ ID NO: 21307 - DNA, 20 bp, synthetic construct
  misc_feature 1..20: note = Description of Artificial Sequence: Synthetic oligonucleotide
  misc_feature 1..20: note = Target: SCN10A; (-) strand; PAM type: NRG; PAM sequence: AGG
  source 1..20: mol_type = other DNA
gactgaaaggtcataaagac

SEQ ID NO: 21308 - DNA, 20 bp, synthetic construct
  misc_feature 1..20: note = Description of Artificial Sequence: Synthetic oligonucleotide
  misc_feature 1..20: note = Target: SCN10A; (-) strand; PAM type: NRG; PAM sequence: CAG
  source 1..20: mol_type = other DNA
tgactgaaaggtcataaaga

SEQ ID NO: 21309 - DNA, 20 bp, synthetic construct
  misc_feature 1..20: note = Description of Artificial Sequence: Synthetic oligonucleotide
  misc_feature 1..20: note = Target: SCN10A; (-) strand; PAM type: NRG; PAM sequence: AAG
  source 1..20: mol_type = other DNA
ttagtgactgaaaggtcata

SEQ ID NO: 21310 - DNA, 20 bp, synthetic construct
  misc_feature 1..20: note = Description of Artificial Sequence: Synthetic oligonucleotide
  misc_feature 1..20: note = Target: SCN10A; (-) strand; PAM type: NRG; PAM sequence: AGG
  source 1..20: mol_type = other DNA
gcctttacttagtgactgaa

SEQ ID NO: 21311 - DNA, 20 bp, synthetic construct
  misc_feature 1..20: note = Description of Artificial Sequence: Synthetic oligonucleotide
  misc_feature 1..20: note = Target: SCN10A; (-) strand; PAM type: NRG; PAM sequence: AAG
  source 1..20: mol_type = other DNA
tgcctttacttagtgactga

SEQ ID NO: 21312 - DNA, 20 bp, synthetic construct
  misc_feature 1..20: note = Description of Artificial Sequence: Synthetic oligonucleotide
  misc_feature 1..20: note = Target: SCN10A; (-) strand; PAM type: NRG; PAM sequence: TAG
  source 1..20: mol_type = other DNA
cttagatttgtgcctttact

SEQ ID NO: 21313 - DNA, 20 bp, synthetic construct
  misc_feature 1..20: note = Description of Artificial Sequence: Synthetic oligonucleotide
  misc_feature 1..20: note = Target: SCN10A; (-) strand; PAM type: NRG; PAM sequence: TAG
  source 1..20: mol_type = other DNA
tgcatacctagaatacccct

SEQ ID NO: 21314 - DNA, 20 bp, synthetic construct
  misc_feature 1..20: note = Description of Artificial Sequence: Synthetic oligonucleotide
  misc_feature 1..20: note = Target: SCN10A; (-) strand; PAM type: NRG; PAM sequence: TAG
  source 1..20: mol_type = other DNA
ttttccccaccatgcatacc

SEQ ID NO: 21315 - DNA, 20 bp, synthetic construct
  misc_feature 1..20: note = Description of Artificial Sequence: Synthetic oligonucleotide
  misc_feature 1..20: note = Target: SCN10A; (-) strand; PAM type: NRG; PAM sequence: GAG
  source 1..20: mol_type = other DNA
tctttcccggagtctatcta

SEQ ID NO: 21316 - DNA, 20 bp, synthetic construct
  misc_feature 1..20: note = Description of Artificial Sequence: Synthetic oligonucleotide
  misc_feature 1..20: note = Target: SCN10A; (-) strand; PAM type: NRG; PAM sequence: TAG
  source 1..20: mol_type = other DNA
ggtctttcccggagtctatc

SEQ ID NO: 21317 - DNA, 20 bp, synthetic construct
  misc_feature 1..20: note = Description of Artificial Sequence: Synthetic oligonucleotide
  misc_feature 1..20: note = Target: SCN10A; (-) strand; PAM type: NRG; PAM sequence: GAG
  source 1..20: mol_type = other DNA
ctctctcctggtctttcccg

SEQ ID NO: 21318 - DNA, 20 bp, synthetic construct
  misc_feature 1..20: note = Description of Artificial Sequence: Synthetic oligonucleotide
  misc_feature 1..20: note = Target: SCN10A; (-) strand; PAM type: NRG; PAM sequence: CGG
  source 1..20: mol_type = other DNA
tcctctctcctggtctttcc

SEQ ID NO: 21319 - DNA, 20 bp, synthetic construct
  misc_feature 1..20: note = Description of Artificial Sequence: Synthetic oligonucleotide
  misc_feature 1..20: note = Target: SCN10A; (-) strand; PAM type: NRG; PAM sequence: TGG
  source 1..20: mol_type = other DNA
ctgtaatctctcctctctcc

SEQ ID NO: 21320 - DNA, 20 bp, synthetic construct
  misc_feature 1..20: note = Description of Artificial Sequence: Synthetic oligonucleotide
  misc_feature 1..20: note = Target: SCN10A; (-) strand; PAM type: NRG; PAM sequence: CAG
  source 1..20: mol_type = other DNA
ataacctatttgctgagcat

SEQ ID NO: 21321 - DNA, 20 bp, synthetic construct
  misc_feature 1..20: note = Description of Artificial Sequence: Synthetic oligonucleotide
  misc_feature 1..20: note = Target: SCN10A; (-) strand; PAM type: NRG; PAM sequence: GAG
  source 1..20: mol_type = other DNA
accatgataacctatttgct

SEQ ID NO: 21322 - DNA, 20 bp, synthetic construct
  misc_feature 1..20: note = Description of Artificial Sequence: Synthetic oligonucleotide
  misc_feature 1..20: note = Target: SCN10A; (-) strand; PAM type: NRG; PAM sequence: AGG
  source 1..20: mol_type = other DNA
actgaactatccaggtgaca

SEQ ID NO: 21323 - DNA, 20 bp, synthetic construct
  misc_feature 1..20: note = Description of Artificial Sequence: Synthetic oligonucleotide
  misc_feature 1..20: note = Target: SCN10A; (-) strand; PAM type: NRG; PAM sequence: AAG
  source 1..20: mol_type = other DNA
aactgaactatccaggtgac

SEQ ID NO: 21324 - DNA, 20 bp, synthetic construct
  misc_feature 1..20: note = Description of Artificial Sequence: Synthetic oligonucleotide
  misc_feature 1..20: note = Target: SCN10A; (-) strand; PAM type: NRG; PAM sequence: AGG
  source 1..20: mol_type = other DNA
ggcaatcaactgaactatcc

SEQ ID NO: 21325 - DNA, 20 bp, synthetic construct
  misc_feature 1..20: note = Description of Artificial Sequence: Synthetic oligonucleotide
  misc_feature 1..20: note = Target: SCN10A; (-) strand; PAM type: NRG; PAM sequence: CAG
  source 1..20: mol_type = other DNA
tggcaatcaactgaactatc

SEQ ID NO: 21326 - DNA, 20 bp, synthetic construct
  misc_feature 1..20: note = Description of Artificial Sequence: Synthetic oligonucleotide
  misc_feature 1..20: note = Target: SCN10A; (-) strand; PAM type: NRG; PAM sequence: TGG
  source 1..20: mol_type = other DNA
ctagccctgtggccaaaggt

SEQ ID NO: 21327 - DNA, 20 bp, synthetic construct
  misc_feature 1..20: note = Description of Artificial Sequence: Synthetic oligonucleotide
  misc_feature 1..20: note = Target: SCN10A; (-) strand; PAM type: NRG; PAM sequence: AGG
  source 1..20: mol_type = other DNA
ttgtctagccctgtggccaa

SEQ ID NO: 21328 - DNA, 20 bp, synthetic construct
  misc_feature 1..20: note = Description of Artificial Sequence: Synthetic oligonucleotide
  misc_feature 1..20: note = Target: SCN10A; (-) strand; PAM type: NRG; PAM sequence: AAG
  source 1..20: mol_type = other DNA
tttgtctagccctgtggcca

SEQ ID NO: 21329 - DNA, 20 bp, synthetic construct
  misc_feature 1..20: note = Description of Artificial Sequence: Synthetic oligonucleotide
  misc_feature 1..20: note = Target: SCN10A; (-) strand; PAM type: NRG; PAM sequence: TGG
  source 1..20: mol_type = other DNA
gacagctttgtctagccctg

SEQ ID NO: 21330 - DNA, 20 bp, synthetic construct
  misc_feature 1..20: note = Description of Artificial Sequence: Synthetic oligonucleotide
  misc_feature 1..20: note = Target: SCN10A; (-) strand; PAM type: NRG; PAM sequence: TAG
  source 1..20: mol_type = other DNA
gaacttaggacagctttgtc

SEQ ID NO: 21331 - DNA, 20 bp, synthetic construct
  misc_feature 1..20: note = Description of Artificial Sequence: Synthetic oligonucleotide
  misc_feature 1..20: note = Target: SCN10A; (-) strand; PAM type: NRG; PAM sequence: CAG
  source 1..20: mol_type = other DNA
gtggaaaagtgaacttagga

SEQ ID NO: 21332 - DNA, 20 bp, synthetic construct
  misc_feature 1..20: note = Description of Artificial Sequence: Synthetic oligonucleotide
  misc_feature 1..20: note = Target: SCN10A; (-) strand; PAM type: NRG; PAM sequence: AGG
  source 1..20: mol_type = other DNA
gcatgtggaaaagtgaactt

SEQ ID NO: 21333 - DNA, 20 bp, synthetic construct
  misc_feature 1..20: note = Description of Artificial Sequence: Synthetic oligonucleotide
  misc_feature 1..20: note = Target: SCN10A; (-) strand; PAM type: NRG; PAM sequence: TAG
  source 1..20: mol_type = other DNA
tgcatgtggaaaagtgaact

SEQ ID NO: 21334 - DNA, 20 bp, synthetic construct
  misc_feature 1..20: note = Description of Artificial Sequence: Synthetic oligonucleotide
  misc_feature 1..20: note = Target: SCN10A; (-) strand; PAM type: NRG; PAM sequence: AAG
  source 1..20: mol_type = other DNA
tcacaactttgcatgtggaa

SEQ ID NO: 21335 - DNA, 20 bp, synthetic construct
  misc_feature 1..20: note = Description of Artificial Sequence: Synthetic oligonucleotide
  misc_feature 1..20: note = Target: SCN10A; (-) strand; PAM type: NRG; PAM sequence: TGG
  source 1..20: mol_type = other DNA
ttaggtcacaactttgcatg

SEQ ID NO: 21336 - DNA, 20 bp, synthetic construct
  misc_feature 1..20: note = Description of Artificial Sequence: Synthetic oligonucleotide
  misc_feature 1..20: note = Target: SCN10A; (-) strand; PAM type: NRG; PAM sequence: AGG
  source 1..20: mol_type = other DNA
gtgtgcatagtagcctcctt

SEQ ID NO: 21337 - DNA, 20 bp, synthetic construct
  misc_feature 1..20: note = Description of Artificial Sequence: Synthetic oligonucleotide
  misc_feature 1..20: note = Target: SCN10A; (-) strand; PAM type: NRG; PAM sequence: TAG
  source 1..20: mol_type = other DNA
ggtgtgcatagtagcctcct

SEQ ID NO: 21338 - DNA, 20 bp, synthetic construct
  misc_feature 1..20: note = Description of Artificial Sequence: Synthetic oligonucleotide
  misc_feature 1..20: note = Target: SCN10A; (-) strand; PAM type: NRG; PAM sequence: TAG
  source 1..20: mol_type = other DNA
tccagtactggtgtgcatag

SEQ ID NO: 21339 - DNA, 20 bp, synthetic construct
  misc_feature 1..20: note = Description of Artificial Sequence: Synthetic oligonucleotide
  misc_feature 1..20: note = Target: SCN10A; (-) strand; PAM type: NRG; PAM sequence: TAG
  source 1..20: mol_type = other DNA
tgttccagtactggtgtgca

SEQ ID NO: 21340 - DNA, 20 bp, synthetic construct
  misc_feature 1..20: note = Description of Artificial Sequence: Synthetic oligonucleotide
  misc_feature 1..20: note = Target: SCN10A; (-) strand; PAM type: NRG; PAM sequence: TGG
  source 1..20: mol_type = other DNA
taccaagtatgttccagtac

SEQ ID NO: 21341 - DNA, 20 bp, synthetic construct
  misc_feature 1..20: note = Description of Artificial Sequence: Synthetic oligonucleotide
  misc_feature 1..20: note = Target: SCN10A; (-) strand; PAM type: NRG; PAM sequence: CAG
  source 1..20: mol_type = other DNA
accacttaccaagtatgttc

SEQ ID NO: 21342 - DNA, 20 bp, synthetic construct
  misc_feature 1..20: note = Description of Artificial Sequence: Synthetic oligonucleotide
  misc_feature 1..20: note = Target: SCN10A; (-) strand; PAM type: NRG; PAM sequence: AAG
  source 1..20: mol_type = other DNA
tcattcaacaaccacttacc

SEQ ID NO: 21343 - DNA, 20 bp, synthetic construct
  misc_feature 1..20: note = Description of Artificial Sequence: Synthetic oligonucleotide
  misc_feature 1..20: note = Target: SCN10A; (-) strand; PAM type: NRG; PAM sequence: AAG
  source 1..20: mol_type = other DNA
tacctaattttcagacaatg

SEQ ID NO: 21344 - DNA, 20 bp, synthetic construct
  misc_feature 1..20: note = Description of Artificial Sequence: Synthetic oligonucleotide
  misc_feature 1..20: note = Target: SCN10A; (-) strand; PAM type: NRG; PAM sequence: CAG
  source 1..20: mol_type = other DNA
gaattgtactacctaatttt

SEQ ID NO: 21345 - DNA, 20 bp, synthetic construct
  misc_feature 1..20: note = Description of Artificial Sequence: Synthetic oligonucleotide
  misc_feature 1..20: note = Target: SCN10A; (-) strand; PAM type: NRG; PAM sequence: GGG
  source 1..20: mol_type = other DNA
actctcacattcatacagat

SEQ ID NO: 21346 - DNA, 20 bp, synthetic construct
  misc_feature 1..20: note = Description of Artificial Sequence: Synthetic oligonucleotide
  misc_feature 1..20: note = Target: SCN10A; (-) strand; PAM type: NRG; PAM sequence: TGG
  source 1..20: mol_type = other DNA
aactctcacattcatacaga

SEQ ID NO: 21347 - DNA, 20 bp, synthetic construct
  misc_feature 1..20: note = Description of Artificial Sequence: Synthetic oligonucleotide
  misc_feature 1..20: note = Target: SCN10A; (-) strand; PAM type: NRG; PAM sequence: CAG
  source 1..20: mol_type = other DNA
cacaaactctcacattcata

SEQ ID NO: 21348 - DNA, 20 bp, synthetic construct
  misc_feature 1..20: note = Description of Artificial Sequence: Synthetic oligonucleotide
  misc_feature 1..20: note = Target: SCN10A; (-) strand; PAM type: NRG; PAM sequence: CAG
  source 1..20: mol_type = other DNA
tagaaactcattgcactgta

SEQ ID NO: 21349 - DNA, 20 bp, synthetic construct
  misc_feature 1..20: note = Description of Artificial Sequence: Synthetic oligonucleotide
  misc_feature 1..20: note = Target: SCN10A; (-) strand; PAM type: NRG; PAM sequence: TAG
  source 1..20: mol_type = other DNA
gttcaagcctcgagggatcc

SEQ ID NO: 21350 - DNA, 20 bp, synthetic construct
  misc_feature 1..20: note = Description of Artificial Sequence: Synthetic oligonucleotide
  misc_feature 1..20: note = Target: SCN10A; (-) strand; PAM type: NRG; PAM sequence: GGG
  source 1..20: mol_type = other DNA
gttgactgttcaagcctcga

SEQ ID NO: 21351 - DNA, 20 bp, synthetic construct
  misc_feature 1..20: note = Description of Artificial Sequence: Synthetic oligonucleotide
  misc_feature 1..20: note = Target: SCN10A; (-) strand; PAM type: NRG; PAM sequence: AGG
  source 1..20: mol_type = other DNA
tgttgactgttcaagcctcg

SEQ ID NO: 21352 - DNA, 20 bp, synthetic construct
  misc_feature 1..20: note = Description of Artificial Sequence: Synthetic oligonucleotide
  misc_feature 1..20: note = Target: SCN10A; (-) strand; PAM type: NRG; PAM sequence: GAG
  source 1..20: mol_type = other DNA
ttgttgactgttcaagcctc

SEQ ID NO: 21353 - DNA, 20 bp, synthetic construct
  misc_feature 1..20: note = Description of Artificial Sequence: Synthetic oligonucleotide
  misc_feature 1..20: note = Target: SCN10A; (-) strand; PAM type: NRG; PAM sequence: AAG
  source 1..20: mol_type = other DNA
ctctccattgttgactgttc

SEQ ID NO: 21354 - DNA, 20 bp, synthetic construct
  misc_feature 1..20: note = Description of Artificial Sequence: Synthetic oligonucleotide
  misc_feature 1..20: note = Target: SCN10A; (-) strand; PAM type: NRG; PAM sequence: CAG
  source 1..20: mol_type = other DNA
ttaggctgcaacccttcctt

SEQ ID NO: 21355 - DNA, 20 bp, synthetic construct
  misc_feature 1..20: note = Description of Artificial Sequence: Synthetic oligonucleotide
  misc_feature 1..20: note = Target: SCN10A; (-) strand; PAM type: NRG; PAM sequence: AGG
  source 1..20: mol_type = other DNA
cattattcttccaggaaatt

SEQ ID NO: 21356 - DNA, 20 bp, synthetic construct
  misc_feature 1..20: note = Description of Artificial Sequence: Synthetic oligonucleotide
  misc_feature 1..20: note = Target: SCN10A; (-) strand; PAM type: NRG; PAM sequence: TAG
  source 1..20: mol_type = other DNA
acattattcttccaggaaat

SEQ ID NO: 21357 - DNA, 20 bp, synthetic construct
  misc_feature 1..20: note = Description of Artificial Sequence: Synthetic oligonucleotide
  misc_feature 1..20: note = Target: SCN10A; (-) strand; PAM type: NRG; PAM sequence: AGG
  source 1..20: mol_type = other DNA
aggaatgacattattcttcc

SEQ ID NO: 21358 - DNA, 20 bp, synthetic construct
  misc_feature 1..20: note = Description of Artificial Sequence: Synthetic oligonucleotide
  misc_feature 1..20: note = Target: SCN10A; (-) strand; PAM type: NRG; PAM sequence: CAG
  source 1..20: mol_type = other DNA
gaggaatgacattattcttc

SEQ ID NO: 21359 - DNA, 20 bp, synthetic construct
  misc_feature 1..20: note = Description of Artificial Sequence: Synthetic oligonucleotide
  misc_feature 1..20: note = Target: SCN10A; (-) strand; PAM type: NRG; PAM sequence: AGG
  source 1..20: mol_type = other DNA
ggaaatgtttattgatttgg

SEQ ID NO: 21360 - DNA, 20 bp, synthetic construct
  misc_feature 1..20: note = Description of Artificial Sequence: Synthetic oligonucleotide
  misc_feature 1..20: note = Target: SCN10A; (-) strand; PAM type: NRG; PAM sequence: GAG
  source 1..20: mol_type = other DNA
gggaaatgtttattgatttg

SEQ ID NO: 21361 - DNA, 20 bp, synthetic construct
  misc_feature 1..20: note = Description of Artificial Sequence: Synthetic oligonucleotide
  misc_feature 1..20: note = Target: SCN10A; (-) strand; PAM type: NRG; PAM sequence: TGG
  source 1..20: mol_type = other DNA
atgggaaatgtttattgatt

SEQ ID NO: 21362 - DNA, 20 bp, synthetic construct
  misc_feature 1..20: note = Description of Artificial Sequence: Synthetic oligonucleotide
  misc_feature 1..20: note = Target: SCN10A; (-) strand; PAM type: NRG; PAM sequence: GGG
  source 1..20: mol_type = other DNA
cctcaatggaagattttgat

SEQ ID NO: 21363 - DNA, 20 bp, synthetic construct
  misc_feature 1..20: note = Description of Artificial Sequence: Synthetic oligonucleotide
  misc_feature 1..20: note = Target: SCN10A; (-) strand; PAM type: NRG; PAM sequence: TGG
  source 1..20: mol_type = other DNA
ccctcaatggaagattttga

SEQ ID NO: 21364 - DNA, 20 bp, synthetic construct
  misc_feature 1..20: note = Description of Artificial Sequence: Synthetic oligonucleotide
  misc_feature 1..20: note = Target: SCN10A; (-) strand; PAM type: NRG; PAM sequence: AAG
  source 1..20: mol_type = other DNA
ccacacagttccctcaatgg

SEQ ID NO: 21365 - DNA, 20 bp, synthetic construct
  misc_feature 1..20: note = Description of Artificial Sequence: Synthetic oligonucleotide
  misc_feature 1..20: note = Target: SCN10A; (-) strand; PAM type: NRG; PAM sequence: TGG
  source 1..20: mol_type = other DNA
aagccacacagttccctcaa

SEQ ID NO: 21366 - DNA, 20 bp, synthetic construct
  misc_feature 1..20: note = Description of Artificial Sequence: Synthetic oligonucleotide
  misc_feature 1..20: note = Target: SCN10A; (-) strand; PAM type: NRG; PAM sequence: CAG
  source 1..20: mol_type = other DNA
tctggcaactttaagccaca

SEQ ID NO: 21367 - DNA, 20 bp, synthetic construct
  misc_feature 1..20: note = Description of Artificial Sequence: Synthetic oligonucleotide
  misc_feature 1..20: note = Target: SCN10A; (-) strand; PAM type: NRG; PAM sequence: AAG
  source 1..20: mol_type = other DNA
ctcttttctctggcaacttt

SEQ ID NO: 21368 - DNA, 20 bp, synthetic construct
  misc_feature 1..20: note = Description of Artificial Sequence: Synthetic oligonucleotide
  misc_feature 1..20: note = Target: SCN10A; (-) strand; PAM type: NRG; PAM sequence: TGG
  source 1..20: mol_type = other DNA
tatgaattagctcttttctc

SEQ ID NO: 21369 - DNA, 20 bp, synthetic construct
  misc_feature 1..20: note = Description of Artificial Sequence: Synthetic oligonucleotide
  misc_feature 1..20: note = Target: SCN10A; (-) strand; PAM type: NRG; PAM sequence: TAG
  source 1..20: mol_type = other DNA
agggctctgggtttatgaat

SEQ ID NO: 21370 - DNA, 20 bp, synthetic construct
  misc_feature 1..20: note = Description of Artificial Sequence: Synthetic oligonucleotide
  misc_feature 1..20: note = Target: SCN10A; (-) strand; PAM type: NRG; PAM sequence: GGG
  source 1..20: mol_type = other DNA
actaattctctgagggctct

SEQ ID NO: 21371 - DNA, 20 bp, synthetic construct
  misc_feature 1..20: note = Description of Artificial Sequence: Synthetic oligonucleotide
  misc_feature 1..20: note = Target: SCN10A; (-) strand; PAM type: NRG; PAM sequence: TGG
  source 1..20: mol_type = other DNA
cactaattctctgagggctc

SEQ ID NO: 21372 - DNA, 20 bp, synthetic construct
  misc_feature 1..20: note = Description of Artificial Sequence: Synthetic oligonucleotide
  misc_feature 1..20: note = Target: SCN10A; (-) strand; PAM type: NRG; PAM sequence: GGG
  source 1..20: mol_type = other DNA
ccagcacactaattctctga

SEQ ID NO: 21373 - DNA, 20 bp, synthetic construct
  misc_feature 1..20: note = Description of Artificial Sequence: Synthetic oligonucleotide
  misc_feature 1..20: note = Target: SCN10A; (-) strand; PAM type: NRG; PAM sequence: AGG
  source 1..20: mol_type = other DNA
cccagcacactaattctctg

SEQ ID NO: 21374 - DNA, 20 bp, synthetic construct
  misc_feature 1..20: note = Description of Artificial Sequence: Synthetic oligonucleotide
  misc_feature 1..20: note = Target: SCN10A; (-) strand; PAM type: NRG; PAM sequence: GAG
  source 1..20: mol_type = other DNA
acccagcacactaattctct

SEQ ID NO: 21375 - DNA, 20 bp, synthetic construct
  misc_feature 1..20: note = Description of Artificial Sequence: Synthetic oligonucleotide
  misc_feature 1..20: note = Target: SCN10A; (-) strand; PAM type: NRG; PAM sequence: CAG
  source 1..20: mol_type = other DNA
gtcatgggaactacctaacc

SEQ ID NO: 21376 - DNA, 20 bp, synthetic construct
  misc_feature 1..20: note = Description of Artificial Sequence: Synthetic oligonucleotide
  misc_feature 1..20: note = Target: SCN10A; (-) strand; PAM type: NRG; PAM sequence: GGG
  source 1..20: mol_type = other DNA
tcaagtttcactatggtcat

SEQ ID NO: 21377 - DNA, 20 bp, synthetic construct
  misc_feature 1..20: note = Description of Artificial Sequence: Synthetic oligonucleotide
  misc_feature 1..20: note = Target: SCN10A; (-) strand; PAM type: NRG; PAM sequence: TGG
  source 1..20: mol_type = other DNA
gtcaagtttcactatggtca

SEQ ID NO: 21378 - DNA, 20 bp, synthetic construct
  misc_feature 1..20: note = Description of Artificial Sequence: Synthetic oligonucleotide
  misc_feature 1..20: note = Target: SCN10A; (-) strand; PAM type: NRG; PAM sequence: TGG
  source 1..20: mol_type = other DNA
attatggtcaagtttcacta

SEQ ID NO: 21379 - DNA, 20 bp, synthetic construct
  misc_feature 1..20: note = Description of Artificial Sequence: Synthetic oligonucleotide
  misc_feature 1..20: note = Target: SCN10A; (-) strand; PAM type: NRG; PAM sequence: AAG
  source 1..20: mol_type = other DNA
aatgatggtttattatggtc

SEQ ID NO: 21380 - DNA, 20 bp, synthetic construct
  misc_feature 1..20: note = Description of Artificial Sequence: Synthetic oligonucleotide
  misc_feature 1..20: note = Target: SCN10A; (-) strand; PAM type: NRG; PAM sequence: TGG
  source 1..20: mol_type = other DNA
acacaaatgatggtttatta

SEQ ID NO: 21381 - DNA, 20 bp, synthetic construct
  misc_feature 1..20: note = Description of Artificial Sequence: Synthetic oligonucleotide
  misc_feature 1..20: note = Target: SCN10A; (-) strand; PAM type: NRG; PAM sequence: TGG
  source 1..20: mol_type = other DNA
ccacctgaggacacaaatga

SEQ ID NO: 21382 - DNA, 20 bp, synthetic construct
  misc_feature 1..20: note = Description of Artificial Sequence: Synthetic oligonucleotide
  misc_feature 1..20: note = Target: SCN10A; (-) strand; PAM type: NRG; PAM sequence: AGG
  source 1..20: mol_type = other DNA
tacatactatagaccacctg

SEQ ID NO: 21383 - DNA, 20 bp, synthetic construct
  misc_feature 1..20: note = Description of Artificial Sequence: Synthetic oligonucleotide
  misc_feature 1..20: note = Target: SCN10A; (-) strand; PAM type: NRG; PAM sequence: GAG
  source 1..20: mol_type = other DNA
gtacatactatagaccacct

SEQ ID NO: 21384 - DNA, 20 bp, synthetic construct
  misc_feature 1..20: note = Description of Artificial Sequence: Synthetic oligonucleotide
  misc_feature 1..20: note = Target: SCN10A; (-) strand; PAM type: NRG; PAM sequence: TAG
  source 1..20: mol_type = other DNA
tttagattttgtacatacta

SEQ ID NO: 21385 - DNA, 20 bp, synthetic construct
  misc_feature 1..20: note = Description of Artificial Sequence: Synthetic oligonucleotide
  misc_feature 1..20: note = Target: SCN10A; (-) strand; PAM type: NRG; PAM sequence: TAG
  source 1..20: mol_type = other DNA
tttggtatgaagtcaatgtt

SEQ ID NO: 21386 - DNA, 20 bp, synthetic construct
  misc_feature 1..20: note = Description of Artificial Sequence: Synthetic oligonucleotide
  misc_feature 1..20: note = Target: SCN10A; (-) strand; PAM type: NRG; PAM sequence: AAG
  source 1..20: mol_type = other DNA
tatgatcagagtttggtatg

SEQ ID NO: 21387 - DNA, 20 bp, synthetic construct
  misc_feature 1..20: note = Description of Artificial Sequence: Synthetic oligonucleotide
  misc_feature 1..20: note = Target: SCN10A; (-) strand; PAM type: NRG; PAM sequence: TGG
  source 1..20: mol_type = other DNA
aaatcggtatgatcagagtt

SEQ ID NO: 21388 - DNA, 20 bp, synthetic construct
  misc_feature 1..20: note = Description of Artificial Sequence: Synthetic oligonucleotide
  misc_feature 1..20: note = Target: SCN10A; (-) strand; PAM type: NRG; PAM sequence: GAG
  source 1..20: mol_type = other DNA
ggaataaatcggtatgatca

SEQ ID NO: 21389 - DNA, 20 bp, synthetic construct
  misc_feature 1..20: note = Description of Artificial Sequence: Synthetic oligonucleotide
  misc_feature 1..20: note = Target: SCN10A; (-) strand; PAM type: NRG; PAM sequence: CAG
  source 1..20: mol_type = other DNA
gtggaataaatcggtatgat

SEQ ID NO: 21390 - DNA, 20 bp, synthetic construct
  misc_feature 1..20: note = Description of Artificial Sequence: Synthetic oligonucleotide
  misc_feature 1..20: note = Target: SCN10A; (-) strand; PAM type: NRG; PAM sequence: CGG
  source 1..20: mol_type = other DNA
ggaaggtgagtggaataaat

SEQ ID NO: 21391 - DNA, 20 bp, synthetic construct
  misc_feature 1..20: note = Description of Artificial Sequence: Synthetic oligonucleotide
  misc_feature 1..20: note = Target: SCN10A; (-) strand; PAM type: NRG; PAM sequence: TGG
  source 1..20: mol_type = other DNA
aaggagttaaggaaggtgag

SEQ ID NO: 21392 - DNA, 20 bp, synthetic construct
  misc_feature 1..20: note = Description of Artificial Sequence: Synthetic oligonucleotide
  misc_feature 1..20: note = Target: SCN10A; (-) strand; PAM type: NRG; PAM sequence: GAG
  source 1..20: mol_type = other DNA
aaaaaggagttaaggaaggt

SEQ ID NO: 21393 - DNA, 20 bp, synthetic construct
  misc_feature 1..20: note = Description of Artificial Sequence: Synthetic oligonucleotide
  misc_feature 1..20: note = Target: SCN10A; (-) strand; PAM type: NRG; PAM sequence: AGG
  source 1..20: mol_type = other DNA
taataaaaaggagttaagga

SEQ ID NO: 21394 - DNA, 20 bp, synthetic construct
  misc_feature 1..20: note = Description of Artificial Sequence: Synthetic oligonucleotide
  misc_feature 1..20: note = Target: SCN10A; (-) strand; PAM type: NRG; PAM sequence: AAG
  source 1..20: mol_type = other DNA
gtaataaaaaggagttaagg

SEQ ID NO: 21395 - DNA, 20 bp, synthetic construct
  misc_feature 1..20: note = Description of Artificial Sequence: Synthetic oligonucleotide
  misc_feature 1..20: note = Target: SCN10A; (-) strand; PAM type: NRG; PAM sequence: AGG
  source 1..20: mol_type = other DNA
ttagtaataaaaaggagtta

SEQ ID NO: 21396 - DNA, 20 bp, synthetic construct
  misc_feature 1..20: note = Description of Artificial Sequence: Synthetic oligonucleotide
  misc_feature 1..20: note = Target: SCN10A; (-) strand; PAM type: NRG; PAM sequence: AAG
  source 1..20: mol_type = other DNA
cttagtaataaaaaggagtt

SEQ ID NO: 21397 - DNA, 20 bp, synthetic construct
  misc_feature 1..20: note = Description of Artificial Sequence: Synthetic oligonucleotide
  misc_feature 1..20: note = Target: SCN10A; (-) strand; PAM type: NRG; PAM sequence: GAG
  source 1..20: mol_type = other DNA
agtagcttagtaataaaaag

SEQ ID NO: 21398 - DNA, 20 bp, synthetic construct
  misc_feature 1..20: note = Description of Artificial Sequence: Synthetic oligonucleotide
  misc_feature 1..20: note = Target: SCN10A; (-) strand; PAM type: NRG; PAM sequence: AGG
  source 1..20: mol_type = other DNA
ttagtagcttagtaataaaa

SEQ ID NO: 21399 - DNA, 20 bp, synthetic construct
  misc_feature 1..20: note = Description of Artificial Sequence: Synthetic oligonucleotide
  misc_feature 1..20: note = Target: SCN10A; (-) strand; PAM type: NRG; PAM sequence: AAG
  source 1..20: mol_type = other DNA
tttagtagcttagtaataaa

SEQ ID NO: 21400 - DNA, 20 bp, synthetic construct
  misc_feature 1..20: note = Description of Artificial Sequence: Synthetic oligonucleotide
  misc_feature 1..20: note = Target: SCN10A; (-) strand; PAM type: NRG; PAM sequence: TAG
  source 1..20: mol_type = other DNA
gattctccactttagtagct

SEQ ID NO: 21401 - DNA, 20 bp, synthetic construct
  misc_feature 1..20: note = Description of Artificial Sequence: Synthetic oligonucleotide
  misc_feature 1..20: note = Target: SCN10A; (-) strand; PAM type: NRG; PAM sequence: TAG
  source 1..20: mol_type = other DNA
ggcaagattctccactttag

SEQ ID NO: 21402 - DNA, 20 bp, synthetic construct
  misc_feature 1..20: note = Description of Artificial Sequence: Synthetic oligonucleotide
  misc_feature 1..20: note = Target: SCN10A; (-) strand; PAM type: NRG; PAM sequence: TAG
  source 1..20: mol_type = other DNA
attggcaagattctccactt

SEQ ID NO: 21403 - DNA, 20 bp, synthetic construct
  misc_feature 1..20: note = Description of Artificial Sequence: Synthetic oligonucleotide
  misc_feature 1..20: note = Target: SCN10A; (-) strand; PAM type: NRG; PAM sequence: AAG
  source 1..20: mol_type = other DNA
taaggagaaccccaattggc

SEQ ID NO: 21404 - DNA, 20 bp, synthetic construct
  misc_feature 1..20: note = Description of Artificial Sequence: Synthetic oligonucleotide
  misc_feature 1..20: note = Target: SCN10A; (-) strand; PAM type: NRG; PAM sequence: TGG
  source 1..20: mol_type = other DNA
ttagtaaggagaaccccaat

SEQ ID NO: 21405 - DNA, 20 bp, synthetic construct
  misc_feature 1..20: note = Description of Artificial Sequence: Synthetic oligonucleotide
  misc_feature 1..20: note = Target: SCN10A; (-) strand; PAM type: NRG; PAM sequence: GAG
  source 1..20: mol_type = other DNA
gagataaggggattagtaag

SEQ ID NO: 21406 - DNA, 20 bp, synthetic construct
  misc_feature 1..20: note = Description of Artificial Sequence: Synthetic oligonucleotide
  misc_feature 1..20: note = Target: SCN10A; (-) strand; PAM type: NRG; PAM sequence: AGG
  source 1..20: mol_type = other DNA
gtgagataaggggattagta

SEQ ID NO: 21407 - DNA, 20 bp, synthetic construct
  misc_feature 1..20: note = Description of Artificial Sequence: Synthetic oligonucleotide
  misc_feature 1..20: note = Target: SCN10A; (-) strand; PAM type: NRG; PAM sequence: AAG
  source 1..20: mol_type = other DNA
tgtgagataaggggattagt

SEQ ID NO: 21408 - DNA, 20 bp, synthetic construct
  misc_feature 1..20: note = Description of Artificial Sequence: Synthetic oligonucleotide
  misc_feature 1..20: note = Target: SCN10A; (-) strand; PAM type: NRG; PAM sequence: TAG
  source 1..20: mol_type = other DNA
gttctgtgagataaggggat

SEQ ID NO: 21409 - DNA, 20 bp, synthetic construct
  misc_feature 1..20: note = Description of Artificial Sequence: Synthetic oligonucleotide
  misc_feature 1..20: note = Target: SCN10A; (-) strand; PAM type: NRG; PAM sequence: GGG
  source 1..20: mol_type = other DNA
cttcagttctgtgagataag

SEQ ID NO: 21410 - DNA, 20 bp, synthetic construct
  misc_feature 1..20: note = Description of Artificial Sequence: Synthetic oligonucleotide
  misc_feature 1..20: note = Target: SCN10A; (-) strand; PAM type: NRG; PAM sequence: GGG
  source 1..20: mol_type = other DNA
acttcagttctgtgagataa

SEQ ID NO: 21411 - DNA, 20 bp, synthetic construct
  misc_feature 1..20: note = Description of Artificial Sequence: Synthetic oligonucleotide
  misc_feature 1..20: note = Target: SCN10A; (-) strand; PAM type: NRG; PAM sequence: AGG
  source 1..20: mol_type = other DNA
aacttcagttctgtgagata

SEQ ID NO: 21412 - DNA, 20 bp, synthetic construct
  misc_feature 1..20: note = Description of Artificial Sequence: Synthetic oligonucleotide
  misc_feature 1..20: note = Target: SCN10A; (-) strand; PAM type: NRG; PAM sequence: AAG
  source 1..20: mol_type = other DNA
aaacttcagttctgtgagat

SEQ ID NO: 21413 - DNA, 20 bp, synthetic construct
  misc_feature 1..20: note = Description of Artificial Sequence: Synthetic oligonucleotide
  misc_feature 1..20: note = Target: SCN10A; (-) strand; PAM type: NRG; PAM sequence: GAG
  source 1..20: mol_type = other DNA
agaggaaacttcagttctgt

SEQ ID NO: 21414 - DNA, 20 bp, synthetic construct
  misc_feature 1..20: note = Description of Artificial Sequence: Synthetic oligonucleotide
  misc_feature 1..20: note = Target: SCN10A; (-) strand; PAM type: NRG; PAM sequence: CAG
  source 1..20: mol_type = other DNA
attatcaagagaggaaactt

SEQ ID NO: 21415 - DNA, 20 bp, synthetic construct
  misc_feature 1..20: note = Description of Artificial Sequence: Synthetic oligonucleotide
  misc_feature 1..20: note = Target: SCN10A; (-) strand; PAM type: NRG; PAM sequence: AGG
  source 1..20: mol_type = other DNA
aggcttcaaattatcaagag

SEQ ID NO: 21416 - DNA, 20 bp, synthetic construct
  misc_feature 1..20: note = Description of Artificial Sequence: Synthetic oligonucleotide
  misc_feature 1..20: note = Target: SCN10A; (-) strand; PAM type: NRG; PAM sequence: GAG
  source 1..20: mol_type = other DNA
caggcttcaaattatcaaga

SEQ ID NO: 21417 - DNA, 20 bp, synthetic construct
  misc_feature 1..20: note = Description of Artificial Sequence: Synthetic oligonucleotide
  misc_feature 1..20: note = Target: SCN10A; (-) strand; PAM type: NRG; PAM sequence: GAG
  source 1..20: mol_type = other DNA
atcaggcttcaaattatcaa

SEQ ID NO: 21418 - DNA, 20 bp, synthetic construct
  misc_feature 1..20: note = Description of Artificial Sequence: Synthetic oligonucleotide
  misc_feature 1..20: note = Target: SCN10A; (-) strand; PAM type: NRG; PAM sequence: AAG
  source 1..20: mol_type = other DNA
ggatcaggcttcaaattatc

SEQ ID NO: 21419 - DNA, 20 bp, synthetic construct
  misc_feature 1..20: note = Description of Artificial Sequence: Synthetic oligonucleotide
  misc_feature 1..20: note = Target: SCN10A; (-) strand; PAM type: NRG; PAM sequence: AGG
  source 1..20: mol_type = other DNA
aatggttgctaaacaggatc

SEQ ID NO: 21420 - DNA, 20 bp, synthetic construct
  misc_feature 1..20: note = Description of Artificial Sequence: Synthetic oligonucleotide
  misc_feature 1..20: note = Target: SCN10A; (-) strand; PAM type: NRG; PAM sequence: CAG
  source 1..20: mol_type = other DNA
taatggttgctaaacaggat

SEQ ID NO: 21421 - DNA, 20 bp, synthetic construct
  misc_feature 1..20: note = Description of Artificial Sequence: Synthetic oligonucleotide
  misc_feature 1..20: note = Target: SCN10A; (-) strand; PAM type: NRG; PAM sequence: AGG
  source 1..20: mol_type = other DNA
tttaataatggttgctaaac

SEQ ID NO: 21422 - DNA, 20 bp, synthetic construct
  misc_feature 1..20: note = Description of Artificial Sequence: Synthetic oligonucleotide
  misc_feature 1..20: note = Target: SCN10A; (-) strand; PAM type: NRG; PAM sequence: CAG
  source 1..20: mol_type = other DNA
ttttaataatggttgctaaa

SEQ ID NO: 21423 - DNA, 20 bp, synthetic construct
  misc_feature 1..20: note = Description of Artificial Sequence: Synthetic oligonucleotide
  misc_feature 1..20: note = Target: SCN10A; (-) strand; PAM type: NRG; PAM sequence: TGG
  source 1..20: mol_type = other DNA
taatactgagcttttaataa

SEQ ID NO: 21424 - DNA, 20 bp, synthetic construct
  misc_feature 1..20: note = Description of Artificial Sequence: Synthetic oligonucleotide
  misc_feature 1..20: note = Target: SCN10A; (-) strand; PAM type: NRG; PAM sequence: GAG
  source 1..20: mol_type = other DNA
agtactctatttataatact

SEQ ID NO: 21425 - DNA, 20 bp, synthetic construct
  misc_feature 1..20: note = Description of Artificial Sequence: Synthetic oligonucleotide
  misc_feature 1..20: note = Target: SCN10A; (-) strand; PAM type: NRG; PAM sequence: GAG
  source 1..20: mol_type = other DNA
gggcatgtattacaggcaga

SEQ ID NO: 21426 - DNA, 20 bp, synthetic construct
  misc_feature 1..20: note = Description of Artificial Sequence: Synthetic oligonucleotide
  misc_feature 1..20: note = Target: SCN10A; (-) strand; PAM type: NRG; PAM sequence: GAG
  source 1..20: mol_type = other DNA
ttgggcatgtattacaggca

SEQ ID NO: 21427 - DNA, 20 bp, synthetic construct
  misc_feature 1..20: note = Description of Artificial Sequence: Synthetic oligonucleotide
  misc_feature 1..20: note = Target: SCN10A; (-) strand; PAM type: NRG; PAM sequence: CAG
  source 1..20: mol_type = other DNA
ccttgggcatgtattacagg

SEQ ID NO: 21428 - DNA, 20 bp, synthetic construct
  misc_feature 1..20: note = Description of Artificial Sequence: Synthetic oligonucleotide
  misc_feature 1..20: note = Target: SCN10A; (-) strand; PAM type: NRG; PAM sequence: AGG
  source 1..20: mol_type = other DNA
agtccttgggcatgtattac

SEQ ID NO: 21429 - DNA, 20 bp, synthetic construct
  misc_feature 1..20: note = Description of Artificial Sequence: Synthetic oligonucleotide
  misc_feature 1..20: note = Target: SCN10A; (-) strand; PAM type: NRG; PAM sequence: CAG
  source 1..20: mol_type = other DNA
tagtccttgggcatgtatta

SEQ ID NO: 21430 - DNA, 20 bp, synthetic construct
  misc_feature 1..20: note = Description of Artificial Sequence: Synthetic oligonucleotide
  misc_feature 1..20: note = Target: SCN10A; (-) strand; PAM type: NRG; PAM sequence: GGG
  source 1..20: mol_type = other DNA
ttatgagttctatagtcctt

SEQ ID NO: 21431 - DNA, 20 bp, synthetic construct
  misc_feature 1..20: note = Description of Artificial Sequence: Synthetic oligonucleotide
  misc_feature 1..20: note = Target: SCN10A; (-) strand; PAM type: NRG; PAM sequence: TGG
  source 1..20: mol_type = other DNA
tttatgagttctatagtcct

SEQ ID NO: 21432 - DNA, 20 bp, synthetic construct
  misc_feature 1..20: note = Description of Artificial Sequence: Synthetic oligonucleotide
  misc_feature 1..20: note = Target: SCN10A; (-) strand; PAM type: NRG; PAM sequence: TAG
  source 1..20: mol_type = other DNA
tttgcattttatgagttcta

SEQ ID NO: 21433 - DNA, 20 bp, synthetic construct
  misc_feature 1..20: note = Description of Artificial Sequence: Synthetic oligonucleotide
  misc_feature 1..20: note = Target: SCN10A; (-) strand; PAM type: NRG; PAM sequence: GAG
  source 1..20: mol_type = other DNA
gaaggatttttgcattttat

SEQ ID NO: 21434 - DNA, 20 bp, synthetic construct
  misc_feature 1..20: note = Description of Artificial Sequence: Synthetic oligonucleotide
  misc_feature 1..20: note = Target: SCN10A; (-) strand; PAM type: NRG; PAM sequence: AGG
  source 1..20: mol_type = other DNA
catttgcttcaaaaattgga

SEQ ID NO: 21435 - DNA, 20 bp, synthetic construct
  misc_feature 1..20: note = Description of Artificial Sequence: Synthetic oligonucleotide
  misc_feature 1..20: note = Target: SCN10A; (-) strand; PAM type: NRG; PAM sequence: AAG
  source 1..20: mol_type = other DNA
tcatttgcttcaaaaattgg

SEQ ID NO: 21436 - DNA, 20 bp, synthetic construct
  misc_feature 1..20: note = Description of Artificial Sequence: Synthetic oligonucleotide
  misc_feature 1..20: note = Target: SCN10A; (-) strand; PAM type: NRG; PAM sequence: TGG
  source 1..20: mol_type = other DNA
ttctcatttgcttcaaaaat

SEQ ID NO: 21437 - DNA, 20 bp, synthetic construct
  misc_feature 1..20: note = Description of Artificial Sequence: Synthetic oligonucleotide
  misc_feature 1..20: note = Target: SCN10A; (-) strand; PAM type: NRG; PAM sequence: TGG
  source 1..20: mol_type = other DNA
tagtattcccttccttaata

SEQ ID NO: 21438 - DNA, 20 bp, synthetic construct
  misc_feature 1..20: note = Description of Artificial Sequence: Synthetic oligonucleotide
  misc_feature 1..20: note = Target: SCN10A; (-) strand; PAM type: NRG; PAM sequence: TAG
  source 1..20: mol_type = other DNA
gtgctcaagtgcaaataatg

SEQ ID NO: 21439 - DNA, 20 bp, synthetic construct
  misc_feature 1..20: note = Description of Artificial Sequence: Synthetic oligonucleotide
  misc_feature 1..20: note = Target: SCN10A; (-) strand; PAM type: NRG; PAM sequence: AAG
  source 1..20: mol_type = other DNA
cattggtttgcttggtgctc

SEQ ID NO: 21440 - DNA, 20 bp, synthetic construct
  misc_feature 1..20: note = Description of Artificial Sequence: Synthetic oligonucleotide
  misc_feature 1..20: note = Target: SCN10A; (-) strand; PAM type: NRG; PAM sequence: TGG
  source 1..20: mol_type = other DNA
agtttcttcattggtttgct

SEQ ID NO: 21441 - DNA, 20 bp, synthetic construct
  misc_feature 1..20: note = Description of Artificial Sequence: Synthetic oligonucleotide
  misc_feature 1..20: note = Target: SCN10A; (-) strand; PAM type: NRG; PAM sequence: TGG
  source 1..20: mol_type = other DNA
tttcttctcagtttcttcat

SEQ ID NO: 21442 - DNA, 20 bp, synthetic construct
  misc_feature 1..20: note = Description of Artificial Sequence: Synthetic oligonucleotide
  misc_feature 1..20: note = Target: SCN10A; (-) strand; PAM type: NRG; PAM sequence: CAG
  source 1..20: mol_type = other DNA
tgcaaccaaaattttcttct

SEQ ID NO: 21443 - DNA, 20 bp, synthetic construct
  misc_feature 1..20: note = Description of Artificial Sequence: Synthetic oligonucleotide
  misc_feature 1..20: note = Target: SCN10A; (-) strand; PAM type: NRG; PAM sequence: GAG
  source 1..20: mol_type = other DNA
taaaataactcgtggccaag

SEQ ID NO: 21444 - DNA, 20 bp, synthetic construct
  misc_feature 1..20: note = Description of Artificial Sequence: Synthetic oligonucleotide
  misc_feature 1..20: note = Target: SCN10A; (-) strand; PAM type: NRG; PAM sequence: AGG
  source 1..20: mol_type = other DNA
tctaaaataactcgtggcca

SEQ ID NO: 21445 - DNA, 20 bp, synthetic construct
  misc_feature 1..20: note = Description of Artificial Sequence: Synthetic oligonucleotide
  misc_feature 1..20: note = Target: SCN10A; (-) strand; PAM type: NRG; PAM sequence: AAG
  source 1..20: mol_type = other DNA
ttctaaaataactcgtggcc

SEQ ID NO: 21446 - DNA, 20 bp, synthetic construct
  misc_feature 1..20: note = Description of Artificial Sequence: Synthetic oligonucleotide
  misc_feature 1..20: note = Target: SCN10A; (-) strand; PAM type: NRG; PAM sequence: TGG
  source 1..20: mol_type = other DNA
cttaattctaaaataactcg

SEQ ID NO: 21447 - DNA, 20 bp, synthetic construct
  misc_feature 1..20: note = Description of Artificial Sequence: Synthetic oligonucleotide
  misc_feature 1..20: note = Target: SCN10A; (-) strand; PAM type: NRG; PAM sequence: AAG
  source 1..20: mol_type = other DNA
attctaatgcttatactcag

SEQ ID NO: 21448 - DNA, 20 bp, synthetic construct
  misc_feature 1..20: note = Description of Artificial Sequence: Synthetic oligonucleotide
  misc_feature 1..20: note = Target: SCN10A; (-) strand; PAM type: NRG; PAM sequence: CAG
  source 1..20: mol_type = other DNA
gcaattctaatgcttatact

SEQ ID NO: 21449 - DNA, 20 bp, synthetic construct
  misc_feature 1..20: note = Description of Artificial Sequence: Synthetic oligonucleotide
  misc_feature 1..20: note = Target: SCN10A; (-) strand; PAM type: NRG; PAM sequence: AAG
  source 1..20: mol_type = other DNA
tcgttagaggatgaatttta

SEQ ID NO: 21450 - DNA, 20 bp, synthetic construct
  misc_feature 1..20: note = Description of Artificial Sequence: Synthetic oligonucleotide
  misc_feature 1..20: note = Target: SCN10A; (-) strand; PAM type: NRG; PAM sequence: AGG
  source 1..20: mol_type = other DNA
agaccagttggtctcgttag

SEQ ID NO: 21451 - DNA, 20 bp, synthetic construct
  misc_feature 1..20: note = Description of Artificial Sequence: Synthetic oligonucleotide
  misc_feature 1..20: note = Target: SCN10A; (-) strand; PAM type: NRG; PAM sequence: GAG
  source 1..20: mol_type = other DNA
cagaccagttggtctcgtta

SEQ ID NO: 21452 - DNA, 20 bp, synthetic construct
  misc_feature 1..20: note = Description of Artificial Sequence: Synthetic oligonucleotide
  misc_feature 1..20: note = Target: SCN10A; (-) strand; PAM type: NRG; PAM sequence: TAG
  source 1..20: mol_type = other DNA
cacagaccagttggtctcgt

SEQ ID NO: 21453 - DNA, 20 bp, synthetic construct
  misc_feature 1..20: note = Description of Artificial Sequence: Synthetic oligonucleotide
  misc_feature 1..20: note = Target: SCN10A; (-) strand; PAM type: NRG; PAM sequence: TGG
  source 1..20: mol_type = other DNA
gtggaaaatcacagaccagt

SEQ ID NO: 21454 - DNA, 20 bp, synthetic construct
  misc_feature 1..20: note = Description of Artificial Sequence: Synthetic oligonucleotide
  misc_feature 1..20: note = Target: SCN10A; (-) strand; PAM type: NRG; PAM sequence: CAG
  source 1..20: mol_type = other DNA
ttttgtggaaaatcacagac

SEQ ID NO: 21455 - DNA, 20 bp, synthetic construct
  misc_feature 1..20: note = Description of Artificial Sequence: Synthetic oligonucleotide
  misc_feature 1..20: note = Target: SCN10A; (-) strand; PAM type: NRG; PAM sequence: CAG
  source 1..20: mol_type = other DNA
agggtttttgtggaaaatca

SEQ ID NO: 21456 - DNA, 20 bp, synthetic construct
  misc_feature 1..20: note = Description of Artificial Sequence: Synthetic oligonucleotide
  misc_feature 1..20: note = Target: SCN10A; (-) strand; PAM type: NRG; PAM sequence: TGG
  source 1..20: mol_type = other DNA
gagacccaggagggtttttg

SEQ ID NO: 21457 - DNA, 20 bp, synthetic construct
  misc_feature 1..20: note = Description of Artificial Sequence: Synthetic oligonucleotide
  misc_feature 1..20: note = Target: SCN10A; (-) strand; PAM type: NRG; PAM sequence: GGG
  source 1..20: mol_type = other DNA
tatatagaagagacccagga

SEQ ID NO: 21458 - DNA, 20 bp, synthetic construct
  misc_feature 1..20: note = Description of Artificial Sequence: Synthetic oligonucleotide
  misc_feature 1..20: note = Target: SCN10A; (-) strand; PAM type: NRG; PAM sequence: AGG
  source 1..20: mol_type = other DNA
atatatagaagagacccagg

SEQ ID NO: 21459 - DNA, 20 bp, synthetic construct
  misc_feature 1..20: note = Description of Artificial Sequence: Synthetic oligonucleotide
  misc_feature 1..20: note = Target: SCN10A; (-) strand; PAM type: NRG; PAM sequence: GAG
  source 1..20: mol_type = other DNA
aatatatagaagagacccag

SEQ ID NO: 21460 - DNA, 20 bp, synthetic construct
  misc_feature 1..20: note = Description of Artificial Sequence: Synthetic oligonucleotide
  misc_feature 1..20: note = Target: SCN10A; (-) strand; PAM type: NRG; PAM sequence: AGG
  source 1..20: mol_type = other DNA
ggaatatatagaagagaccc

SEQ ID NO: 21461 - DNA, 20 bp, synthetic construct
  misc_feature 1..20: note = Description of Artificial Sequence: Synthetic oligonucleotide
  misc_feature 1..20: note = Target: SCN10A; (-) strand; PAM type: NRG; PAM sequence: CAG
  source 1..20: mol_type = other DNA
aggaatatatagaagagacc

SEQ ID NO: 21462 - DNA, 20 bp, synthetic construct
  misc_feature 1..20: note = Description of Artificial Sequence: Synthetic oligonucleotide
  misc_feature 1..20: note = Target: SCN10A; (-) strand; PAM type: NRG; PAM sequence: GAG
  source 1..20: mol_type = other DNA
aaatagaggaatatatagaa

SEQ ID NO: 21463 - DNA, 20 bp, synthetic construct
  misc_feature 1..20: note = Description of Artificial Sequence: Synthetic oligonucleotide
  misc_feature 1..20: note = Target: SCN10A; (-) strand; PAM type: NRG; PAM sequence: AAG
  source 1..20: mol_type = other DNA
ttaaatagaggaatatatag

SEQ ID NO: 21464 - DNA, 20 bp, synthetic construct
  misc_feature 1..20: note = Description of Artificial Sequence: Synthetic oligonucleotide
  misc_feature 1..20: note = Target: SCN10A; (-) strand; PAM type: NRG; PAM sequence: TAG
  source 1..20: mol_type = other DNA
aaattaaatagaggaatata

SEQ ID NO: 21465 - DNA, 20 bp, synthetic construct
  misc_feature 1..20: note = Description of Artificial Sequence: Synthetic oligonucleotide
  misc_feature 1..20: note = Target: SCN10A; (-) strand; PAM type: NRG; PAM sequence: AGG
  source 1..20: mol_type = other DNA
aaccaatagaaattaaatag

SEQ ID NO: 21466 - DNA, 20 bp, synthetic construct
  misc_feature 1..20: note = Description of Artificial Sequence: Synthetic oligonucleotide
  misc_feature 1..20: note = Target: SCN10A; (-) strand; PAM type: NRG; PAM sequence: GAG
  source 1..20: mol_type = other DNA
taaccaatagaaattaaata

SEQ ID NO: 21467 - DNA, 20 bp, synthetic construct
  misc_feature 1..20: note = Description of Artificial Sequence: Synthetic oligonucleotide
  misc_feature 1..20: note = Target: SCN10A; (-) strand; PAM type: NRG; PAM sequence: TAG
  source 1..20: mol_type = other DNA
tataaccaatagaaattaaa

SEQ ID NO: 21468 - DNA, 20 bp, synthetic construct
  misc_feature 1..20: note = Description of Artificial Sequence: Synthetic oligonucleotide
  misc_feature 1..20: note = Target: SCN10A; (-) strand; PAM type: NRG; PAM sequence: TAG
  source 1..20: mol_type = other DNA
taaagccattttataaccaa

SEQ ID NO: 21469 - DNA, 20 bp, synthetic construct
  misc_feature 1..20: note = Description of Artificial Sequence: Synthetic oligonucleotide
  misc_feature 1..20: note = Target: SCN10A; (-) strand; PAM type: NRG; PAM sequence: AAG
  source 1..20: mol_type = other DNA
cctaatgcagtttttatcta

SEQ ID NO: 21470 - DNA, 20 bp, synthetic construct
  misc_feature 1..20: note = Description of Artificial Sequence: Synthetic oligonucleotide
  misc_feature 1..20: note = Target: SCN10A; (-) strand; PAM type: NRG; PAM sequence: CAG
  source 1..20: mol_type = other DNA
tgtggtaaatagacctaatg

SEQ ID NO: 21471 - DNA, 20 bp, synthetic construct
  misc_feature 1..20: note = Description of Artificial Sequence: Synthetic oligonucleotide
  misc_feature 1..20: note = Target: SCN10A; (-) strand; PAM type: NRG; PAM sequence: TAG
  source 1..20: mol_type = other DNA
aggtacattcatgtggtaaa

SEQ ID NO: 21472 - DNA, 20 bp, synthetic construct
  misc_feature 1..20: note = Description of Artificial Sequence: Synthetic oligonucleotide
  misc_feature 1..20: note = Target: SCN10A; (-) strand; PAM type: NRG; PAM sequence: TGG
  source 1..20: mol_type = other DNA
ttttcccaggtacattcatg

SEQ ID NO: 21473 - DNA, 20 bp, synthetic construct
  misc_feature 1..20: note = Description of Artificial Sequence: Synthetic oligonucleotide
  misc_feature 1..20: note = Target: SCN10A; (-) strand; PAM type: NRG; PAM sequence: AGG
  source 1..20: mol_type = other DNA
catcctctccctcttttccc

SEQ ID NO: 21474 - DNA, 20 bp, synthetic construct
  misc_feature 1..20: note = Description of Artificial Sequence: Synthetic oligonucleotide
  misc_feature 1..20: note = Target: SCN10A; (-) strand; PAM type: NRG; PAM sequence: CAG
  source 1..20: mol_type = other DNA
gcatcctctccctcttttcc

SEQ ID NO: 21475 - DNA, 20 bp, synthetic construct
  misc_feature 1..20: note = Description of Artificial Sequence: Synthetic oligonucleotide
  misc_feature 1..20: note = Target: SCN10A; (-) strand; PAM type: NRG; PAM sequence: AGG
  source 1..20: mol_type = other DNA
ttattggagcccactcagga

SEQ ID NO: 21476 - DNA, 20 bp, synthetic construct
  misc_feature 1..20: note = Description of Artificial Sequence: Synthetic oligonucleotide
  misc_feature 1..20: note = Target: SCN10A; (-) strand; PAM type: NRG; PAM sequence: AAG
  source 1..20: mol_type = other DNA
tttattggagcccactcagg

SEQ ID NO: 21477 - DNA, 20 bp, synthetic construct
  misc_feature 1..20: note = Description of Artificial Sequence: Synthetic oligonucleotide
  misc_feature 1..20: note = Target: SCN10A; (-) strand; PAM type: NRG; PAM sequence: AGG
  source 1..20: mol_type = other DNA
tgatttattggagcccactc

SEQ ID NO: 21478 - DNA, 20 bp, synthetic construct
  misc_feature 1..20: note = Description of Artificial Sequence: Synthetic oligonucleotide
  misc_feature 1..20: note = Target: SCN10A; (-) strand; PAM type: NRG; PAM sequence: CAG
  source 1..20: mol_type = other DNA
ttgatttattggagcccact

SEQ ID NO: 21479 - DNA, 20 bp, synthetic construct
  misc_feature 1..20: note = Description of Artificial Sequence: Synthetic oligonucleotide
  misc_feature 1..20: note = Target: SCN10A; (-) strand; PAM type: NRG; PAM sequence: GAG
  source 1..20: mol_type = other DNA
taatgctaattgatttattg

SEQ ID NO: 21480 - DNA, 20 bp, synthetic construct
  misc_feature 1..20: note = Description of Artificial Sequence: Synthetic oligonucleotide
  misc_feature 1..20: note = Target: SCN10A; (-) strand; PAM type: NRG; PAM sequence: TGG
  source 1..20: mol_type = other DNA
tttaatgctaattgatttat

SEQ ID NO: 21481 - DNA, 20 bp, synthetic construct
  misc_feature 1..20: note = Description of Artificial Sequence: Synthetic oligonucleotide
  misc_feature 1..20: note = Target: SCN10A; (-) strand; PAM type: NRG; PAM sequence: AAG
  source 1..20: mol_type = other DNA
aagacagggaggcaccattt

SEQ ID NO: 21482 - DNA, 20 bp, synthetic construct
  misc_feature 1..20: note = Description of Artificial Sequence: Synthetic oligonucleotide
  misc_feature 1..20: note = Target: SCN10A; (-) strand; PAM type: NRG; PAM sequence: AGG
  source 1..20: mol_type = other DNA
atgtatgtgcaaagacaggg

SEQ ID NO: 21483 - DNA, 20 bp, synthetic construct
  misc_feature 1..20: note = Description of Artificial Sequence: Synthetic oligonucleotide
  misc_feature 1..20: note = Target: SCN10A; (-) strand; PAM type: NRG; PAM sequence: GAG
  source 1..20: mol_type = other DNA
catgtatgtgcaaagacagg

SEQ ID NO: 21484 - DNA, 20 bp, synthetic construct
  misc_feature 1..20: note = Description of Artificial Sequence: Synthetic oligonucleotide
  misc_feature 1..20: note = Target: SCN10A; (-) strand; PAM type: NRG; PAM sequence: GGG
  source 1..20: mol_type = other DNA
aacatgtatgtgcaaagaca

SEQ ID NO: 21485 - DNA, 20 bp, synthetic construct
  misc_feature 1..20: note = Description of Artificial Sequence: Synthetic oligonucleotide
  misc_feature 1..20: note = Target: SCN10A; (-) strand; PAM type: NRG; PAM sequence: AGG
  source 1..20: mol_type = other DNA
caacatgtatgtgcaaagac

SEQ ID NO: 21486 - DNA, 20 bp, synthetic construct
  misc_feature 1..20: note = Description of Artificial Sequence: Synthetic oligonucleotide
  misc_feature 1..20: note = Target: SCN10A; (-) strand; PAM type: NRG; PAM sequence: CAG
  source 1..20: mol_type = other DNA
acaacatgtatgtgcaaaga

SEQ ID NO: 21487 - DNA, 20 bp, synthetic construct
  misc_feature 1..20: note = Description of Artificial Sequence: Synthetic oligonucleotide
  misc_feature 1..20: note = Target: SCN10A; (-) strand; PAM type: NRG; PAM sequence: AAG
  source 1..20: mol_type = other DNA
aagaacaacatgtatgtgca

SEQ ID NO: 21488 - DNA, 20 bp, synthetic construct
  misc_feature 1..20: note = Description of Artificial Sequence: Synthetic oligonucleotide
  misc_feature 1..20: note = Target: SCN10A; (-) strand; PAM type: NRG; PAM sequence: AAG
  source 1..20: mol_type = other DNA
aggagtattttcctggcaga

SEQ ID NO: 21489 - DNA, 20 bp, synthetic construct
  misc_feature 1..20: note = Description of Artificial Sequence: Synthetic oligonucleotide
  misc_feature 1..20: note = Target: SCN10A; (-) strand; PAM type: NRG; PAM sequence: CAG
  source 1..20: mol_type = other DNA
ggggaggagtattttcctgg

SEQ ID NO: 21490 - DNA, 20 bp, synthetic construct
  misc_feature 1..20: note = Description of Artificial Sequence: Synthetic oligonucleotide
  misc_feature 1..20: note = Target: SCN10A; (-) strand; PAM type: NRG; PAM sequence: TGG
  source 1..20: mol_type = other DNA
tttggggaggagtattttcc

SEQ ID NO: 21491 - DNA, 20 bp, synthetic construct
  misc_feature 1..20: note = Description of Artificial Sequence: Synthetic oligonucleotide
  misc_feature 1..20: note = Target: SCN10A; (-) strand; PAM type: NRG; PAM sequence: GAG
  source 1..20: mol_type = other DNA
acttgagagagtttggggag

SEQ ID NO: 21492 - DNA, 20 bp, synthetic construct
  misc_feature 1..20: note = Description of Artificial Sequence: Synthetic oligonucleotide
  misc_feature 1..20: note = Target: SCN10A; (-) strand; PAM type: NRG; PAM sequence: AGG
  source 1..20: mol_type = other DNA
agacttgagagagtttgggg

SEQ ID NO: 21493 - DNA, 20 bp, synthetic construct
  misc_feature 1..20: note = Description of Artificial Sequence: Synthetic oligonucleotide
  misc_feature 1..20: note = Target: SCN10A; (-) strand; PAM type: NRG; PAM sequence: GAG
  source 1..20: mol_type = other DNA
aagacttgagagagtttggg

SEQ ID NO: 21494 - DNA, 20 bp, synthetic construct
  misc_feature 1..20: note = Description of Artificial Sequence: Synthetic oligonucleotide
  misc_feature 1..20: note = Target: SCN10A; (-) strand; PAM type: NRG; PAM sequence: GGG
  source 1..20: mol_type = other DNA
tgaagacttgagagagtttg

SEQ ID NO: 21495 - DNA, 20 bp, synthetic construct
  misc_feature 1..20: note = Description of Artificial Sequence: Synthetic oligonucleotide
  misc_feature 1..20: note = Target: SCN10A; (-) strand; PAM type: NRG; PAM sequence: GGG
  source 1..20: mol_type = other DNA
ttgaagacttgagagagttt

SEQ ID NO: 21496 - DNA, 20 bp, synthetic construct
  misc_feature 1..20: note = Description of Artificial Sequence: Synthetic oligonucleotide
  misc_feature 1..20: note = Target: SCN10A; (-) strand; PAM type: NRG; PAM sequence: TGG
  source 1..20: mol_type = other DNA
attgaagacttgagagagtt

SEQ ID NO: 21497 - DNA, 20 bp, synthetic construct
  misc_feature 1..20: note = Description of Artificial Sequence: Synthetic oligonucleotide
  misc_feature 1..20: note = Target: SCN10A; (-) strand; PAM type: NRG; PAM sequence: GAG
  source 1..20: mol_type = other DNA
tagtaattgaagacttgaga

SEQ ID NO: 21498 - DNA, 20 bp, synthetic construct
  misc_feature 1..20: note = Description of Artificial Sequence: Synthetic oligonucleotide
  misc_feature 1..20: note = Target: SCN10A; (-) strand; PAM type: NRG; PAM sequence: GAG
  source 1..20: mol_type = other DNA
tctagtaattgaagacttga

SEQ ID NO: 21499 - DNA, 20 bp, synthetic construct
  misc_feature 1..20: note = Description of Artificial Sequence: Synthetic oligonucleotide
  misc_feature 1..20: note = Target: SCN10A; (-) strand; PAM type: NRG; PAM sequence: GAG
  source 1..20: mol_type = other DNA
cttctagtaattgaagactt

SEQ ID NO: 21500 - DNA, 20 bp, synthetic construct
  misc_feature 1..20: note = Description of Artificial Sequence: Synthetic oligonucleotide
  misc_feature 1..20: note = Target: SCN10A; (-) strand; PAM type: NRG; PAM sequence: AAG
  source 1..20: mol_type = other DNA
aggggttcttctagtaattg

SEQ ID NO: 21501 - DNA, 20 bp, synthetic construct
  misc_feature 1..20: note = Description of Artificial Sequence: Synthetic oligonucleotide
  misc_feature 1..20: note = Target: SCN10A; (-) strand; PAM type: NRG; PAM sequence: TAG
  source 1..20: mol_type = other DNA
atagcatgtaggggttcttc

SEQ ID NO: 21502 - DNA, 20 bp, synthetic construct
  misc_feature 1..20: note = Description of Artificial Sequence: Synthetic oligonucleotide
  misc_feature 1..20: note = Target: SCN10A; (-) strand; PAM type: NRG; PAM sequence: GGG
  source 1..20: mol_type = other DNA
caacaataaatagcatgtag

SEQ ID NO: 21503 - DNA, 20 bp, synthetic construct
  misc_feature 1..20: note = Description of Artificial Sequence: Synthetic oligonucleotide
  misc_feature 1..20: note = Target: SCN10A; (-) strand; PAM type: NRG; PAM sequence: GGG
  source 1..20: mol_type = other DNA
tcaacaataaatagcatgta

SEQ ID NO: 21504 - DNA, 20 bp, synthetic construct
  misc_feature 1..20: note = Description of Artificial Sequence: Synthetic oligonucleotide
  misc_feature 1..20: note = Target: SCN10A; (-) strand; PAM type: NRG; PAM sequence: AGG
  source 1..20: mol_type = other DNA
atcaacaataaatagcatgt

SEQ ID NO: 21505 - DNA, 20 bp, synthetic construct
  misc_feature 1..20: note = Description of Artificial Sequence: Synthetic oligonucleotide
  misc_feature 1..20: note = Target: SCN10A; (-) strand; PAM type: NRG; PAM sequence: TAG
  source 1..20: mol_type = other DNA
gatcaacaataaatagcatg

SEQ ID NO: 21506 - DNA, 20 bp, synthetic construct
  misc_feature 1..20: note = Description of Artificial Sequence: Synthetic oligonucleotide
  misc_feature 1..20: note = Target: SCN10A; (-) strand; PAM type: NRG; PAM sequence: TAG
  source 1..20: mol_type = other DNA
taattgggatcaacaataaa

SEQ ID NO: 21507 - DNA, 20 bp, synthetic construct
  misc_feature 1..20: note = Description of Artificial Sequence: Synthetic oligonucleotide
  misc_feature 1..20: note = Target: SCN10A; (-) strand; PAM type: NRG; PAM sequence: GGG
  source 1..20: mol_type = other DNA
tcctggaggaaggcataatt

SEQ ID NO: 21508 - DNA, 20 bp, synthetic construct
  misc_feature 1..20: note = Description of Artificial Sequence: Synthetic oligonucleotide
  misc_feature 1..20: note = Target: SCN10A; (-) strand; PAM type: NRG; PAM sequence: TGG
  source 1..20: mol_type = other DNA
ttcctggaggaaggcataat

SEQ ID NO: 21509 - DNA, 20 bp, synthetic construct
  misc_feature 1..20: note = Description of Artificial Sequence: Synthetic oligonucleotide
  misc_feature 1..20: note = Target: SCN10A; (-) strand; PAM type: NRG; PAM sequence: AGG
  source 1..20: mol_type = other DNA
agaaaaggcttcctggagga

SEQ ID NO: 21510 - DNA, 20 bp, synthetic construct
  misc_feature 1..20: note = Description of Artificial Sequence: Synthetic oligonucleotide
  misc_feature 1..20: note = Target: SCN10A; (-) strand; PAM type: NRG; PAM sequence: AAG
  source 1..20: mol_type = other DNA
cagaaaaggcttcctggagg

SEQ ID NO: 21511 - DNA, 20 bp, synthetic construct
  misc_feature 1..20: note = Description of Artificial Sequence: Synthetic oligonucleotide
  misc_feature 1..20: note = Target: SCN10A; (-) strand; PAM type: NRG; PAM sequence: AGG
  source 1..20: mol_type = other DNA
tatcagaaaaggcttcctgg

SEQ ID NO: 21512 - DNA, 20 bp, synthetic construct
  misc_feature 1..20: note = Description of Artificial Sequence: Synthetic oligonucleotide
  misc_feature 1..20: note = Target: SCN10A; (-) strand; PAM type: NRG; PAM sequence: GAG
  source 1..20: mol_type = other DNA
gtatcagaaaaggcttcctg

SEQ ID NO: 21513 - DNA, 20 bp, synthetic construct
  misc_feature 1..20: note = Description of Artificial Sequence: Synthetic oligonucleotide
  misc_feature 1..20: note = Target: SCN10A; (-) strand; PAM type: NRG; PAM sequence: TGG
  source 1..20: mol_type = other DNA
aggtatcagaaaaggcttcc

SEQ ID NO: 21514 - DNA, 20 bp, synthetic construct
  misc_feature 1..20: note = Description of Artificial Sequence: Synthetic oligonucleotide
  misc_feature 1..20: note = Target: SCN10A; (-) strand; PAM type: NRG; PAM sequence: AGG
  source 1..20: mol_type = other DNA
ggctggataggtatcagaaa

SEQ ID NO: 21515 - DNA, 20 bp, synthetic construct
  misc_feature 1..20: note = Description of Artificial Sequence: Synthetic oligonucleotide
  misc_feature 1..20: note = Target: SCN10A; (-) strand; PAM type: NRG; PAM sequence: AAG
  source 1..20: mol_type = other DNA
gggctggataggtatcagaa

SEQ ID NO: 21516 - DNA, 20 bp, synthetic construct
  misc_feature 1..20: note = Description of Artificial Sequence: Synthetic oligonucleotide
  misc_feature 1..20: note = Target: SCN10A; (-) strand; PAM type: NRG; PAM sequence: CAG
  source 1..20: mol_type = other DNA
ttatggggctggataggtat

SEQ ID NO: 21517 - DNA, 20 bp, synthetic construct
  misc_feature 1..20: note = Description of Artificial Sequence: Synthetic oligonucleotide
  misc_feature 1..20: note = Target: SCN10A; (-) strand; PAM type: NRG; PAM sequence: AGG
  source 1..20: mol_type = other DNA
ccactcttatggggctggat

SEQ ID NO: 21518 - DNA, 20 bp, synthetic construct
  misc_feature 1..20: note = Description of Artificial Sequence: Synthetic oligonucleotide
  misc_feature 1..20: note = Target: SCN10A; (-) strand; PAM type: NRG; PAM sequence: TAG
  source 1..20: mol_type = other DNA
tccactcttatggggctgga

SEQ ID NO: 21519 - DNA, 20 bp, synthetic construct
  misc_feature 1..20: note = Description of Artificial Sequence: Synthetic oligonucleotide
  misc_feature 1..20: note = Target: SCN10A; (-) strand; PAM type: NRG; PAM sequence: TGG
  source 1..20: mol_type = other DNA
aacatccactcttatggggc

SEQ ID NO: 21520 - DNA, 20 bp, synthetic construct
  misc_feature 1..20: note = Description of Artificial Sequence: Synthetic oligonucleotide
  misc_feature 1..20: note = Target: SCN10A; (-) strand; PAM type: NRG; PAM sequence: GGG
  source 1..20: mol_type = other DNA
aagaaacatccactcttatg

SEQ ID NO: 21521 - DNA, 20 bp, synthetic construct
  misc_feature 1..20: note = Description of Artificial Sequence: Synthetic oligonucleotide
  misc_feature 1..20: note = Target: SCN10A; (-) strand; PAM type: NRG; PAM sequence: GGG
  source 1..20: mol_type = other DNA
gaagaaacatccactcttat

SEQ ID NO: 21522 - DNA, 20 bp, synthetic construct
  misc_feature 1..20: note = Description of Artificial Sequence: Synthetic oligonucleotide
  misc_feature 1..20: note = Target: SCN10A; (-) strand; PAM type: NRG; PAM sequence: TGG
  source 1..20: mol_type = other DNA
ggaagaaacatccactctta

SEQ ID NO: 21523 - DNA, 20 bp, synthetic construct
  misc_feature 1..20: note = Description of Artificial Sequence: Synthetic oligonucleotide
  misc_feature 1..20: note = Target: SCN10A; (-) strand; PAM type: NRG; PAM sequence: AAG
  source 1..20: mol_type = other DNA
tggtgttttgagaatcaggg

SEQ ID NO: 21524 - DNA, 20 bp, synthetic construct
  misc_feature 1..20: note = Description of Artificial Sequence: Synthetic oligonucleotide
  misc_feature 1..20: note = Target: SCN10A; (-) strand; PAM type: NRG; PAM sequence: GGG
  source 1..20: mol_type = other DNA
acatggtgttttgagaatca

SEQ ID NO: 21525 - DNA, 20 bp, synthetic construct
  misc_feature 1..20: note = Description of Artificial Sequence: Synthetic oligonucleotide
  misc_feature 1..20: note = Target: SCN10A; (-) strand; PAM type: NRG; PAM sequence: AGG
  source 1..20: mol_type = other DNA
tacatggtgttttgagaatc

SEQ ID NO: 21526 - DNA, 20 bp, synthetic construct
  misc_feature 1..20: note = Description of Artificial Sequence: Synthetic oligonucleotide
  misc_feature 1..20: note = Target: SCN10A; (-) strand; PAM type: NRG; PAM sequence: CAG
  source 1..20: mol_type = other DNA
atacatggtgttttgagaat

SEQ ID NO: 21527 - DNA, 20 bp, synthetic construct
  misc_feature 1..20: note = Description of Artificial Sequence: Synthetic oligonucleotide
  misc_feature 1..20: note = Target: SCN10A; (-) strand; PAM type: NRG; PAM sequence: GAG
  source 1..20: mol_type = other DNA
agacacatacatggtgtttt

SEQ ID NO: 21528 - DNA, 20 bp, synthetic construct
  misc_feature 1..20: note = Description of Artificial Sequence: Synthetic oligonucleotide
  misc_feature 1..20: note = Target: SCN10A; (-) strand; PAM type: NRG; PAM sequence: TGG
  source 1..20: mol_type = other DNA
gtgtattagagacacataca

SEQ ID NO: 21529 - DNA, 20 bp, synthetic construct
  misc_feature 1..20: note = Description of Artificial Sequence: Synthetic oligonucleotide
  misc_feature 1..20: note = Target: SCN10A; (-) strand; PAM type: NRG; PAM sequence: GAG
  source 1..20: mol_type = other DNA
atgtgttaaatagtgtatta

SEQ ID NO: 21530 - DNA, 20 bp, synthetic construct
  misc_feature 1..20: note = Description of Artificial Sequence: Synthetic oligonucleotide
  misc_feature 1..20: note = Target: SCN10A; (-) strand; PAM type: NRG; PAM sequence: TAG
  source 1..20: mol_type = other DNA
ctatgtgttaaatagtgtat

SEQ ID NO: 21531 - DNA, 20 bp, synthetic construct
  misc_feature 1..20: note = Description of Artificial Sequence: Synthetic oligonucleotide
  misc_feature 1..20: note = Target: SCN10A; (-) strand; PAM type: NRG; PAM sequence: TAG
  source 1..20: mol_type = other DNA
aaacacagctatgtgttaaa

SEQ ID NO: 21532 - DNA, 20 bp, synthetic construct
  misc_feature 1..20: note = Description of Artificial Sequence: Synthetic oligonucleotide
  misc_feature 1..20: note = Target: SCN10A; (-) strand; PAM type: NRG; PAM sequence: CAG
  source 1..20: mol_type = other DNA
ggaggaggcagatataaaca

SEQ ID NO: 21533 - DNA, 20 bp, synthetic construct
  misc_feature 1..20: note = Description of Artificial Sequence: Synthetic oligonucleotide
  misc_feature 1..20: note = Target: SCN10A; (-) strand; PAM type: NRG; PAM sequence: CAG
  source 1..20: mol_type = other DNA
ttccatttgggtggaggagg

SEQ ID NO: 21534 - DNA, 20 bp, synthetic construct
  misc_feature 1..20: note = Description of Artificial Sequence: Synthetic oligonucleotide
  misc_feature 1..20: note = Target: SCN10A; (-) strand; PAM type: NRG; PAM sequence: AGG
  source 1..20: mol_type = other DNA
gatttccatttgggtggagg

SEQ ID NO: 21535 - DNA, 20 bp, synthetic construct
  misc_feature 1..20: note = Description of Artificial Sequence: Synthetic oligonucleotide
  misc_feature 1..20: note = Target: SCN10A; (-) strand; PAM type: NRG; PAM sequence: GAG
  source 1..20: mol_type = other DNA
ggatttccatttgggtggag

SEQ ID NO: 21536 - DNA, 20 bp, synthetic construct
  misc_feature 1..20: note = Description of Artificial Sequence: Synthetic oligonucleotide
  misc_feature 1..20: note = Target: SCN10A; (-) strand; PAM type: NRG; PAM sequence: AGG
  source 1..20: mol_type = other DNA
aaggatttccatttgggtgg

SEQ ID NO: 21537 - DNA, 20 bp, synthetic construct
  misc_feature 1..20: note = Description of Artificial Sequence: Synthetic oligonucleotide
  misc_feature 1..20: note = Target: SCN10A; (-) strand; PAM type: NRG; PAM sequence: GAG
  source 1..20: mol_type = other DNA
taaggatttccatttgggtg

SEQ ID NO: 21538 - DNA, 20 bp, synthetic construct
  misc_feature 1..20: note = Description of Artificial Sequence: Synthetic oligonucleotide
  misc_feature 1..20: note = Target: SCN10A; (-) strand; PAM type: NRG; PAM sequence: TGG
  source 1..20: mol_type = other DNA
cctaaggatttccatttggg

SEQ ID NO: 21539 - DNA, 20 bp, synthetic construct
  misc_feature 1..20: note = Description of Artificial Sequence: Synthetic oligonucleotide
  misc_feature 1..20: note = Target: SCN10A; (-) strand; PAM type: NRG; PAM sequence: GGG
  source 1..20: mol_type = other DNA
ttccctaaggatttccattt

SEQ ID NO: 21540 - DNA, 20 bp, synthetic construct
  misc_feature 1..20: note = Description of Artificial Sequence: Synthetic oligonucleotide
  misc_feature 1..20: note = Target: SCN10A; (-) strand; PAM type: NRG; PAM sequence: TGG
  source 1..20: mol_type = other DNA
tttccctaaggatttccatt

SEQ ID NO: 21541 - DNA, 20 bp, synthetic construct
  misc_feature 1..20: note = Description of Artificial Sequence: Synthetic oligonucleotide
  misc_feature 1..20: note = Target: SCN10A; (-) strand; PAM type: NRG; PAM sequence: AGG
  source 1..20: mol_type = other DNA
agaacatgttcttttcccta

SEQ ID NO: 21542 - DNA, 20 bp, synthetic construct
  misc_feature 1..20: note = Description of Artificial Sequence: Synthetic oligonucleotide
  misc_feature 1..20: note = Target: SCN10A; (-) strand; PAM type: NRG; PAM sequence: AAG
  source 1..20: mol_type = other DNA
tagaacatgttcttttccct

SEQ ID NO: 21543 - DNA, 20 bp, synthetic construct
  misc_feature 1..20: note = Description of Artificial Sequence: Synthetic oligonucleotide
  misc_feature 1..20: note = Target: SCN10A; (-) strand; PAM type: NRG; PAM sequence: TAG
  source 1..20: mol_type = other DNA
gcttggtataaagagatgac

SEQ ID NO: 21544 - DNA, 20 bp, synthetic construct
  misc_feature 1..20: note = Description of Artificial Sequence: Synthetic oligonucleotide
  misc_feature 1..20: note = Target: SCN10A; (-) strand; PAM type: NRG; PAM sequence: GAG
  source 1..20: mol_type = other DNA
tactaggtgcttggtataaa

SEQ ID NO: 21545 - DNA, 20 bp, synthetic construct
  misc_feature 1..20: note = Description of Artificial Sequence: Synthetic oligonucleotide
  misc_feature 1..20: note = Target: SCN10A; (-) strand; PAM type: NRG; PAM sequence: AAG
  source 1..20: mol_type = other DNA
aatactaggtgcttggtata

SEQ ID NO: 21546 - DNA, 20 bp, synthetic construct
  misc_feature 1..20: note = Description of Artificial Sequence: Synthetic oligonucleotide
  misc_feature 1..20: note = Target: SCN10A; (-) strand; PAM type: NRG; PAM sequence: TGG
  source 1..20: mol_type = other DNA
attcaacaatactaggtgct

SEQ ID NO: 21547 - DNA, 20 bp, synthetic construct
  misc_feature 1..20: note = Description of Artificial Sequence: Synthetic oligonucleotide
  misc_feature 1..20: note = Target: SCN10A; (-) strand; PAM type: NRG; PAM sequence: AGG
  source 1..20: mol_type = other DNA
cttgttcattcaacaatact

SEQ ID NO: 21548 - DNA, 20 bp, synthetic construct
  misc_feature 1..20: note = Description of Artificial Sequence: Synthetic oligonucleotide
  misc_feature 1..20: note = Target: SCN10A; (-) strand; PAM type: NRG; PAM sequence: TAG
  source 1..20: mol_type = other DNA
acttgttcattcaacaatac

SEQ ID NO: 21549 - DNA, 20 bp, synthetic construct
  misc_feature 1..20: note = Description of Artificial Sequence: Synthetic oligonucleotide
  misc_feature 1..20: note = Target: SCN10A; (-) strand; PAM type: NRG; PAM sequence: GAG
  source 1..20: mol_type = other DNA
ctttcaaagggaaaaaagag

SEQ ID NO: 21550 - DNA, 20 bp, synthetic construct
  misc_feature 1..20: note = Description of Artificial Sequence: Synthetic oligonucleotide
  misc_feature 1..20: note = Target: SCN10A; (-) strand; PAM type: NRG; PAM sequence: AGG
  source 1..20: mol_type = other DNA
tactttcaaagggaaaaaag

SEQ ID NO: 21551 - DNA, 20 bp, synthetic construct
  misc_feature 1..20: note = Description of Artificial Sequence: Synthetic oligonucleotide
  misc_feature 1..20: note = Target: SCN10A; (-) strand; PAM type: NRG; PAM sequence: GAG
  source 1..20: mol_type = other DNA
ttactttcaaagggaaaaaa

SEQ ID NO: 21552 - DNA, 20 bp, synthetic construct
  misc_feature 1..20: note = Description of Artificial Sequence: Synthetic oligonucleotide
  misc_feature 1..20: note = Target: SCN10A; (-) strand; PAM type: NRG; PAM sequence: AAG
  source 1..20: mol_type = other DNA
gcttactttcaaagggaaaa

SEQ ID NO: 21553 - DNA, 20 bp, synthetic construct
  misc_feature 1..20: note = Description of Artificial Sequence: Synthetic oligonucleotide
  misc_feature 1..20: note = Target: SCN10A; (-) strand; PAM type: NRG; PAM sequence: GGG
  source 1..20: mol_type = other DNA
cagtgatgcttactttcaaa

SEQ ID NO: 21554 - DNA, 20 bp, synthetic construct
  misc_feature 1..20: note = Description of Artificial Sequence: Synthetic oligonucleotide
  misc_feature 1..20: note = Target: SCN10A; (-) strand; PAM type: NRG; PAM sequence: AGG
  source 1..20: mol_type = other DNA
ccagtgatgcttactttcaa

SEQ ID NO: 21555 - DNA, 20 bp, synthetic construct
  misc_feature 1..20: note = Description of Artificial Sequence: Synthetic oligonucleotide
  misc_feature 1..20: note = Target: SCN10A; (-) strand; PAM type: NRG; PAM sequence: AAG
  source 1..20: mol_type = other DNA
tccagtgatgcttactttca

SEQ ID NO: 21556 - DNA, 20 bp, synthetic construct
  misc_feature 1..20: note = Description of Artificial Sequence: Synthetic oligonucleotide
  misc_feature 1..20: note = Target: SCN10A; (-) strand; PAM type: NRG; PAM sequence: CAG
  source 1..20: mol_type = other DNA
ggtatgtgtgcttgtctctc

SEQ ID NO: 21557 - DNA, 20 bp, synthetic construct
  misc_feature 1..20: note = Description of Artificial Sequence: Synthetic oligonucleotide
  misc_feature 1..20: note = Target: SCN10A; (-) strand; PAM type: NRG; PAM sequence: TGG
  source 1..20: mol_type = other DNA
gcacttggatgtccaataat

SEQ ID NO: 21558 - DNA, 20 bp, synthetic construct
  misc_feature 1..20: note = Description of Artificial Sequence: Synthetic oligonucleotide
  misc_feature 1..20: note = Target: SCN10A; (-) strand; PAM type: NRG; PAM sequence: TGG
  source 1..20: mol_type = other DNA
gccccacacagattagcact

SEQ ID NO: 21559 - DNA, 20 bp, synthetic construct
  misc_feature 1..20: note = Description of Artificial Sequence: Synthetic oligonucleotide
  misc_feature 1..20: note = Target: SCN10A; (-) strand; PAM type: NRG; PAM sequence: TAG
  source 1..20: mol_type = other DNA
tctgtcagccccacacagat

SEQ ID NO: 21560 - DNA, 20 bp, synthetic construct
  misc_feature 1..20: note = Description of Artificial Sequence: Synthetic oligonucleotide
  misc_feature 1..20: note = Target: SCN10A; (-) strand; PAM type: NRG; PAM sequence: CAG
  source 1..20: mol_type = other DNA
cccattctgtcagccccaca

SEQ ID NO: 21561 - DNA, 20 bp, synthetic construct
  misc_feature 1..20: note = Description of Artificial Sequence: Synthetic oligonucleotide
  misc_feature 1..20: note = Target: SCN10A; (-) strand; PAM type: NRG; PAM sequence: CAG
  source 1..20: mol_type = other DNA
tttaatttcccccattctgt

SEQ ID NO: 21562 - DNA, 20 bp, synthetic construct
  misc_feature 1..20: note = Description of Artificial Sequence: Synthetic oligonucleotide
  misc_feature 1..20: note = Target: SCN10A; (-) strand; PAM type: NRG; PAM sequence: GGG
  source 1..20: mol_type = other DNA
aatgtcaatgacactgaatt

SEQ ID NO: 21563 - DNA, 20 bp, synthetic construct
  misc_feature 1..20: note = Description of Artificial Sequence: Synthetic oligonucleotide
  misc_feature 1..20: note = Target: SCN10A; (-) strand; PAM type: NRG; PAM sequence: TGG
  source 1..20: mol_type = other DNA
aaatgtcaatgacactgaat

SEQ ID NO: 21564 - DNA, 20 bp, synthetic construct
  misc_feature 1..20: note = Description of Artificial Sequence: Synthetic oligonucleotide
  misc_feature 1..20: note = Target: SCN10A; (-) strand; PAM type: NRG; PAM sequence: TGG
  source 1..20: mol_type = other DNA
aggatgaatcacagcttcca

SEQ ID NO: 21565 - DNA, 20 bp, synthetic construct
  misc_feature 1..20: note = Description of Artificial Sequence: Synthetic oligonucleotide
  misc_feature 1..20: note = Target: SCN10A; (-) strand; PAM type: NRG; PAM sequence: CAG
  source 1..20: mol_type = other DNA
tcacagaacaggatgaatca

SEQ ID NO: 21566 - DNA, 20 bp, synthetic construct
  misc_feature 1..20: note = Description of Artificial Sequence: Synthetic oligonucleotide
  misc_feature 1..20: note = Target: SCN10A; (-) strand; PAM type: NRG; PAM sequence: AGG
  source 1..20: mol_type = other DNA
agttcagacaatcacagaac

SEQ ID NO: 21567 - DNA, 20 bp, synthetic construct
  misc_feature 1..20: note = Description of Artificial Sequence: Synthetic oligonucleotide
  misc_feature 1..20: note = Target: SCN10A; (-) strand; PAM type: NRG; PAM sequence: CAG
  source 1..20: mol_type = other DNA
cagttcagacaatcacagaa

SEQ ID NO: 21568 - DNA, 20 bp, synthetic construct
  misc_feature 1..20: note = Description of Artificial Sequence: Synthetic oligonucleotide
  misc_feature 1..20: note = Target: SCN10A; (-) strand; PAM type: NRG; PAM sequence: CAG
  source 1..20: mol_type = other DNA
gggcacagttcagacaatca

SEQ ID NO: 21569 - DNA, 20 bp, synthetic construct
  misc_feature 1..20: note = Description of Artificial Sequence: Synthetic oligonucleotide
  misc_feature 1..20: note = Target: SCN10A; (-) strand; PAM type: NRG; PAM sequence: CAG
  source 1..20: mol_type = other DNA
ggcatacatggggcacagtt

SEQ ID NO: 21570 - DNA, 20 bp, synthetic construct
  misc_feature 1..20: note = Description of Artificial Sequence: Synthetic oligonucleotide
  misc_feature 1..20: note = Target: SCN10A; (-) strand; PAM type: NRG; PAM sequence: CAG
  source 1..20: mol_type = other DNA
cacctggcatacatggggca

SEQ ID NO: 21571 - DNA, 20 bp, synthetic construct
  misc_feature 1..20: note = Description of Artificial Sequence: Synthetic oligonucleotide
  misc_feature 1..20: note = Target: SCN10A; (-) strand; PAM type: NRG; PAM sequence: GGG
  source 1..20: mol_type = other DNA
agcagcacctggcatacatg

SEQ ID NO: 21572 - DNA, 20 bp, synthetic construct
  misc_feature 1..20: note = Description of Artificial Sequence: Synthetic oligonucleotide
  misc_feature 1..20: note = Target: SCN10A; (-) strand; PAM type: NRG; PAM sequence: GGG
  source 1..20: mol_type = other DNA
gagcagcacctggcatacat

SEQ ID NO: 21573 - DNA, 20 bp, synthetic construct
  misc_feature 1..20: note = Description of Artificial Sequence: Synthetic oligonucleotide
  misc_feature 1..20: note = Target: SCN10A; (-) strand; PAM type: NRG; PAM sequence: TGG
  source 1..20: mol_type = other DNA
tgagcagcacctggcataca

SEQ ID NO: 21574 - DNA, 20 bp, synthetic construct
  misc_feature 1..20: note = Description of Artificial Sequence: Synthetic oligonucleotide
  misc_feature 1..20: note = Target: SCN10A; (-) strand; PAM type: NRG; PAM sequence: TGG
  source 1..20: mol_type = other DNA
tgccccttttgagcagcacc

SEQ ID NO: 21575 - DNA, 20 bp, synthetic construct
  misc_feature 1..20: note = Description of Artificial Sequence: Synthetic oligonucleotide
  misc_feature 1..20: note = Target: SCN10A; (-) strand; PAM type: NRG; PAM sequence: CAG
  source 1..20: mol_type = other DNA
cttgctttgccccttttgag

SEQ ID NO: 21576 - DNA, 20 bp, synthetic construct
  misc_feature 1..20: note = Description of Artificial Sequence: Synthetic oligonucleotide
  misc_feature 1..20: note = Target: SCN10A; (-) strand; PAM type: NRG; PAM sequence: GAG
  source 1..20: mol_type = other DNA
tttcttgctttgcccctttt

SEQ ID NO: 21577 - DNA, 20 bp, synthetic construct
  misc_feature 1..20: note = Description of Artificial Sequence: Synthetic oligonucleotide
  misc_feature 1..20: note = Target: SCN10A; (-) strand; PAM type: NRG; PAM sequence: CAG
  source 1..20: mol_type = other DNA
ctcatgacacatccacactt

SEQ ID NO: 21578 - DNA, 20 bp, synthetic construct
  misc_feature 1..20: note = Description of Artificial Sequence: Synthetic oligonucleotide
  misc_feature 1..20: note = Target: SCN10A; (-) strand; PAM type: NRG; PAM sequence: CAG
  source 1..20: mol_type = other DNA
tatgtgtgcatatacaaaca

SEQ ID NO: 21579 - DNA, 20 bp, synthetic construct
  misc_feature 1..20: note = Description of Artificial Sequence: Synthetic oligonucleotide
  misc_feature 1..20: note = Target: SCN10A; (-) strand; PAM type: NRG; PAM sequence: CAG
  source 1..20: mol_type = other DNA
aataccatctctccaaccct

SEQ ID NO: 21580 - DNA, 20 bp, synthetic construct
  misc_feature 1..20: note = Description of Artificial Sequence: Synthetic oligonucleotide
  misc_feature 1..20: note = Target: SCN10A; (-) strand; PAM type: NRG; PAM sequence: AGG
  source 1..20: mol_type = other DNA
cttttcctgtgctaagccga

SEQ ID NO: 21581 - DNA, 20 bp, synthetic construct
  misc_feature 1..20: note = Description of Artificial Sequence: Synthetic oligonucleotide
  misc_feature 1..20: note = Target: SCN10A; (-) strand; PAM type: NRG; PAM sequence: AAG
  source 1..20: mol_type = other DNA
tcttttcctgtgctaagccg

SEQ ID NO: 21582 - DNA, 20 bp, synthetic construct
  misc_feature 1..20: note = Description of Artificial Sequence: Synthetic oligonucleotide
  misc_feature 1..20: note = Target: SCN10A; (-) strand; PAM type: NRG; PAM sequence: AAG
  source 1..20: mol_type = other DNA
tcaatctcttttcctgtgct

SEQ ID NO: 21583 - DNA, 20 bp, synthetic construct
  misc_feature 1..20: note = Description of Artificial Sequence: Synthetic oligonucleotide
  misc_feature 1..20: note = Target: SCN10A; (-) strand; PAM type: NRG; PAM sequence: TGG
  source 1..20: mol_type = other DNA
tgtggaaaaggggatcaaca

SEQ ID NO: 21584 - DNA, 20 bp, synthetic construct
  misc_feature 1..20: note = Description of Artificial Sequence: Synthetic oligonucleotide
  misc_feature 1..20: note = Target: SCN10A; (-) strand; PAM type: NRG; PAM sequence: GGG
  source 1..20: mol_type = other DNA
acactaacagtgtggaaaag

SEQ ID NO: 21585 - DNA, 20 bp, synthetic construct
  misc_feature 1..20: note = Description of Artificial Sequence: Synthetic oligonucleotide
  misc_feature 1..20: note = Target: SCN10A; (-) strand; PAM type: NRG; PAM sequence: GGG
  source 1..20: mol_type = other DNA
cacactaacagtgtggaaaa

SEQ ID NO: 21586 - DNA, 20 bp, synthetic construct
  misc_feature 1..20: note = Description of Artificial Sequence: Synthetic oligonucleotide
  misc_feature 1..20: note = Target: SCN10A; (-) strand; PAM type: NRG; PAM sequence: AGG
  source 1..20: mol_type = other DNA
ccacactaacagtgtggaaa

SEQ ID NO: 21587 - DNA, 20 bp, synthetic construct
  misc_feature 1..20: note = Description of Artificial Sequence: Synthetic oligonucleotide
  misc_feature 1..20: note = Target: SCN10A; (-) strand; PAM type: NRG; PAM sequence: AAG
  source 1..20: mol_type = other DNA
tccacactaacagtgtggaa

SEQ ID NO: 21588 - DNA, 20 bp, synthetic construct
  misc_feature 1..20: note = Description of Artificial Sequence: Synthetic oligonucleotide
  misc_feature 1..20: note = Target: SCN10A; (-) strand; PAM type: NRG; PAM sequence: TGG
  source 1..20: mol_type = other DNA
gtggctccacactaacagtg

SEQ ID NO: 21589 - DNA, 20 bp, synthetic construct
  misc_feature 1..20: note = Description of Artificial Sequence: Synthetic oligonucleotide
  misc_feature 1..20: note = Target: SCN10A; (-) strand; PAM type: NRG; PAM sequence: CAG
  source 1..20: mol_type = other DNA
ggagggtggctccacactaa

SEQ ID NO: 21590 - DNA, 20 bp, synthetic construct
  misc_feature 1..20: note = Description of Artificial Sequence: Synthetic oligonucleotide
  misc_feature 1..20: note = Target: SCN10A; (-) strand; PAM type: NRG; PAM sequence: TGG
  source 1..20: mol_type = other DNA
atatctgctgtgtgggaggg

SEQ ID NO: 21591 - DNA, 20 bp, synthetic construct
  misc_feature 1..20: note = Description of Artificial Sequence: Synthetic oligonucleotide
  misc_feature 1..20: note = Target: SCN10A; (-) strand; PAM type: NRG; PAM sequence: GGG
  source 1..20: mol_type = other DNA
ataatatctgctgtgtggga

SEQ ID NO: 21592 - DNA, 20 bp, synthetic construct
  misc_feature 1..20: note = Description of Artificial Sequence: Synthetic oligonucleotide
  misc_feature 1..20: note = Target: SCN10A; (-) strand; PAM type: NRG; PAM sequence: AGG
  source 1..20: mol_type = other DNA
gataatatctgctgtgtggg

SEQ ID NO: 21593 - DNA, 20 bp, synthetic construct
  misc_feature 1..20: note = Description of Artificial Sequence: Synthetic oligonucleotide
  misc_feature 1..20: note = Target: SCN10A; (-) strand; PAM type: NRG; PAM sequence: GAG
  source 1..20: mol_type = other DNA
agataatatctgctgtgtgg

SEQ ID NO: 21594 - DNA, 20 bp, synthetic construct
  misc_feature 1..20: note = Description of Artificial Sequence: Synthetic oligonucleotide
  misc_feature 1..20: note = Target: SCN10A; (-) strand; PAM type: NRG; PAM sequence: GGG
  source 1..20: mol_type = other DNA
acagataatatctgctgtgt

SEQ ID NO: 21595 - DNA, 20 bp, synthetic construct
  misc_feature 1..20: note = Description of Artificial Sequence: Synthetic oligonucleotide
  misc_feature 1..20: note = Target: SCN10A; (-) strand; PAM type: NRG; PAM sequence: TGG
  source 1..20: mol_type = other DNA
gacagataatatctgctgtg

SEQ ID NO: 21596 - DNA, 20 bp, synthetic construct
  misc_feature 1..20: note = Description of Artificial Sequence: Synthetic oligonucleotide
  misc_feature 1..20: note = Target: SCN10A; (-) strand; PAM type: NRG; PAM sequence: CAG
  source 1..20: mol_type = other DNA
tgccctttctataggtctga

SEQ ID NO: 21597 - DNA, 20 bp, synthetic construct
  misc_feature 1..20: note = Description of Artificial Sequence: Synthetic oligonucleotide
  misc_feature 1..20: note = Target: SCN10A; (-) strand; PAM type: NRG; PAM sequence: AGG
  source 1..20: mol_type = other DNA
cccaaatatgccctttctat

SEQ ID NO: 21598 - DNA, 20 bp, synthetic construct
  misc_feature 1..20: note = Description of Artificial Sequence: Synthetic oligonucleotide
  misc_feature 1..20: note = Target: SCN10A; (-) strand; PAM type: NRG; PAM sequence: TAG
  source 1..20: mol_type = other DNA
ccccaaatatgccctttcta

SEQ ID NO: 21599 - DNA, 20 bp, synthetic construct
  misc_feature 1..20: note = Description of Artificial Sequence: Synthetic oligonucleotide
  misc_feature 1..20: note = Target: SCN10A; (-) strand; PAM type: NRG; PAM sequence: AAG
  source 1..20: mol_type = other DNA
accaccttcctgccccttga

SEQ ID NO: 21600 - DNA, 20 bp, synthetic construct
  misc_feature 1..20: note = Description of Artificial Sequence: Synthetic oligonucleotide
  misc_feature 1..20: note = Target: SCN10A; (-) strand; PAM type: NRG; PAM sequence: TAG
  source 1..20: mol_type = other DNA
gcacctcacctcagaccctg

SEQ ID NO: 21601 - DNA, 20 bp, synthetic construct
  misc_feature 1..20: note = Description of Artificial Sequence: Synthetic oligonucleotide
  misc_feature 1..20: note = Target: SCN10A; (-) strand; PAM type: NRG; PAM sequence: CAG
  source 1..20: mol_type = other DNA
atggcttcagcacctcacct

SEQ ID NO: 21602 - DNA, 20 bp, synthetic construct
  misc_feature 1..20: note = Description of Artificial Sequence: Synthetic oligonucleotide
  misc_feature 1..20: note = Target: SCN10A; (-) strand; PAM type: NRG; PAM sequence: CAG
  source 1..20: mol_type = other DNA
atccagcctgggaatggctt

SEQ ID NO: 21603 - DNA, 20 bp, synthetic construct
  misc_feature 1..20: note = Description of Artificial Sequence: Synthetic oligonucleotide
  misc_feature 1..20: note = Target: SCN10A; (-) strand; PAM type: NRG; PAM sequence: TGG
  source 1..20: mol_type = other DNA
gacacaatccagcctgggaa

SEQ ID NO: 21604 - DNA, 20 bp, synthetic construct
  misc_feature 1..20: note = Description of Artificial Sequence: Synthetic oligonucleotide
  misc_feature 1..20: note = Target: SCN10A; (-) strand; PAM type: NRG; PAM sequence: GGG
  source 1..20: mol_type = other DNA
tctgtgacacaatccagcct

SEQ ID NO: 21605 - DNA, 20 bp, synthetic construct
  misc_feature 1..20: note = Description of Artificial Sequence: Synthetic oligonucleotide
  misc_feature 1..20: note = Target: SCN10A; (-) strand; PAM type: NRG; PAM sequence: TGG
  source 1..20: mol_type = other DNA
ctctgtgacacaatccagcc

SEQ ID NO: 21606 - DNA, 20 bp, synthetic construct
  misc_feature 1..20: note = Description of Artificial Sequence: Synthetic oligonucleotide
  misc_feature 1..20: note = Target: SCN10A; (-) strand; PAM type: NRG; PAM sequence: CAG
  source 1..20: mol_type = other DNA
cccatctctgtgacacaatc

SEQ ID NO: 21607 - DNA, 20 bp, synthetic construct
  misc_feature 1..20: note = Description of Artificial Sequence: Synthetic oligonucleotide
  misc_feature 1..20: note = Target: SCN10A; (-) strand; PAM type: NRG; PAM sequence: CAG
  source 1..20: mol_type = other DNA
gttgttatcagaaaagtttc

SEQ ID NO: 21608 - DNA, 20 bp, synthetic construct
  misc_feature 1..20: note = Description of Artificial Sequence: Synthetic oligonucleotide
  misc_feature 1..20: note = Target: SCN10A; (-) strand; PAM type: NRG; PAM sequence: AAG
  source 1..20: mol_type = other DNA
gtcacctgttgttatcagaa

SEQ ID NO: 21609 - DNA, 20 bp, synthetic construct
  misc_feature 1..20: note = Description of Artificial Sequence: Synthetic oligonucleotide
  misc_feature 1..20: note = Target: SCN10A; (-) strand; PAM type: NRG; PAM sequence: CAG
  source 1..20: mol_type = other DNA
aagctgtcacctgttgttat

SEQ ID NO: 21610 - DNA, 20 bp, synthetic construct
  misc_feature 1..20: note = Description of Artificial Sequence: Synthetic oligonucleotide
  misc_feature 1..20: note = Target: SCN10A; (-) strand; PAM type: NRG; PAM sequence: AAG
  source 1..20: mol_type = other DNA
ttcctaaggtcctgcaattc

SEQ ID NO: 21611 - DNA, 20 bp, synthetic construct
  misc_feature 1..20: note = Description of Artificial Sequence: Synthetic oligonucleotide
  misc_feature 1..20: note = Target: SCN10A; (-) strand; PAM type: NRG; PAM sequence: AGG
  source 1..20: mol_type = other DNA
aatttctgacctccttccta

SEQ ID NO: 21612 - DNA, 20 bp, synthetic construct
  misc_feature 1..20: note = Description of Artificial Sequence: Synthetic oligonucleotide
  misc_feature 1..20: note = Target: SCN10A; (-) strand; PAM type: NRG; PAM sequence: AAG
  source 1..20: mol_type = other DNA
taatttctgacctccttcct

SEQ ID NO: 21613 - DNA, 20 bp, synthetic construct
  misc_feature 1..20: note = Description of Artificial Sequence: Synthetic oligonucleotide
  misc_feature 1..20: note = Target: SCN10A; (-) strand; PAM type: NRG; PAM sequence: GGG
  source 1..20: mol_type = other DNA
cacaattttatataattatt

SEQ ID NO: 21614 - DNA, 20 bp, synthetic construct
  misc_feature 1..20: note = Description of Artificial Sequence: Synthetic oligonucleotide
  misc_feature 1..20: note = Target: SCN10A; (-) strand; PAM type: NRG; PAM sequence: TGG
  source 1..20: mol_type = other DNA
tcacaattttatataattat

SEQ ID NO: 21615 - DNA, 20 bp, synthetic construct
  misc_feature 1..20: note = Description of Artificial Sequence: Synthetic oligonucleotide
  misc_feature 1..20: note = Target: SCN10A; (-) strand; PAM type: NRG; PAM sequence: TAG
  source 1..20: mol_type = other DNA
gtggtttttatttttttact

SEQ ID NO: 21616 - DNA, 20 bp, synthetic construct
  misc_feature 1..20: note = Description of Artificial Sequence: Synthetic oligonucleotide
  misc_feature 1..20: note = Target: SCN10A; (-) strand; PAM type: NRG; PAM sequence: TGG
  source 1..20: mol_type = other DNA
ttttttctgatgcgtcgagg

SEQ ID NO: 21617 - DNA, 20 bp, synthetic construct
  misc_feature 1..20: note = Description of Artificial Sequence: Synthetic oligonucleotide
  misc_feature 1..20: note = Target: SCN10A; (-) strand; PAM type: NRG; PAM sequence: AGG
  source 1..20: mol_type = other DNA
tttttttttctgatgcgtcg

SEQ ID NO: 21618 - DNA, 20 bp, synthetic construct
  misc_feature 1..20: note = Description of Artificial Sequence: Synthetic oligonucleotide
  misc_feature 1..20: note = Target: SCN10A; (-) strand; PAM type: NRG; PAM sequence: GAG
  source 1..20: mol_type = other DNA
ttttttttttctgatgcgtc

SEQ ID NO: 21619 - DNA, 20 bp, synthetic construct
  misc_feature 1..20: note = Description of Artificial Sequence: Synthetic oligonucleotide
  misc_feature 1..20: note = Target: SCN10A; (-) strand; PAM type: NRG; PAM sequence: GAG
  source 1..20: mol_type = other DNA
ggttccctgtccgtggtgct

SEQ ID NO: 21620 - DNA, 20 bp, synthetic construct
  misc_feature 1..20: note = Description of Artificial Sequence: Synthetic oligonucleotide
  misc_feature 1..20: note = Target: SCN10A; (-) strand; PAM type: NRG; PAM sequence: TGG
  source 1..20: mol_type = other DNA
agtgcaaggttccctgtccg

SEQ ID NO: 21621 - DNA, 20 bp, synthetic construct
  misc_feature 1..20: note = Description of Artificial Sequence: Synthetic oligonucleotide
  misc_feature 1..20: note = Target: SCN10A; (-) strand; PAM type: NRG; PAM sequence: AGG
  source 1..20: mol_type = other DNA
gtctgcagttctagagtgca

SEQ ID NO: 21622 - DNA, 20 bp, synthetic construct
  misc_feature 1..20: note = Description of Artificial Sequence: Synthetic oligonucleotide
  misc_feature 1..20: note = Target: SCN10A; (-) strand; PAM type: NRG; PAM sequence: AAG
  source 1..20: mol_type = other DNA
ggtctgcagttctagagtgc

SEQ ID NO: 21623 - DNA, 20 bp, synthetic construct
  misc_feature 1..20: note = Description of Artificial Sequence: Synthetic oligonucleotide
  misc_feature 1..20: note = Target: SCN10A; (-) strand; PAM type: NRG; PAM sequence: GAG
  source 1..20: mol_type = other DNA
ggctctggtctgcagttcta

SEQ ID NO: 21624 - DNA, 20 bp, synthetic construct
  misc_feature 1..20: note = Description of Artificial Sequence: Synthetic oligonucleotide
  misc_feature 1..20: note = Target: SCN10A; (-) strand; PAM type: NRG; PAM sequence: TAG
  source 1..20: mol_type = other DNA
gaggctctggtctgcagttc

SEQ ID NO: 21625 - DNA, 20 bp, synthetic construct
  misc_feature 1..20: note = Description of Artificial Sequence: Synthetic oligonucleotide
  misc_feature 1..20: note = Target: SCN10A; (-) strand; PAM type: NRG; PAM sequence: CAG
  source 1..20: mol_type = other DNA
ccttctgaggctctggtctg

SEQ ID NO: 21626 - DNA, 20 bp, synthetic construct
  misc_feature 1..20: note = Description of Artificial Sequence: Synthetic oligonucleotide
  misc_feature 1..20: note = Target: SCN10A; (-) strand; PAM type: NRG; PAM sequence: TGG
  source 1..20: mol_type = other DNA
tcagcttccttctgaggctc

SEQ ID NO: 21627 - DNA, 20 bp, synthetic construct
  misc_feature 1..20: note = Description of Artificial Sequence: Synthetic oligonucleotide
  misc_feature 1..20: note = Target: SCN10A; (-) strand; PAM type: NRG; PAM sequence: AGG
  source 1..20: mol_type = other DNA
caaaggtcagcttccttctg

SEQ ID NO: 21628 - DNA, 20 bp, synthetic construct
  misc_feature 1..20: note = Description of Artificial Sequence: Synthetic oligonucleotide
  misc_feature 1..20: note = Target: SCN10A; (-) strand; PAM type: NRG; PAM sequence: GAG
  source 1..20: mol_type = other DNA
tcaaaggtcagcttccttct

SEQ ID NO: 21629 - DNA, 20 bp, synthetic construct
  misc_feature 1..20: note = Description of Artificial Sequence: Synthetic oligonucleotide
  misc_feature 1..20: note = Target: SCN10A; (-) strand; PAM type: NRG; PAM sequence: CAG
  source 1..20: mol_type = other DNA
tgtctgcggacatcaaaggt

SEQ ID NO: 21630 - DNA, 20 bp, synthetic construct
  misc_feature 1..20: note = Description of Artificial Sequence: Synthetic oligonucleotide
  misc_feature 1..20: note = Target: SCN10A; (-) strand; PAM type: NRG; PAM sequence: AGG
  source 1..20: mol_type = other DNA
aaggtgtctgcggacatcaa

SEQ ID NO: 21631 - DNA, 20 bp, synthetic construct
  misc_feature 1..20: note = Description of Artificial Sequence: Synthetic oligonucleotide
  misc_feature 1..20: note = Target: SCN10A; (-) strand; PAM type: NRG; PAM sequence: AAG
  source 1..20: mol_type = other DNA
taaggtgtctgcggacatca

SEQ ID NO: 21632 - DNA, 20 bp, synthetic construct
  misc_feature 1..20: note = Description of Artificial Sequence: Synthetic oligonucleotide
  misc_feature 1..20: note = Target: SCN10A; (-) strand; PAM type: NRG; PAM sequence: CGG
  source 1..20: mol_type = other DNA
tgccaatcttaaggtgtctg

SEQ ID NO: 21633 - DNA, 20 bp, synthetic construct
  misc_feature 1..20: note = Description of Artificial Sequence: Synthetic oligonucleotide
  misc_feature 1..20: note = Target: SCN10A; (-) strand; PAM type: NRG; PAM sequence: AGG
  source 1..20: mol_type = other DNA
tactgaacatgccaatctta

SEQ ID NO: 21634 - DNA, 20 bp, synthetic construct
  misc_feature 1..20: note = Description of Artificial Sequence: Synthetic oligonucleotide
  misc_feature 1..20: note = Target: SCN10A; (-) strand; PAM type: NRG; PAM sequence: AAG
  source 1..20: mol_type = other DNA
atactgaacatgccaatctt

SEQ ID NO: 21635 - DNA, 20 bp, synthetic construct
  misc_feature 1..20: note = Description of Artificial Sequence: Synthetic oligonucleotide
  misc_feature 1..20: note = Target: SCN10A; (-) strand; PAM type: NRG; PAM sequence: AAG
  source 1..20: mol_type = other DNA
cggtttgtaggaaaggtggg

SEQ ID NO: 21636 - DNA, 20 bp, synthetic construct
  misc_feature 1..20: note = Description of Artificial Sequence: Synthetic oligonucleotide
  misc_feature 1..20: note = Target: SCN10A; (-) strand; PAM type: NRG; PAM sequence: GGG
  source 1..20: mol_type = other DNA
ccccggtttgtaggaaaggt

SEQ ID NO: 21637 - DNA, 20 bp, synthetic construct
  misc_feature 1..20: note = Description of Artificial Sequence: Synthetic oligonucleotide
  misc_feature 1..20: note = Target: SCN10A; (-) strand; PAM type: NRG; PAM sequence: TGG
  source 1..20: mol_type = other DNA
accccggtttgtaggaaagg

SEQ ID NO: 21638 - DNA, 20 bp, synthetic construct
  misc_feature 1..20: note = Description of Artificial Sequence: Synthetic oligonucleotide
  misc_feature 1..20: note = Target: SCN10A; (-) strand; PAM type: NRG; PAM sequence: AGG
  source 1..20: mol_type = other DNA
agaaccccggtttgtaggaa

SEQ ID NO: 21639 - DNA, 20 bp, synthetic construct
  misc_feature 1..20: note = Description of Artificial Sequence: Synthetic oligonucleotide
  misc_feature 1..20: note = Target: SCN10A; (-) strand; PAM type: NRG; PAM sequence: AAG
  source 1..20: mol_type = other DNA
aagaaccccggtttgtagga

SEQ ID NO: 21640 - DNA, 20 bp, synthetic construct
  misc_feature 1..20: note = Description of Artificial Sequence: Synthetic oligonucleotide
  misc_feature 1..20: note = Target: SCN10A; (-) strand; PAM type: NRG; PAM sequence: AGG
  source 1..20: mol_type = other DNA
gaggaagaaccccggtttgt

SEQ ID NO: 21641 - DNA, 20 bp, synthetic construct
  misc_feature 1..20: note = Description of Artificial Sequence: Synthetic oligonucleotide
  misc_feature 1..20: note = Target: SCN10A; (-) strand; PAM type: NRG; PAM sequence: TAG
  source 1..20: mol_type = other DNA
ggaggaagaaccccggtttg

SEQ ID NO: 21642 - DNA, 20 bp, synthetic construct
  misc_feature 1..20: note = Description of Artificial Sequence: Synthetic oligonucleotide
  misc_feature 1..20: note = Target: SCN10A; (-) strand; PAM type: NRG; PAM sequence: CGG
  source 1..20: mol_type = other DNA
ggacactggaggaagaaccc

SEQ ID NO: 21643 - DNA, 20 bp, synthetic construct
  misc_feature 1..20: note = Description of Artificial Sequence: Synthetic oligonucleotide
  misc_feature 1..20: note = Target: SCN10A; (-) strand; PAM type: NRG; PAM sequence: AAG
  source 1..20: mol_type = other DNA
caagatgaggacactggagg

SEQ ID NO: 21644 - DNA, 20 bp, synthetic construct
  misc_feature 1..20: note = Description of Artificial Sequence: Synthetic oligonucleotide
  misc_feature 1..20: note = Target: SCN10A; (-) strand; PAM type: NRG; PAM sequence: AGG
  source 1..20: mol_type = other DNA
ttccaagatgaggacactgg

SEQ ID NO: 21645 - DNA, 20 bp, synthetic construct
  misc_feature 1..20: note = Description of Artificial Sequence: Synthetic oligonucleotide
  misc_feature 1..20: note = Target: SCN10A; (-) strand; PAM type: NRG; PAM sequence: GAG
  source 1..20: mol_type = other DNA
attccaagatgaggacactg

SEQ ID NO: 21646 - DNA, 20 bp, synthetic construct
  misc_feature 1..20: note = Description of Artificial Sequence: Synthetic oligonucleotide
  misc_feature 1..20: note = Target: SCN10A; (-) strand; PAM type: NRG; PAM sequence: TGG
  source 1..20: mol_type = other DNA
tgattccaagatgaggacac

SEQ ID NO: 21647 - DNA, 20 bp, synthetic construct
  misc_feature 1..20: note = Description of Artificial Sequence: Synthetic oligonucleotide
  misc_feature 1..20: note = Target: SCN10A; (-) strand; PAM type: NRG; PAM sequence: AGG
  source 1..20: mol_type = other DNA
tgggtggtgattccaagatg

SEQ ID NO: 21648 - DNA, 20 bp, synthetic construct
  misc_feature 1..20: note = Description of Artificial Sequence: Synthetic oligonucleotide
  misc_feature 1..20: note = Target: SCN10A; (-) strand; PAM type: NRG; PAM sequence: GAG
  source 1..20: mol_type = other DNA
atgggtggtgattccaagat

SEQ ID NO: 21649 - DNA, 20 bp, synthetic construct
  misc_feature 1..20: note = Description of Artificial Sequence: Synthetic oligonucleotide
  misc_feature 1..20: note = Target: SCN10A; (-) strand; PAM type: NRG; PAM sequence: AAG
  source 1..20: mol_type = other DNA
atcaaatgggtggtgattcc

SEQ ID NO: 21650 - DNA, 20 bp, synthetic construct
  misc_feature 1..20: note = Description of Artificial Sequence: Synthetic oligonucleotide
  misc_feature 1..20: note = Target: SCN10A; (-) strand; PAM type: NRG; PAM sequence: TGG
  source 1..20: mol_type = other DNA
ggattgggcaatcaaatggg

SEQ ID NO: 21651 - DNA, 20 bp, synthetic construct
  misc_feature 1..20: note = Description of Artificial Sequence: Synthetic oligonucleotide
  misc_feature 1..20: note = Target: SCN10A; (-) strand; PAM type: NRG; PAM sequence: GGG
  source 1..20: mol_type = other DNA
tcaggattgggcaatcaaat

SEQ ID NO: 21652 - DNA, 20 bp, synthetic construct
  misc_feature 1..20: note = Description of Artificial Sequence: Synthetic oligonucleotide
  misc_feature 1..20: note = Target: SCN10A; (-) strand; PAM type: NRG; PAM sequence: TGG
  source 1..20: mol_type = other DNA
ttcaggattgggcaatcaaa

SEQ ID NO: 21653 - DNA, 20 bp, synthetic construct
  misc_feature 1..20: note = Description of Artificial Sequence: Synthetic oligonucleotide
  misc_feature 1..20: note = Target: SCN10A; (-) strand; PAM type: NRG; PAM sequence: GGG
  source 1..20: mol_type = other DNA
gactcccaggtttcaggatt

SEQ ID NO: 21654 - DNA, 20 bp, synthetic construct
  misc_feature 1..20: note = Description of Artificial Sequence: Synthetic oligonucleotide
  misc_feature 1..20: note = Target: SCN10A; (-) strand; PAM type: NRG; PAM sequence: TGG
  source 1..20: mol_type = other DNA
tgactcccaggtttcaggat

SEQ ID NO: 21655 - DNA, 20 bp, synthetic construct
  misc_feature 1..20: note = Description of Artificial Sequence: Synthetic oligonucleotide
  misc_feature 1..20: note = Target: SCN10A; (-) strand; PAM type: NRG; PAM sequence: AGG
  source 1..20: mol_type = other DNA
caatttgactcccaggtttc

SEQ ID NO: 21656 - DNA, 20 bp, synthetic construct
  misc_feature 1..20: note = Description of Artificial Sequence: Synthetic oligonucleotide
  misc_feature 1..20: note = Target: SCN10A; (-) strand; PAM type: NRG; PAM sequence: CAG
  source 1..20: mol_type = other DNA
ccaatttgactcccaggttt

SEQ ID NO: 21657 - DNA, 20 bp, synthetic construct
  misc_feature 1..20: note = Description of Artificial Sequence: Synthetic oligonucleotide
  misc_feature 1..20: note = Target: SCN10A; (-) strand; PAM type: NRG; PAM sequence: AGG
  source 1..20: mol_type = other DNA
gggagtccaatttgactccc

SEQ ID NO: 21658 - DNA, 20 bp, synthetic construct
  misc_feature 1..20: note = Description of Artificial Sequence: Synthetic oligonucleotide
  misc_feature 1..20: note = Target: SCN10A; (-) strand; PAM type: NRG; PAM sequence: CAG
  source 1..20: mol_type = other DNA
ggggagtccaatttgactcc

SEQ ID NO: 21659 - DNA, 20 bp, synthetic construct
  misc_feature 1..20: note = Description of Artificial Sequence: Synthetic oligonucleotide
  misc_feature 1..20: note = Target: SCN10A; (-) strand; PAM type: NRG; PAM sequence: GAG
  source 1..20: mol_type = other DNA
actgtggaaaaaggaaaggg

SEQ ID NO: 21660 - DNA, 20 bp, synthetic construct
  misc_feature 1..20: note = Description of Artificial Sequence: Synthetic oligonucleotide
  misc_feature 1..20: note = Target: SCN10A; (-) strand; PAM type: NRG; PAM sequence: GGG
  source 1..20: mol_type = other DNA
ggactgtggaaaaaggaaag

SEQ ID NO: 21661 - DNA, 20 bp, synthetic construct
  misc_feature 1..20: note = Description of Artificial Sequence: Synthetic oligonucleotide
  misc_feature 1..20: note = Target: SCN10A; (-) strand; PAM type: NRG; PAM sequence: GGG
  source 1..20: mol_type = other DNA
tggactgtggaaaaaggaaa

SEQ ID NO: 21662 - DNA, 20 bp, synthetic construct
  misc_feature 1..20: note = Description of Artificial Sequence: Synthetic oligonucleotide
  misc_feature 1..20: note = Target: SCN10A; (-) strand; PAM type: NRG; PAM sequence: AGG
  source 1..20: mol_type = other DNA
gtggactgtggaaaaaggaa

SEQ ID NO: 21663 - DNA, 20 bp, synthetic construct
  misc_feature 1..20: note = Description of Artificial Sequence: Synthetic oligonucleotide
  misc_feature 1..20: note = Target: SCN10A; (-) strand; PAM type: NRG; PAM sequence: AAG
  source 1..20: mol_type = other DNA
tgtggactgtggaaaaagga

SEQ ID NO: 21664 - DNA, 20 bp, synthetic construct
  misc_feature 1..20: note = Description of Artificial Sequence: Synthetic oligonucleotide
  misc_feature 1..20: note = Target: SCN10A; (-) strand; PAM type: NRG; PAM sequence: AGG
  source 1..20: mol_type = other DNA
ggattgtggactgtggaaaa

SEQ ID NO: 21665 - DNA, 20 bp, synthetic construct
  misc_feature 1..20: note = Description of Artificial Sequence: Synthetic oligonucleotide
  misc_feature 1..20: note = Target: SCN10A; (-) strand; PAM type: NRG; PAM sequence: AAG
  source 1..20: mol_type = other DNA
gggattgtggactgtggaaa

SEQ ID NO: 21666 - DNA, 20 bp, synthetic construct
  misc_feature 1..20: note = Description of Artificial Sequence: Synthetic oligonucleotide
  misc_feature 1..20: note = Target: SCN10A; (-) strand; PAM type: NRG; PAM sequence: TGG
  source 1..20: mol_type = other DNA
aagattgggattgtggactg

SEQ ID NO: 21667 - DNA, 20 bp, synthetic construct
  misc_feature 1..20: note = Description of Artificial Sequence: Synthetic oligonucleotide
  misc_feature 1..20: note = Target: SCN10A; (-) strand; PAM type: NRG; PAM sequence: TGG
  source 1..20: mol_type = other DNA
gatcaacaagattgggattg

SEQ ID NO: 21668 - DNA, 20 bp, synthetic construct
  misc_feature 1..20: note = Description of Artificial Sequence: Synthetic oligonucleotide
  misc_feature 1..20: note = Target: SCN10A; (-) strand; PAM type: NRG; PAM sequence: GGG
  source 1..20: mol_type = other DNA
ggaagtggatcaacaagatt

SEQ ID NO: 21669 - DNA, 20 bp, synthetic construct
  misc_feature 1..20: note = Description of Artificial Sequence: Synthetic oligonucleotide
  misc_feature 1..20: note = Target: SCN10A; (-) strand; PAM type: NRG; PAM sequence: TGG
  source 1..20: mol_type = other DNA
gggaagtggatcaacaagat

SEQ ID NO: 21670 - DNA, 20 bp, synthetic construct
  misc_feature 1..20: note = Description of Artificial Sequence: Synthetic oligonucleotide
  misc_feature 1..20: note = Target: SCN10A; (-) strand; PAM type: NRG; PAM sequence: AAG
  source 1..20: mol_type = other DNA
ccttagggaagtggatcaac

SEQ ID NO: 21671 - DNA, 20 bp, synthetic construct
  misc_feature 1..20: note = Description of Artificial Sequence: Synthetic oligonucleotide
  misc_feature 1..20: note = Target: SCN10A; (-) strand; PAM type: NRG; PAM sequence: TGG
  source 1..20: mol_type = other DNA
ataaggacaccttagggaag

SEQ ID NO: 21672 - DNA, 20 bp, synthetic construct
  misc_feature 1..20: note = Description of Artificial Sequence: Synthetic oligonucleotide
  misc_feature 1..20: note = Target: SCN10A; (-) strand; PAM type: NRG; PAM sequence: AAG
  source 1..20: mol_type = other DNA
attataaggacaccttaggg

SEQ ID NO: 21673 - DNA, 20 bp, synthetic construct
  misc_feature 1..20: note = Description of Artificial Sequence: Synthetic oligonucleotide
  misc_feature 1..20: note = Target: SCN10A; (-) strand; PAM type: NRG; PAM sequence: GGG
  source 1..20: mol_type = other DNA
tgaattataaggacacctta

SEQ ID NO: 21674 - DNA, 20 bp, synthetic construct
  misc_feature 1..20: note = Description of Artificial Sequence: Synthetic oligonucleotide
  misc_feature 1..20: note = Target: SCN10A; (-) strand; PAM type: NRG; PAM sequence: AGG
  source 1..20: mol_type = other DNA
gtgaattataaggacacctt

SEQ ID NO: 21675 - DNA, 20 bp, synthetic construct
  misc_feature 1..20: note = Description of Artificial Sequence: Synthetic oligonucleotide
  misc_feature 1..20: note = Target: SCN10A; (-) strand; PAM type: NRG; PAM sequence: TAG
  source 1..20: mol_type = other DNA
ggtgaattataaggacacct

SEQ ID NO: 21676 - DNA, 20 bp, synthetic construct
  misc_feature 1..20: note = Description of Artificial Sequence: Synthetic oligonucleotide
  misc_feature 1..20: note = Target: SCN10A; (-) strand; PAM type: NRG; PAM sequence: AGG
  source 1..20: mol_type = other DNA
gggaaaaggggtgaattata

SEQ ID NO: 21677 - DNA, 20 bp, synthetic construct
  misc_feature 1..20: note = Description of Artificial Sequence: Synthetic oligonucleotide
  misc_feature 1..20: note = Target: SCN10A; (-) strand; PAM type: NRG; PAM sequence: AAG
  source 1..20: mol_type = other DNA
ggggaaaaggggtgaattat

SEQ ID NO: 21678 - DNA, 20 bp, synthetic construct
  misc_feature 1..20: note = Description of Artificial Sequence: Synthetic oligonucleotide
  misc_feature 1..20: note = Target: SCN10A; (-) strand; PAM type: NRG; PAM sequence: GGG
  source 1..20: mol_type = other DNA
taattatagatggggaaaag

SEQ ID NO: 21679 - DNA, 20 bp, synthetic construct
  misc_feature 1..20: note = Description of Artificial Sequence: Synthetic oligonucleotide
  misc_feature 1..20: note = Target: SCN10A; (-) strand; PAM type: NRG; PAM sequence: GGG
  source 1..20: mol_type = other DNA
gtaattatagatggggaaaa

SEQ ID NO: 21680 - DNA, 20 bp, synthetic construct
  misc_feature 1..20: note = Description of Artificial Sequence: Synthetic oligonucleotide
  misc_feature 1..20: note = Target: SCN10A; (-) strand; PAM type: NRG; PAM sequence: AGG
  source 1..20: mol_type = other DNA
tgtaattatagatggggaaa

SEQ ID NO: 21681 - DNA, 20 bp, synthetic construct
  misc_feature 1..20: note = Description of Artificial Sequence: Synthetic oligonucleotide
  misc_feature 1..20: note = Target: SCN10A; (-) strand; PAM type: NRG; PAM sequence: AAG
  source 1..20: mol_type = other DNA
gtgtaattatagatggggaa

SEQ ID NO: 21682 - DNA, 20 bp, synthetic construct
  misc_feature 1..20: note = Description of Artificial Sequence: Synthetic oligonucleotide
  misc_feature 1..20: note = Target: SCN10A; (-) strand; PAM type: NRG; PAM sequence: GGG
  source 1..20: mol_type = other DNA
ggaaagtgtaattatagatg

SEQ ID NO: 21683 - DNA, 20 bp, synthetic construct
  misc_feature 1..20: note = Description of Artificial Sequence: Synthetic oligonucleotide
  misc_feature 1..20: note = Target: SCN10A; (-) strand; PAM type: NRG; PAM sequence: GGG
  source 1..20: mol_type = other DNA
aggaaagtgtaattatagat

SEQ ID NO: 21684 - DNA, 20 bp, synthetic construct
  misc_feature 1..20: note = Description of Artificial Sequence: Synthetic oligonucleotide
  misc_feature 1..20: note = Target: SCN10A; (-) strand; PAM type: NRG; PAM sequence: TGG
  source 1..20: mol_type = other DNA
taggaaagtgtaattataga

SEQ ID NO: 21685 - DNA, 20 bp, synthetic construct
  misc_feature 1..20: note = Description of Artificial Sequence: Synthetic oligonucleotide
  misc_feature 1..20: note = Target: SCN10A; (-) strand; PAM type: NRG; PAM sequence: TAG
  source 1..20: mol_type = other DNA
aaactaggaaagtgtaatta

SEQ ID NO: 21686 - DNA, 20 bp, synthetic construct
  misc_feature 1..20: note = Description of Artificial Sequence: Synthetic oligonucleotide
  misc_feature 1..20: note = Target: SCN10A; (-) strand; PAM type: NRG; PAM sequence: AAG
  source 1..20: mol_type = other DNA
aatggtgtcttaaactagga

SEQ ID NO: 21687 - DNA, 20 bp, synthetic construct
  misc_feature 1..20: note = Description of Artificial Sequence: Synthetic oligonucleotide
  misc_feature 1..20: note = Target: SCN10A; (-) strand; PAM type: NRG; PAM sequence: AGG
  source 1..20: mol_type = other DNA
ccaaaatggtgtcttaaact

SEQ ID NO: 21688 - DNA, 20 bp, synthetic construct
  misc_feature 1..20: note = Description of Artificial Sequence: Synthetic oligonucleotide
  misc_feature 1..20: note = Target: SCN10A; (-) strand; PAM type: NRG; PAM sequence: TAG
  source 1..20: mol_type = other DNA
tccaaaatggtgtcttaaac

SEQ ID NO: 21689 - DNA, 20 bp, synthetic construct
  misc_feature 1..20: note = Description of Artificial Sequence: Synthetic oligonucleotide
  misc_feature 1..20: note = Target: SCN10A; (-) strand; PAM type: NRG; PAM sequence: TGG
  source 1..20: mol_type = other DNA
atccagacacccctccaaaa

SEQ ID NO: 21690 - DNA, 20 bp, synthetic construct
  misc_feature 1..20: note = Description of Artificial Sequence: Synthetic oligonucleotide
  misc_feature 1..20: note = Target: SCN10A; (-) strand; PAM type: NRG; PAM sequence: CAG
  source 1..20: mol_type = other DNA
gcatagagcctaaaaggatc

SEQ ID NO: 21691 - DNA, 20 bp, synthetic construct
  misc_feature 1..20: note = Description of Artificial Sequence: Synthetic oligonucleotide
  misc_feature 1..20: note = Target: SCN10A; (-) strand; PAM type: NRG; PAM sequence: AGG
  source 1..20: mol_type = other DNA
ctggaggcatagagcctaaa

SEQ ID NO: 21692 - DNA, 20 bp, synthetic construct
  misc_feature 1..20: note = Description of Artificial Sequence: Synthetic oligonucleotide
  misc_feature 1..20: note = Target: SCN10A; (-) strand; PAM type: NRG; PAM sequence: AAG
  source 1..20: mol_type = other DNA
gctggaggcatagagcctaa

SEQ ID NO: 21693 - DNA, 20 bp, synthetic construct
  misc_feature 1..20: note = Description of Artificial Sequence: Synthetic oligonucleotide
  misc_feature 1..20: note = Target: SCN10A; (-) strand; PAM type: NRG; PAM sequence: GAG
  source 1..20: mol_type = other DNA
gagaaagagctggaggcata

SEQ ID NO: 21694 - DNA, 20 bp, synthetic construct
  misc_feature 1..20: note = Description of Artificial Sequence: Synthetic oligonucleotide
  misc_feature 1..20: note = Target: SCN10A; (-) strand; PAM type: NRG; PAM sequence: TAG
  source 1..20: mol_type = other DNA
cagagaaagagctggaggca

SEQ ID NO: 21695 - DNA, 20 bp, synthetic construct
  misc_feature 1..20: note = Description of Artificial Sequence: Synthetic oligonucleotide
  misc_feature 1..20: note = Target: SCN10A; (-) strand; PAM type: NRG; PAM sequence: AGG
  source 1..20: mol_type = other DNA
tgtggcagagaaagagctgg

SEQ ID NO: 21696 - DNA, 20 bp, synthetic construct
  misc_feature 1..20: note = Description of Artificial Sequence: Synthetic oligonucleotide
  misc_feature 1..20: note = Target: SCN10A; (-) strand; PAM type: NRG; PAM sequence: GAG
  source 1..20: mol_type = other DNA
gtgtggcagagaaagagctg

SEQ ID NO: 21697 - DNA, 20 bp, synthetic construct
  misc_feature 1..20: note = Description of Artificial Sequence: Synthetic oligonucleotide
  misc_feature 1..20: note = Target: SCN10A; (-) strand; PAM type: NRG; PAM sequence: TGG
  source 1..20: mol_type = other DNA
gtgtgtggcagagaaagagc

SEQ ID NO: 21698 - DNA, 20 bp, synthetic construct
  misc_feature 1..20: note = Description of Artificial Sequence: Synthetic oligonucleotide
  misc_feature 1..20: note = Target: SCN10A; (-) strand; PAM type: NRG; PAM sequence: GAG
  source 1..20: mol_type = other DNA
agaggtgtgtggcagagaaa

SEQ ID NO: 21699 - DNA, 20 bp, synthetic construct
  misc_feature 1..20: note = Description of Artificial Sequence: Synthetic oligonucleotide
  misc_feature 1..20: note = Target: SCN10A; (-) strand; PAM type: NRG; PAM sequence: AAG
  source 1..20: mol_type = other DNA
gaagaggtgtgtggcagaga

SEQ ID NO: 21700 - DNA, 20 bp, synthetic construct
  misc_feature 1..20: note = Description of Artificial Sequence: Synthetic oligonucleotide
  misc_feature 1..20: note = Target: SCN10A; (-) strand; PAM type: NRG; PAM sequence: GAG
  source 1..20: mol_type = other DNA
gtgggaagaggtgtgtggca

SEQ ID NO: 21701 - DNA, 20 bp, synthetic construct
  misc_feature 1..20: note = Description of Artificial Sequence: Synthetic oligonucleotide
  misc_feature 1..20: note = Target: SCN10A; (-) strand; PAM type: NRG; PAM sequence: CAG
  source 1..20: mol_type = other DNA
gagtgggaagaggtgtgtgg

SEQ ID NO: 21702 - DNA, 20 bp, synthetic construct
  misc_feature 1..20: note = Description of Artificial Sequence: Synthetic oligonucleotide
  misc_feature 1..20: note = Target: SCN10A; (-) strand; PAM type: NRG; PAM sequence: TGG
  source 1..20: mol_type = other DNA
ttggagtgggaagaggtgtg

SEQ ID NO: 21703 - DNA, 20 bp, synthetic construct
  misc_feature 1..20: note = Description of Artificial Sequence: Synthetic oligonucleotide
  misc_feature 1..20: note = Target: SCN10A; (-) strand; PAM type: NRG; PAM sequence: AGG
  source 1..20: mol_type = other DNA
caatgagttggagtgggaag

SEQ ID NO: 21704 - DNA, 20 bp, synthetic construct
  misc_feature 1..20: note = Description of Artificial Sequence: Synthetic oligonucleotide
  misc_feature 1..20: note = Target: SCN10A; (-) strand; PAM type: NRG; PAM sequence: GAG
  source 1..20: mol_type = other DNA
acaatgagttggagtgggaa

SEQ ID NO: 21705 - DNA, 20 bp, synthetic construct
  misc_feature 1..20: note = Description of Artificial Sequence: Synthetic oligonucleotide
  misc_feature 1..20: note = Target: SCN10A; (-) strand; PAM type: NRG; PAM sequence: AAG
  source 1..20: mol_type = other DNA
agacaatgagttggagtggg

SEQ ID NO: 21706 - DNA, 20 bp, synthetic construct
  misc_feature 1..20: note = Description of Artificial Sequence: Synthetic oligonucleotide
  misc_feature 1..20: note = Target: SCN10A; (-) strand; PAM type: NRG; PAM sequence: GGG
  source 1..20: mol_type = other DNA
cgtagacaatgagttggagt

SEQ ID NO: 21707 - DNA, 20 bp, synthetic construct
  misc_feature 1..20: note = Description of Artificial Sequence: Synthetic oligonucleotide
  misc_feature 1..20: note = Target: SCN10A; (-) strand; PAM type: NRG; PAM sequence: TGG
  source 1..20: mol_type = other DNA
ccgtagacaatgagttggag

SEQ ID NO: 21708 - DNA, 20 bp, synthetic construct
  misc_feature 1..20: note = Description of Artificial Sequence: Synthetic oligonucleotide
  misc_feature 1..20: note = Target: SCN10A; (-) strand; PAM type: NRG; PAM sequence: GAG
  source 1..20: mol_type = other DNA
ctgccgtagacaatgagttg

SEQ ID NO: 21709 - DNA, 20 bp, synthetic construct
  misc_feature 1..20: note = Description of Artificial Sequence: Synthetic oligonucleotide
  misc_feature 1..20: note = Target: SCN10A; (-) strand; PAM type: NRG; PAM sequence: TGG
  source 1..20: mol_type = other DNA
agctgccgtagacaatgagt

SEQ ID NO: 21710 - DNA, 20 bp, synthetic construct
  misc_feature 1..20: note = Description of Artificial Sequence: Synthetic oligonucleotide
  misc_feature 1..20: note = Target: SCN10A; (-) strand; PAM type: NRG; PAM sequence: GAG
  source 1..20: mol_type = other DNA
ttgcagctgccgtagacaat

SEQ ID NO: 21711 - DNA, 20 bp, synthetic construct
  misc_feature 1..20: note = Description of Artificial Sequence: Synthetic oligonucleotide
  misc_feature 1..20: note = Target: SCN10A; (-) strand; PAM type: NRG; PAM sequence: TAG
  source 1..20: mol_type = other DNA
acccaccattgcagctgccg

SEQ ID NO: 21712 - DNA, 20 bp, synthetic construct
  misc_feature 1..20: note = Description of Artificial Sequence: Synthetic oligonucleotide
  misc_feature 1..20: note = Target: SCN10A; (-) strand; PAM type: NRG; PAM sequence: CAG
  source 1..20: mol_type = other DNA
ctaaagattacccaccattg

SEQ ID NO: 21713 - DNA, 20 bp, synthetic construct
  misc_feature 1..20: note = Description of Artificial Sequence: Synthetic oligonucleotide
  misc_feature 1..20: note = Target: SCN10A; (-) strand; PAM type: NRG; PAM sequence: AAG
  source 1..20: mol_type = other DNA
aggctcaggtttgtgctcta

SEQ ID NO: 21714 - DNA, 20 bp, synthetic construct
  misc_feature 1..20: note = Description of Artificial Sequence: Synthetic oligonucleotide
  misc_feature 1..20: note = Target: SCN10A; (-) strand; PAM type: NRG; PAM sequence: AGG
  source 1..20: mol_type = other DNA
cgcaggatggtaagaggctc

SEQ ID NO: 21715 - DNA, 20 bp, synthetic construct
  misc_feature 1..20: note = Description of Artificial Sequence: Synthetic oligonucleotide
  misc_feature 1..20: note = Target: SCN10A; (-) strand; PAM type: NRG; PAM sequence: CAG
  source 1..20: mol_type = other DNA
gcgcaggatggtaagaggct

SEQ ID NO: 21716 - DNA, 20 bp, synthetic construct
  misc_feature 1..20: note = Description of Artificial Sequence: Synthetic oligonucleotide
  misc_feature 1..20: note = Target: SCN10A; (-) strand; PAM type: NRG; PAM sequence: AGG
  source 1..20: mol_type = other DNA
aaccagcgcaggatggtaag

SEQ ID NO: 21717 - DNA, 20 bp, synthetic construct
  misc_feature 1..20: note = Description of Artificial Sequence: Synthetic oligonucleotide
  misc_feature 1..20: note = Target: SCN10A; (-) strand; PAM type: NRG; PAM sequence: GAG
  source 1..20: mol_type = other DNA
caaccagcgcaggatggtaa

SEQ ID NO: 21718 - DNA, 20 bp, synthetic construct
  misc_feature 1..20: note = Description of Artificial Sequence: Synthetic oligonucleotide
  misc_feature 1..20: note = Target: SCN10A; (-) strand; PAM type: NRG; PAM sequence: AAG
  source 1..20: mol_type = other DNA
tacaaccagcgcaggatggt

SEQ ID NO: 21719 - DNA, 20 bp, synthetic construct
  misc_feature 1..20: note = Description of Artificial Sequence: Synthetic oligonucleotide
  misc_feature 1..20: note = Target: SCN10A; (-) strand; PAM type: NRG; PAM sequence: TGG
  source 1..20: mol_type = other DNA
tccttacaaccagcgcagga

SEQ ID NO: 21720 - DNA, 20 bp, synthetic construct
  misc_feature 1..20: note = Description of Artificial Sequence: Synthetic oligonucleotide
  misc_feature 1..20: note = Target: SCN10A; (-) strand; PAM type: NRG; PAM sequence: AGG
  source 1..20: mol_type = other DNA
ctgatccttacaaccagcgc

SEQ ID NO: 21721 - DNA, 20 bp, synthetic construct
  misc_feature 1..20: note = Description of Artificial Sequence: Synthetic oligonucleotide
  misc_feature 1..20: note = Target: SCN10A; (-) strand; PAM type: NRG; PAM sequence: CAG
  source 1..20: mol_type = other DNA
tctgatccttacaaccagcg

SEQ ID NO: 21722 - DNA, 20 bp, synthetic construct
  misc_feature 1..20: note = Description of Artificial Sequence: Synthetic oligonucleotide
  misc_feature 1..20: note = Target: SCN10A; (-) strand; PAM type: NRG; PAM sequence: CAG
  source 1..20: mol_type = other DNA
cccgctctgatccttacaac

SEQ ID NO: 21723 - DNA, 20 bp, synthetic construct
  misc_feature 1..20: note = Description of Artificial Sequence: Synthetic oligonucleotide
  misc_feature 1..20: note = Target: SCN10A; (-) strand; PAM type: NRG; PAM sequence: AAG
  source 1..20: mol_type = other DNA
agtgtcagagggctccacag

SEQ ID NO: 21724 - DNA, 20 bp, synthetic construct
  misc_feature 1..20: note = Description of Artificial Sequence: Synthetic oligonucleotide
  misc_feature 1..20: note = Target: SCN10A; (-) strand; PAM type: NRG; PAM sequence: CAG
  source 1..20: mol_type = other DNA
aagagtgtcagagggctcca

SEQ ID NO: 21725 - DNA, 20 bp, synthetic construct
  misc_feature 1..20: note = Description of Artificial Sequence: Synthetic oligonucleotide
  misc_feature 1..20: note = Target: SCN10A; (-) strand; PAM type: NRG; PAM sequence: GGG
  source 1..20: mol_type = other DNA
ataaagccaagagtgtcaga

SEQ ID NO: 21726 - DNA, 20 bp, synthetic construct
  misc_feature 1..20: note = Description of Artificial Sequence: Synthetic oligonucleotide
  misc_feature 1..20: note = Target: SCN10A; (-) strand; PAM type: NRG; PAM sequence: AGG
  source 1..20: mol_type = other DNA
aataaagccaagagtgtcag

SEQ ID NO: 21727 - DNA, 20 bp, synthetic construct
  misc_feature 1..20: note = Description of Artificial Sequence: Synthetic oligonucleotide
  misc_feature 1..20: note = Target: SCN10A; (-) strand; PAM type: NRG; PAM sequence: GAG
  source 1..20: mol_type = other DNA
gaataaagccaagagtgtca

SEQ ID NO: 21728 - DNA, 20 bp, synthetic construct
  misc_feature 1..20: note = Description of Artificial Sequence: Synthetic oligonucleotide
  misc_feature 1..20: note = Target: SCN10A; (-) strand; PAM type: NRG; PAM sequence: CAG
  source 1..20: mol_type = other DNA
tagaataaagccaagagtgt

SEQ ID NO: 21729 - DNA, 20 bp, synthetic construct
  misc_feature 1..20: note = Description of Artificial Sequence: Synthetic oligonucleotide
  misc_feature 1..20: note = Target: SCN10A; (-) strand; PAM type: NRG; PAM sequence: GAG
  source 1..20: mol_type = other DNA
aaggcatagaataaagccaa

SEQ ID NO: 21730 - DNA, 20 bp, synthetic construct
  misc_feature 1..20: note = Description of Artificial Sequence: Synthetic oligonucleotide
  misc_feature 1..20: note = Target: SCN10A; (-) strand; PAM type: NRG; PAM sequence: AAG
  source 1..20: mol_type = other DNA
agaaggcatagaataaagcc

SEQ ID NO: 21731 - DNA, 20 bp, synthetic construct
  misc_feature 1..20: note = Description of Artificial Sequence: Synthetic oligonucleotide
  misc_feature 1..20: note = Target: SCN10A; (-) strand; PAM type: NRG; PAM sequence: AAG
  source 1..20: mol_type = other DNA
gtgagagaaggcatagaata

SEQ ID NO: 21732 - DNA, 20 bp, synthetic construct
  misc_feature 1..20: note = Description of Artificial Sequence: Synthetic oligonucleotide
  misc_feature 1..20: note = Target: SCN10A; (-) strand; PAM type: NRG; PAM sequence: TAG
  source 1..20: mol_type = other DNA
aatgccagtgagagaaggca

SEQ ID NO: 21733 - DNA, 20 bp, synthetic construct
  misc_feature 1..20: note = Description of Artificial Sequence: Synthetic oligonucleotide
  misc_feature 1..20: note = Target: SCN10A; (-) strand; PAM type: NRG; PAM sequence: AGG
  source 1..20: mol_type = other DNA
ccaaaaatgccagtgagaga

SEQ ID NO: 21734 - DNA, 20 bp, synthetic construct
  misc_feature 1..20: note = Description of Artificial Sequence: Synthetic oligonucleotide
  misc_feature 1..20: note = Target: SCN10A; (-) strand; PAM type: NRG; PAM sequence: AAG
  source 1..20: mol_type = other DNA
tccaaaaatgccagtgagag

SEQ ID NO: 21735 - DNA, 20 bp, synthetic construct
  misc_feature 1..20: note = Description of Artificial Sequence: Synthetic oligonucleotide
  misc_feature 1..20: note = Target: SCN10A; (-) strand; PAM type: NRG; PAM sequence: GAG
  source 1..20: mol_type = other DNA
acctccaaaaatgccagtga

SEQ ID NO: 21736 - DNA, 20 bp, synthetic construct
  misc_feature 1..20: note = Description of Artificial Sequence: Synthetic oligonucleotide
  misc_feature 1..20: note = Target: SCN10A; (-) strand; PAM type: NRG; PAM sequence: GAG
  source 1..20: mol_type = other DNA
taacctccaaaaatgccagt

SEQ ID NO: 21737 - DNA, 20 bp, synthetic construct
  misc_feature 1..20: note = Description of Artificial Sequence: Synthetic oligonucleotide
  misc_feature 1..20: note = Target: SCN10A; (-) strand; PAM type: NRG; PAM sequence: CAG
  source 1..20: mol_type = other DNA
cctttaacctccaaaaatgc

SEQ ID NO: 21738 - DNA, 20 bp, synthetic construct
  misc_feature 1..20: note = Description of Artificial Sequence: Synthetic oligonucleotide
  misc_feature 1..20: note = Target: SCN10A; (-) strand; PAM type: NRG; PAM sequence: TGG
  source 1..20: mol_type = other DNA
acctctctccactcccacaa

SEQ ID NO: 21739 - DNA, 20 bp, synthetic construct
  misc_feature 1..20: note = Description of Artificial Sequence: Synthetic oligonucleotide
  misc_feature 1..20: note = Target: SCN10A; (-) strand; PAM type: NRG; PAM sequence: GGG
  source 1..20: mol_type = other DNA
cgcaggtgctagcagcacta

SEQ ID NO: 21740 - DNA, 20 bp, synthetic construct
  misc_feature 1..20: note = Description of Artificial Sequence: Synthetic oligonucleotide
  misc_feature 1..20: note = Target: SCN10A; (-) strand; PAM type: NRG; PAM sequence: AGG
  source 1..20: mol_type = other DNA
tcgcaggtgctagcagcact

SEQ ID NO: 21741 - DNA, 20 bp, synthetic construct
  misc_feature 1..20: note = Description of Artificial Sequence: Synthetic oligonucleotide
  misc_feature 1..20: note = Target: SCN10A; (-) strand; PAM type: NRG; PAM sequence: TAG
  source 1..20: mol_type = other DNA
ttcgcaggtgctagcagcac

SEQ ID NO: 21742 - DNA, 20 bp, synthetic construct
  misc_feature 1..20: note = Description of Artificial Sequence: Synthetic oligonucleotide
  misc_feature 1..20: note = Target: SCN10A; (-) strand; PAM type: NRG; PAM sequence: CAG
  source 1..20: mol_type = other DNA
tctctcttcgcaggtgctag

SEQ ID NO: 21743 - DNA, 20 bp, synthetic construct
  misc_feature 1..20: note = Description of Artificial Sequence: Synthetic oligonucleotide
  misc_feature 1..20: note = Target: SCN10A; (-) strand; PAM type: NRG; PAM sequence: TAG
  source 1..20: mol_type = other DNA
tgttctctcttcgcaggtgc

SEQ ID NO: 21744 - DNA, 20 bp, synthetic construct
  misc_feature 1..20: note = Description of Artificial Sequence: Synthetic oligonucleotide
  misc_feature 1..20: note = Target: SCN10A; (-) strand; PAM type: NRG; PAM sequence: AGG
  source 1..20: mol_type = other DNA
acctgctgttctctcttcgc

SEQ ID NO: 21745 - DNA, 20 bp, synthetic construct
  misc_feature 1..20: note = Description of Artificial Sequence: Synthetic oligonucleotide
  misc_feature 1..20: note = Target: SCN10A; (-) strand; PAM type: NRG; PAM sequence: CAG
  source 1..20: mol_type = other DNA
cacctgctgttctctcttcg

SEQ ID NO: 21746 - DNA, 20 bp, synthetic construct
  misc_feature 1..20: note = Description of Artificial Sequence: Synthetic oligonucleotide
  misc_feature 1..20: note = Target: SCN10A; (-) strand; PAM type: NRG; PAM sequence: TGG
  source 1..20: mol_type = other DNA
taagtccaagcaaatactat

SEQ ID NO: 21747 - DNA, 20 bp, synthetic construct
  misc_feature 1..20: note = Description of Artificial Sequence: Synthetic oligonucleotide
  misc_feature 1..20: note = Target: SCN10A; (-) strand; PAM type: NRG; PAM sequence: AAG
  source 1..20: mol_type = other DNA
gacacattcatgctaagtcc

SEQ ID NO: 21748 - DNA, 20 bp, synthetic construct
  misc_feature 1..20: note = Description of Artificial Sequence: Synthetic oligonucleotide
  misc_feature 1..20: note = Target: SCN10A; (-) strand; PAM type: NRG; PAM sequence: AAG
  source 1..20: mol_type = other DNA
ctgggggacacattcatgct

SEQ ID NO: 21749 - DNA, 20 bp, synthetic construct
  misc_feature 1..20: note = Description of Artificial Sequence: Synthetic oligonucleotide
  misc_feature 1..20: note = Target: SCN10A; (-) strand; PAM type: NRG; PAM sequence: GGG
  source 1..20: mol_type = other DNA
ccctggcaccccatgtctgg

SEQ ID NO: 21750 - DNA, 20 bp, synthetic construct
  misc_feature 1..20: note = Description of Artificial Sequence: Synthetic oligonucleotide
  misc_feature 1..20: note = Target: SCN10A; (-) strand; PAM type: NRG; PAM sequence: GGG
  source 1..20: mol_type = other DNA
cccctggcaccccatgtctg

SEQ ID NO: 21751 - DNA, 20 bp, synthetic construct
  misc_feature 1..20: note = Description of Artificial Sequence: Synthetic oligonucleotide
  misc_feature 1..20: note = Target: SCN10A; (-) strand; PAM type: NRG; PAM sequence: GGG
  source 1..20: mol_type = other DNA
acccctggcaccccatgtct

SEQ ID NO: 21752 - DNA, 20 bp, synthetic construct
  misc_feature 1..20: note = Description of Artificial Sequence: Synthetic oligonucleotide
  misc_feature 1..20: note = Target: SCN10A; (-) strand; PAM type: NRG; PAM sequence: TGG
  source 1..20: mol_type = other DNA
cacccctggcaccccatgtc

SEQ ID NO: 21753 - DNA, 20 bp, synthetic construct
  misc_feature 1..20: note = Description of Artificial Sequence: Synthetic oligonucleotide
  misc_feature 1..20: note = Target: SCN10A; (-) strand; PAM type: NRG; PAM sequence: TGG
  source 1..20: mol_type = other DNA
tgtttcagatctctcacccc

SEQ ID NO: 21754 - DNA, 20 bp, synthetic construct
  misc_feature 1..20: note = Description of Artificial Sequence: Synthetic oligonucleotide
  misc_feature 1..20: note = Target: SCN10A; (-) strand; PAM type: NRG; PAM sequence: CAG
  source 1..20: mol_type = other DNA
acccttcagcttctctgttt

SEQ ID NO: 21755 - DNA, 20 bp, synthetic construct
  misc_feature 1..20: note = Description of Artificial Sequence: Synthetic oligonucleotide
  misc_feature 1..20: note = Target: SCN10A; (-) strand; PAM type: NRG; PAM sequence: CAG
  source 1..20: mol_type = other DNA
ccaccctggtcctaaccctt

SEQ ID NO: 21756 - DNA, 20 bp, synthetic construct
  misc_feature 1..20: note = Description of Artificial Sequence: Synthetic oligonucleotide
  misc_feature 1..20: note = Target: SCN10A; (-) strand; PAM type: NRG; PAM sequence: TGG
  source 1..20: mol_type = other DNA
gcctaatcccaccaccaccc

SEQ ID NO: 21757 - DNA, 20 bp, synthetic construct
  misc_feature 1..20: note = Description of Artificial Sequence: Synthetic oligonucleotide
  misc_feature 1..20: note = Target: SCN10A; (-) strand; PAM type: NRG; PAM sequence: TGG
  source 1..20: mol_type = other DNA
cgaggtgtctgttcctgcca

SEQ ID NO: 21758 - DNA, 20 bp, synthetic construct
  misc_feature 1..20: note = Description of Artificial Sequence: Synthetic oligonucleotide
  misc_feature 1..20: note = Target: SCN10A; (-) strand; PAM type: NRG; PAM sequence: AGG
  source 1..20: mol_type = other DNA
gaatgagtgggggtgacccg

SEQ ID NO: 21759 - DNA, 20 bp, synthetic construct
  misc_feature 1..20: note = Description of Artificial Sequence: Synthetic oligonucleotide
  misc_feature 1..20: note = Target: SCN10A; (-) strand; PAM type: NRG; PAM sequence: GAG
  source 1..20: mol_type = other DNA
tgaatgagtgggggtgaccc

SEQ ID NO: 21760 - DNA, 20 bp, synthetic construct
  misc_feature 1..20: note = Description of Artificial Sequence: Synthetic oligonucleotide
  misc_feature 1..20: note = Target: SCN10A; (-) strand; PAM type: NRG; PAM sequence: GGG
  source 1..20: mol_type = other DNA
agtaccccatgaatgagtgg

SEQ ID NO: 21761 - DNA, 20 bp, synthetic construct
  misc_feature 1..20: note = Description of Artificial Sequence: Synthetic oligonucleotide
  misc_feature 1..20: note = Target: SCN10A; (-) strand; PAM type: NRG; PAM sequence: GGG
  source 1..20: mol_type = other DNA
gagtaccccatgaatgagtg

SEQ ID NO: 21762 - DNA, 20 bp, synthetic construct
  misc_feature 1..20: note = Description of Artificial Sequence: Synthetic oligonucleotide
  misc_feature 1..20: note = Target: SCN10A; (-) strand; PAM type: NRG; PAM sequence: GGG
  source 1..20: mol_type = other DNA
agagtaccccatgaatgagt

SEQ ID NO: 21763 - DNA, 20 bp, synthetic construct
  misc_feature 1..20: note = Description of Artificial Sequence: Synthetic oligonucleotide
  misc_feature 1..20: note = Target: SCN10A; (-) strand; PAM type: NRG; PAM sequence: TGG
  source 1..20: mol_type = other DNA
cagagtaccccatgaatgag

SEQ ID NO: 21764 - DNA, 20 bp, synthetic construct
  misc_feature 1..20: note = Description of Artificial Sequence: Synthetic oligonucleotide
  misc_feature 1..20: note = Target: SCN10A; (-) strand; PAM type: NRG; PAM sequence: GAG
  source 1..20: mol_type = other DNA
caacagagtaccccatgaat

SEQ ID NO: 21765 - DNA, 20 bp, synthetic construct
  misc_feature 1..20: note = Description of Artificial Sequence: Synthetic oligonucleotide
  misc_feature 1..20: note = Target: SCN10A; (-) strand; PAM type: NRG; PAM sequence: GAG
  source 1..20: mol_type = other DNA
atctgggtggggcaccaaca

SEQ ID NO: 21766 - DNA, 20 bp, synthetic construct
  misc_feature 1..20: note = Description of Artificial Sequence: Synthetic oligonucleotide
  misc_feature 1..20: note = Target: SCN10A; (-) strand; PAM type: NRG; PAM sequence: CAG
  source 1..20: mol_type = other DNA
ggatctgggtggggcaccaa

SEQ ID NO: 21767 - DNA, 20 bp, synthetic construct
  misc_feature 1..20: note = Description of Artificial Sequence: Synthetic oligonucleotide
  misc_feature 1..20: note = Target: SCN10A; (-) strand; PAM type: NRG; PAM sequence: GGG
  source 1..20: mol_type = other DNA
tggtgaaagggatctgggtg

SEQ ID NO: 21768 - DNA, 20 bp, synthetic construct
  misc_feature 1..20: note = Description of Artificial Sequence: Synthetic oligonucleotide
  misc_feature 1..20: note = Target: SCN10A; (-) strand; PAM type: NRG; PAM sequence: GGG
  source 1..20: mol_type = other DNA
ctggtgaaagggatctgggt

SEQ ID NO: 21769 - DNA, 20 bp, synthetic construct
  misc_feature 1..20: note = Description of Artificial Sequence: Synthetic oligonucleotide
  misc_feature 1..20: note = Target: SCN10A; (-) strand; PAM type: NRG; PAM sequence: TGG
  source 1..20: mol_type = other DNA
cctggtgaaagggatctggg

SEQ ID NO: 21770 - DNA, 20 bp, synthetic construct
  misc_feature 1..20: note = Description of Artificial Sequence: Synthetic oligonucleotide
  misc_feature 1..20: note = Target: SCN10A; (-) strand; PAM type: NRG; PAM sequence: GGG
  source 1..20: mol_type = other DNA
tgacctggtgaaagggatct

SEQ ID NO: 21771 - DNA, 20 bp, synthetic construct
  misc_feature 1..20: note = Description of Artificial Sequence: Synthetic oligonucleotide
  misc_feature 1..20: note = Target: SCN10A; (-) strand; PAM type: NRG; PAM sequence: TGG
  source 1..20: mol_type = other DNA
ctgacctggtgaaagggatc

SEQ ID NO: 21772 - DNA, 20 bp, synthetic construct
  misc_feature 1..20: note = Description of Artificial Sequence: Synthetic oligonucleotide
  misc_feature 1..20: note = Target: SCN10A; (-) strand; PAM type: NRG; PAM sequence: GGG
  source 1..20: mol_type = other DNA
gctgtgctgacctggtgaaa

SEQ ID NO: 21773 - DNA, 20 bp, synthetic construct
  misc_feature 1..20: note = Description of Artificial Sequence: Synthetic oligonucleotide
  misc_feature 1..20: note = Target: SCN10A; (-) strand; PAM type: NRG; PAM sequence: AGG
  source 1..20: mol_type = other DNA
agctgtgctgacctggtgaa

SEQ ID NO: 21774 - DNA, 20 bp, synthetic construct
  misc_feature 1..20: note = Description of Artificial Sequence: Synthetic oligonucleotide
  misc_feature 1..20: note = Target: SCN10A; (-) strand; PAM type: NRG; PAM sequence: AAG
  source 1..20: mol_type = other DNA
tagctgtgctgacctggtga

SEQ ID NO: 21775 - DNA, 20 bp, synthetic construct
  misc_feature 1..20: note = Description of Artificial Sequence: Synthetic oligonucleotide
  misc_feature 1..20: note = Target: SCN10A; (-) strand; PAM type: NRG; PAM sequence: TGG
  source 1..20: mol_type = other DNA
tcgggatagctgtgctgacc

SEQ ID NO: 21776 - DNA, 20 bp, synthetic construct
  misc_feature 1..20: note = Description of Artificial Sequence: Synthetic oligonucleotide
  misc_feature 1..20: note = Target: SCN10A; (-) strand; PAM type: NRG; PAM sequence: TAG
  source 1..20: mol_type = other DNA
gccatgcaagcagctcggga

SEQ ID NO: 21777 - DNA, 20 bp, synthetic construct
  misc_feature 1..20: note = Description of Artificial Sequence: Synthetic oligonucleotide
  misc_feature 1..20: note = Target: SCN10A; (-) strand; PAM type: NRG; PAM sequence: GGG
  source 1..20: mol_type = other DNA
tgctgccatgcaagcagctc

SEQ ID NO: 21778 - DNA, 20 bp, synthetic construct
  misc_feature 1..20: note = Description of Artificial Sequence: Synthetic oligonucleotide
  misc_feature 1..20: note = Target: SCN10A; (-) strand; PAM type: NRG; PAM sequence: CGG
  source 1..20: mol_type = other DNA
ctgctgccatgcaagcagct

SEQ ID NO: 21779 - DNA, 20 bp, synthetic construct
  misc_feature 1..20: note = Description of Artificial Sequence: Synthetic oligonucleotide
  misc_feature 1..20: note = Target: SCN10A; (-) strand; PAM type: NRG; PAM sequence: CAG
  source 1..20: mol_type = other DNA
atcagctgctgccatgcaag

SEQ ID NO: 21780 - DNA, 20 bp, synthetic construct
  misc_feature 1..20: note = Description of Artificial Sequence: Synthetic oligonucleotide
  misc_feature 1..20: note = Target: SCN10A; (-) strand; PAM type: NRG; PAM sequence: AAG
  source 1..20: mol_type = other DNA
gccatcagctgctgccatgc

SEQ ID NO: 21781 - DNA, 20 bp, synthetic construct
  misc_feature 1..20: note = Description of Artificial Sequence: Synthetic oligonucleotide
  misc_feature 1..20: note = Target: SCN10A; (-) strand; PAM type: NRG; PAM sequence: CAG
  source 1..20: mol_type = other DNA
atgctgcaagtatgagccat

SEQ ID NO: 21782 - DNA, 20 bp, synthetic construct
  misc_feature 1..20: note = Description of Artificial Sequence: Synthetic oligonucleotide
  misc_feature 1..20: note = Target: SCN10A; (-) strand; PAM type: NRG; PAM sequence: GAG
  source 1..20: mol_type = other DNA
ttgtagaatgctgcaagtat

SEQ ID NO: 21783 - DNA, 20 bp, synthetic construct
  misc_feature 1..20: note = Description of Artificial Sequence: Synthetic oligonucleotide
  misc_feature 1..20: note = Target: SCN10A; (-) strand; PAM type: NRG; PAM sequence: AAG
  source 1..20: mol_type = other DNA
ctttttttgtagaatgctgc

SEQ ID NO: 21784 - DNA, 20 bp, synthetic construct
  misc_feature 1..20: note = Description of Artificial Sequence: Synthetic oligonucleotide
  misc_feature 1..20: note = Target: SCN10A; (-) strand; PAM type: NRG; PAM sequence: TAG
  source 1..20: mol_type = other DNA
gccaaaagagactttttttg

SEQ ID NO: 21785 - DNA, 20 bp, synthetic construct
  misc_feature 1..20: note = Description of Artificial Sequence: Synthetic oligonucleotide
  misc_feature 1..20: note = Target: SCN10A; (-) strand; PAM type: NRG; PAM sequence: GAG
  source 1..20: mol_type = other DNA
ccagaagcaggcagccaaaa

SEQ ID NO: 21786 - DNA, 20 bp, synthetic construct
  misc_feature 1..20: note = Description of Artificial Sequence: Synthetic oligonucleotide
  misc_feature 1..20: note = Target: SCN10A; (-) strand; PAM type: NRG; PAM sequence: AAG
  source 1..20: mol_type = other DNA
tcccagaagcaggcagccaa

SEQ ID NO: 21787 - DNA, 20 bp, synthetic construct
  misc_feature 1..20: note = Description of Artificial Sequence: Synthetic oligonucleotide
  misc_feature 1..20: note = Target: SCN10A; (-) strand; PAM type: NRG; PAM sequence: CAG
  source 1..20: mol_type = other DNA
atacctatcccagaagcagg

SEQ ID NO: 21788 - DNA, 20 bp, synthetic construct
  misc_feature 1..20: note = Description of Artificial Sequence: Synthetic oligonucleotide
  misc_feature 1..20: note = Target: SCN10A; (-) strand; PAM type: NRG; PAM sequence: AGG
  source 1..20: mol_type = other DNA
cccatacctatcccagaagc

SEQ ID NO: 21789 - DNA, 20 bp, synthetic construct
  misc_feature 1..20: note = Description of Artificial Sequence: Synthetic oligonucleotide
  misc_feature 1..20: note = Target: SCN10A; (-) strand; PAM type: NRG; PAM sequence: CAG
  source 1..20: mol_type = other DNA
ccccatacctatcccagaag

SEQ ID NO: 21790 - DNA, 20 bp, synthetic construct
  misc_feature 1..20: note = Description of Artificial Sequence: Synthetic oligonucleotide
  misc_feature 1..20: note = Target: SCN10A; (-) strand; PAM type: NRG; PAM sequence: AAG
  source 1..20: mol_type = other DNA
cctccccatacctatcccag

SEQ ID NO: 21791 - DNA, 20 bp, synthetic construct
  misc_feature 1..20: note = Description of Artificial Sequence: Synthetic oligonucleotide
  misc_feature 1..20: note = Target: SCN10A; (-) strand; PAM type: NRG; PAM sequence: CAG
  source 1..20: mol_type = other DNA
taccctccccatacctatcc

SEQ ID NO: 21792 - DNA, 20 bp, synthetic construct
  misc_feature 1..20: note = Description of Artificial Sequence: Synthetic oligonucleotide
  misc_feature 1..20: note = Target: SCN10A; (-) strand; PAM type: NRG; PAM sequence: CAG
  source 1..20: mol_type = other DNA
ctaccttgaggcaagggggc

SEQ ID NO: 21793 - DNA, 20 bp, synthetic construct
  misc_feature 1..20: note = Description of Artificial Sequence: Synthetic oligonucleotide
  misc_feature 1..20: note = Target: SCN10A; (-) strand; PAM type: NRG; PAM sequence: GGG
  source 1..20: mol_type = other DNA
agtcctaccttgaggcaagg

SEQ ID NO: 21794 - DNA, 20 bp, synthetic construct
  misc_feature 1..20: note = Description of Artificial Sequence: Synthetic oligonucleotide
  misc_feature 1..20: note = Target: SCN10A; (-) strand; PAM type: NRG; PAM sequence: GGG
  source 1..20: mol_type = other DNA
tagtcctaccttgaggcaag

SEQ ID NO: 21795 - DNA, 20 bp, synthetic construct
  misc_feature 1..20: note = Description of Artificial Sequence: Synthetic oligonucleotide
  misc_feature 1..20: note = Target: SCN10A; (-) strand; PAM type: NRG; PAM sequence: GGG
  source 1..20: mol_type = other DNA
ttagtcctaccttgaggcaa

SEQ ID NO: 21796 - DNA, 20 bp, synthetic construct
  misc_feature 1..20: note = Description of Artificial Sequence: Synthetic oligonucleotide
  misc_feature 1..20: note = Target: SCN10A; (-) strand; PAM type: NRG; PAM sequence: AGG
  source 1..20: mol_type = other DNA
gttagtcctaccttgaggca

SEQ ID NO: 21797 - DNA, 20 bp, synthetic construct
  misc_feature 1..20: note = Description of Artificial Sequence: Synthetic oligonucleotide
  misc_feature 1..20: note = Target: SCN10A; (-) strand; PAM type: NRG; PAM sequence: AAG
  source 1..20: mol_type = other DNA
agttagtcctaccttgaggc

SEQ ID NO: 21798 - DNA, 20 bp, synthetic construct
  misc_feature 1..20: note = Description of Artificial Sequence: Synthetic oligonucleotide
  misc_feature 1..20: note = Target: SCN10A; (-) strand; PAM type: NRG; PAM sequence: AGG
  source 1..20: mol_type = other DNA
ccacagttagtcctaccttg

SEQ ID NO: 21799 - DNA, 20 bp, synthetic construct
  misc_feature 1..20: note = Description of Artificial Sequence: Synthetic oligonucleotide
  misc_feature 1..20: note = Target: SCN10A; (-) strand; PAM type: NRG; PAM sequence: GAG
  source 1..20: mol_type = other DNA
accacagttagtcctacctt

SEQ ID NO: 21800 - DNA, 20 bp, synthetic construct
  misc_feature 1..20: note = Description of Artificial Sequence: Synthetic oligonucleotide
  misc_feature 1..20: note = Target: SCN10A; (-) strand; PAM type: NRG; PAM sequence: TAG
  source 1..20: mol_type = other DNA
ggcatgacctgtaccacagt

SEQ ID NO: 21801 - DNA, 20 bp, synthetic construct
  misc_feature 1..20: note = Description of Artificial Sequence: Synthetic oligonucleotide
  misc_feature 1..20: note = Target: SCN10A; (-) strand; PAM type: NRG; PAM sequence: CAG
  source 1..20: mol_type = other DNA
ctggggcatgacctgtacca

SEQ ID NO: 21802 - DNA, 20 bp, synthetic construct
  misc_feature 1..20: note = Description of Artificial Sequence: Synthetic oligonucleotide
  misc_feature 1..20: note = Target: SCN10A; (-) strand; PAM type: NRG; PAM sequence: GGG
  source 1..20: mol_type = other DNA
tgatcccatggggaactctg

SEQ ID NO: 21803 - DNA, 20 bp, synthetic construct
  misc_feature 1..20: note = Description of Artificial Sequence: Synthetic oligonucleotide
  misc_feature 1..20: note = Target: SCN10A; (-) strand; PAM type: NRG; PAM sequence: GGG
  source 1..20: mol_type = other DNA
ttgatcccatggggaactct

SEQ ID NO: 21804 - DNA, 20 bp, synthetic construct
  misc_feature 1..20: note = Description of Artificial Sequence: Synthetic oligonucleotide
  misc_feature 1..20: note = Target: SCN10A; (-) strand; PAM type: NRG; PAM sequence: TGG
  source 1..20: mol_type = other DNA
cttgatcccatggggaactc

SEQ ID NO: 21805 - DNA, 20 bp, synthetic construct
  misc_feature 1..20: note = Description of Artificial Sequence: Synthetic oligonucleotide
  misc_feature 1..20: note = Target: SCN10A; (-) strand; PAM type: NRG; PAM sequence: GGG
  source 1..20: mol_type = other DNA
agcttcagcttgatcccatg

SEQ ID NO: 21806 - DNA, 20 bp, synthetic construct
  misc_feature 1..20: note = Description of Artificial Sequence: Synthetic oligonucleotide
  misc_feature 1..20: note = Target: SCN10A; (-) strand; PAM type: NRG; PAM sequence: GGG
  source 1..20: mol_type = other DNA
cagcttcagcttgatcccat

SEQ ID NO: 21807 - DNA, 20 bp, synthetic construct
  misc_feature 1..20: note = Description of Artificial Sequence: Synthetic oligonucleotide
  misc_feature 1..20: note = Target: SCN10A; (-) strand; PAM type: NRG; PAM sequence: TGG
  source 1..20: mol_type = other DNA
ccagcttcagcttgatccca

SEQ ID NO: 21808 - DNA, 20 bp, synthetic construct
  misc_feature 1..20: note = Description of Artificial Sequence: Synthetic oligonucleotide
  misc_feature 1..20: note = Target: SCN10A; (-) strand; PAM type: NRG; PAM sequence: CAG
  source 1..20: mol_type = other DNA
tctcagctagagaccagctt

SEQ ID NO: 21809 - DNA, 20 bp, synthetic construct
  misc_feature 1..20: note = Description of Artificial Sequence: Synthetic oligonucleotide
  misc_feature 1..20: note = Target: SCN10A; (-) strand; PAM type: NRG; PAM sequence: CAG
  source 1..20: mol_type = other DNA
gagtgttctcagctagagac

SEQ ID NO: 21810 - DNA, 20 bp, synthetic construct
  misc_feature 1..20: note = Description of Artificial Sequence: Synthetic oligonucleotide
  misc_feature 1..20: note = Target: SCN10A; (-) strand; PAM type: NRG; PAM sequence: GAG
  source 1..20: mol_type = other DNA
acaaggagtgttctcagcta

SEQ ID NO: 21811 - DNA, 20 bp, synthetic construct
  misc_feature 1..20: note = Description of Artificial Sequence: Synthetic oligonucleotide
  misc_feature 1..20: note = Target: SCN10A; (-) strand; PAM type: NRG; PAM sequence: TAG
  source 1..20: mol_type = other DNA
aaacaaggagtgttctcagc

SEQ ID NO: 21812 - DNA, 20 bp, synthetic construct
  misc_feature 1..20: note = Description of Artificial Sequence: Synthetic oligonucleotide
  misc_feature 1..20: note = Target: SCN10A; (-) strand; PAM type: NRG; PAM sequence: CAG
  source 1..20: mol_type = other DNA
aactaaacaaggagtgttct

SEQ ID NO: 21813 - DNA, 20 bp, synthetic construct
  misc_feature 1..20: note = Description of Artificial Sequence: Synthetic oligonucleotide
  misc_feature 1..20: note = Target: SCN10A; (-) strand; PAM type: NRG; PAM sequence: GAG
  source 1..20: mol_type = other DNA
agagggtggaactaaacaag

SEQ ID NO: 21814 - DNA, 20 bp, synthetic construct
  misc_feature 1..20: note = Description of Artificial Sequence: Synthetic oligonucleotide
  misc_feature 1..20: note = Target: SCN10A; (-) strand; PAM type: NRG; PAM sequence: AGG
  source 1..20: mol_type = other DNA
gcagagggtggaactaaaca

SEQ ID NO: 21815 - DNA, 20 bp, synthetic construct
  misc_feature 1..20: note = Description of Artificial Sequence: Synthetic oligonucleotide
  misc_feature 1..20: note = Target: SCN10A; (-) strand; PAM type: NRG; PAM sequence: AAG
  source 1..20: mol_type = other DNA
ggcagagggtggaactaaac

SEQ ID NO: 21816 - DNA, 20 bp, synthetic construct
  misc_feature 1..20: note = Description of Artificial Sequence: Synthetic oligonucleotide
  misc_feature 1..20: note = Target: SCN10A; (-) strand; PAM type: NRG; PAM sequence: TGG
  source 1..20: mol_type = other DNA
aaacagaatggggcagaggg

SEQ ID NO: 21817 - DNA, 20 bp, synthetic construct
  misc_feature 1..20: note = Description of Artificial Sequence: Synthetic oligonucleotide
  misc_feature 1..20: note = Target: SCN10A; (-) strand; PAM type: NRG; PAM sequence: GGG
  source 1..20: mol_type = other DNA
gcaaaacagaatggggcaga

SEQ ID NO: 21818 - DNA, 20 bp, synthetic construct
  misc_feature 1..20: note = Description of Artificial Sequence: Synthetic oligonucleotide
  misc_feature 1..20: note = Target: SCN10A; (-) strand; PAM type: NRG; PAM sequence: AGG
  source 1..20: mol_type = other DNA
agcaaaacagaatggggcag

SEQ ID NO: 21819 - DNA, 20 bp, synthetic construct
  misc_feature 1..20: note = Description of Artificial Sequence: Synthetic oligonucleotide
  misc_feature 1..20: note = Target: SCN10A; (-) strand; PAM type: NRG; PAM sequence: GAG
  source 1..20: mol_type = other DNA
aagcaaaacagaatggggca

SEQ ID NO: 21820 - DNA, 20 bp, synthetic construct
  misc_feature 1..20: note = Description of Artificial Sequence: Synthetic oligonucleotide
  misc_feature 1..20: note = Target: SCN10A; (-) strand; PAM type: NRG; PAM sequence: CAG
  source 1..20: mol_type = other DNA
tgaagcaaaacagaatgggg

SEQ ID NO: 21821 - DNA, 20 bp, synthetic construct
  misc_feature 1..20: note = Description of Artificial Sequence: Synthetic oligonucleotide
  misc_feature 1..20: note = Target: SCN10A; (-) strand; PAM type: NRG; PAM sequence: GGG
  source 1..20: mol_type = other DNA
gaatgaagcaaaacagaatg

SEQ ID NO: 21822 - DNA, 20 bp, synthetic construct
  misc_feature 1..20: note = Description of Artificial Sequence: Synthetic oligonucleotide
  misc_feature 1..20: note = Target: SCN10A; (-) strand; PAM type: NRG; PAM sequence: GGG
  source 1..20: mol_type = other DNA
cgaatgaagcaaaacagaat

SEQ ID NO: 21823 - DNA, 20 bp, synthetic construct
  misc_feature 1..20: note = Description of Artificial Sequence: Synthetic oligonucleotide
  misc_feature 1..20: note = Target: SCN10A; (-) strand; PAM type: NRG; PAM sequence: TGG
  source 1..20: mol_type = other DNA
gcgaatgaagcaaaacagaa

SEQ ID NO: 21824 - DNA, 20 bp, synthetic construct
  misc_feature 1..20: note = Description of Artificial Sequence: Synthetic oligonucleotide
  misc_feature 1..20: note = Target: SCN10A; (-) strand; PAM type: NRG; PAM sequence: CAG
  source 1..20: mol_type = other DNA
agaaagcgaatgaagcaaaa

SEQ ID NO: 21825 - DNA, 20 bp, synthetic construct
  misc_feature 1..20: note = Description of Artificial Sequence: Synthetic oligonucleotide
  misc_feature 1..20: note = Target: SCN10A; (-) strand; PAM type: NRG; PAM sequence: AAG
  source 1..20: mol_type = other DNA
ctctcaggagaaagcgaatg

SEQ ID NO: 21826 - DNA, 20 bp, synthetic construct
  misc_feature 1..20: note = Description of Artificial Sequence: Synthetic oligonucleotide
  misc_feature 1..20: note = Target: SCN10A; (-) strand; PAM type: NRG; PAM sequence: AAG
  source 1..20: mol_type = other DNA
gagggagtgctctcaggaga

SEQ ID NO: 21827 - DNA, 20 bp, synthetic construct
  misc_feature 1..20: note = Description of Artificial Sequence: Synthetic oligonucleotide
  misc_feature 1..20: note = Target: SCN10A; (-) strand; PAM type: NRG; PAM sequence: GAG
  source 1..20: mol_type = other DNA
tattgagggagtgctctcag

SEQ ID NO: 21828 - DNA, 20 bp, synthetic construct
  misc_feature 1..20: note = Description of Artificial Sequence: Synthetic oligonucleotide
  misc_feature 1..20: note = Target: SCN10A; (-) strand; PAM type: NRG; PAM sequence: AGG
  source 1..20: mol_type = other DNA
cctattgagggagtgctctc

SEQ ID NO: 21829 - DNA, 20 bp, synthetic construct
  misc_feature 1..20: note = Description of Artificial Sequence: Synthetic oligonucleotide
  misc_feature 1..20: note = Target: SCN10A; (-) strand; PAM type: NRG; PAM sequence: CAG
  source 1..20: mol_type = other DNA
acctattgagggagtgctct

SEQ ID NO: 21830 - DNA, 20 bp, synthetic construct
  misc_feature 1..20: note = Description of Artificial Sequence: Synthetic oligonucleotide
  misc_feature 1..20: note = Target: SCN10A; (-) strand; PAM type: NRG; PAM sequence: GAG
  source 1..20: mol_type = other DNA
gtgcaagtgacctattgagg

SEQ ID NO: 21831 - DNA, 20 bp, synthetic construct
  misc_feature 1..20: note = Description of Artificial Sequence: Synthetic oligonucleotide
  misc_feature 1..20: note = Target: SCN10A; (-) strand; PAM type: NRG; PAM sequence: GGG
  source 1..20: mol_type = other DNA
ttgtgcaagtgacctattga

SEQ ID NO: 21832 - DNA, 20 bp, synthetic construct
  misc_feature 1..20: note = Description of Artificial Sequence: Synthetic oligonucleotide
  misc_feature 1..20: note = Target: SCN10A; (-) strand; PAM type: NRG; PAM sequence: AGG
  source 1..20: mol_type = other DNA
cttgtgcaagtgacctattg

SEQ ID NO: 21833 - DNA, 20 bp, synthetic construct
  misc_feature 1..20: note = Description of Artificial Sequence: Synthetic oligonucleotide
  misc_feature 1..20: note = Target: SCN10A; (-) strand; PAM type: NRG; PAM sequence: GAG
  source 1..20: mol_type = other DNA
tcttgtgcaagtgacctatt

SEQ ID NO: 21834 - DNA, 20 bp, synthetic construct
  misc_feature 1..20: note = Description of Artificial Sequence: Synthetic oligonucleotide
  misc_feature 1..20: note = Target: SCN10A; (-) strand; PAM type: NRG; PAM sequence: AAG
  source 1..20: mol_type = other DNA
ctaagtgaggattcttgtgc

SEQ ID NO: 21835 - DNA, 20 bp, synthetic construct
  misc_feature 1..20: note = Description of Artificial Sequence: Synthetic oligonucleotide
  misc_feature 1..20: note = Target: SCN10A; (-) strand; PAM type: NRG; PAM sequence: AGG
  source 1..20: mol_type = other DNA
ctcaaagaagaagctaagtg

SEQ ID NO: 21836 - DNA, 20 bp, synthetic construct
  misc_feature 1..20: note = Description of Artificial Sequence: Synthetic oligonucleotide
  misc_feature 1..20: note = Target: SCN10A; (-) strand; PAM type: NRG; PAM sequence: GAG
  source 1..20: mol_type = other DNA
tctcaaagaagaagctaagt

SEQ ID NO: 21837 - DNA, 20 bp, synthetic construct
  misc_feature 1..20: note = Description of Artificial Sequence: Synthetic oligonucleotide
  misc_feature 1..20: note = Target: SCN10A; (-) strand; PAM type: NRG; PAM sequence: AAG
  source 1..20: mol_type = other DNA
gttttctcaaagaagaagct

SEQ ID NO: 21838 - DNA, 20 bp, synthetic construct
  misc_feature 1..20: note = Description of Artificial Sequence: Synthetic oligonucleotide
  misc_feature 1..20: note = Target: SCN10A; (-) strand; PAM type: NRG; PAM sequence: AAG
  source 1..20: mol_type = other DNA
atcaggttttctcaaagaag

SEQ ID NO: 21839 - DNA, 20 bp, synthetic construct
  misc_feature 1..20: note = Description of Artificial Sequence: Synthetic oligonucleotide
  misc_feature 1..20: note = Target: SCN10A; (-) strand; PAM type: NRG; PAM sequence: AAG
  source 1..20: mol_type = other DNA
tagatcaggttttctcaaag

SEQ ID NO: 21840 - DNA, 20 bp, synthetic construct
  misc_feature 1..20: note = Description of Artificial Sequence: Synthetic oligonucleotide
  misc_feature 1..20: note = Target: SCN10A; (-) strand; PAM type: NRG; PAM sequence: AAG
  source 1..20: mol_type = other DNA
tattagatcaggttttctca

SEQ ID NO: 21841 - DNA, 20 bp, synthetic construct
  misc_feature 1..20: note = Description of Artificial Sequence: Synthetic oligonucleotide
  misc_feature 1..20: note = Target: SCN10A; (-) strand; PAM type: NRG; PAM sequence: AGG
  source 1..20: mol_type = other DNA
ctcagggaccatattagatc

SEQ ID NO: 21842 - DNA, 20 bp, synthetic construct
  misc_feature 1..20: note = Description of Artificial Sequence: Synthetic oligonucleotide
  misc_feature 1..20: note = Target: SCN10A; (-) strand; PAM type: NRG; PAM sequence: CAG
  source 1..20: mol_type = other DNA
cctcagggaccatattagat

SEQ ID NO: 21843 - DNA, 20 bp, synthetic construct
  misc_feature 1..20: note = Description of Artificial Sequence: Synthetic oligonucleotide
  misc_feature 1..20: note = Target: SCN10A; (-) strand; PAM type: NRG; PAM sequence: TAG
  source 1..20: mol_type = other DNA
tcttgcctcagggaccatat

SEQ ID NO: 21844 - DNA, 20 bp, synthetic construct
  misc_feature 1..20: note = Description of Artificial Sequence: Synthetic oligonucleotide
  misc_feature 1..20: note = Target: SCN10A; (-) strand; PAM type: NRG; PAM sequence: GGG
  source 1..20: mol_type = other DNA
ggaggaatcatcttgcctca

SEQ ID NO: 21845 - DNA, 20 bp, synthetic construct
  misc_feature 1..20: note = Description of Artificial Sequence: Synthetic oligonucleotide
  misc_feature 1..20: note = Target: SCN10A; (-) strand; PAM type: NRG; PAM sequence: AGG
  source 1..20: mol_type = other DNA
aggaggaatcatcttgcctc

SEQ ID NO: 21846 - DNA, 20 bp, synthetic construct
  misc_feature 1..20: note = Description of Artificial Sequence: Synthetic oligonucleotide
  misc_feature 1..20: note = Target: SCN10A; (-) strand; PAM type: NRG; PAM sequence: CAG
  source 1..20: mol_type = other DNA
taggaggaatcatcttgcct

SEQ ID NO: 21847 - DNA, 20 bp, synthetic construct
  misc_feature 1..20: note = Description of Artificial Sequence: Synthetic oligonucleotide
  misc_feature 1..20: note = Target: SCN10A; (-) strand; PAM type: NRG; PAM sequence: AGG
  source 1..20: mol_type = other DNA
accgtttagggagctatagg

SEQ ID NO: 21848 - DNA, 20 bp, synthetic construct
  misc_feature 1..20: note = Description of Artificial Sequence: Synthetic oligonucleotide
  misc_feature 1..20: note = Target: SCN10A; (-) strand; PAM type: NRG; PAM sequence: GAG
  source 1..20: mol_type = other DNA
caccgtttagggagctatag

SEQ ID NO: 21849 - DNA, 20 bp, synthetic construct
  misc_feature 1..20: note = Description of Artificial Sequence: Synthetic oligonucleotide
  misc_feature 1..20: note = Target: SCN10A; (-) strand; PAM type: NRG; PAM sequence: AGG
  source 1..20: mol_type = other DNA
ggcaccgtttagggagctat

SEQ ID NO: 21850 - DNA, 20 bp, synthetic construct
  misc_feature 1..20: note = Description of Artificial Sequence: Synthetic oligonucleotide
  misc_feature 1..20: note = Target: SCN10A; (-) strand; PAM type: NRG; PAM sequence: TAG
  source 1..20: mol_type = other DNA
gggcaccgtttagggagcta

SEQ ID NO: 21851 - DNA, 20 bp, synthetic construct
  misc_feature 1..20: note = Description of Artificial Sequence: Synthetic oligonucleotide
  misc_feature 1..20: note = Target: SCN10A; (-) strand; PAM type: NRG; PAM sequence: GAG
  source 1..20: mol_type = other DNA
caattagggcaccgtttagg

SEQ ID NO: 21852 - DNA, 20 bp, synthetic construct
  misc_feature 1..20: note = Description of Artificial Sequence: Synthetic oligonucleotide
  misc_feature 1..20: note = Target: SCN10A; (-) strand; PAM type: NRG; PAM sequence: GGG
  source 1..20: mol_type = other DNA
ttcaattagggcaccgttta

SEQ ID NO: 21853 - DNA, 20 bp, synthetic construct
  misc_feature 1..20: note = Description of Artificial Sequence: Synthetic oligonucleotide
  misc_feature 1..20: note = Target: SCN10A; (-) strand; PAM type: NRG; PAM sequence: AGG
  source 1..20: mol_type = other DNA
cttcaattagggcaccgttt

SEQ ID NO: 21854 - DNA, 20 bp, synthetic construct
  misc_feature 1..20: note = Description of Artificial Sequence: Synthetic oligonucleotide
  misc_feature 1..20: note = Target: SCN10A; (-) strand; PAM type: NRG; PAM sequence: TAG
  source 1..20: mol_type = other DNA
acttcaattagggcaccgtt

SEQ ID NO: 21855 - DNA, 20 bp, synthetic construct
  misc_feature 1..20: note = Description of Artificial Sequence: Synthetic oligonucleotide
  misc_feature 1..20: note = Target: SCN10A; (-) strand; PAM type: NRG; PAM sequence: GGG
  source 1..20: mol_type = other DNA
tggactagccacttcaatta

SEQ ID NO: 21856 - DNA, 20 bp, synthetic construct
  misc_feature 1..20: note = Description of Artificial Sequence: Synthetic oligonucleotide
  misc_feature 1..20: note = Target: SCN10A; (-) strand; PAM type: NRG; PAM sequence: AGG
  source 1..20: mol_type = other DNA
ctggactagccacttcaatt

SEQ ID NO: 21857 - DNA, 20 bp, synthetic construct
  misc_feature 1..20: note = Description of Artificial Sequence: Synthetic oligonucleotide
  misc_feature 1..20: note = Target: SCN10A; (-) strand; PAM type: NRG; PAM sequence: TAG
  source 1..20: mol_type = other DNA
tctggactagccacttcaat

SEQ ID NO: 21858 - DNA, 20 bp, synthetic construct
  misc_feature 1..20: note = Description of Artificial Sequence: Synthetic oligonucleotide
  misc_feature 1..20: note = Target: SCN10A; (-) strand; PAM type: NRG; PAM sequence: TAG
  source 1..20: mol_type = other DNA
tcttggatactgttctggac

SEQ ID NO: 21859 - DNA, 20 bp, synthetic construct
  misc_feature 1..20: note = Description of Artificial Sequence: Synthetic oligonucleotide
  misc_feature 1..20: note = Target: SCN10A; (-) strand; PAM type: NRG; PAM sequence: TGG
  source 1..20: mol_type = other DNA
tccattcttggatactgttc

SEQ ID NO: 21860 - DNA, 20 bp, synthetic construct
  misc_feature 1..20: note = Description of Artificial Sequence: Synthetic oligonucleotide
  misc_feature 1..20: note = Target: SCN10A; (-) strand; PAM type: NRG; PAM sequence: TGG
  source 1..20: mol_type = other DNA
ggttgcagactgtccattct

SEQ ID NO: 21861 - DNA, 20 bp, synthetic construct
  misc_feature 1..20: note = Description of Artificial Sequence: Synthetic oligonucleotide
  misc_feature 1..20: note = Target: SCN10A; (-) strand; PAM type: NRG; PAM sequence: CAG
  source 1..20: mol_type = other DNA
aagctttgtgaagaaggttg

SEQ ID NO: 21862 - DNA, 20 bp, synthetic construct
  misc_feature 1..20: note = Description of Artificial Sequence: Synthetic oligonucleotide
  misc_feature 1..20: note = Target: SCN10A; (-) strand; PAM type: NRG; PAM sequence: AGG
  source 1..20: mol_type = other DNA
gagtggaagctttgtgaaga

SEQ ID NO: 21863 - DNA, 20 bp, synthetic construct
  misc_feature 1..20: note = Description of Artificial Sequence: Synthetic oligonucleotide
  misc_feature 1..20: note = Target: SCN10A; (-) strand; PAM type: NRG; PAM sequence: AAG
  source 1..20: mol_type = other DNA
ggagtggaagctttgtgaag

SEQ ID NO: 21864 - DNA, 20 bp, synthetic construct
  misc_feature 1..20: note = Description of Artificial Sequence: Synthetic oligonucleotide
  misc_feature 1..20: note = Target: SCN10A; (-) strand; PAM type: NRG; PAM sequence: AAG
  source 1..20: mol_type = other DNA
tgaggagtggaagctttgtg

SEQ ID NO: 21865 - DNA, 20 bp, synthetic construct
  misc_feature 1..20: note = Description of Artificial Sequence: Synthetic oligonucleotide
  misc_feature 1..20: note = Target: SCN10A; (-) strand; PAM type: NRG; PAM sequence: AAG
  source 1..20: mol_type = other DNA
aggaggtttgtgaggagtgg

SEQ ID NO: 21866 - DNA, 20 bp, synthetic construct
  misc_feature 1..20: note = Description of Artificial Sequence: Synthetic oligonucleotide
  misc_feature 1..20: note = Target: SCN10A; (-) strand; PAM type: NRG; PAM sequence: TGG
  source 1..20: mol_type = other DNA
agcaggaggtttgtgaggag

SEQ ID NO: 21867 - DNA, 20 bp, synthetic construct
  misc_feature 1..20: note = Description of Artificial Sequence: Synthetic oligonucleotide
  misc_feature 1..20: note = Target: SCN10A; (-) strand; PAM type: NRG; PAM sequence: GAG
  source 1..20: mol_type = other DNA
aggagcaggaggtttgtgag

SEQ ID NO: 21868 - DNA, 20 bp, synthetic construct
  misc_feature 1..20: note = Description of Artificial Sequence: Synthetic oligonucleotide
  misc_feature 1..20: note = Target: SCN10A; (-) strand; PAM type: NRG; PAM sequence: AGG
  source 1..20: mol_type = other DNA
gaaggagcaggaggtttgtg

SEQ ID NO: 21869 - DNA, 20 bp, synthetic construct
  misc_feature 1..20: note = Description of Artificial Sequence: Synthetic oligonucleotide
  misc_feature 1..20: note = Target: SCN10A; (-) strand; PAM type: NRG; PAM sequence: GAG
  source 1..20: mol_type = other DNA
ggaaggagcaggaggtttgt

SEQ ID NO: 21870 - DNA, 20 bp, synthetic construct
  misc_feature 1..20: note = Description of Artificial Sequence: Synthetic oligonucleotide
  misc_feature 1..20: note = Target: SCN10A; (-) strand; PAM type: NRG; PAM sequence: AGG
  source 1..20: mol_type = other DNA
gatgctccggaaggagcagg

SEQ ID NO: 21871 - DNA, 20 bp, synthetic construct
  misc_feature 1..20: note = Description of Artificial Sequence: Synthetic oligonucleotide
  misc_feature 1..20: note = Target: SCN10A; (-) strand; PAM type: NRG; PAM sequence: GAG
  source 1..20: mol_type = other DNA
agatgctccggaaggagcag

SEQ ID NO: 21872 - DNA, 20 bp, synthetic construct
  misc_feature 1..20: note = Description of Artificial Sequence: Synthetic oligonucleotide
  misc_feature 1..20: note = Target: SCN10A; (-) strand; PAM type: NRG; PAM sequence: AGG
  source 1..20: mol_type = other DNA
cgagatgctccggaaggagc

SEQ ID NO: 21873 - DNA, 20 bp, synthetic construct
  misc_feature 1..20: note = Description of Artificial Sequence: Synthetic oligonucleotide
  misc_feature 1..20: note = Target: SCN10A; (-) strand; PAM type: NRG; PAM sequence: CAG
  source 1..20: mol_type = other DNA
tcgagatgctccggaaggag

SEQ ID NO: 21874 - DNA, 20 bp, synthetic construct
  misc_feature 1..20: note = Description of Artificial Sequence: Synthetic oligonucleotide
  misc_feature 1..20: note = Target: SCN10A; (-) strand; PAM type: NRG; PAM sequence: GAG
  source 1..20: mol_type = other DNA
ccctcgagatgctccggaag

SEQ ID NO: 21875 - DNA, 20 bp, synthetic construct
  misc_feature 1..20: note = Description of Artificial Sequence: Synthetic oligonucleotide
  misc_feature 1..20: note = Target: SCN10A; (-) strand; PAM type: NRG; PAM sequence: AGG
  source 1..20: mol_type = other DNA
ggccctcgagatgctccgga

SEQ ID NO: 21876 - DNA, 20 bp, synthetic construct
  misc_feature 1..20: note = Description of Artificial Sequence: Synthetic oligonucleotide
  misc_feature 1..20: note = Target: SCN10A; (-) strand; PAM type: NRG; PAM sequence: AAG
  source 1..20: mol_type = other DNA
aggccctcgagatgctccgg

SEQ ID NO: 21877 - DNA, 20 bp, synthetic construct
  misc_feature 1..20: note = Description of Artificial Sequence: Synthetic oligonucleotide
  misc_feature 1..20: note = Target: SCN10A; (-) strand; PAM type: NRG; PAM sequence: CGG
  source 1..20: mol_type = other DNA
aggaggccctcgagatgctc

SEQ ID NO: 21878 - DNA, 20 bp, synthetic construct
  misc_feature 1..20: note = Description of Artificial Sequence: Synthetic oligonucleotide
  misc_feature 1..20: note = Target: SCN10A; (-) strand; PAM type: NRG; PAM sequence: GAG
  source 1..20: mol_type = other DNA
agaagttccaggaggccctc

SEQ ID NO: 21879 - DNA, 20 bp, synthetic construct
  misc_feature 1..20: note = Description of Artificial Sequence: Synthetic oligonucleotide
  misc_feature 1..20: note = Target: SCN10A; (-) strand; PAM type: NRG; PAM sequence: AGG
  source 1..20: mol_type = other DNA
aaaggagaagaagttccagg

SEQ ID NO: 21880 - DNA, 20 bp, synthetic construct
  misc_feature 1..20: note = Description of Artificial Sequence: Synthetic oligonucleotide
  misc_feature 1..20: note = Target: SCN10A; (-) strand; PAM type: NRG; PAM sequence: GAG
  source 1..20: mol_type = other DNA
caaaggagaagaagttccag

SEQ ID NO: 21881 - DNA, 20 bp, synthetic construct
  misc_feature 1..20: note = Description of Artificial Sequence: Synthetic oligonucleotide
  misc_feature 1..20: note = Target: SCN10A; (-) strand; PAM type: NRG; PAM sequence: AGG
  source 1..20: mol_type = other DNA
agcaaaggagaagaagttcc

SEQ ID NO: 21882 - DNA, 20 bp, synthetic construct
  misc_feature 1..20: note = Description of Artificial Sequence: Synthetic oligonucleotide
  misc_feature 1..20: note = Target: SCN10A; (-) strand; PAM type: NRG; PAM sequence: CAG
  source 1..20: mol_type = other DNA
aagcaaaggagaagaagttc

SEQ ID NO: 21883 - DNA, 20 bp, synthetic construct
  misc_feature 1..20: note = Description of Artificial Sequence: Synthetic oligonucleotide
  misc_feature 1..20: note = Target: SCN10A; (-) strand; PAM type: NRG; PAM sequence: AAG
  source 1..20: mol_type = other DNA
aaattgaagcaaaggagaag

SEQ ID NO: 21884 - DNA, 20 bp, synthetic construct
  misc_feature 1..20: note = Description of Artificial Sequence: Synthetic oligonucleotide
  misc_feature 1..20: note = Target: SCN10A; (-) strand; PAM type: NRG; PAM sequence: AAG
  source 1..20: mol_type = other DNA
atgaaattgaagcaaaggag

SEQ ID NO: 21885 - DNA, 20 bp, synthetic construct
  misc_feature 1..20: note = Description of Artificial Sequence: Synthetic oligonucleotide
  misc_feature 1..20: note = Target: SCN10A; (-) strand; PAM type: NRG; PAM sequence: GAG
  source 1..20: mol_type = other DNA
ctgatgaaattgaagcaaag

SEQ ID NO: 21886 - DNA, 20 bp, synthetic construct
  misc_feature 1..20: note = Description of Artificial Sequence: Synthetic oligonucleotide
  misc_feature 1..20: note = Target: SCN10A; (-) strand; PAM type: NRG; PAM sequence: AGG
  source 1..20: mol_type = other DNA
cactgatgaaattgaagcaa

SEQ ID NO: 21887 - DNA, 20 bp, synthetic construct
  misc_feature 1..20: note = Description of Artificial Sequence: Synthetic oligonucleotide
  misc_feature 1..20: note = Target: SCN10A; (-) strand; PAM type: NRG; PAM sequence: AAG
  source 1..20: mol_type = other DNA
ccactgatgaaattgaagca

SEQ ID NO: 21888 - DNA, 20 bp, synthetic construct
  misc_feature 1..20: note = Description of Artificial Sequence: Synthetic oligonucleotide
  misc_feature 1..20: note = Target: SCN10A; (-) strand; PAM type: NRG; PAM sequence: AAG
  source 1..20: mol_type = other DNA
ggcaaccactgatgaaattg

SEQ ID NO: 21889 - DNA, 20 bp, synthetic construct
  misc_feature 1..20: note = Description of Artificial Sequence: Synthetic oligonucleotide
  misc_feature 1..20: note = Target: SCN10A; (-) strand; PAM type: NRG; PAM sequence: AGG
  source 1..20: mol_type = other DNA
ggcgtatgaggagcagaacc

SEQ ID NO: 21890 - DNA, 20 bp, synthetic construct
  misc_feature 1..20: note = Description of Artificial Sequence: Synthetic oligonucleotide
  misc_feature 1..20: note = Target: SCN10A; (-) strand; PAM type: NRG; PAM sequence: CAG
  source 1..20: mol_type = other DNA
tggcgtatgaggagcagaac

SEQ ID NO: 21891 - DNA, 20 bp, synthetic construct
  misc_feature 1..20: note = Description of Artificial Sequence: Synthetic oligonucleotide
  misc_feature 1..20: note = Target: SCN10A; (-) strand; PAM type: NRG; PAM sequence: CAG
  source 1..20: mol_type = other DNA
tcaccatggcgtatgaggag

SEQ ID NO: 21892 - DNA, 20 bp, synthetic construct
  misc_feature 1..20: note = Description of Artificial Sequence: Synthetic oligonucleotide
  misc_feature 1..20: note = Target: SCN10A; (-) strand; PAM type: NRG; PAM sequence: GAG
  source 1..20: mol_type = other DNA
tagtcaccatggcgtatgag

SEQ ID NO: 21893 - DNA, 20 bp, synthetic construct
  misc_feature 1..20: note = Description of Artificial Sequence: Synthetic oligonucleotide
  misc_feature 1..20: note = Target: SCN10A; (-) strand; PAM type: NRG; PAM sequence: AGG
  source 1..20: mol_type = other DNA
tgtagtcaccatggcgtatg

SEQ ID NO: 21894 - DNA, 20 bp, synthetic construct
  misc_feature 1..20: note = Description of Artificial Sequence: Synthetic oligonucleotide
  misc_feature 1..20: note = Target: SCN10A; (-) strand; PAM type: NRG; PAM sequence: GAG
  source 1..20: mol_type = other DNA
ctgtagtcaccatggcgtat

SEQ ID NO: 21895 - DNA, 20 bp, synthetic construct
  misc_feature 1..20: note = Description of Artificial Sequence: Synthetic oligonucleotide
  misc_feature 1..20: note = Target: SCN10A; (-) strand; PAM type: NRG; PAM sequence: TGG
  source 1..20: mol_type = other DNA
gatcttggctgtagtcacca

SEQ ID NO: 21896 - DNA, 20 bp, synthetic construct
  misc_feature 1..20: note = Description of Artificial Sequence: Synthetic oligonucleotide
  misc_feature 1..20: note = Target: SCN10A; (-) strand; PAM type: NRG; PAM sequence: TAG
  source 1..20: mol_type = other DNA
ggtcaacttgatcttggctg

SEQ ID NO: 21897 - DNA, 20 bp, synthetic construct
  misc_feature 1..20: note = Description of Artificial Sequence: Synthetic oligonucleotide
  misc_feature 1..20: note = Target: SCN10A; (-) strand; PAM type: NRG; PAM sequence: TGG
  source 1..20: mol_type = other DNA
ctacctggtcaacttgatct

SEQ ID NO: 21898 - DNA, 20 bp, synthetic construct
  misc_feature 1..20: note = Description of Artificial Sequence: Synthetic oligonucleotide
  misc_feature 1..20: note = Target: SCN10A; (-) strand; PAM type: NRG; PAM sequence: TGG
  source 1..20: mol_type = other DNA
cttcctgggatctttctacc

SEQ ID NO: 21899 - DNA, 20 bp, synthetic construct
  misc_feature 1..20: note = Description of Artificial Sequence: Synthetic oligonucleotide
  misc_feature 1..20: note = Target: SCN10A; (-) strand; PAM type: NRG; PAM sequence: GGG
  source 1..20: mol_type = other DNA
tttgtgctcgtaatcttcct

SEQ ID NO: 21900 - DNA, 20 bp, synthetic construct
  misc_feature 1..20: note = Description of Artificial Sequence: Synthetic oligonucleotide
  misc_feature 1..20: note = Target: SCN10A; (-) strand; PAM type: NRG; PAM sequence: TGG
  source 1..20: mol_type = other DNA
ttttgtgctcgtaatcttcc

SEQ ID NO: 21901 - DNA, 20 bp, synthetic construct
  misc_feature 1..20: note = Description of Artificial Sequence: Synthetic oligonucleotide
  misc_feature 1..20: note = Target: SCN10A; (-) strand; PAM type: NRG; PAM sequence: GGG
  source 1..20: mol_type = other DNA
tgcagaccctgaggacttct

SEQ ID NO: 21902 - DNA, 20 bp, synthetic construct
  misc_feature 1..20: note = Description of Artificial Sequence: Synthetic oligonucleotide
  misc_feature 1..20: note = Target: SCN10A; (-) strand; PAM type: NRG; PAM sequence: TGG
  source 1..20: mol_type = other DNA
ctgcagaccctgaggacttc

SEQ ID NO: 21903 - DNA, 20 bp, synthetic construct
  misc_feature 1..20: note = Description of Artificial Sequence: Synthetic oligonucleotide
  misc_feature 1..20: note = Target: SCN10A; (-) strand; PAM type: NRG; PAM sequence: AGG
  source 1..20: mol_type = other DNA
ccttgaacctgcagaccctg

SEQ ID NO: 21904 - DNA, 20 bp, synthetic construct
  misc_feature 1..20: note = Description of Artificial Sequence: Synthetic oligonucleotide
  misc_feature 1..20: note = Target: SCN10A; (-) strand; PAM type: NRG; PAM sequence: GAG
  source 1..20: mol_type = other DNA
cccttgaacctgcagaccct

SEQ ID NO: 21905 - DNA, 20 bp, synthetic construct
  misc_feature 1..20: note = Description of Artificial Sequence: Synthetic oligonucleotide
  misc_feature 1..20: note = Target: SCN10A; (-) strand; PAM type: NRG; PAM sequence: CAG
  source 1..20: mol_type = other DNA
tcttctttcccttgaacctg

SEQ ID NO: 21906 - DNA, 20 bp, synthetic construct
  misc_feature 1..20: note = Description of Artificial Sequence: Synthetic oligonucleotide
  misc_feature 1..20: note = Target: SCN10A; (-) strand; PAM type: NRG; PAM sequence: AGG
  source 1..20: mol_type = other DNA
ggtccatgtgctatgggtac

SEQ ID NO: 21907 - DNA, 20 bp, synthetic construct
  misc_feature 1..20: note = Description of Artificial Sequence: Synthetic oligonucleotide
  misc_feature 1..20: note = Target: SCN10A; (-) strand; PAM type: NRG; PAM sequence: CAG
  source 1..20: mol_type = other DNA
gggtccatgtgctatgggta

SEQ ID NO: 21908 - DNA, 20 bp, synthetic construct
  misc_feature 1..20: note = Description of Artificial Sequence: Synthetic oligonucleotide
  misc_feature 1..20: note = Target: SCN10A; (-) strand; PAM type: NRG; PAM sequence: GGG
  source 1..20: mol_type = other DNA
ttcaggggtccatgtgctat

SEQ ID NO: 21909 - DNA, 20 bp, synthetic construct
  misc_feature 1..20: note = Description of Artificial Sequence: Synthetic oligonucleotide
  misc_feature 1..20: note = Target: SCN10A; (-) strand; PAM type: NRG; PAM sequence: TGG
  source 1..20: mol_type = other DNA
attcaggggtccatgtgcta

SEQ ID NO: 21910 - DNA, 20 bp, synthetic construct
  misc_feature 1..20: note = Description of Artificial Sequence: Synthetic oligonucleotide
  misc_feature 1..20: note = Target: SCN10A; (-) strand; PAM type: NRG; PAM sequence: GGG
  source 1..20: mol_type = other DNA
ggaggctgacttaaattcag

SEQ ID NO: 21911 - DNA, 20 bp, synthetic construct
  misc_feature 1..20: note = Description of Artificial Sequence: Synthetic oligonucleotide
  misc_feature 1..20: note = Target: SCN10A; (-) strand; PAM type: NRG; PAM sequence: GGG
  source 1..20: mol_type = other DNA
aggaggctgacttaaattca

SEQ ID NO: 21912 - DNA, 20 bp, synthetic construct
  misc_feature 1..20: note = Description of Artificial Sequence: Synthetic oligonucleotide
  misc_feature 1..20: note = Target: SCN10A; (-) strand; PAM type: NRG; PAM sequence: AGG
  source 1..20: mol_type = other DNA
gaggaggctgacttaaattc

SEQ ID NO: 21913 - DNA, 20 bp, synthetic construct
  misc_feature 1..20: note = Description of Artificial Sequence: Synthetic oligonucleotide
  misc_feature 1..20: note = Target: SCN10A; (-) strand; PAM type: NRG; PAM sequence: CAG
  source 1..20: mol_type = other DNA
ggaggaggctgacttaaatt

SEQ ID NO: 21914 - DNA, 20 bp, synthetic construct
  misc_feature 1..20: note = Description of Artificial Sequence: Synthetic oligonucleotide
  misc_feature 1..20: note = Target: SCN10A; (-) strand; PAM type: NRG; PAM sequence: AGG
  source 1..20: mol_type = other DNA
ggctgtgcttttcctggagg

SEQ ID NO: 21915 - DNA, 20 bp, synthetic construct
  misc_feature 1..20: note = Description of Artificial Sequence: Synthetic oligonucleotide
  misc_feature 1..20: note = Target: SCN10A; (-) strand; PAM type: NRG; PAM sequence: GAG
  source 1..20: mol_type = other DNA
tggctgtgcttttcctggag

SEQ ID NO: 21916 - DNA, 20 bp, synthetic construct
  misc_feature 1..20: note = Description of Artificial Sequence: Synthetic oligonucleotide
  misc_feature 1..20: note = Target: SCN10A; (-) strand; PAM type: NRG; PAM sequence: AGG
  source 1..20: mol_type = other DNA
catggctgtgcttttcctgg

SEQ ID NO: 21917 - DNA, 20 bp, synthetic construct
  misc_feature 1..20: note = Description of Artificial Sequence: Synthetic oligonucleotide
  misc_feature 1..20: note = Target: SCN10A; (-) strand; PAM type: NRG; PAM sequence: GAG
  source 1..20: mol_type = other DNA
gcatggctgtgcttttcctg

SEQ ID NO: 21918 - DNA, 20 bp, synthetic construct
  misc_feature 1..20: note = Description of Artificial Sequence: Synthetic oligonucleotide
  misc_feature 1..20: note = Target: SCN10A; (-) strand; PAM type: NRG; PAM sequence: TGG
  source 1..20: mol_type = other DNA
ctgcatggctgtgcttttcc

SEQ ID NO: 21919 - DNA, 20 bp, synthetic construct
  misc_feature 1..20: note = Description of Artificial Sequence: Synthetic oligonucleotide
  misc_feature 1..20: note = Target: SCN10A; (-) strand; PAM type: NRG; PAM sequence: TGG
  source 1..20: mol_type = other DNA
aggctggtgggtcagctgca

SEQ ID NO: 21920 - DNA, 20 bp, synthetic construct
  misc_feature 1..20: note = Description of Artificial Sequence: Synthetic oligonucleotide
  misc_feature 1..20: note = Target: SCN10A; (-) strand; PAM type: NRG; PAM sequence: CAG
  source 1..20: mol_type = other DNA
ttggttggaggctggtgggt

SEQ ID NO: 21921 - DNA, 20 bp, synthetic construct
  misc_feature 1..20: note = Description of Artificial Sequence: Synthetic oligonucleotide
  misc_feature 1..20: note = Target: SCN10A; (-) strand; PAM type: NRG; PAM sequence: GGG
  source 1..20: mol_type = other DNA
agacttggttggaggctggt

SEQ ID NO: 21922 - DNA, 20 bp, synthetic construct
  misc_feature 1..20: note = Description of Artificial Sequence: Synthetic oligonucleotide
  misc_feature 1..20: note = Target: SCN10A; (-) strand; PAM type: NRG; PAM sequence: TGG
  source 1..20: mol_type = other DNA
cagacttggttggaggctgg

SEQ ID NO: 21923 - DNA, 20 bp, synthetic construct
  misc_feature 1..20: note = Description of Artificial Sequence: Synthetic oligonucleotide
  misc_feature 1..20: note = Target: SCN10A; (-) strand; PAM type: NRG; PAM sequence: TGG
  source 1..20: mol_type = other DNA
acgcagacttggttggaggc

SEQ ID NO: 21924 - DNA, 20 bp, synthetic construct
  misc_feature 1..20: note = Description of Artificial Sequence: Synthetic oligonucleotide
  misc_feature 1..20: note = Target: SCN10A; (-) strand; PAM type: NRG; PAM sequence: AGG
  source 1..20: mol_type = other DNA
ccccacgcagacttggttgg

SEQ ID NO: 21925 - DNA, 20 bp, synthetic construct
  misc_feature 1..20: note = Description of Artificial Sequence: Synthetic oligonucleotide
  misc_feature 1..20: note = Target: SCN10A; (-) strand; PAM type: NRG; PAM sequence: GAG
  source 1..20: mol_type = other DNA
cccccacgcagacttggttg

SEQ ID NO: 21926 - DNA, 20 bp, synthetic construct
  misc_feature 1..20: note = Description of Artificial Sequence: Synthetic oligonucleotide
  misc_feature 1..20: note = Target: SCN10A; (-) strand; PAM type: NRG; PAM sequence: TGG
  source 1..20: mol_type = other DNA
ttcccccacgcagacttggt

SEQ ID NO: 21927 - DNA, 20 bp, synthetic construct
  misc_feature 1..20: note = Description of Artificial Sequence: Synthetic oligonucleotide
  misc_feature 1..20: note = Target: SCN10A; (-) strand; PAM type: NRG; PAM sequence: TGG
  source 1..20: mol_type = other DNA
tgcattcccccacgcagact

SEQ ID NO: 21928 - DNA, 20 bp, synthetic construct
  misc_feature 1..20: note = Description of Artificial Sequence: Synthetic oligonucleotide
  misc_feature 1..20: note = Target: SCN10A; (-) strand; PAM type: NRG; PAM sequence: CAG
  source 1..20: mol_type = other DNA
ctgagctgcattcccccacg

SEQ ID NO: 21929 - DNA, 20 bp, synthetic construct
  misc_feature 1..20: note = Description of Artificial Sequence: Synthetic oligonucleotide
  misc_feature 1..20: note = Target: SCN10A; (-) strand; PAM type: NRG; PAM sequence: GAG
  source 1..20: mol_type = other DNA
cgcctctaccagcaggtact

SEQ ID NO: 21930 - DNA, 20 bp, synthetic construct
  misc_feature 1..20: note = Description of Artificial Sequence: Synthetic oligonucleotide
  misc_feature 1..20: note = Target: SCN10A; (-) strand; PAM type: NRG; PAM sequence: AGG
  source 1..20: mol_type = other DNA
ctgggaacgcctctaccagc

SEQ ID NO: 21931 - DNA, 20 bp, synthetic construct
  misc_feature 1..20: note = Description of Artificial Sequence: Synthetic oligonucleotide
  misc_feature 1..20: note = Target: SCN10A; (-) strand; PAM type: NRG; PAM sequence: CAG
  source 1..20: mol_type = other DNA
cctgggaacgcctctaccag

SEQ ID NO: 21932 - DNA, 20 bp, synthetic construct
  misc_feature 1..20: note = Description of Artificial Sequence: Synthetic oligonucleotide
  misc_feature 1..20: note = Target: SCN10A; (-) strand; PAM type: NRG; PAM sequence: CAG
  source 1..20: mol_type = other DNA
attcctgggaacgcctctac

SEQ ID NO: 21933 - DNA, 20 bp, synthetic construct
  misc_feature 1..20: note = Description of Artificial Sequence: Synthetic oligonucleotide
  misc_feature 1..20: note = Target: SCN10A; (-) strand; PAM type: NRG; PAM sequence: GGG
  source 1..20: mol_type = other DNA
cctcatgacacaggattcct

SEQ ID NO: 21934 - DNA, 20 bp, synthetic construct
  misc_feature 1..20: note = Description of Artificial Sequence: Synthetic oligonucleotide
  misc_feature 1..20: note = Target: SCN10A; (-) strand; PAM type: NRG; PAM sequence: TGG
  source 1..20: mol_type = other DNA
gcctcatgacacaggattcc

SEQ ID NO: 21935 - DNA, 20 bp, synthetic construct
  misc_feature 1..20: note = Description of Artificial Sequence: Synthetic oligonucleotide
  misc_feature 1..20: note = Target: SCN10A; (-) strand; PAM type: NRG; PAM sequence: AGG
  source 1..20: mol_type = other DNA
actgttccgcctcatgacac

SEQ ID NO: 21936 - DNA, 20 bp, synthetic construct
  misc_feature 1..20: note = Description of Artificial Sequence: Synthetic oligonucleotide
  misc_feature 1..20: note = Target: SCN10A; (-) strand; PAM type: NRG; PAM sequence: CAG
  source 1..20: mol_type = other DNA
cactgttccgcctcatgaca

SEQ ID NO: 21937 - DNA, 20 bp, synthetic construct
  misc_feature 1..20: note = Description of Artificial Sequence: Synthetic oligonucleotide
  misc_feature 1..20: note = Target: SCN10A; (-) strand; PAM type: NRG; PAM sequence: GGG
  source 1..20: mol_type = other DNA
cagctttgattcctttgctt

SEQ ID NO: 21938 - DNA, 20 bp, synthetic construct
  misc_feature 1..20: note = Description of Artificial Sequence: Synthetic oligonucleotide
  misc_feature 1..20: note = Target: SCN10A; (-) strand; PAM type: NRG; PAM sequence: TGG
  source 1..20: mol_type = other DNA
ccagctttgattcctttgct

SEQ ID NO: 21939 - DNA, 20 bp, synthetic construct
  misc_feature 1..20: note = Description of Artificial Sequence: Synthetic oligonucleotide
  misc_feature 1..20: note = Target: SCN10A; (-) strand; PAM type: NRG; PAM sequence: CAG
  source 1..20: mol_type = other DNA
aacccggattttaactacac

SEQ ID NO: 21940 - DNA, 20 bp, synthetic construct
  misc_feature 1..20: note = Description of Artificial Sequence: Synthetic oligonucleotide
  misc_feature 1..20: note = Target: SCN10A; (-) strand; PAM type: NRG; PAM sequence: CGG
  source 1..20: mol_type = other DNA
ccttaaaacttctgacaacc

SEQ ID NO: 21941 - DNA, 20 bp, synthetic construct
  misc_feature 1..20: note = Description of Artificial Sequence: Synthetic oligonucleotide
  misc_feature 1..20: note = Target: SCN10A; (-) strand; PAM type: NRG; PAM sequence: TGG
  source 1..20: mol_type = other DNA
tgctgcagccactgccctga

SEQ ID NO: 21942 - DNA, 20 bp, synthetic construct
  misc_feature 1..20: note = Description of Artificial Sequence: Synthetic oligonucleotide
  misc_feature 1..20: note = Target: SCN10A; (-) strand; PAM type: NRG; PAM sequence: CAG
  source 1..20: mol_type = other DNA
gaccttctctgttcttgctg

SEQ ID NO: 21943 - DNA, 20 bp, synthetic construct
  misc_feature 1..20: note = Description of Artificial Sequence: Synthetic oligonucleotide
  misc_feature 1..20: note = Target: SCN10A; (-) strand; PAM type: NRG; PAM sequence: GGG
  source 1..20: mol_type = other DNA
accttgtctgcaataagcag

SEQ ID NO: 21944 - DNA, 20 bp, synthetic construct
  misc_feature 1..20: note = Description of Artificial Sequence: Synthetic oligonucleotide
  misc_feature 1..20: note = Target: SCN10A; (-) strand; PAM type: NRG; PAM sequence: GGG
  source 1..20: mol_type = other DNA
taccttgtctgcaataagca

SEQ ID NO: 21945 - DNA, 20 bp, synthetic construct
  misc_feature 1..20: note = Description of Artificial Sequence: Synthetic oligonucleotide
  misc_feature 1..20: note = Target: SCN10A; (-) strand; PAM type: NRG; PAM sequence: AGG
  source 1..20: mol_type = other DNA
ctaccttgtctgcaataagc

SEQ ID NO: 21946 - DNA, 20 bp, synthetic construct
  misc_feature 1..20: note = Description of Artificial Sequence: Synthetic oligonucleotide
  misc_feature 1..20: note = Target: SCN10A; (-) strand; PAM type: NRG; PAM sequence: CAG
  source 1..20: mol_type = other DNA
gctaccttgtctgcaataag

SEQ ID NO: 21947 - DNA, 20 bp, synthetic construct
  misc_feature 1..20: note = Description of Artificial Sequence: Synthetic oligonucleotide
  misc_feature 1..20: note = Target: SCN10A; (-) strand; PAM type: NRG; PAM sequence: AAG
  source 1..20: mol_type = other DNA
tgggctaccttgtctgcaat

SEQ ID NO: 21948 - DNA, 20 bp, synthetic construct
  misc_feature 1..20: note = Description of Artificial Sequence: Synthetic oligonucleotide
  misc_feature 1..20: note = Target: SCN10A; (-) strand; PAM type: NRG; PAM sequence: GGG
  source 1..20: mol_type = other DNA
tgtggttgtctcgcagccct

SEQ ID NO: 21949 - DNA, 20 bp, synthetic construct
  misc_feature 1..20: note = Description of Artificial Sequence: Synthetic oligonucleotide
  misc_feature 1..20: note = Target: SCN10A; (-) strand; PAM type: NRG; PAM sequence: TGG
  source 1..20: mol_type = other DNA
ctgtggttgtctcgcagccc

SEQ ID NO: 21950 - DNA, 20 bp, synthetic construct
  misc_feature 1..20: note = Description of Artificial Sequence: Synthetic oligonucleotide
  misc_feature 1..20: note = Target: SCN10A; (-) strand; PAM type: NRG; PAM sequence: CAG
  source 1..20: mol_type = other DNA
aaaactctgtggttgtctcg

SEQ ID NO: 21951 - DNA, 20 bp, synthetic construct
  misc_feature 1..20: note = Description of Artificial Sequence: Synthetic oligonucleotide
  misc_feature 1..20: note = Target: SCN10A; (-) strand; PAM type: NRG; PAM sequence: TGG
  source 1..20: mol_type = other DNA
atctctgacataaaactctg

SEQ ID NO: 21952 - DNA, 20 bp, synthetic construct
  misc_feature 1..20: note = Description of Artificial Sequence: Synthetic oligonucleotide
  misc_feature 1..20: note = Target: SCN10A; (-) strand; PAM type: NRG; PAM sequence: AGG
  source 1..20: mol_type = other DNA
ctgctaataagaggaagact

SEQ ID NO: 21953 - DNA, 20 bp, synthetic construct
  misc_feature 1..20: note = Description of Artificial Sequence: Synthetic oligonucleotide
  misc_feature 1..20: note = Target: SCN10A; (-) strand; PAM type: NRG; PAM sequence: TAG
  source 1..20: mol_type = other DNA
cctgctaataagaggaagac

SEQ ID NO: 21954 - DNA, 20 bp, synthetic construct
  misc_feature 1..20: note = Description of Artificial Sequence: Synthetic oligonucleotide
  misc_feature 1..20: note = Target: SCN10A; (-) strand; PAM type: NRG; PAM sequence: AAG
  source 1..20: mol_type = other DNA
atcatcctgctaataagagg

SEQ ID NO: 21955 - DNA, 20 bp, synthetic construct
  misc_feature 1..20: note = Description of Artificial Sequence: Synthetic oligonucleotide
  misc_feature 1..20: note = Target: SCN10A; (-) strand; PAM type: NRG; PAM sequence: AGG
  source 1..20: mol_type = other DNA
aagatcatcctgctaataag

SEQ ID NO: 21956 - DNA, 20 bp, synthetic construct
  misc_feature 1..20: note = Description of Artificial Sequence: Synthetic oligonucleotide
  misc_feature 1..20: note = Target: SCN10A; (-) strand; PAM type: NRG; PAM sequence: GAG
  source 1..20: mol_type = other DNA
caagatcatcctgctaataa

SEQ ID NO: 21957 - DNA, 20 bp, synthetic construct
  misc_feature 1..20: note = Description of Artificial Sequence: Synthetic oligonucleotide
  misc_feature 1..20: note = Target: SCN10A; (-) strand; PAM type: NRG; PAM sequence: AAG
  source 1..20: mol_type = other DNA
tccaagatcatcctgctaat

SEQ ID NO: 21958 - DNA, 20 bp, synthetic construct
  misc_feature 1..20: note = Description of Artificial Sequence: Synthetic oligonucleotide
  misc_feature 1..20: note = Target: SCN10A; (-) strand; PAM type: NRG; PAM sequence: AAG
  source 1..20: mol_type = other DNA
cctaaacagaccaagtgtcc

SEQ ID NO: 21959 - DNA, 20 bp, synthetic construct
  misc_feature 1..20: note = Description of Artificial Sequence: Synthetic oligonucleotide
  misc_feature 1..20: note = Target: SCN10A; (-) strand; PAM type: NRG; PAM sequence: AAG
  source 1..20: mol_type = other DNA
aaccaatacctaaacagacc

SEQ ID NO: 21960 - DNA, 20 bp, synthetic construct
  misc_feature 1..20: note = Description of Artificial Sequence: Synthetic oligonucleotide
  misc_feature 1..20: note = Target: SCN10A; (-) strand; PAM type: NRG; PAM sequence: CAG
  source 1..20: mol_type = other DNA
aacagaaaccaatacctaaa

SEQ ID NO: 21961 - DNA, 20 bp, synthetic construct
  misc_feature 1..20: note = Description of Artificial Sequence: Synthetic oligonucleotide
  misc_feature 1..20: note = Target: SCN10A; (-) strand; PAM type: NRG; PAM sequence: CAG
  source 1..20: mol_type = other DNA
cgtccccgttttatggataa

SEQ ID NO: 21962 - DNA, 20 bp, synthetic construct
  misc_feature 1..20: note = Description of Artificial Sequence: Synthetic oligonucleotide
  misc_feature 1..20: note = Target: SCN10A; (-) strand; PAM type: NRG; PAM sequence: TGG
  source 1..20: mol_type = other DNA
gtattagcgtccccgtttta

SEQ ID NO: 21963 - DNA, 20 bp, synthetic construct
  misc_feature 1..20: note = Description of Artificial Sequence: Synthetic oligonucleotide
  misc_feature 1..20: note = Target: SCN10A; (-) strand; PAM type: NRG; PAM sequence: TAG
  source 1..20: mol_type = other DNA
aaattctgacgtgaaagtat

SEQ ID NO: 21964 - DNA, 20 bp, synthetic construct
  misc_feature 1..20: note = Description of Artificial Sequence: Synthetic oligonucleotide
  misc_feature 1..20: note = Target: SCN10A; (-) strand; PAM type: NRG; PAM sequence: AAG
  source 1..20: mol_type = other DNA
tgtatgaaattctgacgtga

SEQ ID NO: 21965 - DNA, 20 bp, synthetic construct
  misc_feature 1..20: note = Description of Artificial Sequence: Synthetic oligonucleotide
  misc_feature 1..20: note = Target: SCN10A; (-) strand; PAM type: NRG; PAM sequence: AGG
  source 1..20: mol_type = other DNA
ggcagtcagctgccttcccc

SEQ ID NO: 21966 - DNA, 20 bp, synthetic construct
  misc_feature 1..20: note = Description of Artificial Sequence: Synthetic oligonucleotide
  misc_feature 1..20: note = Target: SCN10A; (-) strand; PAM type: NRG; PAM sequence: CAG
  source 1..20: mol_type = other DNA
gggcagtcagctgccttccc

SEQ ID NO: 21967 - DNA, 20 bp, synthetic construct
  misc_feature 1..20: note = Description of Artificial Sequence: Synthetic oligonucleotide
  misc_feature 1..20: note = Target: SCN10A; (-) strand; PAM type: NRG; PAM sequence: CAG
  source 1..20: mol_type = other DNA
tagtatcgtgtctgggcagt

SEQ ID NO: 21968 - DNA, 20 bp, synthetic construct
  misc_feature 1..20: note = Description of Artificial Sequence: Synthetic oligonucleotide
  misc_feature 1..20: note = Target: SCN10A; (-) strand; PAM type: NRG; PAM sequence: CAG
  source 1..20: mol_type = other DNA
cttatagtatcgtgtctggg

SEQ ID NO: 21969 - DNA, 20 bp, synthetic construct
  misc_feature 1..20: note = Description of Artificial Sequence: Synthetic oligonucleotide
  misc_feature 1..20: note = Target: SCN10A; (-) strand; PAM type: NRG; PAM sequence: GGG
  source 1..20: mol_type = other DNA
gagcttatagtatcgtgtct

SEQ ID NO: 21970 - DNA, 20 bp, synthetic construct
  misc_feature 1..20: note = Description of Artificial Sequence: Synthetic oligonucleotide
  misc_feature 1..20: note = Target: SCN10A; (-) strand; PAM type: NRG; PAM sequence: TGG
  source 1..20: mol_type = other DNA
agagcttatagtatcgtgtc

SEQ ID NO: 21971 - DNA, 20 bp, synthetic construct
  misc_feature 1..20: note = Description of Artificial Sequence: Synthetic oligonucleotide
  misc_feature 1..20: note = Target: SCN10A; (-) strand; PAM type: NRG; PAM sequence: TAG
  source 1..20: mol_type = other DNA
atgaactggcaaagagctta

SEQ ID NO: 21972 - DNA, 20 bp, synthetic construct
  misc_feature 1..20: note = Description of Artificial Sequence: Synthetic oligonucleotide
  misc_feature 1..20: note = Target: SCN10A; (-) strand; PAM type: NRG; PAM sequence: GAG
  source 1..20: mol_type = other DNA
ccctggtatgaactggcaaa

SEQ ID NO: 21973 - DNA, 20 bp, synthetic construct
  misc_feature 1..20: note = Description of Artificial Sequence: Synthetic oligonucleotide
  misc_feature 1..20: note = Target: SCN10A; (-) strand; PAM type: NRG; PAM sequence: AAG
  source 1..20: mol_type = other DNA
ttccctggtatgaactggca

SEQ ID NO: 21974 - DNA, 20 bp, synthetic construct
  misc_feature 1..20: note = Description of Artificial Sequence: Synthetic oligonucleotide
  misc_feature 1..20: note = Target: SCN10A; (-) strand; PAM type: NRG; PAM sequence: TGG
  source 1..20: mol_type = other DNA
ctcatttccctggtatgaac

SEQ ID NO: 21975 - DNA, 20 bp, synthetic construct
  misc_feature 1..20: note = Description of Artificial Sequence: Synthetic oligonucleotide
  misc_feature 1..20: note = Target: SCN10A; (-) strand; PAM type: NRG; PAM sequence: TGG
  source 1..20: mol_type = other DNA
gctactgactctcatttccc

SEQ ID NO: 21976 - DNA, 20 bp, synthetic construct
  misc_feature 1..20: note = Description of Artificial Sequence: Synthetic oligonucleotide
  misc_feature 1..20: note = Target: SCN10A; (-) strand; PAM type: NRG; PAM sequence: AAG
  source 1..20: mol_type = other DNA
tgccaacaggctcaggtttt

SEQ ID NO: 21977 - DNA, 20 bp, synthetic construct
  misc_feature 1..20: note = Description of Artificial Sequence: Synthetic oligonucleotide
  misc_feature 1..20: note = Target: SCN10A; (-) strand; PAM type: NRG; PAM sequence: AGG
  source 1..20: mol_type = other DNA
cagatgatgccaacaggctc

SEQ ID NO: 21978 - DNA, 20 bp, synthetic construct
  misc_feature 1..20: note = Description of Artificial Sequence: Synthetic oligonucleotide
  misc_feature 1..20: note = Target: SCN10A; (-) strand; PAM type: NRG; PAM sequence: CAG
  source 1..20: mol_type = other DNA
gcagatgatgccaacaggct

SEQ ID NO: 21979 - DNA, 20 bp, synthetic construct
  misc_feature 1..20: note = Description of Artificial Sequence: Synthetic oligonucleotide
  misc_feature 1..20: note = Target: SCN10A; (-) strand; PAM type: NRG; PAM sequence: AGG
  source 1..20: mol_type = other DNA
actctgcagatgatgccaac

SEQ ID NO: 21980 - DNA, 20 bp, synthetic construct
  misc_feature 1..20: note = Description of Artificial Sequence: Synthetic oligonucleotide
  misc_feature 1..20: note = Target: SCN10A; (-) strand; PAM type: NRG; PAM sequence: CAG
  source 1..20: mol_type = other DNA
aactctgcagatgatgccaa

SEQ ID NO: 21981 - DNA, 20 bp, synthetic construct
  misc_feature 1..20: note = Description of Artificial Sequence: Synthetic oligonucleotide
  misc_feature 1..20: note = Target: SCN10A; (-) strand; PAM type: NRG; PAM sequence: CAG
  source 1..20: mol_type = other DNA
tcccttgatagacaactctg

SEQ ID NO: 21982 - DNA, 20 bp, synthetic construct
  misc_feature 1..20: note = Description of Artificial Sequence: Synthetic oligonucleotide
  misc_feature 1..20: note = Target: SCN10A; (-) strand; PAM type: NRG; PAM sequence: TAG
  source 1..20: mol_type = other DNA
taatgtgagacctcccttga

SEQ ID NO: 21983 - DNA, 20 bp, synthetic construct
  misc_feature 1..20: note = Description of Artificial Sequence: Synthetic oligonucleotide
  misc_feature 1..20: note = Target: SCN10A; (-) strand; PAM type: NRG; PAM sequence: GAG
  source 1..20: mol_type = other DNA
tcagtgaacttggctaatgt

SEQ ID NO: 21984 - DNA, 20 bp, synthetic construct
  misc_feature 1..20: note = Description of Artificial Sequence: Synthetic oligonucleotide
  misc_feature 1..20: note = Target: SCN10A; (-) strand; PAM type: NRG; PAM sequence: TGG
  source 1..20: mol_type = other DNA
atataattaatcagtgaact

SEQ ID NO: 21985 - DNA, 20 bp, synthetic construct
  misc_feature 1..20: note = Description of Artificial Sequence: Synthetic oligonucleotide
  misc_feature 1..20: note = Target: SCN10A; (-) strand; PAM type: NRG; PAM sequence: CAG
  source 1..20: mol_type = other DNA
cactgttacatataattaat

SEQ ID NO: 21986 - DNA, 20 bp, synthetic construct
  misc_feature 1..20: note = Description of Artificial Sequence: Synthetic oligonucleotide
  misc_feature 1..20: note = Target: SCN10A; (-) strand; PAM type: NRG; PAM sequence: AAG
  source 1..20: mol_type = other DNA
gaaagtgctcagtaagtgga

SEQ ID NO: 21987 - DNA, 20 bp, synthetic construct
  misc_feature 1..20: note = Description of Artificial Sequence: Synthetic oligonucleotide
  misc_feature 1..20: note = Target: SCN10A; (-) strand; PAM type: NRG; PAM sequence: TGG
  source 1..20: mol_type = other DNA
cacagaaagtgctcagtaag

SEQ ID NO: 21988 - DNA, 20 bp, synthetic construct
  misc_feature 1..20: note = Description of Artificial Sequence: Synthetic oligonucleotide
  misc_feature 1..20: note = Target: SCN10A; (-) strand; PAM type: NRG; PAM sequence: AAG
  source 1..20: mol_type = other DNA
gaacacagaaagtgctcagt

SEQ ID NO: 21989 - DNA, 20 bp, synthetic construct
  misc_feature 1..20: note = Description of Artificial Sequence: Synthetic oligonucleotide
  misc_feature 1..20: note = Target: SCN10A; (-) strand; PAM type: NRG; PAM sequence: CAG
  source 1..20: mol_type = other DNA
agaagaacacagaaagtgct

SEQ ID NO: 21990 - DNA, 20 bp, synthetic construct
  misc_feature 1..20: note = Description of Artificial Sequence: Synthetic oligonucleotide
  misc_feature 1..20: note = Target: SCN10A; (-) strand; PAM type: NRG; PAM sequence: AAG
  source 1..20: mol_type = other DNA
gggagagagaagaacacaga

SEQ ID NO: 21991 - DNA, 20 bp, synthetic construct
  misc_feature 1..20: note = Description of Artificial Sequence: Synthetic oligonucleotide
  misc_feature 1..20: note = Target: SCN10A; (-) strand; PAM type: NRG; PAM sequence: CAG
  source 1..20: mol_type = other DNA
taaagggagagagaagaaca

SEQ ID NO: 21992 - DNA, 20 bp, synthetic construct
  misc_feature 1..20: note = Description of Artificial Sequence: Synthetic oligonucleotide
  misc_feature 1..20: note = Target: SCN10A; (-) strand; PAM type: NRG; PAM sequence: AAG
  source 1..20: mol_type = other DNA
aagcacttaaagggagagag

SEQ ID NO: 21993 - DNA, 20 bp, synthetic construct
  misc_feature 1..20: note = Description of Artificial Sequence: Synthetic oligonucleotide
  misc_feature 1..20: note = Target: SCN10A; (-) strand; PAM type: NRG; PAM sequence: GAG
  source 1..20: mol_type = other DNA
gtaaagcacttaaagggaga

SEQ ID NO: 21994 - DNA, 20 bp, synthetic construct
  misc_feature 1..20: note = Description of Artificial Sequence: Synthetic oligonucleotide
  misc_feature 1..20: note = Target: SCN10A; (-) strand; PAM type: NRG; PAM sequence: GAG
  source 1..20: mol_type = other DNA
ttgtaaagcacttaaaggga

SEQ ID NO: 21995 - DNA, 20 bp, synthetic construct
  misc_feature 1..20: note = Description of Artificial Sequence: Synthetic oligonucleotide
  misc_feature 1..20: note = Target: SCN10A; (-) strand; PAM type: NRG; PAM sequence: GAG
  source 1..20: mol_type = other DNA
gtttgtaaagcacttaaagg

SEQ ID NO: 21996 - DNA, 20 bp, synthetic construct
  misc_feature 1..20: note = Description of Artificial Sequence: Synthetic oligonucleotide
  misc_feature 1..20: note = Target: SCN10A; (-) strand; PAM type: NRG; PAM sequence: GGG
  source 1..20: mol_type = other DNA
gtgtttgtaaagcacttaaa

SEQ ID NO: 21997 - DNA, 20 bp, synthetic construct
  misc_feature 1..20: note = Description of Artificial Sequence: Synthetic oligonucleotide
  misc_feature 1..20: note = Target: SCN10A; (-) strand; PAM type: NRG; PAM sequence: AGG
  source 1..20: mol_type = other DNA
agtgtttgtaaagcacttaa

SEQ ID NO: 21998 - DNA, 20 bp, synthetic construct
  misc_feature 1..20: note = Description of Artificial Sequence: Synthetic oligonucleotide
  misc_feature 1..20: note = Target: SCN10A; (-) strand; PAM type: NRG; PAM sequence: AAG
  source 1..20: mol_type = other DNA
tagtgtttgtaaagcactta

SEQ ID NO: 21999 - DNA, 20 bp, synthetic construct
  misc_feature 1..20: note = Description of Artificial Sequence: Synthetic oligonucleotide
  misc_feature 1..20: note = Target: SCN10A; (-) strand; PAM type: NRG; PAM sequence: AAG
  source 1..20: mol_type = other DNA
attaaattatagtgtttgta

SEQ ID NO: 22000 - DNA, 20 bp, synthetic construct
  misc_feature 1..20: note = Description of Artificial Sequence: Synthetic oligonucleotide
  misc_feature 1..20: note = Target: SCN10A; (-) strand; PAM type: NRG; PAM sequence: TAG
  source 1..20: mol_type = other DNA
aacattgagtgattaaatta

SEQ ID NO: 22001 - DNA, 20 bp, synthetic construct
  misc_feature 1..20: note = Description of Artificial Sequence: Synthetic oligonucleotide
  misc_feature 1..20: note = Target: SCN10A; (-) strand; PAM type: NRG; PAM sequence: GAG
  source 1..20: mol_type = other DNA
atctgtaaagaaagaacatt

SEQ ID NO: 22002 - DNA, 20 bp, synthetic construct
  misc_feature 1..20: note = Description of Artificial Sequence: Synthetic oligonucleotide
  misc_feature 1..20: note = Target: SCN10A; (-) strand; PAM type: NRG; PAM sequence: AAG
  source 1..20: mol_type = other DNA
agattccttatctgtaaaga

SEQ ID NO: 22003 - DNA, 20 bp, synthetic construct
  misc_feature 1..20: note = Description of Artificial Sequence: Synthetic oligonucleotide
  misc_feature 1..20: note = Target: SCN10A; (-) strand; PAM type: NRG; PAM sequence: AAG
  source 1..20: mol_type = other DNA
ccccagattccttatctgta

SEQ ID NO: 22004 - DNA, 20 bp, synthetic construct
  misc_feature 1..20: note = Description of Artificial Sequence: Synthetic oligonucleotide
  misc_feature 1..20: note = Target: SCN10A; (-) strand; PAM type: NRG; PAM sequence: CAG
  source 1..20: mol_type = other DNA
actgacttctttctgacccc

SEQ ID NO: 22005 - DNA, 20 bp, synthetic construct
  misc_feature 1..20: note = Description of Artificial Sequence: Synthetic oligonucleotide
  misc_feature 1..20: note = Target: SCN10A; (-) strand; PAM type: NRG; PAM sequence: AGG
  source 1..20: mol_type = other DNA
attgacacctgcgtagtttt

SEQ ID NO: 22006 - DNA, 20 bp, synthetic construct
  misc_feature 1..20: note = Description of Artificial Sequence: Synthetic oligonucleotide
  misc_feature 1..20: note = Target: SCN10A; (-) strand; PAM type: NRG; PAM sequence: TAG
  source 1..20: mol_type = other DNA
tattgacacctgcgtagttt

SEQ ID NO: 22007 - DNA, 20 bp, synthetic construct
  misc_feature 1..20: note = Description of Artificial Sequence: Synthetic oligonucleotide
  misc_feature 1..20: note = Target: SCN10A; (-) strand; PAM type: NRG; PAM sequence: TAG
  source 1..20: mol_type = other DNA
taaatatattgacacctgcg

SEQ ID NO: 22008 - DNA, 20 bp, synthetic construct
  misc_feature 1..20: note = Description of Artificial Sequence: Synthetic oligonucleotide
  misc_feature 1..20: note = Target: SCN10A; (-) strand; PAM type: NRG; PAM sequence: CAG
  source 1..20: mol_type = other DNA
tcaagtattgggctacttga

SEQ ID NO: 22009 - DNA, 20 bp, synthetic construct
  misc_feature 1..20: note = Description of Artificial Sequence: Synthetic oligonucleotide
  misc_feature 1..20: note = Target: SCN10A; (-) strand; PAM type: NRG; PAM sequence: GGG
  source 1..20: mol_type = other DNA
gctaggctgactcaagtatt

SEQ ID NO: 22010 - DNA, 20 bp, synthetic construct
  misc_feature 1..20: note = Description of Artificial Sequence: Synthetic oligonucleotide
  misc_feature 1..20: note = Target: SCN10A; (-) strand; PAM type: NRG; PAM sequence: TGG
  source 1..20: mol_type = other DNA
ggctaggctgactcaagtat

SEQ ID NO: 22011 - DNA, 20 bp, synthetic construct
  misc_feature 1..20: note = Description of Artificial Sequence: Synthetic oligonucleotide
  misc_feature 1..20: note = Target: SCN10A; (-) strand; PAM type: NRG; PAM sequence: AAG
  source 1..20: mol_type = other DNA
ggaggaggctaggctgactc

SEQ ID NO: 22012 - DNA, 20 bp, synthetic construct
  misc_feature 1..20: note = Description of Artificial Sequence: Synthetic oligonucleotide
  misc_feature 1..20: note = Target: SCN10A; (-) strand; PAM type: NRG; PAM sequence: AGG
  source 1..20: mol_type = other DNA
gccatcttcaggaggaggct

SEQ ID NO: 22013 - DNA, 20 bp, synthetic construct
  misc_feature 1..20: note = Description of Artificial Sequence: Synthetic oligonucleotide
  misc_feature 1..20: note = Target: SCN10A; (-) strand; PAM type: NRG; PAM sequence: TAG
  source 1..20: mol_type = other DNA
ggccatcttcaggaggaggc

SEQ ID NO: 22014 - DNA, 20 bp, synthetic construct
  misc_feature 1..20: note = Description of Artificial Sequence: Synthetic oligonucleotide
  misc_feature 1..20: note = Target: SCN10A; (-) strand; PAM type: NRG; PAM sequence: AGG
  source 1..20: mol_type = other DNA
cataggccatcttcaggagg

SEQ ID NO: 22015 - DNA, 20 bp, synthetic construct
  misc_feature 1..20: note = Description of Artificial Sequence: Synthetic oligonucleotide
  misc_feature 1..20: note = Target: SCN10A; (-) strand; PAM type: NRG; PAM sequence: GAG
  source 1..20: mol_type = other DNA
tcataggccatcttcaggag

SEQ ID NO: 22016 - DNA, 20 bp, synthetic construct
  misc_feature 1..20: note = Description of Artificial Sequence: Synthetic oligonucleotide
  misc_feature 1..20: note = Target: SCN10A; (-) strand; PAM type: NRG; PAM sequence: AGG
  source 1..20: mol_type = other DNA
cttcataggccatcttcagg

SEQ ID NO: 22017 - DNA, 20 bp, synthetic construct
  misc_feature 1..20: note = Description of Artificial Sequence: Synthetic oligonucleotide
  misc_feature 1..20: note = Target: SCN10A; (-) strand; PAM type: NRG; PAM sequence: GAG
  source 1..20: mol_type = other DNA
ccttcataggccatcttcag

SEQ ID NO: 22018 - DNA, 20 bp, synthetic construct
  misc_feature 1..20: note = Description of Artificial Sequence: Synthetic oligonucleotide
  misc_feature 1..20: note = Target: SCN10A; (-) strand; PAM type: NRG; PAM sequence: AGG
  source 1..20: mol_type = other DNA
ttccttcataggccatcttc

SEQ ID NO: 22019 - DNA, 20 bp, synthetic construct
  misc_feature 1..20: note = Description of Artificial Sequence: Synthetic oligonucleotide
  misc_feature 1..20: note = Target: SCN10A; (-) strand; PAM type: NRG; PAM sequence: CAG
  source 1..20: mol_type = other DNA
cttccttcataggccatctt

SEQ ID NO: 22020 - DNA, 20 bp, synthetic construct
  misc_feature 1..20: note = Description of Artificial Sequence: Synthetic oligonucleotide
  misc_feature 1..20: note = Target: SCN10A; (-) strand; PAM type: NRG; PAM sequence: AGG
  source 1..20: mol_type = other DNA
ttaatctggccttccttcat

SEQ ID NO: 22021 - DNA, 20 bp, synthetic construct
  misc_feature 1..20: note = Description of Artificial Sequence: Synthetic oligonucleotide
  misc_feature 1..20: note = Target: SCN10A; (-) strand; PAM type: NRG; PAM sequence: TAG
  source 1..20: mol_type = other DNA
tttaatctggccttccttca

SEQ ID NO: 22022 - DNA, 20 bp, synthetic construct
  misc_feature 1..20: note = Description of Artificial Sequence: Synthetic oligonucleotide
  misc_feature 1..20: note = Target: SCN10A; (-) strand; PAM type: NRG; PAM sequence: TGG
  source 1..20: mol_type = other DNA
ccaggcagtcatttttaatc

SEQ ID NO: 22023 - DNA, 20 bp, synthetic construct
  misc_feature 1..20: note = Description of Artificial Sequence: Synthetic oligonucleotide
  misc_feature 1..20: note = Target: SCN10A; (-) strand; PAM type: NRG; PAM sequence: CAG
  source 1..20: mol_type = other DNA
ccacctcaatactcaccagg

SEQ ID NO: 22024 - DNA, 20 bp, synthetic construct
  misc_feature 1..20: note = Description of Artificial Sequence: Synthetic oligonucleotide
  misc_feature 1..20: note = Target: SCN10A; (-) strand; PAM type: NRG; PAM sequence: AGG
  source 1..20: mol_type = other DNA
ttcccacctcaatactcacc

SEQ ID NO: 22025 - DNA, 20 bp, synthetic construct
  misc_feature 1..20: note = Description of Artificial Sequence: Synthetic oligonucleotide
  misc_feature 1..20: note = Target: SCN10A; (-) strand; PAM type: NRG; PAM sequence: CAG
  source 1..20: mol_type = other DNA
attcccacctcaatactcac

SEQ ID NO: 22026 - DNA, 20 bp, synthetic construct
  misc_feature 1..20: note = Description of Artificial Sequence: Synthetic oligonucleotide
  misc_feature 1..20: note = Target: SCN10A; (-) strand; PAM type: NRG; PAM sequence: CAG
  source 1..20: mol_type = other DNA
atgagagagaggaaggagtt

SEQ ID NO: 22027 - DNA, 20 bp, synthetic construct
  misc_feature 1..20: note = Description of Artificial Sequence: Synthetic oligonucleotide
  misc_feature 1..20: note = Target: SCN10A; (-) strand; PAM type: NRG; PAM sequence: GAG
  source 1..20: mol_type = other DNA
ctattatgagagagaggaag

SEQ ID NO: 22028 - DNA, 20 bp, synthetic construct
  misc_feature 1..20: note = Description of Artificial Sequence: Synthetic oligonucleotide
  misc_feature 1..20: note = Target: SCN10A; (-) strand; PAM type: NRG; PAM sequence: AGG
  source 1..20: mol_type = other DNA
tcctattatgagagagagga

SEQ ID NO: 22029 - DNA, 20 bp, synthetic construct
  misc_feature 1..20: note = Description of Artificial Sequence: Synthetic oligonucleotide
  misc_feature 1..20: note = Target: SCN10A; (-) strand; PAM type: NRG; PAM sequence: AAG
  source 1..20: mol_type = other DNA
ctcctattatgagagagagg

SEQ ID NO: 22030 - DNA, 20 bp, synthetic construct
  misc_feature 1..20: note = Description of Artificial Sequence: Synthetic oligonucleotide
  misc_feature 1..20: note = Target: SCN10A; (-) strand; PAM type: NRG; PAM sequence: AGG
  source 1..20: mol_type = other DNA
atcctcctattatgagagag

SEQ ID NO: 22031 - DNA, 20 bp, synthetic construct
  misc_feature 1..20: note = Description of Artificial Sequence: Synthetic oligonucleotide
  misc_feature 1..20: note = Target: SCN10A; (-) strand; PAM type: NRG; PAM sequence: GAG
  source 1..20: mol_type = other DNA
catcctcctattatgagaga

SEQ ID NO: 22032 - DNA, 20 bp, synthetic construct
  misc_feature 1..20: note = Description of Artificial Sequence: Synthetic oligonucleotide
  misc_feature 1..20: note = Target: SCN10A; (-) strand; PAM type: NRG; PAM sequence: GAG
  source 1..20: mol_type = other DNA
ctcatcctcctattatgaga

SEQ ID NO: 22033 - DNA, 20 bp, synthetic construct
  misc_feature 1..20: note = Description of Artificial Sequence: Synthetic oligonucleotide
  misc_feature 1..20: note = Target: SCN10A; (-) strand; PAM type: NRG; PAM sequence: GAG
  source 1..20: mol_type = other DNA
gactcatcctcctattatga

SEQ ID NO: 22034 - DNA, 20 bp, synthetic construct
  misc_feature 1..20: note = Description of Artificial Sequence: Synthetic oligonucleotide
  misc_feature 1..20: note = Target: SCN10A; (-) strand; PAM type: NRG; PAM sequence: GAG
  source 1..20: mol_type = other DNA
tcgactcatcctcctattat

SEQ ID NO: 22035 - DNA, 20 bp, synthetic construct
  misc_feature 1..20: note = Description of Artificial Sequence: Synthetic oligonucleotide
  misc_feature 1..20: note = Target: SCN10A; (-) strand; PAM type: NRG; PAM sequence: CAG
  source 1..20: mol_type = other DNA
ctttacgctccctgagctga

SEQ ID NO: 22036 - DNA, 20 bp, synthetic construct
  misc_feature 1..20: note = Description of Artificial Sequence: Synthetic oligonucleotide
  misc_feature 1..20: note = Target: SCN10A; (-) strand; PAM type: NRG; PAM sequence: GAG
  source 1..20: mol_type = other DNA
gagagcactttacgctccct

SEQ ID NO: 22037 - DNA, 20 bp, synthetic construct
  misc_feature 1..20: note = Description of Artificial Sequence: Synthetic oligonucleotide
  misc_feature 1..20: note = Target: SCN10A; (-) strand; PAM type: NRG; PAM sequence: GAG
  source 1..20: mol_type = other DNA
atctctgctagggtggatga

SEQ ID NO: 22038 - DNA, 20 bp, synthetic construct
  misc_feature 1..20: note = Description of Artificial Sequence: Synthetic oligonucleotide
  misc_feature 1..20: note = Target: SCN10A; (-) strand; PAM type: NRG; PAM sequence: GAG
  source 1..20: mol_type = other DNA
ccatctctgctagggtggat

SEQ ID NO: 22039 - DNA, 20 bp, synthetic construct
  misc_feature 1..20: note = Description of Artificial Sequence: Synthetic oligonucleotide
  misc_feature 1..20: note = Target: SCN10A; (-) strand; PAM type: NRG; PAM sequence: TGG
  source 1..20: mol_type = other DNA
tcaggccatctctgctaggg

SEQ ID NO: 22040 - DNA, 20 bp, synthetic construct
  misc_feature 1..20: note = Description of Artificial Sequence: Synthetic oligonucleotide
  misc_feature 1..20: note = Target: SCN10A; (-) strand; PAM type: NRG; PAM sequence: GGG
  source 1..20: mol_type = other DNA
tgatcaggccatctctgcta

SEQ ID NO: 22041 - DNA, 20 bp, synthetic construct
  misc_feature 1..20: note = Description of Artificial Sequence: Synthetic oligonucleotide
  misc_feature 1..20: note = Target: SCN10A; (-) strand; PAM type: NRG; PAM sequence: AGG
  source 1..20: mol_type = other DNA
ttgatcaggccatctctgct

SEQ ID NO: 22042 - DNA, 20 bp, synthetic construct
  misc_feature 1..20: note = Description of Artificial Sequence: Synthetic oligonucleotide
  misc_feature 1..20: note = Target: SCN10A; (-) strand; PAM type: NRG; PAM sequence: TAG
  source 1..20: mol_type = other DNA
attgatcaggccatctctgc

SEQ ID NO: 22043 - DNA, 20 bp, synthetic construct
  misc_feature 1..20: note = Description of Artificial Sequence: Synthetic oligonucleotide
  misc_feature 1..20: note = Target: SCN10A; (-) strand; PAM type: NRG; PAM sequence: AGG
  source 1..20: mol_type = other DNA
gcattgctgtttcattgatc

SEQ ID NO: 22044 - DNA, 20 bp, synthetic construct
  misc_feature 1..20: note = Description of Artificial Sequence: Synthetic oligonucleotide
  misc_feature 1..20: note = Target: SCN10A; (-) strand; PAM type: NRG; PAM sequence: CAG
  source 1..20: mol_type = other DNA
ggcattgctgtttcattgat

SEQ ID NO: 22045 - DNA, 20 bp, synthetic construct
  misc_feature 1..20: note = Description of Artificial Sequence: Synthetic oligonucleotide
  misc_feature 1..20: note = Target: SCN10A; (-) strand; PAM type: NRG; PAM sequence: AGG
  source 1..20: mol_type = other DNA
ataattctggacttcaaacg

SEQ ID NO: 22046 - DNA, 20 bp, synthetic construct
  misc_feature 1..20: note = Description of Artificial Sequence: Synthetic oligonucleotide
  misc_feature 1..20: note = Target: SCN10A; (-) strand; PAM type: NRG; PAM sequence: GAG
  source 1..20: mol_type = other DNA
aataattctggacttcaaac

SEQ ID NO: 22047 - DNA, 20 bp, synthetic construct
  misc_feature 1..20: note = Description of Artificial Sequence: Synthetic oligonucleotide
  misc_feature 1..20: note = Target: SCN10A; (-) strand; PAM type: NRG; PAM sequence: TGG
  source 1..20: mol_type = other DNA
aaaatttaaaaaaataattc

SEQ ID NO: 22048 - DNA, 20 bp, synthetic construct
  misc_feature 1..20: note = Description of Artificial Sequence: Synthetic oligonucleotide
  misc_feature 1..20: note = Target: SCN10A; (-) strand; PAM type: NRG; PAM sequence: AAG
  source 1..20: mol_type = other DNA
ggtaaataaaacaggagaaa

SEQ ID NO: 22049 - DNA, 20 bp, synthetic construct
  misc_feature 1..20: note = Description of Artificial Sequence: Synthetic oligonucleotide
  misc_feature 1..20: note = Target: SCN10A; (-) strand; PAM type: NRG; PAM sequence: GAG
  source 1..20: mol_type = other DNA
aatgcaggtaaataaaacag

SEQ ID NO: 22050 - DNA, 20 bp, synthetic construct
  misc_feature 1..20: note = Description of Artificial Sequence: Synthetic oligonucleotide
  misc_feature 1..20: note = Target: SCN10A; (-) strand; PAM type: NRG; PAM sequence: AGG
  source 1..20: mol_type = other DNA
ggaatgcaggtaaataaaac

SEQ ID NO: 22051 - DNA, 20 bp, synthetic construct
  misc_feature 1..20: note = Description of Artificial Sequence: Synthetic oligonucleotide
  misc_feature 1..20: note = Target: SCN10A; (-) strand; PAM type: NRG; PAM sequence: CAG
  source 1..20: mol_type = other DNA
aggaatgcaggtaaataaaa

SEQ ID NO: 22052 - DNA, 20 bp, synthetic construct
  misc_feature 1..20: note = Description of Artificial Sequence: Synthetic oligonucleotide
  misc_feature 1..20: note = Target: SCN10A; (-) strand; PAM type: NRG; PAM sequence: AGG
  source 1..20: mol_type = other DNA
catgtattcacaaggaatgc

SEQ ID NO: 22053 - DNA, 20 bp, synthetic construct
  misc_feature 1..20: note = Description of Artificial Sequence: Synthetic oligonucleotide
  misc_feature 1..20: note = Target: SCN10A; (-) strand; PAM type: NRG; PAM sequence: CAG
  source 1..20: mol_type = other DNA
ccatgtattcacaaggaatg

SEQ ID NO: 22054 - DNA, 20 bp, synthetic construct
  misc_feature 1..20: note = Description of Artificial Sequence: Synthetic oligonucleotide
  misc_feature 1..20: note = Target: SCN10A; (-) strand; PAM type: NRG; PAM sequence: AGG
  source 1..20: mol_type = other DNA
aagaattccatgtattcaca

SEQ ID NO: 22055 - DNA, 20 bp, synthetic construct
  misc_feature 1..20: note = Description of Artificial Sequence: Synthetic oligonucleotide
  misc_feature 1..20: note = Target: SCN10A; (-) strand; PAM type: NRG; PAM sequence: AAG
  source 1..20: mol_type = other DNA
aaagaattccatgtattcac

SEQ ID NO: 22056 - DNA, 20 bp, synthetic construct
  misc_feature 1..20: note = Description of Artificial Sequence: Synthetic oligonucleotide
  misc_feature 1..20: note = Target: SCN10A; (-) strand; PAM type: NRG; PAM sequence: AAG
  source 1..20: mol_type = other DNA
tggagaaatcctgggagtaa

SEQ ID NO: 22057 - DNA, 20 bp, synthetic construct
  misc_feature 1..20: note = Description of Artificial Sequence: Synthetic oligonucleotide
  misc_feature 1..20: note = Target: SCN10A; (-) strand; PAM type: NRG; PAM sequence: GAG
  source 1..20: mol_type = other DNA
agttcatggagaaatcctgg

SEQ ID NO: 22058 - DNA, 20 bp, synthetic construct
  misc_feature 1..20: note = Description of Artificial Sequence: Synthetic oligonucleotide
  misc_feature 1..20: note = Target: SCN10A; (-) strand; PAM type: NRG; PAM sequence: GGG
  source 1..20: mol_type = other DNA
ggagttcatggagaaatcct

SEQ ID NO: 22059 - DNA, 20 bp, synthetic construct
  misc_feature 1..20: note = Description of Artificial Sequence: Synthetic oligonucleotide
  misc_feature 1..20: note = Target: SCN10A; (-) strand; PAM type: NRG; PAM sequence: TGG
  source 1..20: mol_type = other DNA
tggagttcatggagaaatcc

SEQ ID NO: 22060 - DNA, 20 bp, synthetic construct
  misc_feature 1..20: note = Description of Artificial Sequence: Synthetic oligonucleotide
  misc_feature 1..20: note = Target: SCN10A; (-) strand; PAM type: NRG; PAM sequence: GAG
  source 1..20: mol_type = other DNA
cccagaggttggagttcatg

SEQ ID NO: 22061 - DNA, 20 bp, synthetic construct
  misc_feature 1..20: note = Description of Artificial Sequence: Synthetic oligonucleotide
  misc_feature 1..20: note = Target: SCN10A; (-) strand; PAM type: NRG; PAM sequence: TGG
  source 1..20: mol_type = other DNA
gccccagaggttggagttca

SEQ ID NO: 22062 - DNA, 20 bp, synthetic construct
  misc_feature 1..20: note = Description of Artificial Sequence: Synthetic oligonucleotide
  misc_feature 1..20: note = Target: SCN10A; (-) strand; PAM type: NRG; PAM sequence: GAG
  source 1..20: mol_type = other DNA
aaggagagccccagaggttg

SEQ ID NO: 22063 - DNA, 20 bp, synthetic construct
  misc_feature 1..20: note = Description of Artificial Sequence: Synthetic oligonucleotide
  misc_feature 1..20: note = Target: SCN10A; (-) strand; PAM type: NRG; PAM sequence: TGG
  source 1..20: mol_type = other DNA
ataaggagagccccagaggt

SEQ ID NO: 22064 - DNA, 20 bp, synthetic construct
  misc_feature 1..20: note = Description of Artificial Sequence: Synthetic oligonucleotide
  misc_feature 1..20: note = Target: SCN10A; (-) strand; PAM type: NRG; PAM sequence: AGG
  source 1..20: mol_type = other DNA
tgggataaggagagccccag

SEQ ID NO: 22065 - DNA, 20 bp, synthetic construct
  misc_feature 1..20: note = Description of Artificial Sequence: Synthetic oligonucleotide
  misc_feature 1..20: note = Target: SCN10A; (-) strand; PAM type: NRG; PAM sequence: GAG
  source 1..20: mol_type = other DNA
ctgggataaggagagcccca

SEQ ID NO: 22066 - DNA, 20 bp, synthetic construct
  misc_feature 1..20: note = Description of Artificial Sequence: Synthetic oligonucleotide
  misc_feature 1..20: note = Target: SCN10A; (-) strand; PAM type: NRG; PAM sequence: CAG
  source 1..20: mol_type = other DNA
gtctgggataaggagagccc

SEQ ID NO: 22067 - DNA, 20 bp, synthetic construct
  misc_feature 1..20: note = Description of Artificial Sequence: Synthetic oligonucleotide
  misc_feature 1..20: note = Target: SCN10A; (-) strand; PAM type: NRG; PAM sequence: GAG
  source 1..20: mol_type = other DNA
atggatgtctgggataagga

SEQ ID NO: 22068 - DNA, 20 bp, synthetic construct
  misc_feature 1..20: note = Description of Artificial Sequence: Synthetic oligonucleotide
  misc_feature 1..20: note = Target: SCN10A; (-) strand; PAM type: NRG; PAM sequence: GAG
  source 1..20: mol_type = other DNA
acatggatgtctgggataag

SEQ ID NO: 22069 - DNA, 20 bp, synthetic construct
  misc_feature 1..20: note = Description of Artificial Sequence: Synthetic oligonucleotide
  misc_feature 1..20: note = Target: SCN10A; (-) strand; PAM type: NRG; PAM sequence: AGG
  source 1..20: mol_type = other DNA
tcacatggatgtctgggata

SEQ ID NO: 22070 - DNA, 20 bp, synthetic construct
  misc_feature 1..20: note = Description of Artificial Sequence: Synthetic oligonucleotide
  misc_feature 1..20: note = Target: SCN10A; (-) strand; PAM type: NRG; PAM sequence: AAG
  source 1..20: mol_type = other DNA
ttcacatggatgtctgggat

SEQ ID NO: 22071 - DNA, 20 bp, synthetic construct
  misc_feature 1..20: note = Description of Artificial Sequence: Synthetic oligonucleotide
  misc_feature 1..20: note = Target: SCN10A; (-) strand; PAM type: NRG; PAM sequence: GGG
  source 1..20: mol_type = other DNA
ggttgttcacatggatgtct

SEQ ID NO: 22072 - DNA, 20 bp, synthetic construct
  misc_feature 1..20: note = Description of Artificial Sequence: Synthetic oligonucleotide
  misc_feature 1..20: note = Target: SCN10A; (-) strand; PAM type: NRG; PAM sequence: TGG
  source 1..20: mol_type = other DNA
gggttgttcacatggatgtc

SEQ ID NO: 22073 - DNA, 20 bp, synthetic construct
  misc_feature 1..20: note = Description of Artificial Sequence: Synthetic oligonucleotide
  misc_feature 1..20: note = Target: SCN10A; (-) strand; PAM type: NRG; PAM sequence: TGG
  source 1..20: mol_type = other DNA
catggtatgggttgttcaca

SEQ ID NO: 22074 - DNA, 20 bp, synthetic construct
  misc_feature 1..20: note = Description of Artificial Sequence: Synthetic oligonucleotide
  misc_feature 1..20: note = Target: SCN10A; (-) strand; PAM type: NRG; PAM sequence: GGG
  source 1..20: mol_type = other DNA
agagctctaatccatggtat

SEQ ID NO: 22075 - DNA, 20 bp, synthetic construct
  misc_feature 1..20: note = Description of Artificial Sequence: Synthetic oligonucleotide
  misc_feature 1..20: note = Target: SCN10A; (-) strand; PAM type: NRG; PAM sequence: TGG
  source 1..20: mol_type = other DNA
cagagctctaatccatggta

SEQ ID NO: 22076 - DNA, 20 bp, synthetic construct
  misc_feature 1..20: note = Description of Artificial Sequence: Synthetic oligonucleotide
  misc_feature 1..20: note = Target: SCN10A; (-) strand; PAM type: NRG; PAM sequence: TGG
  source 1..20: mol_type = other DNA
gttgtcagagctctaatcca

SEQ ID NO: 22077 - DNA, 20 bp, synthetic construct
  misc_feature 1..20: note = Description of Artificial Sequence: Synthetic oligonucleotide
  misc_feature 1..20: note = Target: SCN10A; (-) strand; PAM type: NRG; PAM sequence: GAG
  source 1..20: mol_type = other DNA
tgattagaattaagttgtca

SEQ ID NO: 22078 - DNA, 20 bp, synthetic construct
  misc_feature 1..20: note = Description of Artificial Sequence: Synthetic oligonucleotide
  misc_feature 1..20: note = Target: SCN10A; (-) strand; PAM type: NRG; PAM sequence: CAG
  source 1..20: mol_type = other DNA
actgattagaattaagttgt

SEQ ID NO: 22079 - DNA, 20 bp, synthetic construct
  misc_feature 1..20: note = Description of Artificial Sequence: Synthetic oligonucleotide
  misc_feature 1..20: note = Target: SCN10A; (-) strand; PAM type: NRG; PAM sequence: AAG
  source 1..20: mol_type = other DNA
acttggaactgattagaatt

SEQ ID NO: 22080 - DNA, 20 bp, synthetic construct
  misc_feature 1..20: note = Description of Artificial Sequence: Synthetic oligonucleotide
  misc_feature 1..20: note = Target: SCN10A; (-) strand; PAM type: NRG; PAM sequence: TAG
  source 1..20: mol_type = other DNA
gagatagacttggaactgat

SEQ ID NO: 22081 - DNA, 20 bp, synthetic construct
  misc_feature 1..20: note = Description of Artificial Sequence: Synthetic oligonucleotide
  misc_feature 1..20: note = Target: SCN10A; (-) strand; PAM type: NRG; PAM sequence: TGG
  source 1..20: mol_type = other DNA
aatcgaagtggagatagact

SEQ ID NO: 22082 - DNA, 20 bp, synthetic construct
  misc_feature 1..20: note = Description of Artificial Sequence: Synthetic oligonucleotide
  misc_feature 1..20: note = Target: SCN10A; (-) strand; PAM type: NRG; PAM sequence: TAG
  source 1..20: mol_type = other DNA
atcttcaatcgaagtggaga

SEQ ID NO: 22083 - DNA, 20 bp, synthetic construct
  misc_feature 1..20: note = Description of Artificial Sequence: Synthetic oligonucleotide
  misc_feature 1..20: note = Target: SCN10A; (-) strand; PAM type: NRG; PAM sequence: GAG
  source 1..20: mol_type = other DNA
tgcaatcttcaatcgaagtg

SEQ ID NO: 22084 - DNA, 20 bp, synthetic construct
  misc_feature 1..20: note = Description of Artificial Sequence: Synthetic oligonucleotide
  misc_feature 1..20: note = Target: SCN10A; (-) strand; PAM type: NRG; PAM sequence: TGG
  source 1..20: mol_type = other DNA
cttgcaatcttcaatcgaag

SEQ ID NO: 22085 - DNA, 20 bp, synthetic construct
  misc_feature 1..20: note = Description of Artificial Sequence: Synthetic oligonucleotide
  misc_feature 1..20: note = Target: SCN10A; (-) strand; PAM type: NRG; PAM sequence: AAG
  source 1..20: mol_type = other DNA
gaacttgcaatcttcaatcg

SEQ ID NO: 22086 - DNA, 20 bp, synthetic construct
  misc_feature 1..20: note = Description of Artificial Sequence: Synthetic oligonucleotide
  misc_feature 1..20: note = Target: SCN10A; (-) strand; PAM type: NRG; PAM sequence: GGG
  source 1..20: mol_type = other DNA
aatgtgggtctacaaagcca

SEQ ID NO: 22087 - DNA, 20 bp, synthetic construct
  misc_feature 1..20: note = Description of Artificial Sequence: Synthetic oligonucleotide
  misc_feature 1..20: note = Target: SCN10A; (-) strand; PAM type: NRG; PAM sequence: AGG
  source 1..20: mol_type = other DNA
aaatgtgggtctacaaagcc

SEQ ID NO: 22088 - DNA, 20 bp, synthetic construct
  misc_feature 1..20: note = Description of Artificial Sequence: Synthetic oligonucleotide
  misc_feature 1..20: note = Target: SCN10A; (-) strand; PAM type: NRG; PAM sequence: CAG
  source 1..20: mol_type = other DNA
taaatgtgggtctacaaagc

SEQ ID NO: 22089 - DNA, 20 bp, synthetic construct
  misc_feature 1..20: note = Description of Artificial Sequence: Synthetic oligonucleotide
  misc_feature 1..20: note = Target: SCN10A; (-) strand; PAM type: NRG; PAM sequence: AAG
  source 1..20: mol_type = other DNA
tctttaaatgtgggtctaca

SEQ ID NO: 22090 - DNA, 20 bp, synthetic construct
  misc_feature 1..20: note = Description of Artificial Sequence: Synthetic oligonucleotide
  misc_feature 1..20: note = Target: SCN10A; (-) strand; PAM type: NRG; PAM sequence: GGG
  source 1..20: mol_type = other DNA
aagagcctatctttaaatgt

SEQ ID NO: 22091 - DNA, 20 bp, synthetic construct
  misc_feature 1..20: note = Description of Artificial Sequence: Synthetic oligonucleotide
  misc_feature 1..20: note = Target: SCN10A; (-) strand; PAM type: NRG; PAM sequence: TGG
  source 1..20: mol_type = other DNA
caagagcctatctttaaatg

SEQ ID NO: 22092 - DNA, 20 bp, synthetic construct
  misc_feature 1..20: note = Description of Artificial Sequence: Synthetic oligonucleotide
  misc_feature 1..20: note = Target: SCN10A; (-) strand; PAM type: NRG; PAM sequence: GAG
  source 1..20: mol_type = other DNA
cccttggaagagcaaaccaa

SEQ ID NO: 22093 - DNA, 20 bp, synthetic construct
  misc_feature 1..20: note = Description of Artificial Sequence: Synthetic oligonucleotide
  misc_feature 1..20: note = Target: SCN10A; (-) strand; PAM type: NRG; PAM sequence: AAG
  source 1..20: mol_type = other DNA
gccccttggaagagcaaacc

SEQ ID NO: 22094 - DNA, 20 bp, synthetic construct
  misc_feature 1..20: note = Description of Artificial Sequence: Synthetic oligonucleotide
  misc_feature 1..20: note = Target: SCN10A; (-) strand; PAM type: NRG; PAM sequence: GAG
  source 1..20: mol_type = other DNA
ggttgcctagccccttggaa

SEQ ID NO: 22095 - DNA, 20 bp, synthetic construct
  misc_feature 1..20: note = Description of Artificial Sequence: Synthetic oligonucleotide
  misc_feature 1..20: note = Target: SCN10A; (-) strand; PAM type: NRG; PAM sequence: AAG
  source 1..20: mol_type = other DNA
tgggttgcctagccccttgg

SEQ ID NO: 22096 - DNA, 20 bp, synthetic construct
  misc_feature 1..20: note = Description of Artificial Sequence: Synthetic oligonucleotide
  misc_feature 1..20: note = Target: SCN10A; (-) strand; PAM type: NRG; PAM sequence: TGG
  source 1..20: mol_type = other DNA
aaatgggttgcctagcccct

SEQ ID NO: 22097 - DNA, 20 bp, synthetic construct
  misc_feature 1..20: note = Description of Artificial Sequence: Synthetic oligonucleotide
  misc_feature 1..20: note = Target: SCN10A; (-) strand; PAM type: NRG; PAM sequence: TAG
  source 1..20: mol_type = other DNA
cctacaggaaatgggttgcc

SEQ ID NO: 22098 - DNA, 20 bp, synthetic construct
  misc_feature 1..20: note = Description of Artificial Sequence: Synthetic oligonucleotide
  misc_feature 1..20: note = Target: SCN10A; (-) strand; PAM type: NRG; PAM sequence: GGG
  source 1..20: mol_type = other DNA
ttaagaaacctacaggaaat

SEQ ID NO: 22099 - DNA, 20 bp, synthetic construct
  misc_feature 1..20: note = Description of Artificial Sequence: Synthetic oligonucleotide
  misc_feature 1..20: note = Target: SCN10A; (-) strand; PAM type: NRG; PAM sequence: TGG
  source 1..20: mol_type = other DNA
attaagaaacctacaggaaa

SEQ ID NO: 22100 - DNA, 20 bp, synthetic construct
  misc_feature 1..20: note = Description of Artificial Sequence: Synthetic oligonucleotide
  misc_feature 1..20: note = Target: SCN10A; (-) strand; PAM type: NRG; PAM sequence: AGG
  source 1..20: mol_type = other DNA
gagttaattaagaaacctac

SEQ ID NO: 22101 - DNA, 20 bp, synthetic construct
  misc_feature 1..20: note = Description of Artificial Sequence: Synthetic oligonucleotide
  misc_feature 1..20: note = Target: SCN10A; (-) strand; PAM type: NRG; PAM sequence: CAG
  source 1..20: mol_type = other DNA
agagttaattaagaaaccta

SEQ ID NO: 22102 - DNA, 20 bp, synthetic construct
  misc_feature 1..20: note = Description of Artificial Sequence: Synthetic oligonucleotide
  misc_feature 1..20: note = Target: SCN10A; (-) strand; PAM type: NRG; PAM sequence: AAG
  source 1..20: mol_type = other DNA
ggctgccctcagagttaatt

SEQ ID NO: 22103 - DNA, 20 bp, synthetic construct
  misc_feature 1..20: note = Description of Artificial Sequence: Synthetic oligonucleotide
  misc_feature 1..20: note = Target: SCN10A; (-) strand; PAM type: NRG; PAM sequence: GAG
  source 1..20: mol_type = other DNA
tagaaacaaggctgccctca

SEQ ID NO: 22104 - DNA, 20 bp, synthetic construct
  misc_feature 1..20: note = Description of Artificial Sequence: Synthetic oligonucleotide
  misc_feature 1..20: note = Target: SCN10A; (-) strand; PAM type: NRG; PAM sequence: CAG
  source 1..20: mol_type = other DNA
catagaaacaaggctgccct

SEQ ID NO: 22105 - DNA, 20 bp, synthetic construct
  misc_feature 1..20: note = Description of Artificial Sequence: Synthetic oligonucleotide
  misc_feature 1..20: note = Target: SCN10A; (-) strand; PAM type: NRG; PAM sequence: AGG
  source 1..20: mol_type = other DNA
ctacagaagacatagaaaca

SEQ ID NO: 22106 - DNA, 20 bp, synthetic construct
  misc_feature 1..20: note = Description of Artificial Sequence: Synthetic oligonucleotide
  misc_feature 1..20: note = Target: SCN10A; (-) strand; PAM type: NRG; PAM sequence: AAG
  source 1..20: mol_type = other DNA
tctacagaagacatagaaac

SEQ ID NO: 22107 - DNA, 20 bp, synthetic construct
  misc_feature 1..20: note = Description of Artificial Sequence: Synthetic oligonucleotide
  misc_feature 1..20: note = Target: SCN10A; (-) strand; PAM type: NRG; PAM sequence: TAG
  source 1..20: mol_type = other DNA
gtggatttctacagaagaca

SEQ ID NO: 22108 - DNA, 20 bp, synthetic construct
  misc_feature 1..20: note = Description of Artificial Sequence: Synthetic oligonucleotide
  misc_feature 1..20: note = Target: SCN10A; (-) strand; PAM type: NRG; PAM sequence: AAG
  source 1..20: mol_type = other DNA
gctatggtggatttctacag

SEQ ID NO: 22109 - DNA, 20 bp, synthetic construct
  misc_feature 1..20: note = Description of Artificial Sequence: Synthetic oligonucleotide
  misc_feature 1..20: note = Target: SCN10A; (-) strand; PAM type: NRG; PAM sequence: CAG
  source 1..20: mol_type = other DNA
gtggctatggtggatttcta

SEQ ID NO: 22110 - DNA, 20 bp, synthetic construct
  misc_feature 1..20: note = Description of Artificial Sequence: Synthetic oligonucleotide
  misc_feature 1..20: note = Target: SCN10A; (-) strand; PAM type: NRG; PAM sequence: TGG
  source 1..20: mol_type = other DNA
tttatatgcagtggctatgg

SEQ ID NO: 22111 - DNA, 20 bp, synthetic construct
  misc_feature 1..20: note = Description of Artificial Sequence: Synthetic oligonucleotide
  misc_feature 1..20: note = Target: SCN10A; (-) strand; PAM type: NRG; PAM sequence: TGG
  source 1..20: mol_type = other DNA
ctgtttatatgcagtggcta

SEQ ID NO: 22112 - DNA, 20 bp, synthetic construct
  misc_feature 1..20: note = Description of Artificial Sequence: Synthetic oligonucleotide
  misc_feature 1..20: note = Target: SCN10A; (-) strand; PAM type: NRG; PAM sequence: TGG
  source 1..20: mol_type = other DNA
agtgaactgtttatatgcag

SEQ ID NO: 22113 - DNA, 20 bp, synthetic construct
  misc_feature 1..20: note = Description of Artificial Sequence: Synthetic oligonucleotide
  misc_feature 1..20: note = Target: SCN10A; (-) strand; PAM type: NRG; PAM sequence: CAG
  source 1..20: mol_type = other DNA
agcagtgaactgtttatatg

SEQ ID NO: 22114 - DNA, 20 bp, synthetic construct
  misc_feature 1..20: note = Description of Artificial Sequence: Synthetic oligonucleotide
  misc_feature 1..20: note = Target: SCN10A; (-) strand; PAM type: NRG; PAM sequence: CAG
  source 1..20: mol_type = other DNA
atctcatttaatcctcagag

SEQ ID NO: 22115 - DNA, 20 bp, synthetic construct
  misc_feature 1..20: note = Description of Artificial Sequence: Synthetic oligonucleotide
  misc_feature 1..20: note = Target: SCN10A; (-) strand; PAM type: NRG; PAM sequence: GAG
  source 1..20: mol_type = other DNA
gtgatctcatttaatcctca

SEQ ID NO: 22116 - DNA, 20 bp, synthetic construct
  misc_feature 1..20: note = Description of Artificial Sequence: Synthetic oligonucleotide
  misc_feature 1..20: note = Target: SCN10A; (-) strand; PAM type: NRG; PAM sequence: CAG
  source 1..20: mol_type = other DNA
cagtgatctcatttaatcct

SEQ ID NO: 22117 - DNA, 20 bp, synthetic construct
  misc_feature 1..20: note = Description of Artificial Sequence: Synthetic oligonucleotide
  misc_feature 1..20: note = Target: SCN10A; (-) strand; PAM type: NRG; PAM sequence: CAG
  source 1..20: mol_type = other DNA
cagaagtgcaagacactata

SEQ ID NO: 22118 - DNA, 20 bp, synthetic construct
  misc_feature 1..20: note = Description of Artificial Sequence: Synthetic oligonucleotide
  misc_feature 1..20: note = Target: SCN10A; (-) strand; PAM type: NRG; PAM sequence: AAG
  source 1..20: mol_type = other DNA
tatttactatgcagaagtgc

SEQ ID NO: 22119 - DNA, 20 bp, synthetic construct
  misc_feature 1..20: note = Description of Artificial Sequence: Synthetic oligonucleotide
  misc_feature 1..20: note = Target: SCN10A; (-) strand; PAM type: NRG; PAM sequence: AAG
  source 1..20: mol_type = other DNA
atacaatatttactatgcag

SEQ ID NO: 22120 - DNA, 20 bp, synthetic construct
  misc_feature 1..20: note = Description of Artificial Sequence: Synthetic oligonucleotide
  misc_feature 1..20: note = Target: SCN10A; (-) strand; PAM type: NRG; PAM sequence: CAG
  source 1..20: mol_type = other DNA
tatatacaatatttactatg

SEQ ID NO: 22121 - DNA, 20 bp, synthetic construct
  misc_feature 1..20: note = Description of Artificial Sequence: Synthetic oligonucleotide
  misc_feature 1..20: note = Target: SCN10A; (-) strand; PAM type: NRG; PAM sequence: CAG
  source 1..20: mol_type = other DNA
acaataggaattttcctttg

SEQ ID NO: 22122 - DNA, 20 bp, synthetic construct
  misc_feature 1..20: note = Description of Artificial Sequence: Synthetic oligonucleotide
  misc_feature 1..20: note = Target: SCN10A; (-) strand; PAM type: NRG; PAM sequence: AGG
  source 1..20: mol_type = other DNA
cttccaaggttaaaaacaat

SEQ ID NO: 22123 - DNA, 20 bp, synthetic construct
  misc_feature 1..20: note = Description of Artificial Sequence: Synthetic oligonucleotide
  misc_feature 1..20: note = Target: SCN10A; (-) strand; PAM type: NRG; PAM sequence: TAG
  source 1..20: mol_type = other DNA
gcttccaaggttaaaaacaa

SEQ ID NO: 22124 - DNA, 20 bp, synthetic construct
  misc_feature 1..20: note = Description of Artificial Sequence: Synthetic oligonucleotide
  misc_feature 1..20: note = Target: SCN10A; (-) strand; PAM type: NRG; PAM sequence: AGG
  source 1..20: mol_type = other DNA
tatcctttcagcagcttcca

SEQ ID NO: 22125 - DNA, 20 bp, synthetic construct
  misc_feature 1..20: note = Description of Artificial Sequence: Synthetic oligonucleotide
  misc_feature 1..20: note = Target: SCN10A; (-) strand; PAM type: NRG; PAM sequence: AAG
  source 1..20: mol_type = other DNA
ttatcctttcagcagcttcc

SEQ ID NO: 22126 - DNA, 20 bp, synthetic construct
  misc_feature 1..20: note = Description of Artificial Sequence: Synthetic oligonucleotide
  misc_feature 1..20: note = Target: SCN10A; (-) strand; PAM type: NRG; PAM sequence: CAG
  source 1..20: mol_type = other DNA
attccagtttatcctttcag

SEQ ID NO: 22127 - DNA, 20 bp, synthetic construct
  misc_feature 1..20: note = Description of Artificial Sequence: Synthetic oligonucleotide
  misc_feature 1..20: note = Target: SCN10A; (-) strand; PAM type: NRG; PAM sequence: CAG
  source 1..20: mol_type = other DNA
attattccagtttatccttt

SEQ ID NO: 22128 - DNA, 20 bp, synthetic construct
  misc_feature 1..20: note = Description of Artificial Sequence: Synthetic oligonucleotide
  misc_feature 1..20: note = Target: SCN10A; (-) strand; PAM type: NRG; PAM sequence: CAG
  source 1..20: mol_type = other DNA
ttcttccacatatattattc

SEQ ID NO: 22129 - DNA, 20 bp, synthetic construct
  misc_feature 1..20: note = Description of Artificial Sequence: Synthetic oligonucleotide
  misc_feature 1..20: note = Target: SCN10A; (-) strand; PAM type: NRG; PAM sequence: CAG
  source 1..20: mol_type = other DNA
agaaaatagttgataatttt

SEQ ID NO: 22130 - DNA, 20 bp, synthetic construct
  misc_feature 1..20: note = Description of Artificial Sequence: Synthetic oligonucleotide
  misc_feature 1..20: note = Target: SCN10A; (-) strand; PAM type: NRG; PAM sequence: TAG
  source 1..20: mol_type = other DNA
agaaaatggataccagaaaa

SEQ ID NO: 22131 - DNA, 20 bp, synthetic construct
  misc_feature 1..20: note = Description of Artificial Sequence: Synthetic oligonucleotide
  misc_feature 1..20: note = Target: SCN10A; (-) strand; PAM type: NRG; PAM sequence: CAG
  source 1..20: mol_type = other DNA
tcaaggcagaaaatggatac

SEQ ID NO: 22132 - DNA, 20 bp, synthetic construct
  misc_feature 1..20: note = Description of Artificial Sequence: Synthetic oligonucleotide
  misc_feature 1..20: note = Target: SCN10A; (-) strand; PAM type: NRG; PAM sequence: TGG
  source 1..20: mol_type = other DNA
aggggtctcaaggcagaaaa

SEQ ID NO: 22133 - DNA, 20 bp, synthetic construct
  misc_feature 1..20: note = Description of Artificial Sequence: Synthetic oligonucleotide
  misc_feature 1..20: note = Target: SCN10A; (-) strand; PAM type: NRG; PAM sequence: CAG
  source 1..20: mol_type = other DNA
gaaggtcaggggtctcaagg

SEQ ID NO: 22134 - DNA, 20 bp, synthetic construct
  misc_feature 1..20: note = Description of Artificial Sequence: Synthetic oligonucleotide
  misc_feature 1..20: note = Target: SCN10A; (-) strand; PAM type: NRG; PAM sequence: AGG
  source 1..20: mol_type = other DNA
gaggaaggtcaggggtctca

SEQ ID NO: 22135 - DNA, 20 bp, synthetic construct
  misc_feature 1..20: note = Description of Artificial Sequence: Synthetic oligonucleotide
  misc_feature 1..20: note = Target: SCN10A; (-) strand; PAM type: NRG; PAM sequence: AAG
  source 1..20: mol_type = other DNA
ggaggaaggtcaggggtctc

SEQ ID NO: 22136 - DNA, 20 bp, synthetic construct
  misc_feature 1..20: note = Description of Artificial Sequence: Synthetic oligonucleotide
  misc_feature 1..20: note = Target: SCN10A; (-) strand; PAM type: NRG; PAM sequence: GGG
  source 1..20: mol_type = other DNA
cactgtgggaggaaggtcag

SEQ ID NO: 22137 - DNA, 20 bp, synthetic construct
  misc_feature 1..20: note = Description of Artificial Sequence: Synthetic oligonucleotide
  misc_feature 1..20: note = Target: SCN10A; (-) strand; PAM type: NRG; PAM sequence: GGG
  source 1..20: mol_type = other DNA
gcactgtgggaggaaggtca

SEQ ID NO: 22138 - DNA, 20 bp, synthetic construct
  misc_feature 1..20: note = Description of Artificial Sequence: Synthetic oligonucleotide
  misc_feature 1..20: note = Target: SCN10A; (-) strand; PAM type: NRG; PAM sequence: AGG
  source 1..20: mol_type = other DNA
ggcactgtgggaggaaggtc

SEQ ID NO: 22139 - DNA, 20 bp, synthetic construct
  misc_feature 1..20: note = Description of Artificial Sequence: Synthetic oligonucleotide
  misc_feature 1..20: note = Target: SCN10A; (-) strand; PAM type: NRG; PAM sequence: CAG
  source 1..20: mol_type = other DNA
tggcactgtgggaggaaggt

SEQ ID NO: 22140 - DNA, 20 bp, synthetic construct
  misc_feature 1..20: note = Description of Artificial Sequence: Synthetic oligonucleotide
  misc_feature 1..20: note = Target: SCN10A; (-) strand; PAM type: NRG; PAM sequence: AGG
  source 1..20: mol_type = other DNA
ccaatggcactgtgggagga

SEQ ID NO: 22141 - DNA, 20 bp, synthetic construct
  misc_feature 1..20: note = Description of Artificial Sequence: Synthetic oligonucleotide
  misc_feature 1..20: note = Target: SCN10A; (-) strand; PAM type: NRG; PAM sequence: AAG
  source 1..20: mol_type = other DNA
gccaatggcactgtgggagg

SEQ ID NO: 22142 - DNA, 20 bp, synthetic construct
  misc_feature 1..20: note = Description of Artificial Sequence: Synthetic oligonucleotide
  misc_feature 1..20: note = Target: SCN10A; (-) strand; PAM type: NRG; PAM sequence: AGG
  source 1..20: mol_type = other DNA
ttggccaatggcactgtggg

SEQ ID NO: 22143 - DNA, 20 bp, synthetic construct
  misc_feature 1..20: note = Description of Artificial Sequence: Synthetic oligonucleotide
  misc_feature 1..20: note = Target: SCN10A; (-) strand; PAM type: NRG; PAM sequence: GAG
  source 1..20: mol_type = other DNA
attggccaatggcactgtgg

SEQ ID NO: 22144 - DNA, 20 bp, synthetic construct
  misc_feature 1..20: note = Description of Artificial Sequence: Synthetic oligonucleotide
  misc_feature 1..20: note = Target: SCN10A; (-) strand; PAM type: NRG; PAM sequence: GGG
  source 1..20: mol_type = other DNA
acattggccaatggcactgt

SEQ ID NO: 22145 - DNA, 20 bp, synthetic construct
  misc_feature 1..20: note = Description of Artificial Sequence: Synthetic oligonucleotide
  misc_feature 1..20: note = Target: SCN10A; (-) strand; PAM type: NRG; PAM sequence: TGG
  source 1..20: mol_type = other DNA
cacattggccaatggcactg

SEQ ID NO: 22146 - DNA, 20 bp, synthetic construct
  misc_feature 1..20: note = Description of Artificial Sequence: Synthetic oligonucleotide
  misc_feature 1..20: note = Target: SCN10A; (-) strand; PAM type: NRG; PAM sequence: TGG
  source 1..20: mol_type = other DNA
gaaaggcccacattggccaa

SEQ ID NO: 22147 - DNA, 20 bp, synthetic construct
  misc_feature 1..20: note = Description of Artificial Sequence: Synthetic oligonucleotide
  misc_feature 1..20: note = Target: SCN10A; (-) strand; PAM type: NRG; PAM sequence: TGG
  source 1..20: mol_type = other DNA
tcctgaggaaaggcccacat

SEQ ID NO: 22148 - DNA, 20 bp, synthetic construct
  misc_feature 1..20: note = Description of Artificial Sequence: Synthetic oligonucleotide
  misc_feature 1..20: note = Target: SCN10A; (-) strand; PAM type: NRG; PAM sequence: AGG
  source 1..20: mol_type = other DNA
gaagccagagtcctgaggaa

SEQ ID NO: 22149 - DNA, 20 bp, synthetic construct
  misc_feature 1..20: note = Description of Artificial Sequence: Synthetic oligonucleotide
  misc_feature 1..20: note = Target: SCN10A; (-) strand; PAM type: NRG; PAM sequence: AAG
  source 1..20: mol_type = other DNA
agaagccagagtcctgagga

SEQ ID NO: 22150 - DNA, 20 bp, synthetic construct
  misc_feature 1..20: note = Description of Artificial Sequence: Synthetic oligonucleotide
  misc_feature 1..20: note = Target: SCN10A; (-) strand; PAM type: NRG; PAM sequence: AGG
  source 1..20: mol_type = other DNA
gcagagaagccagagtcctg

SEQ ID NO: 22151 - DNA, 20 bp, synthetic construct
  misc_feature 1..20: note = Description of Artificial Sequence: Synthetic oligonucleotide
  misc_feature 1..20: note = Target: SCN10A; (-) strand; PAM type: NRG; PAM sequence: GAG
  source 1..20: mol_type = other DNA
tgcagagaagccagagtcct

SEQ ID NO: 22152 - DNA, 20 bp, synthetic construct
  misc_feature 1..20: note = Description of Artificial Sequence: Synthetic oligonucleotide
  misc_feature 1..20: note = Target: SCN10A; (-) strand; PAM type: NRG; PAM sequence: GAG
  source 1..20: mol_type = other DNA
gtggggctgcagagaagcca

SEQ ID NO: 22153 - DNA, 20 bp, synthetic construct
  misc_feature 1..20: note = Description of Artificial Sequence: Synthetic oligonucleotide
  misc_feature 1..20: note = Target: SCN10A; (-) strand; PAM type: NRG; PAM sequence: CAG
  source 1..20: mol_type = other DNA
ctgtggggctgcagagaagc

SEQ ID NO: 22154 - DNA, 20 bp, synthetic construct
  misc_feature 1..20: note = Description of Artificial Sequence: Synthetic oligonucleotide
  misc_feature 1..20: note = Target: SCN10A; (-) strand; PAM type: NRG; PAM sequence: AAG
  source 1..20: mol_type = other DNA
tcctctgtggggctgcagag

SEQ ID NO: 22155 - DNA, 20 bp, synthetic construct
  misc_feature 1..20: note = Description of Artificial Sequence: Synthetic oligonucleotide
  misc_feature 1..20: note = Target: SCN10A; (-) strand; PAM type: NRG; PAM sequence: GAG
  source 1..20: mol_type = other DNA
gggtcctctgtggggctgca

SEQ ID NO: 22156 - DNA, 20 bp, synthetic construct
  misc_feature 1..20: note = Description of Artificial Sequence: Synthetic oligonucleotide
  misc_feature 1..20: note = Target: SCN10A; (-) strand; PAM type: NRG; PAM sequence: CAG
  source 1..20: mol_type = other DNA
ctgggtcctctgtggggctg

SEQ ID NO: 22157 - DNA, 20 bp, synthetic construct
  misc_feature 1..20: note = Description of Artificial Sequence: Synthetic oligonucleotide
  misc_feature 1..20: note = Target: SCN10A; (-) strand; PAM type: NRG; PAM sequence: GGG
  source 1..20: mol_type = other DNA
ctaaacctgggtcctctgtg

SEQ ID NO: 22158 - DNA, 20 bp, synthetic construct
  misc_feature 1..20: note = Description of Artificial Sequence: Synthetic oligonucleotide
  misc_feature 1..20: note = Target: SCN10A; (-) strand; PAM type: NRG; PAM sequence: GGG
  source 1..20: mol_type = other DNA
gctaaacctgggtcctctgt

SEQ ID NO: 22159 - DNA, 20 bp, synthetic construct
  misc_feature 1..20: note = Description of Artificial Sequence: Synthetic oligonucleotide
  misc_feature 1..20: note = Target: SCN10A; (-) strand; PAM type: NRG; PAM sequence: TGG
  source 1..20: mol_type = other DNA
agctaaacctgggtcctctg

SEQ ID NO: 22160 - DNA, 20 bp, synthetic construct
  misc_feature 1..20: note = Description of Artificial Sequence: Synthetic oligonucleotide
  misc_feature 1..20: note = Target: SCN10A; (-) strand; PAM type: NRG; PAM sequence: GGG
  source 1..20: mol_type = other DNA
atgccgtgaaagctaaacct

SEQ ID NO: 22161 - DNA, 20 bp, synthetic construct
  misc_feature 1..20: note = Description of Artificial Sequence: Synthetic oligonucleotide
  misc_feature 1..20: note = Target: SCN10A; (-) strand; PAM type: NRG; PAM sequence: TGG
  source 1..20: mol_type = other DNA
catgccgtgaaagctaaacc

SEQ ID NO: 22162 - DNA, 20 bp, synthetic construct
  misc_feature 1..20: note = Description of Artificial Sequence: Synthetic oligonucleotide
  misc_feature 1..20: note = Target: SCN10A; (-) strand; PAM type: NRG; PAM sequence: AAG
  source 1..20: mol_type = other DNA
cctgccggggcatgccgtga

SEQ ID NO: 22163 - DNA, 20 bp, synthetic construct
  misc_feature 1..20: note = Description of Artificial Sequence: Synthetic oligonucleotide
  misc_feature 1..20: note = Target: SCN10A; (-) strand; PAM type: NRG; PAM sequence: GGG
  source 1..20: mol_type = other DNA
ggacagagtgaaccctgccg

SEQ ID NO: 22164 - DNA, 20 bp, synthetic construct
  misc_feature 1..20: note = Description of Artificial Sequence: Synthetic oligonucleotide
  misc_feature 1..20: note = Target: SCN10A; (-) strand; PAM type: NRG; PAM sequence: GGG
  source 1..20: mol_type = other DNA
cggacagagtgaaccctgcc

SEQ ID NO: 22165 - DNA, 20 bp, synthetic construct
  misc_feature 1..20: note = Description of Artificial Sequence: Synthetic oligonucleotide
  misc_feature 1..20: note = Target: SCN10A; (-) strand; PAM type: NRG; PAM sequence: CGG
  source 1..20: mol_type = other DNA
acggacagagtgaaccctgc

SEQ ID NO: 22166 - DNA, 20 bp, synthetic construct
  misc_feature 1..20: note = Description of Artificial Sequence: Synthetic oligonucleotide
  misc_feature 1..20: note = Target: SCN10A; (-) strand; PAM type: NRG; PAM sequence: GAG
  source 1..20: mol_type = other DNA
ccagctcaggataacggaca

SEQ ID NO: 22167 - DNA, 20 bp, synthetic construct
  misc_feature 1..20: note = Description of Artificial Sequence: Synthetic oligonucleotide
  misc_feature 1..20: note = Target: SCN10A; (-) strand; PAM type: NRG; PAM sequence: CAG
  source 1..20: mol_type = other DNA
ggccagctcaggataacgga

SEQ ID NO: 22168 - DNA, 20 bp, synthetic construct
  misc_feature 1..20: note = Description of Artificial Sequence: Synthetic oligonucleotide
  misc_feature 1..20: note = Target: SCN10A; (-) strand; PAM type: NRG; PAM sequence: CGG
  source 1..20: mol_type = other DNA
gagaggccagctcaggataa

SEQ ID NO: 22169 - DNA, 20 bp, synthetic construct
  misc_feature 1..20: note = Description of Artificial Sequence: Synthetic oligonucleotide
  misc_feature 1..20: note = Target: SCN10A; (-) strand; PAM type: NRG; PAM sequence: AGG
  source 1..20: mol_type = other DNA
tggcagagagaggccagctc

SEQ ID NO: 22170 - DNA, 20 bp, synthetic construct
  misc_feature 1..20: note = Description of Artificial Sequence: Synthetic oligonucleotide
  misc_feature 1..20: note = Target: SCN10A; (-) strand; PAM type: NRG; PAM sequence: CAG
  source 1..20: mol_type = other DNA
atggcagagagaggccagct

SEQ ID NO: 22171 - DNA, 20 bp, synthetic construct
  misc_feature 1..20: note = Description of Artificial Sequence: Synthetic oligonucleotide
  misc_feature 1..20: note = Target: SCN10A; (-) strand; PAM type: NRG; PAM sequence: CAG
  source 1..20: mol_type = other DNA
ctgggatggcagagagaggc

SEQ ID NO: 22172 - DNA, 20 bp, synthetic construct
  misc_feature 1..20: note = Description of Artificial Sequence: Synthetic oligonucleotide
  misc_feature 1..20: note = Target: SCN10A; (-) strand; PAM type: NRG; PAM sequence: AGG
  source 1..20: mol_type = other DNA
caggctgggatggcagagag

SEQ ID NO: 22173 - DNA, 20 bp, synthetic construct
  misc_feature 1..20: note = Description of Artificial Sequence: Synthetic oligonucleotide
  misc_feature 1..20: note = Target: SCN10A; (-) strand; PAM type: NRG; PAM sequence: GAG
  source 1..20: mol_type = other DNA
ccaggctgggatggcagaga

SEQ ID NO: 22174 - DNA, 20 bp, synthetic construct
  misc_feature 1..20: note = Description of Artificial Sequence: Synthetic oligonucleotide
  misc_feature 1..20: note = Target: SCN10A; (-) strand; PAM type: NRG; PAM sequence: GAG
  source 1..20: mol_type = other DNA
gaccaggctgggatggcaga

SEQ ID NO: 22175 - DNA, 20 bp, synthetic construct
  misc_feature 1..20: note = Description of Artificial Sequence: Synthetic oligonucleotide
  misc_feature 1..20: note = Target: SCN10A; (-) strand; PAM type: NRG; PAM sequence: GAG
  source 1..20: mol_type = other DNA
tggaccaggctgggatggca

SEQ ID NO: 22176 - DNA, 20 bp, synthetic construct
  misc_feature 1..20: note = Description of Artificial Sequence: Synthetic oligonucleotide
  misc_feature 1..20: note = Target: SCN10A; (-) strand; PAM type: NRG; PAM sequence: CAG
  source 1..20: mol_type = other DNA
agtggaccaggctgggatgg

SEQ ID NO: 22177 - DNA, 20 bp, synthetic construct
  misc_feature 1..20: note = Description of Artificial Sequence: Synthetic oligonucleotide
  misc_feature 1..20: note = Target: SCN10A; (-) strand; PAM type: NRG; PAM sequence: TGG
  source 1..20: mol_type = other DNA
gggagtggaccaggctggga

SEQ ID NO: 22178 - DNA, 20 bp, synthetic construct
  misc_feature 1..20: note = Description of Artificial Sequence: Synthetic oligonucleotide
  misc_feature 1..20: note = Target: SCN10A; (-) strand; PAM type: NRG; PAM sequence: GGG
  source 1..20: mol_type = other DNA
gtgggggagtggaccaggct

SEQ ID NO: 22179 - DNA, 20 bp, synthetic construct
  misc_feature 1..20: note = Description of Artificial Sequence: Synthetic oligonucleotide
  misc_feature 1..20: note = Target: SCN10A; (-) strand; PAM type: NRG; PAM sequence: TGG
  source 1..20: mol_type = other DNA
agtgggggagtggaccaggc

SEQ ID NO: 22180 - DNA, 20 bp, synthetic construct
  misc_feature 1..20: note = Description of Artificial Sequence: Synthetic oligonucleotide
  misc_feature 1..20: note = Target: SCN10A; (-) strand; PAM type: NRG; PAM sequence: AGG
  source 1..20: mol_type = other DNA
aggcagtgggggagtggacc

SEQ ID NO: 22181 - DNA, 20 bp, synthetic construct
  misc_feature 1..20: note = Description of Artificial Sequence: Synthetic oligonucleotide
  misc_feature 1..20: note = Target: SCN10A; (-) strand; PAM type: NRG; PAM sequence: CAG
  source 1..20: mol_type = other DNA
caggcagtgggggagtggac

SEQ ID NO: 22182 - DNA, 20 bp, synthetic construct
  misc_feature 1..20: note = Description of Artificial Sequence: Synthetic oligonucleotide
  misc_feature 1..20: note = Target: SCN10A; (-) strand; PAM type: NRG; PAM sequence: TGG
  source 1..20: mol_type = other DNA
ccagccaggcagtgggggag

SEQ ID NO: 22183 - DNA, 20 bp, synthetic construct
  misc_feature 1..20: note = Description of Artificial Sequence: Synthetic oligonucleotide
  misc_feature 1..20: note = Target: SCN10A; (-) strand; PAM type: NRG; PAM sequence: GAG
  source 1..20: mol_type = other DNA
gtgccagccaggcagtgggg

SEQ ID NO: 22184 - DNA, 20 bp, synthetic construct
  misc_feature 1..20: note = Description of Artificial Sequence: Synthetic oligonucleotide
  misc_feature 1..20: note = Target: SCN10A; (-) strand; PAM type: NRG; PAM sequence: GGG
  source 1..20: mol_type = other DNA
aggtgccagccaggcagtgg

SEQ ID NO: 22185 - DNA, 20 bp, synthetic construct
  misc_feature 1..20: note = Description of Artificial Sequence: Synthetic oligonucleotide
  misc_feature 1..20: note = Target: SCN10A; (-) strand; PAM type: NRG; PAM sequence: GGG
  source 1..20: mol_type = other DNA
caggtgccagccaggcagtg

SEQ ID NO: 22186 - DNA, 20 bp, synthetic construct
  misc_feature 1..20: note = Description of Artificial Sequence: Synthetic oligonucleotide
  misc_feature 1..20: note = Target: SCN10A; (-) strand; PAM type: NRG; PAM sequence: GGG
  source 1..20: mol_type = other DNA
gcaggtgccagccaggcagt

SEQ ID NO: 22187 - DNA, 20 bp, synthetic construct
  misc_feature 1..20: note = Description of Artificial Sequence: Synthetic oligonucleotide
  misc_feature 1..20: note = Target: SCN10A; (-) strand; PAM type: NRG; PAM sequence: TGG
  source 1..20: mol_type = other DNA
ggcaggtgccagccaggcag

SEQ ID NO: 22188 - DNA, 20 bp, synthetic construct
  misc_feature 1..20: note = Description of Artificial Sequence: Synthetic oligonucleotide
  misc_feature 1..20: note = Target: SCN10A; (-) strand; PAM type: NRG; PAM sequence: CAG
  source 1..20: mol_type = other DNA
ttgggcaggtgccagccagg

SEQ ID NO: 22189 - DNA, 20 bp, synthetic construct
  misc_feature 1..20: note = Description of Artificial Sequence: Synthetic oligonucleotide
  misc_feature 1..20: note = Target: SCN10A; (-) strand; PAM type: NRG; PAM sequence: AGG
  source 1..20: mol_type = other DNA
ctattgggcaggtgccagcc

SEQ ID NO: 22190 - DNA, 20 bp, synthetic construct
  misc_feature 1..20: note = Description of Artificial Sequence: Synthetic oligonucleotide
  misc_feature 1..20: note = Target: SCN10A; (-) strand; PAM type: NRG; PAM sequence: CAG
  source 1..20: mol_type = other DNA
gctattgggcaggtgccagc

SEQ ID NO: 22191 - DNA, 20 bp, synthetic construct
  misc_feature 1..20: note = Description of Artificial Sequence: Synthetic oligonucleotide
  misc_feature 1..20: note = Target: SCN10A; (-) strand; PAM type: NRG; PAM sequence: CAG
  source 1..20: mol_type = other DNA
gcctgctattgggcaggtgc

SEQ ID NO: 22192 - DNA, 20 bp, synthetic construct
  misc_feature 1..20: note = Description of Artificial Sequence: Synthetic oligonucleotide
  misc_feature 1..20: note = Target: SCN10A; (-) strand; PAM type: NRG; PAM sequence: AGG
  source 1..20: mol_type = other DNA
ggccaggcctgctattgggc

SEQ ID NO: 22193 - DNA, 20 bp, synthetic construct
  misc_feature 1..20: note = Description of Artificial Sequence: Synthetic oligonucleotide
  misc_feature 1..20: note = Target: SCN10A; (-) strand; PAM type: NRG; PAM sequence: CAG
  source 1..20: mol_type = other DNA
aggccaggcctgctattggg

SEQ ID NO: 22194 - DNA, 20 bp, synthetic construct
  misc_feature 1..20: note = Description of Artificial Sequence: Synthetic oligonucleotide
  misc_feature 1..20: note = Target: SCN10A; (-) strand; PAM type: NRG; PAM sequence: GGG
  source 1..20: mol_type = other DNA
gagaggccaggcctgctatt

SEQ ID NO: 22195 - DNA, 20 bp, synthetic construct
  misc_feature 1..20: note = Description of Artificial Sequence: Synthetic oligonucleotide
  misc_feature 1..20: note = Target: SCN10A; (-) strand; PAM type: NRG; PAM sequence: TGG
  source 1..20: mol_type = other DNA
tgagaggccaggcctgctat

SEQ ID NO: 22196 - DNA, 20 bp, synthetic construct
  misc_feature 1..20: note = Description of Artificial Sequence: Synthetic oligonucleotide
  misc_feature 1..20: note = Target: SCN10A; (-) strand; PAM type: NRG; PAM sequence: AGG
  source 1..20: mol_type = other DNA
gctcagctccctgagaggcc

SEQ ID NO: 22197 - DNA, 20 bp, synthetic construct
  misc_feature 1..20: note = Description of Artificial Sequence: Synthetic oligonucleotide
  misc_feature 1..20: note = Target: SCN10A; (-) strand; PAM type: NRG; PAM sequence: CAG
  source 1..20: mol_type = other DNA
agctcagctccctgagaggc

SEQ ID NO: 22198 - DNA, 20 bp, synthetic construct
  misc_feature 1..20: note = Description of Artificial Sequence: Synthetic oligonucleotide
  misc_feature 1..20: note = Target: SCN10A; (-) strand; PAM type: NRG; PAM sequence: AGG
  source 1..20: mol_type = other DNA
ctacagctcagctccctgag

SEQ ID NO: 22199 - DNA, 20 bp, synthetic construct
  misc_feature 1..20: note = Description of Artificial Sequence: Synthetic oligonucleotide
  misc_feature 1..20: note = Target: SCN10A; (-) strand; PAM type: NRG; PAM sequence: GAG
  source 1..20: mol_type = other DNA
tctacagctcagctccctga

SEQ ID NO: 22200 - DNA, 20 bp, synthetic construct
  misc_feature 1..20: note = Description of Artificial Sequence: Synthetic oligonucleotide
  misc_feature 1..20: note = Target: SCN10A; (-) strand; PAM type: NRG; PAM sequence: GAG
  source 1..20: mol_type = other DNA
cctctacagctcagctccct

SEQ ID NO: 22201 - DNA, 20 bp, synthetic construct
  misc_feature 1..20: note = Description of Artificial Sequence: Synthetic oligonucleotide
  misc_feature 1..20: note = Target: SCN10A; (-) strand; PAM type: NRG; PAM sequence: CAG
  source 1..20: mol_type = other DNA
atctacacacctctacagct

SEQ ID NO: 22202 - DNA, 20 bp, synthetic construct
  misc_feature 1..20: note = Description of Artificial Sequence: Synthetic oligonucleotide
  misc_feature 1..20: note = Target: SCN10A; (-) strand; PAM type: NRG; PAM sequence: CAG
  source 1..20: mol_type = other DNA
ggtccatctacacacctcta

SEQ ID NO: 22203 - DNA, 20 bp, synthetic construct
  misc_feature 1..20: note = Description of Artificial Sequence: Synthetic oligonucleotide
  misc_feature 1..20: note = Target: SCN10A; (-) strand; PAM type: NRG; PAM sequence: GGG
  source 1..20: mol_type = other DNA
ctttttgtggtaaagttgtt

SEQ ID NO: 22204 - DNA, 20 bp, synthetic construct
  misc_feature 1..20: note = Description of Artificial Sequence: Synthetic oligonucleotide
  misc_feature 1..20: note = Target: SCN10A; (-) strand; PAM type: NRG; PAM sequence: TGG
  source 1..20: mol_type = other DNA
cctttttgtggtaaagttgt

SEQ ID NO: 22205 - DNA, 20 bp, synthetic construct
  misc_feature 1..20: note = Description of Artificial Sequence: Synthetic oligonucleotide
  misc_feature 1..20: note = Target: SCN10A; (-) strand; PAM type: NRG; PAM sequence: AAG
  source 1..20: mol_type = other DNA
ctcaagtcctttttgtggta

SEQ ID NO: 22206 - DNA, 20 bp, synthetic construct
  misc_feature 1..20: note = Description of Artificial Sequence: Synthetic oligonucleotide
  misc_feature 1..20: note = Target: SCN10A; (-) strand; PAM type: NRG; PAM sequence: TGG
  source 1..20: mol_type = other DNA
agcagctcaagtcctttttg

SEQ ID NO: 22207 - DNA, 20 bp, synthetic construct
  misc_feature 1..20: note = Description of Artificial Sequence: Synthetic oligonucleotide
  misc_feature 1..20: note = Target: SCN10A; (-) strand; PAM type: NRG; PAM sequence: AAG
  source 1..20: mol_type = other DNA
caatggctccagagcagctc

SEQ ID NO: 22208 - DNA, 20 bp, synthetic construct
  misc_feature 1..20: note = Description of Artificial Sequence: Synthetic oligonucleotide
  misc_feature 1..20: note = Target: SCN10A; (-) strand; PAM type: NRG; PAM sequence: CAG
  source 1..20: mol_type = other DNA
tcaaggcaatggctccagag

SEQ ID NO: 22209 - DNA, 20 bp, synthetic construct
  misc_feature 1..20: note = Description of Artificial Sequence: Synthetic oligonucleotide
  misc_feature 1..20: note = Target: SCN10A; (-) strand; PAM type: NRG; PAM sequence: GAG
  source 1..20: mol_type = other DNA
ttctcaaggcaatggctcca

SEQ ID NO: 22210 - DNA, 20 bp, synthetic construct
  misc_feature 1..20: note = Description of Artificial Sequence: Synthetic oligonucleotide
  misc_feature 1..20: note = Target: SCN10A; (-) strand; PAM type: NRG; PAM sequence: CAG
  source 1..20: mol_type = other DNA
atttctcaaggcaatggctc

SEQ ID NO: 22211 - DNA, 20 bp, synthetic construct
  misc_feature 1..20: note = Description of Artificial Sequence: Synthetic oligonucleotide
  misc_feature 1..20: note = Target: SCN10A; (-) strand; PAM type: NRG; PAM sequence: TGG
  source 1..20: mol_type = other DNA
aatggcatttctcaaggcaa

SEQ ID NO: 22212 - DNA, 20 bp, synthetic construct
  misc_feature 1..20: note = Description of Artificial Sequence: Synthetic oligonucleotide
  misc_feature 1..20: note = Target: SCN10A; (-) strand; PAM type: NRG; PAM sequence: AGG
  source 1..20: mol_type = other DNA
ctagataatggcatttctca

SEQ ID NO: 22213 - DNA, 20 bp, synthetic construct
  misc_feature 1..20: note = Description of Artificial Sequence: Synthetic oligonucleotide
  misc_feature 1..20: note = Target: SCN10A; (-) strand; PAM type: NRG; PAM sequence: AAG
  source 1..20: mol_type = other DNA
tctagataatggcatttctc

SEQ ID NO: 22214 - DNA, 20 bp, synthetic construct
  misc_feature 1..20: note = Description of Artificial Sequence: Synthetic oligonucleotide
  misc_feature 1..20: note = Target: SCN10A; (-) strand; PAM type: NRG; PAM sequence: TGG
  source 1..20: mol_type = other DNA
gcatccttctgtctagataa

SEQ ID NO: 22215 - DNA, 20 bp, synthetic construct
  misc_feature 1..20: note = Description of Artificial Sequence: Synthetic oligonucleotide
  misc_feature 1..20: note = Target: SCN10A; (-) strand; PAM type: NRG; PAM sequence: TAG
  source 1..20: mol_type = other DNA
cccctcagcatccttctgtc

SEQ ID NO: 22216 - DNA, 20 bp, synthetic construct
  misc_feature 1..20: note = Description of Artificial Sequence: Synthetic oligonucleotide
  misc_feature 1..20: note = Target: SCN10A; (-) strand; PAM type: NRG; PAM sequence: CAG
  source 1..20: mol_type = other DNA
aatgtaaaccaagagcccct

SEQ ID NO: 22217 - DNA, 20 bp, synthetic construct
  misc_feature 1..20: note = Description of Artificial Sequence: Synthetic oligonucleotide
  misc_feature 1..20: note = Target: SCN10A; (-) strand; PAM type: NRG; PAM sequence: GAG
  source 1..20: mol_type = other DNA
ttgacttaaatgtaaaccaa

SEQ ID NO: 22218 - DNA, 20 bp, synthetic construct
  misc_feature 1..20: note = Description of Artificial Sequence: Synthetic oligonucleotide
  misc_feature 1..20: note = Target: SCN10A; (-) strand; PAM type: NRG; PAM sequence: AAG
  source 1..20: mol_type = other DNA
ctttgacttaaatgtaaacc

SEQ ID NO: 22219 - DNA, 20 bp, synthetic construct
  misc_feature 1..20: note = Description of Artificial Sequence: Synthetic oligonucleotide
  misc_feature 1..20: note = Target: SCN10A; (-) strand; PAM type: NRG; PAM sequence: CAG
  source 1..20: mol_type = other DNA
tgagagggttgttctgacat

SEQ ID NO: 22220 - DNA, 20 bp, synthetic construct
  misc_feature 1..20: note = Description of Artificial Sequence: Synthetic oligonucleotide
  misc_feature 1..20: note = Target: SCN10A; (-) strand; PAM type: NRG; PAM sequence: GGG
  source 1..20: mol_type = other DNA
tggttctttggctcatgaga

SEQ ID NO: 22221 - DNA, 20 bp, synthetic construct
  misc_feature 1..20: note = Description of Artificial Sequence: Synthetic oligonucleotide
  misc_feature 1..20: note = Target: SCN10A; (-) strand; PAM type: NRG; PAM sequence: AGG
  source 1..20: mol_type = other DNA
ttggttctttggctcatgag

SEQ ID NO: 22222 - DNA, 20 bp, synthetic construct
  misc_feature 1..20: note = Description of Artificial Sequence: Synthetic oligonucleotide
  misc_feature 1..20: note = Target: SCN10A; (-) strand; PAM type: NRG; PAM sequence: GAG
  source 1..20: mol_type = other DNA
tttggttctttggctcatga

SEQ ID NO: 22223 - DNA, 20 bp, synthetic construct
  misc_feature 1..20: note = Description of Artificial Sequence: Synthetic oligonucleotide
  misc_feature 1..20: note = Target: SCN10A; (-) strand; PAM type: NRG; PAM sequence: GAG
  source 1..20: mol_type = other DNA
catttggttctttggctcat

SEQ ID NO: 22224 - DNA, 20 bp, synthetic construct
  misc_feature 1..20: note = Description of Artificial Sequence: Synthetic oligonucleotide
  misc_feature 1..20: note = Target: SCN10A; (-) strand; PAM type: NRG; PAM sequence: TGG
  source 1..20: mol_type = other DNA
gcacttggcatttggttctt

SEQ ID NO: 22225 - DNA, 20 bp, synthetic construct
  misc_feature 1..20: note = Description of Artificial Sequence: Synthetic oligonucleotide
  misc_feature 1..20: note = Target: SCN10A; (-) strand; PAM type: NRG; PAM sequence: TGG
  source 1..20: mol_type = other DNA
tcacaaatgcacttggcatt

SEQ ID NO: 22226 - DNA, 20 bp, synthetic construct
  misc_feature 1..20: note = Description of Artificial Sequence: Synthetic oligonucleotide
  misc_feature 1..20: note = Target: SCN10A; (-) strand; PAM type: NRG; PAM sequence: TGG
  source 1..20: mol_type = other DNA
tgttctttcacaaatgcact

SEQ ID NO: 22227 - DNA, 20 bp, synthetic construct
  misc_feature 1..20: note = Description of Artificial Sequence: Synthetic oligonucleotide
  misc_feature 1..20: note = Target: SCN10A; (-) strand; PAM type: NRG; PAM sequence: TGG
  source 1..20: mol_type = other DNA
ttggtcaacatcaggttcct

SEQ ID NO: 22228 - DNA, 20 bp, synthetic construct
  misc_feature 1..20: note = Description of Artificial Sequence: Synthetic oligonucleotide
  misc_feature 1..20: note = Target: SCN10A; (-) strand; PAM type: NRG; PAM sequence: AGG
  source 1..20: mol_type = other DNA
aggagcatttggtcaacatc

SEQ ID NO: 22229 - DNA, 20 bp, synthetic construct
  misc_feature 1..20: note = Description of Artificial Sequence: Synthetic oligonucleotide
  misc_feature 1..20: note = Target: SCN10A; (-) strand; PAM type: NRG; PAM sequence: CAG
  source 1..20: mol_type = other DNA
caggagcatttggtcaacat

SEQ ID NO: 22230 - DNA, 20 bp, synthetic construct
  misc_feature 1..20: note = Description of Artificial Sequence: Synthetic oligonucleotide
  misc_feature 1..20: note = Target: SCN10A; (-) strand; PAM type: NRG; PAM sequence: TGG
  source 1..20: mol_type = other DNA
tggaaacaagcaggagcatt

SEQ ID NO: 22231 - DNA, 20 bp, synthetic construct
  misc_feature 1..20: note = Description of Artificial Sequence: Synthetic oligonucleotide
  misc_feature 1..20: note = Target: SCN10A; (-) strand; PAM type: NRG; PAM sequence: GAG
  source 1..20: mol_type = other DNA
tgaggactggaaacaagcag

SEQ ID NO: 22232 - DNA, 20 bp, synthetic construct
  misc_feature 1..20: note = Description of Artificial Sequence: Synthetic oligonucleotide
  misc_feature 1..20: note = Target: SCN10A; (-) strand; PAM type: NRG; PAM sequence: AGG
  source 1..20: mol_type = other DNA
gctgaggactggaaacaagc

SEQ ID NO: 22233 - DNA, 20 bp, synthetic construct
  misc_feature 1..20: note = Description of Artificial Sequence: Synthetic oligonucleotide
  misc_feature 1..20: note = Target: SCN10A; (-) strand; PAM type: NRG; PAM sequence: CAG
  source 1..20: mol_type = other DNA
agctgaggactggaaacaag

SEQ ID NO: 22234 - DNA, 20 bp, synthetic construct
  misc_feature 1..20: note = Description of Artificial Sequence: Synthetic oligonucleotide
  misc_feature 1..20: note = Target: SCN10A; (-) strand; PAM type: NRG; PAM sequence: AAG
  source 1..20: mol_type = other DNA
tggagctgaggactggaaac

SEQ ID NO: 22235 - DNA, 20 bp, synthetic construct
  misc_feature 1..20: note = Description of Artificial Sequence: Synthetic oligonucleotide
  misc_feature 1..20: note = Target: SCN10A; (-) strand; PAM type: NRG; PAM sequence: TGG
  source 1..20: mol_type = other DNA
tctcagttggagctgaggac

SEQ ID NO: 22236 - DNA, 20 bp, synthetic construct
  misc_feature 1..20: note = Description of Artificial Sequence: Synthetic oligonucleotide
  misc_feature 1..20: note = Target: SCN10A; (-) strand; PAM type: NRG; PAM sequence: AGG
  source 1..20: mol_type = other DNA
aactatctcagttggagctg

SEQ ID NO: 22237 - DNA, 20 bp, synthetic construct
  misc_feature 1..20: note = Description of Artificial Sequence: Synthetic oligonucleotide
  misc_feature 1..20: note = Target: SCN10A; (-) strand; PAM type: NRG; PAM sequence: GAG
  source 1..20: mol_type = other DNA
aaactatctcagttggagct

SEQ ID NO: 22238 - DNA, 20 bp, synthetic construct
  misc_feature 1..20: note = Description of Artificial Sequence: Synthetic oligonucleotide
  misc_feature 1..20: note = Target: SCN10A; (-) strand; PAM type: NRG; PAM sequence: GAG
  source 1..20: mol_type = other DNA
taggaaaactatctcagttg

SEQ ID NO: 22239 - DNA, 20 bp, synthetic construct
  misc_feature 1..20: note = Description of Artificial Sequence: Synthetic oligonucleotide
  misc_feature 1..20: note = Target: SCN10A; (-) strand; PAM type: NRG; PAM sequence: TGG
  source 1..20: mol_type = other DNA
actaggaaaactatctcagt

SEQ ID NO: 22240 - DNA, 20 bp, synthetic construct
  misc_feature 1..20: note = Description of Artificial Sequence: Synthetic oligonucleotide
  misc_feature 1..20: note = Target: SCN10A; (-) strand; PAM type: NRG; PAM sequence: CAG
  source 1..20: mol_type = other DNA
gctcactaggaaaactatct

SEQ ID NO: 22241 - DNA, 20 bp, synthetic construct
  misc_feature 1..20: note = Description of Artificial Sequence: Synthetic oligonucleotide
  misc_feature 1..20: note = Target: SCN10A; (-) strand; PAM type: NRG; PAM sequence: AGG
  source 1..20: mol_type = other DNA
tccaccttcatcagctcact

SEQ ID NO: 22242 - DNA, 20 bp, synthetic construct
  misc_feature 1..20: note = Description of Artificial Sequence: Synthetic oligonucleotide
  misc_feature 1..20: note = Target: SCN10A; (-) strand; PAM type: NRG; PAM sequence: TAG
  source 1..20: mol_type = other DNA
ctccaccttcatcagctcac

SEQ ID NO: 22243 - DNA, 20 bp, synthetic construct
  misc_feature 1..20: note = Description of Artificial Sequence: Synthetic oligonucleotide
  misc_feature 1..20: note = Target: SCN10A; (-) strand; PAM type: NRG; PAM sequence: CAG
  source 1..20: mol_type = other DNA
gcatgaggctccaccttcat

SEQ ID NO: 22244 - DNA, 20 bp, synthetic construct
  misc_feature 1..20: note = Description of Artificial Sequence: Synthetic oligonucleotide
  misc_feature 1..20: note = Target: SCN10A; (-) strand; PAM type: NRG; PAM sequence: AGG
  source 1..20: mol_type = other DNA
acctgtgtggagcctgcatg

SEQ ID NO: 22245 - DNA, 20 bp, synthetic construct
  misc_feature 1..20: note = Description of Artificial Sequence: Synthetic oligonucleotide
  misc_feature 1..20: note = Target: SCN10A; (-) strand; PAM type: NRG; PAM sequence: GAG
  source 1..20: mol_type = other DNA
gacctgtgtggagcctgcat

SEQ ID NO: 22246 - DNA, 20 bp, synthetic construct
  misc_feature 1..20: note = Description of Artificial Sequence: Synthetic oligonucleotide
  misc_feature 1..20: note = Target: SCN10A; (-) strand; PAM type: NRG; PAM sequence: GAG
  source 1..20: mol_type = other DNA
tgcccaggtcgacctgtgtg

SEQ ID NO: 22247 - DNA, 20 bp, synthetic construct
  misc_feature 1..20: note = Description of Artificial Sequence: Synthetic oligonucleotide
  misc_feature 1..20: note = Target: SCN10A; (-) strand; PAM type: NRG; PAM sequence: TGG
  source 1..20: mol_type = other DNA
gttgcccaggtcgacctgtg

SEQ ID NO: 22248 - DNA, 20 bp, synthetic construct
  misc_feature 1..20: note = Description of Artificial Sequence: Synthetic oligonucleotide
  misc_feature 1..20: note = Target: SCN10A; (-) strand; PAM type: NRG; PAM sequence: AGG
  source 1..20: mol_type = other DNA
ctgacggctccatgttgccc

SEQ ID NO: 22249 - DNA, 20 bp, synthetic construct
  misc_feature 1..20: note = Description of Artificial Sequence: Synthetic oligonucleotide
  misc_feature 1..20: note = Target: SCN10A; (-) strand; PAM type: NRG; PAM sequence: CAG
  source 1..20: mol_type = other DNA
gctgacggctccatgttgcc

SEQ ID NO: 22250 - DNA, 20 bp, synthetic construct
  misc_feature 1..20: note = Description of Artificial Sequence: Synthetic oligonucleotide
  misc_feature 1..20: note = Target: SCN10A; (-) strand; PAM type: NRG; PAM sequence: CGG
  source 1..20: mol_type = other DNA
cccagtgcctgagaggctga

SEQ ID NO: 22251 - DNA, 20 bp, synthetic construct
  misc_feature 1..20: note = Description of Artificial Sequence: Synthetic oligonucleotide
  misc_feature 1..20: note = Target: SCN10A; (-) strand; PAM type: NRG; PAM sequence: AGG
  source 1..20: mol_type = other DNA
caacacccccagtgcctgag

SEQ ID NO: 22252 - DNA, 20 bp, synthetic construct
  misc_feature 1..20: note = Description of Artificial Sequence: Synthetic oligonucleotide
  misc_feature 1..20: note = Target: SCN10A; (-) strand; PAM type: NRG; PAM sequence: GAG
  source 1..20: mol_type = other DNA
acaacacccccagtgcctga

SEQ ID NO: 22253 - DNA, 20 bp, synthetic construct
  misc_feature 1..20: note = Description of Artificial Sequence: Synthetic oligonucleotide
  misc_feature 1..20: note = Target: SCN10A; (-) strand; PAM type: NRG; PAM sequence: GAG
  source 1..20: mol_type = other DNA
tcacaacacccccagtgcct

SEQ ID NO: 22254 - DNA, 20 bp, synthetic construct
  misc_feature 1..20: note = Description of Artificial Sequence: Synthetic oligonucleotide
  misc_feature 1..20: note = Target: SCN10A; (-) strand; PAM type: NRG; PAM sequence: CAG
  source 1..20: mol_type = other DNA
agcagagctcacaacacccc

SEQ ID NO: 22255 - DNA, 20 bp, synthetic construct
  misc_feature 1..20: note = Description of Artificial Sequence: Synthetic oligonucleotide
  misc_feature 1..20: note = Target: SCN10A; (-) strand; PAM type: NRG; PAM sequence: GAG
  source 1..20: mol_type = other DNA
gctgagagcttggaaaagca

SEQ ID NO: 22256 - DNA, 20 bp, synthetic construct
  misc_feature 1..20: note = Description of Artificial Sequence: Synthetic oligonucleotide
  misc_feature 1..20: note = Target: SCN10A; (-) strand; PAM type: NRG; PAM sequence: CAG
  source 1..20: mol_type = other DNA
tggctgagagcttggaaaag

SEQ ID NO: 22257 - DNA, 20 bp, synthetic construct
  misc_feature 1..20: note = Description of Artificial Sequence: Synthetic oligonucleotide
  misc_feature 1..20: note = Target: SCN10A; (-) strand; PAM type: NRG; PAM sequence: AAG
  source 1..20: mol_type = other DNA
ccatggctgagagcttggaa

SEQ ID NO: 22258 - DNA, 20 bp, synthetic construct
  misc_feature 1..20: note = Description of Artificial Sequence: Synthetic oligonucleotide
  misc_feature 1..20: note = Target: SCN10A; (-) strand; PAM type: NRG; PAM sequence: TGG
  source 1..20: mol_type = other DNA
cacctccatggctgagagct

SEQ ID NO: 22259 - DNA, 20 bp, synthetic construct
  misc_feature 1..20: note = Description of Artificial Sequence: Synthetic oligonucleotide
  misc_feature 1..20: note = Target: SCN10A; (-) strand; PAM type: NRG; PAM sequence: GAG
  source 1..20: mol_type = other DNA
tcacccacctccatggctga

SEQ ID NO: 22260 - DNA, 20 bp, synthetic construct
  misc_feature 1..20: note = Description of Artificial Sequence: Synthetic oligonucleotide
  misc_feature 1..20: note = Target: SCN10A; (-) strand; PAM type: NRG; PAM sequence: GAG
  source 1..20: mol_type = other DNA
tctcacccacctccatggct

SEQ ID NO: 22261 - DNA, 20 bp, synthetic construct
  misc_feature 1..20: note = Description of Artificial Sequence: Synthetic oligonucleotide
  misc_feature 1..20: note = Target: SCN10A; (-) strand; PAM type: NRG; PAM sequence: TGG
  source 1..20: mol_type = other DNA
gcccatctcacccacctcca

SEQ ID NO: 22262 - DNA, 20 bp, synthetic construct
  misc_feature 1..20: note = Description of Artificial Sequence: Synthetic oligonucleotide
  misc_feature 1..20: note = Target: SCN10A; (-) strand; PAM type: NRG; PAM sequence: AGG
  source 1..20: mol_type = other DNA
ctttaggcaaaagatcaaaa

SEQ ID NO: 22263 - DNA, 20 bp, synthetic construct
  misc_feature 1..20: note = Description of Artificial Sequence: Synthetic oligonucleotide
  misc_feature 1..20: note = Target: SCN10A; (-) strand; PAM type: NRG; PAM sequence: AAG
  source 1..20: mol_type = other DNA
actttaggcaaaagatcaaa

SEQ ID NO: 22264 - DNA, 20 bp, synthetic construct
  misc_feature 1..20: note = Description of Artificial Sequence: Synthetic oligonucleotide
  misc_feature 1..20: note = Target: SCN10A; (-) strand; PAM type: NRG; PAM sequence: AAG
  source 1..20: mol_type = other DNA
agcagaaagactttaggcaa

SEQ ID NO: 22265 - DNA, 20 bp, synthetic construct
  misc_feature 1..20: note = Description of Artificial Sequence: Synthetic oligonucleotide
  misc_feature 1..20: note = Target: SCN10A; (-) strand; PAM type: NRG; PAM sequence: AGG
  source 1..20: mol_type = other DNA
ggcatgagcagaaagacttt

SEQ ID NO: 22266 - DNA, 20 bp, synthetic construct
  misc_feature 1..20: note = Description of Artificial Sequence: Synthetic oligonucleotide
  misc_feature 1..20: note = Target: SCN10A; (-) strand; PAM type: NRG; PAM sequence: TAG
  source 1..20: mol_type = other DNA
aggcatgagcagaaagactt

SEQ ID NO: 22267 - DNA, 20 bp, synthetic construct
  misc_feature 1..20: note = Description of Artificial Sequence: Synthetic oligonucleotide
  misc_feature 1..20: note = Target: SCN10A; (-) strand; PAM type: NRG; PAM sequence: AAG
  source 1..20: mol_type = other DNA
tggaggaaggcatgagcaga

SEQ ID NO: 22268 - DNA, 20 bp, synthetic construct
  misc_feature 1..20: note = Description of Artificial Sequence: Synthetic oligonucleotide
  misc_feature 1..20: note = Target: SCN10A; (-) strand; PAM type: NRG; PAM sequence: CAG
  source 1..20: mol_type = other DNA
ccactggaggaaggcatgag

SEQ ID NO: 22269 - DNA, 20 bp, synthetic construct
  misc_feature 1..20: note = Description of Artificial Sequence: Synthetic oligonucleotide
  misc_feature 1..20: note = Target: SCN10A; (-) strand; PAM type: NRG; PAM sequence: GAG
  source 1..20: mol_type = other DNA
tggccactggaggaaggcat

SEQ ID NO: 22270 - DNA, 20 bp, synthetic construct
  misc_feature 1..20: note = Description of Artificial Sequence: Synthetic oligonucleotide
  misc_feature 1..20: note = Target: SCN10A; (-) strand; PAM type: NRG; PAM sequence: AGG
  source 1..20: mol_type = other DNA
ctgctttggccactggagga

SEQ ID NO: 22271 - DNA, 20 bp, synthetic construct
  misc_feature 1..20: note = Description of Artificial Sequence: Synthetic oligonucleotide
  misc_feature 1..20: note = Target: SCN10A; (-) strand; PAM type: NRG; PAM sequence: AAG
  source 1..20: mol_type = other DNA
gctgctttggccactggagg

SEQ ID NO: 22272 - DNA, 20 bp, synthetic construct
  misc_feature 1..20: note = Description of Artificial Sequence: Synthetic oligonucleotide
  misc_feature 1..20: note = Target: SCN10A; (-) strand; PAM type: NRG; PAM sequence: AGG
  source 1..20: mol_type = other DNA
cctgctgctttggccactgg

SEQ ID NO: 22273 - DNA, 20 bp, synthetic construct
  misc_feature 1..20: note = Description of Artificial Sequence: Synthetic oligonucleotide
  misc_feature 1..20: note = Target: SCN10A; (-) strand; PAM type: NRG; PAM sequence: GAG
  source 1..20: mol_type = other DNA
gcctgctgctttggccactg

SEQ ID NO: 22274 - DNA, 20 bp, synthetic construct
  misc_feature 1..20: note = Description of Artificial Sequence: Synthetic oligonucleotide
  misc_feature 1..20: note = Target: SCN10A; (-) strand; PAM type: NRG; PAM sequence: TGG
  source 1..20: mol_type = other DNA
ctgcctgctgctttggccac

SEQ ID NO: 22275 - DNA, 20 bp, synthetic construct
  misc_feature 1..20: note = Description of Artificial Sequence: Synthetic oligonucleotide
  misc_feature 1..20: note = Target: SCN10A; (-) strand; PAM type: NRG; PAM sequence: TGG
  source 1..20: mol_type = other DNA
ctcagctctgcctgctgctt

SEQ ID NO: 22276 - DNA, 20 bp, synthetic construct
  misc_feature 1..20: note = Description of Artificial Sequence: Synthetic oligonucleotide
  misc_feature 1..20: note = Target: SCN10A; (-) strand; PAM type: NRG; PAM sequence: CAG
  source 1..20: mol_type = other DNA
gctaagggatgaggacccct

SEQ ID NO: 22277 - DNA, 20 bp, synthetic construct
  misc_feature 1..20: note = Description of Artificial Sequence: Synthetic oligonucleotide
  misc_feature 1..20: note = Target: SCN10A; (-) strand; PAM type: NRG; PAM sequence: AGG
  source 1..20: mol_type = other DNA
tgagacaaagctaagggatg

SEQ ID NO: 22278 - DNA, 20 bp, synthetic construct
  misc_feature 1..20: note = Description of Artificial Sequence: Synthetic oligonucleotide
  misc_feature 1..20: note = Target: SCN10A; (-) strand; PAM type: NRG; PAM sequence: GAG
  source 1..20: mol_type = other DNA
gtgagacaaagctaagggat

SEQ ID NO: 22279 - DNA, 20 bp, synthetic construct
  misc_feature 1..20: note = Description of Artificial Sequence: Synthetic oligonucleotide
  misc_feature 1..20: note = Target: SCN10A; (-) strand; PAM type: NRG; PAM sequence: GGG
  source 1..20: mol_type = other DNA
agaatgtgagacaaagctaa

SEQ ID NO: 22280 - DNA, 20 bp, synthetic construct
  misc_feature 1..20: note = Description of Artificial Sequence: Synthetic oligonucleotide
  misc_feature 1..20: note = Target: SCN10A; (-) strand; PAM type: NRG; PAM sequence: AGG
  source 1..20: mol_type = other DNA
cagaatgtgagacaaagcta

SEQ ID NO: 22281 - DNA, 20 bp, synthetic construct
  misc_feature 1..20: note = Description of Artificial Sequence: Synthetic oligonucleotide
  misc_feature 1..20: note = Target: SCN10A; (-) strand; PAM type: NRG; PAM sequence: AAG
  source 1..20: mol_type = other DNA
acagaatgtgagacaaagct

SEQ ID NO: 22282 - DNA, 20 bp, synthetic construct
  misc_feature 1..20: note = Description of Artificial Sequence: Synthetic oligonucleotide
  misc_feature 1..20: note = Target: SCN10A; (-) strand; PAM type: NRG; PAM sequence: AAG
  source 1..20: mol_type = other DNA
gcagaacagaatgtgagaca

SEQ ID NO: 22283 - DNA, 20 bp, synthetic construct
  misc_feature 1..20: note = Description of Artificial Sequence: Synthetic oligonucleotide
  misc_feature 1..20: note = Target: SCN10A; (-) strand; PAM type: NRG; PAM sequence: GAG
  source 1..20: mol_type = other DNA
caggtggcagaacagaatgt

SEQ ID NO: 22284 - DNA, 20 bp, synthetic construct
  misc_feature 1..20: note = Description of Artificial Sequence: Synthetic oligonucleotide
  misc_feature 1..20: note = Target: SCN10A; (-) strand; PAM type: NRG; PAM sequence: CAG
  source 1..20: mol_type = other DNA
gaccattccaggtggcagaa

SEQ ID NO: 22285 - DNA, 20 bp, synthetic construct
  misc_feature 1..20: note = Description of Artificial Sequence: Synthetic oligonucleotide
  misc_feature 1..20: note = Target: SCN10A; (-) strand; PAM type: NRG; PAM sequence: CAG
  source 1..20: mol_type = other DNA
gcgaagaccattccaggtgg

SEQ ID NO: 22286 - DNA, 20 bp, synthetic construct
  misc_feature 1..20: note = Description of Artificial Sequence: Synthetic oligonucleotide
  misc_feature 1..20: note = Target: SCN10A; (-) strand; PAM type: NRG; PAM sequence: TGG
  source 1..20: mol_type = other DNA
tcagcgaagaccattccagg

SEQ ID NO: 22287 - DNA, 20 bp, synthetic construct
  misc_feature 1..20: note = Description of Artificial Sequence: Synthetic oligonucleotide
  misc_feature 1..20: note = Target: SCN10A; (-) strand; PAM type: NRG; PAM sequence: AGG
  source 1..20: mol_type = other DNA
gtttcagcgaagaccattcc

SEQ ID NO: 22288 - DNA, 20 bp, synthetic construct
  misc_feature 1..20: note = Description of Artificial Sequence: Synthetic oligonucleotide
  misc_feature 1..20: note = Target: SCN10A; (-) strand; PAM type: NRG; PAM sequence: CAG
  source 1..20: mol_type = other DNA
agtttcagcgaagaccattc

SEQ ID NO: 22289 - DNA, 20 bp, synthetic construct
  misc_feature 1..20: note = Description of Artificial Sequence: Synthetic oligonucleotide
  misc_feature 1..20: note = Target: SCN10A; (-) strand; PAM type: NRG; PAM sequence: AAG
  source 1..20: mol_type = other DNA
aatacgagatagtttcagcg

SEQ ID NO: 22290 - DNA, 20 bp, synthetic construct
  misc_feature 1..20: note = Description of Artificial Sequence: Synthetic oligonucleotide
  misc_feature 1..20: note = Target: SCN10A; (-) strand; PAM type: NRG; PAM sequence: CAG
  source 1..20: mol_type = other DNA
gggtgaatacgagatagttt

SEQ ID NO: 22291 - DNA, 20 bp, synthetic construct
  misc_feature 1..20: note = Description of Artificial Sequence: Synthetic oligonucleotide
  misc_feature 1..20: note = Target: SCN10A; (-) strand; PAM type: NRG; PAM sequence: TAG
  source 1..20: mol_type = other DNA
caggctgggtgaatacgaga

SEQ ID NO: 22292 - DNA, 20 bp, synthetic construct
  misc_feature 1..20: note = Description of Artificial Sequence: Synthetic oligonucleotide
  misc_feature 1..20: note = Target: SCN10A; (-) strand; PAM type: NRG; PAM sequence: GAG
  source 1..20: mol_type = other DNA
tctccaggctgggtgaatac

SEQ ID NO: 22293 - DNA, 20 bp, synthetic construct
  misc_feature 1..20: note = Description of Artificial Sequence: Synthetic oligonucleotide
  misc_feature 1..20: note = Target: SCN10A; (-) strand; PAM type: NRG; PAM sequence: GGG
  source 1..20: mol_type = other DNA
aggtaggatgtctccaggct

SEQ ID NO: 22294 - DNA, 20 bp, synthetic construct
  misc_feature 1..20: note = Description of Artificial Sequence: Synthetic oligonucleotide
  misc_feature 1..20: note = Target: SCN10A; (-) strand; PAM type: NRG; PAM sequence: TGG
  source 1..20: mol_type = other DNA
caggtaggatgtctccaggc

SEQ ID NO: 22295 - DNA, 20 bp, synthetic construct
  misc_feature 1..20: note = Description of Artificial Sequence: Synthetic oligonucleotide
  misc_feature 1..20: note = Target: SCN10A; (-) strand; PAM type: NRG; PAM sequence: AGG
  source 1..20: mol_type = other DNA
agggcaggtaggatgtctcc

SEQ ID NO: 22296 - DNA, 20 bp, synthetic construct
  misc_feature 1..20: note = Description of Artificial Sequence: Synthetic oligonucleotide
  misc_feature 1..20: note = Target: SCN10A; (-) strand; PAM type: NRG; PAM sequence: CAG
  source 1..20: mol_type = other DNA
aagggcaggtaggatgtctc

SEQ ID NO: 22297 - DNA, 20 bp, synthetic construct
  misc_feature 1..20: note = Description of Artificial Sequence: Synthetic oligonucleotide
  misc_feature 1..20: note = Target: SCN10A; (-) strand; PAM type: NRG; PAM sequence: AGG
  source 1..20: mol_type = other DNA
gtgagctttcaagggcaggt

SEQ ID NO: 22298 - DNA, 20 bp, synthetic construct
  misc_feature 1..20: note = Description of Artificial Sequence: Synthetic oligonucleotide
  misc_feature 1..20: note = Target: SCN10A; (-) strand; PAM type: NRG; PAM sequence: TAG
  source 1..20: mol_type = other DNA
ggtgagctttcaagggcagg

SEQ ID NO: 22299 - DNA, 20 bp, synthetic construct
  misc_feature 1..20: note = Description of Artificial Sequence: Synthetic oligonucleotide
  misc_feature 1..20: note = Target: SCN10A; (-) strand; PAM type: NRG; PAM sequence: AGG
  source 1..20: mol_type = other DNA
tgaggtgagctttcaagggc

SEQ ID NO: 22300 - DNA, 20 bp, synthetic construct
  misc_feature 1..20: note = Description of Artificial Sequence: Synthetic oligonucleotide
  misc_feature 1..20: note = Target: SCN10A; (-) strand; PAM type: NRG; PAM sequence: CAG
  source 1..20: mol_type = other DNA
ttgaggtgagctttcaaggg

SEQ ID NO: 22301 - DNA, 20 bp, synthetic construct
  misc_feature 1..20: note = Description of Artificial Sequence: Synthetic oligonucleotide
  misc_feature 1..20: note = Target: SCN10A; (-) strand; PAM type: NRG; PAM sequence: GGG
  source 1..20: mol_type = other DNA
tgtttgaggtgagctttcaa

SEQ ID NO: 22302 - DNA, 20 bp, synthetic construct
  misc_feature 1..20: note = Description of Artificial Sequence: Synthetic oligonucleotide
  misc_feature 1..20: note = Target: SCN10A; (-) strand; PAM type: NRG; PAM sequence: AGG
  source 1..20: mol_type = other DNA
gtgtttgaggtgagctttca

SEQ ID NO: 22303 - DNA, 20 bp, synthetic construct
  misc_feature 1..20: note = Description of Artificial Sequence: Synthetic oligonucleotide
  misc_feature 1..20: note = Target: SCN10A; (-) strand; PAM type: NRG; PAM sequence: AAG
  source 1..20: mol_type = other DNA
ggtgtttgaggtgagctttc

SEQ ID NO: 22304 - DNA, 20 bp, synthetic construct
  misc_feature 1..20: note = Description of Artificial Sequence: Synthetic oligonucleotide
  misc_feature 1..20: note = Target: SCN10A; (-) strand; PAM type: NRG; PAM sequence: GAG
  source 1..20: mol_type = other DNA
ctggaggtggtgtttgaggt

SEQ ID NO: 22305 - DNA, 20 bp, synthetic construct
  misc_feature 1..20: note = Description of Artificial Sequence: Synthetic oligonucleotide
  misc_feature 1..20: note = Target: SCN10A; (-) strand; PAM type: NRG; PAM sequence: AGG
  source 1..20: mol_type = other DNA
cttcctggaggtggtgtttg

SEQ ID NO: 22306 - DNA, 20 bp, synthetic construct
  misc_feature 1..20: note = Description of Artificial Sequence: Synthetic oligonucleotide
  misc_feature 1..20: note = Target: SCN10A; (-) strand; PAM type: NRG; PAM sequence: GAG
  source 1..20: mol_type = other DNA
gcttcctggaggtggtgttt

SEQ ID NO: 22307 - DNA, 20 bp, synthetic construct
  misc_feature 1..20: note = Description of Artificial Sequence: Synthetic oligonucleotide
  misc_feature 1..20: note = Target: SCN10A; (-) strand; PAM type: NRG; PAM sequence: TGG
  source 1..20: mol_type = other DNA
tagggaaggcttcctggagg

SEQ ID NO: 22308 - DNA, 20 bp, synthetic construct
  misc_feature 1..20: note = Description of Artificial Sequence: Synthetic oligonucleotide
  misc_feature 1..20: note = Target: SCN10A; (-) strand; PAM type: NRG; PAM sequence: AGG
  source 1..20: mol_type = other DNA
aagtagggaaggcttcctgg

SEQ ID NO: 22309 - DNA, 20 bp, synthetic construct
  misc_feature 1..20: note = Description of Artificial Sequence: Synthetic oligonucleotide
  misc_feature 1..20: note = Target: SCN10A; (-) strand; PAM type: NRG; PAM sequence: GAG
  source 1..20: mol_type = other DNA
aaagtagggaaggcttcctg

SEQ ID NO: 22310 - DNA, 20 bp, synthetic construct
  misc_feature 1..20: note = Description of Artificial Sequence: Synthetic oligonucleotide
  misc_feature 1..20: note = Target: SCN10A; (-) strand; PAM type: NRG; PAM sequence: TGG
  source 1..20: mol_type = other DNA
agaaagtagggaaggcttcc

SEQ ID NO: 22311 - DNA, 20 bp, synthetic construct
  misc_feature 1..20: note = Description of Artificial Sequence: Synthetic oligonucleotide
  misc_feature 1..20: note = Target: SCN10A; (-) strand; PAM type: NRG; PAM sequence: AGG
  source 1..20: mol_type = other DNA
ggcaagagagaaagtaggga

SEQ ID NO: 22312 - DNA, 20 bp, synthetic construct
  misc_feature 1..20: note = Description of Artificial Sequence: Synthetic oligonucleotide
  misc_feature 1..20: note = Target: SCN10A; (-) strand; PAM type: NRG; PAM sequence: AAG
  source 1..20: mol_type = other DNA
aggcaagagagaaagtaggg

SEQ ID NO: 22313 - DNA, 20 bp, synthetic construct
  misc_feature 1..20: note = Description of Artificial Sequence: Synthetic oligonucleotide
  misc_feature 1..20: note = Target: SCN10A; (-) strand; PAM type: NRG; PAM sequence: GGG
  source 1..20: mol_type = other DNA
gtgaggcaagagagaaagta

SEQ ID NO: 22314 - DNA, 20 bp, synthetic construct
  misc_feature 1..20: note = Description of Artificial Sequence: Synthetic oligonucleotide
  misc_feature 1..20: note = Target: SCN10A; (-) strand; PAM type: NRG; PAM sequence: AGG
  source 1..20: mol_type = other DNA
tgtgaggcaagagagaaagt

SEQ ID NO: 22315 - DNA, 20 bp, synthetic construct
  misc_feature 1..20: note = Description of Artificial Sequence: Synthetic oligonucleotide
  misc_feature 1..20: note = Target: SCN10A; (-) strand; PAM type: NRG; PAM sequence: TAG
  source 1..20: mol_type = other DNA
gtgtgaggcaagagagaaag

SEQ ID NO: 22316 - DNA, 20 bp, synthetic construct
  misc_feature 1..20: note = Description of Artificial Sequence: Synthetic oligonucleotide
  misc_feature 1..20: note = Target: SCN10A; (-) strand; PAM type: NRG; PAM sequence: AAG
  source 1..20: mol_type = other DNA
gcggtgtgaggcaagagaga

SEQ ID NO: 22317 - DNA, 20 bp, synthetic construct
  misc_feature 1..20: note = Description of Artificial Sequence: Synthetic oligonucleotide
  misc_feature 1..20: note = Target: SCN10A; (-) strand; PAM type: NRG; PAM sequence: GAG
  source 1..20: mol_type = other DNA
ggtggcggtgtgaggcaaga

SEQ ID NO: 22318 - DNA, 20 bp, synthetic construct
  misc_feature 1..20: note = Description of Artificial Sequence: Synthetic oligonucleotide
  misc_feature 1..20: note = Target: SCN10A; (-) strand; PAM type: NRG; PAM sequence: GAG
  source 1..20: mol_type = other DNA
gaggtggcggtgtgaggcaa

SEQ ID NO: 22319 - DNA, 20 bp, synthetic construct
  misc_feature 1..20: note = Description of Artificial Sequence: Synthetic oligonucleotide
  misc_feature 1..20: note = Target: SCN10A; (-) strand; PAM type: NRG; PAM sequence: AAG
  source 1..20: mol_type = other DNA
gtgaggtggcggtgtgaggc

SEQ ID NO: 22320 - DNA, 20 bp, synthetic construct
  misc_feature 1..20: note = Description of Artificial Sequence: Synthetic oligonucleotide
  misc_feature 1..20: note = Target: SCN10A; (-) strand; PAM type: NRG; PAM sequence: AGG
  source 1..20: mol_type = other DNA
cacagtgaggtggcggtgtg

SEQ ID NO: 22321 - DNA, 20 bp, synthetic construct
  misc_feature 1..20: note = Description of Artificial Sequence: Synthetic oligonucleotide
  misc_feature 1..20: note = Target: SCN10A; (-) strand; PAM type: NRG; PAM sequence: GAG
  source 1..20: mol_type = other DNA
acacagtgaggtggcggtgt

SEQ ID NO: 22322 - DNA, 20 bp, synthetic construct
  misc_feature 1..20: note = Description of Artificial Sequence: Synthetic oligonucleotide
  misc_feature 1..20: note = Target: SCN10A; (-) strand; PAM type: NRG; PAM sequence: CGG
  source 1..20: mol_type = other DNA
gggcaaacacagtgaggtgg

SEQ ID NO: 22323 - DNA, 20 bp, synthetic construct
  misc_feature 1..20: note = Description of Artificial Sequence: Synthetic oligonucleotide
  misc_feature 1..20: note = Target: SCN10A; (-) strand; PAM type: NRG; PAM sequence: TGG
  source 1..20: mol_type = other DNA
gctgggcaaacacagtgagg

SEQ ID NO: 22324 - DNA, 20 bp, synthetic construct
  misc_feature 1..20: note = Description of Artificial Sequence: Synthetic oligonucleotide
  misc_feature 1..20: note = Target: SCN10A; (-) strand; PAM type: NRG; PAM sequence: AGG
  source 1..20: mol_type = other DNA
taggctgggcaaacacagtg

SEQ ID NO: 22325 - DNA, 20 bp, synthetic construct
  misc_feature 1..20: note = Description of Artificial Sequence: Synthetic oligonucleotide
  misc_feature 1..20: note = Target: SCN10A; (-) strand; PAM type: NRG; PAM sequence: GAG
  source 1..20: mol_type = other DNA
ataggctgggcaaacacagt

SEQ ID NO: 22326 - DNA, 20 bp, synthetic construct
  misc_feature 1..20: note = Description of Artificial Sequence: Synthetic oligonucleotide
  misc_feature 1..20: note = Target: SCN10A; (-) strand; PAM type: NRG; PAM sequence: CAG
  source 1..20: mol_type = other DNA
cttcataggctgggcaaaca

SEQ ID NO: 22327 - DNA, 20 bp, synthetic construct
  misc_feature 1..20: note = Description of Artificial Sequence: Synthetic oligonucleotide
  misc_feature 1..20: note = Target: SCN10A; (-) strand; PAM type: NRG; PAM sequence: GGG
  source 1..20: mol_type = other DNA
tactagaggcttcataggct

SEQ ID NO: 22328 - DNA, 20 bp, synthetic construct
  misc_feature 1..20: note = Description of Artificial Sequence: Synthetic oligonucleotide
  misc_feature 1..20: note = Target: SCN10A; (-) strand; PAM type: NRG; PAM sequence: TGG
  source 1..20: mol_type = other DNA
ttactagaggcttcataggc

SEQ ID NO: 22329 - DNA, 20 bp, synthetic construct
  misc_feature 1..20: note = Description of Artificial Sequence: Synthetic oligonucleotide
  misc_feature 1..20: note = Target: SCN10A; (-) strand; PAM type: NRG; PAM sequence: AGG
  source 1..20: mol_type = other DNA
ttctttactagaggcttcat

SEQ ID NO: 22330 - DNA, 20 bp, synthetic construct
  misc_feature 1..20: note = Description of Artificial Sequence: Synthetic oligonucleotide
  misc_feature 1..20: note = Target: SCN10A; (-) strand; PAM type: NRG; PAM sequence: TAG
  source 1..20: mol_type = other DNA
gttctttactagaggcttca

SEQ ID NO: 22331 - DNA, 20 bp, synthetic construct
  misc_feature 1..20: note = Description of Artificial Sequence: Synthetic oligonucleotide
  misc_feature 1..20: note = Target: SCN10A; (-) strand; PAM type: NRG; PAM sequence: AGG
  source 1..20: mol_type = other DNA
gaaaacaagttctttactag

SEQ ID NO: 22332 - DNA, 20 bp, synthetic construct
  misc_feature 1..20: note = Description of Artificial Sequence: Synthetic oligonucleotide
  misc_feature 1..20: note = Target: SCN10A; (-) strand; PAM type: NRG; PAM sequence: GAG
  source 1..20: mol_type = other DNA
ggaaaacaagttctttacta

SEQ ID NO: 22333 - DNA, 20 bp, synthetic construct
  misc_feature 1..20: note = Description of Artificial Sequence: Synthetic oligonucleotide
  misc_feature 1..20: note = Target: SCN10A; (-) strand; PAM type: NRG; PAM sequence: TAG
  source 1..20: mol_type = other DNA
gtggaaaacaagttctttac

SEQ ID NO: 22334 - DNA, 20 bp, synthetic construct
  misc_feature 1..20: note = Description of Artificial Sequence: Synthetic oligonucleotide
  misc_feature 1..20: note = Target: SCN10A; (-) strand; PAM type: NRG; PAM sequence: AAG
  source 1..20: mol_type = other DNA
gatgctaccctgtggaaaac

SEQ ID NO: 22335 - DNA, 20 bp, synthetic construct
  misc_feature 1..20: note = Description of Artificial Sequence: Synthetic oligonucleotide
  misc_feature 1..20: note = Target: SCN10A; (-) strand; PAM type: NRG; PAM sequence: TGG
  source 1..20: mol_type = other DNA
gacataaagatgctaccctg

SEQ ID NO: 22336 - DNA, 20 bp, synthetic construct
  misc_feature 1..20: note = Description of Artificial Sequence: Synthetic oligonucleotide
  misc_feature 1..20: note = Target: SCN10A; (-) strand; PAM type: NRG; PAM sequence: AAG
  source 1..20: mol_type = other DNA
atttctcattcatagacata

SEQ ID NO: 22337 - DNA, 20 bp, synthetic construct
  misc_feature 1..20: note = Description of Artificial Sequence: Synthetic oligonucleotide
  misc_feature 1..20: note = Target: SCN10A; (-) strand; PAM type: NRG; PAM sequence: TAG
  source 1..20: mol_type = other DNA
agtttgcaatttctcattca

SEQ ID NO: 22338 - DNA, 20 bp, synthetic construct
  misc_feature 1..20: note = Description of Artificial Sequence: Synthetic oligonucleotide
  misc_feature 1..20: note = Target: SCN10A; (-) strand; PAM type: NRG; PAM sequence: TAG
  source 1..20: mol_type = other DNA
aaatccagcctataagctgc

SEQ ID NO: 22339 - DNA, 20 bp, synthetic construct
  misc_feature 1..20: note = Description of Artificial Sequence: Synthetic oligonucleotide
  misc_feature 1..20: note = Target: SCN10A; (-) strand; PAM type: NRG; PAM sequence: AAG
  source 1..20: mol_type = other DNA
gtgggccaaatccagcctat

SEQ ID NO: 22340 - DNA, 20 bp, synthetic construct
  misc_feature 1..20: note = Description of Artificial Sequence: Synthetic oligonucleotide
  misc_feature 1..20: note = Target: SCN10A; (-) strand; PAM type: NRG; PAM sequence: CAG
  source 1..20: mol_type = other DNA
atatttctgtgggccaaatc

SEQ ID NO: 22341 - DNA, 20 bp, synthetic construct
  misc_feature 1..20: note = Description of Artificial Sequence: Synthetic oligonucleotide
  misc_feature 1..20: note = Target: SCN10A; (-) strand; PAM type: NRG; PAM sequence: GGG
  source 1..20: mol_type = other DNA
gccaaacaaaatatttctgt

SEQ ID NO: 22342 - DNA, 20 bp, synthetic construct
  misc_feature 1..20: note = Description of Artificial Sequence: Synthetic oligonucleotide
  misc_feature 1..20: note = Target: SCN10A; (-) strand; PAM type: NRG; PAM sequence: TGG
  source 1..20: mol_type = other DNA
ggccaaacaaaatatttctg

SEQ ID NO: 22343 - DNA, 20 bp, synthetic construct
  misc_feature 1..20: note = Description of Artificial Sequence: Synthetic oligonucleotide
  misc_feature 1..20: note = Target: SCN10A; (-) strand; PAM type: NRG; PAM sequence: GGG
  source 1..20: mol_type = other DNA
aaaaatgtctacatattgtt

SEQ ID NO: 22344 - DNA, 20 bp, synthetic construct
  misc_feature 1..20: note = Description of Artificial Sequence: Synthetic oligonucleotide
  misc_feature 1..20: note = Target: SCN10A; (-) strand; PAM type: NRG; PAM sequence: TGG
  source 1..20: mol_type = other DNA
aaaaaatgtctacatattgt

SEQ ID NO: 22345 - DNA, 20 bp, synthetic construct
  misc_feature 1..20: note = Description of Artificial Sequence: Synthetic oligonucleotide
  misc_feature 1..20: note = Target: SCN10A; (-) strand; PAM type: NRG; PAM sequence: TGG
  source 1..20: mol_type = other DNA
aatctcccaaccgtaaacat

SEQ ID NO: 22346 - DNA, 20 bp, synthetic construct
  misc_feature 1..20: note = Description of Artificial Sequence: Synthetic oligonucleotide
  misc_feature 1..20: note = Target: SCN10A; (-) strand; PAM type: NRG; PAM sequence: TAG
  source 1..20: mol_type = other DNA
taaaatagagataggaaatt

SEQ ID NO: 22347 - DNA, 20 bp, synthetic construct
  misc_feature 1..20: note = Description of Artificial Sequence: Synthetic oligonucleotide
  misc_feature 1..20: note = Target: SCN10A; (-) strand; PAM type: NRG; PAM sequence: AGG
  source 1..20: mol_type = other DNA
ccaacttttaaaatagagat

SEQ ID NO: 22348 - DNA, 20 bp, synthetic construct
  misc_feature 1..20: note = Description of Artificial Sequence: Synthetic oligonucleotide
  misc_feature 1..20: note = Target: SCN10A; (-) strand; PAM type: NRG; PAM sequence: TAG
  source 1..20: mol_type = other DNA
tccaacttttaaaatagaga

SEQ ID NO: 22349 - DNA, 20 bp, synthetic construct
  misc_feature 1..20: note = Description of Artificial Sequence: Synthetic oligonucleotide
  misc_feature 1..20: note = Target: SCN10A; (-) strand; PAM type: NRG; PAM sequence: GAG
  source 1..20: mol_type = other DNA
ctcttccaacttttaaaata

SEQ ID NO: 22350 - DNA, 20 bp, synthetic construct
  misc_feature 1..20: note = Description of Artificial Sequence: Synthetic oligonucleotide
  misc_feature 1..20: note = Target: SCN10A; (-) strand; PAM type: NRG; PAM sequence: TAG
  source 1..20: mol_type = other DNA
agctcttccaacttttaaaa

SEQ ID NO: 22351 - DNA, 20 bp, synthetic construct
  misc_feature 1..20: note = Description of Artificial Sequence: Synthetic oligonucleotide
  misc_feature 1..20: note = Target: SCN10A; (-) strand; PAM type: NRG; PAM sequence: CAG
  source 1..20: mol_type = other DNA
aaatgtgggttcactgtttc

SEQ ID NO: 22352 - DNA, 20 bp, synthetic construct
  misc_feature 1..20: note = Description of Artificial Sequence: Synthetic oligonucleotide
  misc_feature 1..20: note = Target: SCN10A; (-) strand; PAM type: NRG; PAM sequence: GGG
  source 1..20: mol_type = other DNA
tggttgccatgtggaaatgt

SEQ ID NO: 22353 - DNA, 20 bp, synthetic construct
  misc_feature 1..20: note = Description of Artificial Sequence: Synthetic oligonucleotide
  misc_feature 1..20: note = Target: SCN10A; (-) strand; PAM type: NRG; PAM sequence: TGG
  source 1..20: mol_type = other DNA
ttggttgccatgtggaaatg

SEQ ID NO: 22354 - DNA, 20 bp, synthetic construct
  misc_feature 1..20: note = Description of Artificial Sequence: Synthetic oligonucleotide
  misc_feature 1..20: note = Target: SCN10A; (-) strand; PAM type: NRG; PAM sequence: TGG
  source 1..20: mol_type = other DNA
tccagcttttggttgccatg

SEQ ID NO: 22355 - DNA, 20 bp, synthetic construct
  misc_feature 1..20: note = Description of Artificial Sequence: Synthetic oligonucleotide
  misc_feature 1..20: note = Target: SCN10A; (-) strand; PAM type: NRG; PAM sequence: TGG
  source 1..20: mol_type = other DNA
ccactgctcggtccagcttt

SEQ ID NO: 22356 - DNA, 20 bp, synthetic construct
  misc_feature 1..20: note = Description of Artificial Sequence: Synthetic oligonucleotide
  misc_feature 1..20: note = Target: SCN10A; (-) strand; PAM type: NRG; PAM sequence: CAG
  source 1..20: mol_type = other DNA
gacagccccactgctcggtc

SEQ ID NO: 22357 - DNA, 20 bp, synthetic construct
  misc_feature 1..20: note = Description of Artificial Sequence: Synthetic oligonucleotide
  misc_feature 1..20: note = Target: SCN10A; (-) strand; PAM type: NRG; PAM sequence: CGG
  source 1..20: mol_type = other DNA
aaggggacagccccactgct

SEQ ID NO: 22358 - DNA, 20 bp, synthetic construct
  misc_feature 1..20: note = Description of Artificial Sequence: Synthetic oligonucleotide
  misc_feature 1..20: note = Target: SCN10A; (-) strand; PAM type: NRG; PAM sequence: CAG
  source 1..20: mol_type = other DNA
catgcctcctctaaagggga

SEQ ID NO: 22359 - DNA, 20 bp, synthetic construct
  misc_feature 1..20: note = Description of Artificial Sequence: Synthetic oligonucleotide
  misc_feature 1..20: note = Target: SCN10A; (-) strand; PAM type: NRG; PAM sequence: GGG
  source 1..20: mol_type = other DNA
agttcatgcctcctctaaag

SEQ ID NO: 22360 - DNA, 20 bp, synthetic construct
  misc_feature 1..20: note = Description of Artificial Sequence: Synthetic oligonucleotide
  misc_feature 1..20: note = Target: SCN10A; (-) strand; PAM type: NRG; PAM sequence: GGG
  source 1..20: mol_type = other DNA
gagttcatgcctcctctaaa

SEQ ID NO: 22361 - DNA, 20 bp, synthetic construct
  misc_feature 1..20: note = Description of Artificial Sequence: Synthetic oligonucleotide
  misc_feature 1..20: note = Target: SCN10A; (-) strand; PAM type: NRG; PAM sequence: AGG
  source 1..20: mol_type = other DNA
agagttcatgcctcctctaa

SEQ ID NO: 22362 - DNA, 20 bp, synthetic construct
  misc_feature 1..20: note = Description of Artificial Sequence: Synthetic oligonucleotide
  misc_feature 1..20: note = Target: SCN10A; (-) strand; PAM type: NRG; PAM sequence: AAG
  source 1..20: mol_type = other DNA
gagagttcatgcctcctcta

SEQ ID NO: 22363 - DNA, 20 bp, synthetic construct
  misc_feature 1..20: note = Description of Artificial Sequence: Synthetic oligonucleotide
  misc_feature 1..20: note = Target: SCN10A; (-) strand; PAM type: NRG; PAM sequence: GAG
  source 1..20: mol_type = other DNA
ggagggaacctaggagctga

SEQ ID NO: 22364 - DNA, 20 bp, synthetic construct
  misc_feature 1..20: note = Description of Artificial Sequence: Synthetic oligonucleotide
  misc_feature 1..20: note = Target: SCN10A; (-) strand; PAM type: NRG; PAM sequence: GAG
  source 1..20: mol_type = other DNA
caggagggaacctaggagct

SEQ ID NO: 22365 - DNA, 20 bp, synthetic construct
  misc_feature 1..20: note = Description of Artificial Sequence: Synthetic oligonucleotide
  misc_feature 1..20: note = Target: SCN10A; (-) strand; PAM type: NRG; PAM sequence: GAG
  source 1..20: mol_type = other DNA
tgggccaggagggaacctag

SEQ ID NO: 22366 - DNA, 20 bp, synthetic construct
  misc_feature 1..20: note = Description of Artificial Sequence: Synthetic oligonucleotide
  misc_feature 1..20: note = Target: SCN10A; (-) strand; PAM type: NRG; PAM sequence: AGG
  source 1..20: mol_type = other DNA
agtgggccaggagggaacct

SEQ ID NO: 22367 - DNA, 20 bp, synthetic construct
  misc_feature 1..20: note = Description of Artificial Sequence: Synthetic oligonucleotide
  misc_feature 1..20: note = Target: SCN10A; (-) strand; PAM type: NRG; PAM sequence: TAG
  source 1..20: mol_type = other DNA
gagtgggccaggagggaacc

SEQ ID NO: 22368 - DNA, 20 bp, synthetic construct
  misc_feature 1..20: note = Description of Artificial Sequence: Synthetic oligonucleotide
  misc_feature 1..20: note = Target: SCN10A; (-) strand; PAM type: NRG; PAM sequence: GGG
  source 1..20: mol_type = other DNA
atgagtggagtgggccagga

SEQ ID NO: 22369 - DNA, 20 bp, synthetic construct
  misc_feature 1..20: note = Description of Artificial Sequence: Synthetic oligonucleotide
  misc_feature 1..20: note = Target: SCN10A; (-) strand; PAM type: NRG; PAM sequence: AGG
  source 1..20: mol_type = other DNA
aatgagtggagtgggccagg

SEQ ID NO: 22370 - DNA, 20 bp, synthetic construct
  misc_feature 1..20: note = Description of Artificial Sequence: Synthetic oligonucleotide
  misc_feature 1..20: note = Target: SCN10A; (-) strand; PAM type: NRG; PAM sequence: GAG
  source 1..20: mol_type = other DNA
aaatgagtggagtgggccag

SEQ ID NO: 22371 - DNA, 20 bp, synthetic construct
  misc_feature 1..20: note = Description of Artificial Sequence: Synthetic oligonucleotide
  misc_feature 1..20: note = Target: SCN10A; (-) strand; PAM type: NRG; PAM sequence: AGG
  source 1..20: mol_type = other DNA
acaaatgagtggagtgggcc

SEQ ID NO: 22372 - DNA, 20 bp, synthetic construct
  misc_feature 1..20: note = Description of Artificial Sequence: Synthetic oligonucleotide
  misc_feature 1..20: note = Target: SCN10A; (-) strand; PAM type: NRG; PAM sequence: CAG
  source 1..20: mol_type = other DNA
aacaaatgagtggagtgggc

SEQ ID NO: 22373 - DNA, 20 bp, synthetic construct
  misc_feature 1..20: note = Description of Artificial Sequence: Synthetic oligonucleotide
  misc_feature 1..20: note = Target: SCN10A; (-) strand; PAM type: NRG; PAM sequence: GGG
  source 1..20: mol_type = other DNA
taacaacaaatgagtggagt

SEQ ID NO: 22374 - DNA, 20 bp, synthetic construct
  misc_feature 1..20: note = Description of Artificial Sequence: Synthetic oligonucleotide
  misc_feature 1..20: note = Target: SCN10A; (-) strand; PAM type: NRG; PAM sequence: TGG
  source 1..20: mol_type = other DNA
ataacaacaaatgagtggag

SEQ ID NO: 22375 - DNA, 20 bp, synthetic construct
  misc_feature 1..20: note = Description of Artificial Sequence: Synthetic oligonucleotide
  misc_feature 1..20: note = Target: SCN10A; (-) strand; PAM type: NRG; PAM sequence: GAG
  source 1..20: mol_type = other DNA
ttcataacaacaaatgagtg

SEQ ID NO: 22376 - DNA, 20 bp, synthetic construct
  misc_feature 1..20: note = Description of Artificial Sequence: Synthetic oligonucleotide
  misc_feature 1..20: note = Target: SCN10A; (-) strand; PAM type: NRG; PAM sequence: TGG
  source 1..20: mol_type = other DNA
gattcataacaacaaatgag

SEQ ID NO: 22377 - DNA, 20 bp, synthetic construct
  misc_feature 1..20: note = Description of Artificial Sequence: Synthetic oligonucleotide
  misc_feature 1..20: note = Target: SCN10A; (-) strand; PAM type: NRG; PAM sequence: GAG
  source 1..20: mol_type = other DNA
ccagattcataacaacaaat

SEQ ID NO: 22378 - DNA, 20 bp, synthetic construct
  misc_feature 1..20: note = Description of Artificial Sequence: Synthetic oligonucleotide
  misc_feature 1..20: note = Target: SCN10A; (-) strand; PAM type: NRG; PAM sequence: CAG
  source 1..20: mol_type = other DNA
tttcgaattcttacagaggc

SEQ ID NO: 22379 - DNA, 20 bp, synthetic construct
  misc_feature 1..20: note = Description of Artificial Sequence: Synthetic oligonucleotide
  misc_feature 1..20: note = Target: SCN10A; (-) strand; PAM type: NRG; PAM sequence: AGG
  source 1..20: mol_type = other DNA
gcaatttcgaattcttacag

SEQ ID NO: 22380 - DNA, 20 bp, synthetic construct
  misc_feature 1..20: note = Description of Artificial Sequence: Synthetic oligonucleotide
  misc_feature 1..20: note = Target: SCN10A; (-) strand; PAM type: NRG; PAM sequence: GAG
  source 1..20: mol_type = other DNA
tgcaatttcgaattcttaca

SEQ ID NO: 22381 - DNA, 20 bp, synthetic construct
  misc_feature 1..20: note = Description of Artificial Sequence: Synthetic oligonucleotide
  misc_feature 1..20: note = Target: SCN10A; (-) strand; PAM type: NRG; PAM sequence: CAG
  source 1..20: mol_type = other DNA
tttgcaatttcgaattctta

SEQ ID NO: 22382 - DNA, 20 bp, synthetic construct
  misc_feature 1..20: note = Description of Artificial Sequence: Synthetic oligonucleotide
  misc_feature 1..20: note = Target: SCN10A; (-) strand; PAM type: NRG; PAM sequence: CAG
  source 1..20: mol_type = other DNA
agaggaaaaaacacatgtat

SEQ ID NO: 22383 - DNA, 20 bp, synthetic construct
  misc_feature 1..20: note = Description of Artificial Sequence: Synthetic oligonucleotide
  misc_feature 1..20: note = Target: SCN10A; (-) strand; PAM type: NRG; PAM sequence: AGG
  source 1..20: mol_type = other DNA
cacattaccctcacaagtag

SEQ ID NO: 22384 - DNA, 20 bp, synthetic construct
  misc_feature 1..20: note = Description of Artificial Sequence: Synthetic oligonucleotide
  misc_feature 1..20: note = Target: SCN10A; (-) strand; PAM type: NRG; PAM sequence: GAG
  source 1..20: mol_type = other DNA
ccacattaccctcacaagta

SEQ ID NO: 22385 - DNA, 20 bp, synthetic construct
  misc_feature 1..20: note = Description of Artificial Sequence: Synthetic oligonucleotide
  misc_feature 1..20: note = Target: SCN10A; (-) strand; PAM type: NRG; PAM sequence: TAG
  source 1..20: mol_type = other DNA
agccacattaccctcacaag

SEQ ID NO: 22386 - DNA, 20 bp, synthetic construct
  misc_feature 1..20: note = Description of Artificial Sequence: Synthetic oligonucleotide
  misc_feature 1..20: note = Target: SCN10A; (-) strand; PAM type: NRG; PAM sequence: AAG
  source 1..20: mol_type = other DNA
tatagccacattaccctcac

SEQ ID NO: 22387 - DNA, 20 bp, synthetic construct
  misc_feature 1..20: note = Description of Artificial Sequence: Synthetic oligonucleotide
  misc_feature 1..20: note = Target: SCN10A; (-) strand; PAM type: NRG; PAM sequence: TAG
  source 1..20: mol_type = other DNA
tcacagctaactccattcta

SEQ ID NO: 22388 - DNA, 20 bp, synthetic construct
  misc_feature 1..20: note = Description of Artificial Sequence: Synthetic oligonucleotide
  misc_feature 1..20: note = Target: SCN10A; (-) strand; PAM type: NRG; PAM sequence: CAG
  source 1..20: mol_type = other DNA
tgctctacacttaatcatca

SEQ ID NO: 22389 - DNA, 20 bp, synthetic construct
  misc_feature 1..20: note = Description of Artificial Sequence: Synthetic oligonucleotide
  misc_feature 1..20: note = Target: SCN10A; (-) strand; PAM type: NRG; PAM sequence: AGG
  source 1..20: mol_type = other DNA
ataaataatctaccccagga

SEQ ID NO: 22390 - DNA, 20 bp, synthetic construct
  misc_feature 1..20: note = Description of Artificial Sequence: Synthetic oligonucleotide
  misc_feature 1..20: note = Target: SCN10A; (-) strand; PAM type: NRG; PAM sequence: AAG
  source 1..20: mol_type = other DNA
aataaataatctaccccagg

SEQ ID NO: 22391 - DNA, 20 bp, synthetic construct
  misc_feature 1..20: note = Description of Artificial Sequence: Synthetic oligonucleotide
  misc_feature 1..20: note = Target: SCN10A; (-) strand; PAM type: NRG; PAM sequence: AGG
  source 1..20: mol_type = other DNA
tttaataaataatctacccc

SEQ ID NO: 22392 - DNA, 20 bp, synthetic construct
  misc_feature 1..20: note = Description of Artificial Sequence: Synthetic oligonucleotide
  misc_feature 1..20: note = Target: SCN10A; (-) strand; PAM type: NRG; PAM sequence: CAG
  source 1..20: mol_type = other DNA
ttttaataaataatctaccc

SEQ ID NO: 22393 - DNA, 20 bp, synthetic construct
  misc_feature 1..20: note = Description of Artificial Sequence: Synthetic oligonucleotide
  misc_feature 1..20: note = Target: SCN10A; (-) strand; PAM type: NRG; PAM sequence: TAG
  source 1..20: mol_type = other DNA
atacatagagacaagaatta

SEQ ID NO: 22394 - DNA, 20 bp, synthetic construct
  misc_feature 1..20: note = Description of Artificial Sequence: Synthetic oligonucleotide
  misc_feature 1..20: note = Target: SCN10A; (-) strand; PAM type: NRG; PAM sequence: AAG
  source 1..20: mol_type = other DNA
gggtgtggatacatagagac

SEQ ID NO: 22395 - DNA, 20 bp, synthetic construct
  misc_feature 1..20: note = Description of Artificial Sequence: Synthetic oligonucleotide
  misc_feature 1..20: note = Target: SCN10A; (-) strand; PAM type: NRG; PAM sequence: GAG
  source 1..20: mol_type = other DNA
ggaaagggtgtggatacata

SEQ ID NO: 22396 - DNA, 20 bp, synthetic construct
  misc_feature 1..20: note = Description of Artificial Sequence: Synthetic oligonucleotide
  misc_feature 1..20: note = Target: SCN10A; (-) strand; PAM type: NRG; PAM sequence: TAG
  source 1..20: mol_type = other DNA
ttggaaagggtgtggataca

SEQ ID NO: 22397 - DNA, 20 bp, synthetic construct
  misc_feature 1..20: note = Description of Artificial Sequence: Synthetic oligonucleotide
  misc_feature 1..20: note = Target: SCN10A; (-) strand; PAM type: NRG; PAM sequence: TGG
  source 1..20: mol_type = other DNA
aagtcacattggaaagggtg

SEQ ID NO: 22398 - DNA, 20 bp, synthetic construct
  misc_feature 1..20: note = Description of Artificial Sequence: Synthetic oligonucleotide
  misc_feature 1..20: note = Target: SCN10A; (-) strand; PAM type: NRG; PAM sequence: GGG
  source 1..20: mol_type = other DNA
ctgaaaagtcacattggaaa

SEQ ID NO: 22399 - DNA, 20 bp, synthetic construct
  misc_feature 1..20: note = Description of Artificial Sequence: Synthetic oligonucleotide
  misc_feature 1..20: note = Target: SCN10A; (-) strand; PAM type: NRG; PAM sequence: AGG
  source 1..20: mol_type = other DNA
gctgaaaagtcacattggaa

SEQ ID NO: 22400 - DNA, 20 bp, synthetic construct
  misc_feature 1..20: note = Description of Artificial Sequence: Synthetic oligonucleotide
  misc_feature 1..20: note = Target: SCN10A; (-) strand; PAM type: NRG; PAM sequence: AAG
  source 1..20: mol_type = other DNA
agctgaaaagtcacattgga

SEQ ID NO: 22401 - DNA, 20 bp, synthetic construct
  misc_feature 1..20: note = Description of Artificial Sequence: Synthetic oligonucleotide
  misc_feature 1..20: note = Target: SCN10A; (-) strand; PAM type: NRG; PAM sequence: TGG
  source 1..20: mol_type = other DNA
aaagagctgaaaagtcacat

SEQ ID NO: 22402 - DNA, 20 bp, synthetic construct
  misc_feature 1..20: note = Description of Artificial Sequence: Synthetic oligonucleotide
  misc_feature 1..20: note = Target: SCN10A; (-) strand; PAM type: NRG; PAM sequence: AAG
  source 1..20: mol_type = other DNA
actcaatggaaagagctgaa

SEQ ID NO: 22403 - DNA, 20 bp, synthetic construct
  misc_feature 1..20: note = Description of Artificial Sequence: Synthetic oligonucleotide
  misc_feature 1..20: note = Target: SCN10A; (-) strand; PAM type: NRG; PAM sequence: GAG
  source 1..20: mol_type = other DNA
acttcatcactcaatggaaa

SEQ ID NO: 22404 - DNA, 20 bp, synthetic construct
  misc_feature 1..20: note = Description of Artificial Sequence: Synthetic oligonucleotide
  misc_feature 1..20: note = Target: SCN10A; (-) strand; PAM type: NRG; PAM sequence: AAG
  source 1..20: mol_type = other DNA
agacttcatcactcaatgga

SEQ ID NO: 22405 - DNA, 20 bp, synthetic construct
  misc_feature 1..20: note = Description of Artificial Sequence: Synthetic oligonucleotide
  misc_feature 1..20: note = Target: SCN10A; (-) strand; PAM type: NRG; PAM sequence: TGG
  source 1..20: mol_type = other DNA
aaatagacttcatcactcaa

SEQ ID NO: 22406 - DNA, 20 bp, synthetic construct
  misc_feature 1..20: note = Description of Artificial Sequence: Synthetic oligonucleotide
  misc_feature 1..20: note = Target: SCN10A; (-) strand; PAM type: NRG; PAM sequence: TAG
  source 1..20: mol_type = other DNA
agatccaagagacagagaaa

SEQ ID NO: 22407 - DNA, 20 bp, synthetic construct
  misc_feature 1..20: note = Description of Artificial Sequence: Synthetic oligonucleotide
  misc_feature 1..20: note = Target: SCN10A; (-) strand; PAM type: NRG; PAM sequence: GAG
  source 1..20: mol_type = other DNA
cagtagagatccaagagaca

SEQ ID NO: 22408 - DNA, 20 bp, synthetic construct
  misc_feature 1..20: note = Description of Artificial Sequence: Synthetic oligonucleotide
  misc_feature 1..20: note = Target: SCN10A; (-) strand; PAM type: NRG; PAM sequence: CAG
  source 1..20: mol_type = other DNA
tccagtagagatccaagaga

SEQ ID NO: 22409 - DNA, 20 bp, synthetic construct
  misc_feature 1..20: note = Description of Artificial Sequence: Synthetic oligonucleotide
  misc_feature 1..20: note = Target: SCN10A; (-) strand; PAM type: NRG; PAM sequence: GAG
  source 1..20: mol_type = other DNA
gcagtccagtagagatccaa

SEQ ID NO: 22410 - DNA, 20 bp, synthetic construct
  misc_feature 1..20: note = Description of Artificial Sequence: Synthetic oligonucleotide
  misc_feature 1..20: note = Target: SCN10A; (-) strand; PAM type: NRG; PAM sequence: AAG
  source 1..20: mol_type = other DNA
ttgcagtccagtagagatcc

SEQ ID NO: 22411 - DNA, 20 bp, synthetic construct
  misc_feature 1..20: note = Description of Artificial Sequence: Synthetic oligonucleotide
  misc_feature 1..20: note = Target: SCN10A; (-) strand; PAM type: NRG; PAM sequence: GAG
  source 1..20: mol_type = other DNA
aagcaagttgcagtccagta

SEQ ID NO: 22412 - DNA, 20 bp, synthetic construct
  misc_feature 1..20: note = Description of Artificial Sequence: Synthetic oligonucleotide
  misc_feature 1..20: note = Target: SCN10A; (-) strand; PAM type: NRG; PAM sequence: TAG
  source 1..20: mol_type = other DNA
taaagcaagttgcagtccag

SEQ ID NO: 22413 - DNA, 20 bp, synthetic construct
  misc_feature 1..20: note = Description of Artificial Sequence: Synthetic oligonucleotide
  misc_feature 1..20: note = Target: SCN10A; (-) strand; PAM type: NRG; PAM sequence: CAG
  source 1..20: mol_type = other DNA
gactaaagcaagttgcagtc

SEQ ID NO: 22414 - DNA, 20 bp, synthetic construct
  misc_feature 1..20: note = Description of Artificial Sequence: Synthetic oligonucleotide
  misc_feature 1..20: note = Target: SCN10A; (-) strand; PAM type: NRG; PAM sequence: CAG
  source 1..20: mol_type = other DNA
ttcttgactaaagcaagttg

SEQ ID NO: 22415 - DNA, 20 bp, synthetic construct
  misc_feature 1..20: note = Description of Artificial Sequence: Synthetic oligonucleotide
  misc_feature 1..20: note = Target: SCN10A; (-) strand; PAM type: NRG; PAM sequence: AAG
  source 1..20: mol_type = other DNA
gatacattcttgactaaagc

SEQ ID NO: 22416 - DNA, 20 bp, synthetic construct
  misc_feature 1..20: note = Description of Artificial Sequence: Synthetic oligonucleotide
  misc_feature 1..20: note = Target: SCN10A; (-) strand; PAM type: NRG; PAM sequence: AAG
  source 1..20: mol_type = other DNA
ttctgatacattcttgacta

SEQ ID NO: 22417 - DNA, 20 bp, synthetic construct
  misc_feature 1..20: note = Description of Artificial Sequence: Synthetic oligonucleotide
  misc_feature 1..20: note = Target: SCN10A; (-) strand; PAM type: NRG; PAM sequence: TAG
  source 1..20: mol_type = other DNA
ggcttcttcaggcctaggct

SEQ ID NO: 22418 - DNA, 20 bp, synthetic construct
  misc_feature 1..20: note = Description of Artificial Sequence: Synthetic oligonucleotide
  misc_feature 1..20: note = Target: SCN10A; (-) strand; PAM type: NRG; PAM sequence: AGG
  source 1..20: mol_type = other DNA
tgcaaggcttcttcaggcct

SEQ ID NO: 22419 - DNA, 20 bp, synthetic construct
  misc_feature 1..20: note = Description of Artificial Sequence: Synthetic oligonucleotide
  misc_feature 1..20: note = Target: SCN10A; (-) strand; PAM type: NRG; PAM sequence: TAG
  source 1..20: mol_type = other DNA
ttgcaaggcttcttcaggcc

SEQ ID NO: 22420 - DNA, 20 bp, synthetic construct
  misc_feature 1..20: note = Description of Artificial Sequence: Synthetic oligonucleotide
  misc_feature 1..20: note = Target: SCN10A; (-) strand; PAM type: NRG; PAM sequence: AGG
  source 1..20: mol_type = other DNA
gaagtttgcaaggcttcttc

SEQ ID NO: 22421 - DNA, 20 bp, synthetic construct
  misc_feature 1..20: note = Description of Artificial Sequence: Synthetic oligonucleotide
  misc_feature 1..20: note = Target: SCN10A; (-) strand; PAM type: NRG; PAM sequence: CAG
  source 1..20: mol_type = other DNA
ggaagtttgcaaggcttctt

SEQ ID NO: 22422 - DNA, 20 bp, synthetic construct
  misc_feature 1..20: note = Description of Artificial Sequence: Synthetic oligonucleotide
  misc_feature 1..20: note = Target: SCN10A; (-) strand; PAM type: NRG; PAM sequence: AGG
  source 1..20: mol_type = other DNA
aaaaacagtggaagtttgca

SEQ ID NO: 22423 - DNA, 20 bp, synthetic construct
  misc_feature 1..20: note = Description of Artificial Sequence: Synthetic oligonucleotide
  misc_feature 1..20: note = Target: SCN10A; (-) strand; PAM type: NRG; PAM sequence: AAG
  source 1..20: mol_type = other DNA
gaaaaacagtggaagtttgc

SEQ ID NO: 22424 - DNA, 20 bp, synthetic construct
  misc_feature 1..20: note = Description of Artificial Sequence: Synthetic oligonucleotide
  misc_feature 1..20: note = Target: SCN10A; (-) strand; PAM type: NRG; PAM sequence: AAG
  source 1..20: mol_type = other DNA
tgttcccagaaaaacagtgg

SEQ ID NO: 22425 - DNA, 20 bp, synthetic construct
  misc_feature 1..20: note = Description of Artificial Sequence: Synthetic oligonucleotide
  misc_feature 1..20: note = Target: SCN10A; (-) strand; PAM type: NRG; PAM sequence: TGG
  source 1..20: mol_type = other DNA
cagtgttcccagaaaaacag

SEQ ID NO: 22426 - DNA, 20 bp, synthetic construct
  misc_feature 1..20: note = Description of Artificial Sequence: Synthetic oligonucleotide
  misc_feature 1..20: note = Target: SCN10A; (-) strand; PAM type: NRG; PAM sequence: CAG
  source 1..20: mol_type = other DNA
tggcagtgttcccagaaaaa

SEQ ID NO: 22427 - DNA, 20 bp, synthetic construct
  misc_feature 1..20: note = Description of Artificial Sequence: Synthetic oligonucleotide
  misc_feature 1..20: note = Target: SCN10A; (-) strand; PAM type: NRG; PAM sequence: CAG
  source 1..20: mol_type = other DNA
tgttctcatggcagtgttcc

SEQ ID NO: 22428 - DNA, 20 bp, synthetic construct
  misc_feature 1..20: note = Description of Artificial Sequence: Synthetic oligonucleotide
  misc_feature 1..20: note = Target: SCN10A; (-) strand; PAM type: NRG; PAM sequence: CAG
  source 1..20: mol_type = other DNA
gcctgggcctgttctcatgg

SEQ ID NO: 22429 - DNA, 20 bp, synthetic construct
  misc_feature 1..20: note = Description of Artificial Sequence: Synthetic oligonucleotide
  misc_feature 1..20: note = Target: SCN10A; (-) strand; PAM type: NRG; PAM sequence: TGG
  source 1..20: mol_type = other DNA
ttagcctgggcctgttctca

SEQ ID NO: 22430 - DNA, 20 bp, synthetic construct
  misc_feature 1..20: note = Description of Artificial Sequence: Synthetic oligonucleotide
  misc_feature 1..20: note = Target: SCN10A; (-) strand; PAM type: NRG; PAM sequence: GGG
  source 1..20: mol_type = other DNA
acccccaaacaggttagcct

SEQ ID NO: 22431 - DNA, 20 bp, synthetic construct
  misc_feature 1..20: note = Description of Artificial Sequence: Synthetic oligonucleotide
  misc_feature 1..20: note = Target: SCN10A; (-) strand; PAM type: NRG; PAM sequence: TGG
  source 1..20: mol_type = other DNA
cacccccaaacaggttagcc

SEQ ID NO: 22432 - DNA, 20 bp, synthetic construct
  misc_feature 1..20: note = Description of Artificial Sequence: Synthetic oligonucleotide
  misc_feature 1..20: note = Target: SCN10A; (-) strand; PAM type: NRG; PAM sequence: TAG
  source 1..20: mol_type = other DNA
cctctcacccccaaacaggt

SEQ ID NO: 22433 - DNA, 20 bp, synthetic construct
  misc_feature 1..20: note = Description of Artificial Sequence: Synthetic oligonucleotide
  misc_feature 1..20: note = Target: SCN10A; (-) strand; PAM type: NRG; PAM sequence: AGG
  source 1..20: mol_type = other DNA
gtggcctctcacccccaaac

SEQ ID NO: 22434 - DNA, 20 bp, synthetic construct
  misc_feature 1..20: note = Description of Artificial Sequence: Synthetic oligonucleotide
  misc_feature 1..20: note = Target: SCN10A; (-) strand; PAM type: NRG; PAM sequence: CAG
  source 1..20: mol_type = other DNA
tgtggcctctcacccccaaa

SEQ ID NO: 22435 - DNA, 20 bp, synthetic construct
  misc_feature 1..20: note = Description of Artificial Sequence: Synthetic oligonucleotide
  misc_feature 1..20: note = Target: SCN10A; (-) strand; PAM type: NRG; PAM sequence: TGG
  source 1..20: mol_type = other DNA
acgtcctgtctctgctcatg

SEQ ID NO: 22436 - DNA, 20 bp, synthetic construct
  misc_feature 1..20: note = Description of Artificial Sequence: Synthetic oligonucleotide
  misc_feature 1..20: note = Target: SCN10A; (-) strand; PAM type: NRG; PAM sequence: AGG
  source 1..20: mol_type = other DNA
aacttggagatggctggtct

SEQ ID NO: 22437 - DNA, 20 bp, synthetic construct
  misc_feature 1..20: note = Description of Artificial Sequence: Synthetic oligonucleotide
  misc_feature 1..20: note = Target: SCN10A; (-) strand; PAM type: NRG; PAM sequence: TAG
  source 1..20: mol_type = other DNA
taacttggagatggctggtc

SEQ ID NO: 22438 - DNA, 20 bp, synthetic construct
  misc_feature 1..20: note = Description of Artificial Sequence: Synthetic oligonucleotide
  misc_feature 1..20: note = Target: SCN10A; (-) strand; PAM type: NRG; PAM sequence: TGG
  source 1..20: mol_type = other DNA
catattaacttggagatggc

SEQ ID NO: 22439 - DNA, 20 bp, synthetic construct
  misc_feature 1..20: note = Description of Artificial Sequence: Synthetic oligonucleotide
  misc_feature 1..20: note = Target: SCN10A; (-) strand; PAM type: NRG; PAM sequence: TGG
  source 1..20: mol_type = other DNA
acagcatattaacttggaga

SEQ ID NO: 22440 - DNA, 20 bp, synthetic construct
  misc_feature 1..20: note = Description of Artificial Sequence: Synthetic oligonucleotide
  misc_feature 1..20: note = Target: SCN10A; (-) strand; PAM type: NRG; PAM sequence: GAG
  source 1..20: mol_type = other DNA
gcagacagcatattaacttg

SEQ ID NO: 22441 - DNA, 20 bp, synthetic construct
  misc_feature 1..20: note = Description of Artificial Sequence: Synthetic oligonucleotide
  misc_feature 1..20: note = Target: SCN10A; (-) strand; PAM type: NRG; PAM sequence: TGG
  source 1..20: mol_type = other DNA
atgcagacagcatattaact

SEQ ID NO: 22442 - DNA, 20 bp, synthetic construct
  misc_feature 1..20: note = Description of Artificial Sequence: Synthetic oligonucleotide
  misc_feature 1..20: note = Target: SCN10A; (-) strand; PAM type: NRG; PAM sequence: CAG
  source 1..20: mol_type = other DNA
ctcattcatgcatatgcaga

SEQ ID NO: 22443 - DNA, 20 bp, synthetic construct
  misc_feature 1..20: note = Description of Artificial Sequence: Synthetic oligonucleotide
  misc_feature 1..20: note = Target: SCN10A; (-) strand; PAM type: NRG; PAM sequence: CAG
  source 1..20: mol_type = other DNA
taggctcattcatgcatatg

SEQ ID NO: 22444 - DNA, 20 bp, synthetic construct
  misc_feature 1..20: note = Description of Artificial Sequence: Synthetic oligonucleotide
  misc_feature 1..20: note = Target: SCN10A; (-) strand; PAM type: NRG; PAM sequence: AGG
  source 1..20: mol_type = other DNA
ggcattgggtgacattgact

SEQ ID NO: 22445 - DNA, 20 bp, synthetic construct
  misc_feature 1..20: note = Description of Artificial Sequence: Synthetic oligonucleotide
  misc_feature 1..20: note = Target: SCN10A; (-) strand; PAM type: NRG; PAM sequence: TAG
  source 1..20: mol_type = other DNA
gggcattgggtgacattgac

SEQ ID NO: 22446 - DNA, 20 bp, synthetic construct
  misc_feature 1..20: note = Description of Artificial Sequence: Synthetic oligonucleotide
  misc_feature 1..20: note = Target: SCN10A; (-) strand; PAM type: NRG; PAM sequence: GGG
  source 1..20: mol_type = other DNA
actgggatcagatgggcatt

SEQ ID NO: 22447 - DNA, 20 bp, synthetic construct
  misc_feature 1..20: note = Description of Artificial Sequence: Synthetic oligonucleotide
  misc_feature 1..20: note = Target: SCN10A; (-) strand; PAM type: NRG; PAM sequence: TGG
  source 1..20: mol_type = other DNA
gactgggatcagatgggcat

SEQ ID NO: 22448 - DNA, 20 bp, synthetic construct
  misc_feature 1..20: note = Description of Artificial Sequence: Synthetic oligonucleotide
  misc_feature 1..20: note = Target: SCN10A; (-) strand; PAM type: NRG; PAM sequence: GGG
  source 1..20: mol_type = other DNA
attttggactgggatcagat

SEQ ID NO: 22449 - DNA, 20 bp, synthetic construct
  misc_feature 1..20: note = Description of Artificial Sequence: Synthetic oligonucleotide
  misc_feature 1..20: note = Target: SCN10A; (-) strand; PAM type: NRG; PAM sequence: TGG
  source 1..20: mol_type = other DNA
cattttggactgggatcaga

SEQ ID NO: 22450 - DNA, 20 bp, synthetic construct
  misc_feature 1..20: note = Description of Artificial Sequence: Synthetic oligonucleotide
  misc_feature 1..20: note = Target: SCN10A; (-) strand; PAM type: NRG; PAM sequence: CAG
  source 1..20: mol_type = other DNA
tcagcattttggactgggat

SEQ ID NO: 22451 - DNA, 20 bp, synthetic construct
  misc_feature 1..20: note = Description of Artificial Sequence: Synthetic oligonucleotide
  misc_feature 1..20: note = Target: SCN10A; (-) strand; PAM type: NRG; PAM sequence: GGG
  source 1..20: mol_type = other DNA
gtgcatcagcattttggact

SEQ ID NO: 22452 - DNA, 20 bp, synthetic construct
  misc_feature 1..20: note = Description of Artificial Sequence: Synthetic oligonucleotide
  misc_feature 1..20: note = Target: SCN10A; (-) strand; PAM type: NRG; PAM sequence: TGG
  source 1..20: mol_type = other DNA
tgtgcatcagcattttggac

SEQ ID NO: 22453 - DNA, 20 bp, synthetic construct
  misc_feature 1..20: note = Description of Artificial Sequence: Synthetic oligonucleotide
  misc_feature 1..20: note = Target: SCN10A; (-) strand; PAM type: NRG; PAM sequence: TGG
  source 1..20: mol_type = other DNA
gattctgtgcatcagcattt

SEQ ID NO: 22454 - DNA, 20 bp, synthetic construct
  misc_feature 1..20: note = Description of Artificial Sequence: Synthetic oligonucleotide
  misc_feature 1..20: note = Target: SCN10A; (-) strand; PAM type: NRG; PAM sequence: CAG
  source 1..20: mol_type = other DNA
taattcatgattctgtgcat

SEQ ID NO: 22455 - DNA, 20 bp, synthetic construct
  misc_feature 1..20: note = Description of Artificial Sequence: Synthetic oligonucleotide
  misc_feature 1..20: note = Target: SCN10A; (-) strand; PAM type: NRG; PAM sequence: TAG
  source 1..20: mol_type = other DNA
tggggagggaatgtatgagt

SEQ ID NO: 22456 - DNA, 20 bp, synthetic construct
  misc_feature 1..20: note = Description of Artificial Sequence: Synthetic oligonucleotide
  misc_feature 1..20: note = Target: SCN10A; (-) strand; PAM type: NRG; PAM sequence: GAG
  source 1..20: mol_type = other DNA
ctcatggggagggaatgtat

SEQ ID NO: 22457 - DNA, 20 bp, synthetic construct
  misc_feature 1..20: note = Description of Artificial Sequence: Synthetic oligonucleotide
  misc_feature 1..20: note = Target: SCN10A; (-) strand; PAM type: NRG; PAM sequence: GGG
  source 1..20: mol_type = other DNA
caacccagagctcatgggga

SEQ ID NO: 22458 - DNA, 20 bp, synthetic construct
  misc_feature 1..20: note = Description of Artificial Sequence: Synthetic oligonucleotide
  misc_feature 1..20: note = Target: SCN10A; (-) strand; PAM type: NRG; PAM sequence: AGG
  source 1..20: mol_type = other DNA
ccaacccagagctcatgggg

SEQ ID NO: 22459 - DNA, 20 bp, synthetic construct
  misc_feature 1..20: note = Description of Artificial Sequence: Synthetic oligonucleotide
  misc_feature 1..20: note = Target: SCN10A; (-) strand; PAM type: NRG; PAM sequence: GAG
  source 1..20: mol_type = other DNA
gccaacccagagctcatggg

SEQ ID NO: 22460 - DNA, 20 bp, synthetic construct
  misc_feature 1..20: note = Description of Artificial Sequence: Synthetic oligonucleotide
  misc_feature 1..20: note = Target: SCN10A; (-) strand; PAM type: NRG; PAM sequence: GGG
  source 1..20: mol_type = other DNA
ttgccaacccagagctcatg

SEQ ID NO: 22461 - DNA, 20 bp, synthetic construct
  misc_feature 1..20: note = Description of Artificial Sequence: Synthetic oligonucleotide
  misc_feature 1..20: note = Target: SCN10A; (-) strand; PAM type: NRG; PAM sequence: GGG
  source 1..20: mol_type = other DNA
tttgccaacccagagctcat

SEQ ID NO: 22462 - DNA, 20 bp, synthetic construct
  misc_feature 1..20: note = Description of Artificial Sequence: Synthetic oligonucleotide
  misc_feature 1..20: note = Target: SCN10A; (-) strand; PAM type: NRG; PAM sequence: TGG
  source 1..20: mol_type = other DNA
ctttgccaacccagagctca

SEQ ID NO: 22463 - DNA, 20 bp, synthetic construct
  misc_feature 1..20: note = Description of Artificial Sequence: Synthetic oligonucleotide
  misc_feature 1..20: note = Target: SCN10A; (-) strand; PAM type: NRG; PAM sequence: GAG
  source 1..20: mol_type = other DNA
tcatggcctttgccaaccca

SEQ ID NO: 22464 - DNA, 20 bp, synthetic construct
  misc_feature 1..20: note = Description of Artificial Sequence: Synthetic oligonucleotide
  misc_feature 1..20: note = Target: SCN10A; (-) strand; PAM type: NRG; PAM sequence: CAG
  source 1..20: mol_type = other DNA
aatcatggcctttgccaacc

SEQ ID NO: 22465 - DNA, 20 bp, synthetic construct
  misc_feature 1..20: note = Description of Artificial Sequence: Synthetic oligonucleotide
  misc_feature 1..20: note = Target: SCN10A; (-) strand; PAM type: NRG; PAM sequence: TGG
  source 1..20: mol_type = other DNA
atgtataaataaataaatca

SEQ ID NO: 22466 - DNA, 20 bp, synthetic construct
  misc_feature 1..20: note = Description of Artificial Sequence: Synthetic oligonucleotide
  misc_feature 1..20: note = Target: SCN10A; (-) strand; PAM type: NRG; PAM sequence: AAG
  source 1..20: mol_type = other DNA
tggggttgcaggtcctggga

SEQ ID NO: 22467 - DNA, 20 bp, synthetic construct
  misc_feature 1..20: note = Description of Artificial Sequence: Synthetic oligonucleotide
  misc_feature 1..20: note = Target: SCN10A; (-) strand; PAM type: NRG; PAM sequence: GGG
  source 1..20: mol_type = other DNA
cagatggggttgcaggtcct

SEQ ID NO: 22468 - DNA, 20 bp, synthetic construct
  misc_feature 1..20: note = Description of Artificial Sequence: Synthetic oligonucleotide
  misc_feature 1..20: note = Target: SCN10A; (-) strand; PAM type: NRG; PAM sequence: TGG
  source 1..20: mol_type = other DNA
acagatggggttgcaggtcc

SEQ ID NO: 22469 - DNA, 20 bp, synthetic construct
  misc_feature 1..20: note = Description of Artificial Sequence: Synthetic oligonucleotide
  misc_feature 1..20: note = Target: SCN10A; (-) strand; PAM type: NRG; PAM sequence: AGG
  source 1..20: mol_type = other DNA
atgggcacagatggggttgc

SEQ ID NO: 22470 - DNA, 20 bp, synthetic construct
  misc_feature 1..20: note = Description of Artificial Sequence: Synthetic oligonucleotide
  misc_feature 1..20: note = Target: SCN10A; (-) strand; PAM type: NRG; PAM sequence: CAG
  source 1..20: mol_type = other DNA
tatgggcacagatggggttg

SEQ ID NO: 22471 - DNA, 20 bp, synthetic construct
  misc_feature 1..20: note = Description of Artificial Sequence: Synthetic oligonucleotide
  misc_feature 1..20: note = Target: SCN10A; (-) strand; PAM type: NRG; PAM sequence: GGG
  source 1..20: mol_type = other DNA
gcatattatgggcacagatg

SEQ ID NO: 22472 - DNA, 20 bp, synthetic construct
  misc_feature 1..20: note = Description of Artificial Sequence: Synthetic oligonucleotide
  misc_feature 1..20: note = Target: SCN10A; (-) strand; PAM type: NRG; PAM sequence: GGG
  source 1..20: mol_type = other DNA
ggcatattatgggcacagat

SEQ ID NO: 22473 - DNA, 20 bp, synthetic construct
  misc_feature 1..20: note = Description of Artificial Sequence: Synthetic oligonucleotide
  misc_feature 1..20: note = Target: SCN10A; (-) strand; PAM type: NRG; PAM sequence: TGG
  source 1..20: mol_type = other DNA
tggcatattatgggcacaga

SEQ ID NO: 22474 - DNA, 20 bp, synthetic construct
  misc_feature 1..20: note = Description of Artificial Sequence: Synthetic oligonucleotide
  misc_feature 1..20: note = Target: SCN10A; (-) strand; PAM type: NRG; PAM sequence: CAG
  source 1..20: mol_type = other DNA
tccttggcatattatgggca

SEQ ID NO: 22475 - DNA, 20 bp, synthetic construct
  misc_feature 1..20: note = Description of Artificial Sequence: Synthetic oligonucleotide
  misc_feature 1..20: note = Target: SCN10A; (-) strand; PAM type: NRG; PAM sequence: GGG
  source 1..20: mol_type = other DNA
tcttgtccttggcatattat

SEQ ID NO: 22476 - DNA, 20 bp, synthetic construct
  misc_feature 1..20: note = Description of Artificial Sequence: Synthetic oligonucleotide
  misc_feature 1..20: note = Target: SCN10A; (-) strand; PAM type: NRG; PAM sequence: TGG
  source 1..20: mol_type = other DNA
atcttgtccttggcatatta

SEQ ID NO: 22477 - DNA, 20 bp, synthetic construct
  misc_feature 1..20: note = Description of Artificial Sequence: Synthetic oligonucleotide
  misc_feature 1..20: note = Target: SCN10A; (-) strand; PAM type: NRG; PAM sequence: TGG
  source 1..20: mol_type = other DNA
ttccttctccatcttgtcct

SEQ ID NO: 22478 - DNA, 20 bp, synthetic construct
  misc_feature 1..20: note = Description of Artificial Sequence: Synthetic oligonucleotide
  misc_feature 1..20: note = Target: SCN10A; (-) strand; PAM type: NRG; PAM sequence: GAG
  source 1..20: mol_type = other DNA
cccaacttatgacaaagcac

SEQ ID NO: 22479 - DNA, 20 bp, synthetic construct
  misc_feature 1..20: note = Description of Artificial Sequence: Synthetic oligonucleotide
  misc_feature 1..20: note = Target: SCN10A; (-) strand; PAM type: NRG; PAM sequence: AAG
  source 1..20: mol_type = other DNA
tgagttcccaacttatgaca

SEQ ID NO: 22480 - DNA, 20 bp, synthetic construct
  misc_feature 1..20: note = Description of Artificial Sequence: Synthetic oligonucleotide
  misc_feature 1..20: note = Target: SCN10A; (-) strand; PAM type: NRG; PAM sequence: GAG
  source 1..20: mol_type = other DNA
caatggatctgactcagggt

SEQ ID NO: 22481 - DNA, 20 bp, synthetic construct
  misc_feature 1..20: note = Description of Artificial Sequence: Synthetic oligonucleotide
  misc_feature 1..20: note = Target: SCN10A; (-) strand; PAM type: NRG; PAM sequence: GGG
  source 1..20: mol_type = other DNA
gtggcaatggatctgactca

SEQ ID NO: 22482 - DNA, 20 bp, synthetic construct
  misc_feature 1..20: note = Description of Artificial Sequence: Synthetic oligonucleotide
  misc_feature 1..20: note = Target: SCN10A; (-) strand; PAM type: NRG; PAM sequence: AGG
  source 1..20: mol_type = other DNA
tgtggcaatggatctgactc

SEQ ID NO: 22483 - DNA, 20 bp, synthetic construct
  misc_feature 1..20: note = Description of Artificial Sequence: Synthetic oligonucleotide
  misc_feature 1..20: note = Target: SCN10A; (-) strand; PAM type: NRG; PAM sequence: CAG
  source 1..20: mol_type = other DNA
gtgtggcaatggatctgact

SEQ ID NO: 22484 - DNA, 20 bp, synthetic construct
  misc_feature 1..20: note = Description of Artificial Sequence: Synthetic oligonucleotide
  misc_feature 1..20: note = Target: SCN10A; (-) strand; PAM type: NRG; PAM sequence: TGG
  source 1..20: mol_type = other DNA
gaccccttactgtgtggcaa

SEQ ID NO: 22485 - DNA, 20 bp, synthetic construct
  misc_feature 1..20: note = Description of Artificial Sequence: Synthetic oligonucleotide
  misc_feature 1..20: note = Target: SCN10A; (-) strand; PAM type: NRG; PAM sequence: TGG
  source 1..20: mol_type = other DNA
acttctgaccccttactgtg

SEQ ID NO: 22486 - DNA, 20 bp, synthetic construct
  misc_feature 1..20: note = Description of Artificial Sequence: Synthetic oligonucleotide
  misc_feature 1..20: note = Target: SCN10A; (-) strand; PAM type: NRG; PAM sequence: AGG
  source 1..20: mol_type = other DNA
gatatctacataaataagcg

SEQ ID NO: 22487 - DNA, 20 bp, synthetic construct
  misc_feature 1..20: note = Description of Artificial Sequence: Synthetic oligonucleotide
  misc_feature 1..20: note = Target: SCN10A; (-) strand; PAM type: NRG; PAM sequence: GAG
  source 1..20: mol_type = other DNA
agatatctacataaataagc

SEQ ID NO: 22488 - DNA, 20 bp, synthetic construct
  misc_feature 1..20: note = Description of Artificial Sequence: Synthetic oligonucleotide
  misc_feature 1..20: note = Target: SCN10A; (-) strand; PAM type: NRG; PAM sequence: AAG
  source 1..20: mol_type = other DNA
cagcagatatctacataaat

SEQ ID NO: 22489 - DNA, 20 bp, synthetic construct
  misc_feature 1..20: note = Description of Artificial Sequence: Synthetic oligonucleotide
  misc_feature 1..20: note = Target: SCN10A; (-) strand; PAM type: NRG; PAM sequence: CAG
  source 1..20: mol_type = other DNA
tcttttcttcctttcttcag

SEQ ID NO: 22490 - DNA, 20 bp, synthetic construct
  misc_feature 1..20: note = Description of Artificial Sequence: Synthetic oligonucleotide
  misc_feature 1..20: note = Target: SCN10A; (-) strand; PAM type: NRG; PAM sequence: CAG
  source 1..20: mol_type = other DNA
ctttcttttcttcctttctt

SEQ ID NO: 22491 - DNA, 20 bp, synthetic construct
  misc_feature 1..20: note = Description of Artificial Sequence: Synthetic oligonucleotide
  misc_feature 1..20: note = Target: SCN10A; (-) strand; PAM type: NRG; PAM sequence: AGG
  source 1..20: mol_type = other DNA
agggttcagaaccatctgtg

SEQ ID NO: 22492 - DNA, 20 bp, synthetic construct
  misc_feature 1..20: note = Description of Artificial Sequence: Synthetic oligonucleotide
  misc_feature 1..20: note = Target: SCN10A; (-) strand; PAM type: NRG; PAM sequence: GAG
  source 1..20: mol_type = other DNA
gagggttcagaaccatctgt

SEQ ID NO: 22493 - DNA, 20 bp, synthetic construct
  misc_feature 1..20: note = Description of Artificial Sequence: Synthetic oligonucleotide
  misc_feature 1..20: note = Target: SCN10A; (-) strand; PAM type: NRG; PAM sequence: CAG
  source 1..20: mol_type = other DNA
aaggcttgggttggagggtt

SEQ ID NO: 22494 - DNA, 20 bp, synthetic construct
  misc_feature 1..20: note = Description of Artificial Sequence: Synthetic oligonucleotide
  misc_feature 1..20: note = Target: SCN10A; (-) strand; PAM type: NRG; PAM sequence: GGG
  source 1..20: mol_type = other DNA
cacacaaggcttgggttgga

SEQ ID NO: 22495 - DNA, 20 bp, synthetic construct
  misc_feature 1..20: note = Description of Artificial Sequence: Synthetic oligonucleotide
  misc_feature 1..20: note = Target: SCN10A; (-) strand; PAM type: NRG; PAM sequence: AGG
  source 1..20: mol_type = other DNA
ccacacaaggcttgggttgg

SEQ ID NO: 22496 - DNA, 20 bp, synthetic construct
  misc_feature 1..20: note = Description of Artificial Sequence: Synthetic oligonucleotide
  misc_feature 1..20: note = Target: SCN10A; (-) strand; PAM type: NRG; PAM sequence: GAG
  source 1..20: mol_type = other DNA
accacacaaggcttgggttg

SEQ ID NO: 22497 - DNA, 20 bp, synthetic construct
  misc_feature 1..20: note = Description of Artificial Sequence: Synthetic oligonucleotide
  misc_feature 1..20: note = Target: SCN10A; (-) strand; PAM type: NRG; PAM sequence: TGG
  source 1..20: mol_type = other DNA
tcaccacacaaggcttgggt

SEQ ID NO: 22498 - DNA, 20 bp, synthetic construct
  misc_feature 1..20: note = Description of Artificial Sequence: Synthetic oligonucleotide
  misc_feature 1..20: note = Target: SCN10A; (-) strand; PAM type: NRG; PAM sequence: GGG
  source 1..20: mol_type = other DNA
gcattcaccacacaaggctt

SEQ ID NO: 22499 - DNA, 20 bp, synthetic construct
  misc_feature 1..20: note = Description of Artificial Sequence: Synthetic oligonucleotide
  misc_feature 1..20: note = Target: SCN10A; (-) strand; PAM type: NRG; PAM sequence: TGG
  source 1..20: mol_type = other DNA
tgcattcaccacacaaggct

SEQ ID NO: 22500 - DNA, 20 bp, synthetic construct
  misc_feature 1..20: note = Description of Artificial Sequence: Synthetic oligonucleotide
  misc_feature 1..20: note = Target: SCN10A; (-) strand; PAM type: NRG; PAM sequence: AGG
  source 1..20: mol_type = other DNA
aatattgcattcaccacaca

SEQ ID NO: 22501 - DNA, 20 bp, synthetic construct
  misc_feature 1..20: note = Description of Artificial Sequence: Synthetic oligonucleotide
  misc_feature 1..20: note = Target: SCN10A; (-) strand; PAM type: NRG; PAM sequence: AAG
  source 1..20: mol_type = other DNA
gaatattgcattcaccacac

SEQ ID NO: 22502 - DNA, 20 bp, synthetic construct
  misc_feature 1..20: note = Description of Artificial Sequence: Synthetic oligonucleotide
  misc_feature 1..20: note = Target: SCN10A; (-) strand; PAM type: NRG; PAM sequence: GGG
  source 1..20: mol_type = other DNA
gagctcactttggaagactt

SEQ ID NO: 22503 - DNA, 20 bp, synthetic construct
  misc_feature 1..20: note = Description of Artificial Sequence: Synthetic oligonucleotide
  misc_feature 1..20: note = Target: SCN10A; (-) strand; PAM type: NRG; PAM sequence: TGG
  source 1..20: mol_type = other DNA
ggagctcactttggaagact

SEQ ID NO: 22504 - DNA, 20 bp, synthetic construct
  misc_feature 1..20: note = Description of Artificial Sequence: Synthetic oligonucleotide
  misc_feature 1..20: note = Target: SCN10A; (-) strand; PAM type: NRG; PAM sequence: AAG
  source 1..20: mol_type = other DNA
gccaaaggagctcactttgg

SEQ ID NO: 22505 - DNA, 20 bp, synthetic construct
  misc_feature 1..20: note = Description of Artificial Sequence: Synthetic oligonucleotide
  misc_feature 1..20: note = Target: SCN10A; (-) strand; PAM type: NRG; PAM sequence: TGG
  source 1..20: mol_type = other DNA
gtagccaaaggagctcactt

SEQ ID NO: 22506 - DNA, 20 bp, synthetic construct
  misc_feature 1..20: note = Description of Artificial Sequence: Synthetic oligonucleotide
  misc_feature 1..20: note = Target: SCN10A; (-) strand; PAM type: NRG; PAM sequence: GAG
  source 1..20: mol_type = other DNA
ctgagtacatgtagccaaag

SEQ ID NO: 22507 - DNA, 20 bp, synthetic construct
  misc_feature 1..20: note = Description of Artificial Sequence: Synthetic oligonucleotide
  misc_feature 1..20: note = Target: SCN10A; (-) strand; PAM type: NRG; PAM sequence: AGG
  source 1..20: mol_type = other DNA
cactgagtacatgtagccaa

SEQ ID NO: 22508 - DNA, 20 bp, synthetic construct
  misc_feature 1..20: note = Description of Artificial Sequence: Synthetic oligonucleotide
  misc_feature 1..20: note = Target: SCN10A; (-) strand; PAM type: NRG; PAM sequence: AAG
  source 1..20: mol_type = other DNA
ccactgagtacatgtagcca

SEQ ID NO: 22509 - DNA, 20 bp, synthetic construct
  misc_feature 1..20: note = Description of Artificial Sequence: Synthetic oligonucleotide
  misc_feature 1..20: note = Target: SCN10A; (-) strand; PAM type: NRG; PAM sequence: TAG
  source 1..20: mol_type = other DNA
gcatgcccactgagtacatg

SEQ ID NO: 22510 - DNA, 20 bp, synthetic construct
  misc_feature 1..20: note = Description of Artificial Sequence: Synthetic oligonucleotide
  misc_feature 1..20: note = Target: SCN10A; (-) strand; PAM type: NRG; PAM sequence: GAG
  source 1..20: mol_type = other DNA
tgtggcccagcatgcccact

SEQ ID NO: 22511 - DNA, 20 bp, synthetic construct
  misc_feature 1..20: note = Description of Artificial Sequence: Synthetic oligonucleotide
  misc_feature 1..20: note = Target: SCN10A; (-) strand; PAM type: NRG; PAM sequence: CAG
  source 1..20: mol_type = other DNA
tttacaacttccatgtggcc

SEQ ID NO: 22512 - DNA, 20 bp, synthetic construct
  misc_feature 1..20: note = Description of Artificial Sequence: Synthetic oligonucleotide
  misc_feature 1..20: note = Target: SCN10A; (-) strand; PAM type: NRG; PAM sequence: TGG
  source 1..20: mol_type = other DNA
gtgactttacaacttccatg

SEQ ID NO: 22513 - DNA, 20 bp, synthetic construct
  misc_feature 1..20: note = Description of Artificial Sequence: Synthetic oligonucleotide
  misc_feature 1..20: note = Target: SCN10A; (-) strand; PAM type: NRG; PAM sequence: CAG
  source 1..20: mol_type = other DNA
ctgcttagctcttctctttt

SEQ ID NO: 22514 - DNA, 20 bp, synthetic construct
  misc_feature 1..20: note = Description of Artificial Sequence: Synthetic oligonucleotide
  misc_feature 1..20: note = Target: SCN10A; (-) strand; PAM type: NRG; PAM sequence: TAG
  source 1..20: mol_type = other DNA
tgagagccgaagtcactgct

SEQ ID NO: 22515 - DNA, 20 bp, synthetic construct
  misc_feature 1..20: note = Description of Artificial Sequence: Synthetic oligonucleotide
  misc_feature 1..20: note = Target: SCN10A; (-) strand; PAM type: NRG; PAM sequence: AAG
  source 1..20: mol_type = other DNA
ctgggggagattgagagccg

SEQ ID NO: 22516 - DNA, 20 bp, synthetic construct
  misc_feature 1..20: note = Description of Artificial Sequence: Synthetic oligonucleotide
  misc_feature 1..20: note = Target: SCN10A; (-) strand; PAM type: NRG; PAM sequence: GAG
  source 1..20: mol_type = other DNA
cctctgctgggggagattga

SEQ ID NO: 22517 - DNA, 20 bp, synthetic construct
  misc_feature 1..20: note = Description of Artificial Sequence: Synthetic oligonucleotide
  misc_feature 1..20: note = Target: SCN10A; (-) strand; PAM type: NRG; PAM sequence: GAG
  source 1..20: mol_type = other DNA
tacctctgctgggggagatt

SEQ ID NO: 22518 - DNA, 20 bp, synthetic construct
  misc_feature 1..20: note = Description of Artificial Sequence: Synthetic oligonucleotide
  misc_feature 1..20: note = Target: SCN10A; (-) strand; PAM type: NRG; PAM sequence: GAG
  source 1..20: mol_type = other DNA
tcattctacctctgctgggg

SEQ ID NO: 22519 - DNA, 20 bp, synthetic construct
  misc_feature 1..20: note = Description of Artificial Sequence: Synthetic oligonucleotide
  misc_feature 1..20: note = Target: SCN10A; (-) strand; PAM type: NRG; PAM sequence: GGG
  source 1..20: mol_type = other DNA
agtcattctacctctgctgg

SEQ ID NO: 22520 - DNA, 20 bp, synthetic construct
  misc_feature 1..20: note = Description of Artificial Sequence: Synthetic oligonucleotide
  misc_feature 1..20: note = Target: SCN10A; (-) strand; PAM type: NRG; PAM sequence: GGG
  source 1..20: mol_type = other DNA
aagtcattctacctctgctg

SEQ ID NO: 22521 - DNA, 20 bp, synthetic construct
  misc_feature 1..20: note = Description of Artificial Sequence: Synthetic oligonucleotide
  misc_feature 1..20: note = Target: SCN10A; (-) strand; PAM type: NRG; PAM sequence: GGG
  source 1..20: mol_type = other DNA
caagtcattctacctctgct

SEQ ID NO: 22522 - DNA, 20 bp, synthetic construct
  misc_feature 1..20: note = Description of Artificial Sequence: Synthetic oligonucleotide
  misc_feature 1..20: note = Target: SCN10A; (-) strand; PAM type: NRG; PAM sequence: TGG
  source 1..20: mol_type = other DNA
gcaagtcattctacctctgc

SEQ ID NO: 22523 - DNA, 20 bp, synthetic construct
  misc_feature 1..20: note = Description of Artificial Sequence: Synthetic oligonucleotide
  misc_feature 1..20: note = Target: SCN10A; (-) strand; PAM type: NRG; PAM sequence: AAG
  source 1..20: mol_type = other DNA
tgagccataaatctagaggc

SEQ ID NO: 22524 - DNA, 20 bp, synthetic construct
  misc_feature 1..20: note = Description of Artificial Sequence: Synthetic oligonucleotide
  misc_feature 1..20: note = Target: SCN10A; (-) strand; PAM type: NRG; PAM sequence: AGG
  source 1..20: mol_type = other DNA
gaaatgagccataaatctag

SEQ ID NO: 22525 - DNA, 20 bp, synthetic construct
  misc_feature 1..20: note = Description of Artificial Sequence: Synthetic oligonucleotide
  misc_feature 1..20: note = Target: SCN10A; (-) strand; PAM type: NRG; PAM sequence: GAG
  source 1..20: mol_type = other DNA
ggaaatgagccataaatcta

SEQ ID NO: 22526 - DNA, 20 bp, synthetic construct
  misc_feature 1..20: note = Description of Artificial Sequence: Synthetic oligonucleotide
  misc_feature 1..20: note = Target: SCN10A; (-) strand; PAM type: NRG; PAM sequence: TAG
  source 1..20: mol_type = other DNA
aaggaaatgagccataaatc

SEQ ID NO: 22527 - DNA, 20 bp, synthetic construct
  misc_feature 1..20: note = Description of Artificial Sequence: Synthetic oligonucleotide
  misc_feature 1..20: note = Target: SCN10A; (-) strand; PAM type: NRG; PAM sequence: GAG
  source 1..20: mol_type = other DNA
catccctcttgcaaggaaat

SEQ ID NO: 22528 - DNA, 20 bp, synthetic construct
  misc_feature 1..20: note = Description of Artificial Sequence: Synthetic oligonucleotide
  misc_feature 1..20: note = Target: SCN10A; (-) strand; PAM type: NRG; PAM sequence: AGG
  source 1..20: mol_type = other DNA
tgctcagcatccctcttgca

SEQ ID NO: 22529 - DNA, 20 bp, synthetic construct
  misc_feature 1..20: note = Description of Artificial Sequence: Synthetic oligonucleotide
  misc_feature 1..20: note = Target: SCN10A; (-) strand; PAM type: NRG; PAM sequence: AAG
  source 1..20: mol_type = other DNA
ttgctcagcatccctcttgc

SEQ ID NO: 22530 - DNA, 20 bp, synthetic construct
  misc_feature 1..20: note = Description of Artificial Sequence: Synthetic oligonucleotide
  misc_feature 1..20: note = Target: SCN10A; (-) strand; PAM type: NRG; PAM sequence: CAG
  source 1..20: mol_type = other DNA
gtattctatttcctgttgct

SEQ ID NO: 22531 - DNA, 20 bp, synthetic construct
  misc_feature 1..20: note = Description of Artificial Sequence: Synthetic oligonucleotide
  misc_feature 1..20: note = Target: SCN10A; (-) strand; PAM type: NRG; PAM sequence: GGG
  source 1..20: mol_type = other DNA
ttgagttgtgttttactttt

SEQ ID NO: 22532 - DNA, 20 bp, synthetic construct
  misc_feature 1..20: note = Description of Artificial Sequence: Synthetic oligonucleotide
  misc_feature 1..20: note = Target: SCN10A; (-) strand; PAM type: NRG; PAM sequence: TGG
  source 1..20: mol_type = other DNA
cttgagttgtgttttacttt

SEQ ID NO: 22533 - DNA, 20 bp, synthetic construct
  misc_feature 1..20: note = Description of Artificial Sequence: Synthetic oligonucleotide
  misc_feature 1..20: note = Target: SCN10A; (-) strand; PAM type: NRG; PAM sequence: GAG
  source 1..20: mol_type = other DNA
cctgccaaaatggttctctt

SEQ ID NO: 22534 - DNA, 20 bp, synthetic construct
  misc_feature 1..20: note = Description of Artificial Sequence: Synthetic oligonucleotide
  misc_feature 1..20: note = Target: SCN10A; (-) strand; PAM type: NRG; PAM sequence: TGG
  source 1..20: mol_type = other DNA
actcccctttcctgccaaaa

SEQ ID NO: 22535 - DNA, 20 bp, synthetic construct
  misc_feature 1..20: note = Description of Artificial Sequence: Synthetic oligonucleotide
  misc_feature 1..20: note = Target: SCN10A; (-) strand; PAM type: NRG; PAM sequence: TAG
  source 1..20: mol_type = other DNA
ggagcccctgtgtgtgtgta

SEQ ID NO: 22536 - DNA, 20 bp, synthetic construct
  misc_feature 1..20: note = Description of Artificial Sequence: Synthetic oligonucleotide
  misc_feature 1..20: note = Target: SCN10A; (-) strand; PAM type: NRG; PAM sequence: GAG
  source 1..20: mol_type = other DNA
atatagggacaggggatatg

SEQ ID NO: 22537 - DNA, 20 bp, synthetic construct
  misc_feature 1..20: note = Description of Artificial Sequence: Synthetic oligonucleotide
  misc_feature 1..20: note = Target: SCN10A; (-) strand; PAM type: NRG; PAM sequence: TGG
  source 1..20: mol_type = other DNA
tcatatagggacaggggata

SEQ ID NO: 22538 - DNA, 20 bp, synthetic construct
  misc_feature 1..20: note = Description of Artificial Sequence: Synthetic oligonucleotide
  misc_feature 1..20: note = Target: SCN10A; (-) strand; PAM type: NRG; PAM sequence: GGG
  source 1..20: mol_type = other DNA
ttggtatcatatagggacag

SEQ ID NO: 22539 - DNA, 20 bp, synthetic construct
  misc_feature 1..20: note = Description of Artificial Sequence: Synthetic oligonucleotide
  misc_feature 1..20: note = Target: SCN10A; (-) strand; PAM type: NRG; PAM sequence: GGG
  source 1..20: mol_type = other DNA
cttggtatcatatagggaca

SEQ ID NO: 22540 - DNA, 20 bp, synthetic construct
  misc_feature 1..20: note = Description of Artificial Sequence: Synthetic oligonucleotide
  misc_feature 1..20: note = Target: SCN10A; (-) strand; PAM type: NRG; PAM sequence: AGG
  source 1..20: mol_type = other DNA
ccttggtatcatatagggac

SEQ ID NO: 22541 - DNA, 20 bp, synthetic construct
  misc_feature 1..20: note = Description of Artificial Sequence: Synthetic oligonucleotide
  misc_feature 1..20: note = Target: SCN10A; (-) strand; PAM type: NRG; PAM sequence: CAG
  source 1..20: mol_type = other DNA
cccttggtatcatataggga

SEQ ID NO: 22542 - DNA, 20 bp, synthetic construct
  misc_feature 1..20: note = Description of Artificial Sequence: Synthetic oligonucleotide
  misc_feature 1..20: note = Target: SCN10A; (-) strand; PAM type: NRG; PAM sequence: GGG
  source 1..20: mol_type = other DNA
tggacccttggtatcatata

SEQ ID NO: 22543 - DNA, 20 bp, synthetic construct
  misc_feature 1..20: note = Description of Artificial Sequence: Synthetic oligonucleotide
  misc_feature 1..20: note = Target: SCN10A; (-) strand; PAM type: NRG; PAM sequence: AGG
  source 1..20: mol_type = other DNA
ttggacccttggtatcatat

SEQ ID NO: 22544 - DNA, 20 bp, synthetic construct
  misc_feature 1..20: note = Description of Artificial Sequence: Synthetic oligonucleotide
  misc_feature 1..20: note = Target: SCN10A; (-) strand; PAM type: NRG; PAM sequence: TAG
  source 1..20: mol_type = other DNA
gttggacccttggtatcata

SEQ ID NO: 22545 - DNA, 20 bp, synthetic construct
  misc_feature 1..20: note = Description of Artificial Sequence: Synthetic oligonucleotide
  misc_feature 1..20: note = Target: SCN10A; (-) strand; PAM type: NRG; PAM sequence: TGG
  source 1..20: mol_type = other DNA
ccaaggtctggttggaccct

SEQ ID NO: 22546 - DNA, 20 bp, synthetic construct
  misc_feature 1..20: note = Description of Artificial Sequence: Synthetic oligonucleotide
  misc_feature 1..20: note = Target: SCN10A; (-) strand; PAM type: NRG; PAM sequence: TGG
  source 1..20: mol_type = other DNA
catagggaccaaggtctggt

SEQ ID NO: 22547 - DNA, 20 bp, synthetic construct
  misc_feature 1..20: note = Description of Artificial Sequence: Synthetic oligonucleotide
  misc_feature 1..20: note = Target: SCN10A; (-) strand; PAM type: NRG; PAM sequence: TGG
  source 1..20: mol_type = other DNA
cttccatagggaccaaggtc

SEQ ID NO: 22548 - DNA, 20 bp, synthetic construct
  misc_feature 1..20: note = Description of Artificial Sequence: Synthetic oligonucleotide
  misc_feature 1..20: note = Target: SCN10A; (-) strand; PAM type: NRG; PAM sequence: AGG
  source 1..20: mol_type = other DNA
agtctcttccatagggacca

SEQ ID NO: 22549 - DNA, 20 bp, synthetic construct
  misc_feature 1..20: note = Description of Artificial Sequence: Synthetic oligonucleotide
  misc_feature 1..20: note = Target: SCN10A; (-) strand; PAM type: NRG; PAM sequence: AAG
  source 1..20: mol_type = other DNA
gagtctcttccatagggacc

SEQ ID NO: 22550 - DNA, 20 bp, synthetic construct
  misc_feature 1..20: note = Description of Artificial Sequence: Synthetic oligonucleotide
  misc_feature 1..20: note = Target: SCN10A; (-) strand; PAM type: NRG; PAM sequence: GGG
  source 1..20: mol_type = other DNA
tgagtggagtctcttccata

SEQ ID NO: 22551 - DNA, 20 bp, synthetic construct
  misc_feature 1..20: note = Description of Artificial Sequence: Synthetic oligonucleotide
  misc_feature 1..20: note = Target: SCN10A; (-) strand; PAM type: NRG; PAM sequence: AGG
  source 1..20: mol_type = other DNA
gtgagtggagtctcttccat

SEQ ID NO: 22552 - DNA, 20 bp, synthetic construct
  misc_feature 1..20: note = Description of Artificial Sequence: Synthetic oligonucleotide
  misc_feature 1..20: note = Target: SCN10A; (-) strand; PAM type: NRG; PAM sequence: TAG
  source 1..20: mol_type = other DNA
cgtgagtggagtctcttcca

SEQ ID NO: 22553 - DNA, 20 bp, synthetic construct
  misc_feature 1..20: note = Description of Artificial Sequence: Synthetic oligonucleotide
  misc_feature 1..20: note = Target: SCN10A; (-) strand; PAM type: NRG; PAM sequence: GAG
  source 1..20: mol_type = other DNA
tctcacagaaaacgtgagtg

SEQ ID NO: 22554 - DNA, 20 bp, synthetic construct
  misc_feature 1..20: note = Description of Artificial Sequence: Synthetic oligonucleotide
  misc_feature 1..20: note = Target: SCN10A; (-) strand; PAM type: NRG; PAM sequence: TGG
  source 1..20: mol_type = other DNA
catctcacagaaaacgtgag

SEQ ID NO: 22555 - DNA, 20 bp, synthetic construct
  misc_feature 1..20: note = Description of Artificial Sequence: Synthetic oligonucleotide
  misc_feature 1..20: note = Target: SCN10A; (-) strand; PAM type: NRG; PAM sequence: GAG
  source 1..20: mol_type = other DNA
actcatctcacagaaaacgt

SEQ ID NO: 22556 - DNA, 20 bp, synthetic construct
  misc_feature 1..20: note = Description of Artificial Sequence: Synthetic oligonucleotide
  misc_feature 1..20: note = Target: SCN10A; (-) strand; PAM type: NRG; PAM sequence: CAG
  source 1..20: mol_type = other DNA
acaaccaactactcatctca

SEQ ID NO: 22557 - DNA, 20 bp, synthetic construct
  misc_feature 1..20: note = Description of Artificial Sequence: Synthetic oligonucleotide
  misc_feature 1..20: note = Target: SCN10A; (-) strand; PAM type: NRG; PAM sequence: GAG
  source 1..20: mol_type = other DNA
agaatgacatggctgtcaat

SEQ ID NO: 22558 - DNA, 20 bp, synthetic construct
  misc_feature 1..20: note = Description of Artificial Sequence: Synthetic oligonucleotide
  misc_feature 1..20: note = Target: SCN10A; (-) strand; PAM type: NRG; PAM sequence: TGG
  source 1..20: mol_type = other DNA
taaatgtgtcaagaatgaca

SEQ ID NO: 22559 - DNA, 20 bp, synthetic construct
  misc_feature 1..20: note = Description of Artificial Sequence: Synthetic oligonucleotide
  misc_feature 1..20: note = Target: SCN10A; (-) strand; PAM type: NRG; PAM sequence: AAG
  source 1..20: mol_type = other DNA
acctcaaaaataaatgtgtc

SEQ ID NO: 22560 - DNA, 20 bp, synthetic construct
  misc_feature 1..20: note = Description of Artificial Sequence: Synthetic oligonucleotide
  misc_feature 1..20: note = Target: SCN10A; (-) strand; PAM type: NRG; PAM sequence: GGG
  source 1..20: mol_type = other DNA
gtggggctgcaactcttcaa

SEQ ID NO: 22561 - DNA, 20 bp, synthetic construct
  misc_feature 1..20: note = Description of Artificial Sequence: Synthetic oligonucleotide
  misc_feature 1..20: note = Target: SCN10A; (-) strand; PAM type: NRG; PAM sequence: AGG
  source 1..20: mol_type = other DNA
ggtggggctgcaactcttca

SEQ ID NO: 22562 - DNA, 20 bp, synthetic construct
  misc_feature 1..20: note = Description of Artificial Sequence: Synthetic oligonucleotide
  misc_feature 1..20: note = Target: SCN10A; (-) strand; PAM type: NRG; PAM sequence: AAG
  source 1..20: mol_type = other DNA
tggtggggctgcaactcttc

SEQ ID NO: 22563 - DNA, 20 bp, synthetic construct
  misc_feature 1..20: note = Description of Artificial Sequence: Synthetic oligonucleotide
  misc_feature 1..20: note = Target: SCN10A; (-) strand; PAM type: NRG; PAM sequence: GGG
  source 1..20: mol_type = other DNA
taagtgtttttgccttggtg

SEQ ID NO: 22564 - DNA, 20 bp, synthetic construct
  misc_feature 1..20: note = Description of Artificial Sequence: Synthetic oligonucleotide
  misc_feature 1..20: note = Target: SCN10A; (-) strand; PAM type: NRG; PAM sequence: GGG
  source 1..20: mol_type = other DNA
ctaagtgtttttgccttggt

SEQ ID NO: 22565 - DNA, 20 bp, synthetic construct
  misc_feature 1..20: note = Description of Artificial Sequence: Synthetic oligonucleotide
  misc_feature 1..20: note = Target: SCN10A; (-) strand; PAM type: NRG; PAM sequence: TGG
  source 1..20: mol_type = other DNA
cctaagtgtttttgccttgg

SEQ ID NO: 22566 - DNA, 20 bp, synthetic construct
  misc_feature 1..20: note = Description of Artificial Sequence: Synthetic oligonucleotide
  misc_feature 1..20: note = Target: SCN10A; (-) strand; PAM type: NRG; PAM sequence: TGG
  source 1..20: mol_type = other DNA
ctgcctaagtgtttttgcct

SEQ ID NO: 22567 - DNA, 20 bp, synthetic construct
  misc_feature 1..20: note = Description of Artificial Sequence: Synthetic oligonucleotide
  misc_feature 1..20: note = Target: SCN10A; (-) strand; PAM type: NRG; PAM sequence: AAG
  source 1..20: mol_type = other DNA
atcctcaccatcttctgcct

SEQ ID NO: 22568 - DNA, 20 bp, synthetic construct
  misc_feature 1..20: note = Description of Artificial Sequence: Synthetic oligonucleotide
  misc_feature 1..20: note = Target: SCN10A; (-) strand; PAM type: NRG; PAM sequence: TGG
  source 1..20: mol_type = other DNA
gattcactcagtgaagaaac

SEQ ID NO: 22569 - DNA, 20 bp, synthetic construct
  misc_feature 1..20: note = Description of Artificial Sequence: Synthetic oligonucleotide
  misc_feature 1..20: note = Target: SCN10A; (-) strand; PAM type: NRG; PAM sequence: AAG
  source 1..20: mol_type = other DNA
gggccctgattcactcagtg

SEQ ID NO: 22570 - DNA, 20 bp, synthetic construct
  misc_feature 1..20: note = Description of Artificial Sequence: Synthetic oligonucleotide
  misc_feature 1..20: note = Target: SCN10A; (-) strand; PAM type: NRG; PAM sequence: CAG
  source 1..20: mol_type = other DNA
tgtgggggccctgattcact

SEQ ID NO: 22571 - DNA, 20 bp, synthetic construct
  misc_feature 1..20: note = Description of Artificial Sequence: Synthetic oligonucleotide
  misc_feature 1..20: note = Target: SCN10A; (-) strand; PAM type: NRG; PAM sequence: GGG
  source 1..20: mol_type = other DNA
aggcctgaaggtcattgtgg

SEQ ID NO: 22572 - DNA, 20 bp, synthetic construct
  misc_feature 1..20: note = Description of Artificial Sequence: Synthetic oligonucleotide
  misc_feature 1..20: note = Target: SCN10A; (-) strand; PAM type: NRG; PAM sequence: GGG
  source 1..20: mol_type = other DNA
caggcctgaaggtcattgtg

SEQ ID NO: 22573 - DNA, 20 bp, synthetic construct
  misc_feature 1..20: note = Description of Artificial Sequence: Synthetic oligonucleotide
  misc_feature 1..20: note = Target: SCN10A; (-) strand; PAM type: NRG; PAM sequence: GGG
  source 1..20: mol_type = other DNA
gcaggcctgaaggtcattgt

SEQ ID NO: 22574 - DNA, 20 bp, synthetic construct
  misc_feature 1..20: note = Description of Artificial Sequence: Synthetic oligonucleotide
  misc_feature 1..20: note = Target: SCN10A; (-) strand; PAM type: NRG; PAM sequence: TGG
  source 1..20: mol_type = other DNA
cgcaggcctgaaggtcattg

SEQ ID NO: 22575 - DNA, 20 bp, synthetic construct
  misc_feature 1..20: note = Description of Artificial Sequence: Synthetic oligonucleotide
  misc_feature 1..20: note = Target: SCN10A; (-) strand; PAM type: NRG; PAM sequence: AGG
  source 1..20: mol_type = other DNA
tcatcttcccgcaggcctga

SEQ ID NO: 22576 - DNA, 20 bp, synthetic construct
  misc_feature 1..20: note = Description of Artificial Sequence: Synthetic oligonucleotide
  misc_feature 1..20: note = Target: SCN10A; (-) strand; PAM type: NRG; PAM sequence: AAG
  source 1..20: mol_type = other DNA
gtcatcttcccgcaggcctg

SEQ ID NO: 22577 - DNA, 20 bp, synthetic construct
  misc_feature 1..20: note = Description of Artificial Sequence: Synthetic oligonucleotide
  misc_feature 1..20: note = Target: SCN10A; (-) strand; PAM type: NRG; PAM sequence: AGG
  source 1..20: mol_type = other DNA
taccactgtcatcttcccgc

SEQ ID NO: 22578 - DNA, 20 bp, synthetic construct
  misc_feature 1..20: note = Description of Artificial Sequence: Synthetic oligonucleotide
  misc_feature 1..20: note = Target: SCN10A; (-) strand; PAM type: NRG; PAM sequence: CAG
  source 1..20: mol_type = other DNA
ataccactgtcatcttcccg

SEQ ID NO: 22579 - DNA, 20 bp, synthetic construct
  misc_feature 1..20: note = Description of Artificial Sequence: Synthetic oligonucleotide
  misc_feature 1..20: note = Target: SCN10A; (-) strand; PAM type: NRG; PAM sequence: TGG
  source 1..20: mol_type = other DNA
tgtgtgctacctcatccatg

SEQ ID NO: 22580 - DNA, 20 bp, synthetic construct
  misc_feature 1..20: note = Description of Artificial Sequence: Synthetic oligonucleotide
  misc_feature 1..20: note = Target: SCN10A; (-) strand; PAM type: NRG; PAM sequence: AAG
  source 1..20: mol_type = other DNA
ggaggatggctaagatgaag

SEQ ID NO: 22581 - DNA, 20 bp, synthetic construct
  misc_feature 1..20: note = Description of Artificial Sequence: Synthetic oligonucleotide
  misc_feature 1..20: note = Target: SCN10A; (-) strand; PAM type: NRG; PAM sequence: AAG
  source 1..20: mol_type = other DNA
gaaggaggatggctaagatg

SEQ ID NO: 22582 - DNA, 20 bp, synthetic construct
  misc_feature 1..20: note = Description of Artificial Sequence: Synthetic oligonucleotide
  misc_feature 1..20: note = Target: SCN10A; (-) strand; PAM type: NRG; PAM sequence: AAG
  source 1..20: mol_type = other DNA
agagatgaaggaggatggct

SEQ ID NO: 22583 - DNA, 20 bp, synthetic construct
  misc_feature 1..20: note = Description of Artificial Sequence: Synthetic oligonucleotide
  misc_feature 1..20: note = Target: SCN10A; (-) strand; PAM type: NRG; PAM sequence: TGG
  source 1..20: mol_type = other DNA
tatgtagagatgaaggagga

SEQ ID NO: 22584 - DNA, 20 bp, synthetic construct
  misc_feature 1..20: note = Description of Artificial Sequence: Synthetic oligonucleotide
  misc_feature 1..20: note = Target: SCN10A; (-) strand; PAM type: NRG; PAM sequence: AGG
  source 1..20: mol_type = other DNA
cctgtatgtagagatgaagg

SEQ ID NO: 22585 - DNA, 20 bp, synthetic construct
  misc_feature 1..20: note = Description of Artificial Sequence: Synthetic oligonucleotide
  misc_feature 1..20: note = Target: SCN10A; (-) strand; PAM type: NRG; PAM sequence: GAG
  source 1..20: mol_type = other DNA
tcctgtatgtagagatgaag

SEQ ID NO: 22586 - DNA, 20 bp, synthetic construct
  misc_feature 1..20: note = Description of Artificial Sequence: Synthetic oligonucleotide
  misc_feature 1..20: note = Target: SCN10A; (-) strand; PAM type: NRG; PAM sequence: AGG
  source 1..20: mol_type = other DNA
actcctgtatgtagagatga

SEQ ID NO: 22587 - DNA, 20 bp, synthetic construct
  misc_feature 1..20: note = Description of Artificial Sequence: Synthetic oligonucleotide
  misc_feature 1..20: note = Target: SCN10A; (-) strand; PAM type: NRG; PAM sequence: AAG
  source 1..20: mol_type = other DNA
cactcctgtatgtagagatg

SEQ ID NO: 22588 - DNA, 20 bp, synthetic construct
  misc_feature 1..20: note = Description of Artificial Sequence: Synthetic oligonucleotide
  misc_feature 1..20: note = Target: SCN10A; (-) strand; PAM type: NRG; PAM sequence: GAG
  source 1..20: mol_type = other DNA
atacttcactcctgtatgta

SEQ ID NO: 22589 - DNA, 20 bp, synthetic construct
  misc_feature 1..20: note = Description of Artificial Sequence: Synthetic oligonucleotide
  misc_feature 1..20: note = Target: SCN10A; (-) strand; PAM type: NRG; PAM sequence: TAG
  source 1..20: mol_type = other DNA
acatacttcactcctgtatg

SEQ ID NO: 22590 - DNA, 20 bp, synthetic construct
  misc_feature 1..20: note = Description of Artificial Sequence: Synthetic oligonucleotide
  misc_feature 1..20: note = Target: SCN10A; (-) strand; PAM type: NRG; PAM sequence: GAG
  source 1..20: mol_type = other DNA
aaggtcttggaactgccctg

SEQ ID NO: 22591 - DNA, 20 bp, synthetic construct
  misc_feature 1..20: note = Description of Artificial Sequence: Synthetic oligonucleotide
  misc_feature 1..20: note = Target: SCN10A; (-) strand; PAM type: NRG; PAM sequence: TGG
  source 1..20: mol_type = other DNA
gaaaggtcttggaactgccc

SEQ ID NO: 22592 - DNA, 20 bp, synthetic construct
  misc_feature 1..20: note = Description of Artificial Sequence: Synthetic oligonucleotide
  misc_feature 1..20: note = Target: SCN10A; (-) strand; PAM type: NRG; PAM sequence: TGG
  source 1..20: mol_type = other DNA
gcttcggatgagaaaggtct

SEQ ID NO: 22593 - DNA, 20 bp, synthetic construct
  misc_feature 1..20: note = Description of Artificial Sequence: Synthetic oligonucleotide
  misc_feature 1..20: note = Target: SCN10A; (-) strand; PAM type: NRG; PAM sequence: AGG
  source 1..20: mol_type = other DNA
atgcaagcttcggatgagaa

SEQ ID NO: 22594 - DNA, 20 bp, synthetic construct
  misc_feature 1..20: note = Description of Artificial Sequence: Synthetic oligonucleotide
  misc_feature 1..20: note = Target: SCN10A; (-) strand; PAM type: NRG; PAM sequence: AAG
  source 1..20: mol_type = other DNA
aatgcaagcttcggatgaga

SEQ ID NO: 22595 - DNA, 20 bp, synthetic construct
  misc_feature 1..20: note = Description of Artificial Sequence: Synthetic oligonucleotide
  misc_feature 1..20: note = Target: SCN10A; (-) strand; PAM type: NRG; PAM sequence: GAG
  source 1..20: mol_type = other DNA
agtaaatgcaagcttcggat

SEQ ID NO: 22596 - DNA, 20 bp, synthetic construct
  misc_feature 1..20: note = Description of Artificial Sequence: Synthetic oligonucleotide
  misc_feature 1..20: note = Target: SCN10A; (-) strand; PAM type: NRG; PAM sequence: CGG
  source 1..20: mol_type = other DNA
ctcagagtaaatgcaagctt

SEQ ID NO: 22597 - DNA, 20 bp, synthetic construct
  misc_feature 1..20: note = Description of Artificial Sequence: Synthetic oligonucleotide
  misc_feature 1..20: note = Target: SCN10A; (-) strand; PAM type: NRG; PAM sequence: AAG
  source 1..20: mol_type = other DNA
ctgcctctcagagtaaatgc

SEQ ID NO: 22598 - DNA, 20 bp, synthetic construct
  misc_feature 1..20: note = Description of Artificial Sequence: Synthetic oligonucleotide
  misc_feature 1..20: note = Target: SCN10A; (-) strand; PAM type: NRG; PAM sequence: GAG
  source 1..20: mol_type = other DNA
gactctctgcctgcctctca

SEQ ID NO: 22599 - DNA, 20 bp, synthetic construct
  misc_feature 1..20: note = Description of Artificial Sequence: Synthetic oligonucleotide
  misc_feature 1..20: note = Target: SCN10A; (-) strand; PAM type: NRG; PAM sequence: CAG
  source 1..20: mol_type = other DNA
ctgactctctgcctgcctct

SEQ ID NO: 22600 - DNA, 20 bp, synthetic construct
  misc_feature 1..20: note = Description of Artificial Sequence: Synthetic oligonucleotide
  misc_feature 1..20: note = Target: SCN10A; (-) strand; PAM type: NRG; PAM sequence: TAG
  source 1..20: mol_type = other DNA
catcgtctttataatgagaa

SEQ ID NO: 22601 - DNA, 20 bp, synthetic construct
  misc_feature 1..20: note = Description of Artificial Sequence: Synthetic oligonucleotide
  misc_feature 1..20: note = Target: SCN10A; (-) strand; PAM type: NRG; PAM sequence: GAG
  source 1..20: mol_type = other DNA
agttgcatcgtctttataat

SEQ ID NO: 22602 - DNA, 20 bp, synthetic construct
  misc_feature 1..20: note = Description of Artificial Sequence: Synthetic oligonucleotide
  misc_feature 1..20: note = Target: SCN10A; (-) strand; PAM type: NRG; PAM sequence: CAG
  source 1..20: mol_type = other DNA
aaaatgcattgcctgggtct

SEQ ID NO: 22603 - DNA, 20 bp, synthetic construct
  misc_feature 1..20: note = Description of Artificial Sequence: Synthetic oligonucleotide
  misc_feature 1..20: note = Target: SCN10A; (-) strand; PAM type: NRG; PAM sequence: GGG
  source 1..20: mol_type = other DNA
tgataaaaaatgcattgcct

SEQ ID NO: 22604 - DNA, 20 bp, synthetic construct
  misc_feature 1..20: note = Description of Artificial Sequence: Synthetic oligonucleotide
  misc_feature 1..20: note = Target: SCN10A; (-) strand; PAM type: NRG; PAM sequence: TGG
  source 1..20: mol_type = other DNA
atgataaaaaatgcattgcc

SEQ ID NO: 22605 - DNA, 20 bp, synthetic construct
  misc_feature 1..20: note = Description of Artificial Sequence: Synthetic oligonucleotide
  misc_feature 1..20: note = Target: SCN10A; (-) strand; PAM type: NRG; PAM sequence: AAG
  source 1..20: mol_type = other DNA
tcaggaattttattagcctc

SEQ ID NO: 22606 - DNA, 20 bp, synthetic construct
  misc_feature 1..20: note = Description of Artificial Sequence: Synthetic oligonucleotide
  misc_feature 1..20: note = Target: SCN10A; (-) strand; PAM type: NRG; PAM sequence: TAG
  source 1..20: mol_type = other DNA
gctagtgtcaggaattttat

SEQ ID NO: 22607 - DNA, 20 bp, synthetic construct
  misc_feature 1..20: note = Description of Artificial Sequence: Synthetic oligonucleotide
  misc_feature 1..20: note = Target: SCN10A; (-) strand; PAM type: NRG; PAM sequence: AGG
  source 1..20: mol_type = other DNA
taaattgaattgctagtgtc

SEQ ID NO: 22608 - DNA, 20 bp, synthetic construct
  misc_feature 1..20: note = Description of Artificial Sequence: Synthetic oligonucleotide
  misc_feature 1..20: note = Target: SCN10A; (-) strand; PAM type: NRG; PAM sequence: CAG
  source 1..20: mol_type = other DNA
ttaaattgaattgctagtgt

SEQ ID NO: 22609 - DNA, 20 bp, synthetic construct
  misc_feature 1..20: note = Description of Artificial Sequence: Synthetic oligonucleotide
  misc_feature 1..20: note = Target: SCN10A; (-) strand; PAM type: NRG; PAM sequence: TAG
  source 1..20: mol_type = other DNA
aattatttaaattgaattgc

SEQ ID NO: 22610 - DNA, 20 bp, synthetic construct
  misc_feature 1..20: note = Description of Artificial Sequence: Synthetic oligonucleotide
  misc_feature 1..20: note = Target: SCN10A; (-) strand; PAM type: NRG; PAM sequence: CAG
  source 1..20: mol_type = other DNA
gcctggaaaaagtaggtact

SEQ ID NO: 22611 - DNA, 20 bp, synthetic construct
  misc_feature 1..20: note = Description of Artificial Sequence: Synthetic oligonucleotide
  misc_feature 1..20: note = Target: SCN10A; (-) strand; PAM type: NRG; PAM sequence: AGG
  source 1..20: mol_type = other DNA
gcacagtgcctggaaaaagt

SEQ ID NO: 22612 - DNA, 20 bp, synthetic construct
  misc_feature 1..20: note = Description of Artificial Sequence: Synthetic oligonucleotide
  misc_feature 1..20: note = Target: SCN10A; (-) strand; PAM type: NRG; PAM sequence: TAG
  source 1..20: mol_type = other DNA
agcacagtgcctggaaaaag

SEQ ID NO: 22613 - DNA, 20 bp, synthetic construct
  misc_feature 1..20: note = Description of Artificial Sequence: Synthetic oligonucleotide
  misc_feature 1..20: note = Target: SCN10A; (-) strand; PAM type: NRG; PAM sequence: AAG
  source 1..20: mol_type = other DNA
cctagcacagtgcctggaaa

SEQ ID NO: 22614 - DNA, 20 bp, synthetic construct
  misc_feature 1..20: note = Description of Artificial Sequence: Synthetic oligonucleotide
  misc_feature 1..20: note = Target: SCN10A; (-) strand; PAM type: NRG; PAM sequence: TGG
  source 1..20: mol_type = other DNA
ttcatgcctagcacagtgcc

SEQ ID NO: 22615 - DNA, 20 bp, synthetic construct
  misc_feature 1..20: note = Description of Artificial Sequence: Synthetic oligonucleotide
  misc_feature 1..20: note = Target: SCN10A; (-) strand; PAM type: NRG; PAM sequence: CAG
  source 1..20: mol_type = other DNA
tagtagcttcatgcctagca

SEQ ID NO: 22616 - DNA, 20 bp, synthetic construct
  misc_feature 1..20: note = Description of Artificial Sequence: Synthetic oligonucleotide
  misc_feature 1..20: note = Target: SCN10A; (-) strand; PAM type: NRG; PAM sequence: TAG
  source 1..20: mol_type = other DNA
gaagttagtagcttcatgcc

SEQ ID NO: 22617 - DNA, 20 bp, synthetic construct
  misc_feature 1..20: note = Description of Artificial Sequence: Synthetic oligonucleotide
  misc_feature 1..20: note = Target: SCN10A; (-) strand; PAM type: NRG; PAM sequence: TAG
  source 1..20: mol_type = other DNA
aattactggggtgaagttag

SEQ ID NO: 22618 - DNA, 20 bp, synthetic construct
  misc_feature 1..20: note = Description of Artificial Sequence: Synthetic oligonucleotide
  misc_feature 1..20: note = Target: SCN10A; (-) strand; PAM type: NRG; PAM sequence: TAG
  source 1..20: mol_type = other DNA
ccaaattactggggtgaagt

SEQ ID NO: 22619 - DNA, 20 bp, synthetic construct
  misc_feature 1..20: note = Description of Artificial Sequence: Synthetic oligonucleotide
  misc_feature 1..20: note = Target: SCN10A; (-) strand; PAM type: NRG; PAM sequence: AAG
  source 1..20: mol_type = other DNA
gatgccaaattactggggtg

SEQ ID NO: 22620 - DNA, 20 bp, synthetic construct
  misc_feature 1..20: note = Description of Artificial Sequence: Synthetic oligonucleotide
  misc_feature 1..20: note = Target: SCN10A; (-) strand; PAM type: NRG; PAM sequence: GGG
  source 1..20: mol_type = other DNA
agacagatgccaaattactg

SEQ ID NO: 22621 - DNA, 20 bp, synthetic construct
  misc_feature 1..20: note = Description of Artificial Sequence: Synthetic oligonucleotide
  misc_feature 1..20: note = Target: SCN10A; (-) strand; PAM type: NRG; PAM sequence: GGG
  source 1..20: mol_type = other DNA
aagacagatgccaaattact

SEQ ID NO: 22622 - DNA, 20 bp, synthetic construct
  misc_feature 1..20: note = Description of Artificial Sequence: Synthetic oligonucleotide
  misc_feature 1..20: note = Target: SCN10A; (-) strand; PAM type: NRG; PAM sequence: TGG
  source 1..20: mol_type = other DNA
aaagacagatgccaaattac

SEQ ID NO: 22623 - DNA, 20 bp, synthetic construct
  misc_feature 1..20: note = Description of Artificial Sequence: Synthetic oligonucleotide
  misc_feature 1..20: note = Target: SCN10A; (-) strand; PAM type: NRG; PAM sequence: CAG
  source 1..20: mol_type = other DNA
cccagatgcatgcagaaaga

SEQ ID NO: 22624 - DNA, 20 bp, synthetic construct
  misc_feature 1..20: note = Description of Artificial Sequence: Synthetic oligonucleotide
  misc_feature 1..20: note = Target: SCN10A; (-) strand; PAM type: NRG; PAM sequence: AAG
  source 1..20: mol_type = other DNA
gcctcccagatgcatgcaga

SEQ ID NO: 22625 - DNA, 20 bp, synthetic construct
  misc_feature 1..20: note = Description of Artificial Sequence: Synthetic oligonucleotide
  misc_feature 1..20: note = Target: SCN10A; (-) strand; PAM type: NRG; PAM sequence: CAG
  source 1..20: mol_type = other DNA
agctgcctcccagatgcatg

SEQ ID NO: 22626 - DNA, 20 bp, synthetic construct
  misc_feature 1..20: note = Description of Artificial Sequence: Synthetic oligonucleotide
  misc_feature 1..20: note = Target: SCN10A; (-) strand; PAM type: NRG; PAM sequence: CAG
  source 1..20: mol_type = other DNA
ccaagtctcaagctgcctcc

SEQ ID NO: 22627 - DNA, 20 bp, synthetic construct
  misc_feature 1..20: note = Description of Artificial Sequence: Synthetic oligonucleotide
  misc_feature 1..20: note = Target: SCN10A; (-) strand; PAM type: NRG; PAM sequence: AAG
  source 1..20: mol_type = other DNA
gttcatgtgtcccaagtctc

SEQ ID NO: 22628 - DNA, 20 bp, synthetic construct
  misc_feature 1..20: note = Description of Artificial Sequence: Synthetic oligonucleotide
  misc_feature 1..20: note = Target: SCN10A; (-) strand; PAM type: NRG; PAM sequence: AAG
  source 1..20: mol_type = other DNA
cagtgaggttcatgtgtccc

SEQ ID NO: 22629 - DNA, 20 bp, synthetic construct
  misc_feature 1..20: note = Description of Artificial Sequence: Synthetic oligonucleotide
  misc_feature 1..20: note = Target: SCN10A; (-) strand; PAM type: NRG; PAM sequence: AGG
  source 1..20: mol_type = other DNA
acacacactcacacacagtg

SEQ ID NO: 22630 - DNA, 20 bp, synthetic construct
  misc_feature 1..20: note = Description of Artificial Sequence: Synthetic oligonucleotide
  misc_feature 1..20: note = Target: SCN10A; (-) strand; PAM type: NRG; PAM sequence: GAG
  source 1..20: mol_type = other DNA
cacacacactcacacacagt

SEQ ID NO: 22631 - DNA, 20 bp, synthetic construct
  misc_feature 1..20: note = Description of Artificial Sequence: Synthetic oligonucleotide
  misc_feature 1..20: note = Target: SCN10A; (-) strand; PAM type: NRG; PAM sequence: CAG
  source 1..20: mol_type = other DNA
cacacacacacactcacaca

SEQ ID NO: 22632 - DNA, 20 bp, synthetic construct
  misc_feature 1..20: note = Description of Artificial Sequence: Synthetic oligonucleotide
  misc_feature 1..20: note = Target: SCN10A; (-) strand; PAM type: NRG; PAM sequence: TGG
  source 1..20: mol_type = other DNA
ctctttctttttctttctct

SEQ ID NO: 22633 - DNA, 20 bp, synthetic construct
  misc_feature 1..20: note = Description of Artificial Sequence: Synthetic oligonucleotide
  misc_feature 1..20: note = Target: SCN10A; (-) strand; PAM type: NRG; PAM sequence: TAG
  source 1..20: mol_type = other DNA
gactgtctcagtgtttctta

SEQ ID NO: 22634 - DNA, 20 bp, synthetic construct
  misc_feature 1..20: note = Description of Artificial Sequence: Synthetic oligonucleotide
  misc_feature 1..20: note = Target: SCN10A; (-) strand; PAM type: NRG; PAM sequence: CAG
  source 1..20: mol_type = other DNA
ttatgccccagtgactgtct

SEQ ID NO: 22635 - DNA, 20 bp, synthetic construct
  misc_feature 1..20: note = Description of Artificial Sequence: Synthetic oligonucleotide
  misc_feature 1..20: note = Target: SCN10A; (-) strand; PAM type: NRG; PAM sequence: CAG
  source 1..20: mol_type = other DNA
cacaagttctatttatgccc

SEQ ID NO: 22636 - DNA, 20 bp, synthetic construct
  misc_feature 1..20: note = Description of Artificial Sequence: Synthetic oligonucleotide
  misc_feature 1..20: note = Target: SCN10A; (-) strand; PAM type: NRG; PAM sequence: AAG
  source 1..20: mol_type = other DNA
ctgccagctgtgcttggcac

SEQ ID NO: 22637 - DNA, 20 bp, synthetic construct
  misc_feature 1..20: note = Description of Artificial Sequence: Synthetic oligonucleotide
  misc_feature 1..20: note = Target: SCN10A; (-) strand; PAM type: NRG; PAM sequence: TGG
  source 1..20: mol_type = other DNA
tctttgctgccagctgtgct

SEQ ID NO: 22638 - DNA, 20 bp, synthetic construct
  misc_feature 1..20: note = Description of Artificial Sequence: Synthetic oligonucleotide
  misc_feature 1..20: note = Target: SCN10A; (-) strand; PAM type: NRG; PAM sequence: CAG
  source 1..20: mol_type = other DNA
ggtgtatccttctttgctgc

SEQ ID NO: 22639 - DNA, 20 bp, synthetic construct
  misc_feature 1..20: note = Description of Artificial Sequence: Synthetic oligonucleotide
  misc_feature 1..20: note = Target: SCN10A; (-) strand; PAM type: NRG; PAM sequence: AGG
  source 1..20: mol_type = other DNA
tcatccctccttaaacaagc

SEQ ID NO: 22640 - DNA, 20 bp, synthetic construct
  misc_feature 1..20: note = Description of Artificial Sequence: Synthetic oligonucleotide
  misc_feature 1..20: note = Target: SCN10A; (-) strand; PAM type: NRG; PAM sequence: CAG
  source 1..20: mol_type = other DNA
atcatccctccttaaacaag

SEQ ID NO: 22641 - DNA, 20 bp, synthetic construct
  misc_feature 1..20: note = Description of Artificial Sequence: Synthetic oligonucleotide
  misc_feature 1..20: note = Target: SCN10A; (-) strand; PAM type: NRG; PAM sequence: AAG
  source 1..20: mol_type = other DNA
caaatcatccctccttaaac

SEQ ID NO: 22642 - DNA, 20 bp, synthetic construct
  misc_feature 1..20: note = Description of Artificial Sequence: Synthetic oligonucleotide
  misc_feature 1..20: note = Target: SCN10A; (-) strand; PAM type: NRG; PAM sequence: GAG
  source 1..20: mol_type = other DNA
gaagttgattttacttacca

SEQ ID NO: 22643 - DNA, 20 bp, synthetic construct
  misc_feature 1..20: note = Description of Artificial Sequence: Synthetic oligonucleotide
  misc_feature 1..20: note = Target: SCN10A; (-) strand; PAM type: NRG; PAM sequence: CAG
  source 1..20: mol_type = other DNA
aagaagttgattttacttac

SEQ ID NO: 22644 - DNA, 20 bp, synthetic construct
  misc_feature 1..20: note = Description of Artificial Sequence: Synthetic oligonucleotide
  misc_feature 1..20: note = Target: SCN10A; (-) strand; PAM type: NRG; PAM sequence: AAG
  source 1..20: mol_type = other DNA
gcgaagctgctctcccaaag

SEQ ID NO: 22645 - DNA, 20 bp, synthetic construct
  misc_feature 1..20: note = Description of Artificial Sequence: Synthetic oligonucleotide
  misc_feature 1..20: note = Target: SCN10A; (-) strand; PAM type: NRG; PAM sequence: AAG
  source 1..20: mol_type = other DNA
cctgcgaagctgctctccca

SEQ ID NO: 22646 - DNA, 20 bp, synthetic construct
  misc_feature 1..20: note = Description of Artificial Sequence: Synthetic oligonucleotide
  misc_feature 1..20: note = Target: SCN10A; (-) strand; PAM type: NRG; PAM sequence: AAG
  source 1..20: mol_type = other DNA
agctctttctgctacctgcg

SEQ ID NO: 22647 - DNA, 20 bp, synthetic construct
  misc_feature 1..20: note = Description of Artificial Sequence: Synthetic oligonucleotide
  misc_feature 1..20: note = Target: SCN10A; (-) strand; PAM type: NRG; PAM sequence: GAG
  source 1..20: mol_type = other DNA
ctagattgcttccctggtca

SEQ ID NO: 22648 - DNA, 20 bp, synthetic construct
  misc_feature 1..20: note = Description of Artificial Sequence: Synthetic oligonucleotide
  misc_feature 1..20: note = Target: SCN10A; (-) strand; PAM type: NRG; PAM sequence: CAG
  source 1..20: mol_type = other DNA
tcctagattgcttccctggt

SEQ ID NO: 22649 - DNA, 20 bp, synthetic construct
  misc_feature 1..20: note = Description of Artificial Sequence: Synthetic oligonucleotide
  misc_feature 1..20: note = Target: SCN10A; (-) strand; PAM type: NRG; PAM sequence: TGG
  source 1..20: mol_type = other DNA
taaatcctagattgcttccc

SEQ ID NO: 22650 - DNA, 20 bp, synthetic construct
  misc_feature 1..20: note = Description of Artificial Sequence: Synthetic oligonucleotide
  misc_feature 1..20: note = Target: SCN10A; (-) strand; PAM type: NRG; PAM sequence: TAG
  source 1..20: mol_type = other DNA
gactaaccaaaaataaatcc

SEQ ID NO: 22651 - DNA, 20 bp, synthetic construct
  misc_feature 1..20: note = Description of Artificial Sequence: Synthetic oligonucleotide
  misc_feature 1..20: note = Target: SCN10A; (-) strand; PAM type: NRG; PAM sequence: TGG
  source 1..20: mol_type = other DNA
ctgacacatgtagtgctcag

SEQ ID NO: 22652 - DNA, 20 bp, synthetic construct
  misc_feature 1..20: note = Description of Artificial Sequence: Synthetic oligonucleotide
  misc_feature 1..20: note = Target: SCN10A; (-) strand; PAM type: NRG; PAM sequence: CAG
  source 1..20: mol_type = other DNA
ggactgacacatgtagtgct

SEQ ID NO: 22653 - DNA, 20 bp, synthetic construct
  misc_feature 1..20: note = Description of Artificial Sequence: Synthetic oligonucleotide
  misc_feature 1..20: note = Target: SCN10A; (-) strand; PAM type: NRG; PAM sequence: TAG
  source 1..20: mol_type = other DNA
agtccagggactgacacatg

SEQ ID NO: 22654 - DNA, 20 bp, synthetic construct
  misc_feature 1..20: note = Description of Artificial Sequence: Synthetic oligonucleotide
  misc_feature 1..20: note = Target: SCN10A; (-) strand; PAM type: NRG; PAM sequence: GGG
  source 1..20: mol_type = other DNA
atcactcagctcccagtcca

SEQ ID NO: 22655 - DNA, 20 bp, synthetic construct
  misc_feature 1..20: note = Description of Artificial Sequence: Synthetic oligonucleotide
  misc_feature 1..20: note = Target: SCN10A; (-) strand; PAM type: NRG; PAM sequence: AGG
  source 1..20: mol_type = other DNA
catcactcagctcccagtcc

SEQ ID NO: 22656 - DNA, 20 bp, synthetic construct
  misc_feature 1..20: note = Description of Artificial Sequence: Synthetic oligonucleotide
  misc_feature 1..20: note = Target: SCN10A; (-) strand; PAM type: NRG; PAM sequence: CAG
  source 1..20: mol_type = other DNA
ccatcactcagctcccagtc

SEQ ID NO: 22657 - DNA, 20 bp, synthetic construct
  misc_feature 1..20: note = Description of Artificial Sequence: Synthetic oligonucleotide
  misc_feature 1..20: note = Target: SCN10A; (-) strand; PAM type: NRG; PAM sequence: CAG
  source 1..20: mol_type = other DNA
cttagccatcactcagctcc

SEQ ID NO: 22658 - DNA, 20 bp, synthetic construct
  misc_feature 1..20: note = Description of Artificial Sequence: Synthetic oligonucleotide
  misc_feature 1..20: note = Target: SCN10A; (-) strand; PAM type: NRG; PAM sequence: CAG
  source 1..20: mol_type = other DNA
ctgctgccttagccatcact

SEQ ID NO: 22659 - DNA, 20 bp, synthetic construct
  misc_feature 1..20: note = Description of Artificial Sequence: Synthetic oligonucleotide
  misc_feature 1..20: note = Target: SCN10A; (-) strand; PAM type: NRG; PAM sequence: TAG
  source 1..20: mol_type = other DNA
cactcgacatgctgctgcct

SEQ ID NO: 22660 - DNA, 20 bp, synthetic construct
  misc_feature 1..20: note = Description of Artificial Sequence: Synthetic oligonucleotide
  misc_feature 1..20: note = Target: SCN10A; (-) strand; PAM type: NRG; PAM sequence: CGG
  source 1..20: mol_type = other DNA
tcccctcaattgtcagacaa

SEQ ID NO: 22661 - DNA, 20 bp, synthetic construct
  misc_feature 1..20: note = Description of Artificial Sequence: Synthetic oligonucleotide
  misc_feature 1..20: note = Target: SCN10A; (-) strand; PAM type: NRG; PAM sequence: CAG
  source 1..20: mol_type = other DNA
cagactttcccctcaattgt

SEQ ID NO: 22662 - DNA, 20 bp, synthetic construct
  misc_feature 1..20: note = Description of Artificial Sequence: Synthetic oligonucleotide
  misc_feature 1..20: note = Target: SCN10A; (-) strand; PAM type: NRG; PAM sequence: CAG
  source 1..20: mol_type = other DNA
ccatctgctcagtaatgcta

SEQ ID NO: 22663 - DNA, 20 bp, synthetic construct
  misc_feature 1..20: note = Description of Artificial Sequence: Synthetic oligonucleotide
  misc_feature 1..20: note = Target: SCN10A; (-) strand; PAM type: NRG; PAM sequence: CAG
  source 1..20: mol_type = other DNA
cccctgtgtgcccatctgct

SEQ ID NO: 22664 - DNA, 20 bp, synthetic construct
  misc_feature 1..20: note = Description of Artificial Sequence: Synthetic oligonucleotide
  misc_feature 1..20: note = Target: SCN10A; (-) strand; PAM type: NRG; PAM sequence: GGG
  source 1..20: mol_type = other DNA
acctctggaacttcagttaa

SEQ ID NO: 22665 - DNA, 20 bp, synthetic construct
  misc_feature 1..20: note = Description of Artificial Sequence: Synthetic oligonucleotide
  misc_feature 1..20: note = Target: SCN10A; (-) strand; PAM type: NRG; PAM sequence: AGG
  source 1..20: mol_type = other DNA
cacctctggaacttcagtta

SEQ ID NO: 22666 - DNA, 20 bp, synthetic construct
  misc_feature 1..20: note = Description of Artificial Sequence: Synthetic oligonucleotide
  misc_feature 1..20: note = Target: SCN10A; (-) strand; PAM type: NRG; PAM sequence: AAG
  source 1..20: mol_type = other DNA
ccacctctggaacttcagtt

SEQ ID NO: 22667 - DNA, 20 bp, synthetic construct
  misc_feature 1..20: note = Description of Artificial Sequence: Synthetic oligonucleotide
  misc_feature 1..20: note = Target: SCN10A; (-) strand; PAM type: NRG; PAM sequence: CAG
  source 1..20: mol_type = other DNA
cattcccacctctggaactt

SEQ ID NO: 22668 - DNA, 20 bp, synthetic construct
  misc_feature 1..20: note = Description of Artificial Sequence: Synthetic oligonucleotide
  misc_feature 1..20: note = Target: SCN10A; (-) strand; PAM type: NRG; PAM sequence: TGG
  source 1..20: mol_type = other DNA
acccaccccattcccacctc

SEQ ID NO: 22669 - DNA, 20 bp, synthetic construct
  misc_feature 1..20: note = Description of Artificial Sequence: Synthetic oligonucleotide
  misc_feature 1..20: note = Target: SCN10A; (-) strand; PAM type: NRG; PAM sequence: TGG
  source 1..20: mol_type = other DNA
ccaaggttttacctcctccc

SEQ ID NO: 22670 - DNA, 20 bp, synthetic construct
  misc_feature 1..20: note = Description of Artificial Sequence: Synthetic oligonucleotide
  misc_feature 1..20: note = Target: SCN10A; (-) strand; PAM type: NRG; PAM sequence: AGG
  source 1..20: mol_type = other DNA
cattcctcagggctctgcca

SEQ ID NO: 22671 - DNA, 20 bp, synthetic construct
  misc_feature 1..20: note = Description of Artificial Sequence: Synthetic oligonucleotide
  misc_feature 1..20: note = Target: SCN10A; (-) strand; PAM type: NRG; PAM sequence: AAG
  source 1..20: mol_type = other DNA
tcattcctcagggctctgcc

SEQ ID NO: 22672 - DNA, 20 bp, synthetic construct
  misc_feature 1..20: note = Description of Artificial Sequence: Synthetic oligonucleotide
  misc_feature 1..20: note = Target: SCN10A; (-) strand; PAM type: NRG; PAM sequence: GGG
  source 1..20: mol_type = other DNA
caactcacactcattcctca

SEQ ID NO: 22673 - DNA, 20 bp, synthetic construct
  misc_feature 1..20: note = Description of Artificial Sequence: Synthetic oligonucleotide
  misc_feature 1..20: note = Target: SCN10A; (-) strand; PAM type: NRG; PAM sequence: AGG
  source 1..20: mol_type = other DNA
tcaactcacactcattcctc

SEQ ID NO: 22674 - DNA, 20 bp, synthetic construct
  misc_feature 1..20: note = Description of Artificial Sequence: Synthetic oligonucleotide
  misc_feature 1..20: note = Target: SCN10A; (-) strand; PAM type: NRG; PAM sequence: CAG
  source 1..20: mol_type = other DNA
ctcaactcacactcattcct

SEQ ID NO: 22675 - DNA, 20 bp, synthetic construct
  misc_feature 1..20: note = Description of Artificial Sequence: Synthetic oligonucleotide
  misc_feature 1..20: note = Target: SCN10A; (-) strand; PAM type: NRG; PAM sequence: GGG
  source 1..20: mol_type = other DNA
actgtgctgccccttcttct

SEQ ID NO: 22676 - DNA, 20 bp, synthetic construct
  misc_feature 1..20: note = Description of Artificial Sequence: Synthetic oligonucleotide
  misc_feature 1..20: note = Target: SCN10A; (-) strand; PAM type: NRG; PAM sequence: TGG
  source 1..20: mol_type = other DNA
tactgtgctgccccttcttc

SEQ ID NO: 22677 - DNA, 20 bp, synthetic construct
  misc_feature 1..20: note = Description of Artificial Sequence: Synthetic oligonucleotide
  misc_feature 1..20: note = Target: SCN10A; (-) strand; PAM type: NRG; PAM sequence: CAG
  source 1..20: mol_type = other DNA
ccacaccattgctcacctcc

SEQ ID NO: 22678 - DNA, 20 bp, synthetic construct
  misc_feature 1..20: note = Description of Artificial Sequence: Synthetic oligonucleotide
  misc_feature 1..20: note = Target: SCN10A; (-) strand; PAM type: NRG; PAM sequence: CGG
  source 1..20: mol_type = other DNA
catgctctggaatccaccta

SEQ ID NO: 22679 - DNA, 20 bp, synthetic construct
  misc_feature 1..20: note = Description of Artificial Sequence: Synthetic oligonucleotide
  misc_feature 1..20: note = Target: SCN10A; (-) strand; PAM type: NRG; PAM sequence: TGG
  source 1..20: mol_type = other DNA
cctcacatctcaccatgctc

SEQ ID NO: 22680 - DNA, 20 bp, synthetic construct
  misc_feature 1..20: note = Description of Artificial Sequence: Synthetic oligonucleotide
  misc_feature 1..20: note = Target: SCN10A; (-) strand; PAM type: NRG; PAM sequence: TGG
  source 1..20: mol_type = other DNA
tgagtcttatttgcaagacc

SEQ ID NO: 22681 - DNA, 20 bp, synthetic construct
  misc_feature 1..20: note = Description of Artificial Sequence: Synthetic oligonucleotide
  misc_feature 1..20: note = Target: SCN10A; (-) strand; PAM type: NRG; PAM sequence: AAG
  source 1..20: mol_type = other DNA
agaccctgagtcttatttgc

SEQ ID NO: 22682 - DNA, 20 bp, synthetic construct
  misc_feature 1..20: note = Description of Artificial Sequence: Synthetic oligonucleotide
  misc_feature 1..20: note = Target: SCN10A; (-) strand; PAM type: NRG; PAM sequence: GAG
  source 1..20: mol_type = other DNA
ctctcaactgggaagaccct

SEQ ID NO: 22683 - DNA, 20 bp, synthetic construct
  misc_feature 1..20: note = Description of Artificial Sequence: Synthetic oligonucleotide
  misc_feature 1..20: note = Target: SCN10A; (-) strand; PAM type: NRG; PAM sequence: AAG
  source 1..20: mol_type = other DNA
ctcacttactctcaactggg

SEQ ID NO: 22684 - DNA, 20 bp, synthetic construct
  misc_feature 1..20: note = Description of Artificial Sequence: Synthetic oligonucleotide
  misc_feature 1..20: note = Target: SCN10A; (-) strand; PAM type: NRG; PAM sequence: GGG
  source 1..20: mol_type = other DNA
tctctcacttactctcaact

SEQ ID NO: 22685 - DNA, 20 bp, synthetic construct
  misc_feature 1..20: note = Description of Artificial Sequence: Synthetic oligonucleotide
  misc_feature 1..20: note = Target: SCN10A; (-) strand; PAM type: NRG; PAM sequence: TGG
  source 1..20: mol_type = other DNA
ctctctcacttactctcaac

SEQ ID NO: 22686 - DNA, 20 bp, synthetic construct
  misc_feature 1..20: note = Description of Artificial Sequence: Synthetic oligonucleotide
  misc_feature 1..20: note = Target: SCN10A; (-) strand; PAM type: NRG; PAM sequence: TGG
  source 1..20: mol_type = other DNA
acacctcttgaagagagccc

SEQ ID NO: 22687 - DNA, 20 bp, synthetic construct
  misc_feature 1..20: note = Description of Artificial Sequence: Synthetic oligonucleotide
  misc_feature 1..20: note = Target: SCN10A; (-) strand; PAM type: NRG; PAM sequence: GAG
  source 1..20: mol_type = other DNA
ctggacacacctcttgaaga

SEQ ID NO: 22688 - DNA, 20 bp, synthetic construct
  misc_feature 1..20: note = Description of Artificial Sequence: Synthetic oligonucleotide
  misc_feature 1..20: note = Target: SCN10A; (-) strand; PAM type: NRG; PAM sequence: GAG
  source 1..20: mol_type = other DNA
cactggacacacctcttgaa

SEQ ID NO: 22689 - DNA, 20 bp, synthetic construct
  misc_feature 1..20: note = Description of Artificial Sequence: Synthetic oligonucleotide
  misc_feature 1..20: note = Target: SCN10A; (-) strand; PAM type: NRG; PAM sequence: AAG
  source 1..20: mol_type = other DNA
cccactggacacacctcttg

SEQ ID NO: 22690 - DNA, 20 bp, synthetic construct
  misc_feature 1..20: note = Description of Artificial Sequence: Synthetic oligonucleotide
  misc_feature 1..20: note = Target: SCN10A; (-) strand; PAM type: NRG; PAM sequence: TGG
  source 1..20: mol_type = other DNA
aactctctgccaattcccac

SEQ ID NO: 22691 - DNA, 20 bp, synthetic construct
  misc_feature 1..20: note = Description of Artificial Sequence: Synthetic oligonucleotide
  misc_feature 1..20: note = Target: SCN10A; (-) strand; PAM type: NRG; PAM sequence: AGG
  source 1..20: mol_type = other DNA
ctggctctgcagggaaagat

SEQ ID NO: 22692 - DNA, 20 bp, synthetic construct
  misc_feature 1..20: note = Description of Artificial Sequence: Synthetic oligonucleotide
  misc_feature 1..20: note = Target: SCN10A; (-) strand; PAM type: NRG; PAM sequence: TAG
  source 1..20: mol_type = other DNA
tctggctctgcagggaaaga

SEQ ID NO: 22693 - DNA, 20 bp, synthetic construct
  misc_feature 1..20: note = Description of Artificial Sequence: Synthetic oligonucleotide
  misc_feature 1..20: note = Target: SCN10A; (-) strand; PAM type: NRG; PAM sequence: AAG
  source 1..20: mol_type = other DNA
cttgtctggctctgcaggga

SEQ ID NO: 22694 - DNA, 20 bp, synthetic construct
  misc_feature 1..20: note = Description of Artificial Sequence: Synthetic oligonucleotide
  misc_feature 1..20: note = Target: SCN10A; (-) strand; PAM type: NRG; PAM sequence: GGG
  source 1..20: mol_type = other DNA
atttcttgtctggctctgca

SEQ ID NO: 22695 - DNA, 20 bp, synthetic construct
  misc_feature 1..20: note = Description of Artificial Sequence: Synthetic oligonucleotide
  misc_feature 1..20: note = Target: SCN10A; (-) strand; PAM type: NRG; PAM sequence: AGG
  source 1..20: mol_type = other DNA
catttcttgtctggctctgc

SEQ ID NO: 22696 - DNA, 20 bp, synthetic construct
  misc_feature 1..20: note = Description of Artificial Sequence: Synthetic oligonucleotide
  misc_feature 1..20: note = Target: SCN10A; (-) strand; PAM type: NRG; PAM sequence: CAG
  source 1..20: mol_type = other DNA
ccatttcttgtctggctctg

SEQ ID NO: 22697 - DNA, 20 bp, synthetic construct
  misc_feature 1..20: note = Description of Artificial Sequence: Synthetic oligonucleotide
  misc_feature 1..20: note = Target: SCN10A; (-) strand; PAM type: NRG; PAM sequence: TGG
  source 1..20: mol_type = other DNA
cttttctaccatttcttgtc

SEQ ID NO: 22698 - DNA, 20 bp, synthetic construct
  misc_feature 1..20: note = Description of Artificial Sequence: Synthetic oligonucleotide
  misc_feature 1..20: note = Target: SCN10A; (-) strand; PAM type: NRG; PAM sequence: AAG
  source 1..20: mol_type = other DNA
aaacacccattctagagtgg

SEQ ID NO: 22699 - DNA, 20 bp, synthetic construct
  misc_feature 1..20: note = Description of Artificial Sequence: Synthetic oligonucleotide
  misc_feature 1..20: note = Target: SCN10A; (-) strand; PAM type: NRG; PAM sequence: TGG
  source 1..20: mol_type = other DNA
cagaaacacccattctagag

SEQ ID NO: 22700 - DNA, 20 bp, synthetic construct
  misc_feature 1..20: note = Description of Artificial Sequence: Synthetic oligonucleotide
  misc_feature 1..20: note = Target: SCN10A; (-) strand; PAM type: NRG; PAM sequence: GAG
  source 1..20: mol_type = other DNA
aaacagaaacacccattcta

SEQ ID NO: 22701 - DNA, 20 bp, synthetic construct
  misc_feature 1..20: note = Description of Artificial Sequence: Synthetic oligonucleotide
  misc_feature 1..20: note = Target: SCN10A; (-) strand; PAM type: NRG; PAM sequence: TAG
  source 1..20: mol_type = other DNA
gtaaacagaaacacccattc

SEQ ID NO: 22702 - DNA, 20 bp, synthetic construct
  misc_feature 1..20: note = Description of Artificial Sequence: Synthetic oligonucleotide
  misc_feature 1..20: note = Target: SCN10A; (-) strand; PAM type: NRG; PAM sequence: CAG
  source 1..20: mol_type = other DNA
ttcgttctcttatctgtaaa

SEQ ID NO: 22703 - DNA, 20 bp, synthetic construct
  misc_feature 1..20: note = Description of Artificial Sequence: Synthetic oligonucleotide
  misc_feature 1..20: note = Target: SCN10A; (-) strand; PAM type: NRG; PAM sequence: AAG
  source 1..20: mol_type = other DNA
aggttctctcctctcacccc

SEQ ID NO: 22704 - DNA, 20 bp, synthetic construct
  misc_feature 1..20: note = Description of Artificial Sequence: Synthetic oligonucleotide
  misc_feature 1..20: note = Target: SCN10A; (-) strand; PAM type: NRG; PAM sequence: AGG
  source 1..20: mol_type = other DNA
cttcccctctgtggcctgat

SEQ ID NO: 22705 - DNA, 20 bp, synthetic construct
  misc_feature 1..20: note = Description of Artificial Sequence: Synthetic oligonucleotide
  misc_feature 1..20: note = Target: SCN10A; (-) strand; PAM type: NRG; PAM sequence: TAG
  source 1..20: mol_type = other DNA
gcttcccctctgtggcctga

SEQ ID NO: 22706 - DNA, 20 bp, synthetic construct
  misc_feature 1..20: note = Description of Artificial Sequence: Synthetic oligonucleotide
  misc_feature 1..20: note = Target: SCN10A; (-) strand; PAM type: NRG; PAM sequence: TGG
  source 1..20: mol_type = other DNA
gacttgatgcttcccctctg

SEQ ID NO: 22707 - DNA, 20 bp, synthetic construct
  misc_feature 1..20: note = Description of Artificial Sequence: Synthetic oligonucleotide
  misc_feature 1..20: note = Target: SCN10A; (-) strand; PAM type: NRG; PAM sequence: GGG
  source 1..20: mol_type = other DNA
caaggcaaactttctgaaat

SEQ ID NO: 22708 - DNA, 20 bp, synthetic construct
  misc_feature 1..20: note = Description of Artificial Sequence: Synthetic oligonucleotide
  misc_feature 1..20: note = Target: SCN10A; (-) strand; PAM type: NRG; PAM sequence: TGG
  source 1..20: mol_type = other DNA
acaaggcaaactttctgaaa

SEQ ID NO: 22709 - DNA, 20 bp, synthetic construct
  misc_feature 1..20: note = Description of Artificial Sequence: Synthetic oligonucleotide
  misc_feature 1..20: note = Target: SCN10A; (-) strand; PAM type: NRG; PAM sequence: AGG
  source 1..20: mol_type = other DNA
ggatggggaggccagagaca

SEQ ID NO: 22710 - DNA, 20 bp, synthetic construct
  misc_feature 1..20: note = Description of Artificial Sequence: Synthetic oligonucleotide
  misc_feature 1..20: note = Target: SCN10A; (-) strand; PAM type: NRG; PAM sequence: AAG
  source 1..20: mol_type = other DNA
aggatggggaggccagagac

SEQ ID NO: 22711 - DNA, 20 bp, synthetic construct
  misc_feature 1..20: note = Description of Artificial Sequence: Synthetic oligonucleotide
  misc_feature 1..20: note = Target: SCN10A; (-) strand; PAM type: NRG; PAM sequence: GAG
  source 1..20: mol_type = other DNA
tggtgaggatggggaggcca

SEQ ID NO: 22712 - DNA, 20 bp, synthetic construct
  misc_feature 1..20: note = Description of Artificial Sequence: Synthetic oligonucleotide
  misc_feature 1..20: note = Target: SCN10A; (-) strand; PAM type: NRG; PAM sequence: CAG
  source 1..20: mol_type = other DNA
gatggtgaggatggggaggc

SEQ ID NO: 22713 - DNA, 20 bp, synthetic construct
  misc_feature 1..20: note = Description of Artificial Sequence: Synthetic oligonucleotide
  misc_feature 1..20: note = Target: SCN10A; (-) strand; PAM type: NRG; PAM sequence: AGG
  source 1..20: mol_type = other DNA
ggttgatggtgaggatgggg

SEQ ID NO: 22714 - DNA, 20 bp, synthetic construct
  misc_feature 1..20: note = Description of Artificial Sequence: Synthetic oligonucleotide
  misc_feature 1..20: note = Target: SCN10A; (-) strand; PAM type: NRG; PAM sequence: GAG
  source 1..20: mol_type = other DNA
aggttgatggtgaggatggg

SEQ ID NO: 22715 - DNA, 20 bp, synthetic construct
  misc_feature 1..20: note = Description of Artificial Sequence: Synthetic oligonucleotide
  misc_feature 1..20: note = Target: SCN10A; (-) strand; PAM type: NRG; PAM sequence: GGG
  source 1..20: mol_type = other DNA
tgaggttgatggtgaggatg

SEQ ID NO: 22716 - DNA, 20 bp, synthetic construct
  misc_feature 1..20: note = Description of Artificial Sequence: Synthetic oligonucleotide
  misc_feature 1..20: note = Target: SCN10A; (-) strand; PAM type: NRG; PAM sequence: GGG
  source 1..20: mol_type = other DNA
atgaggttgatggtgaggat

SEQ ID NO: 22717 - DNA, 20 bp, synthetic construct
  misc_feature 1..20: note = Description of Artificial Sequence: Synthetic oligonucleotide
  misc_feature 1..20: note = Target: SCN10A; (-) strand; PAM type: NRG; PAM sequence: TGG
  source 1..20: mol_type = other DNA
catgaggttgatggtgagga

SEQ ID NO: 22718 - DNA, 20 bp, synthetic construct
  misc_feature 1..20: note = Description of Artificial Sequence: Synthetic oligonucleotide
  misc_feature 1..20: note = Target: SCN10A; (-) strand; PAM type: NRG; PAM sequence: AGG
  source 1..20: mol_type = other DNA
cccccatgaggttgatggtg

SEQ ID NO: 22719 - DNA, 20 bp, synthetic construct
  misc_feature 1..20: note = Description of Artificial Sequence: Synthetic oligonucleotide
  misc_feature 1..20: note = Target: SCN10A; (-) strand; PAM type: NRG; PAM sequence: GAG
  source 1..20: mol_type = other DNA
gcccccatgaggttgatggt

SEQ ID NO: 22720 - DNA, 20 bp, synthetic construct
  misc_feature 1..20: note = Description of Artificial Sequence: Synthetic oligonucleotide
  misc_feature 1..20: note = Target: SCN10A; (-) strand; PAM type: NRG; PAM sequence: TGG
  source 1..20: mol_type = other DNA
ttcagcccccatgaggttga

SEQ ID NO: 22721 - DNA, 20 bp, synthetic construct
  misc_feature 1..20: note = Description of Artificial Sequence: Synthetic oligonucleotide
  misc_feature 1..20: note = Target: SCN10A; (-) strand; PAM type: NRG; PAM sequence: AGG
  source 1..20: mol_type = other DNA
actactcttcagcccccatg

SEQ ID NO: 22722 - DNA, 20 bp, synthetic construct
  misc_feature 1..20: note = Description of Artificial Sequence: Synthetic oligonucleotide
  misc_feature 1..20: note = Target: SCN10A; (-) strand; PAM type: NRG; PAM sequence: GAG
  source 1..20: mol_type = other DNA
gactactcttcagcccccat

SEQ ID NO: 22723 - DNA, 20 bp, synthetic construct
  misc_feature 1..20: note = Description of Artificial Sequence: Synthetic oligonucleotide
  misc_feature 1..20: note = Target: SCN10A; (-) strand; PAM type: NRG; PAM sequence: CAG
  source 1..20: mol_type = other DNA
gtagcccagcgactactctt

SEQ ID NO: 22724 - DNA, 20 bp, synthetic construct
  misc_feature 1..20: note = Description of Artificial Sequence: Synthetic oligonucleotide
  misc_feature 1..20: note = Target: SCN10A; (-) strand; PAM type: NRG; PAM sequence: CAG
  source 1..20: mol_type = other DNA
ctccactgtcaccagtagcc

SEQ ID NO: 22725 - DNA, 20 bp, synthetic construct
  misc_feature 1..20: note = Description of Artificial Sequence: Synthetic oligonucleotide
  misc_feature 1..20: note = Target: SCN10A; (-) strand; PAM type: NRG; PAM sequence: TAG
  source 1..20: mol_type = other DNA
aagatctccactgtcaccag

SEQ ID NO: 22726 - DNA, 20 bp, synthetic construct
  misc_feature 1..20: note = Description of Artificial Sequence: Synthetic oligonucleotide
  misc_feature 1..20: note = Target: SCN10A; (-) strand; PAM type: NRG; PAM sequence: CAG
  source 1..20: mol_type = other DNA
tctaagatctccactgtcac

SEQ ID NO: 22727 - DNA, 20 bp, synthetic construct
  misc_feature 1..20: note = Description of Artificial Sequence: Synthetic oligonucleotide
  misc_feature 1..20: note = Target: SCN10A; (-) strand; PAM type: NRG; PAM sequence: AAG
  source 1..20: mol_type = other DNA
gctcattgtgtggggcctct

SEQ ID NO: 22728 - DNA, 20 bp, synthetic construct
  misc_feature 1..20: note = Description of Artificial Sequence: Synthetic oligonucleotide
  misc_feature 1..20: note = Target: SCN10A; (-) strand; PAM type: NRG; PAM sequence: GGG
  source 1..20: mol_type = other DNA
ccatcaaagctcattgtgtg

SEQ ID NO: 22729 - DNA, 20 bp, synthetic construct
  misc_feature 1..20: note = Description of Artificial Sequence: Synthetic oligonucleotide
  misc_feature 1..20: note = Target: SCN10A; (-) strand; PAM type: NRG; PAM sequence: GGG
  source 1..20: mol_type = other DNA
tccatcaaagctcattgtgt

SEQ ID NO: 22730 - DNA, 20 bp, synthetic construct
  misc_feature 1..20: note = Description of Artificial Sequence: Synthetic oligonucleotide
  misc_feature 1..20: note = Target: SCN10A; (-) strand; PAM type: NRG; PAM sequence: TGG
  source 1..20: mol_type = other DNA
gtccatcaaagctcattgtg

SEQ ID NO: 22731 - DNA, 20 bp, synthetic construct
  misc_feature 1..20: note = Description of Artificial Sequence: Synthetic oligonucleotide
  misc_feature 1..20: note = Target: SCN10A; (-) strand; PAM type: NRG; PAM sequence: AAG
  source 1..20: mol_type = other DNA
gaaacaaaagtagtccatca

SEQ ID NO: 22732 - DNA, 20 bp, synthetic construct
  misc_feature 1..20: note = Description of Artificial Sequence: Synthetic oligonucleotide
  misc_feature 1..20: note = Target: SCN10A; (-) strand; PAM type: NRG; PAM sequence: TAG
  source 1..20: mol_type = other DNA
tgagaattcagaaacaaaag

SEQ ID NO: 22733 - DNA, 20 bp, synthetic construct
  misc_feature 1..20: note = Description of Artificial Sequence: Synthetic oligonucleotide
  misc_feature 1..20: note = Target: SCN10A; (-) strand; PAM type: NRG; PAM sequence: AAG
  source 1..20: mol_type = other DNA
tactgagaattcagaaacaa

SEQ ID NO: 22734 - DNA, 20 bp, synthetic construct
  misc_feature 1..20: note = Description of Artificial Sequence: Synthetic oligonucleotide
  misc_feature 1..20: note = Target: SCN10A; (-) strand; PAM type: NRG; PAM sequence: CAG
  source 1..20: mol_type = other DNA
attcttgattactgagaatt

SEQ ID NO: 22735 - DNA, 20 bp, synthetic construct
  misc_feature 1..20: note = Description of Artificial Sequence: Synthetic oligonucleotide
  misc_feature 1..20: note = Target: SCN10A; (-) strand; PAM type: NRG; PAM sequence: GAG
  source 1..20: mol_type = other DNA
ttaggcaattcttgattact

SEQ ID NO: 22736 - DNA, 20 bp, synthetic construct
  misc_feature 1..20: note = Description of Artificial Sequence: Synthetic oligonucleotide
  misc_feature 1..20: note = Target: SCN10A; (-) strand; PAM type: NRG; PAM sequence: AGG
  source 1..20: mol_type = other DNA
acccagaggaaaaaagaatt

SEQ ID NO: 22737 - DNA, 20 bp, synthetic construct
  misc_feature 1..20: note = Description of Artificial Sequence: Synthetic oligonucleotide
  misc_feature 1..20: note = Target: SCN10A; (-) strand; PAM type: NRG; PAM sequence: TAG
  source 1..20: mol_type = other DNA
cacccagaggaaaaaagaat

SEQ ID NO: 22738 - DNA, 20 bp, synthetic construct
  misc_feature 1..20: note = Description of Artificial Sequence: Synthetic oligonucleotide
  misc_feature 1..20: note = Target: SCN10A; (-) strand; PAM type: NRG; PAM sequence: AAG
  source 1..20: mol_type = other DNA
tttagacacccagaggaaaa

SEQ ID NO: 22739 - DNA, 20 bp, synthetic construct
  misc_feature 1..20: note = Description of Artificial Sequence: Synthetic oligonucleotide
  misc_feature 1..20: note = Target: SCN10A; (-) strand; PAM type: NRG; PAM sequence: AGG
  source 1..20: mol_type = other DNA
tcctgtctttagacacccag

SEQ ID NO: 22740 - DNA, 20 bp, synthetic construct
  misc_feature 1..20: note = Description of Artificial Sequence: Synthetic oligonucleotide
  misc_feature 1..20: note = Target: SCN10A; (-) strand; PAM type: NRG; PAM sequence: GAG
  source 1..20: mol_type = other DNA
atcctgtctttagacaccca

SEQ ID NO: 22741 - DNA, 20 bp, synthetic construct
  misc_feature 1..20: note = Description of Artificial Sequence: Synthetic oligonucleotide
  misc_feature 1..20: note = Target: SCN10A; (-) strand; PAM type: NRG; PAM sequence: CAG
  source 1..20: mol_type = other DNA
aaatcctgtctttagacacc

SEQ ID NO: 22742 - DNA, 20 bp, synthetic construct
  misc_feature 1..20: note = Description of Artificial Sequence: Synthetic oligonucleotide
  misc_feature 1..20: note = Target: SCN10A; (-) strand; PAM type: NRG; PAM sequence: TAG
  source 1..20: mol_type = other DNA
taggtctaaaatcctgtctt

SEQ ID NO: 22743 - DNA, 20 bp, synthetic construct
  misc_feature 1..20: note = Description of Artificial Sequence: Synthetic oligonucleotide
  misc_feature 1..20: note = Target: SCN10A; (-) strand; PAM type: NRG; PAM sequence: AGG
  source 1..20: mol_type = other DNA
agtatcttcactgtttccgt

SEQ ID NO: 22744 - DNA, 20 bp, synthetic construct
  misc_feature 1..20: note = Description of Artificial Sequence: Synthetic oligonucleotide
  misc_feature 1..20: note = Target: SCN10A; (-) strand; PAM type: NRG; PAM sequence: TAG
  source 1..20: mol_type = other DNA
cagtatcttcactgtttccg

SEQ ID NO: 22745 - DNA, 20 bp, synthetic construct
  misc_feature 1..20: note = Description of Artificial Sequence: Synthetic oligonucleotide
  misc_feature 1..20: note = Target: SCN10A; (-) strand; PAM type: NRG; PAM sequence: CAG
  source 1..20: mol_type = other DNA
aggaagggagaaagcagtcc

SEQ ID NO: 22746 - DNA, 20 bp, synthetic construct
  misc_feature 1..20: note = Description of Artificial Sequence: Synthetic oligonucleotide
  misc_feature 1..20: note = Target: SCN10A; (-) strand; PAM type: NRG; PAM sequence: CAG
  source 1..20: mol_type = other DNA
atggggaggaagggagaaag

SEQ ID NO: 22747 - DNA, 20 bp, synthetic construct
  misc_feature 1..20: note = Description of Artificial Sequence: Synthetic oligonucleotide
  misc_feature 1..20: note = Target: SCN10A; (-) strand; PAM type: NRG; PAM sequence: AAG
  source 1..20: mol_type = other DNA
gaaatggggaggaagggaga

SEQ ID NO: 22748 - DNA, 20 bp, synthetic construct
  misc_feature 1..20: note = Description of Artificial Sequence: Synthetic oligonucleotide
  misc_feature 1..20: note = Target: SCN10A; (-) strand; PAM type: NRG; PAM sequence: GAG
  source 1..20: mol_type = other DNA
cttggaaatggggaggaagg

SEQ ID NO: 22749 - DNA, 20 bp, synthetic construct
  misc_feature 1..20: note = Description of Artificial Sequence: Synthetic oligonucleotide
  misc_feature 1..20: note = Target: SCN10A; (-) strand; PAM type: NRG; PAM sequence: GGG
  source 1..20: mol_type = other DNA
aacttggaaatggggaggaa

SEQ ID NO: 22750 - DNA, 20 bp, synthetic construct
  misc_feature 1..20: note = Description of Artificial Sequence: Synthetic oligonucleotide
  misc_feature 1..20: note = Target: SCN10A; (-) strand; PAM type: NRG; PAM sequence: AGG
  source 1..20: mol_type = other DNA
aaacttggaaatggggagga

SEQ ID NO: 22751 - DNA, 20 bp, synthetic construct
  misc_feature 1..20: note = Description of Artificial Sequence: Synthetic oligonucleotide
  misc_feature 1..20: note = Target: SCN10A; (-) strand; PAM type: NRG; PAM sequence: AAG
  source 1..20: mol_type = other DNA
taaacttggaaatggggagg

SEQ ID NO: 22752 - DNA, 20 bp, synthetic construct
  misc_feature 1..20: note = Description of Artificial Sequence: Synthetic oligonucleotide
  misc_feature 1..20: note = Target: SCN10A; (-) strand; PAM type: NRG; PAM sequence: AGG
  source 1..20: mol_type = other DNA
gattaaacttggaaatgggg

SEQ ID NO: 22753 - DNA, 20 bp, synthetic construct
  misc_feature 1..20: note = Description of Artificial Sequence: Synthetic oligonucleotide
  misc_feature 1..20: note = Target: SCN10A; (-) strand; PAM type: NRG; PAM sequence: GAG
  source 1..20: mol_type = other DNA
ggattaaacttggaaatggg

SEQ ID NO: 22754 - DNA, 20 bp, synthetic construct
  misc_feature 1..20: note = Description of Artificial Sequence: Synthetic oligonucleotide
  misc_feature 1..20: note = Target: SCN10A; (-) strand; PAM type: NRG; PAM sequence: GGG
  source 1..20: mol_type = other DNA
aaggattaaacttggaaatg

SEQ ID NO: 22755 - DNA, 20 bp, synthetic construct
  misc_feature 1..20: note = Description of Artificial Sequence: Synthetic oligonucleotide
  misc_feature 1..20: note = Target: SCN10A; (-) strand; PAM type: NRG; PAM sequence: GGG
  source 1..20: mol_type = other DNA
aaaggattaaacttggaaat

SEQ ID NO: 22756 - DNA, 20 bp, synthetic construct
  misc_feature 1..20: note = Description of Artificial Sequence: Synthetic oligonucleotide
  misc_feature 1..20: note = Target: SCN10A; (-) strand; PAM type: NRG; PAM sequence: TGG
  source 1..20: mol_type = other DNA
taaaggattaaacttggaaa

SEQ ID NO: 22757 - DNA, 20 bp, synthetic construct
  misc_feature 1..20: note = Description of Artificial Sequence: Synthetic oligonucleotide
  misc_feature 1..20: note = Target: SCN10A; (-) strand; PAM type: NRG; PAM sequence: TGG
  source 1..20: mol_type = other DNA
ttaaactaaaggattaaact

SEQ ID NO: 22758 - DNA, 20 bp, synthetic construct
  misc_feature 1..20: note = Description of Artificial Sequence: Synthetic oligonucleotide
  misc_feature 1..20: note = Target: SCN10A; (-) strand; PAM type: NRG; PAM sequence: AGG
  source 1..20: mol_type = other DNA
ttatttataccttaaactaa

SEQ ID NO: 22759 - DNA, 20 bp, synthetic construct
  misc_feature 1..20: note = Description of Artificial Sequence: Synthetic oligonucleotide
  misc_feature 1..20: note = Target: SCN10A; (-) strand; PAM type: NRG; PAM sequence: AAG
  source 1..20: mol_type = other DNA
tttatttataccttaaacta

SEQ ID NO: 22760 - DNA, 20 bp, synthetic construct
  misc_feature 1..20: note = Description of Artificial Sequence: Synthetic oligonucleotide
  misc_feature 1..20: note = Target: SCN10A; (-) strand; PAM type: NRG; PAM sequence: CAG
  source 1..20: mol_type = other DNA
gggattcaggcaagacccct

SEQ ID NO: 22761 - DNA, 20 bp, synthetic construct
  misc_feature 1..20: note = Description of Artificial Sequence: Synthetic oligonucleotide
  misc_feature 1..20: note = Target: SCN10A; (-) strand; PAM type: NRG; PAM sequence: AAG
  source 1..20: mol_type = other DNA
tctggttgtgggattcaggc

SEQ ID NO: 22762 - DNA, 20 bp, synthetic construct
  misc_feature 1..20: note = Description of Artificial Sequence: Synthetic oligonucleotide
  misc_feature 1..20: note = Target: SCN10A; (-) strand; PAM type: NRG; PAM sequence: AGG
  source 1..20: mol_type = other DNA
ctgttctggttgtgggattc

SEQ ID NO: 22763 - DNA, 20 bp, synthetic construct
  misc_feature 1..20: note = Description of Artificial Sequence: Synthetic oligonucleotide
  misc_feature 1..20: note = Target: SCN10A; (-) strand; PAM type: NRG; PAM sequence: CAG
  source 1..20: mol_type = other DNA
tctgttctggttgtgggatt

SEQ ID NO: 22764 - DNA, 20 bp, synthetic construct
  misc_feature 1..20: note = Description of Artificial Sequence: Synthetic oligonucleotide
  misc_feature 1..20: note = Target: SCN10A; (-) strand; PAM type: NRG; PAM sequence: GGG
  source 1..20: mol_type = other DNA
tcactttctgttctggttgt

SEQ ID NO: 22765 - DNA, 20 bp, synthetic construct
  misc_feature 1..20: note = Description of Artificial Sequence: Synthetic oligonucleotide
  misc_feature 1..20: note = Target: SCN10A; (-) strand; PAM type: NRG; PAM sequence: TGG
  source 1..20: mol_type = other DNA
ttcactttctgttctggttg

SEQ ID NO: 22766 - DNA, 20 bp, synthetic construct
  misc_feature 1..20: note = Description of Artificial Sequence: Synthetic oligonucleotide
  misc_feature 1..20: note = Target: SCN10A; (-) strand; PAM type: NRG; PAM sequence: TGG
  source 1..20: mol_type = other DNA
catgtcttcactttctgttc

SEQ ID NO: 22767 - DNA, 20 bp, synthetic construct
  misc_feature 1..20: note = Description of Artificial Sequence: Synthetic oligonucleotide
  misc_feature 1..20: note = Target: SCN10A; (-) strand; PAM type: NRG; PAM sequence: GGG
  source 1..20: mol_type = other DNA
caatcaatacgtaacaggag

SEQ ID NO: 22768 - DNA, 20 bp, synthetic construct
  misc_feature 1..20: note = Description of Artificial Sequence: Synthetic oligonucleotide
  misc_feature 1..20: note = Target: SCN10A; (-) strand; PAM type: NRG; PAM sequence: GGG
  source 1..20: mol_type = other DNA
acaatcaatacgtaacagga

SEQ ID NO: 22769 - DNA, 20 bp, synthetic construct
  misc_feature 1..20: note = Description of Artificial Sequence: Synthetic oligonucleotide
  misc_feature 1..20: note = Target: SCN10A; (-) strand; PAM type: NRG; PAM sequence: AGG
  source 1..20: mol_type = other DNA
cacaatcaatacgtaacagg

SEQ ID NO: 22770 - DNA, 20 bp, synthetic construct
  misc_feature 1..20: note = Description of Artificial Sequence: Synthetic oligonucleotide
  misc_feature 1..20: note = Target: SCN10A; (-) strand; PAM type: NRG; PAM sequence: GAG
  source 1..20: mol_type = other DNA
tcacaatcaatacgtaacag

SEQ ID NO: 22771 - DNA, 20 bp, synthetic construct
  misc_feature 1..20: note = Description of Artificial Sequence: Synthetic oligonucleotide
  misc_feature 1..20: note = Target: SCN10A; (-) strand; PAM type: NRG; PAM sequence: AGG
  source 1..20: mol_type = other DNA
cctcacaatcaatacgtaac

SEQ ID NO: 22772 - DNA, 20 bp, synthetic construct
  misc_feature 1..20: note = Description of Artificial Sequence: Synthetic oligonucleotide
  misc_feature 1..20: note = Target: SCN10A; (-) strand; PAM type: NRG; PAM sequence: CAG
  source 1..20: mol_type = other DNA
gcctcacaatcaatacgtaa

SEQ ID NO: 22773 - DNA, 20 bp, synthetic construct
  misc_feature 1..20: note = Description of Artificial Sequence: Synthetic oligonucleotide
  misc_feature 1..20: note = Target: SCN10A; (-) strand; PAM type: NRG; PAM sequence: TGG
  source 1..20: mol_type = other DNA
tgctcttcccacataccaca

SEQ ID NO: 22774 - DNA, 20 bp, synthetic construct
  misc_feature 1..20: note = Description of Artificial Sequence: Synthetic oligonucleotide
  misc_feature 1..20: note = Target: SCN10A; (-) strand; PAM type: NRG; PAM sequence: CAG
  source 1..20: mol_type = other DNA
tattgtcccaactcctaggc

SEQ ID NO: 22775 - DNA, 20 bp, synthetic construct
  misc_feature 1..20: note = Description of Artificial Sequence: Synthetic oligonucleotide
  misc_feature 1..20: note = Target: SCN10A; (-) strand; PAM type: NRG; PAM sequence: AGG
  source 1..20: mol_type = other DNA
agcctattgtcccaactcct

SEQ ID NO: 22776 - DNA, 20 bp, synthetic construct
  misc_feature 1..20: note = Description of Artificial Sequence: Synthetic oligonucleotide
  misc_feature 1..20: note = Target: SCN10A; (-) strand; PAM type: NRG; PAM sequence: TAG
  source 1..20: mol_type = other DNA
aagcctattgtcccaactcc

SEQ ID NO: 22777 - DNA, 20 bp, synthetic construct
  misc_feature 1..20: note = Description of Artificial Sequence: Synthetic oligonucleotide
  misc_feature 1..20: note = Target: SCN10A; (-) strand; PAM type: NRG; PAM sequence: AAG
  source 1..20: mol_type = other DNA
taagagacagtgtgacctgg

SEQ ID NO: 22778 - DNA, 20 bp, synthetic construct
  misc_feature 1..20: note = Description of Artificial Sequence: Synthetic oligonucleotide
  misc_feature 1..20: note = Target: SCN10A; (-) strand; PAM type: NRG; PAM sequence: TGG
  source 1..20: mol_type = other DNA
tagtaagagacagtgtgacc

SEQ ID NO: 22779 - DNA, 20 bp, synthetic construct
  misc_feature 1..20: note = Description of Artificial Sequence: Synthetic oligonucleotide
  misc_feature 1..20: note = Target: SCN10A; (-) strand; PAM type: NRG; PAM sequence: CAG
  source 1..20: mol_type = other DNA
gcctcttcactagtaagaga

SEQ ID NO: 22780 - DNA, 20 bp, synthetic construct
  misc_feature 1..20: note = Description of Artificial Sequence: Synthetic oligonucleotide
  misc_feature 1..20: note = Target: SCN10A; (-) strand; PAM type: NRG; PAM sequence: GAG
  source 1..20: mol_type = other DNA
caaggcctcttcactagtaa

SEQ ID NO: 22781 - DNA, 20 bp, synthetic construct
  misc_feature 1..20: note = Description of Artificial Sequence: Synthetic oligonucleotide
  misc_feature 1..20: note = Target: SCN10A; (-) strand; PAM type: NRG; PAM sequence: AAG
  source 1..20: mol_type = other DNA
cccaaggcctcttcactagt

SEQ ID NO: 22782 - DNA, 20 bp, synthetic construct
  misc_feature 1..20: note = Description of Artificial Sequence: Synthetic oligonucleotide
  misc_feature 1..20: note = Target: SCN10A; (-) strand; PAM type: NRG; PAM sequence: TAG
  source 1..20: mol_type = other DNA
taaacccaaggcctcttcac

SEQ ID NO: 22783 - DNA, 20 bp, synthetic construct
  misc_feature 1..20: note = Description of Artificial Sequence: Synthetic oligonucleotide
  misc_feature 1..20: note = Target: SCN10A; (-) strand; PAM type: NRG; PAM sequence: AGG
  source 1..20: mol_type = other DNA
gtataggaaacataaaccca

SEQ ID NO: 22784 - DNA, 20 bp, synthetic construct
  misc_feature 1..20: note = Description of Artificial Sequence: Synthetic oligonucleotide
  misc_feature 1..20: note = Target: SCN10A; (-) strand; PAM type: NRG; PAM sequence: AAG
  source 1..20: mol_type = other DNA
agtataggaaacataaaccc

SEQ ID NO: 22785 - DNA, 20 bp, synthetic construct
  misc_feature 1..20: note = Description of Artificial Sequence: Synthetic oligonucleotide
  misc_feature 1..20: note = Target: SCN10A; (-) strand; PAM type: NRG; PAM sequence: AGG
  source 1..20: mol_type = other DNA
ggaactgaggcctggagtat

SEQ ID NO: 22786 - DNA, 20 bp, synthetic construct
  misc_feature 1..20: note = Description of Artificial Sequence: Synthetic oligonucleotide
  misc_feature 1..20: note = Target: SCN10A; (-) strand; PAM type: NRG; PAM sequence: TAG
  source 1..20: mol_type = other DNA
aggaactgaggcctggagta

SEQ ID NO: 22787 - DNA, 20 bp, synthetic construct
  misc_feature 1..20: note = Description of Artificial Sequence: Synthetic oligonucleotide
  misc_feature 1..20: note = Target: SCN10A; (-) strand; PAM type: NRG; PAM sequence: GAG
  source 1..20: mol_type = other DNA
gacaaaggaactgaggcctg

SEQ ID NO: 22788 - DNA, 20 bp, synthetic construct
  misc_feature 1..20: note = Description of Artificial Sequence: Synthetic oligonucleotide
  misc_feature 1..20: note = Target: SCN10A; (-) strand; PAM type: NRG; PAM sequence: TGG
  source 1..20: mol_type = other DNA
aagacaaaggaactgaggcc

SEQ ID NO: 22789 - DNA, 20 bp, synthetic construct
  misc_feature 1..20: note = Description of Artificial Sequence: Synthetic oligonucleotide
  misc_feature 1..20: note = Target: SCN10A; (-) strand; PAM type: NRG; PAM sequence: AGG
  source 1..20: mol_type = other DNA
cttacaagacaaaggaactg

SEQ ID NO: 22790 - DNA, 20 bp, synthetic construct
  misc_feature 1..20: note = Description of Artificial Sequence: Synthetic oligonucleotide
  misc_feature 1..20: note = Target: SCN10A; (-) strand; PAM type: NRG; PAM sequence: GAG
  source 1..20: mol_type = other DNA
acttacaagacaaaggaact

SEQ ID NO: 22791 - DNA, 20 bp, synthetic construct
  misc_feature 1..20: note = Description of Artificial Sequence: Synthetic oligonucleotide
  misc_feature 1..20: note = Target: SCN10A; (-) strand; PAM type: NRG; PAM sequence: AGG
  source 1..20: mol_type = other DNA
tgtccccacttacaagacaa

SEQ ID NO: 22792 - DNA, 20 bp, synthetic construct
  misc_feature 1..20: note = Description of Artificial Sequence: Synthetic oligonucleotide
  misc_feature 1..20: note = Target: SCN10A; (-) strand; PAM type: NRG; PAM sequence: AAG
  source 1..20: mol_type = other DNA
ttgtccccacttacaagaca

SEQ ID NO: 22793 - DNA, 20 bp, synthetic construct
  misc_feature 1..20: note = Description of Artificial Sequence: Synthetic oligonucleotide
  misc_feature 1..20: note = Target: SCN10A; (-) strand; PAM type: NRG; PAM sequence: AAG
  source 1..20: mol_type = other DNA
agactattgtccccacttac

SEQ ID NO: 22794 - DNA, 20 bp, synthetic construct
  misc_feature 1..20: note = Description of Artificial Sequence: Synthetic oligonucleotide
  misc_feature 1..20: note = Target: SCN10A; (-) strand; PAM type: NRG; PAM sequence: AAG
  source 1..20: mol_type = other DNA
ccctgtaaggttccagggca

SEQ ID NO: 22795 - DNA, 20 bp, synthetic construct
  misc_feature 1..20: note = Description of Artificial Sequence: Synthetic oligonucleotide
  misc_feature 1..20: note = Target: SCN10A; (-) strand; PAM type: NRG; PAM sequence: GGG
  source 1..20: mol_type = other DNA
aagaaccctgtaaggttcca

SEQ ID NO: 22796 - DNA, 20 bp, synthetic construct
  misc_feature 1..20: note = Description of Artificial Sequence: Synthetic oligonucleotide
  misc_feature 1..20: note = Target: SCN10A; (-) strand; PAM type: NRG; PAM sequence: AGG
  source 1..20: mol_type = other DNA
caagaaccctgtaaggttcc

SEQ ID NO: 22797 - DNA, 20 bp, synthetic construct
  misc_feature 1..20: note = Description of Artificial Sequence: Synthetic oligonucleotide
  misc_feature 1..20: note = Target: SCN10A; (-) strand; PAM type: NRG; PAM sequence: CAG
  source 1..20: mol_type = other DNA
acaagaaccctgtaaggttc

SEQ ID NO: 22798 - DNA, 20 bp, synthetic construct
  misc_feature 1..20: note = Description of Artificial Sequence: Synthetic oligonucleotide
  misc_feature 1..20: note = Target: SCN10A; (-) strand; PAM type: NRG; PAM sequence: AGG
  source 1..20: mol_type = other DNA
attttcacaagaaccctgta

SEQ ID NO: 22799 - DNA, 20 bp, synthetic construct
  misc_feature 1..20: note = Description of Artificial Sequence: Synthetic oligonucleotide
  misc_feature 1..20: note = Target: SCN10A; (-) strand; PAM type: NRG; PAM sequence: AAG
  source 1..20: mol_type = other DNA
aattttcacaagaaccctgt

SEQ ID NO: 22800 - DNA, 20 bp, synthetic construct
  misc_feature 1..20: note = Description of Artificial Sequence: Synthetic oligonucleotide
  misc_feature 1..20: note = Target: SCN10A; (-) strand; PAM type: NRG; PAM sequence: AAG
  source 1..20: mol_type = other DNA
ctcccttctctaattttcac

SEQ ID NO: 22801 - DNA, 20 bp, synthetic construct
  misc_feature 1..20: note = Description of Artificial Sequence: Synthetic oligonucleotide
  misc_feature 1..20: note = Target: SCN10A; (-) strand; PAM type: NRG; PAM sequence: CAG
  source 1..20: mol_type = other DNA
agagcatatgttggttttca

SEQ ID NO: 22802 - DNA, 20 bp, synthetic construct
  misc_feature 1..20: note = Description of Artificial Sequence: Synthetic oligonucleotide
  misc_feature 1..20: note = Target: SCN10A; (-) strand; PAM type: NRG; PAM sequence: TGG
  source 1..20: mol_type = other DNA
tttattcacagagcatatgt

SEQ ID NO: 22803 - DNA, 20 bp, synthetic construct
  misc_feature 1..20: note = Description of Artificial Sequence: Synthetic oligonucleotide
  misc_feature 1..20: note = Target: SCN10A; (-) strand; PAM type: NRG; PAM sequence: GAG
  source 1..20: mol_type = other DNA
caggtgagcatttattcaca

SEQ ID NO: 22804 - DNA, 20 bp, synthetic construct
  misc_feature 1..20: note = Description of Artificial Sequence: Synthetic oligonucleotide
  misc_feature 1..20: note = Target: SCN10A; (-) strand; PAM type: NRG; PAM sequence: CAG
  source 1..20: mol_type = other DNA
cccaggtgagcatttattca

SEQ ID NO: 22805 - DNA, 20 bp, synthetic construct
  misc_feature 1..20: note = Description of Artificial Sequence: Synthetic oligonucleotide
  misc_feature 1..20: note = Target: SCN10A; (-) strand; PAM type: NRG; PAM sequence: GAG
  source 1..20: mol_type = other DNA
cagtttctgtgatcccaggt

SEQ ID NO: 22806 - DNA, 20 bp, synthetic construct
  misc_feature 1..20: note = Description of Artificial Sequence: Synthetic oligonucleotide
  misc_feature 1..20: note = Target: SCN10A; (-) strand; PAM type: NRG; PAM sequence: AGG
  source 1..20: mol_type = other DNA
aaaacagtttctgtgatccc

SEQ ID NO: 22807 - DNA, 20 bp, synthetic construct
  misc_feature 1..20: note = Description of Artificial Sequence: Synthetic oligonucleotide
  misc_feature 1..20: note = Target: SCN10A; (-) strand; PAM type: NRG; PAM sequence: CAG
  source 1..20: mol_type = other DNA
aaaaacagtttctgtgatcc

SEQ ID NO: 22808 - DNA, 20 bp, synthetic construct
  misc_feature 1..20: note = Description of Artificial Sequence: Synthetic oligonucleotide
  misc_feature 1..20: note = Target: SCN10A; (-) strand; PAM type: NRG; PAM sequence: CAG
  source 1..20: mol_type = other DNA
agttcttagagcattaaaaa

SEQ ID NO: 22809 - DNA, 20 bp, synthetic construct
  misc_feature 1..20: note = Description of Artificial Sequence: Synthetic oligonucleotide
  misc_feature 1..20: note = Target: SCN10A; (-) strand; PAM type: NRG; PAM sequence: GAG
  source 1..20: mol_type = other DNA
gcggacattcagagttctta

SEQ ID NO: 22810 - DNA, 20 bp, synthetic construct
  misc_feature 1..20: note = Description of Artificial Sequence: Synthetic oligonucleotide
  misc_feature 1..20: note = Target: SCN10A; (-) strand; PAM type: NRG; PAM sequence: TAG
  source 1..20: mol_type = other DNA
ctgcggacattcagagttct

SEQ ID NO: 22811 - DNA, 20 bp, synthetic construct
  misc_feature 1..20: note = Description of Artificial Sequence: Synthetic oligonucleotide
  misc_feature 1..20: note = Target: SCN10A; (-) strand; PAM type: NRG; PAM sequence: GAG
  source 1..20: mol_type = other DNA
ctcaggcctgcggacattca

SEQ ID NO: 22812 - DNA, 20 bp, synthetic construct
  misc_feature 1..20: note = Description of Artificial Sequence: Synthetic oligonucleotide
  misc_feature 1..20: note = Target: SCN10A; (-) strand; PAM type: NRG; PAM sequence: CAG
  source 1..20: mol_type = other DNA
atctcaggcctgcggacatt

SEQ ID NO: 22813 - DNA, 20 bp, synthetic construct
  misc_feature 1..20: note = Description of Artificial Sequence: Synthetic oligonucleotide
  misc_feature 1..20: note = Target: SCN10A; (-) strand; PAM type: NRG; PAM sequence: CGG
  source 1..20: mol_type = other DNA
tccgtgggatctcaggcctg

SEQ ID NO: 22814 - DNA, 20 bp, synthetic construct
  misc_feature 1..20: note = Description of Artificial Sequence: Synthetic oligonucleotide
  misc_feature 1..20: note = Target: SCN10A; (-) strand; PAM type: NRG; PAM sequence: AGG
  source 1..20: mol_type = other DNA
atagatctccgtgggatctc

SEQ ID NO: 22815 - DNA, 20 bp, synthetic construct
  misc_feature 1..20: note = Description of Artificial Sequence: Synthetic oligonucleotide
  misc_feature 1..20: note = Target: SCN10A; (-) strand; PAM type: NRG; PAM sequence: CAG
  source 1..20: mol_type = other DNA
aatagatctccgtgggatct

SEQ ID NO: 22816 - DNA, 20 bp, synthetic construct
  misc_feature 1..20: note = Description of Artificial Sequence: Synthetic oligonucleotide
  misc_feature 1..20: note = Target: SCN10A; (-) strand; PAM type: NRG; PAM sequence: GGG
  source 1..20: mol_type = other DNA
gcacagcaatagatctccgt

SEQ ID NO: 22817 - DNA, 20 bp, synthetic construct
  misc_feature 1..20: note = Description of Artificial Sequence: Synthetic oligonucleotide
  misc_feature 1..20: note = Target: SCN10A; (-) strand; PAM type: NRG; PAM sequence: TGG
  source 1..20: mol_type = other DNA
ggcacagcaatagatctccg

SEQ ID NO: 22818 - DNA, 20 bp, synthetic construct
  misc_feature 1..20: note = Description of Artificial Sequence: Synthetic oligonucleotide
  misc_feature 1..20: note = Target: SCN10A; (-) strand; PAM type: NRG; PAM sequence: TAG
  source 1..20: mol_type = other DNA
cagatatgttggcacagcaa

SEQ ID NO: 22819 - DNA, 20 bp, synthetic construct
  misc_feature 1..20: note = Description of Artificial Sequence: Synthetic oligonucleotide
  misc_feature 1..20: note = Target: SCN10A; (-) strand; PAM type: NRG; PAM sequence: CAG
  source 1..20: mol_type = other DNA
gtcctacagatatgttggca

SEQ ID NO: 22820 - DNA, 20 bp, synthetic construct
  misc_feature 1..20: note = Description of Artificial Sequence: Synthetic oligonucleotide
  misc_feature 1..20: note = Target: SCN10A; (-) strand; PAM type: NRG; PAM sequence: TGG
  source 1..20: mol_type = other DNA
ttctggtcctacagatatgt

SEQ ID NO: 22821 - DNA, 20 bp, synthetic construct
  misc_feature 1..20: note = Description of Artificial Sequence: Synthetic oligonucleotide
  misc_feature 1..20: note = Target: SCN10A; (-) strand; PAM type: NRG; PAM sequence: CAG
  source 1..20: mol_type = other DNA
ctgactaacttctggtccta

SEQ ID NO: 22822 - DNA, 20 bp, synthetic construct
  misc_feature 1..20: note = Description of Artificial Sequence: Synthetic oligonucleotide
  misc_feature 1..20: note = Target: SCN10A; (-) strand; PAM type: NRG; PAM sequence: TGG
  source 1..20: mol_type = other DNA
cagagatgctgactaacttc

SEQ ID NO: 22823 - DNA, 20 bp, synthetic construct
  misc_feature 1..20: note = Description of Artificial Sequence: Synthetic oligonucleotide
  misc_feature 1..20: note = Target: SCN10A; (-) strand; PAM type: NRG; PAM sequence: GAG
  source 1..20: mol_type = other DNA
ccccaggacccttgcttgca

SEQ ID NO: 22824 - DNA, 20 bp, synthetic construct
  misc_feature 1..20: note = Description of Artificial Sequence: Synthetic oligonucleotide
  misc_feature 1..20: note = Target: SCN10A; (-) strand; PAM type: NRG; PAM sequence: CAG
  source 1..20: mol_type = other DNA
atccccaggacccttgcttg

SEQ ID NO: 22825 - DNA, 20 bp, synthetic construct
  misc_feature 1..20: note = Description of Artificial Sequence: Synthetic oligonucleotide
  misc_feature 1..20: note = Target: SCN10A; (-) strand; PAM type: NRG; PAM sequence: AGG
  source 1..20: mol_type = other DNA
tttatgctgcatgcatcccc

SEQ ID NO: 22826 - DNA, 20 bp, synthetic construct
  misc_feature 1..20: note = Description of Artificial Sequence: Synthetic oligonucleotide
  misc_feature 1..20: note = Target: SCN10A; (-) strand; PAM type: NRG; PAM sequence: CAG
  source 1..20: mol_type = other DNA
atttatgctgcatgcatccc

SEQ ID NO: 22827 - DNA, 20 bp, synthetic construct
  misc_feature 1..20: note = Description of Artificial Sequence: Synthetic oligonucleotide
  misc_feature 1..20: note = Target: SCN10A; (-) strand; PAM type: NRG; PAM sequence: AGG
  source 1..20: mol_type = other DNA
ttctaggctaatgatacccc

SEQ ID NO: 22828 - DNA, 20 bp, synthetic construct
  misc_feature 1..20: note = Description of Artificial Sequence: Synthetic oligonucleotide
  misc_feature 1..20: note = Target: SCN10A; (-) strand; PAM type: NRG; PAM sequence: CAG
  source 1..20: mol_type = other DNA
tttctaggctaatgataccc

SEQ ID NO: 22829 - DNA, 20 bp, synthetic construct
  misc_feature 1..20: note = Description of Artificial Sequence: Synthetic oligonucleotide
  misc_feature 1..20: note = Target: SCN10A; (-) strand; PAM type: NRG; PAM sequence: AGG
  source 1..20: mol_type = other DNA
gtccattctgcatcctttct

SEQ ID NO: 22830 - DNA, 20 bp, synthetic construct
  misc_feature 1..20: note = Description of Artificial Sequence: Synthetic oligonucleotide
  misc_feature 1..20: note = Target: SCN10A; (-) strand; PAM type: NRG; PAM sequence: TAG
  source 1..20: mol_type = other DNA
tgtccattctgcatcctttc

SEQ ID NO: 22831 - DNA, 20 bp, synthetic construct
  misc_feature 1..20: note = Description of Artificial Sequence: Synthetic oligonucleotide
  misc_feature 1..20: note = Target: SCN10A; (-) strand; PAM type: NRG; PAM sequence: AAG
  source 1..20: mol_type = other DNA
tggcagtgtcactagattct

SEQ ID NO: 22832 - DNA, 20 bp, synthetic construct
  misc_feature 1..20: note = Description of Artificial Sequence: Synthetic oligonucleotide
  misc_feature 1..20: note = Target: SCN10A; (-) strand; PAM type: NRG; PAM sequence: TAG
  source 1..20: mol_type = other DNA
tctatagatggcagtgtcac

SEQ ID NO: 22833 - DNA, 20 bp, synthetic construct
  misc_feature 1..20: note = Description of Artificial Sequence: Synthetic oligonucleotide
  misc_feature 1..20: note = Target: SCN10A; (-) strand; PAM type: NRG; PAM sequence: CAG
  source 1..20: mol_type = other DNA
cagtgtcagtctatagatgg

SEQ ID NO: 22834 - DNA, 20 bp, synthetic construct
  misc_feature 1..20: note = Description of Artificial Sequence: Synthetic oligonucleotide
  misc_feature 1..20: note = Target: SCN10A; (-) strand; PAM type: NRG; PAM sequence: TGG
  source 1..20: mol_type = other DNA
tgtcagtgtcagtctataga

SEQ ID NO: 22835 - DNA, 20 bp, synthetic construct
  misc_feature 1..20: note = Description of Artificial Sequence: Synthetic oligonucleotide
  misc_feature 1..20: note = Target: SCN10A; (-) strand; PAM type: NRG; PAM sequence: TAG
  source 1..20: mol_type = other DNA
tcagtgtcagtgtcagtcta

SEQ ID NO: 22836 - DNA, 20 bp, synthetic construct
  misc_feature 1..20: note = Description of Artificial Sequence: Synthetic oligonucleotide
  misc_feature 1..20: note = Target: SCN10A; (-) strand; PAM type: NRG; PAM sequence: CAG
  source 1..20: mol_type = other DNA
aatgaaatcagtgtcagtgt

SEQ ID NO: 22837 - DNA, 20 bp, synthetic construct
  misc_feature 1..20: note = Description of Artificial Sequence: Synthetic oligonucleotide
  misc_feature 1..20: note = Target: SCN10A; (-) strand; PAM type: NRG; PAM sequence: CAG
  source 1..20: mol_type = other DNA
tgcaataatgaaatcagtgt

SEQ ID NO: 22838 - DNA, 20 bp, synthetic construct
  misc_feature 1..20: note = Description of Artificial Sequence: Synthetic oligonucleotide
  misc_feature 1..20: note = Target: SCN10A; (-) strand; PAM type: NRG; PAM sequence: CAG
  source 1..20: mol_type = other DNA
agatgttgcaataatgaaat

SEQ ID NO: 22839 - DNA, 20 bp, synthetic construct
  misc_feature 1..20: note = Description of Artificial Sequence: Synthetic oligonucleotide
  misc_feature 1..20: note = Target: SCN10A; (-) strand; PAM type: NRG; PAM sequence: AAG
  source 1..20: mol_type = other DNA
tctcaaagggtccactctga

SEQ ID NO: 22840 - DNA, 20 bp, synthetic construct
  misc_feature 1..20: note = Description of Artificial Sequence: Synthetic oligonucleotide
  misc_feature 1..20: note = Target: SCN10A; (-) strand; PAM type: NRG; PAM sequence: GGG
  source 1..20: mol_type = other DNA
tcacaatgcatcttctcaaa

SEQ ID NO: 22841 - DNA, 20 bp, synthetic construct
  misc_feature 1..20: note = Description of Artificial Sequence: Synthetic oligonucleotide
  misc_feature 1..20: note = Target: SCN10A; (-) strand; PAM type: NRG; PAM sequence: AGG
  source 1..20: mol_type = other DNA
atcacaatgcatcttctcaa

SEQ ID NO: 22842 - DNA, 20 bp, synthetic construct
  misc_feature 1..20: note = Description of Artificial Sequence: Synthetic oligonucleotide
  misc_feature 1..20: note = Target: SCN10A; (-) strand; PAM type: NRG; PAM sequence: AAG
  source 1..20: mol_type = other DNA
gatcacaatgcatcttctca

SEQ ID NO: 22843 - DNA, 20 bp, synthetic construct
  misc_feature 1..20: note = Description of Artificial Sequence: Synthetic oligonucleotide
  misc_feature 1..20: note = Target: SCN10A; (-) strand; PAM type: NRG; PAM sequence: TAG
  source 1..20: mol_type = other DNA
cgtccacatgcagtgttgcc

SEQ ID NO: 22844 - DNA, 20 bp, synthetic construct
  misc_feature 1..20: note = Description of Artificial Sequence: Synthetic oligonucleotide
  misc_feature 1..20: note = Target: SCN10A; (-) strand; PAM type: NRG; PAM sequence: CAG
  source 1..20: mol_type = other DNA
tttgaagatccgtccacatg

SEQ ID NO: 22845 - DNA, 20 bp, synthetic construct
  misc_feature 1..20: note = Description of Artificial Sequence: Synthetic oligonucleotide
  misc_feature 1..20: note = Target: SCN10A; (-) strand; PAM type: NRG; PAM sequence: AAG
  source 1..20: mol_type = other DNA
tggtcaaactcctgtgtttg

SEQ ID NO: 22846 - DNA, 20 bp, synthetic construct
  misc_feature 1..20: note = Description of Artificial Sequence: Synthetic oligonucleotide
  misc_feature 1..20: note = Target: SCN10A; (-) strand; PAM type: NRG; PAM sequence: TGG
  source 1..20: mol_type = other DNA
cagtgtctgaggagactggt

SEQ ID NO: 22847 - DNA, 20 bp, synthetic construct
  misc_feature 1..20: note = Description of Artificial Sequence: Synthetic oligonucleotide
  misc_feature 1..20: note = Target: SCN10A; (-) strand; PAM type: NRG; PAM sequence: TGG
  source 1..20: mol_type = other DNA
aaatcagtgtctgaggagac

SEQ ID NO: 22848 - DNA, 20 bp, synthetic construct
  misc_feature 1..20: note = Description of Artificial Sequence: Synthetic oligonucleotide
  misc_feature 1..20: note = Target: SCN10A; (-) strand; PAM type: NRG; PAM sequence: GAG
  source 1..20: mol_type = other DNA
ctgagaaatcagtgtctgag

SEQ ID NO: 22849 - DNA, 20 bp, synthetic construct
  misc_feature 1..20: note = Description of Artificial Sequence: Synthetic oligonucleotide
  misc_feature 1..20: note = Target: SCN10A; (-) strand; PAM type: NRG; PAM sequence: AGG
  source 1..20: mol_type = other DNA
ttctgagaaatcagtgtctg

SEQ ID NO: 22850 - DNA, 20 bp, synthetic construct
  misc_feature 1..20: note = Description of Artificial Sequence: Synthetic oligonucleotide
  misc_feature 1..20: note = Target: SCN10A; (-) strand; PAM type: NRG; PAM sequence: GAG
  source 1..20: mol_type = other DNA
cttctgagaaatcagtgtct

SEQ ID NO: 22851 - DNA, 20 bp, synthetic construct
  misc_feature 1..20: note = Description of Artificial Sequence: Synthetic oligonucleotide
  misc_feature 1..20: note = Target: SCN10A; (-) strand; PAM type: NRG; PAM sequence: CAG
  source 1..20: mol_type = other DNA
gcggtctccttctgagaaat

SEQ ID NO: 22852 - DNA, 20 bp, synthetic construct
  misc_feature 1..20: note = Description of Artificial Sequence: Synthetic oligonucleotide
  misc_feature 1..20: note = Target: SCN10A; (-) strand; PAM type: NRG; PAM sequence: GAG
  source 1..20: mol_type = other DNA
tgacatggcggtctccttct

SEQ ID NO: 22853 - DNA, 20 bp, synthetic construct
  misc_feature 1..20: note = Description of Artificial Sequence: Synthetic oligonucleotide
  misc_feature 1..20: note = Target: SCN10A; (-) strand; PAM type: NRG; PAM sequence: CGG
  source 1..20: mol_type = other DNA
cttgtacccccctgacatgg

SEQ ID NO: 22854 - DNA, 20 bp, synthetic construct
  misc_feature 1..20: note = Description of Artificial Sequence: Synthetic oligonucleotide
  misc_feature 1..20: note = Target: SCN10A; (-) strand; PAM type: NRG; PAM sequence: TGG
  source 1..20: mol_type = other DNA
agccttgtacccccctgaca

SEQ ID NO: 22855 - DNA, 20 bp, synthetic construct
  misc_feature 1..20: note = Description of Artificial Sequence: Synthetic oligonucleotide
  misc_feature 1..20: note = Target: SCN10A; (-) strand; PAM type: NRG; PAM sequence: CAG
  source 1..20: mol_type = other DNA
acagtggatcagaaaaggcc

SEQ ID NO: 22856 - DNA, 20 bp, synthetic construct
  misc_feature 1..20: note = Description of Artificial Sequence: Synthetic oligonucleotide
  misc_feature 1..20: note = Target: SCN10A; (-) strand; PAM type: NRG; PAM sequence: AGG
  source 1..20: mol_type = other DNA
ctgtcacagtggatcagaaa

SEQ ID NO: 22857 - DNA, 20 bp, synthetic construct
  misc_feature 1..20: note = Description of Artificial Sequence: Synthetic oligonucleotide
  misc_feature 1..20: note = Target: SCN10A; (-) strand; PAM type: NRG; PAM sequence: AAG
  source 1..20: mol_type = other DNA
cctgtcacagtggatcagaa

SEQ ID NO: 22858 - DNA, 20 bp, synthetic construct
  misc_feature 1..20: note = Description of Artificial Sequence: Synthetic oligonucleotide
  misc_feature 1..20: note = Target: SCN10A; (-) strand; PAM type: NRG; PAM sequence: CAG
  source 1..20: mol_type = other DNA
gttagcctgtcacagtggat

SEQ ID NO: 22859 - DNA, 20 bp, synthetic construct
  misc_feature 1..20: note = Description of Artificial Sequence: Synthetic oligonucleotide
  misc_feature 1..20: note = Target: SCN10A; (-) strand; PAM type: NRG; PAM sequence: TGG
  source 1..20: mol_type = other DNA
taacagttagcctgtcacag

SEQ ID NO: 22860 - DNA, 20 bp, synthetic construct
  misc_feature 1..20: note = Description of Artificial Sequence: Synthetic oligonucleotide
  misc_feature 1..20: note = Target: SCN10A; (-) strand; PAM type: NRG; PAM sequence: CAG
  source 1..20: mol_type = other DNA
agataacagttagcctgtca

SEQ ID NO: 22861 - DNA, 20 bp, synthetic construct
  misc_feature 1..20: note = Description of Artificial Sequence: Synthetic oligonucleotide
  misc_feature 1..20: note = Target: SCN10A; (-) strand; PAM type: NRG; PAM sequence: TAG
  source 1..20: mol_type = other DNA
ctcaaatctgagataacagt

SEQ ID NO: 22862 - DNA, 20 bp, synthetic construct
  misc_feature 1..20: note = Description of Artificial Sequence: Synthetic oligonucleotide
  misc_feature 1..20: note = Target: SCN10A; (-) strand; PAM type: NRG; PAM sequence: CAG
  source 1..20: mol_type = other DNA
agacctcaaatctgagataa

SEQ ID NO: 22863 - DNA, 20 bp, synthetic construct
  misc_feature 1..20: note = Description of Artificial Sequence: Synthetic oligonucleotide
  misc_feature 1..20: note = Target: SCN10A; (-) strand; PAM type: NRG; PAM sequence: GAG
  source 1..20: mol_type = other DNA
atgtcagagacctcaaatct

SEQ ID NO: 22864 - DNA, 20 bp, synthetic construct
  misc_feature 1..20: note = Description of Artificial Sequence: Synthetic oligonucleotide
  misc_feature 1..20: note = Target: SCN10A; (-) strand; PAM type: NRG; PAM sequence: GAG
  source 1..20: mol_type = other DNA
atgcccatgaggagatgtca

SEQ ID NO: 22865 - DNA, 20 bp, synthetic construct
  misc_feature 1..20: note = Description of Artificial Sequence: Synthetic oligonucleotide
  misc_feature 1..20: note = Target: SCN10A; (-) strand; PAM type: NRG; PAM sequence: CAG
  source 1..20: mol_type = other DNA
ccatgcccatgaggagatgt

SEQ ID NO: 22866 - DNA, 20 bp, synthetic construct
  misc_feature 1..20: note = Description of Artificial Sequence: Synthetic oligonucleotide
  misc_feature 1..20: note = Target: SCN10A; (-) strand; PAM type: NRG; PAM sequence: GAG
  source 1..20: mol_type = other DNA
attagtcccatgcccatgag

SEQ ID NO: 22867 - DNA, 20 bp, synthetic construct
  misc_feature 1..20: note = Description of Artificial Sequence: Synthetic oligonucleotide
  misc_feature 1..20: note = Target: SCN10A; (-) strand; PAM type: NRG; PAM sequence: AGG
  source 1..20: mol_type = other DNA
agattagtcccatgcccatg

SEQ ID NO: 22868 - DNA, 20 bp, synthetic construct
  misc_feature 1..20: note = Description of Artificial Sequence: Synthetic oligonucleotide
  misc_feature 1..20: note = Target: SCN10A; (-) strand; PAM type: NRG; PAM sequence: GAG
  source 1..20: mol_type = other DNA
aagattagtcccatgcccat

SEQ ID NO: 22869 - DNA, 20 bp, synthetic construct
  misc_feature 1..20: note = Description of Artificial Sequence: Synthetic oligonucleotide
  misc_feature 1..20: note = Target: SCN10A; (-) strand; PAM type: NRG; PAM sequence: TAG
  source 1..20: mol_type = other DNA
cgggggttgctttccaagat

SEQ ID NO: 22870 - DNA, 20 bp, synthetic construct
  misc_feature 1..20: note = Description of Artificial Sequence: Synthetic oligonucleotide
  misc_feature 1..20: note = Target: SCN10A; (-) strand; PAM type: NRG; PAM sequence: AAG
  source 1..20: mol_type = other DNA
cgcttcgggggttgctttcc

SEQ ID NO: 22871 - DNA, 20 bp, synthetic construct
  misc_feature 1..20: note = Description of Artificial Sequence: Synthetic oligonucleotide
  misc_feature 1..20: note = Target: SCN10A; (-) strand; PAM type: NRG; PAM sequence: GGG
  source 1..20: mol_type = other DNA
gccacagagtaccgcttcgg

SEQ ID NO: 22872 - DNA, 20 bp, synthetic construct
  misc_feature 1..20: note = Description of Artificial Sequence: Synthetic oligonucleotide
  misc_feature 1..20: note = Target: SCN10A; (-) strand; PAM type: NRG; PAM sequence: GGG
  source 1..20: mol_type = other DNA
tgccacagagtaccgcttcg

SEQ ID NO: 22873 - DNA, 20 bp, synthetic construct
  misc_feature 1..20: note = Description of Artificial Sequence: Synthetic oligonucleotide
  misc_feature 1..20: note = Target: SCN10A; (-) strand; PAM type: NRG; PAM sequence: GGG
  source 1..20: mol_type = other DNA
ttgccacagagtaccgcttc

SEQ ID NO: 22874 - DNA, 20 bp, synthetic construct
  misc_feature 1..20: note = Description of Artificial Sequence: Synthetic oligonucleotide
  misc_feature 1..20: note = Target: SCN10A; (-) strand; PAM type: NRG; PAM sequence: CGG
  source 1..20: mol_type = other DNA
cttgccacagagtaccgctt

SEQ ID NO: 22875 - DNA, 20 bp, synthetic construct
  misc_feature 1..20: note = Description of Artificial Sequence: Synthetic oligonucleotide
  misc_feature 1..20: note = Target: SCN10A; (-) strand; PAM type: NRG; PAM sequence: GAG
  source 1..20: mol_type = other DNA
ggcctggggttcttgccaca

SEQ ID NO: 22876 - DNA, 20 bp, synthetic construct
  misc_feature 1..20: note = Description of Artificial Sequence: Synthetic oligonucleotide
  misc_feature 1..20: note = Target: SCN10A; (-) strand; PAM type: NRG; PAM sequence: CAG
  source 1..20: mol_type = other DNA
atggcctggggttcttgcca

SEQ ID NO: 22877 - DNA, 20 bp, synthetic construct
  misc_feature 1..20: note = Description of Artificial Sequence: Synthetic oligonucleotide
  misc_feature 1..20: note = Target: SCN10A; (-) strand; PAM type: NRG; PAM sequence: GGG
  source 1..20: mol_type = other DNA
atttggaattgtatggcctg

SEQ ID NO: 22878 - DNA, 20 bp, synthetic construct
  misc_feature 1..20: note = Description of Artificial Sequence: Synthetic oligonucleotide
  misc_feature 1..20: note = Target: SCN10A; (-) strand; PAM type: NRG; PAM sequence: GGG
  source 1..20: mol_type = other DNA
catttggaattgtatggcct

SEQ ID NO: 22879 - DNA, 20 bp, synthetic construct
  misc_feature 1..20: note = Description of Artificial Sequence: Synthetic oligonucleotide
  misc_feature 1..20: note = Target: SCN10A; (-) strand; PAM type: NRG; PAM sequence: TGG
  source 1..20: mol_type = other DNA
tcatttggaattgtatggcc

SEQ ID NO: 22880 - DNA, 20 bp, synthetic construct
  misc_feature 1..20: note = Description of Artificial Sequence: Synthetic oligonucleotide
  misc_feature 1..20: note = Target: SCN10A; (-) strand; PAM type: NRG; PAM sequence: TGG
  source 1..20: mol_type = other DNA
cttcctcatttggaattgta

SEQ ID NO: 22881 - DNA, 20 bp, synthetic construct
  misc_feature 1..20: note = Description of Artificial Sequence: Synthetic oligonucleotide
  misc_feature 1..20: note = Target: SCN10A; (-) strand; PAM type: NRG; PAM sequence: TGG
  source 1..20: mol_type = other DNA
ctcagttcagcttcctcatt

SEQ ID NO: 22882 - DNA, 20 bp, synthetic construct
  misc_feature 1..20: note = Description of Artificial Sequence: Synthetic oligonucleotide
  misc_feature 1..20: note = Target: SCN10A; (-) strand; PAM type: NRG; PAM sequence: CAG
  source 1..20: mol_type = other DNA
gaaggttcttcatctcagtt

SEQ ID NO: 22883 - DNA, 20 bp, synthetic construct
  misc_feature 1..20: note = Description of Artificial Sequence: Synthetic oligonucleotide
  misc_feature 1..20: note = Target: SCN10A; (-) strand; PAM type: NRG; PAM sequence: CAG
  source 1..20: mol_type = other DNA
ctgaagaaggttcttcatct

SEQ ID NO: 22884 - DNA, 20 bp, synthetic construct
  misc_feature 1..20: note = Description of Artificial Sequence: Synthetic oligonucleotide
  misc_feature 1..20: note = Target: SCN10A; (-) strand; PAM type: NRG; PAM sequence: AGG
  source 1..20: mol_type = other DNA
ccaggctcacactctgaaga

SEQ ID NO: 22885 - DNA, 20 bp, synthetic construct
  misc_feature 1..20: note = Description of Artificial Sequence: Synthetic oligonucleotide
  misc_feature 1..20: note = Target: SCN10A; (-) strand; PAM type: NRG; PAM sequence: AAG
  source 1..20: mol_type = other DNA
tccaggctcacactctgaag

SEQ ID NO: 22886 - DNA, 20 bp, synthetic construct
  misc_feature 1..20: note = Description of Artificial Sequence: Synthetic oligonucleotide
  misc_feature 1..20: note = Target: SCN10A; (-) strand; PAM type: NRG; PAM sequence: AAG
  source 1..20: mol_type = other DNA
gtatccaggctcacactctg

SEQ ID NO: 22887 - DNA, 20 bp, synthetic construct
  misc_feature 1..20: note = Description of Artificial Sequence: Synthetic oligonucleotide
  misc_feature 1..20: note = Target: SCN10A; (-) strand; PAM type: NRG; PAM sequence: AGG
  source 1..20: mol_type = other DNA
tggggcttatgggtgtatcc

SEQ ID NO: 22888 - DNA, 20 bp, synthetic construct
  misc_feature 1..20: note = Description of Artificial Sequence: Synthetic oligonucleotide
  misc_feature 1..20: note = Target: SCN10A; (-) strand; PAM type: NRG; PAM sequence: CAG
  source 1..20: mol_type = other DNA
gtggggcttatgggtgtatc

SEQ ID NO: 22889 - DNA, 20 bp, synthetic construct
  misc_feature 1..20: note = Description of Artificial Sequence: Synthetic oligonucleotide
  misc_feature 1..20: note = Target: SCN10A; (-) strand; PAM type: NRG; PAM sequence: GGG
  source 1..20: mol_type = other DNA
ggtgtccatgtggggcttat

SEQ ID NO: 22890 - DNA, 20 bp, synthetic construct
  misc_feature 1..20: note = Description of Artificial Sequence: Synthetic oligonucleotide
  misc_feature 1..20: note = Target: SCN10A; (-) strand; PAM type: NRG; PAM sequence: TGG
  source 1..20: mol_type = other DNA
gggtgtccatgtggggctta

SEQ ID NO: 22891 - DNA, 20 bp, synthetic construct
  misc_feature 1..20: note = Description of Artificial Sequence: Synthetic oligonucleotide
  misc_feature 1..20: note = Target: SCN10A; (-) strand; PAM type: NRG; PAM sequence: GGG
  source 1..20: mol_type = other DNA
tttgcatgggtgtccatgtg

SEQ ID NO: 22892 - DNA, 20 bp, synthetic construct
  misc_feature 1..20: note = Description of Artificial Sequence: Synthetic oligonucleotide
  misc_feature 1..20: note = Target: SCN10A; (-) strand; PAM type: NRG; PAM sequence: GGG
  source 1..20: mol_type = other DNA
atttgcatgggtgtccatgt

SEQ ID NO: 22893 - DNA, 20 bp, synthetic construct
  misc_feature 1..20: note = Description of Artificial Sequence: Synthetic oligonucleotide
  misc_feature 1..20: note = Target: SCN10A; (-) strand; PAM type: NRG; PAM sequence: TGG
  source 1..20: mol_type = other DNA
gatttgcatgggtgtccatg

SEQ ID NO: 22894 - DNA, 20 bp, synthetic construct
  misc_feature 1..20: note = Description of Artificial Sequence: Synthetic oligonucleotide
  misc_feature 1..20: note = Target: SCN10A; (-) strand; PAM type: NRG; PAM sequence: GGG
  source 1..20: mol_type = other DNA
taaaataaaaagatttgcat

SEQ ID NO: 22895 - DNA, 20 bp, synthetic construct
  misc_feature 1..20: note = Description of Artificial Sequence: Synthetic oligonucleotide
  misc_feature 1..20: note = Target: SCN10A; (-) strand; PAM type: NRG; PAM sequence: TGG
  source 1..20: mol_type = other DNA
ataaaataaaaagatttgca

SEQ ID NO: 22896 - DNA, 20 bp, synthetic construct
  misc_feature 1..20: note = Description of Artificial Sequence: Synthetic oligonucleotide
  misc_feature 1..20: note = Target: SCN10A; (-) strand; PAM type: NRG; PAM sequence: AAG
  source 1..20: mol_type = other DNA
ttgaaataaaataaaataaa

SEQ ID NO: 22897 - DNA, 20 bp, synthetic construct
  misc_feature 1..20: note = Description of Artificial Sequence: Synthetic oligonucleotide
  misc_feature 1..20: note = Target: SCN10A; (-) strand; PAM type: NRG; PAM sequence: AAG
  source 1..20: mol_type = other DNA
aaactattgaaatacaaata

SEQ ID NO: 22898 - DNA, 20 bp, synthetic construct
  misc_feature 1..20: note = Description of Artificial Sequence: Synthetic oligonucleotide
  misc_feature 1..20: note = Target: SCN10A; (-) strand; PAM type: NRG; PAM sequence: AAG
  source 1..20: mol_type = other DNA
aatctcagaaatcagcgtta

SEQ ID NO: 22899 - DNA, 20 bp, synthetic construct
  misc_feature 1..20: note = Description of Artificial Sequence: Synthetic oligonucleotide
  misc_feature 1..20: note = Target: SCN10A; (-) strand; PAM type: NRG; PAM sequence: CAG
  source 1..20: mol_type = other DNA
tgcaccaaaatctcagaaat

SEQ ID NO: 22900 - DNA, 20 bp, synthetic construct
  misc_feature 1..20: note = Description of Artificial Sequence: Synthetic oligonucleotide
  misc_feature 1..20: note = Target: SCN10A; (-) strand; PAM type: NRG; PAM sequence: CAG
  source 1..20: mol_type = other DNA
gtgatggtgcaccaaaatct

SEQ ID NO: 22901 - DNA, 20 bp, synthetic construct
  misc_feature 1..20: note = Description of Artificial Sequence: Synthetic oligonucleotide
  misc_feature 1..20: note = Target: SCN10A; (-) strand; PAM type: NRG; PAM sequence: TGG
  source 1..20: mol_type = other DNA
agtgtacactgctcgggtga

SEQ ID NO: 22902 - DNA, 20 bp, synthetic construct
  misc_feature 1..20: note = Description of Artificial Sequence: Synthetic oligonucleotide
  misc_feature 1..20: note = Target: SCN10A; (-) strand; PAM type: NRG; PAM sequence: GGG
  source 1..20: mol_type = other DNA
gggtacagtgtacactgctc

SEQ ID NO: 22903 - DNA, 20 bp, synthetic construct
  misc_feature 1..20: note = Description of Artificial Sequence: Synthetic oligonucleotide
  misc_feature 1..20: note = Target: SCN10A; (-) strand; PAM type: NRG; PAM sequence: CGG
  source 1..20: mol_type = other DNA
tgggtacagtgtacactgct

SEQ ID NO: 22904 - DNA, 20 bp, synthetic construct
  misc_feature 1..20: note = Description of Artificial Sequence: Synthetic oligonucleotide
  misc_feature 1..20: note = Target: SCN10A; (-) strand; PAM type: NRG; PAM sequence: CAG
  source 1..20: mol_type = other DNA
aagagactacacactgggta

SEQ ID NO: 22905 - DNA, 20 bp, synthetic construct
  misc_feature 1..20: note = Description of Artificial Sequence: Synthetic oligonucleotide
  misc_feature 1..20: note = Target: SCN10A; (-) strand; PAM type: NRG; PAM sequence: GGG
  source 1..20: mol_type = other DNA
gggataagagactacacact

SEQ ID NO: 22906 - DNA, 20 bp, synthetic construct
  misc_feature 1..20: note = Description of Artificial Sequence: Synthetic oligonucleotide
  misc_feature 1..20: note = Target: SCN10A; (-) strand; PAM type: NRG; PAM sequence: TGG
  source 1..20: mol_type = other DNA
agggataagagactacacac

SEQ ID NO: 22907 - DNA, 20 bp, synthetic construct
  misc_feature 1..20: note = Description of Artificial Sequence: Synthetic oligonucleotide
  misc_feature 1..20: note = Target: SCN10A; (-) strand; PAM type: NRG; PAM sequence: GAG
  source 1..20: mol_type = other DNA
gagacgaaggtaagggataa

SEQ ID NO: 22908 - DNA, 20 bp, synthetic construct
  misc_feature 1..20: note = Description of Artificial Sequence: Synthetic oligonucleotide
  misc_feature 1..20: note = Target: SCN10A; (-) strand; PAM type: NRG; PAM sequence: AAG
  source 1..20: mol_type = other DNA
gtgagacgaaggtaagggat

SEQ ID NO: 22909 - DNA, 20 bp, synthetic construct
  misc_feature 1..20: note = Description of Artificial Sequence: Synthetic oligonucleotide
  misc_feature 1..20: note = Target: SCN10A; (-) strand; PAM type: NRG; PAM sequence: GGG
  source 1..20: mol_type = other DNA
gaaaggtgagacgaaggtaa

SEQ ID NO: 22910 - DNA, 20 bp, synthetic construct
  misc_feature 1..20: note = Description of Artificial Sequence: Synthetic oligonucleotide
  misc_feature 1..20: note = Target: SCN10A; (-) strand; PAM type: NRG; PAM sequence: AGG
  source 1..20: mol_type = other DNA
ggaaaggtgagacgaaggta

SEQ ID NO: 22911 - DNA, 20 bp, synthetic construct
  misc_feature 1..20: note = Description of Artificial Sequence: Synthetic oligonucleotide
  misc_feature 1..20: note = Target: SCN10A; (-) strand; PAM type: NRG; PAM sequence: AAG
  source 1..20: mol_type = other DNA
aggaaaggtgagacgaaggt

SEQ ID NO: 22912 - DNA, 20 bp, synthetic construct
  misc_feature 1..20: note = Description of Artificial Sequence: Synthetic oligonucleotide
  misc_feature 1..20: note = Target: SCN10A; (-) strand; PAM type: NRG; PAM sequence: AGG
  source 1..20: mol_type = other DNA
tgggaggaaaggtgagacga

SEQ ID NO: 22913 - DNA, 20 bp, synthetic construct
  misc_feature 1..20: note = Description of Artificial Sequence: Synthetic oligonucleotide
  misc_feature 1..20: note = Target: SCN10A; (-) strand; PAM type: NRG; PAM sequence: AAG
  source 1..20: mol_type = other DNA
ttgggaggaaaggtgagacg

SEQ ID NO: 22914 - DNA, 20 bp, synthetic construct
  misc_feature 1..20: note = Description of Artificial Sequence: Synthetic oligonucleotide
  misc_feature 1..20: note = Target: SCN10A; (-) strand; PAM type: NRG; PAM sequence: GAG
  source 1..20: mol_type = other DNA
ggggacttgggaggaaaggt

SEQ ID NO: 22915 - DNA, 20 bp, synthetic construct
  misc_feature 1..20: note = Description of Artificial Sequence: Synthetic oligonucleotide
  misc_feature 1..20: note = Target: SCN10A; (-) strand; PAM type: NRG; PAM sequence: AGG
  source 1..20: mol_type = other DNA
ctttggggacttgggaggaa

SEQ ID NO: 22916 - DNA, 20 bp, synthetic construct
  misc_feature 1..20: note = Description of Artificial Sequence: Synthetic oligonucleotide
  misc_feature 1..20: note = Target: SCN10A; (-) strand; PAM type: NRG; PAM sequence: AAG
  source 1..20: mol_type = other DNA
actttggggacttgggagga

SEQ ID NO: 22917 - DNA, 20 bp, synthetic construct
  misc_feature 1..20: note = Description of Artificial Sequence: Synthetic oligonucleotide
  misc_feature 1..20: note = Target: SCN10A; (-) strand; PAM type: NRG; PAM sequence: AGG
  source 1..20: mol_type = other DNA
atggactttggggacttggg

SEQ ID NO: 22918 - DNA, 20 bp, synthetic construct
  misc_feature 1..20: note = Description of Artificial Sequence: Synthetic oligonucleotide
  misc_feature 1..20: note = Target: SCN10A; (-) strand; PAM type: NRG; PAM sequence: GAG
  source 1..20: mol_type = other DNA
aatggactttggggacttgg

SEQ ID NO: 22919 - DNA, 20 bp, synthetic construct
  misc_feature 1..20: note = Description of Artificial Sequence: Synthetic oligonucleotide
  misc_feature 1..20: note = Target: SCN10A; (-) strand; PAM type: NRG; PAM sequence: GGG
  source 1..20: mol_type = other DNA
ataatggactttggggactt

SEQ ID NO: 22920 - DNA, 20 bp, synthetic construct
  misc_feature 1..20: note = Description of Artificial Sequence: Synthetic oligonucleotide
  misc_feature 1..20: note = Target: SCN10A; (-) strand; PAM type: NRG; PAM sequence: TGG
  source 1..20: mol_type = other DNA
cataatggactttggggact

SEQ ID NO: 22921 - DNA, 20 bp, synthetic construct
  misc_feature 1..20: note = Description of Artificial Sequence: Synthetic oligonucleotide
  misc_feature 1..20: note = Target: SCN10A; (-) strand; PAM type: NRG; PAM sequence: GGG
  source 1..20: mol_type = other DNA
caatgacataatggactttg

SEQ ID NO: 22922 - DNA, 20 bp, synthetic construct
  misc_feature 1..20: note = Description of Artificial Sequence: Synthetic oligonucleotide
  misc_feature 1..20: note = Target: SCN10A; (-) strand; PAM type: NRG; PAM sequence: GGG
  source 1..20: mol_type = other DNA
acaatgacataatggacttt

SEQ ID NO: 22923 - DNA, 20 bp, synthetic construct
  misc_feature 1..20: note = Description of Artificial Sequence: Synthetic oligonucleotide
  misc_feature 1..20: note = Target: SCN10A; (-) strand; PAM type: NRG; PAM sequence: TGG
  source 1..20: mol_type = other DNA
aacaatgacataatggactt

SEQ ID NO: 22924 - DNA, 20 bp, synthetic construct
  misc_feature 1..20: note = Description of Artificial Sequence: Synthetic oligonucleotide
  misc_feature 1..20: note = Target: SCN10A; (-) strand; PAM type: NRG; PAM sequence: TGG
  source 1..20: mol_type = other DNA
aaggcataacaatgacataa

SEQ ID NO: 22925 - DNA, 20 bp, synthetic construct
  misc_feature 1..20: note = Description of Artificial Sequence: Synthetic oligonucleotide
  misc_feature 1..20: note = Target: SCN10A; (-) strand; PAM type: NRG; PAM sequence: AGG
  source 1..20: mol_type = other DNA
gctaagctgtgaggatgcaa

SEQ ID NO: 22926 - DNA, 20 bp, synthetic construct
  misc_feature 1..20: note = Description of Artificial Sequence: Synthetic oligonucleotide
  misc_feature 1..20: note = Target: SCN10A; (-) strand; PAM type: NRG; PAM sequence: AAG
  source 1..20: mol_type = other DNA
agctaagctgtgaggatgca

SEQ ID NO: 22927 - DNA, 20 bp, synthetic construct
  misc_feature 1..20: note = Description of Artificial Sequence: Synthetic oligonucleotide
  misc_feature 1..20: note = Target: SCN10A; (-) strand; PAM type: NRG; PAM sequence: AGG
  source 1..20: mol_type = other DNA
caagcaggagctaagctgtg

SEQ ID NO: 22928 - DNA, 20 bp, synthetic construct
  misc_feature 1..20: note = Description of Artificial Sequence: Synthetic oligonucleotide
  misc_feature 1..20: note = Target: SCN10A; (-) strand; PAM type: NRG; PAM sequence: GAG
  source 1..20: mol_type = other DNA
acaagcaggagctaagctgt

SEQ ID NO: 22929 - DNA, 20 bp, synthetic construct
  misc_feature 1..20: note = Description of Artificial Sequence: Synthetic oligonucleotide
  misc_feature 1..20: note = Target: SCN10A; (-) strand; PAM type: NRG; PAM sequence: AAG
  source 1..20: mol_type = other DNA
cttaattacaagcaggagct

SEQ ID NO: 22930 - DNA, 20 bp, synthetic construct
  misc_feature 1..20: note = Description of Artificial Sequence: Synthetic oligonucleotide
  misc_feature 1..20: note = Target: SCN10A; (-) strand; PAM type: NRG; PAM sequence: GAG
  source 1..20: mol_type = other DNA
gtgttcttaattacaagcag

SEQ ID NO: 22931 - DNA, 20 bp, synthetic construct
  misc_feature 1..20: note = Description of Artificial Sequence: Synthetic oligonucleotide
  misc_feature 1..20: note = Target: SCN10A; (-) strand; PAM type: NRG; PAM sequence: AGG
  source 1..20: mol_type = other DNA
atgtgttcttaattacaagc

SEQ ID NO: 22932 - DNA, 20 bp, synthetic construct
  misc_feature 1..20: note = Description of Artificial Sequence: Synthetic oligonucleotide
  misc_feature 1..20: note = Target: SCN10A; (-) strand; PAM type: NRG; PAM sequence: CAG
  source 1..20: mol_type = other DNA
catgtgttcttaattacaag

SEQ ID NO: 22933 - DNA, 20 bp, synthetic construct
  misc_feature 1..20: note = Description of Artificial Sequence: Synthetic oligonucleotide
  misc_feature 1..20: note = Target: SCN10A; (-) strand; PAM type: NRG; PAM sequence: AAG
  source 1..20: mol_type = other DNA
catcatgtgttcttaattac

SEQ ID NO: 22934 - DNA, 20 bp, synthetic construct
  misc_feature 1..20: note = Description of Artificial Sequence: Synthetic oligonucleotide
  misc_feature 1..20: note = Target: SCN10A; (-) strand; PAM type: NRG; PAM sequence: AAG
  source 1..20: mol_type = other DNA
taactcaggaatagaaagtc

SEQ ID NO: 22935 - DNA, 20 bp, synthetic construct
  misc_feature 1..20: note = Description of Artificial Sequence: Synthetic oligonucleotide
  misc_feature 1..20: note = Target: SCN10A; (-) strand; PAM type: NRG; PAM sequence: AAG
  source 1..20: mol_type = other DNA
tgaagtaactcaggaataga

SEQ ID NO: 22936 - DNA, 20 bp, synthetic construct
  misc_feature 1..20: note = Description of Artificial Sequence: Synthetic oligonucleotide
  misc_feature 1..20: note = Target: SCN10A; (-) strand; PAM type: NRG; PAM sequence: TAG
  source 1..20: mol_type = other DNA
taaatgaagtaactcaggaa

SEQ ID NO: 22937 - DNA, 20 bp, synthetic construct
  misc_feature 1..20: note = Description of Artificial Sequence: Synthetic oligonucleotide
  misc_feature 1..20: note = Target: SCN10A; (-) strand; PAM type: NRG; PAM sequence: AGG
  source 1..20: mol_type = other DNA
tattctaaatgaagtaactc

SEQ ID NO: 22938 - DNA, 20 bp, synthetic construct
  misc_feature 1..20: note = Description of Artificial Sequence: Synthetic oligonucleotide
  misc_feature 1..20: note = Target: SCN10A; (-) strand; PAM type: NRG; PAM sequence: CAG
  source 1..20: mol_type = other DNA
ttattctaaatgaagtaact

SEQ ID NO: 22939 - DNA, 20 bp, synthetic construct
  misc_feature 1..20: note = Description of Artificial Sequence: Synthetic oligonucleotide
  misc_feature 1..20: note = Target: SCN10A; (-) strand; PAM type: NRG; PAM sequence: AAG
  source 1..20: mol_type = other DNA
ggagactattattctaaatg

SEQ ID NO: 22940 - DNA, 20 bp, synthetic construct
  misc_feature 1..20: note = Description of Artificial Sequence: Synthetic oligonucleotide
  misc_feature 1..20: note = Target: SCN10A; (-) strand; PAM type: NRG; PAM sequence: GAG
  source 1..20: mol_type = other DNA
cagcaagctggatggagttg

SEQ ID NO: 22941 - DNA, 20 bp, synthetic construct
  misc_feature 1..20: note = Description of Artificial Sequence: Synthetic oligonucleotide
  misc_feature 1..20: note = Target: SCN10A; (-) strand; PAM type: NRG; PAM sequence: TGG
  source 1..20: mol_type = other DNA
ggcagcaagctggatggagt

SEQ ID NO: 22942 - DNA, 20 bp, synthetic construct
  misc_feature 1..20: note = Description of Artificial Sequence: Synthetic oligonucleotide
  misc_feature 1..20: note = Target: SCN10A; (-) strand; PAM type: NRG; PAM sequence: GAG
  source 1..20: mol_type = other DNA
cattggcagcaagctggatg

SEQ ID NO: 22943 - DNA, 20 bp, synthetic construct
  misc_feature 1..20: note = Description of Artificial Sequence: Synthetic oligonucleotide
  misc_feature 1..20: note = Target: SCN10A; (-) strand; PAM type: NRG; PAM sequence: TGG
  source 1..20: mol_type = other DNA
ggcattggcagcaagctgga

SEQ ID NO: 22944 - DNA, 20 bp, synthetic construct
  misc_feature 1..20: note = Description of Artificial Sequence: Synthetic oligonucleotide
  misc_feature 1..20: note = Target: SCN10A; (-) strand; PAM type: NRG; PAM sequence: TGG
  source 1..20: mol_type = other DNA
taatggcattggcagcaagc

SEQ ID NO: 22945 - DNA, 20 bp, synthetic construct
  misc_feature 1..20: note = Description of Artificial Sequence: Synthetic oligonucleotide
  misc_feature 1..20: note = Target: SCN10A; (-) strand; PAM type: NRG; PAM sequence: AAG
  source 1..20: mol_type = other DNA
gaaataatggcattggcagc

SEQ ID NO: 22946 - DNA, 20 bp, synthetic construct
  misc_feature 1..20: note = Description of Artificial Sequence: Synthetic oligonucleotide
  misc_feature 1..20: note = Target: SCN10A; (-) strand; PAM type: NRG; PAM sequence: CAG
  source 1..20: mol_type = other DNA
gaatgaaataatggcattgg

SEQ ID NO: 22947 - DNA, 20 bp, synthetic construct
  misc_feature 1..20: note = Description of Artificial Sequence: Synthetic oligonucleotide
  misc_feature 1..20: note = Target: SCN10A; (-) strand; PAM type: NRG; PAM sequence: TGG
  source 1..20: mol_type = other DNA
aaggaatgaaataatggcat

SEQ ID NO: 22948 - DNA, 20 bp, synthetic construct
  misc_feature 1..20: note = Description of Artificial Sequence: Synthetic oligonucleotide
  misc_feature 1..20: note = Target: SCN10A; (-) strand; PAM type: NRG; PAM sequence: TGG
  source 1..20: mol_type = other DNA
tgtaaaaaggaatgaaataa

SEQ ID NO: 22949 - DNA, 20 bp, synthetic construct
  misc_feature 1..20: note = Description of Artificial Sequence: Synthetic oligonucleotide
  misc_feature 1..20: note = Target: SCN10A; (-) strand; PAM type: NRG; PAM sequence: AGG
  source 1..20: mol_type = other DNA
aatactactcagttgtaaaa

SEQ ID NO: 22950 - DNA, 20 bp, synthetic construct
  misc_feature 1..20: note = Description of Artificial Sequence: Synthetic oligonucleotide
  misc_feature 1..20: note = Target: SCN10A; (-) strand; PAM type: NRG; PAM sequence: AAG
  source 1..20: mol_type = other DNA
gaatactactcagttgtaaa

SEQ ID NO: 22951 - DNA, 20 bp, synthetic construct
  misc_feature 1..20: note = Description of Artificial Sequence: Synthetic oligonucleotide
  misc_feature 1..20: note = Target: SCN10A; (-) strand; PAM type: NRG; PAM sequence: CAG
  source 1..20: mol_type = other DNA
gcataccatggaatactact

SEQ ID NO: 22952 - DNA, 20 bp, synthetic construct
  misc_feature 1..20: note = Description of Artificial Sequence: Synthetic oligonucleotide
  misc_feature 1..20: note = Target: SCN10A; (-) strand; PAM type: NRG; PAM sequence: TGG
  source 1..20: mol_type = other DNA
aatatggtgtatgcatacca

SEQ ID NO: 22953 - DNA, 20 bp, synthetic construct
  misc_feature 1..20: note = Description of Artificial Sequence: Synthetic oligonucleotide
  misc_feature 1..20: note = Target: SCN10A; (-) strand; PAM type: NRG; PAM sequence: TGG
  source 1..20: mol_type = other DNA
acaagtgcataaagaaaata

SEQ ID NO: 22954 - DNA, 20 bp, synthetic construct
  misc_feature 1..20: note = Description of Artificial Sequence: Synthetic oligonucleotide
  misc_feature 1..20: note = Target: SCN10A; (-) strand; PAM type: NRG; PAM sequence: AAG
  source 1..20: mol_type = other DNA
catcaaccaacaagtgcata

SEQ ID NO: 22955 - DNA, 20 bp, synthetic construct
  misc_feature 1..20: note = Description of Artificial Sequence: Synthetic oligonucleotide
  misc_feature 1..20: note = Target: SCN10A; (-) strand; PAM type: NRG; PAM sequence: AAG
  source 1..20: mol_type = other DNA
ctaaatgcccatcaaccaac

SEQ ID NO: 22956 - DNA, 20 bp, synthetic construct
  misc_feature 1..20: note = Description of Artificial Sequence: Synthetic oligonucleotide
  misc_feature 1..20: note = Target: SCN10A; (-) strand; PAM type: NRG; PAM sequence: CAG
  source 1..20: mol_type = other DNA
caactgcaaaaatatggaac

SEQ ID NO: 22957 - DNA, 20 bp, synthetic construct
  misc_feature 1..20: note = Description of Artificial Sequence: Synthetic oligonucleotide
  misc_feature 1..20: note = Target: SCN10A; (-) strand; PAM type: NRG; PAM sequence: TGG
  source 1..20: mol_type = other DNA
agtttacaactgcaaaaata

SEQ ID NO: 22958 - DNA, 20 bp, synthetic construct
  misc_feature 1..20: note = Description of Artificial Sequence: Synthetic oligonucleotide
  misc_feature 1..20: note = Target: SCN10A; (-) strand; PAM type: NRG; PAM sequence: CAG
  source 1..20: mol_type = other DNA
tatgcatgcttatagcagca

SEQ ID NO: 22959 - DNA, 20 bp, synthetic construct
  misc_feature 1..20: note = Description of Artificial Sequence: Synthetic oligonucleotide
  misc_feature 1..20: note = Target: SCN10A; (-) strand; PAM type: NRG; PAM sequence: CAG
  source 1..20: mol_type = other DNA
ttgcatatgcatgcttatag

SEQ ID NO: 22960 - DNA, 20 bp, synthetic construct
  misc_feature 1..20: note = Description of Artificial Sequence: Synthetic oligonucleotide
  misc_feature 1..20: note = Target: SCN10A; (-) strand; PAM type: NRG; PAM sequence: TAG
  source 1..20: mol_type = other DNA
cacttgcatatgcatgctta

SEQ ID NO: 22961 - DNA, 20 bp, synthetic construct
  misc_feature 1..20: note = Description of Artificial Sequence: Synthetic oligonucleotide
  misc_feature 1..20: note = Target: SCN10A; (-) strand; PAM type: NRG; PAM sequence: AAG
  source 1..20: mol_type = other DNA
gaaaataagccattattaaa

SEQ ID NO: 22962 - DNA, 20 bp, synthetic construct
  misc_feature 1..20: note = Description of Artificial Sequence: Synthetic oligonucleotide
  misc_feature 1..20: note = Target: SCN10A; (-) strand; PAM type: NRG; PAM sequence: AAG
  source 1..20: mol_type = other DNA
gtatctacccagaggaaaat

SEQ ID NO: 22963 - DNA, 20 bp, synthetic construct
  misc_feature 1..20: note = Description of Artificial Sequence: Synthetic oligonucleotide
  misc_feature 1..20: note = Target: SCN10A; (-) strand; PAM type: NRG; PAM sequence: AGG
  source 1..20: mol_type = other DNA
actactgggtatctacccag

SEQ ID NO: 22964 - DNA, 20 bp, synthetic construct
  misc_feature 1..20: note = Description of Artificial Sequence: Synthetic oligonucleotide
  misc_feature 1..20: note = Target: SCN10A; (-) strand; PAM type: NRG; PAM sequence: GAG
  source 1..20: mol_type = other DNA
cactactgggtatctaccca

SEQ ID NO: 22965 - DNA, 20 bp, synthetic construct
  misc_feature 1..20: note = Description of Artificial Sequence: Synthetic oligonucleotide
  misc_feature 1..20: note = Target: SCN10A; (-) strand; PAM type: NRG; PAM sequence: CAG
  source 1..20: mol_type = other DNA
cccactactgggtatctacc

SEQ ID NO: 22966 - DNA, 20 bp, synthetic construct
  misc_feature 1..20: note = Description of Artificial Sequence: Synthetic oligonucleotide
  misc_feature 1..20: note = Target: SCN10A; (-) strand; PAM type: NRG; PAM sequence: GGG
  source 1..20: mol_type = other DNA
ggtccagcaatcccactact

SEQ ID NO: 22967 - DNA, 20 bp, synthetic construct
  misc_feature 1..20: note = Description of Artificial Sequence: Synthetic oligonucleotide
  misc_feature 1..20: note = Target: SCN10A; (-) strand; PAM type: NRG; PAM sequence: TGG
  source 1..20: mol_type = other DNA
tggtccagcaatcccactac

SEQ ID NO: 22968 - DNA, 20 bp, synthetic construct
  misc_feature 1..20: note = Description of Artificial Sequence: Synthetic oligonucleotide
  misc_feature 1..20: note = Target: SCN10A; (-) strand; PAM type: NRG; PAM sequence: CAG
  source 1..20: mol_type = other DNA
agtagaactaccatttggtc

SEQ ID NO: 22969 - DNA, 20 bp, synthetic construct
  misc_feature 1..20: note = Description of Artificial Sequence: Synthetic oligonucleotide
  misc_feature 1..20: note = Target: SCN10A; (-) strand; PAM type: NRG; PAM sequence: TGG
  source 1..20: mol_type = other DNA
ctaaaagtagaactaccatt

SEQ ID NO: 22970 - DNA, 20 bp, synthetic construct
  misc_feature 1..20: note = Description of Artificial Sequence: Synthetic oligonucleotide
  misc_feature 1..20: note = Target: SCN10A; (-) strand; PAM type: NRG; PAM sequence: TAG
  source 1..20: mol_type = other DNA
attccttaaagaactaaaag

SEQ ID NO: 22971 - DNA, 20 bp, synthetic construct
  misc_feature 1..20: note = Description of Artificial Sequence: Synthetic oligonucleotide
  misc_feature 1..20: note = Target: SCN10A; (-) strand; PAM type: NRG; PAM sequence: AAG
  source 1..20: mol_type = other DNA
gagattccttaaagaactaa

SEQ ID NO: 22972 - DNA, 20 bp, synthetic construct
  misc_feature 1..20: note = Description of Artificial Sequence: Synthetic oligonucleotide
  misc_feature 1..20: note = Target: SCN10A; (-) strand; PAM type: NRG; PAM sequence: AAG
  source 1..20: mol_type = other DNA
aacgttatggagattcctta

SEQ ID NO: 22973 - DNA, 20 bp, synthetic construct
  misc_feature 1..20: note = Description of Artificial Sequence: Synthetic oligonucleotide
  misc_feature 1..20: note = Target: SCN10A; (-) strand; PAM type: NRG; PAM sequence: GAG
  source 1..20: mol_type = other DNA
ccactaaggaaaacgttatg

SEQ ID NO: 22974 - DNA, 20 bp, synthetic construct
  misc_feature 1..20: note = Description of Artificial Sequence: Synthetic oligonucleotide
  misc_feature 1..20: note = Target: SCN10A; (-) strand; PAM type: NRG; PAM sequence: TGG
  source 1..20: mol_type = other DNA
aaccactaaggaaaacgtta

SEQ ID NO: 22975 - DNA, 20 bp, synthetic construct
  misc_feature 1..20: note = Description of Artificial Sequence: Synthetic oligonucleotide
  misc_feature 1..20: note = Target: SCN10A; (-) strand; PAM type: NRG; PAM sequence: AGG
  source 1..20: mol_type = other DNA
gtaaactagtacaaccacta

SEQ ID NO: 22976 - DNA, 20 bp, synthetic construct
  misc_feature 1..20: note = Description of Artificial Sequence: Synthetic oligonucleotide
  misc_feature 1..20: note = Target: SCN10A; (-) strand; PAM type: NRG; PAM sequence: AAG
  source 1..20: mol_type = other DNA
tgtaaactagtacaaccact

SEQ ID NO: 22977 - DNA, 20 bp, synthetic construct
  misc_feature 1..20: note = Description of Artificial Sequence: Synthetic oligonucleotide
  misc_feature 1..20: note = Target: SCN10A; (-) strand; PAM type: NRG; PAM sequence: TAG
  source 1..20: mol_type = other DNA
ctgctggtgggaatgtaaac

SEQ ID NO: 22978 - DNA, 20 bp, synthetic construct
  misc_feature 1..20: note = Description of Artificial Sequence: Synthetic oligonucleotide
  misc_feature 1..20: note = Target: SCN10A; (-) strand; PAM type: NRG; PAM sequence: GGG
  source 1..20: mol_type = other DNA
aacaattttacactgctggt

SEQ ID NO: 22979 - DNA, 20 bp, synthetic construct
  misc_feature 1..20: note = Description of Artificial Sequence: Synthetic oligonucleotide
  misc_feature 1..20: note = Target: SCN10A; (-) strand; PAM type: NRG; PAM sequence: TGG
  source 1..20: mol_type = other DNA
aaacaattttacactgctgg

SEQ ID NO: 22980 - DNA, 20 bp, synthetic construct
  misc_feature 1..20: note = Description of Artificial Sequence: Synthetic oligonucleotide
  misc_feature 1..20: note = Target: SCN10A; (-) strand; PAM type: NRG; PAM sequence: TGG
  source 1..20: mol_type = other DNA
aggaaacaattttacactgc

SEQ ID NO: 22981 - DNA, 20 bp, synthetic construct
  misc_feature 1..20: note = Description of Artificial Sequence: Synthetic oligonucleotide
  misc_feature 1..20: note = Target: SCN10A; (-) strand; PAM type: NRG; PAM sequence: AGG
  source 1..20: mol_type = other DNA
ttggcatggatgtaatgaaa

SEQ ID NO: 22982 - DNA, 20 bp, synthetic construct
  misc_feature 1..20: note = Description of Artificial Sequence: Synthetic oligonucleotide
  misc_feature 1..20: note = Target: SCN10A; (-) strand; PAM type: NRG; PAM sequence: AAG
  source 1..20: mol_type = other DNA
gttggcatggatgtaatgaa

SEQ ID NO: 22983 - DNA, 20 bp, synthetic construct
  misc_feature 1..20: note = Description of Artificial Sequence: Synthetic oligonucleotide
  misc_feature 1..20: note = Target: SCN10A; (-) strand; PAM type: NRG; PAM sequence: TGG
  source 1..20: mol_type = other DNA
aaaaataatagatgttggca

SEQ ID NO: 22984 - DNA, 20 bp, synthetic construct
  misc_feature 1..20: note = Description of Artificial Sequence: Synthetic oligonucleotide
  misc_feature 1..20: note = Target: SCN10A; (-) strand; PAM type: NRG; PAM sequence: TGG
  source 1..20: mol_type = other DNA
aaccaaaaaataatagatgt

SEQ ID NO: 22985 - DNA, 20 bp, synthetic construct
  misc_feature 1..20: note = Description of Artificial Sequence: Synthetic oligonucleotide
  misc_feature 1..20: note = Target: SCN10A; (-) strand; PAM type: NRG; PAM sequence: TAG
  source 1..20: mol_type = other DNA
tggccataaccaaaaaataa

SEQ ID NO: 22986 - DNA, 20 bp, synthetic construct
  misc_feature 1..20: note = Description of Artificial Sequence: Synthetic oligonucleotide
  misc_feature 1..20: note = Target: SCN10A; (-) strand; PAM type: NRG; PAM sequence: TGG
  source 1..20: mol_type = other DNA
ccaccttactcctgcaagaa

SEQ ID NO: 22987 - DNA, 20 bp, synthetic construct
  misc_feature 1..20: note = Description of Artificial Sequence: Synthetic oligonucleotide
  misc_feature 1..20: note = Target: SCN10A; (-) strand; PAM type: NRG; PAM sequence: AAG
  source 1..20: mol_type = other DNA
agataccaccttactcctgc

SEQ ID NO: 22988 - DNA, 20 bp, synthetic construct
  misc_feature 1..20: note = Description of Artificial Sequence: Synthetic oligonucleotide
  misc_feature 1..20: note = Target: SCN10A; (-) strand; PAM type: NRG; PAM sequence: GAG
  source 1..20: mol_type = other DNA
atgcaaattaaaaccacaat

SEQ ID NO: 22989 - DNA, 20 bp, synthetic construct
  misc_feature 1..20: note = Description of Artificial Sequence: Synthetic oligonucleotide
  misc_feature 1..20: note = Target: SCN10A; (-) strand; PAM type: NRG; PAM sequence: GGG
  source 1..20: mol_type = other DNA
ctcaacatcattaattatca

SEQ ID NO: 22990 - DNA, 20 bp, synthetic construct
  misc_feature 1..20: note = Description of Artificial Sequence: Synthetic oligonucleotide
  misc_feature 1..20: note = Target: SCN10A; (-) strand; PAM type: NRG; PAM sequence: AGG
  source 1..20: mol_type = other DNA
gctcaacatcattaattatc

SEQ ID NO: 22991 - DNA, 20 bp, synthetic construct
  misc_feature 1..20: note = Description of Artificial Sequence: Synthetic oligonucleotide
  misc_feature 1..20: note = Target: SCN10A; (-) strand; PAM type: NRG; PAM sequence: CAG
  source 1..20: mol_type = other DNA
tgctcaacatcattaattat

SEQ ID NO: 22992 - DNA, 20 bp, synthetic construct
  misc_feature 1..20: note = Description of Artificial Sequence: Synthetic oligonucleotide
  misc_feature 1..20: note = Target: SCN10A; (-) strand; PAM type: NRG; PAM sequence: AGG
  source 1..20: mol_type = other DNA
tatataaatggccaatgaac

SEQ ID NO: 22993 - DNA, 20 bp, synthetic construct
  misc_feature 1..20: note = Description of Artificial Sequence: Synthetic oligonucleotide
  misc_feature 1..20: note = Target: SCN10A; (-) strand; PAM type: NRG; PAM sequence: CAG
  source 1..20: mol_type = other DNA
atatataaatggccaatgaa

SEQ ID NO: 22994 - DNA, 20 bp, synthetic construct
  misc_feature 1..20: note = Description of Artificial Sequence: Synthetic oligonucleotide
  misc_feature 1..20: note = Target: SCN10A; (-) strand; PAM type: NRG; PAM sequence: TGG
  source 1..20: mol_type = other DNA
ctcaaaagaagatatataaa

SEQ ID NO: 22995 - DNA, 20 bp, synthetic construct
  misc_feature 1..20: note = Description of Artificial Sequence: Synthetic oligonucleotide
  misc_feature 1..20: note = Target: SCN10A; (-) strand; PAM type: NRG; PAM sequence: AAG
  source 1..20: mol_type = other DNA
gaatacgcaattctcaaaag

SEQ ID NO: 22996 - DNA, 20 bp, synthetic construct
  misc_feature 1..20: note = Description of Artificial Sequence: Synthetic oligonucleotide
  misc_feature 1..20: note = Target: SCN10A; (-) strand; PAM type: NRG; PAM sequence: AAG
  source 1..20: mol_type = other DNA
caagaatacgcaattctcaa

SEQ ID NO: 22997 - DNA, 20 bp, synthetic construct
  misc_feature 1..20: note = Description of Artificial Sequence: Synthetic oligonucleotide
  misc_feature 1..20: note = Target: SCN10A; (-) strand; PAM type: NRG; PAM sequence: AAG
  source 1..20: mol_type = other DNA
tccaaaagtgggcaaaggac

SEQ ID NO: 22998 - DNA, 20 bp, synthetic construct
  misc_feature 1..20: note = Description of Artificial Sequence: Synthetic oligonucleotide
  misc_feature 1..20: note = Target: SCN10A; (-) strand; PAM type: NRG; PAM sequence: AGG
  source 1..20: mol_type = other DNA
tcccatccaaaagtgggcaa

SEQ ID NO: 22999 - DNA, 20 bp, synthetic construct
  misc_feature 1..20: note = Description of Artificial Sequence: Synthetic oligonucleotide
  misc_feature 1..20: note = Target: SCN10A; (-) strand; PAM type: NRG; PAM sequence: AAG
  source 1..20: mol_type = other DNA
atcccatccaaaagtgggca

SEQ ID NO: 23000 - DNA, 20 bp, synthetic construct
  misc_feature 1..20: note = Description of Artificial Sequence: Synthetic oligonucleotide
  misc_feature 1..20: note = Target: SCN10A; (-) strand; PAM type: NRG; PAM sequence: GGG
  source 1..20: mol_type = other DNA
aaataatcccatccaaaagt

SEQ ID NO: 23001 - DNA, 20 bp, synthetic construct
  misc_feature 1..20: note = Description of Artificial Sequence: Synthetic oligonucleotide
  misc_feature 1..20: note = Target: SCN10A; (-) strand; PAM type: NRG; PAM sequence: TGG
  source 1..20: mol_type = other DNA
caaataatcccatccaaaag

SEQ ID NO: 23002 - DNA, 20 bp, synthetic construct
  misc_feature 1..20: note = Description of Artificial Sequence: Synthetic oligonucleotide
  misc_feature 1..20: note = Target: SCN10A; (-) strand; PAM type: NRG; PAM sequence: AAG
  source 1..20: mol_type = other DNA
aaacaaataatcccatccaa

SEQ ID NO: 23003 - DNA, 20 bp, synthetic construct
  misc_feature 1..20: note = Description of Artificial Sequence: Synthetic oligonucleotide
  misc_feature 1..20: note = Target: SCN10A; (-) strand; PAM type: NRG; PAM sequence: AAG
  source 1..20: mol_type = other DNA
agaaacacaaataaatcagc

SEQ ID NO: 23004 - DNA, 20 bp, synthetic construct
  misc_feature 1..20: note = Description of Artificial Sequence: Synthetic oligonucleotide
  misc_feature 1..20: note = Target: SCN10A; (-) strand; PAM type: NRG; PAM sequence: CAG
  source 1..20: mol_type = other DNA
tataagaaacacaaataaat

SEQ ID NO: 23005 - DNA, 20 bp, synthetic construct
  misc_feature 1..20: note = Description of Artificial Sequence: Synthetic oligonucleotide
  misc_feature 1..20: note = Target: SCN10A; (-) strand; PAM type: NRG; PAM sequence: AAG
  source 1..20: mol_type = other DNA
gactaatatccagcatctat

SEQ ID NO: 23006 - DNA, 20 bp, synthetic construct
  misc_feature 1..20: note = Description of Artificial Sequence: Synthetic oligonucleotide
  misc_feature 1..20: note = Target: SCN10A; (-) strand; PAM type: NRG; PAM sequence: CAG
  source 1..20: mol_type = other DNA
tccagcaaaagactaatatc

SEQ ID NO: 23007 - DNA, 20 bp, synthetic construct
  misc_feature 1..20: note = Description of Artificial Sequence: Synthetic oligonucleotide
  misc_feature 1..20: note = Target: SCN10A; (-) strand; PAM type: NRG; PAM sequence: AAG
  source 1..20: mol_type = other DNA
gttatctatgcttccagcaa

SEQ ID NO: 23008 - DNA, 20 bp, synthetic construct
  misc_feature 1..20: note = Description of Artificial Sequence: Synthetic oligonucleotide
  misc_feature 1..20: note = Target: SCN10A; (-) strand; PAM type: NRG; PAM sequence: CAG
  source 1..20: mol_type = other DNA
atctttgttatctatgcttc

SEQ ID NO: 23009 - DNA, 20 bp, synthetic construct
  misc_feature 1..20: note = Description of Artificial Sequence: Synthetic oligonucleotide
  misc_feature 1..20: note = Target: SCN10A; (-) strand; PAM type: NRG; PAM sequence: GAG
  source 1..20: mol_type = other DNA
acagacaacccataggatga

SEQ ID NO: 23010 - DNA, 20 bp, synthetic construct
  misc_feature 1..20: note = Description of Artificial Sequence: Synthetic oligonucleotide
  misc_feature 1..20: note = Target: SCN10A; (-) strand; PAM type: NRG; PAM sequence: GAG
  source 1..20: mol_type = other DNA
aaacagacaacccataggat

SEQ ID NO: 23011 - DNA, 20 bp, synthetic construct
  misc_feature 1..20: note = Description of Artificial Sequence: Synthetic oligonucleotide
  misc_feature 1..20: note = Target: SCN10A; (-) strand; PAM type: NRG; PAM sequence: AGG
  source 1..20: mol_type = other DNA
caagtaaacagacaacccat

SEQ ID NO: 23012 - DNA, 20 bp, synthetic construct
  misc_feature 1..20: note = Description of Artificial Sequence: Synthetic oligonucleotide
  misc_feature 1..20: note = Target: SCN10A; (-) strand; PAM type: NRG; PAM sequence: TAG
  source 1..20: mol_type = other DNA
ccaagtaaacagacaaccca

SEQ ID NO: 23013 - DNA, 20 bp, synthetic construct
  misc_feature 1..20: note = Description of Artificial Sequence: Synthetic oligonucleotide
  misc_feature 1..20: note = Target: SCN10A; (-) strand; PAM type: NRG; PAM sequence: CAG
  source 1..20: mol_type = other DNA
gaaataatcatccaagtaaa

SEQ ID NO: 23014 - DNA, 20 bp, synthetic construct
  misc_feature 1..20: note = Description of Artificial Sequence: Synthetic oligonucleotide
  misc_feature 1..20: note = Target: SCN10A; (-) strand; PAM type: NRG; PAM sequence: AAG
  source 1..20: mol_type = other DNA
agcaagagaaataatcatcc

SEQ ID NO: 23015 - DNA, 20 bp, synthetic construct
  misc_feature 1..20: note = Description of Artificial Sequence: Synthetic oligonucleotide
  misc_feature 1..20: note = Target: SCN10A; (-) strand; PAM type: NRG; PAM sequence: GAG
  source 1..20: mol_type = other DNA
aaaaagctgttgcacagcaa

SEQ ID NO: 23016 - DNA, 20 bp, synthetic construct
  misc_feature 1..20: note = Description of Artificial Sequence: Synthetic oligonucleotide
  misc_feature 1..20: note = Target: SCN10A; (-) strand; PAM type: NRG; PAM sequence: AAG
  source 1..20: mol_type = other DNA
ctaaaaagctgttgcacagc

SEQ ID NO: 23017 - DNA, 20 bp, synthetic construct
  misc_feature 1..20: note = Description of Artificial Sequence: Synthetic oligonucleotide
  misc_feature 1..20: note = Target: SCN10A; (-) strand; PAM type: NRG; PAM sequence: CAG
  source 1..20: mol_type = other DNA
taaactaaaaagctgttgca

SEQ ID NO: 23018 - DNA, 20 bp, synthetic construct
  misc_feature 1..20: note = Description of Artificial Sequence: Synthetic oligonucleotide
  misc_feature 1..20: note = Target: SCN10A; (-) strand; PAM type: NRG; PAM sequence: AAG
  source 1..20: mol_type = other DNA
tgggatctaattaaactaaa

SEQ ID NO: 23019 - DNA, 20 bp, synthetic construct
  misc_feature 1..20: note = Description of Artificial Sequence: Synthetic oligonucleotide
  misc_feature 1..20: note = Target: SCN10A; (-) strand; PAM type: NRG; PAM sequence: GGG
  source 1..20: mol_type = other DNA
aaaaacaaaaataaatagat

SEQ ID NO: 23020 - DNA, 20 bp, synthetic construct
  misc_feature 1..20: note = Description of Artificial Sequence: Synthetic oligonucleotide
  misc_feature 1..20: note = Target: SCN10A; (-) strand; PAM type: NRG; PAM sequence: TGG
  source 1..20: mol_type = other DNA
caaaaacaaaaataaataga

SEQ ID NO: 23021 - DNA, 20 bp, synthetic construct
  misc_feature 1..20: note = Description of Artificial Sequence: Synthetic oligonucleotide
  misc_feature 1..20: note = Target: SCN10A; (-) strand; PAM type: NRG; PAM sequence: TAG
  source 1..20: mol_type = other DNA
ccaacaaaaacaaaaataaa

SEQ ID NO: 23022 - DNA, 20 bp, synthetic construct
  misc_feature 1..20: note = Description of Artificial Sequence: Synthetic oligonucleotide
  misc_feature 1..20: note = Target: SCN10A; (-) strand; PAM type: NRG; PAM sequence: AAG
  source 1..20: mol_type = other DNA
cgttcctgaccaaggaccca

SEQ ID NO: 23023 - DNA, 20 bp, synthetic construct
  misc_feature 1..20: note = Description of Artificial Sequence: Synthetic oligonucleotide
  misc_feature 1..20: note = Target: SCN10A; (-) strand; PAM type: NRG; PAM sequence: AGG
  source 1..20: mol_type = other DNA
aggcaaaacgttcctgacca

SEQ ID NO: 23024 - DNA, 20 bp, synthetic construct
  misc_feature 1..20: note = Description of Artificial Sequence: Synthetic oligonucleotide
  misc_feature 1..20: note = Target: SCN10A; (-) strand; PAM type: NRG; PAM sequence: AAG
  source 1..20: mol_type = other DNA
taggcaaaacgttcctgacc

SEQ ID NO: 23025 - DNA, 20 bp, synthetic construct
  misc_feature 1..20: note = Description of Artificial Sequence: Synthetic oligonucleotide
  misc_feature 1..20: note = Target: SCN10A; (-) strand; PAM type: NRG; PAM sequence: AGG
  source 1..20: mol_type = other DNA
actcttctagacattggctt

SEQ ID NO: 23026 - DNA, 20 bp, synthetic construct
  misc_feature 1..20: note = Description of Artificial Sequence: Synthetic oligonucleotide
  misc_feature 1..20: note = Target: SCN10A; (-) strand; PAM type: NRG; PAM sequence: TAG
  source 1..20: mol_type = other DNA
aactcttctagacattggct

SEQ ID NO: 23027 - DNA, 20 bp, synthetic construct
  misc_feature 1..20: note = Description of Artificial Sequence: Synthetic oligonucleotide
  misc_feature 1..20: note = Target: SCN10A; (-) strand; PAM type: NRG; PAM sequence: TGG
  source 1..20: mol_type = other DNA
ggaaaaactcttctagacat

SEQ ID NO: 23028 - DNA, 20 bp, synthetic construct
  misc_feature 1..20: note = Description of Artificial Sequence: Synthetic oligonucleotide
  misc_feature 1..20: note = Target: SCN10A; (-) strand; PAM type: NRG; PAM sequence: TAG
  source 1..20: mol_type = other DNA
taacattggaaaaactcttc

SEQ ID NO: 23029 - DNA, 20 bp, synthetic construct
  misc_feature 1..20: note = Description of Artificial Sequence: Synthetic oligonucleotide
  misc_feature 1..20: note = Target: SCN10A; (-) strand; PAM type: NRG; PAM sequence: TGG
  source 1..20: mol_type = other DNA
aaaattctagaagataacat

SEQ ID NO: 23030 - DNA, 20 bp, synthetic construct
  misc_feature 1..20: note = Description of Artificial Sequence: Synthetic oligonucleotide
  misc_feature 1..20: note = Target: SCN10A; (-) strand; PAM type: NRG; PAM sequence: AAG
  source 1..20: mol_type = other DNA
gaaattataaaaaattctag

SEQ ID NO: 23031 - DNA, 20 bp, synthetic construct
  misc_feature 1..20: note = Description of Artificial Sequence: Synthetic oligonucleotide
  misc_feature 1..20: note = Target: SCN10A; (-) strand; PAM type: NRG; PAM sequence: TAG
  source 1..20: mol_type = other DNA
cctgaaattataaaaaattc

SEQ ID NO: 23032 - DNA, 20 bp, synthetic construct
  misc_feature 1..20: note = Description of Artificial Sequence: Synthetic oligonucleotide
  misc_feature 1..20: note = Target: SCN10A; (-) strand; PAM type: NRG; PAM sequence: AAG
  source 1..20: mol_type = other DNA
tggataaaaggcttaaatct

SEQ ID NO: 23033 - DNA, 20 bp, synthetic construct
  misc_feature 1..20: note = Description of Artificial Sequence: Synthetic oligonucleotide
  misc_feature 1..20: note = Target: SCN10A; (-) strand; PAM type: NRG; PAM sequence: AGG
  source 1..20: mol_type = other DNA
atcaattcaagatggataaa

SEQ ID NO: 23034 - DNA, 20 bp, synthetic construct
  misc_feature 1..20: note = Description of Artificial Sequence: Synthetic oligonucleotide
  misc_feature 1..20: note = Target: SCN10A; (-) strand; PAM type: NRG; PAM sequence: AAG
  source 1..20: mol_type = other DNA
aatcaattcaagatggataa

SEQ ID NO: 23035 - DNA, 20 bp, synthetic construct
  misc_feature 1..20: note = Description of Artificial Sequence: Synthetic oligonucleotide
  misc_feature 1..20: note = Target: SCN10A; (-) strand; PAM type: NRG; PAM sequence: TGG
  source 1..20: mol_type = other DNA
atacaaaaatcaattcaaga

SEQ ID NO: 23036 - DNA, 20 bp, synthetic construct
  misc_feature 1..20: note = Description of Artificial Sequence: Synthetic oligonucleotide
  misc_feature 1..20: note = Target: SCN10A; (-) strand; PAM type: NRG; PAM sequence: AAG
  source 1..20: mol_type = other DNA
ccttatacaaaaatcaattc

SEQ ID NO: 23037 - DNA, 20 bp, synthetic construct
  misc_feature 1..20: note = Description of Artificial Sequence: Synthetic oligonucleotide
  misc_feature 1..20: note = Target: SCN10A; (-) strand; PAM type: NRG; PAM sequence: AAG
  source 1..20: mol_type = other DNA
agcaagccacatgtggaaga

SEQ ID NO: 23038 - DNA, 20 bp, synthetic construct
  misc_feature 1..20: note = Description of Artificial Sequence: Synthetic oligonucleotide
  misc_feature 1..20: note = Target: SCN10A; (-) strand; PAM type: NRG; PAM sequence: AAG
  source 1..20: mol_type = other DNA
aattagcaagccacatgtgg

SEQ ID NO: 23039 - DNA, 20 bp, synthetic construct
  misc_feature 1..20: note = Description of Artificial Sequence: Synthetic oligonucleotide
  misc_feature 1..20: note = Target: SCN10A; (-) strand; PAM type: NRG; PAM sequence: TGG
  source 1..20: mol_type = other DNA
gataattagcaagccacatg

SEQ ID NO: 23040 - DNA, 20 bp, synthetic construct
  misc_feature 1..20: note = Description of Artificial Sequence: Synthetic oligonucleotide
  misc_feature 1..20: note = Target: SCN10A; (-) strand; PAM type: NRG; PAM sequence: AAG
  source 1..20: mol_type = other DNA
atggtgctgggataattagc

SEQ ID NO: 23041 - DNA, 20 bp, synthetic construct
  misc_feature 1..20: note = Description of Artificial Sequence: Synthetic oligonucleotide
  misc_feature 1..20: note = Target: SCN10A; (-) strand; PAM type: NRG; PAM sequence: TAG
  source 1..20: mol_type = other DNA
acaaatggtgctgggataat

SEQ ID NO: 23042 - DNA, 20 bp, synthetic construct
  misc_feature 1..20: note = Description of Artificial Sequence: Synthetic oligonucleotide
  misc_feature 1..20: note = Target: SCN10A; (-) strand; PAM type: NRG; PAM sequence: GGG
  source 1..20: mol_type = other DNA
cctattcaacaaatggtgct

SEQ ID NO: 23043 - DNA, 20 bp, synthetic construct
  misc_feature 1..20: note = Description of Artificial Sequence: Synthetic oligonucleotide
  misc_feature 1..20: note = Target: SCN10A; (-) strand; PAM type: NRG; PAM sequence: TGG
  source 1..20: mol_type = other DNA
ccctattcaacaaatggtgc

SEQ ID NO: 23044 - DNA, 20 bp, synthetic construct
  misc_feature 1..20: note = Description of Artificial Sequence: Synthetic oligonucleotide
  misc_feature 1..20: note = Target: SCN10A; (-) strand; PAM type: NRG; PAM sequence: TGG
  source 1..20: mol_type = other DNA
aggacaccctattcaacaaa

SEQ ID NO: 23045 - DNA, 20 bp, synthetic construct
  misc_feature 1..20: note = Description of Artificial Sequence: Synthetic oligonucleotide
  misc_feature 1..20: note = Target: SCN10A; (-) strand; PAM type: NRG; PAM sequence: AGG
  source 1..20: mol_type = other DNA
acaaaaacgtaagtggggaa

SEQ ID NO: 23046 - DNA, 20 bp, synthetic construct
  misc_feature 1..20: note = Description of Artificial Sequence: Synthetic oligonucleotide
  misc_feature 1..20: note = Target: SCN10A; (-) strand; PAM type: NRG; PAM sequence: AAG
  source 1..20: mol_type = other DNA
aacaaaaacgtaagtgggga

SEQ ID NO: 23047 - DNA, 20 bp, synthetic construct
  misc_feature 1..20: note = Description of Artificial Sequence: Synthetic oligonucleotide
  misc_feature 1..20: note = Target: SCN10A; (-) strand; PAM type: NRG; PAM sequence: GGG
  source 1..20: mol_type = other DNA
agcaaacaaaaacgtaagtg

SEQ ID NO: 23048 - DNA, 20 bp, synthetic construct
  misc_feature 1..20: note = Description of Artificial Sequence: Synthetic oligonucleotide
  misc_feature 1..20: note = Target: SCN10A; (-) strand; PAM type: NRG; PAM sequence: GGG
  source 1..20: mol_type = other DNA
aagcaaacaaaaacgtaagt

SEQ ID NO: 23049 - DNA, 20 bp, synthetic construct
  misc_feature 1..20: note = Description of Artificial Sequence: Synthetic oligonucleotide
  misc_feature 1..20: note = Target: SCN10A; (-) strand; PAM type: NRG; PAM sequence: TGG
  source 1..20: mol_type = other DNA
aaagcaaacaaaaacgtaag

SEQ ID NO: 23050 - DNA, 20 bp, synthetic construct
  misc_feature 1..20: note = Description of Artificial Sequence: Synthetic oligonucleotide
  misc_feature 1..20: note = Target: SCN10A; (-) strand; PAM type: NRG; PAM sequence: AAG
  source 1..20: mol_type = other DNA
gaaaaagcaaacaaaaacgt

SEQ ID NO: 23051 - DNA, 20 bp, synthetic construct
  misc_feature 1..20: note = Description of Artificial Sequence: Synthetic oligonucleotide
  misc_feature 1..20: note = Target: SCN10A; (-) strand; PAM type: NRG; PAM sequence: AAG
  source 1..20: mol_type = other DNA
caagcaactgatctttgaaa

SEQ ID NO: 23052 - DNA, 20 bp, synthetic construct
  misc_feature 1..20: note = Description of Artificial Sequence: Synthetic oligonucleotide
  misc_feature 1..20: note = Target: SCN10A; (-) strand; PAM type: NRG; PAM sequence: AAG
  source 1..20: mol_type = other DNA
aaataaagccaaatacttac

SEQ ID NO: 23053 - DNA, 20 bp, synthetic construct
  misc_feature 1..20: note = Description of Artificial Sequence: Synthetic oligonucleotide
  misc_feature 1..20: note = Target: SCN10A; (-) strand; PAM type: NRG; PAM sequence: AAG
  source 1..20: mol_type = other DNA
gaatagagaactcagaaata

SEQ ID NO: 23054 - DNA, 20 bp, synthetic construct
  misc_feature 1..20: note = Description of Artificial Sequence: Synthetic oligonucleotide
  misc_feature 1..20: note = Target: SCN10A; (-) strand; PAM type: NRG; PAM sequence: CAG
  source 1..20: mol_type = other DNA
atggaaaagaatagagaact

SEQ ID NO: 23055 - DNA, 20 bp, synthetic construct
  misc_feature 1..20: note = Description of Artificial Sequence: Synthetic oligonucleotide
  misc_feature 1..20: note = Target: SCN10A; (-) strand; PAM type: NRG; PAM sequence: GAG
  source 1..20: mol_type = other DNA
tagaccaatggaaaagaata

SEQ ID NO: 23056 - DNA, 20 bp, synthetic construct
  misc_feature 1..20: note = Description of Artificial Sequence: Synthetic oligonucleotide
  misc_feature 1..20: note = Target: SCN10A; (-) strand; PAM type: NRG; PAM sequence: TAG
  source 1..20: mol_type = other DNA
catagaccaatggaaaagaa

SEQ ID NO: 23057 - DNA, 20 bp, synthetic construct
  misc_feature 1..20: note = Description of Artificial Sequence: Synthetic oligonucleotide
  misc_feature 1..20: note = Target: SCN10A; (-) strand; PAM type: NRG; PAM sequence: AAG
  source 1..20: mol_type = other DNA
aagcacatagaccaatggaa

SEQ ID NO: 23058 - DNA, 20 bp, synthetic construct
  misc_feature 1..20: note = Description of Artificial Sequence: Synthetic oligonucleotide
  misc_feature 1..20: note = Target: SCN10A; (-) strand; PAM type: NRG; PAM sequence: TGG
  source 1..20: mol_type = other DNA
aaaataagcacatagaccaa

SEQ ID NO: 23059 - DNA, 20 bp, synthetic construct
  misc_feature 1..20: note = Description of Artificial Sequence: Synthetic oligonucleotide
  misc_feature 1..20: note = Target: SCN10A; (-) strand; PAM type: NRG; PAM sequence: TAG
  source 1..20: mol_type = other DNA
ctggtataaaaataagcaca

SEQ ID NO: 23060 - DNA, 20 bp, synthetic construct
  misc_feature 1..20: note = Description of Artificial Sequence: Synthetic oligonucleotide
  misc_feature 1..20: note = Target: SCN10A; (-) strand; PAM type: NRG; PAM sequence: AAG
  source 1..20: mol_type = other DNA
catgatactggtataaaaat

SEQ ID NO: 23061 - DNA, 20 bp, synthetic construct
  misc_feature 1..20: note = Description of Artificial Sequence: Synthetic oligonucleotide
  misc_feature 1..20: note = Target: SCN10A; (-) strand; PAM type: NRG; PAM sequence: TGG
  source 1..20: mol_type = other DNA
gtaccaaaacagcatgatac

SEQ ID NO: 23062 - DNA, 20 bp, synthetic construct
  misc_feature 1..20: note = Description of Artificial Sequence: Synthetic oligonucleotide
  misc_feature 1..20: note = Target: SCN10A; (-) strand; PAM type: NRG; PAM sequence: CAG
  source 1..20: mol_type = other DNA
tagtatagcctgtaccaaaa

SEQ ID NO: 23063 - DNA, 20 bp, synthetic construct
  misc_feature 1..20: note = Description of Artificial Sequence: Synthetic oligonucleotide
  misc_feature 1..20: note = Target: SCN10A; (-) strand; PAM type: NRG; PAM sequence: TAG
  source 1..20: mol_type = other DNA
tatactacaaggctatagta

SEQ ID NO: 23064 - DNA, 20 bp, synthetic construct
  misc_feature 1..20: note = Description of Artificial Sequence: Synthetic oligonucleotide
  misc_feature 1..20: note = Target: SCN10A; (-) strand; PAM type: NRG; PAM sequence: TAG
  source 1..20: mol_type = other DNA
caaactatactacaaggcta

SEQ ID NO: 23065 - DNA, 20 bp, synthetic construct
  misc_feature 1..20: note = Description of Artificial Sequence: Synthetic oligonucleotide
  misc_feature 1..20: note = Target: SCN10A; (-) strand; PAM type: NRG; PAM sequence: AGG
  source 1..20: mol_type = other DNA
tgatttcaaactatactaca

SEQ ID NO: 23066 - DNA, 20 bp, synthetic construct
  misc_feature 1..20: note = Description of Artificial Sequence: Synthetic oligonucleotide
  misc_feature 1..20: note = Target: SCN10A; (-) strand; PAM type: NRG; PAM sequence: AAG
  source 1..20: mol_type = other DNA
ctgatttcaaactatactac

SEQ ID NO: 23067 - DNA, 20 bp, synthetic construct
  misc_feature 1..20: note = Description of Artificial Sequence: Synthetic oligonucleotide
  misc_feature 1..20: note = Target: SCN10A; (-) strand; PAM type: NRG; PAM sequence: TAG
  source 1..20: mol_type = other DNA
caaatctggaggcatcacct

SEQ ID NO: 23068 - DNA, 20 bp, synthetic construct
  misc_feature 1..20: note = Description of Artificial Sequence: Synthetic oligonucleotide
  misc_feature 1..20: note = Target: SCN10A; (-) strand; PAM type: NRG; PAM sequence: AGG
  source 1..20: mol_type = other DNA
agcaagaataacaaatctgg

SEQ ID NO: 23069 - DNA, 20 bp, synthetic construct
  misc_feature 1..20: note = Description of Artificial Sequence: Synthetic oligonucleotide
  misc_feature 1..20: note = Target: SCN10A; (-) strand; PAM type: NRG; PAM sequence: GAG
  source 1..20: mol_type = other DNA
aagcaagaataacaaatctg

SEQ ID NO: 23070 - DNA, 20 bp, synthetic construct
  misc_feature 1..20: note = Description of Artificial Sequence: Synthetic oligonucleotide
  misc_feature 1..20: note = Target: SCN10A; (-) strand; PAM type: NRG; PAM sequence: TGG
  source 1..20: mol_type = other DNA
ctaagcaagaataacaaatc

SEQ ID NO: 23071 - DNA, 20 bp, synthetic construct
  misc_feature 1..20: note = Description of Artificial Sequence: Synthetic oligonucleotide
  misc_feature 1..20: note = Target: SCN10A; (-) strand; PAM type: NRG; PAM sequence: AAG
  source 1..20: mol_type = other DNA
tagccaaagcaagactaagc

SEQ ID NO: 23072 - DNA, 20 bp, synthetic construct
  misc_feature 1..20: note = Description of Artificial Sequence: Synthetic oligonucleotide
  misc_feature 1..20: note = Target: SCN10A; (-) strand; PAM type: NRG; PAM sequence: AAG
  source 1..20: mol_type = other DNA
cacatagccaaagcaagact

SEQ ID NO: 23073 - DNA, 20 bp, synthetic construct
  misc_feature 1..20: note = Description of Artificial Sequence: Synthetic oligonucleotide
  misc_feature 1..20: note = Target: SCN10A; (-) strand; PAM type: NRG; PAM sequence: AAG
  source 1..20: mol_type = other DNA
ggaatccacatagccaaagc

SEQ ID NO: 23074 - DNA, 20 bp, synthetic construct
  misc_feature 1..20: note = Description of Artificial Sequence: Synthetic oligonucleotide
  misc_feature 1..20: note = Target: SCN10A; (-) strand; PAM type: NRG; PAM sequence: AAG
  source 1..20: mol_type = other DNA
aaaaggaatccacatagcca

SEQ ID NO: 23075 - DNA, 20 bp, synthetic construct
  misc_feature 1..20: note = Description of Artificial Sequence: Synthetic oligonucleotide
  misc_feature 1..20: note = Target: SCN10A; (-) strand; PAM type: NRG; PAM sequence: TAG
  source 1..20: mol_type = other DNA
gaaccaaaaaggaatccaca

SEQ ID NO: 23076 - DNA, 20 bp, synthetic construct
  misc_feature 1..20: note = Description of Artificial Sequence: Synthetic oligonucleotide
  misc_feature 1..20: note = Target: SCN10A; (-) strand; PAM type: NRG; PAM sequence: AGG
  source 1..20: mol_type = other DNA
aaattcatagggaaccaaaa

SEQ ID NO: 23077 - DNA, 20 bp, synthetic construct
  misc_feature 1..20: note = Description of Artificial Sequence: Synthetic oligonucleotide
  misc_feature 1..20: note = Target: SCN10A; (-) strand; PAM type: NRG; PAM sequence: AAG
  source 1..20: mol_type = other DNA
aaaattcatagggaaccaaa

SEQ ID NO: 23078 - DNA, 20 bp, synthetic construct
  misc_feature 1..20: note = Description of Artificial Sequence: Synthetic oligonucleotide
  misc_feature 1..20: note = Target: SCN10A; (-) strand; PAM type: NRG; PAM sequence: GGG
  source 1..20: mol_type = other DNA
taacaaccctaaaattcata

SEQ ID NO: 23079 - DNA, 20 bp, synthetic construct
  misc_feature 1..20: note = Description of Artificial Sequence: Synthetic oligonucleotide
  misc_feature 1..20: note = Target: SCN10A; (-) strand; PAM type: NRG; PAM sequence: AGG
  source 1..20: mol_type = other DNA
ataacaaccctaaaattcat

SEQ ID NO: 23080 - DNA, 20 bp, synthetic construct
  misc_feature 1..20: note = Description of Artificial Sequence: Synthetic oligonucleotide
  misc_feature 1..20: note = Target: SCN10A; (-) strand; PAM type: NRG; PAM sequence: TAG
  source 1..20: mol_type = other DNA
aataacaaccctaaaattca

SEQ ID NO: 23081 - DNA, 20 bp, synthetic construct
  misc_feature 1..20: note = Description of Artificial Sequence: Synthetic oligonucleotide
  misc_feature 1..20: note = Target: SCN10A; (-) strand; PAM type: NRG; PAM sequence: TAG
  source 1..20: mol_type = other DNA
cacatcattcttcacagaaa

SEQ ID NO: 23082 - DNA, 20 bp, synthetic construct
  misc_feature 1..20: note = Description of Artificial Sequence: Synthetic oligonucleotide
  misc_feature 1..20: note = Target: SCN10A; (-) strand; PAM type: NRG; PAM sequence: CAG
  source 1..20: mol_type = other DNA
aagtaccacatcattcttca

SEQ ID NO: 23083 - DNA, 20 bp, synthetic construct
  misc_feature 1..20: note = Description of Artificial Sequence: Synthetic oligonucleotide
  misc_feature 1..20: note = Target: SCN10A; (-) strand; PAM type: NRG; PAM sequence: AAG
  source 1..20: mol_type = other DNA
attcaatacaatttccattg

SEQ ID NO: 23084 - DNA, 20 bp, synthetic construct
  misc_feature 1..20: note = Description of Artificial Sequence: Synthetic oligonucleotide
  misc_feature 1..20: note = Target: SCN10A; (-) strand; PAM type: NRG; PAM sequence: CAG
  source 1..20: mol_type = other DNA
ttactgccaaaagcaatata

SEQ ID NO: 23085 - DNA, 20 bp, synthetic construct
  misc_feature 1..20: note = Description of Artificial Sequence: Synthetic oligonucleotide
  misc_feature 1..20: note = Target: SCN10A; (-) strand; PAM type: NRG; PAM sequence: AAG
  source 1..20: mol_type = other DNA
gaaaatgaccttactgccaa

SEQ ID NO: 23086 - DNA, 20 bp, synthetic construct
  misc_feature 1..20: note = Description of Artificial Sequence: Synthetic oligonucleotide
  misc_feature 1..20: note = Target: SCN10A; (-) strand; PAM type: NRG; PAM sequence: TGG
  source 1..20: mol_type = other DNA
acacatcccatgctcatgga

SEQ ID NO: 23087 - DNA, 20 bp, synthetic construct
  misc_feature 1..20: note = Description of Artificial Sequence: Synthetic oligonucleotide
  misc_feature 1..20: note = Target: SCN10A; (-) strand; PAM type: NRG; PAM sequence: TGG
  source 1..20: mol_type = other DNA
gggaacacatcccatgctca

SEQ ID NO: 23088 - DNA, 20 bp, synthetic construct
  misc_feature 1..20: note = Description of Artificial Sequence: Synthetic oligonucleotide
  misc_feature 1..20: note = Target: SCN10A; (-) strand; PAM type: NRG; PAM sequence: GGG
  source 1..20: mol_type = other DNA
cacagatgacacaaacaaat

SEQ ID NO: 23089 - DNA, 20 bp, synthetic construct
  misc_feature 1..20: note = Description of Artificial Sequence: Synthetic oligonucleotide
  misc_feature 1..20: note = Target: SCN10A; (-) strand; PAM type: NRG; PAM sequence: TGG
  source 1..20: mol_type = other DNA
tcacagatgacacaaacaaa

SEQ ID NO: 23090 - DNA, 20 bp, synthetic construct
  misc_feature 1..20: note = Description of Artificial Sequence: Synthetic oligonucleotide
  misc_feature 1..20: note = Target: SCN10A; (-) strand; PAM type: NRG; PAM sequence: CAG
  source 1..20: mol_type = other DNA
aacactgctaaaataaatca

SEQ ID NO: 23091 - DNA, 20 bp, synthetic construct
  misc_feature 1..20: note = Description of Artificial Sequence: Synthetic oligonucleotide
  misc_feature 1..20: note = Target: SCN10A; (-) strand; PAM type: NRG; PAM sequence: AGG
  source 1..20: mol_type = other DNA
aaaggtgaaagatttctaca

SEQ ID NO: 23092 - DNA, 20 bp, synthetic construct
  misc_feature 1..20: note = Description of Artificial Sequence: Synthetic oligonucleotide
  misc_feature 1..20: note = Target: SCN10A; (-) strand; PAM type: NRG; PAM sequence: AAG
  source 1..20: mol_type = other DNA
aaaaggtgaaagatttctac

SEQ ID NO: 23093 - DNA, 20 bp, synthetic construct
  misc_feature 1..20: note = Description of Artificial Sequence: Synthetic oligonucleotide
  misc_feature 1..20: note = Target: SCN10A; (-) strand; PAM type: NRG; PAM sequence: AAG
  source 1..20: mol_type = other DNA
atacctaaccaaaaaggtga

SEQ ID NO: 23094 - DNA, 20 bp, synthetic construct
  misc_feature 1..20: note = Description of Artificial Sequence: Synthetic oligonucleotide
  misc_feature 1..20: note = Target: SCN10A; (-) strand; PAM type: NRG; PAM sequence: AGG
  source 1..20: mol_type = other DNA
aggaatatacctaaccaaaa

SEQ ID NO: 23095 - DNA, 20 bp, synthetic construct
  misc_feature 1..20: note = Description of Artificial Sequence: Synthetic oligonucleotide
  misc_feature 1..20: note = Target: SCN10A; (-) strand; PAM type: NRG; PAM sequence: AAG
  source 1..20: mol_type = other DNA
taggaatatacctaaccaaa

SEQ ID NO: 23096 - DNA, 20 bp, synthetic construct
  misc_feature 1..20: note = Description of Artificial Sequence: Synthetic oligonucleotide
  misc_feature 1..20: note = Target: SCN10A; (-) strand; PAM type: NRG; PAM sequence: AGG
  source 1..20: mol_type = other DNA
aataaaaacaaaaaaatctt

SEQ ID NO: 23097 - DNA, 20 bp, synthetic construct
  misc_feature 1..20: note = Description of Artificial Sequence: Synthetic oligonucleotide
  misc_feature 1..20: note = Target: SCN10A; (-) strand; PAM type: NRG; PAM sequence: TAG
  source 1..20: mol_type = other DNA
aaataaaaacaaaaaaatct

SEQ ID NO: 23098 - DNA, 20 bp, synthetic construct
  misc_feature 1..20: note = Description of Artificial Sequence: Synthetic oligonucleotide
  misc_feature 1..20: note = Target: SCN10A; (-) strand; PAM type: NRG; PAM sequence: CAG
  source 1..20: mol_type = other DNA
gaactcaatcccttttacaa

SEQ ID NO: 23099 - DNA, 20 bp, synthetic construct
  misc_feature 1..20: note = Description of Artificial Sequence: Synthetic oligonucleotide
  misc_feature 1..20: note = Target: SCN10A; (-) strand; PAM type: NRG; PAM sequence: AAG
  source 1..20: mol_type = other DNA
accaagctgaggaacaaatc

SEQ ID NO: 23100 - DNA, 20 bp, synthetic construct
  misc_feature 1..20: note = Description of Artificial Sequence: Synthetic oligonucleotide
  misc_feature 1..20: note = Target: SCN10A; (-) strand; PAM type: NRG; PAM sequence: AGG
  source 1..20: mol_type = other DNA
caccaccagaaaccaagctg

SEQ ID NO: 23101 - DNA, 20 bp, synthetic construct
  misc_feature 1..20: note = Description of Artificial Sequence: Synthetic oligonucleotide
  misc_feature 1..20: note = Target: SCN10A; (-) strand; PAM type: NRG; PAM sequence: GAG
  source 1..20: mol_type = other DNA
acaccaccagaaaccaagct

SEQ ID NO: 23102 - DNA, 20 bp, synthetic construct
  misc_feature 1..20: note = Description of Artificial Sequence: Synthetic oligonucleotide
  misc_feature 1..20: note = Target: SCN10A; (-) strand; PAM type: NRG; PAM sequence: AAG
  source 1..20: mol_type = other DNA
actgtacaccaccagaaacc

SEQ ID NO: 23103 - DNA, 20 bp, synthetic construct
  misc_feature 1..20: note = Description of Artificial Sequence: Synthetic oligonucleotide
  misc_feature 1..20: note = Target: SCN10A; (-) strand; PAM type: NRG; PAM sequence: CAG
  source 1..20: mol_type = other DNA
gcagcactactgtacaccac

SEQ ID NO: 23104 - DNA, 20 bp, synthetic construct
  misc_feature 1..20: note = Description of Artificial Sequence: Synthetic oligonucleotide
  misc_feature 1..20: note = Target: SCN10A; (-) strand; PAM type: NRG; PAM sequence: CAG
  source 1..20: mol_type = other DNA
aaacaatgtatacaaatcag

SEQ ID NO: 23105 - DNA, 20 bp, synthetic construct
  misc_feature 1..20: note = Description of Artificial Sequence: Synthetic oligonucleotide
  misc_feature 1..20: note = Target: SCN10A; (-) strand; PAM type: NRG; PAM sequence: CAG
  source 1..20: mol_type = other DNA
caaaaacaatgtatacaaat

SEQ ID NO: 23106 - DNA, 20 bp, synthetic construct
  misc_feature 1..20: note = Description of Artificial Sequence: Synthetic oligonucleotide
  misc_feature 1..20: note = Target: SCN10A; (-) strand; PAM type: NRG; PAM sequence: AGG
  source 1..20: mol_type = other DNA
aatgaattcagtaaagtttc

SEQ ID NO: 23107 - DNA, 20 bp, synthetic construct
  misc_feature 1..20: note = Description of Artificial Sequence: Synthetic oligonucleotide
  misc_feature 1..20: note = Target: SCN10A; (-) strand; PAM type: NRG; PAM sequence: CAG
  source 1..20: mol_type = other DNA
aaatgaattcagtaaagttt

SEQ ID NO: 23108 - DNA, 20 bp, synthetic construct
  misc_feature 1..20: note = Description of Artificial Sequence: Synthetic oligonucleotide
  misc_feature 1..20: note = Target: SCN10A; (-) strand; PAM type: NRG; PAM sequence: AAG
  source 1..20: mol_type = other DNA
tctaataaatgaattcagta

SEQ ID NO: 23109 - DNA, 20 bp, synthetic construct
  misc_feature 1..20: note = Description of Artificial Sequence: Synthetic oligonucleotide
  misc_feature 1..20: note = Target: SCN10A; (-) strand; PAM type: NRG; PAM sequence: CAG
  source 1..20: mol_type = other DNA
ctagatctaataaatgaatt

SEQ ID NO: 23110 - DNA, 20 bp, synthetic construct
  misc_feature 1..20: note = Description of Artificial Sequence: Synthetic oligonucleotide
  misc_feature 1..20: note = Target: SCN10A; (-) strand; PAM type: NRG; PAM sequence: TAG
  source 1..20: mol_type = other DNA
agactcatccaaaaagctcc

SEQ ID NO: 23111 - DNA, 20 bp, synthetic construct
  misc_feature 1..20: note = Description of Artificial Sequence: Synthetic oligonucleotide
  misc_feature 1..20: note = Target: SCN10A; (-) strand; PAM type: NRG; PAM sequence: AAG
  source 1..20: mol_type = other DNA
accctaaagactcatccaaa

SEQ ID NO: 23112 - DNA, 20 bp, synthetic construct
  misc_feature 1..20: note = Description of Artificial Sequence: Synthetic oligonucleotide
  misc_feature 1..20: note = Target: SCN10A; (-) strand; PAM type: NRG; PAM sequence: AAG
  source 1..20: mol_type = other DNA
cgtatgcctaggaaacccta

SEQ ID NO: 23113 - DNA, 20 bp, synthetic construct
  misc_feature 1..20: note = Description of Artificial Sequence: Synthetic oligonucleotide
  misc_feature 1..20: note = Target: SCN10A; (-) strand; PAM type: NRG; PAM sequence: AGG
  source 1..20: mol_type = other DNA
aatgatatgatcgtatgcct

SEQ ID NO: 23114 - DNA, 20 bp, synthetic construct
  misc_feature 1..20: note = Description of Artificial Sequence: Synthetic oligonucleotide
  misc_feature 1..20: note = Target: SCN10A; (-) strand; PAM type: NRG; PAM sequence: TAG
  source 1..20: mol_type = other DNA
caatgatatgatcgtatgcc

SEQ ID NO: 23115 - DNA, 20 bp, synthetic construct
  misc_feature 1..20: note = Description of Artificial Sequence: Synthetic oligonucleotide
  misc_feature 1..20: note = Target: SCN10A; (-) strand; PAM type: NRG; PAM sequence: AAG
  source 1..20: mol_type = other DNA
aatccaaatcagtaaagggg

SEQ ID NO: 23116 - DNA, 20 bp, synthetic construct
  misc_feature 1..20: note = Description of Artificial Sequence: Synthetic oligonucleotide
  misc_feature 1..20: note = Target: SCN10A; (-) strand; PAM type: NRG; PAM sequence: GGG
  source 1..20: mol_type = other DNA
gggaatccaaatcagtaaag

SEQ ID NO: 23117 - DNA, 20 bp, synthetic construct
  misc_feature 1..20: note = Description of Artificial Sequence: Synthetic oligonucleotide
  misc_feature 1..20: note = Target: SCN10A; (-) strand; PAM type: NRG; PAM sequence: GGG
  source 1..20: mol_type = other DNA
agggaatccaaatcagtaaa

SEQ ID NO: 23118 - DNA, 20 bp, synthetic construct
  misc_feature 1..20: note = Description of Artificial Sequence: Synthetic oligonucleotide
  misc_feature 1..20: note = Target: SCN10A; (-) strand; PAM type: NRG; PAM sequence: AGG
  source 1..20: mol_type = other DNA
aagggaatccaaatcagtaa

SEQ ID NO: 23119 - DNA, 20 bp, synthetic construct
  misc_feature 1..20: note = Description of Artificial Sequence: Synthetic oligonucleotide
  misc_feature 1..20: note = Target: SCN10A; (-) strand; PAM type: NRG; PAM sequence: AAG
  source 1..20: mol_type = other DNA
aaagggaatccaaatcagta

SEQ ID NO: 23120 - DNA, 20 bp, synthetic construct
  misc_feature 1..20: note = Description of Artificial Sequence: Synthetic oligonucleotide
  misc_feature 1..20: note = Target: SCN10A; (-) strand; PAM type: NRG; PAM sequence: CAG
  source 1..20: mol_type = other DNA
taaataaagggaatccaaat

SEQ ID NO: 23121 - DNA, 20 bp, synthetic construct
  misc_feature 1..20: note = Description of Artificial Sequence: Synthetic oligonucleotide
  misc_feature 1..20: note = Target: SCN10A; (-) strand; PAM type: NRG; PAM sequence: GGG
  source 1..20: mol_type = other DNA
agacaagagaaataaataaa

SEQ ID NO: 23122 - DNA, 20 bp, synthetic construct
  misc_feature 1..20: note = Description of Artificial Sequence: Synthetic oligonucleotide
  misc_feature 1..20: note = Target: SCN10A; (-) strand; PAM type: NRG; PAM sequence: AGG
  source 1..20: mol_type = other DNA
cagacaagagaaataaataa

SEQ ID NO: 23123 - DNA, 20 bp, synthetic construct
  misc_feature 1..20: note = Description of Artificial Sequence: Synthetic oligonucleotide
  misc_feature 1..20: note = Target: SCN10A; (-) strand; PAM type: NRG; PAM sequence: AAG
  source 1..20: mol_type = other DNA
tcagacaagagaaataaata

SEQ ID NO: 23124 - DNA, 20 bp, synthetic construct
  misc_feature 1..20: note = Description of Artificial Sequence: Synthetic oligonucleotide
  misc_feature 1..20: note = Target: SCN10A; (-) strand; PAM type: NRG; PAM sequence: GAG
  source 1..20: mol_type = other DNA
tagccagagcaatcagacaa

SEQ ID NO: 23125 - DNA, 20 bp, synthetic construct
  misc_feature 1..20: note = Description of Artificial Sequence: Synthetic oligonucleotide
  misc_feature 1..20: note = Target: SCN10A; (-) strand; PAM type: NRG; PAM sequence: AAG
  source 1..20: mol_type = other DNA
cctagccagagcaatcagac

SEQ ID NO: 23126 - DNA, 20 bp, synthetic construct
  misc_feature 1..20: note = Description of Artificial Sequence: Synthetic oligonucleotide
  misc_feature 1..20: note = Target: SCN10A; (-) strand; PAM type: NRG; PAM sequence: CAG
  source 1..20: mol_type = other DNA
gaagtcctagccagagcaat

SEQ ID NO: 23127 - DNA, 20 bp, synthetic construct
  misc_feature 1..20: note = Description of Artificial Sequence: Synthetic oligonucleotide
  misc_feature 1..20: note = Target: SCN10A; (-) strand; PAM type: NRG; PAM sequence: GAG
  source 1..20: mol_type = other DNA
agtactggaagtcctagcca

SEQ ID NO: 23128 - DNA, 20 bp, synthetic construct
  misc_feature 1..20: note = Description of Artificial Sequence: Synthetic oligonucleotide
  misc_feature 1..20: note = Target: SCN10A; (-) strand; PAM type: NRG; PAM sequence: CAG
  source 1..20: mol_type = other DNA
atagtactggaagtcctagc

SEQ ID NO: 23129 - DNA, 20 bp, synthetic construct
  misc_feature 1..20: note = Description of Artificial Sequence: Synthetic oligonucleotide
  misc_feature 1..20: note = Target: SCN10A; (-) strand; PAM type: NRG; PAM sequence: TAG
  source 1..20: mol_type = other DNA
caacatagtactggaagtcc

SEQ ID NO: 23130 - DNA, 20 bp, synthetic construct
  misc_feature 1..20: note = Description of Artificial Sequence: Synthetic oligonucleotide
  misc_feature 1..20: note = Target: SCN10A; (-) strand; PAM type: NRG; PAM sequence: AAG
  source 1..20: mol_type = other DNA
tctatccaacatagtactgg

SEQ ID NO: 23131 - DNA, 20 bp, synthetic construct
  misc_feature 1..20: note = Description of Artificial Sequence: Synthetic oligonucleotide
  misc_feature 1..20: note = Target: SCN10A; (-) strand; PAM type: NRG; PAM sequence: TGG
  source 1..20: mol_type = other DNA
atttctatccaacatagtac

SEQ ID NO: 23132 - DNA, 20 bp, synthetic construct
  misc_feature 1..20: note = Description of Artificial Sequence: Synthetic oligonucleotide
  misc_feature 1..20: note = Target: SCN10A; (-) strand; PAM type: NRG; PAM sequence: TAG
  source 1..20: mol_type = other DNA
ttcaccatttctatccaaca

SEQ ID NO: 23133 - DNA, 20 bp, synthetic construct
  misc_feature 1..20: note = Description of Artificial Sequence: Synthetic oligonucleotide
  misc_feature 1..20: note = Target: SCN10A; (-) strand; PAM type: NRG; PAM sequence: AGG
  source 1..20: mol_type = other DNA
ctgagaactgaaacaagaca

SEQ ID NO: 23134 - DNA, 20 bp, synthetic construct
  misc_feature 1..20: note = Description of Artificial Sequence: Synthetic oligonucleotide
  misc_feature 1..20: note = Target: SCN10A; (-) strand; PAM type: NRG; PAM sequence: AAG
  source 1..20: mol_type = other DNA
cctgagaactgaaacaagac

SEQ ID NO: 23135 - DNA, 20 bp, synthetic construct
  misc_feature 1..20: note = Description of Artificial Sequence: Synthetic oligonucleotide
  misc_feature 1..20: note = Target: SCN10A; (-) strand; PAM type: NRG; PAM sequence: AAG
  source 1..20: mol_type = other DNA
ttccccctgagaactgaaac

SEQ ID NO: 23136 - DNA, 20 bp, synthetic construct
  misc_feature 1..20: note = Description of Artificial Sequence: Synthetic oligonucleotide
  misc_feature 1..20: note = Target: SCN10A; (-) strand; PAM type: NRG; PAM sequence: GAG
  source 1..20: mol_type = other DNA
aagttgaaagcattccccct

SEQ ID NO: 23137 - DNA, 20 bp, synthetic construct
  misc_feature 1..20: note = Description of Artificial Sequence: Synthetic oligonucleotide
  misc_feature 1..20: note = Target: SCN10A; (-) strand; PAM type: NRG; PAM sequence: AAG
  source 1..20: mol_type = other DNA
accaaacagggaaaagttga

SEQ ID NO: 23138 - DNA, 20 bp, synthetic construct
  misc_feature 1..20: note = Description of Artificial Sequence: Synthetic oligonucleotide
  misc_feature 1..20: note = Target: SCN10A; (-) strand; PAM type: NRG; PAM sequence: AAG
  source 1..20: mol_type = other DNA
acattataccaaacagggaa

SEQ ID NO: 23139 - DNA, 20 bp, synthetic construct
  misc_feature 1..20: note = Description of Artificial Sequence: Synthetic oligonucleotide
  misc_feature 1..20: note = Target: SCN10A; (-) strand; PAM type: NRG; PAM sequence: GGG
  source 1..20: mol_type = other DNA
agccaacattataccaaaca

SEQ ID NO: 23140 - DNA, 20 bp, synthetic construct
  misc_feature 1..20: note = Description of Artificial Sequence: Synthetic oligonucleotide
  misc_feature 1..20: note = Target: SCN10A; (-) strand; PAM type: NRG; PAM sequence: AGG
  source 1..20: mol_type = other DNA
cagccaacattataccaaac

SEQ ID NO: 23141 - DNA, 20 bp, synthetic construct
  misc_feature 1..20: note = Description of Artificial Sequence: Synthetic oligonucleotide
  misc_feature 1..20: note = Target: SCN10A; (-) strand; PAM type: NRG; PAM sequence: CAG
  source 1..20: mol_type = other DNA
acagccaacattataccaaa

SEQ ID NO: 23142 - DNA, 20 bp, synthetic construct
  misc_feature 1..20: note = Description of Artificial Sequence: Synthetic oligonucleotide
  misc_feature 1..20: note = Target: SCN10A; (-) strand; PAM type: NRG; PAM sequence: CAG
  source 1..20: mol_type = other DNA
agccatctatgacaaatcca

SEQ ID NO: 23143 - DNA, 20 bp, synthetic construct
  misc_feature 1..20: note = Description of Artificial Sequence: Synthetic oligonucleotide
  misc_feature 1..20: note = Target: SCN10A; (-) strand; PAM type: NRG; PAM sequence: AAG
  source 1..20: mol_type = other DNA
gacatactccaaggtaataa

SEQ ID NO: 23144 - DNA, 20 bp, synthetic construct
  misc_feature 1..20: note = Description of Artificial Sequence: Synthetic oligonucleotide
  misc_feature 1..20: note = Target: SCN10A; (-) strand; PAM type: NRG; PAM sequence: AGG
  source 1..20: mol_type = other DNA
catagaagggacatactcca

SEQ ID NO: 23145 - DNA, 20 bp, synthetic construct
  misc_feature 1..20: note = Description of Artificial Sequence: Synthetic oligonucleotide
  misc_feature 1..20: note = Target: SCN10A; (-) strand; PAM type: NRG; PAM sequence: AAG
  source 1..20: mol_type = other DNA
gcatagaagggacatactcc

SEQ ID NO: 23146 - DNA, 20 bp, synthetic construct
  misc_feature 1..20: note = Description of Artificial Sequence: Synthetic oligonucleotide
  misc_feature 1..20: note = Target: SCN10A; (-) strand; PAM type: NRG; PAM sequence: GGG
  source 1..20: mol_type = other DNA
tcaaccaaattggcatagaa

SEQ ID NO: 23147 - DNA, 20 bp, synthetic construct
  misc_feature 1..20: note = Description of Artificial Sequence: Synthetic oligonucleotide
  misc_feature 1..20: note = Target: SCN10A; (-) strand; PAM type: NRG; PAM sequence: AGG
  source 1..20: mol_type = other DNA
ctcaaccaaattggcataga

SEQ ID NO: 23148 - DNA, 20 bp, synthetic construct
  misc_feature 1..20: note = Description of Artificial Sequence: Synthetic oligonucleotide
  misc_feature 1..20: note = Target: SCN10A; (-) strand; PAM type: NRG; PAM sequence: AAG
  source 1..20: mol_type = other DNA
cctcaaccaaattggcatag

SEQ ID NO: 23149 - DNA, 20 bp, synthetic construct
  misc_feature 1..20: note = Description of Artificial Sequence: Synthetic oligonucleotide
  misc_feature 1..20: note = Target: SCN10A; (-) strand; PAM type: NRG; PAM sequence: TAG
  source 1..20: mol_type = other DNA
aaccctcaaccaaattggca

SEQ ID NO: 23150 - DNA, 20 bp, synthetic construct
  misc_feature 1..20: note = Description of Artificial Sequence: Synthetic oligonucleotide
  misc_feature 1..20: note = Target: SCN10A; (-) strand; PAM type: NRG; PAM sequence: TGG
  source 1..20: mol_type = other DNA
attaaaaccctcaaccaaat

SEQ ID NO: 23151 - DNA, 20 bp, synthetic construct
  misc_feature 1..20: note = Description of Artificial Sequence: Synthetic oligonucleotide
  misc_feature 1..20: note = Target: SCN10A; (-) strand; PAM type: NRG; PAM sequence: CAG
  source 1..20: mol_type = other DNA
gaaaagcatttgacaaaatc

SEQ ID NO: 23152 - DNA, 20 bp, synthetic construct
  misc_feature 1..20: note = Description of Artificial Sequence: Synthetic oligonucleotide
  misc_feature 1..20: note = Target: SCN10A; (-) strand; PAM type: NRG; PAM sequence: AAG
  source 1..20: mol_type = other DNA
catctcaataggtgcaggaa

SEQ ID NO: 23153 - DNA, 20 bp, synthetic construct
  misc_feature 1..20: note = Description of Artificial Sequence: Synthetic oligonucleotide
  misc_feature 1..20: note = Target: SCN10A; (-) strand; PAM type: NRG; PAM sequence: AGG
  source 1..20: mol_type = other DNA
atgatcatctcaataggtgc

SEQ ID NO: 23154 - DNA, 20 bp, synthetic construct
  misc_feature 1..20: note = Description of Artificial Sequence: Synthetic oligonucleotide
  misc_feature 1..20: note = Target: SCN10A; (-) strand; PAM type: NRG; PAM sequence: CAG
  source 1..20: mol_type = other DNA
tatgatcatctcaataggtg

SEQ ID NO: 23155 - DNA, 20 bp, synthetic construct
  misc_feature 1..20: note = Description of Artificial Sequence: Synthetic oligonucleotide
  misc_feature 1..20: note = Target: SCN10A; (-) strand; PAM type: NRG; PAM sequence: AGG
  source 1..20: mol_type = other DNA
aatcatatgatcatctcaat

SEQ ID NO: 23156 - DNA, 20 bp, synthetic construct
  misc_feature 1..20: note = Description of Artificial Sequence: Synthetic oligonucleotide
  misc_feature 1..20: note = Target: SCN10A; (-) strand; PAM type: NRG; PAM sequence: TAG
  source 1..20: mol_type = other DNA
aaatcatatgatcatctcaa

SEQ ID NO: 23157 - DNA, 20 bp, synthetic construct
  misc_feature 1..20: note = Description of Artificial Sequence: Synthetic oligonucleotide
  misc_feature 1..20: note = Target: SCN10A; (-) strand; PAM type: NRG; PAM sequence: CAG
  source 1..20: mol_type = other DNA
aatgctgcacgtcacataaa

SEQ ID NO: 23158 - DNA, 20 bp, synthetic construct
  misc_feature 1..20: note = Description of Artificial Sequence: Synthetic oligonucleotide
  misc_feature 1..20: note = Target: SCN10A; (-) strand; PAM type: NRG; PAM sequence: AAG
  source 1..20: mol_type = other DNA
agggatgatttaacatacac

SEQ ID NO: 23159 - DNA, 20 bp, synthetic construct
  misc_feature 1..20: note = Description of Artificial Sequence: Synthetic oligonucleotide
  misc_feature 1..20: note = Target: SCN10A; (-) strand; PAM type: NRG; PAM sequence: GGG
  source 1..20: mol_type = other DNA
ggtttcataccagggaggta

SEQ ID NO: 23160 - DNA, 20 bp, synthetic construct
  misc_feature 1..20: note = Description of Artificial Sequence: Synthetic oligonucleotide
  misc_feature 1..20: note = Target: SCN10A; (-) strand; PAM type: NRG; PAM sequence: AGG
  source 1..20: mol_type = other DNA
gggtttcataccagggaggt

SEQ ID NO: 23161 - DNA, 20 bp, synthetic construct
  misc_feature 1..20: note = Description of Artificial Sequence: Synthetic oligonucleotide
  misc_feature 1..20: note = Target: SCN10A; (-) strand; PAM type: NRG; PAM sequence: TAG
  source 1..20: mol_type = other DNA
ggggtttcataccagggagg

SEQ ID NO: 23162 - DNA, 20 bp, synthetic construct
  misc_feature 1..20: note = Description of Artificial Sequence: Synthetic oligonucleotide
  misc_feature 1..20: note = Target: SCN10A; (-) strand; PAM type: NRG; PAM sequence: AGG
  source 1..20: mol_type = other DNA
aagggggtttcataccaggg

SEQ ID NO: 23163 - DNA, 20 bp, synthetic construct
  misc_feature 1..20: note = Description of Artificial Sequence: Synthetic oligonucleotide
  misc_feature 1..20: note = Target: SCN10A; (-) strand; PAM type: NRG; PAM sequence: GAG
  source 1..20: mol_type = other DNA
caagggggtttcataccagg

SEQ ID NO: 23164 - DNA, 20 bp, synthetic construct
  misc_feature 1..20: note = Description of Artificial Sequence: Synthetic oligonucleotide
  misc_feature 1..20: note = Target: SCN10A; (-) strand; PAM type: NRG; PAM sequence: GGG
  source 1..20: mol_type = other DNA
atcaagggggtttcatacca

SEQ ID NO: 23165 - DNA, 20 bp, synthetic construct
  misc_feature 1..20: note = Description of Artificial Sequence: Synthetic oligonucleotide
  misc_feature 1..20: note = Target: SCN10A; (-) strand; PAM type: NRG; PAM sequence: AGG
  source 1..20: mol_type = other DNA
gatcaagggggtttcatacc

SEQ ID NO: 23166 - DNA, 20 bp, synthetic construct
  misc_feature 1..20: note = Description of Artificial Sequence: Synthetic oligonucleotide
  misc_feature 1..20: note = Target: SCN10A; (-) strand; PAM type: NRG; PAM sequence: CAG
  source 1..20: mol_type = other DNA
tgatcaagggggtttcatac

SEQ ID NO: 23167 - DNA, 20 bp, synthetic construct
  misc_feature 1..20: note = Description of Artificial Sequence: Synthetic oligonucleotide
  misc_feature 1..20: note = Target: SCN10A; (-) strand; PAM type: NRG; PAM sequence: GGG
  source 1..20: mol_type = other DNA
ataacacaccatgatcaagg

SEQ ID NO: 23168 - DNA, 20 bp, synthetic construct
  misc_feature 1..20: note = Description of Artificial Sequence: Synthetic oligonucleotide
  misc_feature 1..20: note = Target: SCN10A; (-) strand; PAM type: NRG; PAM sequence: GGG
  source 1..20: mol_type = other DNA
gataacacaccatgatcaag

SEQ ID NO: 23169 - DNA, 20 bp, synthetic construct
  misc_feature 1..20: note = Description of Artificial Sequence: Synthetic oligonucleotide
  misc_feature 1..20: note = Target: SCN10A; (-) strand; PAM type: NRG; PAM sequence: GGG
  source 1..20: mol_type = other DNA
agataacacaccatgatcaa

SEQ ID NO: 23170 - DNA, 20 bp, synthetic construct
  misc_feature 1..20: note = Description of Artificial Sequence: Synthetic oligonucleotide
  misc_feature 1..20: note = Target: SCN10A; (-) strand; PAM type: NRG; PAM sequence: AGG
  source 1..20: mol_type = other DNA
aagataacacaccatgatca

SEQ ID NO: 23171 - DNA, 20 bp, synthetic construct
  misc_feature 1..20: note = Description of Artificial Sequence: Synthetic oligonucleotide
  misc_feature 1..20: note = Target: SCN10A; (-) strand; PAM type: NRG; PAM sequence: AAG
  source 1..20: mol_type = other DNA
aaagataacacaccatgatc

SEQ ID NO: 23172 - DNA, 20 bp, synthetic construct
  misc_feature 1..20: note = Description of Artificial Sequence: Synthetic oligonucleotide
  misc_feature 1..20: note = Target: SCN10A; (-) strand; PAM type: NRG; PAM sequence: AAG
  source 1..20: mol_type = other DNA
tgaatccaacacatatccaa

SEQ ID NO: 23173 - DNA, 20 bp, synthetic construct
  misc_feature 1..20: note = Description of Artificial Sequence: Synthetic oligonucleotide
  misc_feature 1..20: note = Target: SCN10A; (-) strand; PAM type: NRG; PAM sequence: TAG
  source 1..20: mol_type = other DNA
aaaaatcctcaacaaaatgc

SEQ ID NO: 23174 - DNA, 20 bp, synthetic construct
  misc_feature 1..20: note = Description of Artificial Sequence: Synthetic oligonucleotide
  misc_feature 1..20: note = Target: SCN10A; (-) strand; PAM type: NRG; PAM sequence: TAG
  source 1..20: mol_type = other DNA
gacaatatccctgatgaaca

SEQ ID NO: 23175 - DNA, 20 bp, synthetic construct
  misc_feature 1..20: note = Description of Artificial Sequence: Synthetic oligonucleotide
  misc_feature 1..20: note = Target: SCN10A; (-) strand; PAM type: NRG; PAM sequence: CAG
  source 1..20: mol_type = other DNA
ggacttttaaaaaagaacta

SEQ ID NO: 23176 - DNA, 20 bp, synthetic construct
  misc_feature 1..20: note = Description of Artificial Sequence: Synthetic oligonucleotide
  misc_feature 1..20: note = Target: SCN10A; (-) strand; PAM type: NRG; PAM sequence: AAG
  source 1..20: mol_type = other DNA
ccagaaaaggacttttaaaa

SEQ ID NO: 23177 - DNA, 20 bp, synthetic construct
  misc_feature 1..20: note = Description of Artificial Sequence: Synthetic oligonucleotide
  misc_feature 1..20: note = Target: SCN10A; (-) strand; PAM type: NRG; PAM sequence: AGG
  source 1..20: mol_type = other DNA
cctaataccaaaaccagaaa

SEQ ID NO: 23178 - DNA, 20 bp, synthetic construct
  misc_feature 1..20: note = Description of Artificial Sequence: Synthetic oligonucleotide
  misc_feature 1..20: note = Target: SCN10A; (-) strand; PAM type: NRG; PAM sequence: AAG
  source 1..20: mol_type = other DNA
ccctaataccaaaaccagaa

SEQ ID NO: 23179 - DNA, 20 bp, synthetic construct
  misc_feature 1..20: note = Description of Artificial Sequence: Synthetic oligonucleotide
  misc_feature 1..20: note = Target: SCN10A; (-) strand; PAM type: NRG; PAM sequence: CAG
  source 1..20: mol_type = other DNA
tatcaccctaataccaaaac

SEQ ID NO: 23180 - DNA, 20 bp, synthetic construct
  misc_feature 1..20: note = Description of Artificial Sequence: Synthetic oligonucleotide
  misc_feature 1..20: note = Target: SCN10A; (-) strand; PAM type: NRG; PAM sequence: CAG
  source 1..20: mol_type = other DNA
cctaaatcattttatgaagc

SEQ ID NO: 23181 - DNA, 20 bp, synthetic construct
  misc_feature 1..20: note = Description of Artificial Sequence: Synthetic oligonucleotide
  misc_feature 1..20: note = Target: SCN10A; (-) strand; PAM type: NRG; PAM sequence: AAG
  source 1..20: mol_type = other DNA
tcctcctaaatcattttatg

SEQ ID NO: 23182 - DNA, 20 bp, synthetic construct
  misc_feature 1..20: note = Description of Artificial Sequence: Synthetic oligonucleotide
  misc_feature 1..20: note = Target: SCN10A; (-) strand; PAM type: NRG; PAM sequence: GGG
  source 1..20: mol_type = other DNA
ttccaaaagatgcagaaaga

SEQ ID NO: 23183 - DNA, 20 bp, synthetic construct
  misc_feature 1..20: note = Description of Artificial Sequence: Synthetic oligonucleotide
  misc_feature 1..20: note = Target: SCN10A; (-) strand; PAM type: NRG; PAM sequence: AGG
  source 1..20: mol_type = other DNA
attccaaaagatgcagaaag

SEQ ID NO: 23184 - DNA, 20 bp, synthetic construct
  misc_feature 1..20: note = Description of Artificial Sequence: Synthetic oligonucleotide
  misc_feature 1..20: note = Target: SCN10A; (-) strand; PAM type: NRG; PAM sequence: GAG
  source 1..20: mol_type = other DNA
tattccaaaagatgcagaaa

SEQ ID NO: 23185 - DNA, 20 bp, synthetic construct
  misc_feature 1..20: note = Description of Artificial Sequence: Synthetic oligonucleotide
  misc_feature 1..20: note = Target: SCN10A; (-) strand; PAM type: NRG; PAM sequence: AAG
  source 1..20: mol_type = other DNA
actattccaaaagatgcaga

SEQ ID NO: 23186 - DNA, 20 bp, synthetic construct
  misc_feature 1..20: note = Description of Artificial Sequence: Synthetic oligonucleotide
  misc_feature 1..20: note = Target: SCN10A; (-) strand; PAM type: NRG; PAM sequence: CAG
  source 1..20: mol_type = other DNA
tgaaactattccaaaagatg

SEQ ID NO: 23187 - DNA, 20 bp, synthetic construct
  misc_feature 1..20: note = Description of Artificial Sequence: Synthetic oligonucleotide
  misc_feature 1..20: note = Target: SCN10A; (-) strand; PAM type: NRG; PAM sequence: AAG
  source 1..20: mol_type = other DNA
ttttattgaaactattccaa

SEQ ID NO: 23188 - DNA, 20 bp, synthetic construct
  misc_feature 1..20: note = Description of Artificial Sequence: Synthetic oligonucleotide
  misc_feature 1..20: note = Target: SCN10A; (-) strand; PAM type: NRG; PAM sequence: TGG
  source 1..20: mol_type = other DNA
tcagacattcaaagaagaat

SEQ ID NO: 23189 - DNA, 20 bp, synthetic construct
  misc_feature 1..20: note = Description of Artificial Sequence: Synthetic oligonucleotide
  misc_feature 1..20: note = Target: SCN10A; (-) strand; PAM type: NRG; PAM sequence: AAG
  source 1..20: mol_type = other DNA
attctatcagacattcaaag

SEQ ID NO: 23190 - DNA, 20 bp, synthetic construct
  misc_feature 1..20: note = Description of Artificial Sequence: Synthetic oligonucleotide
  misc_feature 1..20: note = Target: SCN10A; (-) strand; PAM type: NRG; PAM sequence: AAG
  source 1..20: mol_type = other DNA
tgaattctatcagacattca

SEQ ID NO: 23191 - DNA, 20 bp, synthetic construct
  misc_feature 1..20: note = Description of Artificial Sequence: Synthetic oligonucleotide
  misc_feature 1..20: note = Target: SCN10A; (-) strand; PAM type: NRG; PAM sequence: CAG
  source 1..20: mol_type = other DNA
gattcacagctgaattctat

SEQ ID NO: 23192 - DNA, 20 bp, synthetic construct
  misc_feature 1..20: note = Description of Artificial Sequence: Synthetic oligonucleotide
  misc_feature 1..20: note = Target: SCN10A; (-) strand; PAM type: NRG; PAM sequence: CAG
  source 1..20: mol_type = other DNA
ccaggagcagactggattca

SEQ ID NO: 23193 - DNA, 20 bp, synthetic construct
  misc_feature 1..20: note = Description of Artificial Sequence: Synthetic oligonucleotide
  misc_feature 1..20: note = Target: SCN10A; (-) strand; PAM type: NRG; PAM sequence: TGG
  source 1..20: mol_type = other DNA
aaaaaagtccaggagcagac

SEQ ID NO: 23194 - DNA, 20 bp, synthetic construct
  misc_feature 1..20: note = Description of Artificial Sequence: Synthetic oligonucleotide
  misc_feature 1..20: note = Target: SCN10A; (-) strand; PAM type: NRG; PAM sequence: CAG
  source 1..20: mol_type = other DNA
aaggaaaaaaagtccaggag

SEQ ID NO: 23195 - DNA, 20 bp, synthetic construct
  misc_feature 1..20: note = Description of Artificial Sequence: Synthetic oligonucleotide
  misc_feature 1..20: note = Target: SCN10A; (-) strand; PAM type: NRG; PAM sequence: GAG
  source 1..20: mol_type = other DNA
gccaaggaaaaaaagtccag

SEQ ID NO: 23196 - DNA, 20 bp, synthetic construct
  misc_feature 1..20: note = Description of Artificial Sequence: Synthetic oligonucleotide
  misc_feature 1..20: note = Target: SCN10A; (-) strand; PAM type: NRG; PAM sequence: AGG
  source 1..20: mol_type = other DNA
ttgccaaggaaaaaaagtcc

SEQ ID NO: 23197 - DNA, 20 bp, synthetic construct
  misc_feature 1..20: note = Description of Artificial Sequence: Synthetic oligonucleotide
  misc_feature 1..20: note = Target: SCN10A; (-) strand; PAM type: NRG; PAM sequence: CAG
  source 1..20: mol_type = other DNA
attgccaaggaaaaaaagtc

SEQ ID NO: 23198 - DNA, 20 bp, synthetic construct
  misc_feature 1..20: note = Description of Artificial Sequence: Synthetic oligonucleotide
  misc_feature 1..20: note = Target: SCN10A; (-) strand; PAM type: NRG; PAM sequence: AAG
  source 1..20: mol_type = other DNA
caaaaattgccaaggaaaaa

SEQ ID NO: 23199 - DNA, 20 bp, synthetic construct
  misc_feature 1..20: note = Description of Artificial Sequence: Synthetic oligonucleotide
  misc_feature 1..20: note = Target: SCN10A; (-) strand; PAM type: NRG; PAM sequence: AGG
  source 1..20: mol_type = other DNA
cagtaattcaaaaattgcca

SEQ ID NO: 23200 - DNA, 20 bp, synthetic construct
  misc_feature 1..20: note = Description of Artificial Sequence: Synthetic oligonucleotide
  misc_feature 1..20: note = Target: SCN10A; (-) strand; PAM type: NRG; PAM sequence: AAG
  source 1..20: mol_type = other DNA
acagtaattcaaaaattgcc

SEQ ID NO: 23201 - DNA, 20 bp, synthetic construct
  misc_feature 1..20: note = Description of Artificial Sequence: Synthetic oligonucleotide
  misc_feature 1..20: note = Target: SCN10A; (-) strand; PAM type: NRG; PAM sequence: CAG
  source 1..20: mol_type = other DNA
aacaagtagcgagattgaaa

SEQ ID NO: 23202 - DNA, 20 bp, synthetic construct
  misc_feature 1..20: note = Description of Artificial Sequence: Synthetic oligonucleotide
  misc_feature 1..20: note = Target: SCN10A; (-) strand; PAM type: NRG; PAM sequence: GAG
  source 1..20: mol_type = other DNA
acagaccaataacaagtagc

SEQ ID NO: 23203 - DNA, 20 bp, synthetic construct
  misc_feature 1..20: note = Description of Artificial Sequence: Synthetic oligonucleotide
  misc_feature 1..20: note = Target: SCN10A; (-) strand; PAM type: NRG; PAM sequence: TAG
  source 1..20: mol_type = other DNA
ctaaacagaccaataacaag

SEQ ID NO: 23204 - DNA, 20 bp, synthetic construct
  misc_feature 1..20: note = Description of Artificial Sequence: Synthetic oligonucleotide
  misc_feature 1..20: note = Target: SCN10A; (-) strand; PAM type: NRG; PAM sequence: AAG
  source 1..20: mol_type = other DNA
actctaaacagaccaataac

SEQ ID NO: 23205 - DNA, 20 bp, synthetic construct
  misc_feature 1..20: note = Description of Artificial Sequence: Synthetic oligonucleotide
  misc_feature 1..20: note = Target: SCN10A; (-) strand; PAM type: NRG; PAM sequence: CAG
  source 1..20: mol_type = other DNA
aaagtaatagaaactctaaa

SEQ ID NO: 23206 - DNA, 20 bp, synthetic construct
  misc_feature 1..20: note = Description of Artificial Sequence: Synthetic oligonucleotide
  misc_feature 1..20: note = Target: SCN10A; (-) strand; PAM type: NRG; PAM sequence: TAG
  source 1..20: mol_type = other DNA
tagattaaatcagaaagtaa

SEQ ID NO: 23207 - DNA, 20 bp, synthetic construct
  misc_feature 1..20: note = Description of Artificial Sequence: Synthetic oligonucleotide
  misc_feature 1..20: note = Target: SCN10A; (-) strand; PAM type: NRG; PAM sequence: AAG
  source 1..20: mol_type = other DNA
ctgtcttagattaaatcaga

SEQ ID NO: 23208 - DNA, 20 bp, synthetic construct
  misc_feature 1..20: note = Description of Artificial Sequence: Synthetic oligonucleotide
  misc_feature 1..20: note = Target: SCN10A; (-) strand; PAM type: NRG; PAM sequence: CAG
  source 1..20: mol_type = other DNA
acaactgtcttagattaaat

SEQ ID NO: 23209 - DNA, 20 bp, synthetic construct
  misc_feature 1..20: note = Description of Artificial Sequence: Synthetic oligonucleotide
  misc_feature 1..20: note = Target: SCN10A; (-) strand; PAM type: NRG; PAM sequence: TAG
  source 1..20: mol_type = other DNA
ctggaaatatacaactgtct

SEQ ID NO: 23210 - DNA, 20 bp, synthetic construct
  misc_feature 1..20: note = Description of Artificial Sequence: Synthetic oligonucleotide
  misc_feature 1..20: note = Target: SCN10A; (-) strand; PAM type: NRG; PAM sequence: TGG
  source 1..20: mol_type = other DNA
agaggagatgaataaattcc

SEQ ID NO: 23211 - DNA, 20 bp, synthetic construct
  misc_feature 1..20: note = Description of Artificial Sequence: Synthetic oligonucleotide
  misc_feature 1..20: note = Target: SCN10A; (-) strand; PAM type: NRG; PAM sequence: GAG
  source 1..20: mol_type = other DNA
acaaactagaaaatttagag

SEQ ID NO: 23212 - DNA, 20 bp, synthetic construct
  misc_feature 1..20: note = Description of Artificial Sequence: Synthetic oligonucleotide
  misc_feature 1..20: note = Target: SCN10A; (-) strand; PAM type: NRG; PAM sequence: AGG
  source 1..20: mol_type = other DNA
gcacaaactagaaaatttag

SEQ ID NO: 23213 - DNA, 20 bp, synthetic construct
  misc_feature 1..20: note = Description of Artificial Sequence: Synthetic oligonucleotide
  misc_feature 1..20: note = Target: SCN10A; (-) strand; PAM type: NRG; PAM sequence: GAG
  source 1..20: mol_type = other DNA
tgcacaaactagaaaattta

SEQ ID NO: 23214 - DNA, 20 bp, synthetic construct
  misc_feature 1..20: note = Description of Artificial Sequence: Synthetic oligonucleotide
  misc_feature 1..20: note = Target: SCN10A; (-) strand; PAM type: NRG; PAM sequence: TAG
  source 1..20: mol_type = other DNA
tttgcacaaactagaaaatt

SEQ ID NO: 23215 - DNA, 20 bp, synthetic construct
  misc_feature 1..20: note = Description of Artificial Sequence: Synthetic oligonucleotide
  misc_feature 1..20: note = Target: SCN10A; (-) strand; PAM type: NRG; PAM sequence: TAG
  source 1..20: mol_type = other DNA
acacctttatttgcacaaac

SEQ ID NO: 23216 - DNA, 20 bp, synthetic construct
  misc_feature 1..20: note = Description of Artificial Sequence: Synthetic oligonucleotide
  misc_feature 1..20: note = Target: SCN10A; (-) strand; PAM type: NRG; PAM sequence: AGG
  source 1..20: mol_type = other DNA
tacaaaaaaaaaatcattca

SEQ ID NO: 23217 - DNA, 20 bp, synthetic construct
  misc_feature 1..20: note = Description of Artificial Sequence: Synthetic oligonucleotide
  misc_feature 1..20: note = Target: SCN10A; (-) strand; PAM type: NRG; PAM sequence: AAG
  source 1..20: mol_type = other DNA
atacaaaaaaaaaatcattc

SEQ ID NO: 23218 - DNA, 20 bp, synthetic construct
  misc_feature 1..20: note = Description of Artificial Sequence: Synthetic oligonucleotide
  misc_feature 1..20: note = Target: SCN10A; (-) strand; PAM type: NRG; PAM sequence: CAG
  source 1..20: mol_type = other DNA
agatattacaactgatacca

SEQ ID NO: 23219 - DNA, 20 bp, synthetic construct
  misc_feature 1..20: note = Description of Artificial Sequence: Synthetic oligonucleotide
  misc_feature 1..20: note = Target: SCN10A; (-) strand; PAM type: NRG; PAM sequence: GAG
  source 1..20: mol_type = other DNA
ctcaattagaaataaaatgg

SEQ ID NO: 23220 - DNA, 20 bp, synthetic construct
  misc_feature 1..20: note = Description of Artificial Sequence: Synthetic oligonucleotide
  misc_feature 1..20: note = Target: SCN10A; (-) strand; PAM type: NRG; PAM sequence: GGG
  source 1..20: mol_type = other DNA
agctcaattagaaataaaat

SEQ ID NO: 23221 - DNA, 20 bp, synthetic construct
  misc_feature 1..20: note = Description of Artificial Sequence: Synthetic oligonucleotide
  misc_feature 1..20: note = Target: SCN10A; (-) strand; PAM type: NRG; PAM sequence: TGG
  source 1..20: mol_type = other DNA
aagctcaattagaaataaaa

SEQ ID NO: 23222 - DNA, 20 bp, synthetic construct
  misc_feature 1..20: note = Description of Artificial Sequence: Synthetic oligonucleotide
  misc_feature 1..20: note = Target: SCN10A; (-) strand; PAM type: NRG; PAM sequence: TAG
  source 1..20: mol_type = other DNA
aagatccaaataagctcaat

SEQ ID NO: 23223 - DNA, 20 bp, synthetic construct
  misc_feature 1..20: note = Description of Artificial Sequence: Synthetic oligonucleotide
  misc_feature 1..20: note = Target: SCN10A; (-) strand; PAM type: NRG; PAM sequence: AAG
  source 1..20: mol_type = other DNA
agaagagagaagatccaaat

SEQ ID NO: 23224 - DNA, 20 bp, synthetic construct
  misc_feature 1..20: note = Description of Artificial Sequence: Synthetic oligonucleotide
  misc_feature 1..20: note = Target: SCN10A; (-) strand; PAM type: NRG; PAM sequence: AAG
  source 1..20: mol_type = other DNA
taaccaagaaaagaagagag

SEQ ID NO: 23225 - DNA, 20 bp, synthetic construct
  misc_feature 1..20: note = Description of Artificial Sequence: Synthetic oligonucleotide
  misc_feature 1..20: note = Target: SCN10A; (-) strand; PAM type: NRG; PAM sequence: GAG
  source 1..20: mol_type = other DNA
gattaaccaagaaaagaaga

SEQ ID NO: 23226 - DNA, 20 bp, synthetic construct
  misc_feature 1..20: note = Description of Artificial Sequence: Synthetic oligonucleotide
  misc_feature 1..20: note = Target: SCN10A; (-) strand; PAM type: NRG; PAM sequence: GAG
  source 1..20: mol_type = other DNA
aagattaaccaagaaaagaa

SEQ ID NO: 23227 - DNA, 20 bp, synthetic construct
  misc_feature 1..20: note = Description of Artificial Sequence: Synthetic oligonucleotide
  misc_feature 1..20: note = Target: SCN10A; (-) strand; PAM type: NRG; PAM sequence: AAG
  source 1..20: mol_type = other DNA
gcaagattaaccaagaaaag

SEQ ID NO: 23228 - DNA, 20 bp, synthetic construct
  misc_feature 1..20: note = Description of Artificial Sequence: Synthetic oligonucleotide
  misc_feature 1..20: note = Target: SCN10A; (-) strand; PAM type: NRG; PAM sequence: AAG
  source 1..20: mol_type = other DNA
ttggcaagattaaccaagaa

SEQ ID NO: 23229 - DNA, 20 bp, synthetic construct
  misc_feature 1..20: note = Description of Artificial Sequence: Synthetic oligonucleotide
  misc_feature 1..20: note = Target: SCN10A; (-) strand; PAM type: NRG; PAM sequence: AAG
  source 1..20: mol_type = other DNA
gaccattggcaagattaacc

SEQ ID NO: 23230 - DNA, 20 bp, synthetic construct
  misc_feature 1..20: note = Description of Artificial Sequence: Synthetic oligonucleotide
  misc_feature 1..20: note = Target: SCN10A; (-) strand; PAM type: NRG; PAM sequence: AAG
  source 1..20: mol_type = other DNA
aaaattgattgaccattggc

SEQ ID NO: 23231 - DNA, 20 bp, synthetic construct
  misc_feature 1..20: note = Description of Artificial Sequence: Synthetic oligonucleotide
  misc_feature 1..20: note = Target: SCN10A; (-) strand; PAM type: NRG; PAM sequence: TGG
  source 1..20: mol_type = other DNA
atagaaaattgattgaccat

SEQ ID NO: 23232 - DNA, 20 bp, synthetic construct
  misc_feature 1..20: note = Description of Artificial Sequence: Synthetic oligonucleotide
  misc_feature 1..20: note = Target: SCN10A; (-) strand; PAM type: NRG; PAM sequence: TAG
  source 1..20: mol_type = other DNA
gcgggttctttaaaaagata

SEQ ID NO: 23233 - DNA, 20 bp, synthetic construct
  misc_feature 1..20: note = Description of Artificial Sequence: Synthetic oligonucleotide
  misc_feature 1..20: note = Target: SCN10A; (-) strand; PAM type: NRG; PAM sequence: AAG
  source 1..20: mol_type = other DNA
caaaaagcgggttctttaaa

SEQ ID NO: 23234 - DNA, 20 bp, synthetic construct
  misc_feature 1..20: note = Description of Artificial Sequence: Synthetic oligonucleotide
  misc_feature 1..20: note = Target: SCN10A; (-) strand; PAM type: NRG; PAM sequence: GGG
  source 1..20: mol_type = other DNA
agataagtgaaacaaaaagc

SEQ ID NO: 23235 - DNA, 20 bp, synthetic construct
  misc_feature 1..20: note = Description of Artificial Sequence: Synthetic oligonucleotide
  misc_feature 1..20: note = Target: SCN10A; (-) strand; PAM type: NRG; PAM sequence: CGG
  source 1..20: mol_type = other DNA
aagataagtgaaacaaaaag

SEQ ID NO: 23236 - DNA, 20 bp, synthetic construct
  misc_feature 1..20: note = Description of Artificial Sequence: Synthetic oligonucleotide
  misc_feature 1..20: note = Target: SCN10A; (-) strand; PAM type: NRG; PAM sequence: AAG
  source 1..20: mol_type = other DNA
caaaagataagtgaaacaaa

SEQ ID NO: 23237 - DNA, 20 bp, synthetic construct
  misc_feature 1..20: note = Description of Artificial Sequence: Synthetic oligonucleotide
  misc_feature 1..20: note = Target: SCN10A; (-) strand; PAM type: NRG; PAM sequence: AAG
  source 1..20: mol_type = other DNA
ataataataatacaaaagat

SEQ ID NO: 23238 - DNA, 20 bp, synthetic construct
  misc_feature 1..20: note = Description of Artificial Sequence: Synthetic oligonucleotide
  misc_feature 1..20: note = Target: SCN10A; (-) strand; PAM type: NRG; PAM sequence: AAG
  source 1..20: mol_type = other DNA
taaaaataataataatacaa

SEQ ID NO: 23239 - DNA, 20 bp, synthetic construct
  misc_feature 1..20: note = Description of Artificial Sequence: Synthetic oligonucleotide
  misc_feature 1..20: note = Target: SCN10A; (-) strand; PAM type: NRG; PAM sequence: CAG
  source 1..20: mol_type = other DNA
aggaataacaaagatcaggg

SEQ ID NO: 23240 - DNA, 20 bp, synthetic construct
  misc_feature 1..20: note = Description of Artificial Sequence: Synthetic oligonucleotide
  misc_feature 1..20: note = Target: SCN10A; (-) strand; PAM type: NRG; PAM sequence: GGG
  source 1..20: mol_type = other DNA
aaaaggaataacaaagatca

SEQ ID NO: 23241 - DNA, 20 bp, synthetic construct
  misc_feature 1..20: note = Description of Artificial Sequence: Synthetic oligonucleotide
  misc_feature 1..20: note = Target: SCN10A; (-) strand; PAM type: NRG; PAM sequence: AGG
  source 1..20: mol_type = other DNA
gaaaaggaataacaaagatc

SEQ ID NO: 23242 - DNA, 20 bp, synthetic construct
  misc_feature 1..20: note = Description of Artificial Sequence: Synthetic oligonucleotide
  misc_feature 1..20: note = Target: SCN10A; (-) strand; PAM type: NRG; PAM sequence: CAG
  source 1..20: mol_type = other DNA
agaaaaggaataacaaagat

SEQ ID NO: 23243 - DNA, 20 bp, synthetic construct
  misc_feature 1..20: note = Description of Artificial Sequence: Synthetic oligonucleotide
  misc_feature 1..20: note = Target: SCN10A; (-) strand; PAM type: NRG; PAM sequence: AAG
  source 1..20: mol_type = other DNA
gcagaagaaaaggaataaca

SEQ ID NO: 23244 - DNA, 20 bp, synthetic construct
  misc_feature 1..20: note = Description of Artificial Sequence: Synthetic oligonucleotide
  misc_feature 1..20: note = Target: SCN10A; (-) strand; PAM type: NRG; PAM sequence: AGG
  source 1..20: mol_type = other DNA
cccaaaccaagcagaagaaa

SEQ ID NO: 23245 - DNA, 20 bp, synthetic construct
  misc_feature 1..20: note = Description of Artificial Sequence: Synthetic oligonucleotide
  misc_feature 1..20: note = Target: SCN10A; (-) strand; PAM type: NRG; PAM sequence: AAG
  source 1..20: mol_type = other DNA
acccaaaccaagcagaagaa

SEQ ID NO: 23246 - DNA, 20 bp, synthetic construct
  misc_feature 1..20: note = Description of Artificial Sequence: Synthetic oligonucleotide
  misc_feature 1..20: note = Target: SCN10A; (-) strand; PAM type: NRG; PAM sequence: AAG
  source 1..20: mol_type = other DNA
aacagacccaaaccaagcag

SEQ ID NO: 23247 - DNA, 20 bp, synthetic construct
  misc_feature 1..20: note = Description of Artificial Sequence: Synthetic oligonucleotide
  misc_feature 1..20: note = Target: SCN10A; (-) strand; PAM type: NRG; PAM sequence: CAG
  source 1..20: mol_type = other DNA
caaaacagacccaaaccaag

SEQ ID NO: 23248 - DNA, 20 bp, synthetic construct
  misc_feature 1..20: note = Description of Artificial Sequence: Synthetic oligonucleotide
  misc_feature 1..20: note = Target: SCN10A; (-) strand; PAM type: NRG; PAM sequence: AAG
  source 1..20: mol_type = other DNA
gaacaaaacagacccaaacc

SEQ ID NO: 23249 - DNA, 20 bp, synthetic construct
  misc_feature 1..20: note = Description of Artificial Sequence: Synthetic oligonucleotide
  misc_feature 1..20: note = Target: SCN10A; (-) strand; PAM type: NRG; PAM sequence: CAG
  source 1..20: mol_type = other DNA
ttagagaaacaagaacaaaa

SEQ ID NO: 23250 - DNA, 20 bp, synthetic construct
  misc_feature 1..20: note = Description of Artificial Sequence: Synthetic oligonucleotide
  misc_feature 1..20: note = Target: SCN10A; (-) strand; PAM type: NRG; PAM sequence: AAG
  source 1..20: mol_type = other DNA
cctcaaggaattagagaaac

SEQ ID NO: 23251 - DNA, 20 bp, synthetic construct
  misc_feature 1..20: note = Description of Artificial Sequence: Synthetic oligonucleotide
  misc_feature 1..20: note = Target: SCN10A; (-) strand; PAM type: NRG; PAM sequence: GAG
  source 1..20: mol_type = other DNA
ggtcacacctcaaggaatta

SEQ ID NO: 23252 - DNA, 20 bp, synthetic construct
  misc_feature 1..20: note = Description of Artificial Sequence: Synthetic oligonucleotide
  misc_feature 1..20: note = Target: SCN10A; (-) strand; PAM type: NRG; PAM sequence: TAG
  source 1..20: mol_type = other DNA
aaggtcacacctcaaggaat

SEQ ID NO: 23253 - DNA, 20 bp, synthetic construct
  misc_feature 1..20: note = Description of Artificial Sequence: Synthetic oligonucleotide
  misc_feature 1..20: note = Target: SCN10A; (-) strand; PAM type: NRG; PAM sequence: AGG
  source 1..20: mol_type = other DNA
taatctaaggtcacacctca

SEQ ID NO: 23254 - DNA, 20 bp, synthetic construct
  misc_feature 1..20: note = Description of Artificial Sequence: Synthetic oligonucleotide
  misc_feature 1..20: note = Target: SCN10A; (-) strand; PAM type: NRG; PAM sequence: AAG
  source 1..20: mol_type = other DNA
ataatctaaggtcacacctc

SEQ ID NO: 23255 - DNA, 20 bp, synthetic construct
  misc_feature 1..20: note = Description of Artificial Sequence: Synthetic oligonucleotide
  misc_feature 1..20: note = Target: SCN10A; (-) strand; PAM type: NRG; PAM sequence: AGG
  source 1..20: mol_type = other DNA
gaggacaaatagataatcta

SEQ ID NO: 23256 - DNA, 20 bp, synthetic construct
  misc_feature 1..20: note = Description of Artificial Sequence: Synthetic oligonucleotide
  misc_feature 1..20: note = Target: SCN10A; (-) strand; PAM type: NRG; PAM sequence: AAG
  source 1..20: mol_type = other DNA
agaggacaaatagataatct

SEQ ID NO: 23257 - DNA, 20 bp, synthetic construct
  misc_feature 1..20: note = Description of Artificial Sequence: Synthetic oligonucleotide
  misc_feature 1..20: note = Target: SCN10A; (-) strand; PAM type: NRG; PAM sequence: TAG
  source 1..20: mol_type = other DNA
aaagtatgaaagaggacaaa

SEQ ID NO: 23258 - DNA, 20 bp, synthetic construct
  misc_feature 1..20: note = Description of Artificial Sequence: Synthetic oligonucleotide
  misc_feature 1..20: note = Target: SCN10A; (-) strand; PAM type: NRG; PAM sequence: AGG
  source 1..20: mol_type = other DNA
tacatcaaaaagtatgaaag

SEQ ID NO: 23259 - DNA, 20 bp, synthetic construct
  misc_feature 1..20: note = Description of Artificial Sequence: Synthetic oligonucleotide
  misc_feature 1..20: note = Target: SCN10A; (-) strand; PAM type: NRG; PAM sequence: GAG
  source 1..20: mol_type = other DNA
ctacatcaaaaagtatgaaa

SEQ ID NO: 23260 - DNA, 20 bp, synthetic construct
  misc_feature 1..20: note = Description of Artificial Sequence: Synthetic oligonucleotide
  misc_feature 1..20: note = Target: SCN10A; (-) strand; PAM type: NRG; PAM sequence: AAG
  source 1..20: mol_type = other DNA
acctacatcaaaaagtatga

SEQ ID NO: 23261 - DNA, 20 bp, synthetic construct
  misc_feature 1..20: note = Description of Artificial Sequence: Synthetic oligonucleotide
  misc_feature 1..20: note = Target: SCN10A; (-) strand; PAM type: NRG; PAM sequence: AAG
  source 1..20: mol_type = other DNA
cattaaatacctacatcaaa

SEQ ID NO: 23262 - DNA, 20 bp, synthetic construct
  misc_feature 1..20: note = Description of Artificial Sequence: Synthetic oligonucleotide
  misc_feature 1..20: note = Target: SCN10A; (-) strand; PAM type: NRG; PAM sequence: TAG
  source 1..20: mol_type = other DNA
agtgctaagaggaaagctca

SEQ ID NO: 23263 - DNA, 20 bp, synthetic construct
  misc_feature 1..20: note = Description of Artificial Sequence: Synthetic oligonucleotide
  misc_feature 1..20: note = Target: SCN10A; (-) strand; PAM type: NRG; PAM sequence: AAG
  source 1..20: mol_type = other DNA
ctaaagcagtgctaagagga

SEQ ID NO: 23264 - DNA, 20 bp, synthetic construct
  misc_feature 1..20: note = Description of Artificial Sequence: Synthetic oligonucleotide
  misc_feature 1..20: note = Target: SCN10A; (-) strand; PAM type: NRG; PAM sequence: AGG
  source 1..20: mol_type = other DNA
acagctaaagcagtgctaag

SEQ ID NO: 23265 - DNA, 20 bp, synthetic construct
  misc_feature 1..20: note = Description of Artificial Sequence: Synthetic oligonucleotide
  misc_feature 1..20: note = Target: SCN10A; (-) strand; PAM type: NRG; PAM sequence: GAG
  source 1..20: mol_type = other DNA
tacagctaaagcagtgctaa

SEQ ID NO: 23266 - DNA, 20 bp, synthetic construct
  misc_feature 1..20: note = Description of Artificial Sequence: Synthetic oligonucleotide
  misc_feature 1..20: note = Target: SCN10A; (-) strand; PAM type: NRG; PAM sequence: AAG
  source 1..20: mol_type = other DNA
gatacagctaaagcagtgct

SEQ ID NO: 23267 - DNA, 20 bp, synthetic construct
  misc_feature 1..20: note = Description of Artificial Sequence: Synthetic oligonucleotide
  misc_feature 1..20: note = Target: SCN10A; (-) strand; PAM type: NRG; PAM sequence: CAG
  source 1..20: mol_type = other DNA
cctctgggatacagctaaag

SEQ ID NO: 23268 - DNA, 20 bp, synthetic construct
  misc_feature 1..20: note = Description of Artificial Sequence: Synthetic oligonucleotide
  misc_feature 1..20: note = Target: SCN10A; (-) strand; PAM type: NRG; PAM sequence: AAG
  source 1..20: mol_type = other DNA
aaacctctgggatacagcta

SEQ ID NO: 23269 - DNA, 20 bp, synthetic construct
  misc_feature 1..20: note = Description of Artificial Sequence: Synthetic oligonucleotide
  misc_feature 1..20: note = Target: SCN10A; (-) strand; PAM type: NRG; PAM sequence: CAG
  source 1..20: mol_type = other DNA
ttatcaaaacctctgggata

SEQ ID NO: 23270 - DNA, 20 bp, synthetic construct
  misc_feature 1..20: note = Description of Artificial Sequence: Synthetic oligonucleotide
  misc_feature 1..20: note = Target: SCN10A; (-) strand; PAM type: NRG; PAM sequence: GGG
  source 1..20: mol_type = other DNA
cacaacttatcaaaacctct

SEQ ID NO: 23271 - DNA, 20 bp, synthetic construct
  misc_feature 1..20: note = Description of Artificial Sequence: Synthetic oligonucleotide
  misc_feature 1..20: note = Target: SCN10A; (-) strand; PAM type: NRG; PAM sequence: TGG
  source 1..20: mol_type = other DNA
acacaacttatcaaaacctc

SEQ ID NO: 23272 - DNA, 20 bp, synthetic construct
  misc_feature 1..20: note = Description of Artificial Sequence: Synthetic oligonucleotide
  misc_feature 1..20: note = Target: SCN10A; (-) strand; PAM type: NRG; PAM sequence: TAG
  source 1..20: mol_type = other DNA
ttttttgaactgaatgataa

SEQ ID NO: 23273 - DNA, 20 bp, synthetic construct
  misc_feature 1..20: note = Description of Artificial Sequence: Synthetic oligonucleotide
  misc_feature 1..20: note = Target: SCN10A; (-) strand; PAM type: NRG; PAM sequence: AAG
  source 1..20: mol_type = other DNA
caacaatgaaatcaagatgg

SEQ ID NO: 23274 - DNA, 20 bp, synthetic construct
  misc_feature 1..20: note = Description of Artificial Sequence: Synthetic oligonucleotide
  misc_feature 1..20: note = Target: SCN10A; (-) strand; PAM type: NRG; PAM sequence: TGG
  source 1..20: mol_type = other DNA
ggtcaacaatgaaatcaaga

SEQ ID NO: 23275 - DNA, 20 bp, synthetic construct
  misc_feature 1..20: note = Description of Artificial Sequence: Synthetic oligonucleotide
  misc_feature 1..20: note = Target: SCN10A; (-) strand; PAM type: NRG; PAM sequence: AAG
  source 1..20: mol_type = other DNA
tttgggtcaacaatgaaatc

SEQ ID NO: 23276 - DNA, 20 bp, synthetic construct
  misc_feature 1..20: note = Description of Artificial Sequence: Synthetic oligonucleotide
  misc_feature 1..20: note = Target: SCN10A; (-) strand; PAM type: NRG; PAM sequence: GGG
  source 1..20: mol_type = other DNA
tctgctcttgaatgatcttt

SEQ ID NO: 23277 - DNA, 20 bp, synthetic construct
  misc_feature 1..20: note = Description of Artificial Sequence: Synthetic oligonucleotide
  misc_feature 1..20: note = Target: SCN10A; (-) strand; PAM type: NRG; PAM sequence: TGG
  source 1..20: mol_type = other DNA
atctgctcttgaatgatctt

SEQ ID NO: 23278 - DNA, 20 bp, synthetic construct
  misc_feature 1..20: note = Description of Artificial Sequence: Synthetic oligonucleotide
  misc_feature 1..20: note = Target: SCN10A; (-) strand; PAM type: NRG; PAM sequence: AAG
  source 1..20: mol_type = other DNA
aacctcggagttaactccaa

SEQ ID NO: 23279 - DNA, 20 bp, synthetic construct
  misc_feature 1..20: note = Description of Artificial Sequence: Synthetic oligonucleotide
  misc_feature 1..20: note = Target: SCN10A; (-) strand; PAM type: NRG; PAM sequence: GAG
  source 1..20: mol_type = other DNA
gcacagtcgaataaacctcg

SEQ ID NO: 23280 - DNA, 20 bp, synthetic construct
  misc_feature 1..20: note = Description of Artificial Sequence: Synthetic oligonucleotide
  misc_feature 1..20: note = Target: SCN10A; (-) strand; PAM type: NRG; PAM sequence: CGG
  source 1..20: mol_type = other DNA
gagcacagtcgaataaacct

SEQ ID NO: 23281 - DNA, 20 bp, synthetic construct
  misc_feature 1..20: note = Description of Artificial Sequence: Synthetic oligonucleotide
  misc_feature 1..20: note = Target: SCN10A; (-) strand; PAM type: NRG; PAM sequence: CAG
  source 1..20: mol_type = other DNA
tcaggtatcctctcagagca

SEQ ID NO: 23282 - DNA, 20 bp, synthetic construct
  misc_feature 1..20: note = Description of Artificial Sequence: Synthetic oligonucleotide
  misc_feature 1..20: note = Target: SCN10A; (-) strand; PAM type: NRG; PAM sequence: GAG
  source 1..20: mol_type = other DNA
ttatgtcaggtatcctctca

SEQ ID NO: 23283 - DNA, 20 bp, synthetic construct
  misc_feature 1..20: note = Description of Artificial Sequence: Synthetic oligonucleotide
  misc_feature 1..20: note = Target: SCN10A; (-) strand; PAM type: NRG; PAM sequence: CAG
  source 1..20: mol_type = other DNA
aattatgtcaggtatcctct

SEQ ID NO: 23284 - DNA, 20 bp, synthetic construct
  misc_feature 1..20: note = Description of Artificial Sequence: Synthetic oligonucleotide
  misc_feature 1..20: note = Target: SCN10A; (-) strand; PAM type: NRG; PAM sequence: AGG
  source 1..20: mol_type = other DNA
aagaaaatagaaattatgtc

SEQ ID NO: 23285 - DNA, 20 bp, synthetic construct
  misc_feature 1..20: note = Description of Artificial Sequence: Synthetic oligonucleotide
  misc_feature 1..20: note = Target: SCN10A; (-) strand; PAM type: NRG; PAM sequence: CAG
  source 1..20: mol_type = other DNA
taagaaaatagaaattatgt

SEQ ID NO: 23286 - DNA, 20 bp, synthetic construct
  misc_feature 1..20: note = Description of Artificial Sequence: Synthetic oligonucleotide
  misc_feature 1..20: note = Target: SCN10A; (-) strand; PAM type: NRG; PAM sequence: TAG
  source 1..20: mol_type = other DNA
tctcaataaatttaagaaaa

SEQ ID NO: 23287 - DNA, 20 bp, synthetic construct
  misc_feature 1..20: note = Description of Artificial Sequence: Synthetic oligonucleotide
  misc_feature 1..20: note = Target: SCN10A; (-) strand; PAM type: NRG; PAM sequence: AAG
  source 1..20: mol_type = other DNA
taacaaatctcaataaattt

SEQ ID NO: 23288 - DNA, 20 bp, synthetic construct
  misc_feature 1..20: note = Description of Artificial Sequence: Synthetic oligonucleotide
  misc_feature 1..20: note = Target: SCN10A; (-) strand; PAM type: NRG; PAM sequence: TAG
  source 1..20: mol_type = other DNA
ctctaagatagaccacgtga

SEQ ID NO: 23289 - DNA, 20 bp, synthetic construct
  misc_feature 1..20: note = Description of Artificial Sequence: Synthetic oligonucleotide
  misc_feature 1..20: note = Target: SCN10A; (-) strand; PAM type: NRG; PAM sequence: TAG
  source 1..20: mol_type = other DNA
acatggaatattctctaaga

SEQ ID NO: 23290 - DNA, 20 bp, synthetic construct
  misc_feature 1..20: note = Description of Artificial Sequence: Synthetic oligonucleotide
  misc_feature 1..20: note = Target: SCN10A; (-) strand; PAM type: NRG; PAM sequence: AAG
  source 1..20: mol_type = other DNA
cagcacatggaatattctct

SEQ ID NO: 23291 - DNA, 20 bp, synthetic construct
  misc_feature 1..20: note = Description of Artificial Sequence: Synthetic oligonucleotide
  misc_feature 1..20: note = Target: SCN10A; (-) strand; PAM type: NRG; PAM sequence: TGG
  source 1..20: mol_type = other DNA
acattcttttcatcagcaca

SEQ ID NO: 23292 - DNA, 20 bp, synthetic construct
  misc_feature 1..20: note = Description of Artificial Sequence: Synthetic oligonucleotide
  misc_feature 1..20: note = Target: SCN10A; (-) strand; PAM type: NRG; PAM sequence: CAG
  source 1..20: mol_type = other DNA
agaatatacattcttttcat

SEQ ID NO: 23293 - DNA, 20 bp, synthetic construct
  misc_feature 1..20: note = Description of Artificial Sequence: Synthetic oligonucleotide
  misc_feature 1..20: note = Target: SCN10A; (-) strand; PAM type: NRG; PAM sequence: CAG
  source 1..20: mol_type = other DNA
aacattctaccaaacaactg

SEQ ID NO: 23294 - DNA, 20 bp, synthetic construct
  misc_feature 1..20: note = Description of Artificial Sequence: Synthetic oligonucleotide
  misc_feature 1..20: note = Target: SCN10A; (-) strand; PAM type: NRG; PAM sequence: CAG
  source 1..20: mol_type = other DNA
cctagaacaaatggacttaa

SEQ ID NO: 23295 - DNA, 20 bp, synthetic construct
  misc_feature 1..20: note = Description of Artificial Sequence: Synthetic oligonucleotide
  misc_feature 1..20: note = Target: SCN10A; (-) strand; PAM type: NRG; PAM sequence: TGG
  source 1..20: mol_type = other DNA
aaactgtaacctagaacaaa

SEQ ID NO: 23296 - DNA, 20 bp, synthetic construct
  misc_feature 1..20: note = Description of Artificial Sequence: Synthetic oligonucleotide
  misc_feature 1..20: note = Target: SCN10A; (-) strand; PAM type: NRG; PAM sequence: TAG
  source 1..20: mol_type = other DNA
aatgaacttaaactgtaacc

SEQ ID NO: 23297 - DNA, 20 bp, synthetic construct
  misc_feature 1..20: note = Description of Artificial Sequence: Synthetic oligonucleotide
  misc_feature 1..20: note = Target: SCN10A; (-) strand; PAM type: NRG; PAM sequence: AAG
  source 1..20: mol_type = other DNA
atcaagacagaaagtcaaca

SEQ ID NO: 23298 - DNA, 20 bp, synthetic construct
  misc_feature 1..20: note = Description of Artificial Sequence: Synthetic oligonucleotide
  misc_feature 1..20: note = Target: SCN10A; (-) strand; PAM type: NRG; PAM sequence: AAG
  source 1..20: mol_type = other DNA
agacaggtcatcaagacaga

SEQ ID NO: 23299 - DNA, 20 bp, synthetic construct
  misc_feature 1..20: note = Description of Artificial Sequence: Synthetic oligonucleotide
  misc_feature 1..20: note = Target: SCN10A; (-) strand; PAM type: NRG; PAM sequence: CAG
  source 1..20: mol_type = other DNA
cactagacaggtcatcaaga

SEQ ID NO: 23300 - DNA, 20 bp, synthetic construct
  misc_feature 1..20: note = Description of Artificial Sequence: Synthetic oligonucleotide
  misc_feature 1..20: note = Target: SCN10A; (-) strand; PAM type: NRG; PAM sequence: AAG
  source 1..20: mol_type = other DNA
acagcactagacaggtcatc

SEQ ID NO: 23301 - DNA, 20 bp, synthetic construct
  misc_feature 1..20: note = Description of Artificial Sequence: Synthetic oligonucleotide
  misc_feature 1..20: note = Target: SCN10A; (-) strand; PAM type: NRG; PAM sequence: AGG
  source 1..20: mol_type = other DNA
ttccactgacagcactagac

SEQ ID NO: 23302 - DNA, 20 bp, synthetic construct
  misc_feature 1..20: note = Description of Artificial Sequence: Synthetic oligonucleotide
  misc_feature 1..20: note = Target: SCN10A; (-) strand; PAM type: NRG; PAM sequence: CAG
  source 1..20: mol_type = other DNA
attccactgacagcactaga

SEQ ID NO: 23303 - DNA, 20 bp, synthetic construct
  misc_feature 1..20: note = Description of Artificial Sequence: Synthetic oligonucleotide
  misc_feature 1..20: note = Target: SCN10A; (-) strand; PAM type: NRG; PAM sequence: TAG
  source 1..20: mol_type = other DNA
caatattccactgacagcac

SEQ ID NO: 23304 - DNA, 20 bp, synthetic construct
  misc_feature 1..20: note = Description of Artificial Sequence: Synthetic oligonucleotide
  misc_feature 1..20: note = Target: SCN10A; (-) strand; PAM type: NRG; PAM sequence: CAG
  source 1..20: mol_type = other DNA
ggggatcaatattccactga

SEQ ID NO: 23305 - DNA, 20 bp, synthetic construct
  misc_feature 1..20: note = Description of Artificial Sequence: Synthetic oligonucleotide
  misc_feature 1..20: note = Target: SCN10A; (-) strand; PAM type: NRG; PAM sequence: GGG
  source 1..20: mol_type = other DNA
cagcaatataataatagtgg

SEQ ID NO: 23306 - DNA, 20 bp, synthetic construct
  misc_feature 1..20: note = Description of Artificial Sequence: Synthetic oligonucleotide
  misc_feature 1..20: note = Target: SCN10A; (-) strand; PAM type: NRG; PAM sequence: GGG
  source 1..20: mol_type = other DNA
acagcaatataataatagtg

SEQ ID NO: 23307 - DNA, 20 bp, synthetic construct
  misc_feature 1..20: note = Description of Artificial Sequence: Synthetic oligonucleotide
  misc_feature 1..20: note = Target: SCN10A; (-) strand; PAM type: NRG; PAM sequence: GGG
  source 1..20: mol_type = other DNA
gacagcaatataataatagt

SEQ ID NO: 23308 - DNA, 20 bp, synthetic construct
  misc_feature 1..20: note = Description of Artificial Sequence: Synthetic oligonucleotide
  misc_feature 1..20: note = Target: SCN10A; (-) strand; PAM type: NRG; PAM sequence: TGG
  source 1..20: mol_type = other DNA
agacagcaatataataatag

SEQ ID NO: 23309 - DNA, 20 bp, synthetic construct
  misc_feature 1..20: note = Description of Artificial Sequence: Synthetic oligonucleotide
  misc_feature 1..20: note = Target: SCN10A; (-) strand; PAM type: NRG; PAM sequence: TAG
  source 1..20: mol_type = other DNA
aatagacagcaatataataa

SEQ ID NO: 23310 - DNA, 20 bp, synthetic construct
  misc_feature 1..20: note = Description of Artificial Sequence: Synthetic oligonucleotide
  misc_feature 1..20: note = Target: SCN10A; (-) strand; PAM type: NRG; PAM sequence: CAG
  source 1..20: mol_type = other DNA
gacctaagaaatgaaataga

SEQ ID NO: 23311 - DNA, 20 bp, synthetic construct
  misc_feature 1..20: note = Description of Artificial Sequence: Synthetic oligonucleotide
  misc_feature 1..20: note = Target: SCN10A; (-) strand; PAM type: NRG; PAM sequence: TAG
  source 1..20: mol_type = other DNA
actagacctaagaaatgaaa

SEQ ID NO: 23312 - DNA, 20 bp, synthetic construct
  misc_feature 1..20: note = Description of Artificial Sequence: Synthetic oligonucleotide
  misc_feature 1..20: note = Target: SCN10A; (-) strand; PAM type: NRG; PAM sequence: AAG
  source 1..20: mol_type = other DNA
aaacaattactactagacct

SEQ ID NO: 23313 - DNA, 20 bp, synthetic construct
  misc_feature 1..20: note = Description of Artificial Sequence: Synthetic oligonucleotide
  misc_feature 1..20: note = Target: SCN10A; (-) strand; PAM type: NRG; PAM sequence: TAG
  source 1..20: mol_type = other DNA
atttataaaacaattactac

SEQ ID NO: 23314 - DNA, 20 bp, synthetic construct
  misc_feature 1..20: note = Description of Artificial Sequence: Synthetic oligonucleotide
  misc_feature 1..20: note = Target: SCN10A; (-) strand; PAM type: NRG; PAM sequence: GAG
  source 1..20: mol_type = other DNA
tacatatgcacctaacactg

SEQ ID NO: 23315 - DNA, 20 bp, synthetic construct
  misc_feature 1..20: note = Description of Artificial Sequence: Synthetic oligonucleotide
  misc_feature 1..20: note = Target: SCN10A; (-) strand; PAM type: NRG; PAM sequence: TGG
  source 1..20: mol_type = other DNA
aatacatatgcacctaacac

SEQ ID NO: 23316 - DNA, 20 bp, synthetic construct
  misc_feature 1..20: note = Description of Artificial Sequence: Synthetic oligonucleotide
  misc_feature 1..20: note = Target: SCN10A; (-) strand; PAM type: NRG; PAM sequence: TGG
  source 1..20: mol_type = other DNA
tgataaaataattggtctaa

SEQ ID NO: 23317 - DNA, 20 bp, synthetic construct
  misc_feature 1..20: note = Description of Artificial Sequence: Synthetic oligonucleotide
  misc_feature 1..20: note = Target: SCN10A; (-) strand; PAM type: NRG; PAM sequence: TGG
  source 1..20: mol_type = other DNA
atatataatgataaaataat

SEQ ID NO: 23318 - DNA, 20 bp, synthetic construct
  misc_feature 1..20: note = Description of Artificial Sequence: Synthetic oligonucleotide
  misc_feature 1..20: note = Target: SCN10A; (-) strand; PAM type: NRG; PAM sequence: GGG
  source 1..20: mol_type = other DNA
cagttaaaaaaagacaaaga

SEQ ID NO: 23319 - DNA, 20 bp, synthetic construct
  misc_feature 1..20: note = Description of Artificial Sequence: Synthetic oligonucleotide
  misc_feature 1..20: note = Target: SCN10A; (-) strand; PAM type: NRG; PAM sequence: AGG
  source 1..20: mol_type = other DNA
acagttaaaaaaagacaaag

SEQ ID NO: 23320 - DNA, 20 bp, synthetic construct
  misc_feature 1..20: note = Description of Artificial Sequence: Synthetic oligonucleotide
  misc_feature 1..20: note = Target: SCN10A; (-) strand; PAM type: NRG; PAM sequence: GAG
  source 1..20: mol_type = other DNA
aacagttaaaaaaagacaaa

SEQ ID NO: 23321 - DNA, 20 bp, synthetic construct
  misc_feature 1..20: note = Description of Artificial Sequence: Synthetic oligonucleotide
  misc_feature 1..20: note = Target: SCN10A; (-) strand; PAM type: NRG; PAM sequence: AAG
  source 1..20: mol_type = other DNA
acaacagttaaaaaaagaca

SEQ ID NO: 23322 - DNA, 20 bp, synthetic construct
  misc_feature 1..20: note = Description of Artificial Sequence: Synthetic oligonucleotide
  misc_feature 1..20: note = Target: SCN10A; (-) strand; PAM type: NRG; PAM sequence: AAG
  source 1..20: mol_type = other DNA
aaagcaacaacagttaaaaa

SEQ ID NO: 23323 - DNA, 20 bp, synthetic construct
  misc_feature 1..20: note = Description of Artificial Sequence: Synthetic oligonucleotide
  misc_feature 1..20: note = Target: SCN10A; (-) strand; PAM type: NRG; PAM sequence: CAG
  source 1..20: mol_type = other DNA
aacagaccttaaagcaacaa

SEQ ID NO: 23324 - DNA, 20 bp, synthetic construct
  misc_feature 1..20: note = Description of Artificial Sequence: Synthetic oligonucleotide
  misc_feature 1..20: note = Target: SCN10A; (-) strand; PAM type: NRG; PAM sequence: AAG
  source 1..20: mol_type = other DNA
atcagagaaaacagacctta

SEQ ID NO: 23325 - DNA, 20 bp, synthetic construct
  misc_feature 1..20: note = Description of Artificial Sequence: Synthetic oligonucleotide
  misc_feature 1..20: note = Target: SCN10A; (-) strand; PAM type: NRG; PAM sequence: CAG
  source 1..20: mol_type = other DNA
tattcttatatcagagaaaa

SEQ ID NO: 23326 - DNA, 20 bp, synthetic construct
  misc_feature 1..20: note = Description of Artificial Sequence: Synthetic oligonucleotide
  misc_feature 1..20: note = Target: SCN10A; (-) strand; PAM type: NRG; PAM sequence: GAG
  source 1..20: mol_type = other DNA
gagtagctattcttatatca

SEQ ID NO: 23327 - DNA, 20 bp, synthetic construct
  misc_feature 1..20: note = Description of Artificial Sequence: Synthetic oligonucleotide
  misc_feature 1..20: note = Target: SCN10A; (-) strand; PAM type: NRG; PAM sequence: CAG
  source 1..20: mol_type = other DNA
aggagtagctattcttatat

SEQ ID NO: 23328 - DNA, 20 bp, synthetic construct
  misc_feature 1..20: note = Description of Artificial Sequence: Synthetic oligonucleotide
  misc_feature 1..20: note = Target: SCN10A; (-) strand; PAM type: NRG; PAM sequence: TAG
  source 1..20: mol_type = other DNA
aaaccaaaagcaagcaggag

SEQ ID NO: 23329 - DNA, 20 bp, synthetic construct
  misc_feature 1..20: note = Description of Artificial Sequence: Synthetic oligonucleotide
  misc_feature 1..20: note = Target: SCN10A; (-) strand; PAM type: NRG; PAM sequence: GAG
  source 1..20: mol_type = other DNA
tggaaaccaaaagcaagcag

SEQ ID NO: 23330 - DNA, 20 bp, synthetic construct
  misc_feature 1..20: note = Description of Artificial Sequence: Synthetic oligonucleotide
  misc_feature 1..20: note = Target: SCN10A; (-) strand; PAM type: NRG; PAM sequence: AGG
  source 1..20: mol_type = other DNA
aatggaaaccaaaagcaagc

SEQ ID NO: 23331 - DNA, 20 bp, synthetic construct
  misc_feature 1..20: note = Description of Artificial Sequence: Synthetic oligonucleotide
  misc_feature 1..20: note = Target: SCN10A; (-) strand; PAM type: NRG; PAM sequence: CAG
  source 1..20: mol_type = other DNA
aaatggaaaccaaaagcaag

SEQ ID NO: 23332 - DNA, 20 bp, synthetic construct
  misc_feature 1..20: note = Description of Artificial Sequence: Synthetic oligonucleotide
  misc_feature 1..20: note = Target: SCN10A; (-) strand; PAM type: NRG; PAM sequence: AAG
  source 1..20: mol_type = other DNA
tgcaaatggaaaccaaaagc

SEQ ID NO: 23333 - DNA, 20 bp, synthetic construct
  misc_feature 1..20: note = Description of Artificial Sequence: Synthetic oligonucleotide
  misc_feature 1..20: note = Target: SCN10A; (-) strand; PAM type: NRG; PAM sequence: AAG
  source 1..20: mol_type = other DNA
tccatgcaaatggaaaccaa

SEQ ID NO: 23334 - DNA, 20 bp, synthetic construct
  misc_feature 1..20: note = Description of Artificial Sequence: Synthetic oligonucleotide
  misc_feature 1..20: note = Target: SCN10A; (-) strand; PAM type: NRG; PAM sequence: TGG
  source 1..20: mol_type = other DNA
gaaaagatattccatgcaaa

SEQ ID NO: 23335 - DNA, 20 bp, synthetic construct
  misc_feature 1..20: note = Description of Artificial Sequence: Synthetic oligonucleotide
  misc_feature 1..20: note = Target: SCN10A; (-) strand; PAM type: NRG; PAM sequence: AAG
  source 1..20: mol_type = other DNA
ttaaggtaaagagatgggaa

SEQ ID NO: 23336 - DNA, 20 bp, synthetic construct
  misc_feature 1..20: note = Description of Artificial Sequence: Synthetic oligonucleotide
  misc_feature 1..20: note = Target: SCN10A; (-) strand; PAM type: NRG; PAM sequence: GGG
  source 1..20: mol_type = other DNA
taaacttaaggtaaagagat

SEQ ID NO: 23337 - DNA, 20 bp, synthetic construct
  misc_feature 1..20: note = Description of Artificial Sequence: Synthetic oligonucleotide
  misc_feature 1..20: note = Target: SCN10A; (-) strand; PAM type: NRG; PAM sequence: TGG
  source 1..20: mol_type = other DNA
ataaacttaaggtaaagaga

SEQ ID NO: 23338 - DNA, 20 bp, synthetic construct
  misc_feature 1..20: note = Description of Artificial Sequence: Synthetic oligonucleotide
  misc_feature 1..20: note = Target: SCN10A; (-) strand; PAM type: NRG; PAM sequence: GAG
  source 1..20: mol_type = other DNA
ccacataaacttaaggtaaa

SEQ ID NO: 23339 - DNA, 20 bp, synthetic construct
  misc_feature 1..20: note = Description of Artificial Sequence: Synthetic oligonucleotide
  misc_feature 1..20: note = Target: SCN10A; (-) strand; PAM type: NRG; PAM sequence: AAG
  source 1..20: mol_type = other DNA
agccacataaacttaaggta

SEQ ID NO: 23340 - DNA, 20 bp, synthetic construct
  misc_feature 1..20: note = Description of Artificial Sequence: Synthetic oligonucleotide
  misc_feature 1..20: note = Target: SCN10A; (-) strand; PAM type: NRG; PAM sequence: AGG
  source 1..20: mol_type = other DNA
taaggagccacataaactta

SEQ ID NO: 23341 - DNA, 20 bp, synthetic construct
  misc_feature 1..20: note = Description of Artificial Sequence: Synthetic oligonucleotide
  misc_feature 1..20: note = Target: SCN10A; (-) strand; PAM type: NRG; PAM sequence: AAG
  source 1..20: mol_type = other DNA
ataaggagccacataaactt

SEQ ID NO: 23342 - DNA, 20 bp, synthetic construct
  misc_feature 1..20: note = Description of Artificial Sequence: Synthetic oligonucleotide
  misc_feature 1..20: note = Target: SCN10A; (-) strand; PAM type: NRG; PAM sequence: GAG
  source 1..20: mol_type = other DNA
agactcacctaacacataag

SEQ ID NO: 23343 - DNA, 20 bp, synthetic construct
  misc_feature 1..20: note = Description of Artificial Sequence: Synthetic oligonucleotide
  misc_feature 1..20: note = Target: SCN10A; (-) strand; PAM type: NRG; PAM sequence: AGG
  source 1..20: mol_type = other DNA
agagactcacctaacacata

SEQ ID NO: 23344 - DNA, 20 bp, synthetic construct
  misc_feature 1..20: note = Description of Artificial Sequence: Synthetic oligonucleotide
  misc_feature 1..20: note = Target: SCN10A; (-) strand; PAM type: NRG; PAM sequence: AAG
  source 1..20: mol_type = other DNA
aagagactcacctaacacat

SEQ ID NO: 23345 - DNA, 20 bp, synthetic construct
  misc_feature 1..20: note = Description of Artificial Sequence: Synthetic oligonucleotide
  misc_feature 1..20: note = Target: SCN10A; (-) strand; PAM type: NRG; PAM sequence: GAG
  source 1..20: mol_type = other DNA
caagtatctactgtcttcaa

SEQ ID NO: 23346 - DNA, 20 bp, synthetic construct
  misc_feature 1..20: note = Description of Artificial Sequence: Synthetic oligonucleotide
  misc_feature 1..20: note = Target: SCN10A; (-) strand; PAM type: NRG; PAM sequence: AAG
  source 1..20: mol_type = other DNA
accaagtatctactgtcttc

SEQ ID NO: 23347 - DNA, 20 bp, synthetic construct
  misc_feature 1..20: note = Description of Artificial Sequence: Synthetic oligonucleotide
  misc_feature 1..20: note = Target: SCN10A; (-) strand; PAM type: NRG; PAM sequence: AAG
  source 1..20: mol_type = other DNA
aaaaaaaaaatccaccaacc

SEQ ID NO: 23348 - DNA, 20 bp, synthetic construct
  misc_feature 1..20: note = Description of Artificial Sequence: Synthetic oligonucleotide
  misc_feature 1..20: note = Target: SCN10A; (-) strand; PAM type: NRG; PAM sequence: AGG
  source 1..20: mol_type = other DNA
aaatatacagaagggcagaa

SEQ ID NO: 23349 - DNA, 20 bp, synthetic construct
  misc_feature 1..20: note = Description of Artificial Sequence: Synthetic oligonucleotide
  misc_feature 1..20: note = Target: SCN10A; (-) strand; PAM type: NRG; PAM sequence: AAG
  source 1..20: mol_type = other DNA
aaaatatacagaagggcaga

SEQ ID NO: 23350 - DNA, 20 bp, synthetic construct
  misc_feature 1..20: note = Description of Artificial Sequence: Synthetic oligonucleotide
  misc_feature 1..20: note = Target: SCN10A; (-) strand; PAM type: NRG; PAM sequence: CAG
  source 1..20: mol_type = other DNA
acttaaaatatacagaaggg

SEQ ID NO: 23351 - DNA, 20 bp, synthetic construct
  misc_feature 1..20: note = Description of Artificial Sequence: Synthetic oligonucleotide
  misc_feature 1..20: note = Target: SCN10A; (-) strand; PAM type: NRG; PAM sequence: GGG
  source 1..20: mol_type = other DNA
tccacttaaaatatacagaa

SEQ ID NO: 23352 - DNA, 20 bp, synthetic construct
  misc_feature 1..20: note = Description of Artificial Sequence: Synthetic oligonucleotide
  misc_feature 1..20: note = Target: SCN10A; (-) strand; PAM type: NRG; PAM sequence: AGG
  source 1..20: mol_type = other DNA
atccacttaaaatatacaga

SEQ ID NO: 23353 - DNA, 20 bp, synthetic construct
  misc_feature 1..20: note = Description of Artificial Sequence: Synthetic oligonucleotide
  misc_feature 1..20: note = Target: SCN10A; (-) strand; PAM type: NRG; PAM sequence: AAG
  source 1..20: mol_type = other DNA
gatccacttaaaatatacag

SEQ ID NO: 23354 - DNA, 20 bp, synthetic construct
  misc_feature 1..20: note = Description of Artificial Sequence: Synthetic oligonucleotide
  misc_feature 1..20: note = Target: SCN10A; (-) strand; PAM type: NRG; PAM sequence: CAG
  source 1..20: mol_type = other DNA
aatgatccacttaaaatata

SEQ ID NO: 23355 - DNA, 20 bp, synthetic construct
  misc_feature 1..20: note = Description of Artificial Sequence: Synthetic oligonucleotide
  misc_feature 1..20: note = Target: SCN10A; (-) strand; PAM type: NRG; PAM sequence: GAG
  source 1..20: mol_type = other DNA
cacatctcaatactgatgtt

SEQ ID NO: 23356 - DNA, 20 bp, synthetic construct
  misc_feature 1..20: note = Description of Artificial Sequence: Synthetic oligonucleotide
  misc_feature 1..20: note = Target: SCN10A; (-) strand; PAM type: NRG; PAM sequence: GAG
  source 1..20: mol_type = other DNA
aactagcataatgaatagaa

SEQ ID NO: 23357 - DNA, 20 bp, synthetic construct
  misc_feature 1..20: note = Description of Artificial Sequence: Synthetic oligonucleotide
  misc_feature 1..20: note = Target: SCN10A; (-) strand; PAM type: NRG; PAM sequence: AAG
  source 1..20: mol_type = other DNA
ataactagcataatgaatag

SEQ ID NO: 23358 - DNA, 20 bp, synthetic construct
  misc_feature 1..20: note = Description of Artificial Sequence: Synthetic oligonucleotide
  misc_feature 1..20: note = Target: SCN10A; (-) strand; PAM type: NRG; PAM sequence: TAG
  source 1..20: mol_type = other DNA
gcaataactagcataatgaa

SEQ ID NO: 23359 - DNA, 20 bp, synthetic construct
  misc_feature 1..20: note = Description of Artificial Sequence: Synthetic oligonucleotide
  misc_feature 1..20: note = Target: SCN10A; (-) strand; PAM type: NRG; PAM sequence: TAG
  source 1..20: mol_type = other DNA
aaaggaattaaggcaataac

SEQ ID NO: 23360 - DNA, 20 bp, synthetic construct
  misc_feature 1..20: note = Description of Artificial Sequence: Synthetic oligonucleotide
  misc_feature 1..20: note = Target: SCN10A; (-) strand; PAM type: NRG; PAM sequence: AGG
  source 1..20: mol_type = other DNA
cacaataaaaaaaggaatta

SEQ ID NO: 23361 - DNA, 20 bp, synthetic construct
  misc_feature 1..20: note = Description of Artificial Sequence: Synthetic oligonucleotide
  misc_feature 1..20: note = Target: SCN10A; (-) strand; PAM type: NRG; PAM sequence: AAG
  source 1..20: mol_type = other DNA
acacaataaaaaaaggaatt

SEQ ID NO: 23362 - DNA, 20 bp, synthetic construct
  misc_feature 1..20: note = Description of Artificial Sequence: Synthetic oligonucleotide
  misc_feature 1..20: note = Target: SCN10A; (-) strand; PAM type: NRG; PAM sequence: AGG
  source 1..20: mol_type = other DNA
aacaataacacaataaaaaa

SEQ ID NO: 23363 - DNA, 20 bp, synthetic construct
  misc_feature 1..20: note = Description of Artificial Sequence: Synthetic oligonucleotide
  misc_feature 1..20: note = Target: SCN10A; (-) strand; PAM type: NRG; PAM sequence: AAG
  source 1..20: mol_type = other DNA
aaacaataacacaataaaaa

SEQ ID NO: 23364 - DNA, 20 bp, synthetic construct
  misc_feature 1..20: note = Description of Artificial Sequence: Synthetic oligonucleotide
  misc_feature 1..20: note = Target: SCN10A; (-) strand; PAM type: NRG; PAM sequence: AGG
  source 1..20: mol_type = other DNA
ccttaaagcataaatatcaa

SEQ ID NO: 23365 - DNA, 20 bp, synthetic construct
  misc_feature 1..20: note = Description of Artificial Sequence: Synthetic oligonucleotide
  misc_feature 1..20: note = Target: SCN10A; (-) strand; PAM type: NRG; PAM sequence: AAG
  source 1..20: mol_type = other DNA
tccttaaagcataaatatca

SEQ ID NO: 23366 - DNA, 20 bp, synthetic construct
  misc_feature 1..20: note = Description of Artificial Sequence: Synthetic oligonucleotide
  misc_feature 1..20: note = Target: SCN10A; (-) strand; PAM type: NRG; PAM sequence: AAG
  source 1..20: mol_type = other DNA
accaaaatagaacctcctta

SEQ ID NO: 23367 - DNA, 20 bp, synthetic construct
  misc_feature 1..20: note = Description of Artificial Sequence: Synthetic oligonucleotide
  misc_feature 1..20: note = Target: SCN10A; (-) strand; PAM type: NRG; PAM sequence: TAG
  source 1..20: mol_type = other DNA
aaccttaaaatacaccaaaa

SEQ ID NO: 23368 - DNA, 20 bp, synthetic construct
  misc_feature 1..20: note = Description of Artificial Sequence: Synthetic oligonucleotide
  misc_feature 1..20: note = Target: SCN10A; (-) strand; PAM type: NRG; PAM sequence: AGG
  source 1..20: mol_type = other DNA
gcactacaagaaatgctaaa

SEQ ID NO: 23369 - DNA, 20 bp, synthetic construct
  misc_feature 1..20: note = Description of Artificial Sequence: Synthetic oligonucleotide
  misc_feature 1..20: note = Target: SCN10A; (-) strand; PAM type: NRG; PAM sequence: AAG
  source 1..20: mol_type = other DNA
agcactacaagaaatgctaa

SEQ ID NO: 23370 - DNA, 20 bp, synthetic construct
  misc_feature 1..20: note = Description of Artificial Sequence: Synthetic oligonucleotide
  misc_feature 1..20: note = Target: SCN10A; (-) strand; PAM type: NRG; PAM sequence: AAG
  source 1..20: mol_type = other DNA
cactaccaagccagcactac

SEQ ID NO: 23371 - DNA, 20 bp, synthetic construct
  misc_feature 1..20: note = Description of Artificial Sequence: Synthetic oligonucleotide
  misc_feature 1..20: note = Target: SCN10A; (-) strand; PAM type: NRG; PAM sequence: CAG
  source 1..20: mol_type = other DNA
agaattttccactaccaagc

SEQ ID NO: 23372 - DNA, 20 bp, synthetic construct
  misc_feature 1..20: note = Description of Artificial Sequence: Synthetic oligonucleotide
  misc_feature 1..20: note = Target: SCN10A; (-) strand; PAM type: NRG; PAM sequence: AAG
  source 1..20: mol_type = other DNA
tgagagaattttccactacc

SEQ ID NO: 23373 - DNA, 20 bp, synthetic construct
  misc_feature 1..20: note = Description of Artificial Sequence: Synthetic oligonucleotide
  misc_feature 1..20: note = Target: SCN10A; (-) strand; PAM type: NRG; PAM sequence: GAG
  source 1..20: mol_type = other DNA
ttcagacaaacaaatggtga

SEQ ID NO: 23374 - DNA, 20 bp, synthetic construct
  misc_feature 1..20: note = Description of Artificial Sequence: Synthetic oligonucleotide
  misc_feature 1..20: note = Target: SCN10A; (-) strand; PAM type: NRG; PAM sequence: GAG
  source 1..20: mol_type = other DNA
ttttcagacaaacaaatggt

SEQ ID NO: 23375 - DNA, 20 bp, synthetic construct
  misc_feature 1..20: note = Description of Artificial Sequence: Synthetic oligonucleotide
  misc_feature 1..20: note = Target: SCN10A; (-) strand; PAM type: NRG; PAM sequence: TGG
  source 1..20: mol_type = other DNA
gtttttttcagacaaacaaa

SEQ ID NO: 23376 - DNA, 20 bp, synthetic construct
  misc_feature 1..20: note = Description of Artificial Sequence: Synthetic oligonucleotide
  misc_feature 1..20: note = Target: SCN10A; (-) strand; PAM type: NRG; PAM sequence: CAG
  source 1..20: mol_type = other DNA
agacaagataaagttttttt

SEQ ID NO: 23377 - DNA, 20 bp, synthetic construct
  misc_feature 1..20: note = Description of Artificial Sequence: Synthetic oligonucleotide
  misc_feature 1..20: note = Target: SCN10A; (-) strand; PAM type: NRG; PAM sequence: AAG
  source 1..20: mol_type = other DNA
tcataagtgaagacaagata

SEQ ID NO: 23378 - DNA, 20 bp, synthetic construct
  misc_feature 1..20: note = Description of Artificial Sequence: Synthetic oligonucleotide
  misc_feature 1..20: note = Target: SCN10A; (-) strand; PAM type: NRG; PAM sequence: AAG
  source 1..20: mol_type = other DNA
taagcttcataagtgaagac

SEQ ID NO: 23379 - DNA, 20 bp, synthetic construct
  misc_feature 1..20: note = Description of Artificial Sequence: Synthetic oligonucleotide
  misc_feature 1..20: note = Target: SCN10A; (-) strand; PAM type: NRG; PAM sequence: AAG
  source 1..20: mol_type = other DNA
gaaactaagcttcataagtg

SEQ ID NO: 23380 - DNA, 20 bp, synthetic construct
  misc_feature 1..20: note = Description of Artificial Sequence: Synthetic oligonucleotide
  misc_feature 1..20: note = Target: SCN10A; (-) strand; PAM type: NRG; PAM sequence: AAG
  source 1..20: mol_type = other DNA
gaagagaaactaagcttcat

SEQ ID NO: 23381 - DNA, 20 bp, synthetic construct
  misc_feature 1..20: note = Description of Artificial Sequence: Synthetic oligonucleotide
  misc_feature 1..20: note = Target: SCN10A; (-) strand; PAM type: NRG; PAM sequence: AAG
  source 1..20: mol_type = other DNA
atattgtatgaagagaaact

SEQ ID NO: 23382 - DNA, 20 bp, synthetic construct
  misc_feature 1..20: note = Description of Artificial Sequence: Synthetic oligonucleotide
  misc_feature 1..20: note = Target: SCN10A; (-) strand; PAM type: NRG; PAM sequence: GAG
  source 1..20: mol_type = other DNA
agccaagaatattgtatgaa

SEQ ID NO: 23383 - DNA, 20 bp, synthetic construct
  misc_feature 1..20: note = Description of Artificial Sequence: Synthetic oligonucleotide
  misc_feature 1..20: note = Target: SCN10A; (-) strand; PAM type: NRG; PAM sequence: AAG
  source 1..20: mol_type = other DNA
ccagccaagaatattgtatg

SEQ ID NO: 23384 - DNA, 20 bp, synthetic construct
  misc_feature 1..20: note = Description of Artificial Sequence: Synthetic oligonucleotide
  misc_feature 1..20: note = Target: SCN10A; (-) strand; PAM type: NRG; PAM sequence: AAG
  source 1..20: mol_type = other DNA
aaacaaaataattgccagcc

SEQ ID NO: 23385 - DNA, 20 bp, synthetic construct
  misc_feature 1..20: note = Description of Artificial Sequence: Synthetic oligonucleotide
  misc_feature 1..20: note = Target: SCN10A; (-) strand; PAM type: NRG; PAM sequence: CAG
  source 1..20: mol_type = other DNA
tcctgaaacaaaataattgc

SEQ ID NO: 23386 - DNA, 20 bp, synthetic construct
  misc_feature 1..20: note = Description of Artificial Sequence: Synthetic oligonucleotide
  misc_feature 1..20: note = Target: SCN10A; (-) strand; PAM type: NRG; PAM sequence: TAG
  source 1..20: mol_type = other DNA
agggattagggtcccatctt

SEQ ID NO: 23387 - DNA, 20 bp, synthetic construct
  misc_feature 1..20: note = Description of Artificial Sequence: Synthetic oligonucleotide
  misc_feature 1..20: note = Target: SCN10A; (-) strand; PAM type: NRG; PAM sequence: GGG
  source 1..20: mol_type = other DNA
ttgcaagccagaagggatta

SEQ ID NO: 23388 - DNA, 20 bp, synthetic construct
  misc_feature 1..20: note = Description of Artificial Sequence: Synthetic oligonucleotide
  misc_feature 1..20: note = Target: SCN10A; (-) strand; PAM type: NRG; PAM sequence: AGG
  source 1..20: mol_type = other DNA
cttgcaagccagaagggatt

SEQ ID NO: 23389 - DNA, 20 bp, synthetic construct
  misc_feature 1..20: note = Description of Artificial Sequence: Synthetic oligonucleotide
  misc_feature 1..20: note = Target: SCN10A; (-) strand; PAM type: NRG; PAM sequence: TAG
  source 1..20: mol_type = other DNA
ccttgcaagccagaagggat

SEQ ID NO: 23390 - DNA, 20 bp, synthetic construct
  misc_feature 1..20: note = Description of Artificial Sequence: Synthetic oligonucleotide
  misc_feature 1..20: note = Target: SCN10A; (-) strand; PAM type: NRG; PAM sequence: GGG
  source 1..20: mol_type = other DNA
tgaaaccttgcaagccagaa

SEQ ID NO: 23391 - DNA, 20 bp, synthetic construct
  misc_feature 1..20: note = Description of Artificial Sequence: Synthetic oligonucleotide
  misc_feature 1..20: note = Target: SCN10A; (-) strand; PAM type: NRG; PAM sequence: AGG
  source 1..20: mol_type = other DNA
ctgaaaccttgcaagccaga

SEQ ID NO: 23392 - DNA, 20 bp, synthetic construct
  misc_feature 1..20: note = Description of Artificial Sequence: Synthetic oligonucleotide
  misc_feature 1..20: note = Target: SCN10A; (-) strand; PAM type: NRG; PAM sequence: AAG
  source 1..20: mol_type = other DNA
actgaaaccttgcaagccag

SEQ ID NO: 23393 - DNA, 20 bp, synthetic construct
  misc_feature 1..20: note = Description of Artificial Sequence: Synthetic oligonucleotide
  misc_feature 1..20: note = Target: SCN10A; (-) strand; PAM type: NRG; PAM sequence: CAG
  source 1..20: mol_type = other DNA
tcaactgaaaccttgcaagc

SEQ ID NO: 23394 - DNA, 20 bp, synthetic construct
  misc_feature 1..20: note = Description of Artificial Sequence: Synthetic oligonucleotide
  misc_feature 1..20: note = Target: SCN10A; (-) strand; PAM type: NRG; PAM sequence: AAG
  source 1..20: mol_type = other DNA
tttctcaactgaaaccttgc

SEQ ID NO: 23395 - DNA, 20 bp, synthetic construct
  misc_feature 1..20: note = Description of Artificial Sequence: Synthetic oligonucleotide
  misc_feature 1..20: note = Target: SCN10A; (-) strand; PAM type: NRG; PAM sequence: CAG
  source 1..20: mol_type = other DNA
gatttacataagattaacag

SEQ ID NO: 23396 - DNA, 20 bp, synthetic construct
  misc_feature 1..20: note = Description of Artificial Sequence: Synthetic oligonucleotide
  misc_feature 1..20: note = Target: SCN10A; (-) strand; PAM type: NRG; PAM sequence: CAG
  source 1..20: mol_type = other DNA
tctgatttacataagattaa

SEQ ID NO: 23397 - DNA, 20 bp, synthetic construct
  misc_feature 1..20: note = Description of Artificial Sequence: Synthetic oligonucleotide
  misc_feature 1..20: note = Target: SCN10A; (-) strand; PAM type: NRG; PAM sequence: AAG
  source 1..20: mol_type = other DNA
aaaggttatctgatttacat

SEQ ID NO: 23398 - DNA, 20 bp, synthetic construct
  misc_feature 1..20: note = Description of Artificial Sequence: Synthetic oligonucleotide
  misc_feature 1..20: note = Target: SCN10A; (-) strand; PAM type: NRG; PAM sequence: AGG
  source 1..20: mol_type = other DNA
tcagataacctataaaggaa

SEQ ID NO: 23399 - DNA, 20 bp, synthetic construct
  misc_feature 1..20: note = Description of Artificial Sequence: Synthetic oligonucleotide
  misc_feature 1..20: note = Target: SCN10A; (-) strand; PAM type: NRG; PAM sequence: AAG
  source 1..20: mol_type = other DNA
ctcagataacctataaagga

SEQ ID NO: 23400 - DNA, 20 bp, synthetic construct
  misc_feature 1..20: note = Description of Artificial Sequence: Synthetic oligonucleotide
  misc_feature 1..20: note = Target: SCN10A; (-) strand; PAM type: NRG; PAM sequence: AGG
  source 1..20: mol_type = other DNA
aagcctcagataacctataa

SEQ ID NO: 23401 - DNA, 20 bp, synthetic construct
  misc_feature 1..20: note = Description of Artificial Sequence: Synthetic oligonucleotide
  misc_feature 1..20: note = Target: SCN10A; (-) strand; PAM type: NRG; PAM sequence: AAG
  source 1..20: mol_type = other DNA
aaagcctcagataacctata

SEQ ID NO: 23402 - DNA, 20 bp, synthetic construct
  misc_feature 1..20: note = Description of Artificial Sequence: Synthetic oligonucleotide
  misc_feature 1..20: note = Target: SCN10A; (-) strand; PAM type: NRG; PAM sequence: CAG
  source 1..20: mol_type = other DNA
gagctgtgagacaaaagcct

SEQ ID NO: 23403 - DNA, 20 bp, synthetic construct
  misc_feature 1..20: note = Description of Artificial Sequence: Synthetic oligonucleotide
  misc_feature 1..20: note = Target: SCN10A; (-) strand; PAM type: NRG; PAM sequence: AAG
  source 1..20: mol_type = other DNA
tcttaagagctgtgagacaa

SEQ ID NO: 23404 - DNA, 20 bp, synthetic construct
  misc_feature 1..20: note = Description of Artificial Sequence: Synthetic oligonucleotide
  misc_feature 1..20: note = Target: SCN10A; (-) strand; PAM type: NRG; PAM sequence: GAG
  source 1..20: mol_type = other DNA
aaaagaatcttaagagctgt

SEQ ID NO: 23405 - DNA, 20 bp, synthetic construct
  misc_feature 1..20: note = Description of Artificial Sequence: Synthetic oligonucleotide
  misc_feature 1..20: note = Target: SCN10A; (-) strand; PAM type: NRG; PAM sequence: GAG
  source 1..20: mol_type = other DNA
gacaaagaaaagaatcttaa

SEQ ID NO: 23406 - DNA, 20 bp, synthetic construct
  misc_feature 1..20: note = Description of Artificial Sequence: Synthetic oligonucleotide
  misc_feature 1..20: note = Target: SCN10A; (-) strand; PAM type: NRG; PAM sequence: AAG
  source 1..20: mol_type = other DNA
aagacaaagaaaagaatctt

SEQ ID NO: 23407 - DNA, 20 bp, synthetic construct
  misc_feature 1..20: note = Description of Artificial Sequence: Synthetic oligonucleotide
  misc_feature 1..20: note = Target: SCN10A; (-) strand; PAM type: NRG; PAM sequence: AAG
  source 1..20: mol_type = other DNA
tctaaagtcaagacaaagaa

SEQ ID NO: 23408 - DNA, 20 bp, synthetic construct
  misc_feature 1..20: note = Description of Artificial Sequence: Synthetic oligonucleotide
  misc_feature 1..20: note = Target: SCN10A; (-) strand; PAM type: NRG; PAM sequence: AAG
  source 1..20: mol_type = other DNA
ggttatctaaagtcaagaca

SEQ ID NO: 23409 - DNA, 20 bp, synthetic construct
  misc_feature 1..20: note = Description of Artificial Sequence: Synthetic oligonucleotide
  misc_feature 1..20: note = Target: SCN10A; (-) strand; PAM type: NRG; PAM sequence: AAG
  source 1..20: mol_type = other DNA
acatcaggttatctaaagtc

SEQ ID NO: 23410 - DNA, 20 bp, synthetic construct
  misc_feature 1..20: note = Description of Artificial Sequence: Synthetic oligonucleotide
  misc_feature 1..20: note = Target: SCN10A; (-) strand; PAM type: NRG; PAM sequence: AAG
  source 1..20: mol_type = other DNA
aatagacatcaggttatcta

SEQ ID NO: 23411 - DNA, 20 bp, synthetic construct
  misc_feature 1..20: note = Description of Artificial Sequence: Synthetic oligonucleotide
  misc_feature 1..20: note = Target: SCN10A; (-) strand; PAM type: NRG; PAM sequence: AGG
  source 1..20: mol_type = other DNA
cacctaggcaaatagacatc

SEQ ID NO: 23412 - DNA, 20 bp, synthetic construct
  misc_feature 1..20: note = Description of Artificial Sequence: Synthetic oligonucleotide
  misc_feature 1..20: note = Target: SCN10A; (-) strand; PAM type: NRG; PAM sequence: CAG
  source 1..20: mol_type = other DNA
tcacctaggcaaatagacat

SEQ ID NO: 23413 - DNA, 20 bp, synthetic construct
  misc_feature 1..20: note = Description of Artificial Sequence: Synthetic oligonucleotide
  misc_feature 1..20: note = Target: SCN10A; (-) strand; PAM type: NRG; PAM sequence: TAG
  source 1..20: mol_type = other DNA
aagatcatcacctaggcaaa

SEQ ID NO: 23414 - DNA, 20 bp, synthetic construct
  misc_feature 1..20: note = Description of Artificial Sequence: Synthetic oligonucleotide
  misc_feature 1..20: note = Target: SCN10A; (-) strand; PAM type: NRG; PAM sequence: AGG
  source 1..20: mol_type = other DNA
cacaaaaaagatcatcacct

SEQ ID NO: 23415 - DNA, 20 bp, synthetic construct
  misc_feature 1..20: note = Description of Artificial Sequence: Synthetic oligonucleotide
  misc_feature 1..20: note = Target: SCN10A; (-) strand; PAM type: NRG; PAM sequence: TAG
  source 1..20: mol_type = other DNA
tcacaaaaaagatcatcacc

SEQ ID NO: 23416 - DNA, 20 bp, synthetic construct
  misc_feature 1..20: note = Description of Artificial Sequence: Synthetic oligonucleotide
  misc_feature 1..20: note = Target: SCN10A; (-) strand; PAM type: NRG; PAM sequence: AAG
  source 1..20: mol_type = other DNA
ctctgaaatgtgtcacaaaa

SEQ ID NO: 23417 - DNA, 20 bp, synthetic construct
  misc_feature 1..20: note = Description of Artificial Sequence: Synthetic oligonucleotide
  misc_feature 1..20: note = Target: SCN10A; (-) strand; PAM type: NRG; PAM sequence: AAG
  source 1..20: mol_type = other DNA
atccaaatacaagaagctca

SEQ ID NO: 23418 - DNA, 20 bp, synthetic construct
  misc_feature 1..20: note = Description of Artificial Sequence: Synthetic oligonucleotide
  misc_feature 1..20: note = Target: SCN10A; (-) strand; PAM type: NRG; PAM sequence: AAG
  source 1..20: mol_type = other DNA
tatagatatccaaatacaag

SEQ ID NO: 23419 - DNA, 20 bp, synthetic construct
  misc_feature 1..20: note = Description of Artificial Sequence: Synthetic oligonucleotide
  misc_feature 1..20: note = Target: SCN10A; (-) strand; PAM type: NRG; PAM sequence: AAG
  source 1..20: mol_type = other DNA
aaatatagatatccaaatac

SEQ ID NO: 23420 - DNA, 20 bp, synthetic construct
  misc_feature 1..20: note = Description of Artificial Sequence: Synthetic oligonucleotide
  misc_feature 1..20: note = Target: SCN10A; (-) strand; PAM type: NRG; PAM sequence: TAG
  source 1..20: mol_type = other DNA
ccctggccttgttagaaata

SEQ ID NO: 23421 - DNA, 20 bp, synthetic construct
  misc_feature 1..20: note = Description of Artificial Sequence: Synthetic oligonucleotide
  misc_feature 1..20: note = Target: SCN10A; (-) strand; PAM type: NRG; PAM sequence: TAG
  source 1..20: mol_type = other DNA
gaaaacttccctggccttgt

SEQ ID NO: 23422 - DNA, 20 bp, synthetic construct
  misc_feature 1..20: note = Description of Artificial Sequence: Synthetic oligonucleotide
  misc_feature 1..20: note = Target: SCN10A; (-) strand; PAM type: NRG; PAM sequence: TGG
  source 1..20: mol_type = other DNA
ataattgaggaaaacttccc

SEQ ID NO: 23423 - DNA, 20 bp, synthetic construct
  misc_feature 1..20: note = Description of Artificial Sequence: Synthetic oligonucleotide
  misc_feature 1..20: note = Target: SCN10A; (-) strand; PAM type: NRG; PAM sequence: AGG
  source 1..20: mol_type = other DNA
cttatttgagggaataattg

SEQ ID NO: 23424 - DNA, 20 bp, synthetic construct
  misc_feature 1..20: note = Description of Artificial Sequence: Synthetic oligonucleotide
  misc_feature 1..20: note = Target: SCN10A; (-) strand; PAM type: NRG; PAM sequence: GAG
  source 1..20: mol_type = other DNA
acttatttgagggaataatt

SEQ ID NO: 23425 - DNA, 20 bp, synthetic construct
  misc_feature 1..20: note = Description of Artificial Sequence: Synthetic oligonucleotide
  misc_feature 1..20: note = Target: SCN10A; (-) strand; PAM type: NRG; PAM sequence: GGG
  source 1..20: mol_type = other DNA
agtttggaaaacttatttga

SEQ ID NO: 23426 - DNA, 20 bp, synthetic construct
  misc_feature 1..20: note = Description of Artificial Sequence: Synthetic oligonucleotide
  misc_feature 1..20: note = Target: SCN10A; (-) strand; PAM type: NRG; PAM sequence: AGG
  source 1..20: mol_type = other DNA
aagtttggaaaacttatttg

SEQ ID NO: 23427 - DNA, 20 bp, synthetic construct
  misc_feature 1..20: note = Description of Artificial Sequence: Synthetic oligonucleotide
  misc_feature 1..20: note = Target: SCN10A; (-) strand; PAM type: NRG; PAM sequence: GAG
  source 1..20: mol_type = other DNA
aaagtttggaaaacttattt

SEQ ID NO: 23428 - DNA, 20 bp, synthetic construct
  misc_feature 1..20: note = Description of Artificial Sequence: Synthetic oligonucleotide
  misc_feature 1..20: note = Target: SCN10A; (-) strand; PAM type: NRG; PAM sequence: TGG
  source 1..20: mol_type = other DNA
agaatagaaatctaaaagtt

SEQ ID NO: 23429 - DNA, 20 bp, synthetic construct
  misc_feature 1..20: note = Description of Artificial Sequence: Synthetic oligonucleotide
  misc_feature 1..20: note = Target: SCN10A; (-) strand; PAM type: NRG; PAM sequence: AAG
  source 1..20: mol_type = other DNA
aaggaagaatagaaatctaa

SEQ ID NO: 23430 - DNA, 20 bp, synthetic construct
  misc_feature 1..20: note = Description of Artificial Sequence: Synthetic oligonucleotide
  misc_feature 1..20: note = Target: SCN10A; (-) strand; PAM type: NRG; PAM sequence: TAG
  source 1..20: mol_type = other DNA
tgggtgttcccaaggaagaa

SEQ ID NO: 23431 - DNA, 20 bp, synthetic construct
  misc_feature 1..20: note = Description of Artificial Sequence: Synthetic oligonucleotide
  misc_feature 1..20: note = Target: SCN10A; (-) strand; PAM type: NRG; PAM sequence: AAG
  source 1..20: mol_type = other DNA
aataatgggtgttcccaagg

SEQ ID NO: 23432 - DNA, 20 bp, synthetic construct
  misc_feature 1..20: note = Description of Artificial Sequence: Synthetic oligonucleotide
  misc_feature 1..20: note = Target: SCN10A; (-) strand; PAM type: NRG; PAM sequence: AGG
  source 1..20: mol_type = other DNA
aagaataatgggtgttccca

SEQ ID NO: 23433 - DNA, 20 bp, synthetic construct
  misc_feature 1..20: note = Description of Artificial Sequence: Synthetic oligonucleotide
  misc_feature 1..20: note = Target: SCN10A; (-) strand; PAM type: NRG; PAM sequence: AAG
  source 1..20: mol_type = other DNA
taagaataatgggtgttccc

SEQ ID NO: 23434 - DNA, 20 bp, synthetic construct
  misc_feature 1..20: note = Description of Artificial Sequence: Synthetic oligonucleotide
  misc_feature 1..20: note = Target: SCN10A; (-) strand; PAM type: NRG; PAM sequence: GGG
  source 1..20: mol_type = other DNA
caaccaaacctaagaataat

SEQ ID NO: 23435 - DNA, 20 bp, synthetic construct
  misc_feature 1..20: note = Description of Artificial Sequence: Synthetic oligonucleotide
  misc_feature 1..20: note = Target: SCN10A; (-) strand; PAM type: NRG; PAM sequence: TGG
  source 1..20: mol_type = other DNA
acaaccaaacctaagaataa

SEQ ID NO: 23436 - DNA, 20 bp, synthetic construct
  misc_feature 1..20: note = Description of Artificial Sequence: Synthetic oligonucleotide
  misc_feature 1..20: note = Target: SCN10A; (-) strand; PAM type: NRG; PAM sequence: AAG
  source 1..20: mol_type = other DNA
catgtgaaacaaccaaacct

SEQ ID NO: 23437 - DNA, 20 bp, synthetic construct
  misc_feature 1..20: note = Description of Artificial Sequence: Synthetic oligonucleotide
  misc_feature 1..20: note = Target: SCN10A; (-) strand; PAM type: NRG; PAM sequence: TGG
  source 1..20: mol_type = other DNA
gacaaatcggccaataaatt

SEQ ID NO: 23438 - DNA, 20 bp, synthetic construct
  misc_feature 1..20: note = Description of Artificial Sequence: Synthetic oligonucleotide
  misc_feature 1..20: note = Target: SCN10A; (-) strand; PAM type: NRG; PAM sequence: CGG
  source 1..20: mol_type = other DNA
tttttaaaaaaatgacaaat

SEQ ID NO: 23439 - DNA, 20 bp, synthetic construct
  misc_feature 1..20: note = Description of Artificial Sequence: Synthetic oligonucleotide
  misc_feature 1..20: note = Target: SCN10A; (-) strand; PAM type: NRG; PAM sequence: AAG
  source 1..20: mol_type = other DNA
aactaagacacacaaaaaga

SEQ ID NO: 23440 - DNA, 20 bp, synthetic construct
  misc_feature 1..20: note = Description of Artificial Sequence: Synthetic oligonucleotide
  misc_feature 1..20: note = Target: SCN10A; (-) strand; PAM type: NRG; PAM sequence: AAG
  source 1..20: mol_type = other DNA
cccaaactaagacacacaaa

SEQ ID NO: 23441 - DNA, 20 bp, synthetic construct
  misc_feature 1..20: note = Description of Artificial Sequence: Synthetic oligonucleotide
  misc_feature 1..20: note = Target: SCN10A; (-) strand; PAM type: NRG; PAM sequence: AAG
  source 1..20: mol_type = other DNA
gcttttaatagacccaaact

SEQ ID NO: 23442 - DNA, 20 bp, synthetic construct
  misc_feature 1..20: note = Description of Artificial Sequence: Synthetic oligonucleotide
  misc_feature 1..20: note = Target: SCN10A; (-) strand; PAM type: NRG; PAM sequence: TAG
  source 1..20: mol_type = other DNA
ctcgaagacaaagcttttaa

SEQ ID NO: 23443 - DNA, 20 bp, synthetic construct
  misc_feature 1..20: note = Description of Artificial Sequence: Synthetic oligonucleotide
  misc_feature 1..20: note = Target: SCN10A; (-) strand; PAM type: NRG; PAM sequence: AAG
  source 1..20: mol_type = other DNA
aacttcagagctcgaagaca

SEQ ID NO: 23444 - DNA, 20 bp, synthetic construct
  misc_feature 1..20: note = Description of Artificial Sequence: Synthetic oligonucleotide
  misc_feature 1..20: note = Target: SCN10A; (-) strand; PAM type: NRG; PAM sequence: AAG
  source 1..20: mol_type = other DNA
agaaagaacttcagagctcg

SEQ ID NO: 23445 - DNA, 20 bp, synthetic construct
  misc_feature 1..20: note = Description of Artificial Sequence: Synthetic oligonucleotide
  misc_feature 1..20: note = Target: SCN10A; (-) strand; PAM type: NRG; PAM sequence: GAG
  source 1..20: mol_type = other DNA
aagtagaagaaagaacttca

SEQ ID NO: 23446 - DNA, 20 bp, synthetic construct
  misc_feature 1..20: note = Description of Artificial Sequence: Synthetic oligonucleotide
  misc_feature 1..20: note = Target: SCN10A; (-) strand; PAM type: NRG; PAM sequence: CAG
  source 1..20: mol_type = other DNA
acaagtagaagaaagaactt

SEQ ID NO: 23447 - DNA, 20 bp, synthetic construct
  misc_feature 1..20: note = Description of Artificial Sequence: Synthetic oligonucleotide
  misc_feature 1..20: note = Target: SCN10A; (-) strand; PAM type: NRG; PAM sequence: AAG
  source 1..20: mol_type = other DNA
agactagaacaagtagaaga

SEQ ID NO: 23448 - DNA, 20 bp, synthetic construct
  misc_feature 1..20: note = Description of Artificial Sequence: Synthetic oligonucleotide
  misc_feature 1..20: note = Target: SCN10A; (-) strand; PAM type: NRG; PAM sequence: AAG
  source 1..20: mol_type = other DNA
caatagactagaacaagtag

SEQ ID NO: 23449 - DNA, 20 bp, synthetic construct
  misc_feature 1..20: note = Description of Artificial Sequence: Synthetic oligonucleotide
  misc_feature 1..20: note = Target: SCN10A; (-) strand; PAM type: NRG; PAM sequence: TAG
  source 1..20: mol_type = other DNA
caacaatagactagaacaag

SEQ ID NO: 23450 - DNA, 20 bp, synthetic construct
  misc_feature 1..20: note = Description of Artificial Sequence: Synthetic oligonucleotide
  misc_feature 1..20: note = Target: SCN10A; (-) strand; PAM type: NRG; PAM sequence: AAG
  source 1..20: mol_type = other DNA
tttcaacaatagactagaac

SEQ ID NO: 23451 - DNA, 20 bp, synthetic construct
  misc_feature 1..20: note = Description of Artificial Sequence: Synthetic oligonucleotide
  misc_feature 1..20: note = Target: SCN10A; (-) strand; PAM type: NRG; PAM sequence: TAG
  source 1..20: mol_type = other DNA
ggaaagtttcaacaatagac

SEQ ID NO: 23452 - DNA, 20 bp, synthetic construct
  misc_feature 1..20: note = Description of Artificial Sequence: Synthetic oligonucleotide
  misc_feature 1..20: note = Target: SCN10A; (-) strand; PAM type: NRG; PAM sequence: TAG
  source 1..20: mol_type = other DNA
gcagtggaaagtttcaacaa

SEQ ID NO: 23453 - DNA, 20 bp, synthetic construct
  misc_feature 1..20: note = Description of Artificial Sequence: Synthetic oligonucleotide
  misc_feature 1..20: note = Target: SCN10A; (-) strand; PAM type: NRG; PAM sequence: AAG
  source 1..20: mol_type = other DNA
gaaatacaaaatgcagtgga

SEQ ID NO: 23454 - DNA, 20 bp, synthetic construct
  misc_feature 1..20: note = Description of Artificial Sequence: Synthetic oligonucleotide
  misc_feature 1..20: note = Target: SCN10A; (-) strand; PAM type: NRG; PAM sequence: TGG
  source 1..20: mol_type = other DNA
tagagaaatacaaaatgcag

SEQ ID NO: 23455 - DNA, 20 bp, synthetic construct
  misc_feature 1..20: note = Description of Artificial Sequence: Synthetic oligonucleotide
  misc_feature 1..20: note = Target: SCN10A; (-) strand; PAM type: NRG; PAM sequence: CAG
  source 1..20: mol_type = other DNA
acttagagaaatacaaaatg

SEQ ID NO: 23456 - DNA, 20 bp, synthetic construct
  misc_feature 1..20: note = Description of Artificial Sequence: Synthetic oligonucleotide
  misc_feature 1..20: note = Target: SCN10A; (-) strand; PAM type: NRG; PAM sequence: GAG
  source 1..20: mol_type = other DNA
ggaaatggaagactcactta

SEQ ID NO: 23457 - DNA, 20 bp, synthetic construct
  misc_feature 1..20: note = Description of Artificial Sequence: Synthetic oligonucleotide
  misc_feature 1..20: note = Target: SCN10A; (-) strand; PAM type: NRG; PAM sequence: TAG
  source 1..20: mol_type = other DNA
ctggaaatggaagactcact

SEQ ID NO: 23458 - DNA, 20 bp, synthetic construct
  misc_feature 1..20: note = Description of Artificial Sequence: Synthetic oligonucleotide
  misc_feature 1..20: note = Target: SCN10A; (-) strand; PAM type: NRG; PAM sequence: AAG
  source 1..20: mol_type = other DNA
atcacaacttctggaaatgg

SEQ ID NO: 23459 - DNA, 20 bp, synthetic construct
  misc_feature 1..20: note = Description of Artificial Sequence: Synthetic oligonucleotide
  misc_feature 1..20: note = Target: SCN10A; (-) strand; PAM type: NRG; PAM sequence: TGG
  source 1..20: mol_type = other DNA
acaatcacaacttctggaaa

SEQ ID NO: 23460 - DNA, 20 bp, synthetic construct
  misc_feature 1..20: note = Description of Artificial Sequence: Synthetic oligonucleotide
  misc_feature 1..20: note = Target: SCN10A; (-) strand; PAM type: NRG; PAM sequence: TGG
  source 1..20: mol_type = other DNA
gaaaaaacaatcacaacttc

SEQ ID NO: 23461 - DNA, 20 bp, synthetic construct
  misc_feature 1..20: note = Description of Artificial Sequence: Synthetic oligonucleotide
  misc_feature 1..20: note = Target: SCN10A; (-) strand; PAM type: NRG; PAM sequence: AAG
  source 1..20: mol_type = other DNA
tctccagagaaatagatata

SEQ ID NO: 23462 - DNA, 20 bp, synthetic construct
  misc_feature 1..20: note = Description of Artificial Sequence: Synthetic oligonucleotide
  misc_feature 1..20: note = Target: SCN10A; (-) strand; PAM type: NRG; PAM sequence: TAG
  source 1..20: mol_type = other DNA
tggaaaattctccagagaaa

SEQ ID NO: 23463 - DNA, 20 bp, synthetic construct
  misc_feature 1..20: note = Description of Artificial Sequence: Synthetic oligonucleotide
  misc_feature 1..20: note = Target: SCN10A; (-) strand; PAM type: NRG; PAM sequence: GAG
  source 1..20: mol_type = other DNA
tatggatggaaaattctcca

SEQ ID NO: 23464 - DNA, 20 bp, synthetic construct
  misc_feature 1..20: note = Description of Artificial Sequence: Synthetic oligonucleotide
  misc_feature 1..20: note = Target: SCN10A; (-) strand; PAM type: NRG; PAM sequence: CAG
  source 1..20: mol_type = other DNA
gatatggatggaaaattctc

SEQ ID NO: 23465 - DNA, 20 bp, synthetic construct
  misc_feature 1..20: note = Description of Artificial Sequence: Synthetic oligonucleotide
  misc_feature 1..20: note = Target: SCN10A; (-) strand; PAM type: NRG; PAM sequence: TGG
  source 1..20: mol_type = other DNA
ttaaaacaacaagatatgga

SEQ ID NO: 23466 - DNA, 20 bp, synthetic construct
  misc_feature 1..20: note = Description of Artificial Sequence: Synthetic oligonucleotide
  misc_feature 1..20: note = Target: SCN10A; (-) strand; PAM type: NRG; PAM sequence: TGG
  source 1..20: mol_type = other DNA
atttttaaaacaacaagata

SEQ ID NO: 23467 - DNA, 20 bp, synthetic construct
  misc_feature 1..20: note = Description of Artificial Sequence: Synthetic oligonucleotide
  misc_feature 1..20: note = Target: SCN10A; (-) strand; PAM type: NRG; PAM sequence: AAG
  source 1..20: mol_type = other DNA
aaagaaatttttaaaacaac

SEQ ID NO: 23468 - DNA, 20 bp, synthetic construct
  misc_feature 1..20: note = Description of Artificial Sequence: Synthetic oligonucleotide
  misc_feature 1..20: note = Target: SCN10A; (-) strand; PAM type: NRG; PAM sequence: AAG
  source 1..20: mol_type = other DNA
gaaagataaaaaccaactta

SEQ ID NO: 23469 - DNA, 20 bp, synthetic construct
  misc_feature 1..20: note = Description of Artificial Sequence: Synthetic oligonucleotide
  misc_feature 1..20: note = Target: SCN10A; (-) strand; PAM type: NRG; PAM sequence: AAG
  source 1..20: mol_type = other DNA
attcaaggagacaccagaga

SEQ ID NO: 23470 - DNA, 20 bp, synthetic construct
  misc_feature 1..20: note = Description of Artificial Sequence: Synthetic oligonucleotide
  misc_feature 1..20: note = Target: SCN10A; (-) strand; PAM type: NRG; PAM sequence: GAG
  source 1..20: mol_type = other DNA
agtgattcaaggagacacca

SEQ ID NO: 23471 - DNA, 20 bp, synthetic construct
  misc_feature 1..20: note = Description of Artificial Sequence: Synthetic oligonucleotide
  misc_feature 1..20: note = Target: SCN10A; (-) strand; PAM type: NRG; PAM sequence: CAG
  source 1..20: mol_type = other DNA
taagtgattcaaggagacac

SEQ ID NO: 23472 - DNA, 20 bp, synthetic construct
  misc_feature 1..20: note = Description of Artificial Sequence: Synthetic oligonucleotide
  misc_feature 1..20: note = Target: SCN10A; (-) strand; PAM type: NRG; PAM sequence: GAG
  source 1..20: mol_type = other DNA
tgattattaagtgattcaag

SEQ ID NO: 23473 - DNA, 20 bp, synthetic construct
  misc_feature 1..20: note = Description of Artificial Sequence: Synthetic oligonucleotide
  misc_feature 1..20: note = Target: SCN10A; (-) strand; PAM type: NRG; PAM sequence: AGG
  source 1..20: mol_type = other DNA
gctgattattaagtgattca

SEQ ID NO: 23474 - DNA, 20 bp, synthetic construct
  misc_feature 1..20: note = Description of Artificial Sequence: Synthetic oligonucleotide
  misc_feature 1..20: note = Target: SCN10A; (-) strand; PAM type: NRG; PAM sequence: AAG
  source 1..20: mol_type = other DNA
ggctgattattaagtgattc

SEQ ID NO: 23475 - DNA, 20 bp, synthetic construct
  misc_feature 1..20: note = Description of Artificial Sequence: Synthetic oligonucleotide
  misc_feature 1..20: note = Target: SCN10A; (-) strand; PAM type: NRG; PAM sequence: AAG
  source 1..20: mol_type = other DNA
aattcagaaggctgattatt

SEQ ID NO: 23476 - DNA, 20 bp, synthetic construct
  misc_feature 1..20: note = Description of Artificial Sequence: Synthetic oligonucleotide
  misc_feature 1..20: note = Target: SCN10A; (-) strand; PAM type: NRG; PAM sequence: AGG
  source 1..20: mol_type = other DNA
aaaaaaaaaaagaattcaga

SEQ ID NO: 23477 - DNA, 20 bp, synthetic construct
  misc_feature 1..20: note = Description of Artificial Sequence: Synthetic oligonucleotide
  misc_feature 1..20: note = Target: SCN10A; (-) strand; PAM type: NRG; PAM sequence: AAG
  source 1..20: mol_type = other DNA
aaaaaaaaaaaagaattcag

SEQ ID NO: 23478 - DNA, 20 bp, synthetic construct
  misc_feature 1..20: note = Description of Artificial Sequence: Synthetic oligonucleotide
  misc_feature 1..20: note = Target: SCN10A; (-) strand; PAM type: NRG; PAM sequence: CAG
  source 1..20: mol_type = other DNA
aaaaaaaaaaaaaaagaatt

SEQ ID NO: 23479 - DNA, 20 bp, synthetic construct
  misc_feature 1..20: note = Description of Artificial Sequence: Synthetic oligonucleotide
  misc_feature 1..20: note = Target: SCN10A; (-) strand; PAM type: NRG; PAM sequence: AAG
  source 1..20: mol_type = other DNA
catctcaaaaaaaaaaaaaa

SEQ ID NO: 23480 - DNA, 20 bp, synthetic construct
  misc_feature 1..20: note = Description of Artificial Sequence: Synthetic oligonucleotide
  misc_feature 1..20: note = Target: SCN10A; (-) strand; PAM type: NRG; PAM sequence: GAG
  source 1..20: mol_type = other DNA
cactccagcctgggcaacaa

SEQ ID NO: 23481 - DNA, 20 bp, synthetic construct
  misc_feature 1..20: note = Description of Artificial Sequence: Synthetic oligonucleotide
  misc_feature 1..20: note = Target: SCN10A; (-) strand; PAM type: NRG; PAM sequence: AAG
  source 1..20: mol_type = other DNA
tgcactccagcctgggcaac

SEQ ID NO: 23482 - DNA, 20 bp, synthetic construct
  misc_feature 1..20: note = Description of Artificial Sequence: Synthetic oligonucleotide
  misc_feature 1..20: note = Target: SCN10A; (-) strand; PAM type: NRG; PAM sequence: GGG
  source 1..20: mol_type = other DNA
gcgccattgcactccagcct

SEQ ID NO: 23483 - DNA, 20 bp, synthetic construct
  misc_feature 1..20: note = Description of Artificial Sequence: Synthetic oligonucleotide
  misc_feature 1..20: note = Target: SCN10A; (-) strand; PAM type: NRG; PAM sequence: TGG
  source 1..20: mol_type = other DNA
cgcgccattgcactccagcc

SEQ ID NO: 23484 - DNA, 20 bp, synthetic construct
  misc_feature 1..20: note = Description of Artificial Sequence: Synthetic oligonucleotide
  misc_feature 1..20: note = Target: SCN10A; (-) strand; PAM type: NRG; PAM sequence: CAG
  source 1..20: mol_type = other DNA
gagatcgcgccattgcactc

SEQ ID NO: 23485 - DNA, 20 bp, synthetic construct
  misc_feature 1..20: note = Description of Artificial Sequence: Synthetic oligonucleotide
  misc_feature 1..20: note = Target: SCN10A; (-) strand; PAM type: NRG; PAM sequence: GAG
  source 1..20: mol_type = other DNA
ggcagaggttgcggtgagct

SEQ ID NO: 23486 - DNA, 20 bp, synthetic construct
  misc_feature 1..20: note = Description of Artificial Sequence: Synthetic oligonucleotide
  misc_feature 1..20: note = Target: SCN10A; (-) strand; PAM type: NRG; PAM sequence: GAG
  source 1..20: mol_type = other DNA
tgggaggcagaggttgcggt

SEQ ID NO: 23487 - DNA, 20 bp, synthetic construct
  misc_feature 1..20: note = Description of Artificial Sequence: Synthetic oligonucleotide
  misc_feature 1..20: note = Target: SCN10A; (-) strand; PAM type: NRG; PAM sequence: CGG
  source 1..20: mol_type = other DNA
aacctgggaggcagaggttg

SEQ ID NO: 23488 - DNA, 20 bp, synthetic construct
  misc_feature 1..20: note = Description of Artificial Sequence: Synthetic oligonucleotide
  misc_feature 1..20: note = Target: SCN10A; (-) strand; PAM type: NRG; PAM sequence: AGG
  source 1..20: mol_type = other DNA
tgcttgaacctgggaggcag

SEQ ID NO: 23489 - DNA, 20 bp, synthetic construct
  misc_feature 1..20: note = Description of Artificial Sequence: Synthetic oligonucleotide
  misc_feature 1..20: note = Target: SCN10A; (-) strand; PAM type: NRG; PAM sequence: GAG
  source 1..20: mol_type = other DNA
ttgcttgaacctgggaggca

SEQ ID NO: 23490 - DNA, 20 bp, synthetic construct
  misc_feature 1..20: note = Description of Artificial Sequence: Synthetic oligonucleotide
  misc_feature 1..20: note = Target: SCN10A; (-) strand; PAM type: NRG; PAM sequence: CAG
  source 1..20: mol_type = other DNA
aattgcttgaacctgggagg

SEQ ID NO: 23491 - DNA, 20 bp, synthetic construct
  misc_feature 1..20: note = Description of Artificial Sequence: Synthetic oligonucleotide
  misc_feature 1..20: note = Target: SCN10A; (-) strand; PAM type: NRG; PAM sequence: AGG
  source 1..20: mol_type = other DNA
gagaattgcttgaacctggg

SEQ ID NO: 23492 - DNA, 20 bp, synthetic construct
  misc_feature 1..20: note = Description of Artificial Sequence: Synthetic oligonucleotide
  misc_feature 1..20: note = Target: SCN10A; (-) strand; PAM type: NRG; PAM sequence: GAG
  source 1..20: mol_type = other DNA
ggagaattgcttgaacctgg

SEQ ID NO: 23493 - DNA, 20 bp, synthetic construct
  misc_feature 1..20: note = Description of Artificial Sequence: Synthetic oligonucleotide
  misc_feature 1..20: note = Target: SCN10A; (-) strand; PAM type: NRG; PAM sequence: GGG
  source 1..20: mol_type = other DNA
caggagaattgcttgaacct

SEQ ID NO: 23494 - DNA, 20 bp, synthetic construct
  misc_feature 1..20: note = Description of Artificial Sequence: Synthetic oligonucleotide
  misc_feature 1..20: note = Target: SCN10A; (-) strand; PAM type: NRG; PAM sequence: TGG
  source 1..20: mol_type = other DNA
gcaggagaattgcttgaacc

SEQ ID NO: 23495 - DNA, 20 bp, synthetic construct
  misc_feature 1..20: note = Description of Artificial Sequence: Synthetic oligonucleotide
  misc_feature 1..20: note = Target: SCN10A; (-) strand; PAM type: NRG; PAM sequence: GAG
  source 1..20: mol_type = other DNA
tactcaggagactgaggcag

SEQ ID NO: 23496 - DNA, 20 bp, synthetic construct
  misc_feature 1..20: note = Description of Artificial Sequence: Synthetic oligonucleotide
  misc_feature 1..20: note = Target: SCN10A; (-) strand; PAM type: NRG; PAM sequence: AGG
  source 1..20: mol_type = other DNA
gctactcaggagactgaggc

SEQ ID NO: 23497 - DNA, 20 bp, synthetic construct
  misc_feature 1..20: note = Description of Artificial Sequence: Synthetic oligonucleotide
  misc_feature 1..20: note = Target: SCN10A; (-) strand; PAM type: NRG; PAM sequence: CAG
  source 1..20: mol_type = other DNA
agctactcaggagactgagg

SEQ ID NO: 23498 - DNA, 20 bp, synthetic construct
  misc_feature 1..20: note = Description of Artificial Sequence: Synthetic oligonucleotide
  misc_feature 1..20: note = Target: SCN10A; (-) strand; PAM type: NRG; PAM sequence: AGG
  source 1..20: mol_type = other DNA
cccagctactcaggagactg

SEQ ID NO: 23499 - DNA, 20 bp, synthetic construct
  misc_feature 1..20: note = Description of Artificial Sequence: Synthetic oligonucleotide
  misc_feature 1..20: note = Target: SCN10A; (-) strand; PAM type: NRG; PAM sequence: GAG
  source 1..20: mol_type = other DNA
tcccagctactcaggagact

SEQ ID NO: 23500 - DNA, 20 bp, synthetic construct
  misc_feature 1..20: note = Description of Artificial Sequence: Synthetic oligonucleotide
  misc_feature 1..20: note = Target: SCN10A; (-) strand; PAM type: NRG; PAM sequence: GAG
  source 1..20: mol_type = other DNA
ctgtaatcccagctactcag

SEQ ID NO: 23501 - DNA, 20 bp, synthetic construct
  misc_feature 1..20: note = Description of Artificial Sequence: Synthetic oligonucleotide
  misc_feature 1..20: note = Target: SCN10A; (-) strand; PAM type: NRG; PAM sequence: AGG
  source 1..20: mol_type = other DNA
gcctgtaatcccagctactc

SEQ ID NO: 23502 - DNA, 20 bp, synthetic construct
  misc_feature 1..20: note = Description of Artificial Sequence: Synthetic oligonucleotide
  misc_feature 1..20: note = Target: SCN10A; (-) strand; PAM type: NRG; PAM sequence: CAG
  source 1..20: mol_type = other DNA
tgcctgtaatcccagctact

SEQ ID NO: 23503 - DNA, 20 bp, synthetic construct
  misc_feature 1..20: note = Description of Artificial Sequence: Synthetic oligonucleotide
  misc_feature 1..20: note = Target: SCN10A; (-) strand; PAM type: NRG; PAM sequence: CAG
  source 1..20: mol_type = other DNA
gtggtgcatgcctgtaatcc

SEQ ID NO: 23504 - DNA, 20 bp, synthetic construct
  misc_feature 1..20: note = Description of Artificial Sequence: Synthetic oligonucleotide
  misc_feature 1..20: note = Target: SCN10A; (-) strand; PAM type: NRG; PAM sequence: TGG
  source 1..20: mol_type = other DNA
acaaaattagctagatgtgg

SEQ ID NO: 23505 - DNA, 20 bp, synthetic construct
  misc_feature 1..20: note = Description of Artificial Sequence: Synthetic oligonucleotide
  misc_feature 1..20: note = Target: SCN10A; (-) strand; PAM type: NRG; PAM sequence: TGG
  source 1..20: mol_type = other DNA
aatacaaaattagctagatg

SEQ ID NO: 23506 - DNA, 20 bp, synthetic construct
  misc_feature 1..20: note = Description of Artificial Sequence: Synthetic oligonucleotide
  misc_feature 1..20: note = Target: SCN10A; (-) strand; PAM type: NRG; PAM sequence: TAG
  source 1..20: mol_type = other DNA
ctaaaaaatacaaaattagc

SEQ ID NO: 23507 - DNA, 20 bp, synthetic construct
  misc_feature 1..20: note = Description of Artificial Sequence: Synthetic oligonucleotide
  misc_feature 1..20: note = Target: SCN10A; (-) strand; PAM type: NRG; PAM sequence: TAG
  source 1..20: mol_type = other DNA
tctactaaaaaatacaaaat

SEQ ID NO: 23508 - DNA, 20 bp, synthetic construct
  misc_feature 1..20: note = Description of Artificial Sequence: Synthetic oligonucleotide
  misc_feature 1..20: note = Target: SCN10A; (-) strand; PAM type: NRG; PAM sequence: GAG
  source 1..20: mol_type = other DNA
accagcctgaagccaacatg

SEQ ID NO: 23509 - DNA, 20 bp, synthetic construct
  misc_feature 1..20: note = Description of Artificial Sequence: Synthetic oligonucleotide
  misc_feature 1..20: note = Target: SCN10A; (-) strand; PAM type: NRG; PAM sequence: TGG
  source 1..20: mol_type = other DNA
agaccagcctgaagccaaca

SEQ ID NO: 23510 - DNA, 20 bp, synthetic construct
  misc_feature 1..20: note = Description of Artificial Sequence: Synthetic oligonucleotide
  misc_feature 1..20: note = Target: SCN10A; (-) strand; PAM type: NRG; PAM sequence: AAG
  source 1..20: mol_type = other DNA
agaagttcaagaccagcctg

SEQ ID NO: 23511 - DNA, 20 bp, synthetic construct
  misc_feature 1..20: note = Description of Artificial Sequence: Synthetic oligonucleotide
  misc_feature 1..20: note = Target: SCN10A; (-) strand; PAM type: NRG; PAM sequence: CAG
  source 1..20: mol_type = other DNA
tgaggtcagaagttcaagac

SEQ ID NO: 23512 - DNA, 20 bp, synthetic construct
  misc_feature 1..20: note = Description of Artificial Sequence: Synthetic oligonucleotide
  misc_feature 1..20: note = Target: SCN10A; (-) strand; PAM type: NRG; PAM sequence: AAG
  source 1..20: mol_type = other DNA
tcacctgaggtcagaagttc

SEQ ID NO: 23513 - DNA, 20 bp, synthetic construct
  misc_feature 1..20: note = Description of Artificial Sequence: Synthetic oligonucleotide
  misc_feature 1..20: note = Target: SCN10A; (-) strand; PAM type: NRG; PAM sequence: AAG
  source 1..20: mol_type = other DNA
ggcagatcacctgaggtcag

SEQ ID NO: 23514 - DNA, 20 bp, synthetic construct
  misc_feature 1..20: note = Description of Artificial Sequence: Synthetic oligonucleotide
  misc_feature 1..20: note = Target: SCN10A; (-) strand; PAM type: NRG; PAM sequence: CAG
  source 1..20: mol_type = other DNA
gtgggcagatcacctgaggt

SEQ ID NO: 23515 - DNA, 20 bp, synthetic construct
  misc_feature 1..20: note = Description of Artificial Sequence: Synthetic oligonucleotide
  misc_feature 1..20: note = Target: SCN10A; (-) strand; PAM type: NRG; PAM sequence: AGG
  source 1..20: mol_type = other DNA
caaggtgggcagatcacctg

SEQ ID NO: 23516 - DNA, 20 bp, synthetic construct
  misc_feature 1..20: note = Description of Artificial Sequence: Synthetic oligonucleotide
  misc_feature 1..20: note = Target: SCN10A; (-) strand; PAM type: NRG; PAM sequence: GAG
  source 1..20: mol_type = other DNA
ccaaggtgggcagatcacct

SEQ ID NO: 23517 - DNA, 20 bp, synthetic construct
  misc_feature 1..20: note = Description of Artificial Sequence: Synthetic oligonucleotide
  misc_feature 1..20: note = Target: SCN10A; (-) strand; PAM type: NRG; PAM sequence: CAG
  source 1..20: mol_type = other DNA
ctttgggaggccaaggtggg

SEQ ID NO: 23518 - DNA, 20 bp, synthetic construct
  misc_feature 1..20: note = Description of Artificial Sequence: Synthetic oligonucleotide
  misc_feature 1..20: note = Target: SCN10A; (-) strand; PAM type: NRG; PAM sequence: GGG
  source 1..20: mol_type = other DNA
gcactttgggaggccaaggt

SEQ ID NO: 23519 - DNA, 20 bp, synthetic construct
  misc_feature 1..20: note = Description of Artificial Sequence: Synthetic oligonucleotide
  misc_feature 1..20: note = Target: SCN10A; (-) strand; PAM type: NRG; PAM sequence: TGG
  source 1..20: mol_type = other DNA
agcactttgggaggccaagg

SEQ ID NO: 23520 - DNA, 20 bp, synthetic construct
  misc_feature 1..20: note = Description of Artificial Sequence: Synthetic oligonucleotide
  misc_feature 1..20: note = Target: SCN10A; (-) strand; PAM type: NRG; PAM sequence: AGG
  source 1..20: mol_type = other DNA
ctcagcactttgggaggcca

SEQ ID NO: 23521 - DNA, 20 bp, synthetic construct
  misc_feature 1..20: note = Description of Artificial Sequence: Synthetic oligonucleotide
  misc_feature 1..20: note = Target: SCN10A; (-) strand; PAM type: NRG; PAM sequence: AAG
  source 1..20: mol_type = other DNA
tctcagcactttgggaggcc

SEQ ID NO: 23522 - DNA, 20 bp, synthetic construct
  misc_feature 1..20: note = Description of Artificial Sequence: Synthetic oligonucleotide
  misc_feature 1..20: note = Target: SCN10A; (-) strand; PAM type: NRG; PAM sequence: AGG
  source 1..20: mol_type = other DNA
tgtaatctcagcactttggg

SEQ ID NO: 23523 - DNA, 20 bp, synthetic construct
  misc_feature 1..20: note = Description of Artificial Sequence: Synthetic oligonucleotide
  misc_feature 1..20: note = Target: SCN10A; (-) strand; PAM type: NRG; PAM sequence: GAG
  source 1..20: mol_type = other DNA
ctgtaatctcagcactttgg

SEQ ID NO: 23524 - DNA, 20 bp, synthetic construct
  misc_feature 1..20: note = Description of Artificial Sequence: Synthetic oligonucleotide
  misc_feature 1..20: note = Target: SCN10A; (-) strand; PAM type: NRG; PAM sequence: GGG
  source 1..20: mol_type = other DNA
gcctgtaatctcagcacttt

SEQ ID NO: 23525 - DNA, 20 bp, synthetic construct
  misc_feature 1..20: note = Description of Artificial Sequence: Synthetic oligonucleotide
  misc_feature 1..20: note = Target: SCN10A; (-) strand; PAM type: NRG; PAM sequence: TGG
  source 1..20: mol_type = other DNA
cgcctgtaatctcagcactt

SEQ ID NO: 23526 - DNA, 20 bp, synthetic construct
  misc_feature 1..20: note = Description of Artificial Sequence: Synthetic oligonucleotide
  misc_feature 1..20: note = Target: SCN10A; (-) strand; PAM type: NRG; PAM sequence: CAG
  source 1..20: mol_type = other DNA
gtagctcacgcctgtaatct

SEQ ID NO: 23527 - DNA, 20 bp, synthetic construct
  misc_feature 1..20: note = Description of Artificial Sequence: Synthetic oligonucleotide
  misc_feature 1..20: note = Target: SCN10A; (-) strand; PAM type: NRG; PAM sequence: TAG
  source 1..20: mol_type = other DNA
gaattcagggctgggcacag

SEQ ID NO: 23528 - DNA, 20 bp, synthetic construct
  misc_feature 1..20: note = Description of Artificial Sequence: Synthetic oligonucleotide
  misc_feature 1..20: note = Target: SCN10A; (-) strand; PAM type: NRG; PAM sequence: CAG
  source 1..20: mol_type = other DNA
aaagaattcagggctgggca

SEQ ID NO: 23529 - DNA, 20 bp, synthetic construct
  misc_feature 1..20: note = Description of Artificial Sequence: Synthetic oligonucleotide
  misc_feature 1..20: note = Target: SCN10A; (-) strand; PAM type: NRG; PAM sequence: GGG
  source 1..20: mol_type = other DNA
cagataaagaattcagggct

SEQ ID NO: 23530 - DNA, 20 bp, synthetic construct
  misc_feature 1..20: note = Description of Artificial Sequence: Synthetic oligonucleotide
  misc_feature 1..20: note = Target: SCN10A; (-) strand; PAM type: NRG; PAM sequence: TGG
  source 1..20: mol_type = other DNA
ccagataaagaattcagggc

SEQ ID NO: 23531 - DNA, 20 bp, synthetic construct
  misc_feature 1..20: note = Description of Artificial Sequence: Synthetic oligonucleotide
  misc_feature 1..20: note = Target: SCN10A; (-) strand; PAM type: NRG; PAM sequence: GGG
  source 1..20: mol_type = other DNA
attgccagataaagaattca

SEQ ID NO: 23532 - DNA, 20 bp, synthetic construct
  misc_feature 1..20: note = Description of Artificial Sequence: Synthetic oligonucleotide
  misc_feature 1..20: note = Target: SCN10A; (-) strand; PAM type: NRG; PAM sequence: AGG
  source 1..20: mol_type = other DNA
aattgccagataaagaattc

SEQ ID NO: 23533 - DNA, 20 bp, synthetic construct
  misc_feature 1..20: note = Description of Artificial Sequence: Synthetic oligonucleotide
  misc_feature 1..20: note = Target: SCN10A; (-) strand; PAM type: NRG; PAM sequence: CAG
  source 1..20: mol_type = other DNA
gaattgccagataaagaatt

SEQ ID NO: 23534 - DNA, 20 bp, synthetic construct
  misc_feature 1..20: note = Description of Artificial Sequence: Synthetic oligonucleotide
  misc_feature 1..20: note = Target: SCN10A; (-) strand; PAM type: NRG; PAM sequence: AAG
  source 1..20: mol_type = other DNA
aatctctgaattgccagata

SEQ ID NO: 23535 - DNA, 20 bp, synthetic construct
  misc_feature 1..20: note = Description of Artificial Sequence: Synthetic oligonucleotide
  misc_feature 1..20: note = Target: SCN10A; (-) strand; PAM type: NRG; PAM sequence: CAG
  source 1..20: mol_type = other DNA
agaagaaatctctgaattgc

SEQ ID NO: 23536 - DNA, 20 bp, synthetic construct
  misc_feature 1..20: note = Description of Artificial Sequence: Synthetic oligonucleotide
  misc_feature 1..20: note = Target: SCN10A; (-) strand; PAM type: NRG; PAM sequence: AAG
  source 1..20: mol_type = other DNA
aacaatggatccaaactaag

SEQ ID NO: 23537 - DNA, 20 bp, synthetic construct
  misc_feature 1..20: note = Description of Artificial Sequence: Synthetic oligonucleotide
  misc_feature 1..20: note = Target: SCN10A; (-) strand; PAM type: NRG; PAM sequence: AAG
  source 1..20: mol_type = other DNA
cccaacaatggatccaaact

SEQ ID NO: 23538 - DNA, 20 bp, synthetic construct
  misc_feature 1..20: note = Description of Artificial Sequence: Synthetic oligonucleotide
  misc_feature 1..20: note = Target: SCN10A; (-) strand; PAM type: NRG; PAM sequence: TGG
  source 1..20: mol_type = other DNA
tcaaactagctccccaacaa

SEQ ID NO: 23539 - DNA, 20 bp, synthetic construct
  misc_feature 1..20: note = Description of Artificial Sequence: Synthetic oligonucleotide
  misc_feature 1..20: note = Target: SCN10A; (-) strand; PAM type: NRG; PAM sequence: TAG
  source 1..20: mol_type = other DNA
cacccctcaaaagatcaaac

SEQ ID NO: 23540 - DNA, 20 bp, synthetic construct
  misc_feature 1..20: note = Description of Artificial Sequence: Synthetic oligonucleotide
  misc_feature 1..20: note = Target: SCN10A; (-) strand; PAM type: NRG; PAM sequence: AAG
  source 1..20: mol_type = other DNA
ggttcaataacacccctcaa

SEQ ID NO: 23541 - DNA, 20 bp, synthetic construct
  misc_feature 1..20: note = Description of Artificial Sequence: Synthetic oligonucleotide
  misc_feature 1..20: note = Target: SCN10A; (-) strand; PAM type: NRG; PAM sequence: GGG
  source 1..20: mol_type = other DNA
tctggtaatatgacaaaaga

SEQ ID NO: 23542 - DNA, 20 bp, synthetic construct
  misc_feature 1..20: note = Description of Artificial Sequence: Synthetic oligonucleotide
  misc_feature 1..20: note = Target: SCN10A; (-) strand; PAM type: NRG; PAM sequence: AGG
  source 1..20: mol_type = other DNA
ttctggtaatatgacaaaag

SEQ ID NO: 23543 - DNA, 20 bp, synthetic construct
  misc_feature 1..20: note = Description of Artificial Sequence: Synthetic oligonucleotide
  misc_feature 1..20: note = Target: SCN10A; (-) strand; PAM type: NRG; PAM sequence: GAG
  source 1..20: mol_type = other DNA
attctggtaatatgacaaaa

SEQ ID NO: 23544 - DNA, 20 bp, synthetic construct
  misc_feature 1..20: note = Description of Artificial Sequence: Synthetic oligonucleotide
  misc_feature 1..20: note = Target: SCN10A; (-) strand; PAM type: NRG; PAM sequence: AAG
  source 1..20: mol_type = other DNA
caattctggtaatatgacaa

SEQ ID NO: 23545 - DNA, 20 bp, synthetic construct
  misc_feature 1..20: note = Description of Artificial Sequence: Synthetic oligonucleotide
  misc_feature 1..20: note = Target: SCN10A; (-) strand; PAM type: NRG; PAM sequence: TGG
  source 1..20: mol_type = other DNA
aggaaccagaaaagcaattc

SEQ ID NO: 23546 - DNA, 20 bp, synthetic construct
  misc_feature 1..20: note = Description of Artificial Sequence: Synthetic oligonucleotide
  misc_feature 1..20: note = Target: SCN10A; (-) strand; PAM type: NRG; PAM sequence: AAG
  source 1..20: mol_type = other DNA
caaatgagaaggaaccagaa

SEQ ID NO: 23547 - DNA, 20 bp, synthetic construct
  misc_feature 1..20: note = Description of Artificial Sequence: Synthetic oligonucleotide
  misc_feature 1..20: note = Target: SCN10A; (-) strand; PAM type: NRG; PAM sequence: CAG
  source 1..20: mol_type = other DNA
ctactcaaatgagaaggaac

SEQ ID NO: 23548 - DNA, 20 bp, synthetic construct
  misc_feature 1..20: note = Description of Artificial Sequence: Synthetic oligonucleotide
  misc_feature 1..20: note = Target: SCN10A; (-) strand; PAM type: NRG; PAM sequence: AGG
  source 1..20: mol_type = other DNA
aatagtctactcaaatgaga

SEQ ID NO: 23549 - DNA, 20 bp, synthetic construct
  misc_feature 1..20: note = Description of Artificial Sequence: Synthetic oligonucleotide
  misc_feature 1..20: note = Target: SCN10A; (-) strand; PAM type: NRG; PAM sequence: AAG
  source 1..20: mol_type = other DNA
aaatagtctactcaaatgag

SEQ ID NO: 23550 - DNA, 20 bp, synthetic construct
  misc_feature 1..20: note = Description of Artificial Sequence: Synthetic oligonucleotide
  misc_feature 1..20: note = Target: SCN10A; (-) strand; PAM type: NRG; PAM sequence: GAG
  source 1..20: mol_type = other DNA
ctgaaatagtctactcaaat

SEQ ID NO: 23551 - DNA, 20 bp, synthetic construct
  misc_feature 1..20: note = Description of Artificial Sequence: Synthetic oligonucleotide
  misc_feature 1..20: note = Target: SCN10A; (-) strand; PAM type: NRG; PAM sequence: TAG
  source 1..20: mol_type = other DNA
tccagatcttttctctgaaa

SEQ ID NO: 23552 - DNA, 20 bp, synthetic construct
  misc_feature 1..20: note = Description of Artificial Sequence: Synthetic oligonucleotide
  misc_feature 1..20: note = Target: SCN10A; (-) strand; PAM type: NRG; PAM sequence: CAG
  source 1..20: mol_type = other DNA
gcacaacagccattcagttc

SEQ ID NO: 23553 - DNA, 20 bp, synthetic construct
  misc_feature 1..20: note = Description of Artificial Sequence: Synthetic oligonucleotide
  misc_feature 1..20: note = Target: SCN10A; (-) strand; PAM type: NRG; PAM sequence: CAG
  source 1..20: mol_type = other DNA
gaatctgcacaacagccatt

SEQ ID NO: 23554 - DNA, 20 bp, synthetic construct
  misc_feature 1..20: note = Description of Artificial Sequence: Synthetic oligonucleotide
  misc_feature 1..20: note = Target: SCN10A; (-) strand; PAM type: NRG; PAM sequence: CAG
  source 1..20: mol_type = other DNA
aaacaaaagaatctgcacaa

SEQ ID NO: 23555 - DNA, 20 bp, synthetic construct
  misc_feature 1..20: note = Description of Artificial Sequence: Synthetic oligonucleotide
  misc_feature 1..20: note = Target: SCN10A; (-) strand; PAM type: NRG; PAM sequence: AAG
  source 1..20: mol_type = other DNA
agagatcacccatgaaacaa

SEQ ID NO: 23556 - DNA, 20 bp, synthetic construct
  misc_feature 1..20: note = Description of Artificial Sequence: Synthetic oligonucleotide
  misc_feature 1..20: note = Target: SCN10A; (-) strand; PAM type: NRG; PAM sequence: GAG
  source 1..20: mol_type = other DNA
tggggagagcaccacatcaa

SEQ ID NO: 23557 - DNA, 20 bp, synthetic construct
  misc_feature 1..20: note = Description of Artificial Sequence: Synthetic oligonucleotide
  misc_feature 1..20: note = Target: SCN10A; (-) strand; PAM type: NRG; PAM sequence: AAG
  source 1..20: mol_type = other DNA
attggggagagcaccacatc

SEQ ID NO: 23558 - DNA, 20 bp, synthetic construct
  misc_feature 1..20: note = Description of Artificial Sequence: Synthetic oligonucleotide
  misc_feature 1..20: note = Target: SCN10A; (-) strand; PAM type: NRG; PAM sequence: GAG
  source 1..20: mol_type = other DNA
catccccaggggattgggga

SEQ ID NO: 23559 - DNA, 20 bp, synthetic construct
  misc_feature 1..20: note = Description of Artificial Sequence: Synthetic oligonucleotide
  misc_feature 1..20: note = Target: SCN10A; (-) strand; PAM type: NRG; PAM sequence: GAG
  source 1..20: mol_type = other DNA
cccatccccaggggattggg

SEQ ID NO: 23560 - DNA, 20 bp, synthetic construct
  misc_feature 1..20: note = Description of Artificial Sequence: Synthetic oligonucleotide
  misc_feature 1..20: note = Target: SCN10A; (-) strand; PAM type: NRG; PAM sequence: GGG
  source 1..20: mol_type = other DNA
gccccatccccaggggattg

SEQ ID NO: 23561 - DNA, 20 bp, synthetic construct
  misc_feature 1..20: note = Description of Artificial Sequence: Synthetic oligonucleotide
  misc_feature 1..20: note = Target: SCN10A; (-) strand; PAM type: NRG; PAM sequence: GGG
  source 1..20: mol_type = other DNA
agccccatccccaggggatt

SEQ ID NO: 23562 - DNA, 20 bp, synthetic construct
  misc_feature 1..20: note = Description of Artificial Sequence: Synthetic oligonucleotide
  misc_feature 1..20: note = Target: SCN10A; (-) strand; PAM type: NRG; PAM sequence: TGG
  source 1..20: mol_type = other DNA
aagccccatccccaggggat

SEQ ID NO: 23563 - DNA, 20 bp, synthetic construct
  misc_feature 1..20: note = Description of Artificial Sequence: Synthetic oligonucleotide
  misc_feature 1..20: note = Target: SCN10A; (-) strand; PAM type: NRG; PAM sequence: GGG
  source 1..20: mol_type = other DNA
tcaggaagccccatccccag

SEQ ID NO: 23564 - DNA, 20 bp, synthetic construct
  misc_feature 1..20: note = Description of Artificial Sequence: Synthetic oligonucleotide
  misc_feature 1..20: note = Target: SCN10A; (-) strand; PAM type: NRG; PAM sequence: GGG
  source 1..20: mol_type = other DNA
ctcaggaagccccatcccca

SEQ ID NO: 23565 - DNA, 20 bp, synthetic construct
  misc_feature 1..20: note = Description of Artificial Sequence: Synthetic oligonucleotide
  misc_feature 1..20: note = Target: SCN10A; (-) strand; PAM type: NRG; PAM sequence: AGG
  source 1..20: mol_type = other DNA
tctcaggaagccccatcccc

SEQ ID NO: 23566 - DNA, 20 bp, synthetic construct
  misc_feature 1..20: note = Description of Artificial Sequence: Synthetic oligonucleotide
  misc_feature 1..20: note = Target: SCN10A; (-) strand; PAM type: NRG; PAM sequence: CAG
  source 1..20: mol_type = other DNA
ctctcaggaagccccatccc

SEQ ID NO: 23567 - DNA, 20 bp, synthetic construct
  misc_feature 1..20: note = Description of Artificial Sequence: Synthetic oligonucleotide
  misc_feature 1..20: note = Target: SCN10A; (-) strand; PAM type: NRG; PAM sequence: AAG
  source 1..20: mol_type = other DNA
actgcagtccagctctcagg

SEQ ID NO: 23568 - DNA, 20 bp, synthetic construct
  misc_feature 1..20: note = Description of Artificial Sequence: Synthetic oligonucleotide
  misc_feature 1..20: note = Target: SCN10A; (-) strand; PAM type: NRG; PAM sequence: AGG
  source 1..20: mol_type = other DNA
atcactgcagtccagctctc

SEQ ID NO: 23569 - DNA, 20 bp, synthetic construct
  misc_feature 1..20: note = Description of Artificial Sequence: Synthetic oligonucleotide
  misc_feature 1..20: note = Target: SCN10A; (-) strand; PAM type: NRG; PAM sequence: CAG
  source 1..20: mol_type = other DNA
gatcactgcagtccagctct

SEQ ID NO: 23570 - DNA, 20 bp, synthetic construct
  misc_feature 1..20: note = Description of Artificial Sequence: Synthetic oligonucleotide
  misc_feature 1..20: note = Target: SCN10A; (-) strand; PAM type: NRG; PAM sequence: CAG
  source 1..20: mol_type = other DNA
caataacgatcactgcagtc

SEQ ID NO: 23571 - DNA, 20 bp, synthetic construct
  misc_feature 1..20: note = Description of Artificial Sequence: Synthetic oligonucleotide
  misc_feature 1..20: note = Target: SCN10A; (-) strand; PAM type: NRG; PAM sequence: CAG
  source 1..20: mol_type = other DNA
aagaacaataacgatcactg

SEQ ID NO: 23572 - DNA, 20 bp, synthetic construct
  misc_feature 1..20: note = Description of Artificial Sequence: Synthetic oligonucleotide
  misc_feature 1..20: note = Target: SCN10A; (-) strand; PAM type: NRG; PAM sequence: AAG
  source 1..20: mol_type = other DNA
ctctgtgtggctaggcccag

SEQ ID NO: 23573 - DNA, 20 bp, synthetic construct
  misc_feature 1..20: note = Description of Artificial Sequence: Synthetic oligonucleotide
  misc_feature 1..20: note = Target: SCN10A; (-) strand; PAM type: NRG; PAM sequence: CAG
  source 1..20: mol_type = other DNA
cccctctgtgtggctaggcc

SEQ ID NO: 23574 - DNA, 20 bp, synthetic construct
  misc_feature 1..20: note = Description of Artificial Sequence: Synthetic oligonucleotide
  misc_feature 1..20: note = Target: SCN10A; (-) strand; PAM type: NRG; PAM sequence: AGG
  source 1..20: mol_type = other DNA
ggtagcccctctgtgtggct

SEQ ID NO: 23575 - DNA, 20 bp, synthetic construct
  misc_feature 1..20: note = Description of Artificial Sequence: Synthetic oligonucleotide
  misc_feature 1..20: note = Target: SCN10A; (-) strand; PAM type: NRG; PAM sequence: TAG
  source 1..20: mol_type = other DNA
tggtagcccctctgtgtggc

SEQ ID NO: 23576 - DNA, 20 bp, synthetic construct
  misc_feature 1..20: note = Description of Artificial Sequence: Synthetic oligonucleotide
  misc_feature 1..20: note = Target: SCN10A; (-) strand; PAM type: NRG; PAM sequence: TGG
  source 1..20: mol_type = other DNA
agcctggtagcccctctgtg

SEQ ID NO: 23577 - DNA, 20 bp, synthetic construct
  misc_feature 1..20: note = Description of Artificial Sequence: Synthetic oligonucleotide
  misc_feature 1..20: note = Target: SCN10A; (-) strand; PAM type: NRG; PAM sequence: TAG
  source 1..20: mol_type = other DNA
agtactaccccagagcctgg

SEQ ID NO: 23578 - DNA, 20 bp, synthetic construct
  misc_feature 1..20: note = Description of Artificial Sequence: Synthetic oligonucleotide
  misc_feature 1..20: note = Target: SCN10A; (-) strand; PAM type: NRG; PAM sequence: TGG
  source 1..20: mol_type = other DNA
cccagtactaccccagagcc

SEQ ID NO: 23579 - DNA, 20 bp, synthetic construct
  misc_feature 1..20: note = Description of Artificial Sequence: Synthetic oligonucleotide
  misc_feature 1..20: note = Target: SCN10A; (-) strand; PAM type: NRG; PAM sequence: GAG
  source 1..20: mol_type = other DNA
catttcccagtactacccca

SEQ ID NO: 23580 - DNA, 20 bp, synthetic construct
  misc_feature 1..20: note = Description of Artificial Sequence: Synthetic oligonucleotide
  misc_feature 1..20: note = Target: SCN10A; (-) strand; PAM type: NRG; PAM sequence: CAG
  source 1..20: mol_type = other DNA
ggcatttcccagtactaccc

SEQ ID NO: 23581 - DNA, 20 bp, synthetic construct
  misc_feature 1..20: note = Description of Artificial Sequence: Synthetic oligonucleotide
  misc_feature 1..20: note = Target: SCN10A; (-) strand; PAM type: NRG; PAM sequence: CAG
  source 1..20: mol_type = other DNA
ggactcttgcaggcatttcc

SEQ ID NO: 23582 - DNA, 20 bp, synthetic construct
  misc_feature 1..20: note = Description of Artificial Sequence: Synthetic oligonucleotide
  misc_feature 1..20: note = Target: SCN10A; (-) strand; PAM type: NRG; PAM sequence: AGG
  source 1..20: mol_type = other DNA
tcacatcacaggactcttgc

SEQ ID NO: 23583 - DNA, 20 bp, synthetic construct
  misc_feature 1..20: note = Description of Artificial Sequence: Synthetic oligonucleotide
  misc_feature 1..20: note = Target: SCN10A; (-) strand; PAM type: NRG; PAM sequence: CAG
  source 1..20: mol_type = other DNA
atcacatcacaggactcttg

SEQ ID NO: 23584 - DNA, 20 bp, synthetic construct
  misc_feature 1..20: note = Description of Artificial Sequence: Synthetic oligonucleotide
  misc_feature 1..20: note = Target: SCN10A; (-) strand; PAM type: NRG; PAM sequence: AGG
  source 1..20: mol_type = other DNA
ttcaagatcaatcacatcac

SEQ ID NO: 23585 - DNA, 20 bp, synthetic construct
  misc_feature 1..20: note = Description of Artificial Sequence: Synthetic oligonucleotide
  misc_feature 1..20: note = Target: SCN10A; (-) strand; PAM type: NRG; PAM sequence: CAG
  source 1..20: mol_type = other DNA
cttcaagatcaatcacatca

SEQ ID NO: 23586 - DNA, 20 bp, synthetic construct
  misc_feature 1..20: note = Description of Artificial Sequence: Synthetic oligonucleotide
  misc_feature 1..20: note = Target: SCN10A; (-) strand; PAM type: NRG; PAM sequence: AAG
  source 1..20: mol_type = other DNA
atccatggctgggagacttc

SEQ ID NO: 23587 - DNA, 20 bp, synthetic construct
  misc_feature 1..20: note = Description of Artificial Sequence: Synthetic oligonucleotide
  misc_feature 1..20: note = Target: SCN10A; (-) strand; PAM type: NRG; PAM sequence: GAG
  source 1..20: mol_type = other DNA
atgctgatatccatggctgg

SEQ ID NO: 23588 - DNA, 20 bp, synthetic construct
  misc_feature 1..20: note = Description of Artificial Sequence: Synthetic oligonucleotide
  misc_feature 1..20: note = Target: SCN10A; (-) strand; PAM type: NRG; PAM sequence: GGG
  source 1..20: mol_type = other DNA
agatgctgatatccatggct

SEQ ID NO: 23589 - DNA, 20 bp, synthetic construct
  misc_feature 1..20: note = Description of Artificial Sequence: Synthetic oligonucleotide
  misc_feature 1..20: note = Target: SCN10A; (-) strand; PAM type: NRG; PAM sequence: TGG
  source 1..20: mol_type = other DNA
cagatgctgatatccatggc

SEQ ID NO: 23590 - DNA, 20 bp, synthetic construct
  misc_feature 1..20: note = Description of Artificial Sequence: Synthetic oligonucleotide
  misc_feature 1..20: note = Target: SCN10A; (-) strand; PAM type: NRG; PAM sequence: TGG
  source 1..20: mol_type = other DNA
agaacagatgctgatatcca

SEQ ID NO: 23591 - DNA, 20 bp, synthetic construct
  misc_feature 1..20: note = Description of Artificial Sequence: Synthetic oligonucleotide
  misc_feature 1..20: note = Target: SCN10A; (-) strand; PAM type: NRG; PAM sequence: CAG
  source 1..20: mol_type = other DNA
ctctgccaccttcaccagaa

SEQ ID NO: 23592 - DNA, 20 bp, synthetic construct
  misc_feature 1..20: note = Description of Artificial Sequence: Synthetic oligonucleotide
  misc_feature 1..20: note = Target: SCN10A; (-) strand; PAM type: NRG; PAM sequence: CAG
  source 1..20: mol_type = other DNA
cattcctctgccaccttcac

SEQ ID NO: 23593 - DNA, 20 bp, synthetic construct
  misc_feature 1..20: note = Description of Artificial Sequence: Synthetic oligonucleotide
  misc_feature 1..20: note = Target: SCN10A; (-) strand; PAM type: NRG; PAM sequence: CAG
  source 1..20: mol_type = other DNA
tctacagcctaggactctca

SEQ ID NO: 23594 - DNA, 20 bp, synthetic construct
  misc_feature 1..20: note = Description of Artificial Sequence: Synthetic oligonucleotide
  misc_feature 1..20: note = Target: SCN10A; (-) strand; PAM type: NRG; PAM sequence: AGG
  source 1..20: mol_type = other DNA
actaaatctatctacagcct

SEQ ID NO: 23595 - DNA, 20 bp, synthetic construct
  misc_feature 1..20: note = Description of Artificial Sequence: Synthetic oligonucleotide
  misc_feature 1..20: note = Target: SCN10A; (-) strand; PAM type: NRG; PAM sequence: TAG
  source 1..20: mol_type = other DNA
cactaaatctatctacagcc

SEQ ID NO: 23596 - DNA, 20 bp, synthetic construct
  misc_feature 1..20: note = Description of Artificial Sequence: Synthetic oligonucleotide
  misc_feature 1..20: note = Target: SCN10A; (-) strand; PAM type: NRG; PAM sequence: CAG
  source 1..20: mol_type = other DNA
cagcacactaaatctatcta

SEQ ID NO: 23597 - DNA, 20 bp, synthetic construct
  misc_feature 1..20: note = Description of Artificial Sequence: Synthetic oligonucleotide
  misc_feature 1..20: note = Target: SCN10A; (-) strand; PAM type: NRG; PAM sequence: CAG
  source 1..20: mol_type = other DNA
taactagcattcaagaaagc

SEQ ID NO: 23598 - DNA, 20 bp, synthetic construct
  misc_feature 1..20: note = Description of Artificial Sequence: Synthetic oligonucleotide
  misc_feature 1..20: note = Target: SCN10A; (-) strand; PAM type: NRG; PAM sequence: AAG
  source 1..20: mol_type = other DNA
aacataactagcattcaaga

SEQ ID NO: 23599 - DNA, 20 bp, synthetic construct
  misc_feature 1..20: note = Description of Artificial Sequence: Synthetic oligonucleotide
  misc_feature 1..20: note = Target: SCN10A; (-) strand; PAM type: NRG; PAM sequence: AAG
  source 1..20: mol_type = other DNA
tgctaacataactagcattc

SEQ ID NO: 23600 - DNA, 20 bp, synthetic construct
  misc_feature 1..20: note = Description of Artificial Sequence: Synthetic oligonucleotide
  misc_feature 1..20: note = Target: SCN10A; (-) strand; PAM type: NRG; PAM sequence: TAG
  source 1..20: mol_type = other DNA
aacttcactgctaacataac

SEQ ID NO: 23601 - DNA, 20 bp, synthetic construct
  misc_feature 1..20: note = Description of Artificial Sequence: Synthetic oligonucleotide
  misc_feature 1..20: note = Target: SCN10A; (-) strand; PAM type: NRG; PAM sequence: GAG
  source 1..20: mol_type = other DNA
cctggctaaccagacgtcct

SEQ ID NO: 23602 - DNA, 20 bp, synthetic construct
  misc_feature 1..20: note = Description of Artificial Sequence: Synthetic oligonucleotide
  misc_feature 1..20: note = Target: SCN10A; (-) strand; PAM type: NRG; PAM sequence: CAG
  source 1..20: mol_type = other DNA
cctgcaacatcctggctaac

SEQ ID NO: 23603 - DNA, 20 bp, synthetic construct
  misc_feature 1..20: note = Description of Artificial Sequence: Synthetic oligonucleotide
  misc_feature 1..20: note = Target: SCN10A; (-) strand; PAM type: NRG; PAM sequence: TGG
  source 1..20: mol_type = other DNA
ttgcactgcctgcaacatcc

SEQ ID NO: 23604 - DNA, 20 bp, synthetic construct
  misc_feature 1..20: note = Description of Artificial Sequence: Synthetic oligonucleotide
  misc_feature 1..20: note = Target: SCN10A; (-) strand; PAM type: NRG; PAM sequence: CAG
  source 1..20: mol_type = other DNA
aggaaaaagaaaacaacaac

SEQ ID NO: 23605 - DNA, 20 bp, synthetic construct
  misc_feature 1..20: note = Description of Artificial Sequence: Synthetic oligonucleotide
  misc_feature 1..20: note = Target: SCN10A; (-) strand; PAM type: NRG; PAM sequence: AAG
  source 1..20: mol_type = other DNA
ataactttgatcccaggaaa

SEQ ID NO: 23606 - DNA, 20 bp, synthetic construct
  misc_feature 1..20: note = Description of Artificial Sequence: Synthetic oligonucleotide
  misc_feature 1..20: note = Target: SCN10A; (-) strand; PAM type: NRG; PAM sequence: AGG
  source 1..20: mol_type = other DNA
gacagaataactttgatccc

SEQ ID NO: 23607 - DNA, 20 bp, synthetic construct
  misc_feature 1..20: note = Description of Artificial Sequence: Synthetic oligonucleotide
  misc_feature 1..20: note = Target: SCN10A; (-) strand; PAM type: NRG; PAM sequence: CAG
  source 1..20: mol_type = other DNA
tgacagaataactttgatcc

SEQ ID NO: 23608 - DNA, 20 bp, synthetic construct
  misc_feature 1..20: note = Description of Artificial Sequence: Synthetic oligonucleotide
  misc_feature 1..20: note = Target: SCN10A; (-) strand; PAM type: NRG; PAM sequence: CAG
  source 1..20: mol_type = other DNA
gccattaaagcaactcatga

SEQ ID NO: 23609 - DNA, 20 bp, synthetic construct
  misc_feature 1..20: note = Description of Artificial Sequence: Synthetic oligonucleotide
  misc_feature 1..20: note = Target: SCN10A; (-) strand; PAM type: NRG; PAM sequence: AAG
  source 1..20: mol_type = other DNA
tcaaacagctcaggccatta

SEQ ID NO: 23610 - DNA, 20 bp, synthetic construct
  misc_feature 1..20: note = Description of Artificial Sequence: Synthetic oligonucleotide
  misc_feature 1..20: note = Target: SCN10A; (-) strand; PAM type: NRG; PAM sequence: AGG
  source 1..20: mol_type = other DNA
ggctggaggtcaaacagctc

SEQ ID NO: 23611 - DNA, 20 bp, synthetic construct
  misc_feature 1..20: note = Description of Artificial Sequence: Synthetic oligonucleotide
  misc_feature 1..20: note = Target: SCN10A; (-) strand; PAM type: NRG; PAM sequence: CAG
  source 1..20: mol_type = other DNA
cggctggaggtcaaacagct

SEQ ID NO: 23612 - DNA, 20 bp, synthetic construct
  misc_feature 1..20: note = Description of Artificial Sequence: Synthetic oligonucleotide
  misc_feature 1..20: note = Target: SCN10A; (-) strand; PAM type: NRG; PAM sequence: CAG
  source 1..20: mol_type = other DNA
cctaccggctggaggtcaaa

SEQ ID NO: 23613 - DNA, 20 bp, synthetic construct
  misc_feature 1..20: note = Description of Artificial Sequence: Synthetic oligonucleotide
  misc_feature 1..20: note = Target: SCN10A; (-) strand; PAM type: NRG; PAM sequence: AGG
  source 1..20: mol_type = other DNA
aagcatcacctaccggctgg

SEQ ID NO: 23614 - DNA, 20 bp, synthetic construct
  misc_feature 1..20: note = Description of Artificial Sequence: Synthetic oligonucleotide
  misc_feature 1..20: note = Target: SCN10A; (-) strand; PAM type: NRG; PAM sequence: GAG
  source 1..20: mol_type = other DNA
aaagcatcacctaccggctg

SEQ ID NO: 23615 - DNA, 20 bp, synthetic construct
  misc_feature 1..20: note = Description of Artificial Sequence: Synthetic oligonucleotide
  misc_feature 1..20: note = Target: SCN10A; (-) strand; PAM type: NRG; PAM sequence: TGG
  source 1..20: mol_type = other DNA
tgaaagcatcacctaccggc

SEQ ID NO: 23616 - DNA, 20 bp, synthetic construct
  misc_feature 1..20: note = Description of Artificial Sequence: Synthetic oligonucleotide
  misc_feature 1..20: note = Target: SCN10A; (-) strand; PAM type: NRG; PAM sequence: CGG
  source 1..20: mol_type = other DNA
ctcttgaaagcatcacctac

SEQ ID NO: 23617 - DNA, 20 bp, synthetic construct
  misc_feature 1..20: note = Description of Artificial Sequence: Synthetic oligonucleotide
  misc_feature 1..20: note = Target: SCN10A; (-) strand; PAM type: NRG; PAM sequence: AAG
  source 1..20: mol_type = other DNA
atgcactagtgctctcttga

SEQ ID NO: 23618 - DNA, 20 bp, synthetic construct
  misc_feature 1..20: note = Description of Artificial Sequence: Synthetic oligonucleotide
  misc_feature 1..20: note = Target: SCN10A; (-) strand; PAM type: NRG; PAM sequence: TAG
  source 1..20: mol_type = other DNA
tcccccttctactaatgcac

SEQ ID NO: 23619 - DNA, 20 bp, synthetic construct
  misc_feature 1..20: note = Description of Artificial Sequence: Synthetic oligonucleotide
  misc_feature 1..20: note = Target: SCN10A; (-) strand; PAM type: NRG; PAM sequence: TAG
  source 1..20: mol_type = other DNA
tggccaacttagggtgagct

SEQ ID NO: 23620 - DNA, 20 bp, synthetic construct
  misc_feature 1..20: note = Description of Artificial Sequence: Synthetic oligonucleotide
  misc_feature 1..20: note = Target: SCN10A; (-) strand; PAM type: NRG; PAM sequence: GAG
  source 1..20: mol_type = other DNA
taccctggccaacttagggt

SEQ ID NO: 23621 - DNA, 20 bp, synthetic construct
  misc_feature 1..20: note = Description of Artificial Sequence: Synthetic oligonucleotide
  misc_feature 1..20: note = Target: SCN10A; (-) strand; PAM type: NRG; PAM sequence: GGG
  source 1..20: mol_type = other DNA
tatttaccctggccaactta

SEQ ID NO: 23622 - DNA, 20 bp, synthetic construct
  misc_feature 1..20: note = Description of Artificial Sequence: Synthetic oligonucleotide
  misc_feature 1..20: note = Target: SCN10A; (-) strand; PAM type: NRG; PAM sequence: AGG
  source 1..20: mol_type = other DNA
atatttaccctggccaactt

SEQ ID NO: 23623 - DNA, 20 bp, synthetic construct
  misc_feature 1..20: note = Description of Artificial Sequence: Synthetic oligonucleotide
  misc_feature 1..20: note = Target: SCN10A; (-) strand; PAM type: NRG; PAM sequence: TAG
  source 1..20: mol_type = other DNA
aatatttaccctggccaact

SEQ ID NO: 23624 - DNA, 20 bp, synthetic construct
  misc_feature 1..20: note = Description of Artificial Sequence: Synthetic oligonucleotide
  misc_feature 1..20: note = Target: SCN10A; (-) strand; PAM type: NRG; PAM sequence: TGG
  source 1..20: mol_type = other DNA
agaaactaaaatatttaccc

SEQ ID NO: 23625 - DNA, 20 bp, synthetic construct
  misc_feature 1..20: note = Description of Artificial Sequence: Synthetic oligonucleotide
  misc_feature 1..20: note = Target: SCN10A; (-) strand; PAM type: NRG; PAM sequence: AAG
  source 1..20: mol_type = other DNA
tatggccctgctcatcacct

SEQ ID NO: 23626 - DNA, 20 bp, synthetic construct
  misc_feature 1..20: note = Description of Artificial Sequence: Synthetic oligonucleotide
  misc_feature 1..20: note = Target: SCN10A; (-) strand; PAM type: NRG; PAM sequence: TGG
  source 1..20: mol_type = other DNA
agaaactctcggaagcttta

SEQ ID NO: 23627 - DNA, 20 bp, synthetic construct
  misc_feature 1..20: note = Description of Artificial Sequence: Synthetic oligonucleotide
  misc_feature 1..20: note = Target: SCN10A; (-) strand; PAM type: NRG; PAM sequence: AAG
  source 1..20: mol_type = other DNA
caaaacccagaaactctcgg

SEQ ID NO: 23628 - DNA, 20 bp, synthetic construct
  misc_feature 1..20: note = Description of Artificial Sequence: Synthetic oligonucleotide
  misc_feature 1..20: note = Target: SCN10A; (-) strand; PAM type: NRG; PAM sequence: CGG
  source 1..20: mol_type = other DNA
acacaaaacccagaaactct

SEQ ID NO: 23629 - DNA, 20 bp, synthetic construct
  misc_feature 1..20: note = Description of Artificial Sequence: Synthetic oligonucleotide
  misc_feature 1..20: note = Target: SCN10A; (-) strand; PAM type: NRG; PAM sequence: CAG
  source 1..20: mol_type = other DNA
tggtagctgaacacaaaacc

SEQ ID NO: 23630 - DNA, 20 bp, synthetic construct
  misc_feature 1..20: note = Description of Artificial Sequence: Synthetic oligonucleotide
  misc_feature 1..20: note = Target: SCN10A; (-) strand; PAM type: NRG; PAM sequence: TAG
  source 1..20: mol_type = other DNA
tatttccctacctgccttgg

SEQ ID NO: 23631 - DNA, 20 bp, synthetic construct
  misc_feature 1..20: note = Description of Artificial Sequence: Synthetic oligonucleotide
  misc_feature 1..20: note = Target: SCN10A; (-) strand; PAM type: NRG; PAM sequence: TGG
  source 1..20: mol_type = other DNA
tggtatttccctacctgcct

SEQ ID NO: 23632 - DNA, 20 bp, synthetic construct
  misc_feature 1..20: note = Description of Artificial Sequence: Synthetic oligonucleotide
  misc_feature 1..20: note = Target: SCN10A; (-) strand; PAM type: NRG; PAM sequence: TGG
  source 1..20: mol_type = other DNA
ctacccctgcccccacctga

SEQ ID NO: 23633 - DNA, 20 bp, synthetic construct
  misc_feature 1..20: note = Description of Artificial Sequence: Synthetic oligonucleotide
  misc_feature 1..20: note = Target: SCN10A; (-) strand; PAM type: NRG; PAM sequence: TAG
  source 1..20: mol_type = other DNA
acccaagaagggtctgagtc

SEQ ID NO: 23634 - DNA, 20 bp, synthetic construct
  misc_feature 1..20: note = Description of Artificial Sequence: Synthetic oligonucleotide
  misc_feature 1..20: note = Target: SCN10A; (-) strand; PAM type: NRG; PAM sequence: GAG
  source 1..20: mol_type = other DNA
tccctacccaagaagggtct

SEQ ID NO: 23635 - DNA, 20 bp, synthetic construct
  misc_feature 1..20: note = Description of Artificial Sequence: Synthetic oligonucleotide
  misc_feature 1..20: note = Target: SCN10A; (-) strand; PAM type: NRG; PAM sequence: GGG
  source 1..20: mol_type = other DNA
cagcaatccctacccaagaa

SEQ ID NO: 23636 - DNA, 20 bp, synthetic construct
  misc_feature 1..20: note = Description of Artificial Sequence: Synthetic oligonucleotide
  misc_feature 1..20: note = Target: SCN10A; (-) strand; PAM type: NRG; PAM sequence: AGG
  source 1..20: mol_type = other DNA
acagcaatccctacccaaga

SEQ ID NO: 23637 - DNA, 20 bp, synthetic construct
  misc_feature 1..20: note = Description of Artificial Sequence: Synthetic oligonucleotide
  misc_feature 1..20: note = Target: SCN10A; (-) strand; PAM type: NRG; PAM sequence: AAG
  source 1..20: mol_type = other DNA
cacagcaatccctacccaag

SEQ ID NO: 23638 - DNA, 20 bp, synthetic construct
  misc_feature 1..20: note = Description of Artificial Sequence: Synthetic oligonucleotide
  misc_feature 1..20: note = Target: SCN10A; (-) strand; PAM type: NRG; PAM sequence: AAG
  source 1..20: mol_type = other DNA
ggccacagcaatccctaccc

SEQ ID NO: 23639 - DNA, 20 bp, synthetic construct
  misc_feature 1..20: note = Description of Artificial Sequence: Synthetic oligonucleotide
  misc_feature 1..20: note = Target: SCN10A; (-) strand; PAM type: NRG; PAM sequence: CAG
  source 1..20: mol_type = other DNA
cccatccaccacagtggcca

SEQ ID NO: 23640 - DNA, 20 bp, synthetic construct
  misc_feature 1..20: note = Description of Artificial Sequence: Synthetic oligonucleotide
  misc_feature 1..20: note = Target: SCN10A; (-) strand; PAM type: NRG; PAM sequence: TGG
  source 1..20: mol_type = other DNA
ccaacccccatccaccacag

SEQ ID NO: 23641 - DNA, 20 bp, synthetic construct
  misc_feature 1..20: note = Description of Artificial Sequence: Synthetic oligonucleotide
  misc_feature 1..20: note = Target: SCN10A; (-) strand; PAM type: NRG; PAM sequence: CAG
  source 1..20: mol_type = other DNA
gaaccaacccccatccacca

SEQ ID NO: 23642 - DNA, 20 bp, synthetic construct
  misc_feature 1..20: note = Description of Artificial Sequence: Synthetic oligonucleotide
  misc_feature 1..20: note = Target: SCN10A; (-) strand; PAM type: NRG; PAM sequence: GAG
  source 1..20: mol_type = other DNA
gaacacaaccccactggcct

SEQ ID NO: 23643 - DNA, 20 bp, synthetic construct
  misc_feature 1..20: note = Description of Artificial Sequence: Synthetic oligonucleotide
  misc_feature 1..20: note = Target: SCN10A; (-) strand; PAM type: NRG; PAM sequence: TGG
  source 1..20: mol_type = other DNA
cctctggaacacaaccccac

SEQ ID NO: 23644 - DNA, 20 bp, synthetic construct
  misc_feature 1..20: note = Description of Artificial Sequence: Synthetic oligonucleotide
  misc_feature 1..20: note = Target: SCN10A; (-) strand; PAM type: NRG; PAM sequence: TGG
  source 1..20: mol_type = other DNA
gaggcagccaaaattccctc

SEQ ID NO: 23645 - DNA, 20 bp, synthetic construct
  misc_feature 1..20: note = Description of Artificial Sequence: Synthetic oligonucleotide
  misc_feature 1..20: note = Target: SCN10A; (-) strand; PAM type: NRG; PAM sequence: CAG
  source 1..20: mol_type = other DNA
actctatggcacagcagagg

SEQ ID NO: 23646 - DNA, 20 bp, synthetic construct
  misc_feature 1..20: note = Description of Artificial Sequence: Synthetic oligonucleotide
  misc_feature 1..20: note = Target: SCN10A; (-) strand; PAM type: NRG; PAM sequence: AGG
  source 1..20: mol_type = other DNA
agaactctatggcacagcag

SEQ ID NO: 23647 - DNA, 20 bp, synthetic construct
  misc_feature 1..20: note = Description of Artificial Sequence: Synthetic oligonucleotide
  misc_feature 1..20: note = Target: SCN10A; (-) strand; PAM type: NRG; PAM sequence: GAG
  source 1..20: mol_type = other DNA
gagaactctatggcacagca

SEQ ID NO: 23648 - DNA, 20 bp, synthetic construct
  misc_feature 1..20: note = Description of Artificial Sequence: Synthetic oligonucleotide
  misc_feature 1..20: note = Target: SCN10A; (-) strand; PAM type: NRG; PAM sequence: CAG
  source 1..20: mol_type = other DNA
tggagaactctatggcacag

SEQ ID NO: 23649 - DNA, 20 bp, synthetic construct
  misc_feature 1..20: note = Description of Artificial Sequence: Synthetic oligonucleotide
  misc_feature 1..20: note = Target: SCN10A; (-) strand; PAM type: NRG; PAM sequence: CAG
  source 1..20: mol_type = other DNA
ccctggagaactctatggca

SEQ ID NO: 23650 - DNA, 20 bp, synthetic construct
  misc_feature 1..20: note = Description of Artificial Sequence: Synthetic oligonucleotide
  misc_feature 1..20: note = Target: SCN10A; (-) strand; PAM type: NRG; PAM sequence: TGG
  source 1..20: mol_type = other DNA
cacttccctggagaactcta

SEQ ID NO: 23651 - DNA, 20 bp, synthetic construct
  misc_feature 1..20: note = Description of Artificial Sequence: Synthetic oligonucleotide
  misc_feature 1..20: note = Target: SCN10A; (-) strand; PAM type: NRG; PAM sequence: GAG
  source 1..20: mol_type = other DNA
agctatcccccacttccctg

SEQ ID NO: 23652 - DNA, 20 bp, synthetic construct
  misc_feature 1..20: note = Description of Artificial Sequence: Synthetic oligonucleotide
  misc_feature 1..20: note = Target: SCN10A; (-) strand; PAM type: NRG; PAM sequence: TGG
  source 1..20: mol_type = other DNA
gcagctatcccccacttccc

SEQ ID NO: 23653 - DNA, 20 bp, synthetic construct
  misc_feature 1..20: note = Description of Artificial Sequence: Synthetic oligonucleotide
  misc_feature 1..20: note = Target: SCN10A; (-) strand; PAM type: NRG; PAM sequence: CAG
  source 1..20: mol_type = other DNA
taggtgaggcctctcactag

SEQ ID NO: 23654 - DNA, 20 bp, synthetic construct
  misc_feature 1..20: note = Description of Artificial Sequence: Synthetic oligonucleotide
  misc_feature 1..20: note = Target: SCN10A; (-) strand; PAM type: NRG; PAM sequence: TAG
  source 1..20: mol_type = other DNA
agctaggtgaggcctctcac

SEQ ID NO: 23655 - DNA, 20 bp, synthetic construct
  misc_feature 1..20: note = Description of Artificial Sequence: Synthetic oligonucleotide
  misc_feature 1..20: note = Target: SCN10A; (-) strand; PAM type: NRG; PAM sequence: AGG
  source 1..20: mol_type = other DNA
aactacatgagagctaggtg

SEQ ID NO: 23656 - DNA, 20 bp, synthetic construct
  misc_feature 1..20: note = Description of Artificial Sequence: Synthetic oligonucleotide
  misc_feature 1..20: note = Target: SCN10A; (-) strand; PAM type: NRG; PAM sequence: GAG
  source 1..20: mol_type = other DNA
caactacatgagagctaggt

SEQ ID NO: 23657 - DNA, 20 bp, synthetic construct
  misc_feature 1..20: note = Description of Artificial Sequence: Synthetic oligonucleotide
  misc_feature 1..20: note = Target: SCN10A; (-) strand; PAM type: NRG; PAM sequence: AGG
  source 1..20: mol_type = other DNA
tcaccaactacatgagagct

SEQ ID NO: 23658 - DNA, 20 bp, synthetic construct
  misc_feature 1..20: note = Description of Artificial Sequence: Synthetic oligonucleotide
  misc_feature 1..20: note = Target: SCN10A; (-) strand; PAM type: NRG; PAM sequence: TAG
  source 1..20: mol_type = other DNA
ctcaccaactacatgagagc

SEQ ID NO: 23659 - DNA, 20 bp, synthetic construct
  misc_feature 1..20: note = Description of Artificial Sequence: Synthetic oligonucleotide
  misc_feature 1..20: note = Target: SCN10A; (-) strand; PAM type: NRG; PAM sequence: GAG
  source 1..20: mol_type = other DNA
cagcctcaccaactacatga

SEQ ID NO: 23660 - DNA, 20 bp, synthetic construct
  misc_feature 1..20: note = Description of Artificial Sequence: Synthetic oligonucleotide
  misc_feature 1..20: note = Target: SCN10A; (-) strand; PAM type: NRG; PAM sequence: GAG
  source 1..20: mol_type = other DNA
accagcctcaccaactacat

SEQ ID NO: 23661 - DNA, 20 bp, synthetic construct
  misc_feature 1..20: note = Description of Artificial Sequence: Synthetic oligonucleotide
  misc_feature 1..20: note = Target: SCN10A; (-) strand; PAM type: NRG; PAM sequence: CAG
  source 1..20: mol_type = other DNA
gggcactgcaggagcaagac

SEQ ID NO: 23662 - DNA, 20 bp, synthetic construct
  misc_feature 1..20: note = Description of Artificial Sequence: Synthetic oligonucleotide
  misc_feature 1..20: note = Target: SCN10A; (-) strand; PAM type: NRG; PAM sequence: AAG
  source 1..20: mol_type = other DNA
gagtagggcactgcaggagc

SEQ ID NO: 23663 - DNA, 20 bp, synthetic construct
  misc_feature 1..20: note = Description of Artificial Sequence: Synthetic oligonucleotide
  misc_feature 1..20: note = Target: SCN10A; (-) strand; PAM type: NRG; PAM sequence: GAG
  source 1..20: mol_type = other DNA
gtctgagtagggcactgcag

SEQ ID NO: 23664 - DNA, 20 bp, synthetic construct
  misc_feature 1..20: note = Description of Artificial Sequence: Synthetic oligonucleotide
  misc_feature 1..20: note = Target: SCN10A; (-) strand; PAM type: NRG; PAM sequence: AGG
  source 1..20: mol_type = other DNA
aggtctgagtagggcactgc

SEQ ID NO: 23665 - DNA, 20 bp, synthetic construct
  misc_feature 1..20: note = Description of Artificial Sequence: Synthetic oligonucleotide
  misc_feature 1..20: note = Target: SCN10A; (-) strand; PAM type: NRG; PAM sequence: CAG
  source 1..20: mol_type = other DNA
aaggtctgagtagggcactg

SEQ ID NO: 23666 - DNA, 20 bp, synthetic construct
  misc_feature 1..20: note = Description of Artificial Sequence: Synthetic oligonucleotide
  misc_feature 1..20: note = Target: SCN10A; (-) strand; PAM type: NRG; PAM sequence: GGG
  source 1..20: mol_type = other DNA
cctggggcaaggtctgagta

SEQ ID NO: 23667 - DNA, 20 bp, synthetic construct
  misc_feature 1..20: note = Description of Artificial Sequence: Synthetic oligonucleotide
  misc_feature 1..20: note = Target: SCN10A; (-) strand; PAM type: NRG; PAM sequence: AGG
  source 1..20: mol_type = other DNA
gcctggggcaaggtctgagt

SEQ ID NO: 23668 - DNA, 20 bp, synthetic construct
  misc_feature 1..20: note = Description of Artificial Sequence: Synthetic oligonucleotide
  misc_feature 1..20: note = Target: SCN10A; (-) strand; PAM type: NRG; PAM sequence: TAG
  source 1..20: mol_type = other DNA
agcctggggcaaggtctgag

SEQ ID NO: 23669 - DNA, 20 bp, synthetic construct
  misc_feature 1..20: note = Description of Artificial Sequence: Synthetic oligonucleotide
  misc_feature 1..20: note = Target: SCN10A; (-) strand; PAM type: NRG; PAM sequence: GAG
  source 1..20: mol_type = other DNA
cacagcctggggcaaggtct

SEQ ID NO: 23670 - DNA, 20 bp, synthetic construct
  misc_feature 1..20: note = Description of Artificial Sequence: Synthetic oligonucleotide
  misc_feature 1..20: note = Target: SCN10A; (-) strand; PAM type: NRG; PAM sequence: AGG
  source 1..20: mol_type = other DNA
gaagctcacagcctggggca

SEQ ID NO: 23671 - DNA, 20 bp, synthetic construct
  misc_feature 1..20: note = Description of Artificial Sequence: Synthetic oligonucleotide
  misc_feature 1..20: note = Target: SCN10A; (-) strand; PAM type: NRG; PAM sequence: AAG
  source 1..20: mol_type = other DNA
ggaagctcacagcctggggc

SEQ ID NO: 23672 - DNA, 20 bp, synthetic construct
  misc_feature 1..20: note = Description of Artificial Sequence: Synthetic oligonucleotide
  misc_feature 1..20: note = Target: SCN10A; (-) strand; PAM type: NRG; PAM sequence: GGG
  source 1..20: mol_type = other DNA
gtggggaagctcacagcctg

SEQ ID NO: 23673 - DNA, 20 bp, synthetic construct
  misc_feature 1..20: note = Description of Artificial Sequence: Synthetic oligonucleotide
  misc_feature 1..20: note = Target: SCN10A; (-) strand; PAM type: NRG; PAM sequence: GGG
  source 1..20: mol_type = other DNA
agtggggaagctcacagcct

SEQ ID NO: 23674 - DNA, 20 bp, synthetic construct
  misc_feature 1..20: note = Description of Artificial Sequence: Synthetic oligonucleotide
  misc_feature 1..20: note = Target: SCN10A; (-) strand; PAM type: NRG; PAM sequence: TGG
  source 1..20: mol_type = other DNA
cagtggggaagctcacagcc

SEQ ID NO: 23675 - DNA, 20 bp, synthetic construct
  misc_feature 1..20: note = Description of Artificial Sequence: Synthetic oligonucleotide
  misc_feature 1..20: note = Target: SCN10A; (-) strand; PAM type: NRG; PAM sequence: CAG
  source 1..20: mol_type = other DNA
tttctcagtggggaagctca

SEQ ID NO: 23676 - DNA, 20 bp, synthetic construct
  misc_feature 1..20: note = Description of Artificial Sequence: Synthetic oligonucleotide
  misc_feature 1..20: note = Target: SCN10A; (-) strand; PAM type: NRG; PAM sequence: AAG
  source 1..20: mol_type = other DNA
tgctttctttctcagtgggg

SEQ ID NO: 23677 - DNA, 20 bp, synthetic construct
  misc_feature 1..20: note = Description of Artificial Sequence: Synthetic oligonucleotide
  misc_feature 1..20: note = Target: SCN10A; (-) strand; PAM type: NRG; PAM sequence: GGG
  source 1..20: mol_type = other DNA
tcatgctttctttctcagtg

SEQ ID NO: 23678 - DNA, 20 bp, synthetic construct
  misc_feature 1..20: note = Description of Artificial Sequence: Synthetic oligonucleotide
  misc_feature 1..20: note = Target: SCN10A; (-) strand; PAM type: NRG; PAM sequence: GGG
  source 1..20: mol_type = other DNA
gtcatgctttctttctcagt

SEQ ID NO: 23679 - DNA, 20 bp, synthetic construct
  misc_feature 1..20: note = Description of Artificial Sequence: Synthetic oligonucleotide
  misc_feature 1..20: note = Target: SCN10A; (-) strand; PAM type: NRG; PAM sequence: TGG
  source 1..20: mol_type = other DNA
agtcatgctttctttctcag

SEQ ID NO: 23680 - DNA, 20 bp, synthetic construct
  misc_feature 1..20: note = Description of Artificial Sequence: Synthetic oligonucleotide
  misc_feature 1..20: note = Target: SCN10A; (-) strand; PAM type: NRG; PAM sequence: CAG
  source 1..20: mol_type = other DNA
aaaagtcatgctttctttct

SEQ ID NO: 23681 - DNA, 20 bp, synthetic construct
  misc_feature 1..20: note = Description of Artificial Sequence: Synthetic oligonucleotide
  misc_feature 1..20: note = Target: SCN10A; (-) strand; PAM type: NRG; PAM sequence: AAG
  source 1..20: mol_type = other DNA
cagtgagggatgcggtccaa

SEQ ID NO: 23682 - DNA, 20 bp, synthetic construct
  misc_feature 1..20: note = Description of Artificial Sequence: Synthetic oligonucleotide
  misc_feature 1..20: note = Target: SCN10A; (-) strand; PAM type: NRG; PAM sequence: CGG
  source 1..20: mol_type = other DNA
caagcagacagtgagggatg

SEQ ID NO: 23683 - DNA, 20 bp, synthetic construct
  misc_feature 1..20: note = Description of Artificial Sequence: Synthetic oligonucleotide
  misc_feature 1..20: note = Target: SCN10A; (-) strand; PAM type: NRG; PAM sequence: GGG
  source 1..20: mol_type = other DNA
gaactgcaagcagacagtga

SEQ ID NO: 23684 - DNA, 20 bp, synthetic construct
  misc_feature 1..20: note = Description of Artificial Sequence: Synthetic oligonucleotide
  misc_feature 1..20: note = Target: SCN10A; (-) strand; PAM type: NRG; PAM sequence: AGG
  source 1..20: mol_type = other DNA
ggaactgcaagcagacagtg

SEQ ID NO: 23685 - DNA, 20 bp, synthetic construct
  misc_feature 1..20: note = Description of Artificial Sequence: Synthetic oligonucleotide
  misc_feature 1..20: note = Target: SCN10A; (-) strand; PAM type: NRG; PAM sequence: GAG
  source 1..20: mol_type = other DNA
gggaactgcaagcagacagt

SEQ ID NO: 23686 - DNA, 20 bp, synthetic construct
  misc_feature 1..20: note = Description of Artificial Sequence: Synthetic oligonucleotide
  misc_feature 1..20: note = Target: SCN10A; (-) strand; PAM type: NRG; PAM sequence: CAG
  source 1..20: mol_type = other DNA
aaatgggaactgcaagcaga

SEQ ID NO: 23687 - DNA, 20 bp, synthetic construct
  misc_feature 1..20: note = Description of Artificial Sequence: Synthetic oligonucleotide
  misc_feature 1..20: note = Target: SCN10A; (-) strand; PAM type: NRG; PAM sequence: CAG
  source 1..20: mol_type = other DNA
gggcaaatgggaactgcaag

SEQ ID NO: 23688 - DNA, 20 bp, synthetic construct
  misc_feature 1..20: note = Description of Artificial Sequence: Synthetic oligonucleotide
  misc_feature 1..20: note = Target: SCN10A; (-) strand; PAM type: NRG; PAM sequence: AAG
  source 1..20: mol_type = other DNA
agggggcaaatgggaactgc

SEQ ID NO: 23689 - DNA, 20 bp, synthetic construct
  misc_feature 1..20: note = Description of Artificial Sequence: Synthetic oligonucleotide
  misc_feature 1..20: note = Target: SCN10A; (-) strand; PAM type: NRG; PAM sequence: GGG
  source 1..20: mol_type = other DNA
gcagaatccagggggcaaat

SEQ ID NO: 23690 - DNA, 20 bp, synthetic construct
  misc_feature 1..20: note = Description of Artificial Sequence: Synthetic oligonucleotide
  misc_feature 1..20: note = Target: SCN10A; (-) strand; PAM type: NRG; PAM sequence: TGG
  source 1..20: mol_type = other DNA
agcagaatccagggggcaaa

SEQ ID NO: 23691 - DNA, 20 bp, synthetic construct
  misc_feature 1..20: note = Description of Artificial Sequence: Synthetic oligonucleotide
  misc_feature 1..20: note = Target: SCN10A; (-) strand; PAM type: NRG; PAM sequence: GGG
  source 1..20: mol_type = other DNA
tttcttgagcagaatccagg

SEQ ID NO: 23692 - DNA, 20 bp, synthetic construct
  misc_feature 1..20: note = Description of Artificial Sequence: Synthetic oligonucleotide
  misc_feature 1..20: note = Target: SCN10A; (-) strand; PAM type: NRG; PAM sequence: GGG
  source 1..20: mol_type = other DNA
ttttcttgagcagaatccag

SEQ ID NO: 23693 - DNA, 20 bp, synthetic construct
  misc_feature 1..20: note = Description of Artificial Sequence: Synthetic oligonucleotide
  misc_feature 1..20: note = Target: SCN10A; (-) strand; PAM type: NRG; PAM sequence: GGG
  source 1..20: mol_type = other DNA
attttcttgagcagaatcca

SEQ ID NO: 23694 - DNA, 20 bp, synthetic construct
  misc_feature 1..20: note = Description of Artificial Sequence: Synthetic oligonucleotide
  misc_feature 1..20: note = Target: SCN10A; (-) strand; PAM type: NRG; PAM sequence: AGG
  source 1..20: mol_type = other DNA
aattttcttgagcagaatcc

SEQ ID NO: 23695 - DNA, 20 bp, synthetic construct
  misc_feature 1..20: note = Description of Artificial Sequence: Synthetic oligonucleotide
  misc_feature 1..20: note = Target: SCN10A; (-) strand; PAM type: NRG; PAM sequence: CAG
  source 1..20: mol_type = other DNA
aaattttcttgagcagaatc

SEQ ID NO: 23696 - DNA, 20 bp, synthetic construct
  misc_feature 1..20: note = Description of Artificial Sequence: Synthetic oligonucleotide
  misc_feature 1..20: note = Target: SCN10A; (-) strand; PAM type: NRG; PAM sequence: CAG
  source 1..20: mol_type = other DNA
tgggcacaaattttcttgag

SEQ ID NO: 23697 - DNA, 20 bp, synthetic construct
  misc_feature 1..20: note = Description of Artificial Sequence: Synthetic oligonucleotide
  misc_feature 1..20: note = Target: SCN10A; (-) strand; PAM type: NRG; PAM sequence: GAG
  source 1..20: mol_type = other DNA
aactgggcacaaattttctt

SEQ ID NO: 23698 - DNA, 20 bp, synthetic construct
  misc_feature 1..20: note = Description of Artificial Sequence: Synthetic oligonucleotide
  misc_feature 1..20: note = Target: SCN10A; (-) strand; PAM type: NRG; PAM sequence: GGG
  source 1..20: mol_type = other DNA
aattagtaataatttcaact

SEQ ID NO: 23699 - DNA, 20 bp, synthetic construct
  misc_feature 1..20: note = Description of Artificial Sequence: Synthetic oligonucleotide
  misc_feature 1..20: note = Target: SCN10A; (-) strand; PAM type: NRG; PAM sequence: TGG
  source 1..20: mol_type = other DNA
aaattagtaataatttcaac

SEQ ID NO: 23700 - DNA, 20 bp, synthetic construct
  misc_feature 1..20: note = Description of Artificial Sequence: Synthetic oligonucleotide
  misc_feature 1..20: note = Target: SCN10A; (-) strand; PAM type: NRG; PAM sequence: TAG
  source 1..20: mol_type = other DNA
aaagaagtttcaactaaaat

SEQ ID NO: 23701 - DNA, 20 bp, synthetic construct
  misc_feature 1..20: note = Description of Artificial Sequence: Synthetic oligonucleotide
  misc_feature 1..20: note = Target: SCN10A; (-) strand; PAM type: NRG; PAM sequence: AAG
  source 1..20: mol_type = other DNA
gaggggtcacaggatgaaag

SEQ ID NO: 23702 - DNA, 20 bp, synthetic construct
  misc_feature 1..20: note = Description of Artificial Sequence: Synthetic oligonucleotide
  misc_feature 1..20: note = Target: SCN10A; (-) strand; PAM type: NRG; PAM sequence: AAG
  source 1..20: mol_type = other DNA
agggaggggtcacaggatga

SEQ ID NO: 23703 - DNA, 20 bp, synthetic construct
  misc_feature 1..20: note = Description of Artificial Sequence: Synthetic oligonucleotide
  misc_feature 1..20: note = Target: SCN10A; (-) strand; PAM type: NRG; PAM sequence: AGG
  source 1..20: mol_type = other DNA
tggaatcagggaggggtcac

SEQ ID NO: 23704 - DNA, 20 bp, synthetic construct
  misc_feature 1..20: note = Description of Artificial Sequence: Synthetic oligonucleotide
  misc_feature 1..20: note = Target: SCN10A; (-) strand; PAM type: NRG; PAM sequence: CAG
  source 1..20: mol_type = other DNA
gtggaatcagggaggggtca

SEQ ID NO: 23705 - DNA, 20 bp, synthetic construct
  misc_feature 1..20: note = Description of Artificial Sequence: Synthetic oligonucleotide
  misc_feature 1..20: note = Target: SCN10A; (-) strand; PAM type: NRG; PAM sequence: GGG
  source 1..20: mol_type = other DNA
cagccagtggaatcagggag

SEQ ID NO: 23706 - DNA, 20 bp, synthetic construct
  misc_feature 1..20: note = Description of Artificial Sequence: Synthetic oligonucleotide
  misc_feature 1..20: note = Target: SCN10A; (-) strand; PAM type: NRG; PAM sequence: GGG
  source 1..20: mol_type = other DNA
gcagccagtggaatcaggga

SEQ ID NO: 23707 - DNA, 20 bp, synthetic construct
  misc_feature 1..20: note = Description of Artificial Sequence: Synthetic oligonucleotide
  misc_feature 1..20: note = Target: SCN10A; (-) strand; PAM type: NRG; PAM sequence: AGG
  source 1..20: mol_type = other DNA
ggcagccagtggaatcaggg

SEQ ID NO: 23708 - DNA, 20 bp, synthetic construct
  misc_feature 1..20: note = Description of Artificial Sequence: Synthetic oligonucleotide
  misc_feature 1..20: note = Target: SCN10A; (-) strand; PAM type: NRG; PAM sequence: GAG
  source 1..20: mol_type = other DNA
aggcagccagtggaatcagg

SEQ ID NO: 23709 - DNA, 20 bp, synthetic construct
  misc_feature 1..20: note = Description of Artificial Sequence: Synthetic oligonucleotide
  misc_feature 1..20: note = Target: SCN10A; (-) strand; PAM type: NRG; PAM sequence: GGG
  source 1..20: mol_type = other DNA
gaaggcagccagtggaatca

SEQ ID NO: 23710 - DNA, 20 bp, synthetic construct
  misc_feature 1..20: note = Description of Artificial Sequence: Synthetic oligonucleotide
  misc_feature 1..20: note = Target: SCN10A; (-) strand; PAM type: NRG; PAM sequence: AGG
  source 1..20: mol_type = other DNA
ggaaggcagccagtggaatc

SEQ ID NO: 23711 - DNA, 20 bp, synthetic construct
  misc_feature 1..20: note = Description of Artificial Sequence: Synthetic oligonucleotide
  misc_feature 1..20: note = Target: SCN10A; (-) strand; PAM type: NRG; PAM sequence: CAG
  source 1..20: mol_type = other DNA
gggaaggcagccagtggaat

SEQ ID NO: 23712 - DNA, 20 bp, synthetic construct
  misc_feature 1..20: note = Description of Artificial Sequence: Synthetic oligonucleotide
  misc_feature 1..20: note = Target: SCN10A; (-) strand; PAM type: NRG; PAM sequence: TGG
  source 1..20: mol_type = other DNA
cccttggggaaggcagccag

SEQ ID NO: 23713 - DNA, 20 bp, synthetic construct
  misc_feature 1..20: note = Description of Artificial Sequence: Synthetic oligonucleotide
  misc_feature 1..20: note = Target: SCN10A; (-) strand; PAM type: NRG; PAM sequence: CAG
  source 1..20: mol_type = other DNA
gcacccttggggaaggcagc

SEQ ID NO: 23714 - DNA, 20 bp, synthetic construct
  misc_feature 1..20: note = Description of Artificial Sequence: Synthetic oligonucleotide
  misc_feature 1..20: note = Target: SCN10A; (-) strand; PAM type: NRG; PAM sequence: CAG
  source 1..20: mol_type = other DNA
acaggcacccttggggaagg

SEQ ID NO: 23715 - DNA, 20 bp, synthetic construct
  misc_feature 1..20: note = Description of Artificial Sequence: Synthetic oligonucleotide
  misc_feature 1..20: note = Target: SCN10A; (-) strand; PAM type: NRG; PAM sequence: AGG
  source 1..20: mol_type = other DNA
ctcacaggcacccttgggga

SEQ ID NO: 23716 - DNA, 20 bp, synthetic construct
  misc_feature 1..20: note = Description of Artificial Sequence: Synthetic oligonucleotide
  misc_feature 1..20: note = Target: SCN10A; (-) strand; PAM type: NRG; PAM sequence: AAG
  source 1..20: mol_type = other DNA
tctcacaggcacccttgggg

SEQ ID NO: 23717 - DNA, 20 bp, synthetic construct
  misc_feature 1..20: note = Description of Artificial Sequence: Synthetic oligonucleotide
  misc_feature 1..20: note = Target: SCN10A; (-) strand; PAM type: NRG; PAM sequence: GGG
  source 1..20: mol_type = other DNA
atgtctcacaggcacccttg

SEQ ID NO: 23718 - DNA, 20 bp, synthetic construct
  misc_feature 1..20: note = Description of Artificial Sequence: Synthetic oligonucleotide
  misc_feature 1..20: note = Target: SCN10A; (-) strand; PAM type: NRG; PAM sequence: GGG
  source 1..20: mol_type = other DNA
tatgtctcacaggcaccctt

SEQ ID NO: 23719 - DNA, 20 bp, synthetic construct
  misc_feature 1..20: note = Description of Artificial Sequence: Synthetic oligonucleotide
  misc_feature 1..20: note = Target: SCN10A; (-) strand; PAM type: NRG; PAM sequence: TGG
  source 1..20: mol_type = other DNA
ctatgtctcacaggcaccct

SEQ ID NO: 23720 - DNA, 20 bp, synthetic construct
  misc_feature 1..20: note = Description of Artificial Sequence: Synthetic oligonucleotide
  misc_feature 1..20: note = Target: SCN10A; (-) strand; PAM type: NRG; PAM sequence: AGG
  source 1..20: mol_type = other DNA
catccctgactatgtctcac

SEQ ID NO: 23721 - DNA, 20 bp, synthetic construct
  misc_feature 1..20: note = Description of Artificial Sequence: Synthetic oligonucleotide
  misc_feature 1..20: note = Target: SCN10A; (-) strand; PAM type: NRG; PAM sequence: CAG
  source 1..20: mol_type = other DNA
ccatccctgactatgtctca

SEQ ID NO: 23722 - DNA, 20 bp, synthetic construct
  misc_feature 1..20: note = Description of Artificial Sequence: Synthetic oligonucleotide
  misc_feature 1..20: note = Target: SCN10A; (-) strand; PAM type: NRG; PAM sequence: GGG
  source 1..20: mol_type = other DNA
cagtctccagcttgagacca

SEQ ID NO: 23723 - DNA, 20 bp, synthetic construct
  misc_feature 1..20: note = Description of Artificial Sequence: Synthetic oligonucleotide
  misc_feature 1..20: note = Target: SCN10A; (-) strand; PAM type: NRG; PAM sequence: AGG
  source 1..20: mol_type = other DNA
ccagtctccagcttgagacc

SEQ ID NO: 23724 - DNA, 20 bp, synthetic construct
  misc_feature 1..20: note = Description of Artificial Sequence: Synthetic oligonucleotide
  misc_feature 1..20: note = Target: SCN10A; (-) strand; PAM type: NRG; PAM sequence: CAG
  source 1..20: mol_type = other DNA
cccagtctccagcttgagac

SEQ ID NO: 23725 - DNA, 20 bp, synthetic construct
  misc_feature 1..20: note = Description of Artificial Sequence: Synthetic oligonucleotide
  misc_feature 1..20: note = Target: SCN10A; (-) strand; PAM type: NRG; PAM sequence: GAG
  source 1..20: mol_type = other DNA
gcactcccagtctccagctt

SEQ ID NO: 23726 - DNA, 20 bp, synthetic construct
  misc_feature 1..20: note = Description of Artificial Sequence: Synthetic oligonucleotide
  misc_feature 1..20: note = Target: SCN10A; (-) strand; PAM type: NRG; PAM sequence: CAG
  source 1..20: mol_type = other DNA
ttgtaggcactcccagtctc

SEQ ID NO: 23727 - DNA, 20 bp, synthetic construct
  misc_feature 1..20: note = Description of Artificial Sequence: Synthetic oligonucleotide
  misc_feature 1..20: note = Target: SCN10A; (-) strand; PAM type: NRG; PAM sequence: CAG
  source 1..20: mol_type = other DNA
aagtgccttgtaggcactcc

SEQ ID NO: 23728 - DNA, 20 bp, synthetic construct
  misc_feature 1..20: note = Description of Artificial Sequence: Synthetic oligonucleotide
  misc_feature 1..20: note = Target: SCN10A; (-) strand; PAM type: NRG; PAM sequence: AGG
  source 1..20: mol_type = other DNA
agcaaagggaagtgccttgt

SEQ ID NO: 23729 - DNA, 20 bp, synthetic construct
  misc_feature 1..20: note = Description of Artificial Sequence: Synthetic oligonucleotide
  misc_feature 1..20: note = Target: SCN10A; (-) strand; PAM type: NRG; PAM sequence: TAG
  source 1..20: mol_type = other DNA
cagcaaagggaagtgccttg

SEQ ID NO: 23730 - DNA, 20 bp, synthetic construct
  misc_feature 1..20: note = Description of Artificial Sequence: Synthetic oligonucleotide
  misc_feature 1..20: note = Target: SCN10A; (-) strand; PAM type: NRG; PAM sequence: AAG
  source 1..20: mol_type = other DNA
aaagtagaaacagcaaaggg

SEQ ID NO: 23731 - DNA, 20 bp, synthetic construct
  misc_feature 1..20: note = Description of Artificial Sequence: Synthetic oligonucleotide
  misc_feature 1..20: note = Target: SCN10A; (-) strand; PAM type: NRG; PAM sequence: GGG
  source 1..20: mol_type = other DNA
ataaaagtagaaacagcaaa

SEQ ID NO: 23732 - DNA, 20 bp, synthetic construct
  misc_feature 1..20: note = Description of Artificial Sequence: Synthetic oligonucleotide
  misc_feature 1..20: note = Target: SCN10A; (-) strand; PAM type: NRG; PAM sequence: AGG
  source 1..20: mol_type = other DNA
tataaaagtagaaacagcaa

SEQ ID NO: 23733 - DNA, 20 bp, synthetic construct
  misc_feature 1..20: note = Description of Artificial Sequence: Synthetic oligonucleotide
  misc_feature 1..20: note = Target: SCN10A; (-) strand; PAM type: NRG; PAM sequence: AAG
  source 1..20: mol_type = other DNA
atataaaagtagaaacagca

SEQ ID NO: 23734 - DNA, 20 bp, synthetic construct
  misc_feature 1..20: note = Description of Artificial Sequence: Synthetic oligonucleotide
  misc_feature 1..20: note = Target: SCN10A; (-) strand; PAM type: NRG; PAM sequence: CAG
  source 1..20: mol_type = other DNA
acaaaatataaaagtagaaa

SEQ ID NO: 23735 - DNA, 20 bp, synthetic construct
  misc_feature 1..20: note = Description of Artificial Sequence: Synthetic oligonucleotide
  misc_feature 1..20: note = Target: SCN10A; (-) strand; PAM type: NRG; PAM sequence: TAG
  source 1..20: mol_type = other DNA
agccacacaaaatataaaag

SEQ ID NO: 23736 - DNA, 20 bp, synthetic construct
  misc_feature 1..20: note = Description of Artificial Sequence: Synthetic oligonucleotide
  misc_feature 1..20: note = Target: SCN10A; (-) strand; PAM type: NRG; PAM sequence: AAG
  source 1..20: mol_type = other DNA
ggaagccacacaaaatataa

SEQ ID NO: 23737 - DNA, 20 bp, synthetic construct
  misc_feature 1..20: note = Description of Artificial Sequence: Synthetic oligonucleotide
  misc_feature 1..20: note = Target: SCN10A; (-) strand; PAM type: NRG; PAM sequence: AAG
  source 1..20: mol_type = other DNA
ggaatgtaaataaatttagg

SEQ ID NO: 23738 - DNA, 20 bp, synthetic construct
  misc_feature 1..20: note = Description of Artificial Sequence: Synthetic oligonucleotide
  misc_feature 1..20: note = Target: SCN10A; (-) strand; PAM type: NRG; PAM sequence: AGG
  source 1..20: mol_type = other DNA
cctggaatgtaaataaattt

SEQ ID NO: 23739 - DNA, 20 bp, synthetic construct
  misc_feature 1..20: note = Description of Artificial Sequence: Synthetic oligonucleotide
  misc_feature 1..20: note = Target: SCN10A; (-) strand; PAM type: NRG; PAM sequence: TAG
  source 1..20: mol_type = other DNA
acctggaatgtaaataaatt

SEQ ID NO: 23740 - DNA, 20 bp, synthetic construct
  misc_feature 1..20: note = Description of Artificial Sequence: Synthetic oligonucleotide
  misc_feature 1..20: note = Target: SCN10A; (-) strand; PAM type: NRG; PAM sequence: TGG
  source 1..20: mol_type = other DNA
gagaagaatttacccttacc

SEQ ID NO: 23741 - DNA, 20 bp, synthetic construct
  misc_feature 1..20: note = Description of Artificial Sequence: Synthetic oligonucleotide
  misc_feature 1..20: note = Target: SCN10A; (-) strand; PAM type: NRG; PAM sequence: AAG
  source 1..20: mol_type = other DNA
gaaaatccagatcacaggag

SEQ ID NO: 23742 - DNA, 20 bp, synthetic construct
  misc_feature 1..20: note = Description of Artificial Sequence: Synthetic oligonucleotide
  misc_feature 1..20: note = Target: SCN10A; (-) strand; PAM type: NRG; PAM sequence: GAG
  source 1..20: mol_type = other DNA
tctgaaaatccagatcacag

SEQ ID NO: 23743 - DNA, 20 bp, synthetic construct
  misc_feature 1..20: note = Description of Artificial Sequence: Synthetic oligonucleotide
  misc_feature 1..20: note = Target: SCN10A; (-) strand; PAM type: NRG; PAM sequence: AGG
  source 1..20: mol_type = other DNA
aatctgaaaatccagatcac

SEQ ID NO: 23744 - DNA, 20 bp, synthetic construct
  misc_feature 1..20: note = Description of Artificial Sequence: Synthetic oligonucleotide
  misc_feature 1..20: note = Target: SCN10A; (-) strand; PAM type: NRG; PAM sequence: CAG
  source 1..20: mol_type = other DNA
taatctgaaaatccagatca

SEQ ID NO: 23745 - DNA, 20 bp, synthetic construct
  misc_feature 1..20: note = Description of Artificial Sequence: Synthetic oligonucleotide
  misc_feature 1..20: note = Target: SCN10A; (-) strand; PAM type: NRG; PAM sequence: CAG
  source 1..20: mol_type = other DNA
aactgggtaatctgaaaatc

SEQ ID NO: 23746 - DNA, 20 bp, synthetic construct
  misc_feature 1..20: note = Description of Artificial Sequence: Synthetic oligonucleotide
  misc_feature 1..20: note = Target: SCN10A; (-) strand; PAM type: NRG; PAM sequence: GGG
  source 1..20: mol_type = other DNA
tccaaacatacatcccaact

SEQ ID NO: 23747 - DNA, 20 bp, synthetic construct
  misc_feature 1..20: note = Description of Artificial Sequence: Synthetic oligonucleotide
  misc_feature 1..20: note = Target: SCN10A; (-) strand; PAM type: NRG; PAM sequence: TGG
  source 1..20: mol_type = other DNA
ctccaaacatacatcccaac

SEQ ID NO: 23748 - DNA, 20 bp, synthetic construct
  misc_feature 1..20: note = Description of Artificial Sequence: Synthetic oligonucleotide
  misc_feature 1..20: note = Target: SCN10A; (-) strand; PAM type: NRG; PAM sequence: GGG
  source 1..20: mol_type = other DNA
agctcccaaagtgtgagggg

SEQ ID NO: 23749 - DNA, 20 bp, synthetic construct
  misc_feature 1..20: note = Description of Artificial Sequence: Synthetic oligonucleotide
  misc_feature 1..20: note = Target: SCN10A; (-) strand; PAM type: NRG; PAM sequence: GGG
  source 1..20: mol_type = other DNA
gagctcccaaagtgtgaggg

SEQ ID NO: 23750 - DNA, 20 bp, synthetic construct
  misc_feature 1..20: note = Description of Artificial Sequence: Synthetic oligonucleotide
  misc_feature 1..20: note = Target: SCN10A; (-) strand; PAM type: NRG; PAM sequence: GGG
  source 1..20: mol_type = other DNA
tgagctcccaaagtgtgagg

SEQ ID NO: 23751 - DNA, 20 bp, synthetic construct
  misc_feature 1..20: note = Description of Artificial Sequence: Synthetic oligonucleotide
  misc_feature 1..20: note = Target: SCN10A; (-) strand; PAM type: NRG; PAM sequence: GGG
  source 1..20: mol_type = other DNA
gtgagctcccaaagtgtgag

SEQ ID NO: 23752 - DNA, 20 bp, synthetic construct
  misc_feature 1..20: note = Description of Artificial Sequence: Synthetic oligonucleotide
  misc_feature 1..20: note = Target: SCN10A; (-) strand; PAM type: NRG; PAM sequence: GGG
  source 1..20: mol_type = other DNA
tgtgagctcccaaagtgtga

SEQ ID NO: 23753 - DNA, 20 bp, synthetic construct
  misc_feature 1..20: note = Description of Artificial Sequence: Synthetic oligonucleotide
  misc_feature 1..20: note = Target: SCN10A; (-) strand; PAM type: NRG; PAM sequence: AGG
  source 1..20: mol_type = other DNA
ctgtgagctcccaaagtgtg

SEQ ID NO: 23754 - DNA, 20 bp, synthetic construct
  misc_feature 1..20: note = Description of Artificial Sequence: Synthetic oligonucleotide
  misc_feature 1..20: note = Target: SCN10A; (-) strand; PAM type: NRG; PAM sequence: GAG
  source 1..20: mol_type = other DNA
actgtgagctcccaaagtgt

SEQ ID NO: 23755 - DNA, 20 bp, synthetic construct
  misc_feature 1..20: note = Description of Artificial Sequence: Synthetic oligonucleotide
  misc_feature 1..20: note = Target: SCN10A; (-) strand; PAM type: NRG; PAM sequence: AAG
  source 1..20: mol_type = other DNA
tgaaaaactgtgagctccca

SEQ ID NO: 23756 - DNA, 20 bp, synthetic construct
  misc_feature 1..20: note = Description of Artificial Sequence: Synthetic oligonucleotide
  misc_feature 1..20: note = Target: SCN10A; (-) strand; PAM type: NRG; PAM sequence: GAG
  source 1..20: mol_type = other DNA
caagacaggtgaaaaactgt

SEQ ID NO: 23757 - DNA, 20 bp, synthetic construct
  misc_feature 1..20: note = Description of Artificial Sequence: Synthetic oligonucleotide
  misc_feature 1..20: note = Target: SCN10A; (-) strand; PAM type: NRG; PAM sequence: AGG
  source 1..20: mol_type = other DNA
tgctggaaattctgcaagac

SEQ ID NO: 23758 - DNA, 20 bp, synthetic construct
  misc_feature 1..20: note = Description of Artificial Sequence: Synthetic oligonucleotide
  misc_feature 1..20: note = Target: SCN10A; (-) strand; PAM type: NRG; PAM sequence: CAG
  source 1..20: mol_type = other DNA
ctgctggaaattctgcaaga

SEQ ID NO: 23759 - DNA, 20 bp, synthetic construct
  misc_feature 1..20: note = Description of Artificial Sequence: Synthetic oligonucleotide
  misc_feature 1..20: note = Target: SCN10A; (-) strand; PAM type: NRG; PAM sequence: AAG
  source 1..20: mol_type = other DNA
cacactgctggaaattctgc

SEQ ID NO: 23760 - DNA, 20 bp, synthetic construct
  misc_feature 1..20: note = Description of Artificial Sequence: Synthetic oligonucleotide
  misc_feature 1..20: note = Target: SCN10A; (-) strand; PAM type: NRG; PAM sequence: TGG
  source 1..20: mol_type = other DNA
ttaaataagtggcacactgc

SEQ ID NO: 23761 - DNA, 20 bp, synthetic construct
  misc_feature 1..20: note = Description of Artificial Sequence: Synthetic oligonucleotide
  misc_feature 1..20: note = Target: SCN10A; (-) strand; PAM type: NRG; PAM sequence: TGG
  source 1..20: mol_type = other DNA
catagatccttttaaataag

SEQ ID NO: 23762 - DNA, 20 bp, synthetic construct
  misc_feature 1..20: note = Description of Artificial Sequence: Synthetic oligonucleotide
  misc_feature 1..20: note = Target: SCN10A; (-) strand; PAM type: NRG; PAM sequence: AAG
  source 1..20: mol_type = other DNA
attcatagatccttttaaat

SEQ ID NO: 23763 - DNA, 20 bp, synthetic construct
  misc_feature 1..20: note = Description of Artificial Sequence: Synthetic oligonucleotide
  misc_feature 1..20: note = Target: SCN10A; (-) strand; PAM type: NRG; PAM sequence: TAG
  source 1..20: mol_type = other DNA
aggagaactgaaagaattca

SEQ ID NO: 23764 - DNA, 20 bp, synthetic construct
  misc_feature 1..20: note = Description of Artificial Sequence: Synthetic oligonucleotide
  misc_feature 1..20: note = Target: SCN10A; (-) strand; PAM type: NRG; PAM sequence: AAG
  source 1..20: mol_type = other DNA
gaatataccaggagaactga

SEQ ID NO: 23765 - DNA, 20 bp, synthetic construct
  misc_feature 1..20: note = Description of Artificial Sequence: Synthetic oligonucleotide
  misc_feature 1..20: note = Target: SCN10A; (-) strand; PAM type: NRG; PAM sequence: GAG
  source 1..20: mol_type = other DNA
ccactgcaggaatataccag

SEQ ID NO: 23766 - DNA, 20 bp, synthetic construct
  misc_feature 1..20: note = Description of Artificial Sequence: Synthetic oligonucleotide
  misc_feature 1..20: note = Target: SCN10A; (-) strand; PAM type: NRG; PAM sequence: AGG
  source 1..20: mol_type = other DNA
aaccactgcaggaatatacc

SEQ ID NO: 23767 - DNA, 20 bp, synthetic construct
  misc_feature 1..20: note = Description of Artificial Sequence: Synthetic oligonucleotide
  misc_feature 1..20: note = Target: SCN10A; (-) strand; PAM type: NRG; PAM sequence: CAG
  source 1..20: mol_type = other DNA
gaaccactgcaggaatatac

SEQ ID NO: 23768 - DNA, 20 bp, synthetic construct
  misc_feature 1..20: note = Description of Artificial Sequence: Synthetic oligonucleotide
  misc_feature 1..20: note = Target: SCN10A; (-) strand; PAM type: NRG; PAM sequence: AGG
  source 1..20: mol_type = other DNA
tttgctccaagaaccactgc

SEQ ID NO: 23769 - DNA, 20 bp, synthetic construct
  misc_feature 1..20: note = Description of Artificial Sequence: Synthetic oligonucleotide
  misc_feature 1..20: note = Target: SCN10A; (-) strand; PAM type: NRG; PAM sequence: CAG
  source 1..20: mol_type = other DNA
gtttgctccaagaaccactg

SEQ ID NO: 23770 - DNA, 20 bp, synthetic construct
  misc_feature 1..20: note = Description of Artificial Sequence: Synthetic oligonucleotide
  misc_feature 1..20: note = Target: SCN10A; (-) strand; PAM type: NRG; PAM sequence: AAG
  source 1..20: mol_type = other DNA
acaccatgaacgtttgctcc

SEQ ID NO: 23771 - DNA, 20 bp, synthetic construct
  misc_feature 1..20: note = Description of Artificial Sequence: Synthetic oligonucleotide
  misc_feature 1..20: note = Target: SCN10A; (-) strand; PAM type: NRG; PAM sequence: GAG
  source 1..20: mol_type = other DNA
tcccacttggacagagtgtg

SEQ ID NO: 23772 - DNA, 20 bp, synthetic construct
  misc_feature 1..20: note = Description of Artificial Sequence: Synthetic oligonucleotide
  misc_feature 1..20: note = Target: SCN10A; (-) strand; PAM type: NRG; PAM sequence: TGG
  source 1..20: mol_type = other DNA
ggtcccacttggacagagtg

SEQ ID NO: 23773 - DNA, 20 bp, synthetic construct
  misc_feature 1..20: note = Description of Artificial Sequence: Synthetic oligonucleotide
  misc_feature 1..20: note = Target: SCN10A; (-) strand; PAM type: NRG; PAM sequence: GAG
  source 1..20: mol_type = other DNA
atgcaggtcccacttggaca

SEQ ID NO: 23774 - DNA, 20 bp, synthetic construct
  misc_feature 1..20: note = Description of Artificial Sequence: Synthetic oligonucleotide
  misc_feature 1..20: note = Target: SCN10A; (-) strand; PAM type: NRG; PAM sequence: CAG
  source 1..20: mol_type = other DNA
acatgcaggtcccacttgga

SEQ ID NO: 23775 - DNA, 20 bp, synthetic construct
  misc_feature 1..20: note = Description of Artificial Sequence: Synthetic oligonucleotide
  misc_feature 1..20: note = Target: SCN10A; (-) strand; PAM type: NRG; PAM sequence: TGG
  source 1..20: mol_type = other DNA
gctaacatgcaggtcccact

SEQ ID NO: 23776 - DNA, 20 bp, synthetic construct
  misc_feature 1..20: note = Description of Artificial Sequence: Synthetic oligonucleotide
  misc_feature 1..20: note = Target: SCN10A; (-) strand; PAM type: NRG; PAM sequence: AGG
  source 1..20: mol_type = other DNA
aggagacagggctaacatgc

SEQ ID NO: 23777 - DNA, 20 bp, synthetic construct
  misc_feature 1..20: note = Description of Artificial Sequence: Synthetic oligonucleotide
  misc_feature 1..20: note = Target: SCN10A; (-) strand; PAM type: NRG; PAM sequence: CAG
  source 1..20: mol_type = other DNA
taggagacagggctaacatg

SEQ ID NO: 23778 - DNA, 20 bp, synthetic construct
  misc_feature 1..20: note = Description of Artificial Sequence: Synthetic oligonucleotide
  misc_feature 1..20: note = Target: SCN10A; (-) strand; PAM type: NRG; PAM sequence: GGG
  source 1..20: mol_type = other DNA
aaaatggtgggtaggagaca

SEQ ID NO: 23779 - DNA, 20 bp, synthetic construct
  misc_feature 1..20: note = Description of Artificial Sequence: Synthetic oligonucleotide
  misc_feature 1..20: note = Target: SCN10A; (-) strand; PAM type: NRG; PAM sequence: AGG
  source 1..20: mol_type = other DNA
caaaatggtgggtaggagac

SEQ ID NO: 23780 - DNA, 20 bp, synthetic construct
  misc_feature 1..20: note = Description of Artificial Sequence: Synthetic oligonucleotide
  misc_feature 1..20: note = Target: SCN10A; (-) strand; PAM type: NRG; PAM sequence: CAG
  source 1..20: mol_type = other DNA
acaaaatggtgggtaggaga

SEQ ID NO: 23781 - DNA, 20 bp, synthetic construct
  misc_feature 1..20: note = Description of Artificial Sequence: Synthetic oligonucleotide
  misc_feature 1..20: note = Target: SCN10A; (-) strand; PAM type: NRG; PAM sequence: GAG
  source 1..20: mol_type = other DNA
ggggacaaaatggtgggtag

SEQ ID NO: 23782 - DNA, 20 bp, synthetic construct
  misc_feature 1..20: note = Description of Artificial Sequence: Synthetic oligonucleotide
  misc_feature 1..20: note = Target: SCN10A; (-) strand; PAM type: NRG; PAM sequence: AGG
  source 1..20: mol_type = other DNA
gaggggacaaaatggtgggt

SEQ ID NO: 23783 - DNA, 20 bp, synthetic construct
  misc_feature 1..20: note = Description of Artificial Sequence: Synthetic oligonucleotide
  misc_feature 1..20: note = Target: SCN10A; (-) strand; PAM type: NRG; PAM sequence: TAG
  source 1..20: mol_type = other DNA
agaggggacaaaatggtggg

SEQ ID NO: 23784 - DNA, 20 bp, synthetic construct
  misc_feature 1..20: note = Description of Artificial Sequence: Synthetic oligonucleotide
  misc_feature 1..20: note = Target: SCN10A; (-) strand; PAM type: NRG; PAM sequence: GGG
  source 1..20: mol_type = other DNA
aggagaggggacaaaatggt

SEQ ID NO: 23785 - DNA, 20 bp, synthetic construct
  misc_feature 1..20: note = Description of Artificial Sequence: Synthetic oligonucleotide
  misc_feature 1..20: note = Target: SCN10A; (-) strand; PAM type: NRG; PAM sequence: TGG
  source 1..20: mol_type = other DNA
taggagaggggacaaaatgg

SEQ ID NO: 23786 - DNA, 20 bp, synthetic construct
  misc_feature 1..20: note = Description of Artificial Sequence: Synthetic oligonucleotide
  misc_feature 1..20: note = Target: SCN10A; (-) strand; PAM type: NRG; PAM sequence: TGG
  source 1..20: mol_type = other DNA
tgataggagaggggacaaaa

SEQ ID NO: 23787 - DNA, 20 bp, synthetic construct
  misc_feature 1..20: note = Description of Artificial Sequence: Synthetic oligonucleotide
  misc_feature 1..20: note = Target: SCN10A; (-) strand; PAM type: NRG; PAM sequence: GGG
  source 1..20: mol_type = other DNA
ctgcatgtgtgataggagag

SEQ ID NO: 23788 - DNA, 20 bp, synthetic construct
  misc_feature 1..20: note = Description of Artificial Sequence: Synthetic oligonucleotide
  misc_feature 1..20: note = Target: SCN10A; (-) strand; PAM type: NRG; PAM sequence: GGG
  source 1..20: mol_type = other DNA
tctgcatgtgtgataggaga

SEQ ID NO: 23789 - DNA, 20 bp, synthetic construct
  misc_feature 1..20: note = Description of Artificial Sequence: Synthetic oligonucleotide
  misc_feature 1..20: note = Target: SCN10A; (-) strand; PAM type: NRG; PAM sequence: AGG
  source 1..20: mol_type = other DNA
atctgcatgtgtgataggag

SEQ ID NO: 23790 - DNA, 20 bp, synthetic construct
  misc_feature 1..20: note = Description of Artificial Sequence: Synthetic oligonucleotide
  misc_feature 1..20: note = Target: SCN10A; (-) strand; PAM type: NRG; PAM sequence: GAG
  source 1..20: mol_type = other DNA
gatctgcatgtgtgatagga

SEQ ID NO: 23791 - DNA, 20 bp, synthetic construct
  misc_feature 1..20: note = Description of Artificial Sequence: Synthetic oligonucleotide
  misc_feature 1..20: note = Target: SCN10A; (-) strand; PAM type: NRG; PAM sequence: GAG
  source 1..20: mol_type = other DNA
cagatctgcatgtgtgatag

SEQ ID NO: 23792 - DNA, 20 bp, synthetic construct
  misc_feature 1..20: note = Description of Artificial Sequence: Synthetic oligonucleotide
  misc_feature 1..20: note = Target: SCN10A; (-) strand; PAM type: NRG; PAM sequence: AGG
  source 1..20: mol_type = other DNA
tgcagatctgcatgtgtgat

SEQ ID NO: 23793 - DNA, 20 bp, synthetic construct
  misc_feature 1..20: note = Description of Artificial Sequence: Synthetic oligonucleotide
  misc_feature 1..20: note = Target: SCN10A; (-) strand; PAM type: NRG; PAM sequence: TAG
  source 1..20: mol_type = other DNA
atgcagatctgcatgtgtga

SEQ ID NO: 23794 - DNA, 20 bp, synthetic construct
  misc_feature 1..20: note = Description of Artificial Sequence: Synthetic oligonucleotide
  misc_feature 1..20: note = Target: SCN10A; (-) strand; PAM type: NRG; PAM sequence: CAG
  source 1..20: mol_type = other DNA
ggcgtgagtatatctctatg

SEQ ID NO: 23795 - DNA, 20 bp, synthetic construct
  misc_feature 1..20: note = Description of Artificial Sequence: Synthetic oligonucleotide
  misc_feature 1..20: note = Target: SCN10A; (-) strand; PAM type: NRG; PAM sequence: GAG
  source 1..20: mol_type = other DNA
tagcgtcattaccctggcgt

SEQ ID NO: 23796 - DNA, 20 bp, synthetic construct
  misc_feature 1..20: note = Description of Artificial Sequence: Synthetic oligonucleotide
  misc_feature 1..20: note = Target: SCN10A; (-) strand; PAM type: NRG; PAM sequence: TGG
  source 1..20: mol_type = other DNA
ggattttagcgtcattaccc

SEQ ID NO: 23797 - DNA, 20 bp, synthetic construct
  misc_feature 1..20: note = Description of Artificial Sequence: Synthetic oligonucleotide
  misc_feature 1..20: note = Target: SCN10A; (-) strand; PAM type: NRG; PAM sequence: TAG
  source 1..20: mol_type = other DNA
ccttggaactggctggattt

SEQ ID NO: 23798 - DNA, 20 bp, synthetic construct
  misc_feature 1..20: note = Description of Artificial Sequence: Synthetic oligonucleotide
  misc_feature 1..20: note = Target: SCN10A; (-) strand; PAM type: NRG; PAM sequence: TGG
  source 1..20: mol_type = other DNA
gagagatccttggaactggc

SEQ ID NO: 23799 - DNA, 20 bp, synthetic construct
  misc_feature 1..20: note = Description of Artificial Sequence: Synthetic oligonucleotide
  misc_feature 1..20: note = Target: SCN10A; (-) strand; PAM type: NRG; PAM sequence: TGG
  source 1..20: mol_type = other DNA
acctgagagatccttggaac

SEQ ID NO: 23800 - DNA, 20 bp, synthetic construct
  misc_feature 1..20: note = Description of Artificial Sequence: Synthetic oligonucleotide
  misc_feature 1..20: note = Target: SCN10A; (-) strand; PAM type: NRG; PAM sequence: TGG
  source 1..20: mol_type = other DNA
tcacgtacctgagagatcct

SEQ ID NO: 23801 - DNA, 20 bp, synthetic construct
  misc_feature 1..20: note = Description of Artificial Sequence: Synthetic oligonucleotide
  misc_feature 1..20: note = Target: SCN10A; (-) strand; PAM type: NRG; PAM sequence: GAG
  source 1..20: mol_type = other DNA
aaatgagttcacgtacctga

SEQ ID NO: 23802 - DNA, 20 bp, synthetic construct
  misc_feature 1..20: note = Description of Artificial Sequence: Synthetic oligonucleotide
  misc_feature 1..20: note = Target: SCN10A; (-) strand; PAM type: NRG; PAM sequence: GAG
  source 1..20: mol_type = other DNA
ctaaatgagttcacgtacct

SEQ ID NO: 23803 - DNA, 20 bp, synthetic construct
  misc_feature 1..20: note = Description of Artificial Sequence: Synthetic oligonucleotide
  misc_feature 1..20: note = Target: SCN10A; (-) strand; PAM type: NRG; PAM sequence: GAG
  source 1..20: mol_type = other DNA
caagaggattttgtctaaat

SEQ ID NO: 23804 - DNA, 20 bp, synthetic construct
  misc_feature 1..20: note = Description of Artificial Sequence: Synthetic oligonucleotide
  misc_feature 1..20: note = Target: SCN10A; (-) strand; PAM type: NRG; PAM sequence: AGG
  source 1..20: mol_type = other DNA
ttgataaagatactggcaag

SEQ ID NO: 23805 - DNA, 20 bp, synthetic construct
  misc_feature 1..20: note = Description of Artificial Sequence: Synthetic oligonucleotide
  misc_feature 1..20: note = Target: SCN10A; (-) strand; PAM type: NRG; PAM sequence: GAG
  source 1..20: mol_type = other DNA
cttgataaagatactggcaa

SEQ ID NO: 23806 - DNA, 20 bp, synthetic construct
  misc_feature 1..20: note = Description of Artificial Sequence: Synthetic oligonucleotide
  misc_feature 1..20: note = Target: SCN10A; (-) strand; PAM type: NRG; PAM sequence: AAG
  source 1..20: mol_type = other DNA
gccttgataaagatactggc

SEQ ID NO: 23807 - DNA, 20 bp, synthetic construct
  misc_feature 1..20: note = Description of Artificial Sequence: Synthetic oligonucleotide
  misc_feature 1..20: note = Target: SCN10A; (-) strand; PAM type: NRG; PAM sequence: TGG
  source 1..20: mol_type = other DNA
tgaagccttgataaagatac

SEQ ID NO: 23808 - DNA, 20 bp, synthetic construct
  misc_feature 1..20: note = Description of Artificial Sequence: Synthetic oligonucleotide
  misc_feature 1..20: note = Target: SCN10A; (-) strand; PAM type: NRG; PAM sequence: AAG
  source 1..20: mol_type = other DNA
acacctttgaagccttgata

SEQ ID NO: 23809 - DNA, 20 bp, synthetic construct
  misc_feature 1..20: note = Description of Artificial Sequence: Synthetic oligonucleotide
  misc_feature 1..20: note = Target: SCN10A; (-) strand; PAM type: NRG; PAM sequence: AAG
  source 1..20: mol_type = other DNA
cactgtcatttacacctttg

SEQ ID NO: 23810 - DNA, 20 bp, synthetic construct
  misc_feature 1..20: note = Description of Artificial Sequence: Synthetic oligonucleotide
  misc_feature 1..20: note = Target: SCN10A; (-) strand; PAM type: NRG; PAM sequence: CAG
  source 1..20: mol_type = other DNA
tccttttctaccctccttcc

SEQ ID NO: 23811 - DNA, 20 bp, synthetic construct
  misc_feature 1..20: note = Description of Artificial Sequence: Synthetic oligonucleotide
  misc_feature 1..20: note = Target: SCN10A; (-) strand; PAM type: NRG; PAM sequence: CAG
  source 1..20: mol_type = other DNA
cctgagtacactccatggca

SEQ ID NO: 23812 - DNA, 20 bp, synthetic construct
  misc_feature 1..20: note = Description of Artificial Sequence: Synthetic oligonucleotide
  misc_feature 1..20: note = Target: SCN10A; (-) strand; PAM type: NRG; PAM sequence: TGG
  source 1..20: mol_type = other DNA
aaccccctgagtacactcca

SEQ ID NO: 23813 - DNA, 20 bp, synthetic construct
  misc_feature 1..20: note = Description of Artificial Sequence: Synthetic oligonucleotide
  misc_feature 1..20: note = Target: SCN10A; (-) strand; PAM type: NRG; PAM sequence: GAG
  source 1..20: mol_type = other DNA
cctggaagaaggaaccccct

SEQ ID NO: 23814 - DNA, 20 bp, synthetic construct
  misc_feature 1..20: note = Description of Artificial Sequence: Synthetic oligonucleotide
  misc_feature 1..20: note = Target: SCN10A; (-) strand; PAM type: NRG; PAM sequence: AGG
  source 1..20: mol_type = other DNA
catccctccctcctggaaga

SEQ ID NO: 23815 - DNA, 20 bp, synthetic construct
  misc_feature 1..20: note = Description of Artificial Sequence: Synthetic oligonucleotide
  misc_feature 1..20: note = Target: SCN10A; (-) strand; PAM type: NRG; PAM sequence: AAG
  source 1..20: mol_type = other DNA
tcatccctccctcctggaag

SEQ ID NO: 23816 - DNA, 20 bp, synthetic construct
  misc_feature 1..20: note = Description of Artificial Sequence: Synthetic oligonucleotide
  misc_feature 1..20: note = Target: SCN10A; (-) strand; PAM type: NRG; PAM sequence: AAG
  source 1..20: mol_type = other DNA
aggtcatccctccctcctgg

SEQ ID NO: 23817 - DNA, 20 bp, synthetic construct
  misc_feature 1..20: note = Description of Artificial Sequence: Synthetic oligonucleotide
  misc_feature 1..20: note = Target: SCN10A; (-) strand; PAM type: NRG; PAM sequence: TGG
  source 1..20: mol_type = other DNA
agcaggtcatccctccctcc

SEQ ID NO: 23818 - DNA, 20 bp, synthetic construct
  misc_feature 1..20: note = Description of Artificial Sequence: Synthetic oligonucleotide
  misc_feature 1..20: note = Target: SCN10A; (-) strand; PAM type: NRG; PAM sequence: AGG
  source 1..20: mol_type = other DNA
tttcttggagcagtcagagc

SEQ ID NO: 23819 - DNA, 20 bp, synthetic construct
  misc_feature 1..20: note = Description of Artificial Sequence: Synthetic oligonucleotide
  misc_feature 1..20: note = Target: SCN10A; (-) strand; PAM type: NRG; PAM sequence: CAG
  source 1..20: mol_type = other DNA
ttttcttggagcagtcagag

SEQ ID NO: 23820 - DNA, 20 bp, synthetic construct
  misc_feature 1..20: note = Description of Artificial Sequence: Synthetic oligonucleotide
  misc_feature 1..20: note = Target: SCN10A; (-) strand; PAM type: NRG; PAM sequence: GAG
  source 1..20: mol_type = other DNA
gttttttcttggagcagtca

SEQ ID NO: 23821 - DNA, 20 bp, synthetic construct
  misc_feature 1..20: note = Description of Artificial Sequence: Synthetic oligonucleotide
  misc_feature 1..20: note = Target: SCN10A; (-) strand; PAM type: NRG; PAM sequence: CAG
  source 1..20: mol_type = other DNA
atgttttttcttggagcagt

SEQ ID NO: 23822 - DNA, 20 bp, synthetic construct
  misc_feature 1..20: note = Description of Artificial Sequence: Synthetic oligonucleotide
  misc_feature 1..20: note = Target: SCN10A; (-) strand; PAM type: NRG; PAM sequence: CAG
  source 1..20: mol_type = other DNA
ttgcatgttttttcttggag

SEQ ID NO: 23823 - DNA, 20 bp, synthetic construct
  misc_feature 1..20: note = Description of Artificial Sequence: Synthetic oligonucleotide
  misc_feature 1..20: note = Target: SCN10A; (-) strand; PAM type: NRG; PAM sequence: GAG
  source 1..20: mol_type = other DNA
tctttgcatgttttttcttg

SEQ ID NO: 23824 - DNA, 20 bp, synthetic construct
  misc_feature 1..20: note = Description of Artificial Sequence: Synthetic oligonucleotide
  misc_feature 1..20: note = Target: SCN10A; (-) strand; PAM type: NRG; PAM sequence: TGG
  source 1..20: mol_type = other DNA
attctttgcatgttttttct

SEQ ID NO: 23825 - DNA, 20 bp, synthetic construct
  misc_feature 1..20: note = Description of Artificial Sequence: Synthetic oligonucleotide
  misc_feature 1..20: note = Target: SCN10A; (-) strand; PAM type: NRG; PAM sequence: TGG
  source 1..20: mol_type = other DNA
cttcttccccctcatcacct

SEQ ID NO: 23826 - DNA, 20 bp, synthetic construct
  misc_feature 1..20: note = Description of Artificial Sequence: Synthetic oligonucleotide
  misc_feature 1..20: note = Target: SCN10A; (-) strand; PAM type: NRG; PAM sequence: CAG
  source 1..20: mol_type = other DNA
tgtggcccttctttttccct

SEQ ID NO: 23827 - DNA, 20 bp, synthetic construct
  misc_feature 1..20: note = Description of Artificial Sequence: Synthetic oligonucleotide
  misc_feature 1..20: note = Target: SCN10A; (-) strand; PAM type: NRG; PAM sequence: TGG
  source 1..20: mol_type = other DNA
ccccactccatctatttgtg

SEQ ID NO: 23828 - DNA, 20 bp, synthetic construct
  misc_feature 1..20: note = Description of Artificial Sequence: Synthetic oligonucleotide
  misc_feature 1..20: note = Target: SCN10A; (-) strand; PAM type: NRG; PAM sequence: CAG
  source 1..20: mol_type = other DNA
gcagaagctgctggctgtcc

SEQ ID NO: 23829 - DNA, 20 bp, synthetic construct
  misc_feature 1..20: note = Description of Artificial Sequence: Synthetic oligonucleotide
  misc_feature 1..20: note = Target: SCN10A; (-) strand; PAM type: NRG; PAM sequence: TGG
  source 1..20: mol_type = other DNA
cccagaacagcagaagctgc

SEQ ID NO: 23830 - DNA, 20 bp, synthetic construct
  misc_feature 1..20: note = Description of Artificial Sequence: Synthetic oligonucleotide
  misc_feature 1..20: note = Target: SCN10A; (-) strand; PAM type: NRG; PAM sequence: AAG
  source 1..20: mol_type = other DNA
gcctaaccccagaacagcag

SEQ ID NO: 23831 - DNA, 20 bp, synthetic construct
  misc_feature 1..20: note = Description of Artificial Sequence: Synthetic oligonucleotide
  misc_feature 1..20: note = Target: SCN10A; (-) strand; PAM type: NRG; PAM sequence: CAG
  source 1..20: mol_type = other DNA
tctgcctaaccccagaacag

SEQ ID NO: 23832 - DNA, 20 bp, synthetic construct
  misc_feature 1..20: note = Description of Artificial Sequence: Synthetic oligonucleotide
  misc_feature 1..20: note = Target: SCN10A; (-) strand; PAM type: NRG; PAM sequence: CAG
  source 1..20: mol_type = other DNA
ccctctgcctaaccccagaa

SEQ ID NO: 23833 - DNA, 20 bp, synthetic construct
  misc_feature 1..20: note = Description of Artificial Sequence: Synthetic oligonucleotide
  misc_feature 1..20: note = Target: SCN10A; (-) strand; PAM type: NRG; PAM sequence: CAG
  source 1..20: mol_type = other DNA
tactgccctctgcctaaccc

SEQ ID NO: 23834 - DNA, 20 bp, synthetic construct
  misc_feature 1..20: note = Description of Artificial Sequence: Synthetic oligonucleotide
  misc_feature 1..20: note = Target: SCN10A; (-) strand; PAM type: NRG; PAM sequence: GAG
  source 1..20: mol_type = other DNA
gccctggcagacataaacag

SEQ ID NO: 23835 - DNA, 20 bp, synthetic construct
  misc_feature 1..20: note = Description of Artificial Sequence: Synthetic oligonucleotide
  misc_feature 1..20: note = Target: SCN10A; (-) strand; PAM type: NRG; PAM sequence: AGG
  source 1..20: mol_type = other DNA
aggccctggcagacataaac

SEQ ID NO: 23836 - DNA, 20 bp, synthetic construct
  misc_feature 1..20: note = Description of Artificial Sequence: Synthetic oligonucleotide
  misc_feature 1..20: note = Target: SCN10A; (-) strand; PAM type: NRG; PAM sequence: CAG
  source 1..20: mol_type = other DNA
gaggccctggcagacataaa

SEQ ID NO: 23837 - DNA, 20 bp, synthetic construct
  misc_feature 1..20: note = Description of Artificial Sequence: Synthetic oligonucleotide
  misc_feature 1..20: note = Target: SCN10A; (-) strand; PAM type: NRG; PAM sequence: CAG
  source 1..20: mol_type = other DNA
gcaggatagggaggccctgg

SEQ ID NO: 23838 - DNA, 20 bp, synthetic construct
  misc_feature 1..20: note = Description of Artificial Sequence: Synthetic oligonucleotide
  misc_feature 1..20: note = Target: SCN10A; (-) strand; PAM type: NRG; PAM sequence: TGG
  source 1..20: mol_type = other DNA
cttgcaggatagggaggccc

SEQ ID NO: 23839 - DNA, 20 bp, synthetic construct
  misc_feature 1..20: note = Description of Artificial Sequence: Synthetic oligonucleotide
  misc_feature 1..20: note = Target: SCN10A; (-) strand; PAM type: NRG; PAM sequence: AGG
  source 1..20: mol_type = other DNA
cagcttcttgcaggataggg

SEQ ID NO: 23840 - DNA, 20 bp, synthetic construct
  misc_feature 1..20: note = Description of Artificial Sequence: Synthetic oligonucleotide
  misc_feature 1..20: note = Target: SCN10A; (-) strand; PAM type: NRG; PAM sequence: GAG
  source 1..20: mol_type = other DNA
ccagcttcttgcaggatagg

SEQ ID NO: 23841 - DNA, 20 bp, synthetic construct
  misc_feature 1..20: note = Description of Artificial Sequence: Synthetic oligonucleotide
  misc_feature 1..20: note = Target: SCN10A; (-) strand; PAM type: NRG; PAM sequence: GGG
  source 1..20: mol_type = other DNA
ctccagcttcttgcaggata

SEQ ID NO: 23842 - DNA, 20 bp, synthetic construct
  misc_feature 1..20: note = Description of Artificial Sequence: Synthetic oligonucleotide
  misc_feature 1..20: note = Target: SCN10A; (-) strand; PAM type: NRG; PAM sequence: AGG
  source 1..20: mol_type = other DNA
cctccagcttcttgcaggat

SEQ ID NO: 23843 - DNA, 20 bp, synthetic construct
  misc_feature 1..20: note = Description of Artificial Sequence: Synthetic oligonucleotide
  misc_feature 1..20: note = Target: SCN10A; (-) strand; PAM type: NRG; PAM sequence: TAG
  source 1..20: mol_type = other DNA
gcctccagcttcttgcagga

SEQ ID NO: 23844 - DNA, 20 bp, synthetic construct
  misc_feature 1..20: note = Description of Artificial Sequence: Synthetic oligonucleotide
  misc_feature 1..20: note = Target: SCN10A; (-) strand; PAM type: NRG; PAM sequence: AGG
  source 1..20: mol_type = other DNA
atgagcctccagcttcttgc

SEQ ID NO: 23845 - DNA, 20 bp, synthetic construct
  misc_feature 1..20: note = Description of Artificial Sequence: Synthetic oligonucleotide
  misc_feature 1..20: note = Target: SCN10A; (-) strand; PAM type: NRG; PAM sequence: CAG
  source 1..20: mol_type = other DNA
gatgagcctccagcttcttg

SEQ ID NO: 23846 - DNA, 20 bp, synthetic construct
  misc_feature 1..20: note = Description of Artificial Sequence: Synthetic oligonucleotide
  misc_feature 1..20: note = Target: SCN10A; (-) strand; PAM type: NRG; PAM sequence: CAG
  source 1..20: mol_type = other DNA
ggagtttttagatgagcctc

SEQ ID NO: 23847 - DNA, 20 bp, synthetic construct
  misc_feature 1..20: note = Description of Artificial Sequence: Synthetic oligonucleotide
  misc_feature 1..20: note = Target: SCN10A; (-) strand; PAM type: NRG; PAM sequence: GAG
  source 1..20: mol_type = other DNA
aaaactgggagtttttagat

SEQ ID NO: 23848 - DNA, 20 bp, synthetic construct
  misc_feature 1..20: note = Description of Artificial Sequence: Synthetic oligonucleotide
  misc_feature 1..20: note = Target: SCN10A; (-) strand; PAM type: NRG; PAM sequence: TAG
  source 1..20: mol_type = other DNA
ttctaaaaactgggagtttt

SEQ ID NO: 23849 - DNA, 20 bp, synthetic construct
  misc_feature 1..20: note = Description of Artificial Sequence: Synthetic oligonucleotide
  misc_feature 1..20: note = Target: SCN10A; (-) strand; PAM type: NRG; PAM sequence: GAG
  source 1..20: mol_type = other DNA
ctccagtttctaaaaactgg

SEQ ID NO: 23850 - DNA, 20 bp, synthetic construct
  misc_feature 1..20: note = Description of Artificial Sequence: Synthetic oligonucleotide
  misc_feature 1..20: note = Target: SCN10A; (-) strand; PAM type: NRG; PAM sequence: GGG
  source 1..20: mol_type = other DNA
cactccagtttctaaaaact

SEQ ID NO: 23851 - DNA, 20 bp, synthetic construct
  misc_feature 1..20: note = Description of Artificial Sequence: Synthetic oligonucleotide
  misc_feature 1..20: note = Target: SCN10A; (-) strand; PAM type: NRG; PAM sequence: TGG
  source 1..20: mol_type = other DNA
gcactccagtttctaaaaac

SEQ ID NO: 23852 - DNA, 20 bp, synthetic construct
  misc_feature 1..20: note = Description of Artificial Sequence: Synthetic oligonucleotide
  misc_feature 1..20: note = Target: SCN10A; (-) strand; PAM type: NRG; PAM sequence: CAG
  source 1..20: mol_type = other DNA
ccactcatcagtctgcactc

SEQ ID NO: 23853 - DNA, 20 bp, synthetic construct
  misc_feature 1..20: note = Description of Artificial Sequence: Synthetic oligonucleotide
  misc_feature 1..20: note = Target: SCN10A; (-) strand; PAM type: NRG; PAM sequence: CAG
  source 1..20: mol_type = other DNA
ctctgtcagttaccactcat

SEQ ID NO: 23854 - DNA, 20 bp, synthetic construct
  misc_feature 1..20: note = Description of Artificial Sequence: Synthetic oligonucleotide
  misc_feature 1..20: note = Target: SCN10A; (-) strand; PAM type: NRG; PAM sequence: CAG
  source 1..20: mol_type = other DNA
ctttcttaggtctgctctgt

SEQ ID NO: 23855 - DNA, 20 bp, synthetic construct
  misc_feature 1..20: note = Description of Artificial Sequence: Synthetic oligonucleotide
  misc_feature 1..20: note = Target: SCN10A; (-) strand; PAM type: NRG; PAM sequence: AGG
  source 1..20: mol_type = other DNA
agccagttttcagctttctt

SEQ ID NO: 23856 - DNA, 20 bp, synthetic construct
  misc_feature 1..20: note = Description of Artificial Sequence: Synthetic oligonucleotide
  misc_feature 1..20: note = Target: SCN10A; (-) strand; PAM type: NRG; PAM sequence: TAG
  source 1..20: mol_type = other DNA
cagccagttttcagctttct

SEQ ID NO: 23857 - DNA, 20 bp, synthetic construct
  misc_feature 1..20: note = Description of Artificial Sequence: Synthetic oligonucleotide
  misc_feature 1..20: note = Target: SCN10A; (-) strand; PAM type: NRG; PAM sequence: CAG
  source 1..20: mol_type = other DNA
tccctgcttcagccagtttt

SEQ ID NO: 23858 - DNA, 20 bp, synthetic construct
  misc_feature 1..20: note = Description of Artificial Sequence: Synthetic oligonucleotide
  misc_feature 1..20: note = Target: SCN10A; (-) strand; PAM type: NRG; PAM sequence: CAG
  source 1..20: mol_type = other DNA
tgggtattccctgcttcagc

SEQ ID NO: 23859 - DNA, 20 bp, synthetic construct
  misc_feature 1..20: note = Description of Artificial Sequence: Synthetic oligonucleotide
  misc_feature 1..20: note = Target: SCN10A; (-) strand; PAM type: NRG; PAM sequence: CAG
  source 1..20: mol_type = other DNA
cttctgggtattccctgctt

SEQ ID NO: 23860 - DNA, 20 bp, synthetic construct
  misc_feature 1..20: note = Description of Artificial Sequence: Synthetic oligonucleotide
  misc_feature 1..20: note = Target: SCN10A; (-) strand; PAM type: NRG; PAM sequence: GGG
  source 1..20: mol_type = other DNA
gcatagcttggcttgcttct

SEQ ID NO: 23861 - DNA, 20 bp, synthetic construct
  misc_feature 1..20: note = Description of Artificial Sequence: Synthetic oligonucleotide
  misc_feature 1..20: note = Target: SCN10A; (-) strand; PAM type: NRG; PAM sequence: TGG
  source 1..20: mol_type = other DNA
agcatagcttggcttgcttc

SEQ ID NO: 23862 - DNA, 20 bp, synthetic construct
  misc_feature 1..20: note = Description of Artificial Sequence: Synthetic oligonucleotide
  misc_feature 1..20: note = Target: SCN10A; (-) strand; PAM type: NRG; PAM sequence: TGG
  source 1..20: mol_type = other DNA
tggggctctgcagcatagct

SEQ ID NO: 23863 - DNA, 20 bp, synthetic construct
  misc_feature 1..20: note = Description of Artificial Sequence: Synthetic oligonucleotide
  misc_feature 1..20: note = Target: SCN10A; (-) strand; PAM type: NRG; PAM sequence: TAG
  source 1..20: mol_type = other DNA
agttctggggctctgcagca

SEQ ID NO: 23864 - DNA, 20 bp, synthetic construct
  misc_feature 1..20: note = Description of Artificial Sequence: Synthetic oligonucleotide
  misc_feature 1..20: note = Target: SCN10A; (-) strand; PAM type: NRG; PAM sequence: CAG
  source 1..20: mol_type = other DNA
caagcagttctggggctctg

SEQ ID NO: 23865 - DNA, 20 bp, synthetic construct
  misc_feature 1..20: note = Description of Artificial Sequence: Synthetic oligonucleotide
  misc_feature 1..20: note = Target: SCN10A; (-) strand; PAM type: NRG; PAM sequence: GGG
  source 1..20: mol_type = other DNA
ctaagttccaagcagttctg

SEQ ID NO: 23866 - DNA, 20 bp, synthetic construct
  misc_feature 1..20: note = Description of Artificial Sequence: Synthetic oligonucleotide
  misc_feature 1..20: note = Target: SCN10A; (-) strand; PAM type: NRG; PAM sequence: GGG
  source 1..20: mol_type = other DNA
tctaagttccaagcagttct

SEQ ID NO: 23867 - DNA, 20 bp, synthetic construct
  misc_feature 1..20: note = Description of Artificial Sequence: Synthetic oligonucleotide
  misc_feature 1..20: note = Target: SCN10A; (-) strand; PAM type: NRG; PAM sequence: TGG
  source 1..20: mol_type = other DNA
ctctaagttccaagcagttc

SEQ ID NO: 23868 - DNA, 20 bp, synthetic construct
  misc_feature 1..20: note = Description of Artificial Sequence: Synthetic oligonucleotide
  misc_feature 1..20: note = Target: SCN10A; (-) strand; PAM type: NRG; PAM sequence: CAG
  source 1..20: mol_type = other DNA
tagcatctctaagttccaag

SEQ ID NO: 23869 - DNA, 20 bp, synthetic construct
  misc_feature 1..20: note = Description of Artificial Sequence: Synthetic oligonucleotide
  misc_feature 1..20: note = Target: SCN10A; (-) strand; PAM type: NRG; PAM sequence: AAG
  source 1..20: mol_type = other DNA
acttagcatctctaagttcc

SEQ ID NO: 23870 - DNA, 20 bp, synthetic construct
  misc_feature 1..20: note = Description of Artificial Sequence: Synthetic oligonucleotide
  misc_feature 1..20: note = Target: SCN10A; (-) strand; PAM type: NRG; PAM sequence: AAG
  source 1..20: mol_type = other DNA
cagagatacttagcatctct

SEQ ID NO: 23871 - DNA, 20 bp, synthetic construct
  misc_feature 1..20: note = Description of Artificial Sequence: Synthetic oligonucleotide
  misc_feature 1..20: note = Target: SCN10A; (-) strand; PAM type: NRG; PAM sequence: TAG
  source 1..20: mol_type = other DNA
accttgctttcagagatact

SEQ ID NO: 23872 - DNA, 20 bp, synthetic construct
  misc_feature 1..20: note = Description of Artificial Sequence: Synthetic oligonucleotide
  misc_feature 1..20: note = Target: SCN10A; (-) strand; PAM type: NRG; PAM sequence: GAG
  source 1..20: mol_type = other DNA
tcccccaaaccttgctttca

SEQ ID NO: 23873 - DNA, 20 bp, synthetic construct
  misc_feature 1..20: note = Description of Artificial Sequence: Synthetic oligonucleotide
  misc_feature 1..20: note = Target: SCN10A; (-) strand; PAM type: NRG; PAM sequence: CAG
  source 1..20: mol_type = other DNA
cctcccccaaaccttgcttt

SEQ ID NO: 23874 - DNA, 20 bp, synthetic construct
  misc_feature 1..20: note = Description of Artificial Sequence: Synthetic oligonucleotide
  misc_feature 1..20: note = Target: SCN10A; (-) strand; PAM type: NRG; PAM sequence: CAG
  source 1..20: mol_type = other DNA
aaactttcaagcaattcttt

SEQ ID NO: 23875 - DNA, 20 bp, synthetic construct
  misc_feature 1..20: note = Description of Artificial Sequence: Synthetic oligonucleotide
  misc_feature 1..20: note = Target: SCN10A; (-) strand; PAM type: NRG; PAM sequence: AAG
  source 1..20: mol_type = other DNA
ggttcctgtaaaaaactttc

SEQ ID NO: 23876 - DNA, 20 bp, synthetic construct
  misc_feature 1..20: note = Description of Artificial Sequence: Synthetic oligonucleotide
  misc_feature 1..20: note = Target: SCN10A; (-) strand; PAM type: NRG; PAM sequence: TGG
  source 1..20: mol_type = other DNA
cagcatctagaaagctcaac

SEQ ID NO: 23877 - DNA, 20 bp, synthetic construct
  misc_feature 1..20: note = Description of Artificial Sequence: Synthetic oligonucleotide
  misc_feature 1..20: note = Target: SCN10A; (-) strand; PAM type: NRG; PAM sequence: AAG
  source 1..20: mol_type = other DNA
ggcataaagcagcatctaga

SEQ ID NO: 23878 - DNA, 20 bp, synthetic construct
  misc_feature 1..20: note = Description of Artificial Sequence: Synthetic oligonucleotide
  misc_feature 1..20: note = Target: SCN10A; (-) strand; PAM type: NRG; PAM sequence: TAG
  source 1..20: mol_type = other DNA
ggatggcataaagcagcatc

SEQ ID NO: 23879 - DNA, 20 bp, synthetic construct
  misc_feature 1..20: note = Description of Artificial Sequence: Synthetic oligonucleotide
  misc_feature 1..20: note = Target: SCN10A; (-) strand; PAM type: NRG; PAM sequence: CAG
  source 1..20: mol_type = other DNA
attgaatggatggcataaag

SEQ ID NO: 23880 - DNA, 20 bp, synthetic construct
  misc_feature 1..20: note = Description of Artificial Sequence: Synthetic oligonucleotide
  misc_feature 1..20: note = Target: SCN10A; (-) strand; PAM type: NRG; PAM sequence: AAG
  source 1..20: mol_type = other DNA
ctcattgaatggatggcata

SEQ ID NO: 23881 - DNA, 20 bp, synthetic construct
  misc_feature 1..20: note = Description of Artificial Sequence: Synthetic oligonucleotide
  misc_feature 1..20: note = Target: SCN10A; (-) strand; PAM type: NRG; PAM sequence: TGG
  source 1..20: mol_type = other DNA
acagtttctcattgaatgga

SEQ ID NO: 23882 - DNA, 20 bp, synthetic construct
  misc_feature 1..20: note = Description of Artificial Sequence: Synthetic oligonucleotide
  misc_feature 1..20: note = Target: SCN10A; (-) strand; PAM type: NRG; PAM sequence: TGG
  source 1..20: mol_type = other DNA
agaaacagtttctcattgaa

SEQ ID NO: 23883 - DNA, 20 bp, synthetic construct
  misc_feature 1..20: note = Description of Artificial Sequence: Synthetic oligonucleotide
  misc_feature 1..20: note = Target: SCN10A; (-) strand; PAM type: NRG; PAM sequence: CAG
  source 1..20: mol_type = other DNA
atccatttctggagcagaaa

SEQ ID NO: 23884 - DNA, 20 bp, synthetic construct
  misc_feature 1..20: note = Description of Artificial Sequence: Synthetic oligonucleotide
  misc_feature 1..20: note = Target: SCN10A; (-) strand; PAM type: NRG; PAM sequence: CAG
  source 1..20: mol_type = other DNA
catccaatccatttctggag

SEQ ID NO: 23885 - DNA, 20 bp, synthetic construct
  misc_feature 1..20: note = Description of Artificial Sequence: Synthetic oligonucleotide
  misc_feature 1..20: note = Target: SCN10A; (-) strand; PAM type: NRG; PAM sequence: GAG
  source 1..20: mol_type = other DNA
gagcatccaatccatttctg

SEQ ID NO: 23886 - DNA, 20 bp, synthetic construct
  misc_feature 1..20: note = Description of Artificial Sequence: Synthetic oligonucleotide
  misc_feature 1..20: note = Target: SCN10A; (-) strand; PAM type: NRG; PAM sequence: TGG
  source 1..20: mol_type = other DNA
atgagcatccaatccatttc

SEQ ID NO: 23887 - DNA, 20 bp, synthetic construct
  misc_feature 1..20: note = Description of Artificial Sequence: Synthetic oligonucleotide
  misc_feature 1..20: note = Target: SCN10A; (-) strand; PAM type: NRG; PAM sequence: GAG
  source 1..20: mol_type = other DNA
tcttcaactcttaagaaaat

SEQ ID NO: 23888 - DNA, 20 bp, synthetic construct
  misc_feature 1..20: note = Description of Artificial Sequence: Synthetic oligonucleotide
  misc_feature 1..20: note = Target: SCN10A; (-) strand; PAM type: NRG; PAM sequence: AAG
  source 1..20: mol_type = other DNA
ttccctcttcttcaactctt

SEQ ID NO: 23889 - DNA, 20 bp, synthetic construct
  misc_feature 1..20: note = Description of Artificial Sequence: Synthetic oligonucleotide
  misc_feature 1..20: note = Target: SCN10A; (-) strand; PAM type: NRG; PAM sequence: CAG
  source 1..20: mol_type = other DNA
ttttctttatatgcattttt

SEQ ID NO: 23890 - DNA, 20 bp, synthetic construct
  misc_feature 1..20: note = Description of Artificial Sequence: Synthetic oligonucleotide
  misc_feature 1..20: note = Target: SCN10A; (-) strand; PAM type: NRG; PAM sequence: AGG
  source 1..20: mol_type = other DNA
ggagttgtttgcctttcagt

SEQ ID NO: 23891 - DNA, 20 bp, synthetic construct
  misc_feature 1..20: note = Description of Artificial Sequence: Synthetic oligonucleotide
  misc_feature 1..20: note = Target: SCN10A; (-) strand; PAM type: NRG; PAM sequence: TAG
  source 1..20: mol_type = other DNA
gggagttgtttgcctttcag

SEQ ID NO: 23892 - DNA, 20 bp, synthetic construct
  misc_feature 1..20: note = Description of Artificial Sequence: Synthetic oligonucleotide
  misc_feature 1..20: note = Target: SCN10A; (-) strand; PAM type: NRG; PAM sequence: CAG
  source 1..20: mol_type = other DNA
gaggggagttgtttgccttt

SEQ ID NO: 23893 - DNA, 20 bp, synthetic construct
  misc_feature 1..20: note = Description of Artificial Sequence: Synthetic oligonucleotide
  misc_feature 1..20: note = Target: SCN10A; (-) strand; PAM type: NRG; PAM sequence: GAG
  source 1..20: mol_type = other DNA
gcagaagtgaatagggaggg

SEQ ID NO: 23894 - DNA, 20 bp, synthetic construct
  misc_feature 1..20: note = Description of Artificial Sequence: Synthetic oligonucleotide
  misc_feature 1..20: note = Target: SCN10A; (-) strand; PAM type: NRG; PAM sequence: GGG
  source 1..20: mol_type = other DNA
gagcagaagtgaatagggag

SEQ ID NO: 23895 - DNA, 20 bp, synthetic construct
  misc_feature 1..20: note = Description of Artificial Sequence: Synthetic oligonucleotide
  misc_feature 1..20: note = Target: SCN10A; (-) strand; PAM type: NRG; PAM sequence: GGG
  source 1..20: mol_type = other DNA
ggagcagaagtgaataggga

SEQ ID NO: 23896 - DNA, 20 bp, synthetic construct
  misc_feature 1..20: note = Description of Artificial Sequence: Synthetic oligonucleotide
  misc_feature 1..20: note = Target: SCN10A; (-) strand; PAM type: NRG; PAM sequence: AGG
  source 1..20: mol_type = other DNA
aggagcagaagtgaataggg

SEQ ID NO: 23897 - DNA, 20 bp, synthetic construct
  misc_feature 1..20: note = Description of Artificial Sequence: Synthetic oligonucleotide
  misc_feature 1..20: note = Target: SCN10A; (-) strand; PAM type: NRG; PAM sequence: GAG
  source 1..20: mol_type = other DNA
gaggagcagaagtgaatagg

SEQ ID NO: 23898 - DNA, 20 bp, synthetic construct
  misc_feature 1..20: note = Description of Artificial Sequence: Synthetic oligonucleotide
  misc_feature 1..20: note = Target: SCN10A; (-) strand; PAM type: NRG; PAM sequence: GGG
  source 1..20: mol_type = other DNA
acgaggagcagaagtgaata

SEQ ID NO: 23899 - DNA, 20 bp, synthetic construct
  misc_feature 1..20: note = Description of Artificial Sequence: Synthetic oligonucleotide
  misc_feature 1..20: note = Target: SCN10A; (-) strand; PAM type: NRG; PAM sequence: AGG
  source 1..20: mol_type = other DNA
aacgaggagcagaagtgaat

SEQ ID NO: 23900 - DNA, 20 bp, synthetic construct
  misc_feature 1..20: note = Description of Artificial Sequence: Synthetic oligonucleotide
  misc_feature 1..20: note = Target: SCN10A; (-) strand; PAM type: NRG; PAM sequence: TAG
  source 1..20: mol_type = other DNA
taacgaggagcagaagtgaa

SEQ ID NO: 23901 - DNA, 20 bp, synthetic construct
  misc_feature 1..20: note = Description of Artificial Sequence: Synthetic oligonucleotide
  misc_feature 1..20: note = Target: SCN10A; (-) strand; PAM type: NRG; PAM sequence: AAG
  source 1..20: mol_type = other DNA
ggaaacttaacgaggagcag

SEQ ID NO: 23902 - DNA, 20 bp, synthetic construct
  misc_feature 1..20: note = Description of Artificial Sequence: Synthetic oligonucleotide
  misc_feature 1..20: note = Target: SCN10A; (-) strand; PAM type: NRG; PAM sequence: CAG
  source 1..20: mol_type = other DNA
tctggaaacttaacgaggag

SEQ ID NO: 23903 - DNA, 20 bp, synthetic construct
  misc_feature 1..20: note = Description of Artificial Sequence: Synthetic oligonucleotide
  misc_feature 1..20: note = Target: SCN10A; (-) strand; PAM type: NRG; PAM sequence: GAG
  source 1..20: mol_type = other DNA
tcttctggaaacttaacgag

SEQ ID NO: 23904 - DNA, 20 bp, synthetic construct
  misc_feature 1..20: note = Description of Artificial Sequence: Synthetic oligonucleotide
  misc_feature 1..20: note = Target: SCN10A; (-) strand; PAM type: NRG; PAM sequence: AGG
  source 1..20: mol_type = other DNA
tatcttctggaaacttaacg

SEQ ID NO: 23905 - DNA, 20 bp, synthetic construct
  misc_feature 1..20: note = Description of Artificial Sequence: Synthetic oligonucleotide
  misc_feature 1..20: note = Target: SCN10A; (-) strand; PAM type: NRG; PAM sequence: GAG
  source 1..20: mol_type = other DNA
ttatcttctggaaacttaac

SEQ ID NO: 23906 - DNA, 20 bp, synthetic construct
  misc_feature 1..20: note = Description of Artificial Sequence: Synthetic oligonucleotide
  misc_feature 1..20: note = Target: SCN10A; (-) strand; PAM type: NRG; PAM sequence: TGG
  source 1..20: mol_type = other DNA
ctctaaaccagattatcttc

SEQ ID NO: 23907 - DNA, 20 bp, synthetic construct
  misc_feature 1..20: note = Description of Artificial Sequence: Synthetic oligonucleotide
  misc_feature 1..20: note = Target: SCN10A; (-) strand; PAM type: NRG; PAM sequence: CAG
  source 1..20: mol_type = other DNA
catcttcatgggctctaaac

SEQ ID NO: 23908 - DNA, 20 bp, synthetic construct
  misc_feature 1..20: note = Description of Artificial Sequence: Synthetic oligonucleotide
  misc_feature 1..20: note = Target: SCN10A; (-) strand; PAM type: NRG; PAM sequence: GGG
  source 1..20: mol_type = other DNA
taaaagtgcagcatcttcat

SEQ ID NO: 23909 - DNA, 20 bp, synthetic construct
  misc_feature 1..20: note = Description of Artificial Sequence: Synthetic oligonucleotide
  misc_feature 1..20: note = Target: SCN10A; (-) strand; PAM type: NRG; PAM sequence: TGG
  source 1..20: mol_type = other DNA
ttaaaagtgcagcatcttca

SEQ ID NO: 23910 - DNA, 20 bp, synthetic construct
  misc_feature 1..20: note = Description of Artificial Sequence: Synthetic oligonucleotide
  misc_feature 1..20: note = Target: SCN10A; (-) strand; PAM type: NRG; PAM sequence: CAG
  source 1..20: mol_type = other DNA
ggctgttcatgttaaaagtg

SEQ ID NO: 23911 - DNA, 20 bp, synthetic construct
  misc_feature 1..20: note = Description of Artificial Sequence: Synthetic oligonucleotide
  misc_feature 1..20: note = Target: SCN10A; (-) strand; PAM type: NRG; PAM sequence: AAG
  source 1..20: mol_type = other DNA
tggctggctgttcatgttaa

SEQ ID NO: 23912 - DNA, 20 bp, synthetic construct
  misc_feature 1..20: note = Description of Artificial Sequence: Synthetic oligonucleotide
  misc_feature 1..20: note = Target: SCN10A; (-) strand; PAM type: NRG; PAM sequence: TGG
  source 1..20: mol_type = other DNA
aattcctgatgctccttggc

SEQ ID NO: 23913 - DNA, 20 bp, synthetic construct
  misc_feature 1..20: note = Description of Artificial Sequence: Synthetic oligonucleotide
  misc_feature 1..20: note = Target: SCN10A; (-) strand; PAM type: NRG; PAM sequence: TGG
  source 1..20: mol_type = other DNA
ttcaaattcctgatgctcct

SEQ ID NO: 23914 - DNA, 20 bp, synthetic construct
  misc_feature 1..20: note = Description of Artificial Sequence: Synthetic oligonucleotide
  misc_feature 1..20: note = Target: SCN10A; (-) strand; PAM type: NRG; PAM sequence: AAG
  source 1..20: mol_type = other DNA
gctttggtttctggtgttag

SEQ ID NO: 23915 - DNA, 20 bp, synthetic construct
  misc_feature 1..20: note = Description of Artificial Sequence: Synthetic oligonucleotide
  misc_feature 1..20: note = Target: SCN10A; (-) strand; PAM type: NRG; PAM sequence: TAG
  source 1..20: mol_type = other DNA
gttgctttggtttctggtgt

SEQ ID NO: 23916 - DNA, 20 bp, synthetic construct
  misc_feature 1..20: note = Description of Artificial Sequence: Synthetic oligonucleotide
  misc_feature 1..20: note = Target: SCN10A; (-) strand; PAM type: NRG; PAM sequence: TGG
  source 1..20: mol_type = other DNA
tgtttggttgctttggtttc

SEQ ID NO: 23917 - DNA, 20 bp, synthetic construct
  misc_feature 1..20: note = Description of Artificial Sequence: Synthetic oligonucleotide
  misc_feature 1..20: note = Target: SCN10A; (-) strand; PAM type: NRG; PAM sequence: TGG
  source 1..20: mol_type = other DNA
tttcagttgtttggttgctt

SEQ ID NO: 23918 - DNA, 20 bp, synthetic construct
  misc_feature 1..20: note = Description of Artificial Sequence: Synthetic oligonucleotide
  misc_feature 1..20: note = Target: SCN10A; (-) strand; PAM type: NRG; PAM sequence: TGG
  source 1..20: mol_type = other DNA
ttttttttttttcagttgtt

SEQ ID NO: 23919 - DNA, 20 bp, synthetic construct
  misc_feature 1..20: note = Description of Artificial Sequence: Synthetic oligonucleotide
  misc_feature 1..20: note = Target: SCN10A; (-) strand; PAM type: NRG; PAM sequence: CAG
  source 1..20: mol_type = other DNA
tttctttttttttttttttt

SEQ ID NO: 23920 - DNA, 20 bp, synthetic construct
  misc_feature 1..20: note = Description of Artificial Sequence: Synthetic oligonucleotide
  misc_feature 1..20: note = Target: SCN10A; (-) strand; PAM type: NRG; PAM sequence: CAG
  source 1..20: mol_type = other DNA
gccacagcgcctggccaata

SEQ ID NO: 23921 - DNA, 20 bp, synthetic construct
  misc_feature 1..20: note = Description of Artificial Sequence: Synthetic oligonucleotide
  misc_feature 1..20: note = Target: SCN10A; (-) strand; PAM type: NRG; PAM sequence: TGG
  source 1..20: mol_type = other DNA
caggcgtgagccacagcgcc

SEQ ID NO: 23922 - DNA, 20 bp, synthetic construct
  misc_feature 1..20: note = Description of Artificial Sequence: Synthetic oligonucleotide
  misc_feature 1..20: note = Target: SCN10A; (-) strand; PAM type: NRG; PAM sequence: CAG
  source 1..20: mol_type = other DNA
gcgattacaggcgtgagcca

SEQ ID NO: 23923 - DNA, 20 bp, synthetic construct
  misc_feature 1..20: note = Description of Artificial Sequence: Synthetic oligonucleotide
  misc_feature 1..20: note = Target: SCN10A; (-) strand; PAM type: NRG; PAM sequence: GAG
  source 1..20: mol_type = other DNA
agtgctgcgattacaggcgt

SEQ ID NO: 23924 - DNA, 20 bp, synthetic construct
  misc_feature 1..20: note = Description of Artificial Sequence: Synthetic oligonucleotide
  misc_feature 1..20: note = Target: SCN10A; (-) strand; PAM type: NRG; PAM sequence: AGG
  source 1..20: mol_type = other DNA
tcccaaagtgctgcgattac

SEQ ID NO: 23925 - DNA, 20 bp, synthetic construct
  misc_feature 1..20: note = Description of Artificial Sequence: Synthetic oligonucleotide
  misc_feature 1..20: note = Target: SCN10A; (-) strand; PAM type: NRG; PAM sequence: CAG
  source 1..20: mol_type = other DNA
ctcccaaagtgctgcgatta

SEQ ID NO: 23926 - DNA, 20 bp, synthetic construct
  misc_feature 1..20: note = Description of Artificial Sequence: Synthetic oligonucleotide
  misc_feature 1..20: note = Target: SCN10A; (-) strand; PAM type: NRG; PAM sequence: AAG
  source 1..20: mol_type = other DNA
ctgcccgcctcggcctccca

SEQ ID NO: 23927 - DNA, 20 bp, synthetic construct
  misc_feature 1..20: note = Description of Artificial Sequence: Synthetic oligonucleotide
  misc_feature 1..20: note = Target: SCN10A; (-) strand; PAM type: NRG; PAM sequence: CGG
  source 1..20: mol_type = other DNA
acctcgtaatctgcccgcct

SEQ ID NO: 23928 - DNA, 20 bp, synthetic construct
  misc_feature 1..20: note = Description of Artificial Sequence: Synthetic oligonucleotide
  misc_feature 1..20: note = Target: SCN10A; (-) strand; PAM type: NRG; PAM sequence: TGG
  source 1..20: mol_type = other DNA
tttcaccgcgttagccagga

SEQ ID NO: 23929 - DNA, 20 bp, synthetic construct
  misc_feature 1..20: note = Description of Artificial Sequence: Synthetic oligonucleotide
  misc_feature 1..20: note = Target: SCN10A; (-) strand; PAM type: NRG; PAM sequence: AGG
  source 1..20: mol_type = other DNA
ggggtttcaccgcgttagcc

SEQ ID NO: 23930 - DNA, 20 bp, synthetic construct
  misc_feature 1..20: note = Description of Artificial Sequence: Synthetic oligonucleotide
  misc_feature 1..20: note = Target: SCN10A; (-) strand; PAM type: NRG; PAM sequence: CAG
  source 1..20: mol_type = other DNA
cggggtttcaccgcgttagc

SEQ ID NO: 23931 - DNA, 20 bp, synthetic construct
  misc_feature 1..20: note = Description of Artificial Sequence: Synthetic oligonucleotide
  misc_feature 1..20: note = Target: SCN10A; (-) strand; PAM type: NRG; PAM sequence: TAG
  source 1..20: mol_type = other DNA
gagacggggtttcaccgcgt

SEQ ID NO: 23932 - DNA, 20 bp, synthetic construct
  misc_feature 1..20: note = Description of Artificial Sequence: Synthetic oligonucleotide
  misc_feature 1..20: note = Target: SCN10A; (-) strand; PAM type: NRG; PAM sequence: GGG
  source 1..20: mol_type = other DNA
ttgtatttttagtagagacg

SEQ ID NO: 23933 - DNA, 20 bp, synthetic construct
  misc_feature 1..20: note = Description of Artificial Sequence: Synthetic oligonucleotide
  misc_feature 1..20: note = Target: SCN10A; (-) strand; PAM type: NRG; PAM sequence: GGG
  source 1..20: mol_type = other DNA
tttgtatttttagtagagac

SEQ ID NO: 23934 - DNA, 20 bp, synthetic construct
  misc_feature 1..20: note = Description of Artificial Sequence: Synthetic oligonucleotide
  misc_feature 1..20: note = Target: SCN10A; (-) strand; PAM type: NRG; PAM sequence: CGG
  source 1..20: mol_type = other DNA
ttttgtatttttagtagaga

SEQ ID NO: 23935 - DNA, 20 bp, synthetic construct
  misc_feature 1..20: note = Description of Artificial Sequence: Synthetic oligonucleotide
  misc_feature 1..20: note = Target: SCN10A; (-) strand; PAM type: NRG; PAM sequence: GAG
  source 1..20: mol_type = other DNA
aattttttgtatttttagta

SEQ ID NO: 23936 - DNA, 20 bp, synthetic construct
  misc_feature 1..20: note = Description of Artificial Sequence: Synthetic oligonucleotide
  misc_feature 1..20: note = Target: SCN10A; (-) strand; PAM type: NRG; PAM sequence: TAG
  source 1..20: mol_type = other DNA
ctaattttttgtatttttag

SEQ ID NO: 23937 - DNA, 20 bp, synthetic construct
  misc_feature 1..20: note = Description of Artificial Sequence: Synthetic oligonucleotide
  misc_feature 1..20: note = Target: SCN10A; (-) strand; PAM type: NRG; PAM sequence: TAG
  source 1..20: mol_type = other DNA
cggctaattttttgtatttt

SEQ ID NO: 23938 - DNA, 20 bp, synthetic construct
  misc_feature 1..20: note = Description of Artificial Sequence: Synthetic oligonucleotide
  misc_feature 1..20: note = Target: SCN10A; (-) strand; PAM type: NRG; PAM sequence: CGG
  source 1..20: mol_type = other DNA
caggtgcccgccaaggcgcc

SEQ ID NO: 23939 - DNA, 20 bp, synthetic construct
  misc_feature 1..20: note = Description of Artificial Sequence: Synthetic oligonucleotide
  misc_feature 1..20: note = Target: SCN10A; (-) strand; PAM type: NRG; PAM sequence: AGG
  source 1..20: mol_type = other DNA
ggaactacaggtgcccgcca

SEQ ID NO: 23940 - DNA, 20 bp, synthetic construct
  misc_feature 1..20: note = Description of Artificial Sequence: Synthetic oligonucleotide
  misc_feature 1..20: note = Target: SCN10A; (-) strand; PAM type: NRG; PAM sequence: AAG
  source 1..20: mol_type = other DNA
tggaactacaggtgcccgcc

SEQ ID NO: 23941 - DNA, 20 bp, synthetic construct
  misc_feature 1..20: note = Description of Artificial Sequence: Synthetic oligonucleotide
  misc_feature 1..20: note = Target: SCN10A; (-) strand; PAM type: NRG; PAM sequence: AGG
  source 1..20: mol_type = other DNA
tccggagtagctggaactac

SEQ ID NO: 23942 - DNA, 20 bp, synthetic construct
  misc_feature 1..20: note = Description of Artificial Sequence: Synthetic oligonucleotide
  misc_feature 1..20: note = Target: SCN10A; (-) strand; PAM type: NRG; PAM sequence: CAG
  source 1..20: mol_type = other DNA
ctccggagtagctggaacta

SEQ ID NO: 23943 - DNA, 20 bp, synthetic construct
  misc_feature 1..20: note = Description of Artificial Sequence: Synthetic oligonucleotide
  misc_feature 1..20: note = Target: SCN10A; (-) strand; PAM type: NRG; PAM sequence: TGG
  source 1..20: mol_type = other DNA
gcctcagcctccggagtagc

SEQ ID NO: 23944 - DNA, 20 bp, synthetic construct
  misc_feature 1..20: note = Description of Artificial Sequence: Synthetic oligonucleotide
  misc_feature 1..20: note = Target: SCN10A; (-) strand; PAM type: NRG; PAM sequence: TAG
  source 1..20: mol_type = other DNA
tcccgcctcagcctccggag

SEQ ID NO: 23945 - DNA, 20 bp, synthetic construct
  misc_feature 1..20: note = Description of Artificial Sequence: Synthetic oligonucleotide
  misc_feature 1..20: note = Target: SCN10A; (-) strand; PAM type: NRG; PAM sequence: GAG
  source 1..20: mol_type = other DNA
ttctcccgcctcagcctccg

SEQ ID NO: 23946 - DNA, 20 bp, synthetic construct
  misc_feature 1..20: note = Description of Artificial Sequence: Synthetic oligonucleotide
  misc_feature 1..20: note = Target: SCN10A; (-) strand; PAM type: NRG; PAM sequence: CGG
  source 1..20: mol_type = other DNA
cattctcccgcctcagcctc

SEQ ID NO: 23947 - DNA, 20 bp, synthetic construct
  misc_feature 1..20: note = Description of Artificial Sequence: Synthetic oligonucleotide
  misc_feature 1..20: note = Target: SCN10A; (-) strand; PAM type: NRG; PAM sequence: CAG
  source 1..20: mol_type = other DNA
ttcacgccattctcccgcct

SEQ ID NO: 23948 - DNA, 20 bp, synthetic construct
  misc_feature 1..20: note = Description of Artificial Sequence: Synthetic oligonucleotide
  misc_feature 1..20: note = Target: SCN10A; (-) strand; PAM type: NRG; PAM sequence: GGG
  source 1..20: mol_type = other DNA
cactgcaagctccgcctccc

SEQ ID NO: 23949 - DNA, 20 bp, synthetic construct
  misc_feature 1..20: note = Description of Artificial Sequence: Synthetic oligonucleotide
  misc_feature 1..20: note = Target: SCN10A; (-) strand; PAM type: NRG; PAM sequence: CGG
  source 1..20: mol_type = other DNA
tcactgcaagctccgcctcc

SEQ ID NO: 23950 - DNA, 20 bp, synthetic construct
  misc_feature 1..20: note = Description of Artificial Sequence: Synthetic oligonucleotide
  misc_feature 1..20: note = Target: SCN10A; (-) strand; PAM type: NRG; PAM sequence: AAG
  source 1..20: mol_type = other DNA
acgcgatctaggctcactgc

SEQ ID NO: 23951 - DNA, 20 bp, synthetic construct
  misc_feature 1..20: note = Description of Artificial Sequence: Synthetic oligonucleotide
  misc_feature 1..20: note = Target: SCN10A; (-) strand; PAM type: NRG; PAM sequence: AGG
  source 1..20: mol_type = other DNA
ggagtgcagtgacgcgatct

SEQ ID NO: 23952 - DNA, 20 bp, synthetic construct
  misc_feature 1..20: note = Description of Artificial Sequence: Synthetic oligonucleotide
  misc_feature 1..20: note = Target: SCN10A; (-) strand; PAM type: NRG; PAM sequence: TAG
  source 1..20: mol_type = other DNA
tggagtgcagtgacgcgatc

SEQ ID NO: 23953 - DNA, 20 bp, synthetic construct
  misc_feature 1..20: note = Description of Artificial Sequence: Synthetic oligonucleotide
  misc_feature 1..20: note = Target: SCN10A; (-) strand; PAM type: NRG; PAM sequence: CAG
  source 1..20: mol_type = other DNA
ctgtcacccagactggagtg

SEQ ID NO: 23954 - DNA, 20 bp, synthetic construct
  misc_feature 1..20: note = Description of Artificial Sequence: Synthetic oligonucleotide
  misc_feature 1..20: note = Target: SCN10A; (-) strand; PAM type: NRG; PAM sequence: GAG
  source 1..20: mol_type = other DNA
ttgctctgtcacccagactg

SEQ ID NO: 23955 - DNA, 20 bp, synthetic construct
  misc_feature 1..20: note = Description of Artificial Sequence: Synthetic oligonucleotide
  misc_feature 1..20: note = Target: SCN10A; (-) strand; PAM type: NRG; PAM sequence: TGG
  source 1..20: mol_type = other DNA
tcttgctctgtcacccagac

SEQ ID NO: 23956 - DNA, 20 bp, synthetic construct
  misc_feature 1..20: note = Description of Artificial Sequence: Synthetic oligonucleotide
  misc_feature 1..20: note = Target: SCN10A; (-) strand; PAM type: NRG; PAM sequence: CAG
  source 1..20: mol_type = other DNA
cgaagtcttgctctgtcacc

SEQ ID NO: 23957 - DNA, 20 bp, synthetic construct
  misc_feature 1..20: note = Description of Artificial Sequence: Synthetic oligonucleotide
  misc_feature 1..20: note = Target: SCN10A; (-) strand; PAM type: NRG; PAM sequence: AAG
  source 1..20: mol_type = other DNA
ttgttgttgttttggagacg

SEQ ID NO: 23958 - DNA, 20 bp, synthetic construct
  misc_feature 1..20: note = Description of Artificial Sequence: Synthetic oligonucleotide
  misc_feature 1..20: note = Target: SCN10A; (-) strand; PAM type: NRG; PAM sequence: GAG
  source 1..20: mol_type = other DNA
ctgttgttgttgttgttttg

SEQ ID NO: 23959 - DNA, 20 bp, synthetic construct
  misc_feature 1..20: note = Description of Artificial Sequence: Synthetic oligonucleotide
  misc_feature 1..20: note = Target: SCN10A; (-) strand; PAM type: NRG; PAM sequence: TGG
  source 1..20: mol_type = other DNA
tgctgttgttgttgttgttt

SEQ ID NO: 23960 - DNA, 20 bp, synthetic construct
  misc_feature 1..20: note = Description of Artificial Sequence: Synthetic oligonucleotide
  misc_feature 1..20: note = Target: SCN10A; (-) strand; PAM type: NRG; PAM sequence: AGG
  source 1..20: mol_type = other DNA
ctctctaaaaatattagtac

SEQ ID NO: 23961 - DNA, 20 bp, synthetic construct
  misc_feature 1..20: note = Description of Artificial Sequence: Synthetic oligonucleotide
  misc_feature 1..20: note = Target: SCN10A; (-) strand; PAM type: NRG; PAM sequence: CAG
  source 1..20: mol_type = other DNA
actctctaaaaatattagta

SEQ ID NO: 23962 - DNA, 20 bp, synthetic construct
  misc_feature 1..20: note = Description of Artificial Sequence: Synthetic oligonucleotide
  misc_feature 1..20: note = Target: SCN10A; (-) strand; PAM type: NRG; PAM sequence: TAG
  source 1..20: mol_type = other DNA
tcttaactctctaaaaatat

SEQ ID NO: 23963 - DNA, 20 bp, synthetic construct
  misc_feature 1..20: note = Description of Artificial Sequence: Synthetic oligonucleotide
  misc_feature 1..20: note = Target: SCN10A; (-) strand; PAM type: NRG; PAM sequence: GAG
  source 1..20: mol_type = other DNA
ctgctcttgttctatacgtg

SEQ ID NO: 23964 - DNA, 20 bp, synthetic construct
  misc_feature 1..20: note = Description of Artificial Sequence: Synthetic oligonucleotide
  misc_feature 1..20: note = Target: SCN10A; (-) strand; PAM type: NRG; PAM sequence: TGG
  source 1..20: mol_type = other DNA
ttctgctcttgttctatacg

SEQ ID NO: 23965 - DNA, 20 bp, synthetic construct
  misc_feature 1..20: note = Description of Artificial Sequence: Synthetic oligonucleotide
  misc_feature 1..20: note = Target: SCN10A; (-) strand; PAM type: NRG; PAM sequence: AGG
  source 1..20: mol_type = other DNA
aaattccattttgtctttga

SEQ ID NO: 23966 - DNA, 20 bp, synthetic construct
  misc_feature 1..20: note = Description of Artificial Sequence: Synthetic oligonucleotide
  misc_feature 1..20: note = Target: SCN10A; (-) strand; PAM type: NRG; PAM sequence: AAG
  source 1..20: mol_type = other DNA
aaaattccattttgtctttg

SEQ ID NO: 23967 - DNA, 20 bp, synthetic construct
  misc_feature 1..20: note = Description of Artificial Sequence: Synthetic oligonucleotide
  misc_feature 1..20: note = Target: SCN10A; (-) strand; PAM type: NRG; PAM sequence: TAG
  source 1..20: mol_type = other DNA
ttatttacaagtccgcctat

SEQ ID NO: 23968 - DNA, 20 bp, synthetic construct
  misc_feature 1..20: note = Description of Artificial Sequence: Synthetic oligonucleotide
  misc_feature 1..20: note = Target: SCN10A; (-) strand; PAM type: NRG; PAM sequence: AAG
  source 1..20: mol_type = other DNA
atttccaaaactttatttac

SEQ ID NO: 23969 - DNA, 20 bp, synthetic construct
  misc_feature 1..20: note = Description of Artificial Sequence: Synthetic oligonucleotide
  misc_feature 1..20: note = Target: SCN10A; (-) strand; PAM type: NRG; PAM sequence: GAG
  source 1..20: mol_type = other DNA
ttttttgttccacttcctgt

SEQ ID NO: 23970 - DNA, 20 bp, synthetic construct
  misc_feature 1..20: note = Description of Artificial Sequence: Synthetic oligonucleotide
  misc_feature 1..20: note = Target: SCN10A; (-) strand; PAM type: NRG; PAM sequence: TAG
  source 1..20: mol_type = other DNA
tagtcaaacaatatacctcc

SEQ ID NO: 23971 - DNA, 20 bp, synthetic construct
  misc_feature 1..20: note = Description of Artificial Sequence: Synthetic oligonucleotide
  misc_feature 1..20: note = Target: SCN10A; (-) strand; PAM type: NRG; PAM sequence: TAG
  source 1..20: mol_type = other DNA
tttctttctagacctcctat

SEQ ID NO: 23972 - DNA, 20 bp, synthetic construct
  misc_feature 1..20: note = Description of Artificial Sequence: Synthetic oligonucleotide
  misc_feature 1..20: note = Target: SCN10A; (-) strand; PAM type: NRG; PAM sequence: TAG
  source 1..20: mol_type = other DNA
attgtcttctaatttctttc

SEQ ID NO: 23973 - DNA, 20 bp, synthetic construct
  misc_feature 1..20: note = Description of Artificial Sequence: Synthetic oligonucleotide
  misc_feature 1..20: note = Target: SCN10A; (-) strand; PAM type: NRG; PAM sequence: AGG
  source 1..20: mol_type = other DNA
tatttccctcttaattttga

SEQ ID NO: 23974 - DNA, 20 bp, synthetic construct
  misc_feature 1..20: note = Description of Artificial Sequence: Synthetic oligonucleotide
  misc_feature 1..20: note = Target: SCN10A; (-) strand; PAM type: NRG; PAM sequence: AAG
  source 1..20: mol_type = other DNA
ttatttccctcttaattttg

SEQ ID NO: 23975 - DNA, 20 bp, synthetic construct
  misc_feature 1..20: note = Description of Artificial Sequence: Synthetic oligonucleotide
  misc_feature 1..20: note = Target: SCN10A; (-) strand; PAM type: NRG; PAM sequence: TAG
  source 1..20: mol_type = other DNA
ctagggaaagacttctgtat

SEQ ID NO: 23976 - DNA, 20 bp, synthetic construct
  misc_feature 1..20: note = Description of Artificial Sequence: Synthetic oligonucleotide
  misc_feature 1..20: note = Target: SCN10A; (-) strand; PAM type: NRG; PAM sequence: AAG
  source 1..20: mol_type = other DNA
tttgacagtttggctaggga

SEQ ID NO: 23977 - DNA, 20 bp, synthetic construct
  misc_feature 1..20: note = Description of Artificial Sequence: Synthetic oligonucleotide
  misc_feature 1..20: note = Target: SCN10A; (-) strand; PAM type: NRG; PAM sequence: GGG
  source 1..20: mol_type = other DNA
cttctttgacagtttggcta

SEQ ID NO: 23978 - DNA, 20 bp, synthetic construct
  misc_feature 1..20: note = Description of Artificial Sequence: Synthetic oligonucleotide
  misc_feature 1..20: note = Target: SCN10A; (-) strand; PAM type: NRG; PAM sequence: AGG
  source 1..20: mol_type = other DNA
ccttctttgacagtttggct

SEQ ID NO: 23979 - DNA, 20 bp, synthetic construct
  misc_feature 1..20: note = Description of Artificial Sequence: Synthetic oligonucleotide
  misc_feature 1..20: note = Target: SCN10A; (-) strand; PAM type: NRG; PAM sequence: TAG
  source 1..20: mol_type = other DNA
accttctttgacagtttggc

SEQ ID NO: 23980 - DNA, 20 bp, synthetic construct
  misc_feature 1..20: note = Description of Artificial Sequence: Synthetic oligonucleotide
  misc_feature 1..20: note = Target: SCN10A; (-) strand; PAM type: NRG; PAM sequence: TGG
  source 1..20: mol_type = other DNA
ttctaccttctttgacagtt

SEQ ID NO: 23981 - DNA, 20 bp, synthetic construct
  misc_feature 1..20: note = Description of Artificial Sequence: Synthetic oligonucleotide
  misc_feature 1..20: note = Target: SCN10A; (-) strand; PAM type: NRG; PAM sequence: CAG
  source 1..20: mol_type = other DNA
atatattctaccttctttga

SEQ ID NO: 23982 - DNA, 20 bp, synthetic construct
  misc_feature 1..20: note = Description of Artificial Sequence: Synthetic oligonucleotide
  misc_feature 1..20: note = Target: SCN10A; (-) strand; PAM type: NRG; PAM sequence: AAG
  source 1..20: mol_type = other DNA
aactaagaagtacatttccc

SEQ ID NO: 23983 - DNA, 20 bp, synthetic construct
  misc_feature 1..20: note = Description of Artificial Sequence: Synthetic oligonucleotide
  misc_feature 1..20: note = Target: SCN10A; (-) strand; PAM type: NRG; PAM sequence: AAG
  source 1..20: mol_type = other DNA
ttattagaagggtaactaag

SEQ ID NO: 23984 - DNA, 20 bp, synthetic construct
  misc_feature 1..20: note = Description of Artificial Sequence: Synthetic oligonucleotide
  misc_feature 1..20: note = Target: SCN10A; (-) strand; PAM type: NRG; PAM sequence: AAG
  source 1..20: mol_type = other DNA
actttattagaagggtaact

SEQ ID NO: 23985 - DNA, 20 bp, synthetic construct
  misc_feature 1..20: note = Description of Artificial Sequence: Synthetic oligonucleotide
  misc_feature 1..20: note = Target: SCN10A; (-) strand; PAM type: NRG; PAM sequence: GGG
  source 1..20: mol_type = other DNA
ttctagtaactttattagaa

SEQ ID NO: 23986 - DNA, 20 bp, synthetic construct
  misc_feature 1..20: note = Description of Artificial Sequence: Synthetic oligonucleotide
  misc_feature 1..20: note = Target: SCN10A; (-) strand; PAM type: NRG; PAM sequence: AGG
  source 1..20: mol_type = other DNA
cttctagtaactttattaga

SEQ ID NO: 23987 - DNA, 20 bp, synthetic construct
  misc_feature 1..20: note = Description of Artificial Sequence: Synthetic oligonucleotide
  misc_feature 1..20: note = Target: SCN10A; (-) strand; PAM type: NRG; PAM sequence: AAG
  source 1..20: mol_type = other DNA
gcttctagtaactttattag

SEQ ID NO: 23988 - DNA, 20 bp, synthetic construct
  misc_feature 1..20: note = Description of Artificial Sequence: Synthetic oligonucleotide
  misc_feature 1..20: note = Target: SCN10A; (-) strand; PAM type: NRG; PAM sequence: TAG
  source 1..20: mol_type = other DNA
ccagcttctagtaactttat

SEQ ID NO: 23989 - DNA, 20 bp, synthetic construct
  misc_feature 1..20: note = Description of Artificial Sequence: Synthetic oligonucleotide
  misc_feature 1..20: note = Target: SCN10A; (-) strand; PAM type: NRG; PAM sequence: TAG
  source 1..20: mol_type = other DNA
ataccaccatgcccagcttc

SEQ ID NO: 23990 - DNA, 20 bp, synthetic construct
  misc_feature 1..20: note = Description of Artificial Sequence: Synthetic oligonucleotide
  misc_feature 1..20: note = Target: SCN10A; (-) strand; PAM type: NRG; PAM sequence: CAG
  source 1..20: mol_type = other DNA
caggtacataccaccatgcc

SEQ ID NO: 23991 - DNA, 20 bp, synthetic construct
  misc_feature 1..20: note = Description of Artificial Sequence: Synthetic oligonucleotide
  misc_feature 1..20: note = Target: SCN10A; (-) strand; PAM type: NRG; PAM sequence: AGG
  source 1..20: mol_type = other DNA
tcccaagtagttaggactac

SEQ ID NO: 23992 - DNA, 20 bp, synthetic construct
  misc_feature 1..20: note = Description of Artificial Sequence: Synthetic oligonucleotide
  misc_feature 1..20: note = Target: SCN10A; (-) strand; PAM type: NRG; PAM sequence: CAG
  source 1..20: mol_type = other DNA
ctcccaagtagttaggacta

SEQ ID NO: 23993 - DNA, 20 bp, synthetic construct
  misc_feature 1..20: note = Description of Artificial Sequence: Synthetic oligonucleotide
  misc_feature 1..20: note = Target: SCN10A; (-) strand; PAM type: NRG; PAM sequence: AGG
  source 1..20: mol_type = other DNA
cctcaacctcccaagtagtt

SEQ ID NO: 23994 - DNA, 20 bp, synthetic construct
  misc_feature 1..20: note = Description of Artificial Sequence: Synthetic oligonucleotide
  misc_feature 1..20: note = Target: SCN10A; (-) strand; PAM type: NRG; PAM sequence: TAG
  source 1..20: mol_type = other DNA
gcctcaacctcccaagtagt

SEQ ID NO: 23995 - DNA, 20 bp, synthetic construct
  misc_feature 1..20: note = Description of Artificial Sequence: Synthetic oligonucleotide
  misc_feature 1..20: note = Target: SCN10A; (-) strand; PAM type: NRG; PAM sequence: TAG
  source 1..20: mol_type = other DNA
tcctgcctcaacctcccaag

SEQ ID NO: 23996 - DNA, 20 bp, synthetic construct
  misc_feature 1..20: note = Description of Artificial Sequence: Synthetic oligonucleotide
  misc_feature 1..20: note = Target: SCN10A; (-) strand; PAM type: NRG; PAM sequence: AAG
  source 1..20: mol_type = other DNA
tcctcctgcctcaacctccc

SEQ ID NO: 23997 - DNA, 20 bp, synthetic construct
  misc_feature 1..20: note = Description of Artificial Sequence: Synthetic oligonucleotide
  misc_feature 1..20: note = Target: SCN10A; (-) strand; PAM type: NRG; PAM sequence: AAG
  source 1..20: mol_type = other DNA
ggcctcaaactcctgggttc

SEQ ID NO: 23998 - DNA, 20 bp, synthetic construct
  misc_feature 1..20: note = Description of Artificial Sequence: Synthetic oligonucleotide
  misc_feature 1..20: note = Target: SCN10A; (-) strand; PAM type: NRG; PAM sequence: GGG
  source 1..20: mol_type = other DNA
gctgttggcctcaaactcct

SEQ ID NO: 23999 - DNA, 20 bp, synthetic construct
  misc_feature 1..20: note = Description of Artificial Sequence: Synthetic oligonucleotide
  misc_feature 1..20: note = Target: SCN10A; (-) strand; PAM type: NRG; PAM sequence: TGG
  source 1..20: mol_type = other DNA
ggctgttggcctcaaactcc

SEQ ID NO: 24000 - DNA, 20 bp, synthetic construct
  misc_feature 1..20: note = Description of Artificial Sequence: Synthetic oligonucleotide
  misc_feature 1..20: note = Target: SCN10A; (-) strand; PAM type: NRG; PAM sequence: TGG
  source 1..20: mol_type = other DNA
ctctatgctgcccaggctgt

SEQ ID NO: 24001 - DNA, 20 bp, synthetic construct
  misc_feature 1..20: note = Description of Artificial Sequence: Synthetic oligonucleotide
  misc_feature 1..20: note = Target: SCN10A; (-) strand; PAM type: NRG; PAM sequence: AGG
  source 1..20: mol_type = other DNA
aaagtctctctatgctgccc

SEQ ID NO: 24002 - DNA, 20 bp, synthetic construct
  misc_feature 1..20: note = Description of Artificial Sequence: Synthetic oligonucleotide
  misc_feature 1..20: note = Target: SCN10A; (-) strand; PAM type: NRG; PAM sequence: CAG
  source 1..20: mol_type = other DNA
caaagtctctctatgctgcc

SEQ ID NO: 24003 - DNA, 20 bp, synthetic construct
  misc_feature 1..20: note = Description of Artificial Sequence: Synthetic oligonucleotide
  misc_feature 1..20: note = Target: SCN10A; (-) strand; PAM type: NRG; PAM sequence: AAG
  source 1..20: mol_type = other DNA
taacatttttttttaagaca

SEQ ID NO: 24004 - DNA, 20 bp, synthetic construct
  misc_feature 1..20: note = Description of Artificial Sequence: Synthetic oligonucleotide
  misc_feature 1..20: note = Target: SCN10A; (-) strand; PAM type: NRG; PAM sequence: AAG
  source 1..20: mol_type = other DNA
ctctagtaacattttttttt

SEQ ID NO: 24005 - DNA, 20 bp, synthetic construct
  misc_feature 1..20: note = Description of Artificial Sequence: Synthetic oligonucleotide
  misc_feature 1..20: note = Target: SCN10A; (-) strand; PAM type: NRG; PAM sequence: TAG
  source 1..20: mol_type = other DNA
tttgaatggagcatatcctc

SEQ ID NO: 24006 - DNA, 20 bp, synthetic construct
  misc_feature 1..20: note = Description of Artificial Sequence: Synthetic oligonucleotide
  misc_feature 1..20: note = Target: SCN10A; (-) strand; PAM type: NRG; PAM sequence: GAG
  source 1..20: mol_type = other DNA
atatgtttcttgtttgaatg

SEQ ID NO: 24007 - DNA, 20 bp, synthetic construct
  misc_feature 1..20: note = Description of Artificial Sequence: Synthetic oligonucleotide
  misc_feature 1..20: note = Target: SCN10A; (-) strand; PAM type: NRG; PAM sequence: TGG
  source 1..20: mol_type = other DNA
atatatgtttcttgtttgaa

SEQ ID NO: 24008 - DNA, 20 bp, synthetic construct
  misc_feature 1..20: note = Description of Artificial Sequence: Synthetic oligonucleotide
  misc_feature 1..20: note = Target: SCN10A; (-) strand; PAM type: NRG; PAM sequence: TGG
  source 1..20: mol_type = other DNA
gattccttttgcctcttccc

SEQ ID NO: 24009 - DNA, 20 bp, synthetic construct
  misc_feature 1..20: note = Description of Artificial Sequence: Synthetic oligonucleotide
  misc_feature 1..20: note = Target: SCN10A; (-) strand; PAM type: NRG; PAM sequence: TGG
  source 1..20: mol_type = other DNA
tttcttcttcattctttttt

SEQ ID NO: 24010 - DNA, 20 bp, synthetic construct
  misc_feature 1..20: note = Description of Artificial Sequence: Synthetic oligonucleotide
  misc_feature 1..20: note = Target: SCN10A; (-) strand; PAM type: NRG; PAM sequence: GAG
  source 1..20: mol_type = other DNA
tgatgcacagctgttttcta

SEQ ID NO: 24011 - DNA, 20 bp, synthetic construct
  misc_feature 1..20: note = Description of Artificial Sequence: Synthetic oligonucleotide
  misc_feature 1..20: note = Target: SCN10A; (-) strand; PAM type: NRG; PAM sequence: TAG
  source 1..20: mol_type = other DNA
cctgatgcacagctgttttc

SEQ ID NO: 24012 - DNA, 20 bp, synthetic construct
  misc_feature 1..20: note = Description of Artificial Sequence: Synthetic oligonucleotide
  misc_feature 1..20: note = Target: SCN10A; (-) strand; PAM type: NRG; PAM sequence: CAG
  source 1..20: mol_type = other DNA
tgttttctaggcctgatgca

SEQ ID NO: 24013 - DNA, 20 bp, synthetic construct
  misc_feature 1..20: note = Description of Artificial Sequence: Synthetic oligonucleotide
  misc_feature 1..20: note = Target: SCN10A; (-) strand; PAM type: NRG; PAM sequence: AGG
  source 1..20: mol_type = other DNA
ttctgacctagatgttttct

SEQ ID NO: 24014 - DNA, 20 bp, synthetic construct
  misc_feature 1..20: note = Description of Artificial Sequence: Synthetic oligonucleotide
  misc_feature 1..20: note = Target: SCN10A; (-) strand; PAM type: NRG; PAM sequence: TAG
  source 1..20: mol_type = other DNA
attctgacctagatgttttc

SEQ ID NO: 24015 - DNA, 20 bp, synthetic construct
  misc_feature 1..20: note = Description of Artificial Sequence: Synthetic oligonucleotide
  misc_feature 1..20: note = Target: SCN10A; (-) strand; PAM type: NRG; PAM sequence: TAG
  source 1..20: mol_type = other DNA
tcttctgcctcattctgacc

SEQ ID NO: 24016 - DNA, 20 bp, synthetic construct
  misc_feature 1..20: note = Description of Artificial Sequence: Synthetic oligonucleotide
  misc_feature 1..20: note = Target: SCN10A; (-) strand; PAM type: NRG; PAM sequence: GAG
  source 1..20: mol_type = other DNA
tcctatgggaatcacagcta

SEQ ID NO: 24017 - DNA, 20 bp, synthetic construct
  misc_feature 1..20: note = Description of Artificial Sequence: Synthetic oligonucleotide
  misc_feature 1..20: note = Target: SCN10A; (-) strand; PAM type: NRG; PAM sequence: TAG
  source 1..20: mol_type = other DNA
tttcctatgggaatcacagc

SEQ ID NO: 24018 - DNA, 20 bp, synthetic construct
  misc_feature 1..20: note = Description of Artificial Sequence: Synthetic oligonucleotide
  misc_feature 1..20: note = Target: SCN10A; (-) strand; PAM type: NRG; PAM sequence: CAG
  source 1..20: mol_type = other DNA
tttttttcctatgggaatca

SEQ ID NO: 24019 - DNA, 20 bp, synthetic construct
  misc_feature 1..20: note = Description of Artificial Sequence: Synthetic oligonucleotide
  misc_feature 1..20: note = Target: SCN10A; (-) strand; PAM type: NRG; PAM sequence: GGG
  source 1..20: mol_type = other DNA
gtgtatcatttttttcctat

SEQ ID NO: 24020 - DNA, 20 bp, synthetic construct
  misc_feature 1..20: note = Description of Artificial Sequence: Synthetic oligonucleotide
  misc_feature 1..20: note = Target: SCN10A; (-) strand; PAM type: NRG; PAM sequence: TGG
  source 1..20: mol_type = other DNA
tgtgtatcatttttttccta

SEQ ID NO: 24021 - DNA, 20 bp, synthetic construct
  misc_feature 1..20: note = Description of Artificial Sequence: Synthetic oligonucleotide
  misc_feature 1..20: note = Target: SCN10A; (-) strand; PAM type: NRG; PAM sequence: AGG
  source 1..20: mol_type = other DNA
tcaatttatttgcacacatc

SEQ ID NO: 24022 - DNA, 20 bp, synthetic construct
  misc_feature 1..20: note = Description of Artificial Sequence: Synthetic oligonucleotide
  misc_feature 1..20: note = Target: SCN10A; (-) strand; PAM type: NRG; PAM sequence: CAG
  source 1..20: mol_type = other DNA
ttcaatttatttgcacacat

SEQ ID NO: 24023 - DNA, 20 bp, synthetic construct
  misc_feature 1..20: note = Description of Artificial Sequence: Synthetic oligonucleotide
  misc_feature 1..20: note = Target: SCN10A; (-) strand; PAM type: NRG; PAM sequence: CAG
  source 1..20: mol_type = other DNA
tttgttcccaaactcttctc

SEQ ID NO: 24024 - DNA, 20 bp, synthetic construct
  misc_feature 1..20: note = Description of Artificial Sequence: Synthetic oligonucleotide
  misc_feature 1..20: note = Target: SCN10A; (-) strand; PAM type: NRG; PAM sequence: CAG
  source 1..20: mol_type = other DNA
attttatttttttgtttgct

SEQ ID NO: 24025 - DNA, 20 bp, synthetic construct
  misc_feature 1..20: note = Description of Artificial Sequence: Synthetic oligonucleotide
  misc_feature 1..20: note = Target: SCN10A; (-) strand; PAM type: NRG; PAM sequence: AGG
  source 1..20: mol_type = other DNA
tgctttccttggagttaata

SEQ ID NO: 24026 - DNA, 20 bp, synthetic construct
  misc_feature 1..20: note = Description of Artificial Sequence: Synthetic oligonucleotide
  misc_feature 1..20: note = Target: SCN10A; (-) strand; PAM type: NRG; PAM sequence: AAG
  source 1..20: mol_type = other DNA
ttgctttccttggagttaat

SEQ ID NO: 24027 - DNA, 20 bp, synthetic construct
  misc_feature 1..20: note = Description of Artificial Sequence: Synthetic oligonucleotide
  misc_feature 1..20: note = Target: SCN10A; (-) strand; PAM type: NRG; PAM sequence: GAG
  source 1..20: mol_type = other DNA
caatgtttttgctttccttg

SEQ ID NO: 24028 - DNA, 20 bp, synthetic construct
  misc_feature 1..20: note = Description of Artificial Sequence: Synthetic oligonucleotide
  misc_feature 1..20: note = Target: SCN10A; (-) strand; PAM type: NRG; PAM sequence: TGG
  source 1..20: mol_type = other DNA
cacaatgtttttgctttcct

SEQ ID NO: 24029 - DNA, 20 bp, synthetic construct
  misc_feature 1..20: note = Description of Artificial Sequence: Synthetic oligonucleotide
  misc_feature 1..20: note = Target: SCN10A; (-) strand; PAM type: NRG; PAM sequence: CAG
  source 1..20: mol_type = other DNA
ctgtttacagctgtgtcatg

SEQ ID NO: 24030 - DNA, 20 bp, synthetic construct
  misc_feature 1..20: note = Description of Artificial Sequence: Synthetic oligonucleotide
  misc_feature 1..20: note = Target: SCN10A; (-) strand; PAM type: NRG; PAM sequence: CAG
  source 1..20: mol_type = other DNA
tgctaagtaaacactgttta

SEQ ID NO: 24031 - DNA, 20 bp, synthetic construct
  misc_feature 1..20: note = Description of Artificial Sequence: Synthetic oligonucleotide
  misc_feature 1..20: note = Target: SCN10A; (-) strand; PAM type: NRG; PAM sequence: AAG
  source 1..20: mol_type = other DNA
tataattacattacattgct

SEQ ID NO: 24032 - DNA, 20 bp, synthetic construct
  misc_feature 1..20: note = Description of Artificial Sequence: Synthetic oligonucleotide
  misc_feature 1..20: note = Target: SCN10A; (-) strand; PAM type: NRG; PAM sequence: CAG
  source 1..20: mol_type = other DNA
gtaatcttcagttagatcat

SEQ ID NO: 24033 - DNA, 20 bp, synthetic construct
  misc_feature 1..20: note = Description of Artificial Sequence: Synthetic oligonucleotide
  misc_feature 1..20: note = Target: SCN10A; (-) strand; PAM type: NRG; PAM sequence: TAG
  source 1..20: mol_type = other DNA
gttatattgtaatcttcagt

SEQ ID NO: 24034 - DNA, 20 bp, synthetic construct
  misc_feature 1..20: note = Description of Artificial Sequence: Synthetic oligonucleotide
  misc_feature 1..20: note = Target: SCN10A; (-) strand; PAM type: NRG; PAM sequence: CAG
  source 1..20: mol_type = other DNA
tacagttatattgtaatctt

SEQ ID NO: 24035 - DNA, 20 bp, synthetic construct
  misc_feature 1..20: note = Description of Artificial Sequence: Synthetic oligonucleotide
  misc_feature 1..20: note = Target: SCN10A; (-) strand; PAM type: NRG; PAM sequence: CAG
  source 1..20: mol_type = other DNA
tcaccctcatcttcctgtta

SEQ ID NO: 24036 - DNA, 20 bp, synthetic construct
  misc_feature 1..20: note = Description of Artificial Sequence: Synthetic oligonucleotide
  misc_feature 1..20: note = Target: SCN10A; (-) strand; PAM type: NRG; PAM sequence: AGG
  source 1..20: mol_type = other DNA
ctattatgagaaaaaactta

SEQ ID NO: 24037 - DNA, 20 bp, synthetic construct
  misc_feature 1..20: note = Description of Artificial Sequence: Synthetic oligonucleotide
  misc_feature 1..20: note = Target: SCN10A; (-) strand; PAM type: NRG; PAM sequence: AAG
  source 1..20: mol_type = other DNA
cctattatgagaaaaaactt

SEQ ID NO: 24038 - DNA, 20 bp, synthetic construct
  misc_feature 1..20: note = Description of Artificial Sequence: Synthetic oligonucleotide
  misc_feature 1..20: note = Target: SCN10A; (-) strand; PAM type: NRG; PAM sequence: GAG
  source 1..20: mol_type = other DNA
atttattggcttcctattat

SEQ ID NO: 24039 - DNA, 20 bp, synthetic construct
  misc_feature 1..20: note = Description of Artificial Sequence: Synthetic oligonucleotide
  misc_feature 1..20: note = Target: SCN10A; (-) strand; PAM type: NRG; PAM sequence: TGG
  source 1..20: mol_type = other DNA
caatttctgatgttatttat

SEQ ID NO: 24040 - DNA, 20 bp, synthetic construct
  misc_feature 1..20: note = Description of Artificial Sequence: Synthetic oligonucleotide
  misc_feature 1..20: note = Target: SCN10A; (-) strand; PAM type: NRG; PAM sequence: TAG
  source 1..20: mol_type = other DNA
tttccagaggccaccacttt

SEQ ID NO: 24041 - DNA, 20 bp, synthetic construct
  misc_feature 1..20: note = Description of Artificial Sequence: Synthetic oligonucleotide
  misc_feature 1..20: note = Target: SCN10A; (-) strand; PAM type: NRG; PAM sequence: AGG
  source 1..20: mol_type = other DNA
ttctcatctcttctttccag

SEQ ID NO: 24042 - DNA, 20 bp, synthetic construct
  misc_feature 1..20: note = Description of Artificial Sequence: Synthetic oligonucleotide
  misc_feature 1..20: note = Target: SCN10A; (-) strand; PAM type: NRG; PAM sequence: GAG
  source 1..20: mol_type = other DNA
tttctcatctcttctttcca

SEQ ID NO: 24043 - DNA, 20 bp, synthetic construct
  misc_feature 1..20: note = Description of Artificial Sequence: Synthetic oligonucleotide
  misc_feature 1..20: note = Target: SCN10A; (-) strand; PAM type: NRG; PAM sequence: CAG
  source 1..20: mol_type = other DNA
tttttctcatctcttctttc

SEQ ID NO: 24044 - DNA, 20 bp, synthetic construct
  misc_feature 1..20: note = Description of Artificial Sequence: Synthetic oligonucleotide
  misc_feature 1..20: note = Target: SCN10A; (-) strand; PAM type: NRG; PAM sequence: CAG
  source 1..20: mol_type = other DNA
aaagattctgacaaaaaaaa

SEQ ID NO: 24045 - DNA, 20 bp, synthetic construct
  misc_feature 1..20: note = Description of Artificial Sequence: Synthetic oligonucleotide
  misc_feature 1..20: note = Target: SCN10A; (-) strand; PAM type: NRG; PAM sequence: AAG
  source 1..20: mol_type = other DNA
aaaggtcacagagttttata

SEQ ID NO: 24046 - DNA, 20 bp, synthetic construct
  misc_feature 1..20: note = Description of Artificial Sequence: Synthetic oligonucleotide
  misc_feature 1..20: note = Target: SCN10A; (-) strand; PAM type: NRG; PAM sequence: GAG
  source 1..20: mol_type = other DNA
tcataatttaaaaggtcaca

SEQ ID NO: 24047 - DNA, 20 bp, synthetic construct
  misc_feature 1..20: note = Description of Artificial Sequence: Synthetic oligonucleotide
  misc_feature 1..20: note = Target: SCN10A; (-) strand; PAM type: NRG; PAM sequence: CAG
  source 1..20: mol_type = other DNA
gttcataatttaaaaggtca

SEQ ID NO: 24048 - DNA, 20 bp, synthetic construct
  misc_feature 1..20: note = Description of Artificial Sequence: Synthetic oligonucleotide
  misc_feature 1..20: note = Target: SCN10A; (-) strand; PAM type: NRG; PAM sequence: AGG
  source 1..20: mol_type = other DNA
atatatgttcataatttaaa

SEQ ID NO: 24049 - DNA, 20 bp, synthetic construct
  misc_feature 1..20: note = Description of Artificial Sequence: Synthetic oligonucleotide
  misc_feature 1..20: note = Target: SCN10A; (-) strand; PAM type: NRG; PAM sequence: AAG
  source 1..20: mol_type = other DNA
catatatgttcataatttaa

SEQ ID NO: 24050 - DNA, 20 bp, synthetic construct
  misc_feature 1..20: note = Description of Artificial Sequence: Synthetic oligonucleotide
  misc_feature 1..20: note = Target: SCN10A; (-) strand; PAM type: NRG; PAM sequence: AAG
  source 1..20: mol_type = other DNA
cttgacttttacttttattt

SEQ ID NO: 24051 - DNA, 20 bp, synthetic construct
  misc_feature 1..20: note = Description of Artificial Sequence: Synthetic oligonucleotide
  misc_feature 1..20: note = Target: SCN10A; (-) strand; PAM type: NRG; PAM sequence: CAG
  source 1..20: mol_type = other DNA
aaacacgatttctcctctca

SEQ ID NO: 24052 - DNA, 20 bp, synthetic construct
  misc_feature 1..20: note = Description of Artificial Sequence: Synthetic oligonucleotide
  misc_feature 1..20: note = Target: SCN10A; (-) strand; PAM type: NRG; PAM sequence: TAG
  source 1..20: mol_type = other DNA
agcagctatgcaaccagata

SEQ ID NO: 24053 - DNA, 20 bp, synthetic construct
  misc_feature 1..20: note = Description of Artificial Sequence: Synthetic oligonucleotide
  misc_feature 1..20: note = Target: SCN10A; (-) strand; PAM type: NRG; PAM sequence: CAG
  source 1..20: mol_type = other DNA
agctcaagcagctatgcaac

SEQ ID NO: 24054 - DNA, 20 bp, synthetic construct
  misc_feature 1..20: note = Description of Artificial Sequence: Synthetic oligonucleotide
  misc_feature 1..20: note = Target: SCN10A; (-) strand; PAM type: NRG; PAM sequence: CAG
  source 1..20: mol_type = other DNA
atggaagctgacagctcaag

SEQ ID NO: 24055 - DNA, 20 bp, synthetic construct
  misc_feature 1..20: note = Description of Artificial Sequence: Synthetic oligonucleotide
  misc_feature 1..20: note = Target: SCN10A; (-) strand; PAM type: NRG; PAM sequence: AAG
  source 1..20: mol_type = other DNA
gatatggaagctgacagctc

SEQ ID NO: 24056 - DNA, 20 bp, synthetic construct
  misc_feature 1..20: note = Description of Artificial Sequence: Synthetic oligonucleotide
  misc_feature 1..20: note = Target: SCN10A; (-) strand; PAM type: NRG; PAM sequence: CAG
  source 1..20: mol_type = other DNA
caacaagatatggaagctga

SEQ ID NO: 24057 - DNA, 20 bp, synthetic construct
  misc_feature 1..20: note = Description of Artificial Sequence: Synthetic oligonucleotide
  misc_feature 1..20: note = Target: SCN10A; (-) strand; PAM type: NRG; PAM sequence: AAG
  source 1..20: mol_type = other DNA
gggaaaccaacaagatatgg

SEQ ID NO: 24058 - DNA, 20 bp, synthetic construct
  misc_feature 1..20: note = Description of Artificial Sequence: Synthetic oligonucleotide
  misc_feature 1..20: note = Target: SCN10A; (-) strand; PAM type: NRG; PAM sequence: TGG
  source 1..20: mol_type = other DNA
ggggggaaaccaacaagata

SEQ ID NO: 24059 - DNA, 20 bp, synthetic construct
  misc_feature 1..20: note = Description of Artificial Sequence: Synthetic oligonucleotide
  misc_feature 1..20: note = Target: SCN10A; (-) strand; PAM type: NRG; PAM sequence: AAG
  source 1..20: mol_type = other DNA
agtgtgggggggaaaccaac

SEQ ID NO: 24060 - DNA, 20 bp, synthetic construct
  misc_feature 1..20: note = Description of Artificial Sequence: Synthetic oligonucleotide
  misc_feature 1..20: note = Target: SCN10A; (-) strand; PAM type: NRG; PAM sequence: GGG
  source 1..20: mol_type = other DNA
aaaacataaagagtgtgggg

SEQ ID NO: 24061 - DNA, 20 bp, synthetic construct
  misc_feature 1..20: note = Description of Artificial Sequence: Synthetic oligonucleotide
  misc_feature 1..20: note = Target: SCN10A; (-) strand; PAM type: NRG; PAM sequence: GGG
  source 1..20: mol_type = other DNA
gaaaacataaagagtgtggg

SEQ ID NO: 24062 - DNA, 20 bp, synthetic construct
  misc_feature 1..20: note = Description of Artificial Sequence: Synthetic oligonucleotide
  misc_feature 1..20: note = Target: SCN10A; (-) strand; PAM type: NRG; PAM sequence: GGG
  source 1..20: mol_type = other DNA
agaaaacataaagagtgtgg

SEQ ID NO: 24063 - DNA, 20 bp, synthetic construct
  misc_feature 1..20: note = Description of Artificial Sequence: Synthetic oligonucleotide
  misc_feature 1..20: note = Target: SCN10A; (-) strand; PAM type: NRG; PAM sequence: GGG
  source 1..20: mol_type = other DNA
tagaaaacataaagagtgtg

SEQ ID NO: 24064 - DNA, 20 bp, synthetic construct
  misc_feature 1..20: note = Description of Artificial Sequence: Synthetic oligonucleotide
  misc_feature 1..20: note = Target: SCN10A; (-) strand; PAM type: NRG; PAM sequence: GGG
  source 1..20: mol_type = other DNA
ttagaaaacataaagagtgt

SEQ ID NO: 24065 - DNA, 20 bp, synthetic construct
  misc_feature 1..20: note = Description of Artificial Sequence: Synthetic oligonucleotide
  misc_feature 1..20: note = Target: SCN10A; (-) strand; PAM type: NRG; PAM sequence: TGG
  source 1..20: mol_type = other DNA
tttagaaaacataaagagtg

SEQ ID NO: 24066 - DNA, 20 bp, synthetic construct
  misc_feature 1..20: note = Description of Artificial Sequence: Synthetic oligonucleotide
  misc_feature 1..20: note = Target: SCN10A; (-) strand; PAM type: NRG; PAM sequence: GAG
  source 1..20: mol_type = other DNA
tctaatttagaaaacataaa

SEQ ID NO: 24067 - DNA, 20 bp, synthetic construct
  misc_feature 1..20: note = Description of Artificial Sequence: Synthetic oligonucleotide
  misc_feature 1..20: note = Target: SCN10A; (-) strand; PAM type: NRG; PAM sequence: AAG
  source 1..20: mol_type = other DNA
tttctaatttagaaaacata

SEQ ID NO: 24068 - DNA, 20 bp, synthetic construct
  misc_feature 1..20: note = Description of Artificial Sequence: Synthetic oligonucleotide
  misc_feature 1..20: note = Target: SCN10A; (-) strand; PAM type: NRG; PAM sequence: TAG
  source 1..20: mol_type = other DNA
tgagttaagattttctaatt

SEQ ID NO: 24069 - DNA, 20 bp, synthetic construct
  misc_feature 1..20: note = Description of Artificial Sequence: Synthetic oligonucleotide
  misc_feature 1..20: note = Target: SCN10A; (-) strand; PAM type: NRG; PAM sequence: AAG
  source 1..20: mol_type = other DNA
acaacctataattctgagtt

SEQ ID NO: 24070 - DNA, 20 bp, synthetic construct
  misc_feature 1..20: note = Description of Artificial Sequence: Synthetic oligonucleotide
  misc_feature 1..20: note = Target: SCN10A; (-) strand; PAM type: NRG; PAM sequence: GAG
  source 1..20: mol_type = other DNA
tcccaacaacctataattct

SEQ ID NO: 24071 - DNA, 20 bp, synthetic construct
  misc_feature 1..20: note = Description of Artificial Sequence: Synthetic oligonucleotide
  misc_feature 1..20: note = Target: SCN10A; (-) strand; PAM type: NRG; PAM sequence: AAG
  source 1..20: mol_type = other DNA
caaaccagaaatatccatca

SEQ ID NO: 24072 - DNA, 20 bp, synthetic construct
  misc_feature 1..20: note = Description of Artificial Sequence: Synthetic oligonucleotide
  misc_feature 1..20: note = Target: SCN10A; (-) strand; PAM type: NRG; PAM sequence: CAG
  source 1..20: mol_type = other DNA
ctgtgtttgatttgacaaac

SEQ ID NO: 24073 - DNA, 20 bp, synthetic construct
  misc_feature 1..20: note = Description of Artificial Sequence: Synthetic oligonucleotide
  misc_feature 1..20: note = Target: SCN10A; (-) strand; PAM type: NRG; PAM sequence: GGG
  source 1..20: mol_type = other DNA
gcactctctccataatttct

SEQ ID NO: 24074 - DNA, 20 bp, synthetic construct
  misc_feature 1..20: note = Description of Artificial Sequence: Synthetic oligonucleotide
  misc_feature 1..20: note = Target: SCN10A; (-) strand; PAM type: NRG; PAM sequence: TGG
  source 1..20: mol_type = other DNA
agcactctctccataatttc

SEQ ID NO: 24075 - DNA, 20 bp, synthetic construct
  misc_feature 1..20: note = Description of Artificial Sequence: Synthetic oligonucleotide
  misc_feature 1..20: note = Target: SCN10A; (-) strand; PAM type: NRG; PAM sequence: GAG
  source 1..20: mol_type = other DNA
cactgaaaatagtctttaga

SEQ ID NO: 24076 - DNA, 20 bp, synthetic construct
  misc_feature 1..20: note = Description of Artificial Sequence: Synthetic oligonucleotide
  misc_feature 1..20: note = Target: SCN10A; (-) strand; PAM type: NRG; PAM sequence: GAG
  source 1..20: mol_type = other DNA
agcactgaaaatagtcttta

SEQ ID NO: 24077 - DNA, 20 bp, synthetic construct
  misc_feature 1..20: note = Description of Artificial Sequence: Synthetic oligonucleotide
  misc_feature 1..20: note = Target: SCN10A; (-) strand; PAM type: NRG; PAM sequence: TAG
  source 1..20: mol_type = other DNA
gaagcactgaaaatagtctt

SEQ ID NO: 24078 - DNA, 20 bp, synthetic construct
  misc_feature 1..20: note = Description of Artificial Sequence: Synthetic oligonucleotide
  misc_feature 1..20: note = Target: SCN10A; (-) strand; PAM type: NRG; PAM sequence: TAG
  source 1..20: mol_type = other DNA
ttctggtgaagcactgaaaa

SEQ ID NO: 24079 - DNA, 20 bp, synthetic construct
  misc_feature 1..20: note = Description of Artificial Sequence: Synthetic oligonucleotide
  misc_feature 1..20: note = Target: SCN10A; (-) strand; PAM type: NRG; PAM sequence: AAG
  source 1..20: mol_type = other DNA
ggggcacttgccttctggtg

SEQ ID NO: 24080 - DNA, 20 bp, synthetic construct
  misc_feature 1..20: note = Description of Artificial Sequence: Synthetic oligonucleotide
  misc_feature 1..20: note = Target: SCN10A; (-) strand; PAM type: NRG; PAM sequence: TGG
  source 1..20: mol_type = other DNA
gagctggggcacttgccttc

SEQ ID NO: 24081 - DNA, 20 bp, synthetic construct
  misc_feature 1..20: note = Description of Artificial Sequence: Synthetic oligonucleotide
  misc_feature 1..20: note = Target: SCN10A; (-) strand; PAM type: NRG; PAM sequence: GGG
  source 1..20: mol_type = other DNA
cattagctgctgttgagctg

SEQ ID NO: 24082 - DNA, 20 bp, synthetic construct
  misc_feature 1..20: note = Description of Artificial Sequence: Synthetic oligonucleotide
  misc_feature 1..20: note = Target: SCN10A; (-) strand; PAM type: NRG; PAM sequence: GGG
  source 1..20: mol_type = other DNA
ccattagctgctgttgagct

SEQ ID NO: 24083 - DNA, 20 bp, synthetic construct
  misc_feature 1..20: note = Description of Artificial Sequence: Synthetic oligonucleotide
  misc_feature 1..20: note = Target: SCN10A; (-) strand; PAM type: NRG; PAM sequence: TGG
  source 1..20: mol_type = other DNA
tccattagctgctgttgagc

SEQ ID NO: 24084 - DNA, 20 bp, synthetic construct
  misc_feature 1..20: note = Description of Artificial Sequence: Synthetic oligonucleotide
  misc_feature 1..20: note = Target: SCN10A; (-) strand; PAM type: NRG; PAM sequence: GAG
  source 1..20: mol_type = other DNA
caactccattagctgctgtt

SEQ ID NO: 24085 - DNA, 20 bp, synthetic construct
  misc_feature 1..20: note = Description of Artificial Sequence: Synthetic oligonucleotide
  misc_feature 1..20: note = Target: SCN10A; (-) strand; PAM type: NRG; PAM sequence: TAG
  source 1..20: mol_type = other DNA
aagagaggatgcaactccat

SEQ ID NO: 24086 - DNA, 20 bp, synthetic construct
  misc_feature 1..20: note = Description of Artificial Sequence: Synthetic oligonucleotide
  misc_feature 1..20: note = Target: SCN10A; (-) strand; PAM type: NRG; PAM sequence: AGG
  source 1..20: mol_type = other DNA
agccaaataccaccaaagag

SEQ ID NO: 24087 - DNA, 20 bp, synthetic construct
  misc_feature 1..20: note = Description of Artificial Sequence: Synthetic oligonucleotide
  misc_feature 1..20: note = Target: SCN10A; (-) strand; PAM type: NRG; PAM sequence: GAG
  source 1..20: mol_type = other DNA
gagccaaataccaccaaaga

SEQ ID NO: 24088 - DNA, 20 bp, synthetic construct
  misc_feature 1..20: note = Description of Artificial Sequence: Synthetic oligonucleotide
  misc_feature 1..20: note = Target: SCN10A; (-) strand; PAM type: NRG; PAM sequence: GAG
  source 1..20: mol_type = other DNA
cagagccaaataccaccaaa

SEQ ID NO: 24089 - DNA, 20 bp, synthetic construct
  misc_feature 1..20: note = Description of Artificial Sequence: Synthetic oligonucleotide
  misc_feature 1..20: note = Target: SCN10A; (-) strand; PAM type: NRG; PAM sequence: AAG
  source 1..20: mol_type = other DNA
tgcagagccaaataccacca

SEQ ID NO: 24090 - DNA, 20 bp, synthetic construct
  misc_feature 1..20: note = Description of Artificial Sequence: Synthetic oligonucleotide
  misc_feature 1..20: note = Target: SCN10A; (-) strand; PAM type: NRG; PAM sequence: GAG
  source 1..20: mol_type = other DNA
acatcaagaaataccttgca

SEQ ID NO: 24091 - DNA, 20 bp, synthetic construct
  misc_feature 1..20: note = Description of Artificial Sequence: Synthetic oligonucleotide
  misc_feature 1..20: note = Target: SCN10A; (-) strand; PAM type: NRG; PAM sequence: CAG
  source 1..20: mol_type = other DNA
caacatcaagaaataccttg

SEQ ID NO: 24092 - DNA, 20 bp, synthetic construct
  misc_feature 1..20: note = Description of Artificial Sequence: Synthetic oligonucleotide
  misc_feature 1..20: note = Target: SCN10A; (-) strand; PAM type: NRG; PAM sequence: AAG
  source 1..20: mol_type = other DNA
gaatgctgcaacccaacatc

SEQ ID NO: 24093 - DNA, 20 bp, synthetic construct
  misc_feature 1..20: note = Description of Artificial Sequence: Synthetic oligonucleotide
  misc_feature 1..20: note = Target: SCN10A; (-) strand; PAM type: NRG; PAM sequence: GGG
  source 1..20: mol_type = other DNA
cacttaggaaataacacatt

SEQ ID NO: 24094 - DNA, 20 bp, synthetic construct
  misc_feature 1..20: note = Description of Artificial Sequence: Synthetic oligonucleotide
  misc_feature 1..20: note = Target: SCN10A; (-) strand; PAM type: NRG; PAM sequence: TGG
  source 1..20: mol_type = other DNA
gcacttaggaaataacacat

SEQ ID NO: 24095 - DNA, 20 bp, synthetic construct
  misc_feature 1..20: note = Description of Artificial Sequence: Synthetic oligonucleotide
  misc_feature 1..20: note = Target: SCN10A; (-) strand; PAM type: NRG; PAM sequence: AGG
  source 1..20: mol_type = other DNA
attcaccagaaaaagcactt

SEQ ID NO: 24096 - DNA, 20 bp, synthetic construct
  misc_feature 1..20: note = Description of Artificial Sequence: Synthetic oligonucleotide
  misc_feature 1..20: note = Target: SCN10A; (-) strand; PAM type: NRG; PAM sequence: TAG
  source 1..20: mol_type = other DNA
cattcaccagaaaaagcact

SEQ ID NO: 24097 - DNA, 20 bp, synthetic construct
  misc_feature 1..20: note = Description of Artificial Sequence: Synthetic oligonucleotide
  misc_feature 1..20: note = Target: SCN10A; (-) strand; PAM type: NRG; PAM sequence: AAG
  source 1..20: mol_type = other DNA
ttttcttcattcaccagaaa

SEQ ID NO: 24098 - DNA, 20 bp, synthetic construct
  misc_feature 1..20: note = Description of Artificial Sequence: Synthetic oligonucleotide
  misc_feature 1..20: note = Target: SCN10A; (-) strand; PAM type: NRG; PAM sequence: CAG
  source 1..20: mol_type = other DNA
caatgattttcttcattcac

SEQ ID NO: 24099 - DNA, 20 bp, synthetic construct
  misc_feature 1..20: note = Description of Artificial Sequence: Synthetic oligonucleotide
  misc_feature 1..20: note = Target: SCN10A; (-) strand; PAM type: NRG; PAM sequence: GAG
  source 1..20: mol_type = other DNA
gtgcaagtggctcaacggct

SEQ ID NO: 24100 - DNA, 20 bp, synthetic construct
  misc_feature 1..20: note = Description of Artificial Sequence: Synthetic oligonucleotide
  misc_feature 1..20: note = Target: SCN10A; (-) strand; PAM type: NRG; PAM sequence: CGG
  source 1..20: mol_type = other DNA
cagtggtgcaagtggctcaa

SEQ ID NO: 24101 - DNA, 20 bp, synthetic construct
  misc_feature 1..20: note = Description of Artificial Sequence: Synthetic oligonucleotide
  misc_feature 1..20: note = Target: SCN10A; (-) strand; PAM type: NRG; PAM sequence: TGG
  source 1..20: mol_type = other DNA
tcagacatcagtggtgcaag

SEQ ID NO: 24102 - DNA, 20 bp, synthetic construct
  misc_feature 1..20: note = Description of Artificial Sequence: Synthetic oligonucleotide
  misc_feature 1..20: note = Target: SCN10A; (-) strand; PAM type: NRG; PAM sequence: AAG
  source 1..20: mol_type = other DNA
caatcagacatcagtggtgc

SEQ ID NO: 24103 - DNA, 20 bp, synthetic construct
  misc_feature 1..20: note = Description of Artificial Sequence: Synthetic oligonucleotide
  misc_feature 1..20: note = Target: SCN10A; (-) strand; PAM type: NRG; PAM sequence: TGG
  source 1..20: mol_type = other DNA
ttgtaacaatcagacatcag

SEQ ID NO: 24104 - DNA, 20 bp, synthetic construct
  misc_feature 1..20: note = Description of Artificial Sequence: Synthetic oligonucleotide
  misc_feature 1..20: note = Target: SCN10A; (-) strand; PAM type: NRG; PAM sequence: CAG
  source 1..20: mol_type = other DNA
gatttgtaacaatcagacat

SEQ ID NO: 24105 - DNA, 20 bp, synthetic construct
  misc_feature 1..20: note = Description of Artificial Sequence: Synthetic oligonucleotide
  misc_feature 1..20: note = Target: SCN10A; (-) strand; PAM type: NRG; PAM sequence: CAG
  source 1..20: mol_type = other DNA
atatcgggatttgtaacaat

SEQ ID NO: 24106 - DNA, 20 bp, synthetic construct
  misc_feature 1..20: note = Description of Artificial Sequence: Synthetic oligonucleotide
  misc_feature 1..20: note = Target: SCN10A; (-) strand; PAM type: NRG; PAM sequence: GGG
  source 1..20: mol_type = other DNA
gttttcagagcctgaatatc

SEQ ID NO: 24107 - DNA, 20 bp, synthetic construct
  misc_feature 1..20: note = Description of Artificial Sequence: Synthetic oligonucleotide
  misc_feature 1..20: note = Target: SCN10A; (-) strand; PAM type: NRG; PAM sequence: CGG
  source 1..20: mol_type = other DNA
tgttttcagagcctgaatat

SEQ ID NO: 24108 - DNA, 20 bp, synthetic construct
  misc_feature 1..20: note = Description of Artificial Sequence: Synthetic oligonucleotide
  misc_feature 1..20: note = Target: SCN10A; (-) strand; PAM type: NRG; PAM sequence: GAG
  source 1..20: mol_type = other DNA
attatgaatctttgttttca

SEQ ID NO: 24109 - DNA, 20 bp, synthetic construct
  misc_feature 1..20: note = Description of Artificial Sequence: Synthetic oligonucleotide
  misc_feature 1..20: note = Target: SCN10A; (-) strand; PAM type: NRG; PAM sequence: CAG
  source 1..20: mol_type = other DNA
atattatgaatctttgtttt

SEQ ID NO: 24110 - DNA, 20 bp, synthetic construct
  misc_feature 1..20: note = Description of Artificial Sequence: Synthetic oligonucleotide
  misc_feature 1..20: note = Target: SCN10A; (-) strand; PAM type: NRG; PAM sequence: CAG
  source 1..20: mol_type = other DNA
gggtatctcagtgatccatt

SEQ ID NO: 24111 - DNA, 20 bp, synthetic construct
  misc_feature 1..20: note = Description of Artificial Sequence: Synthetic oligonucleotide
  misc_feature 1..20: note = Target: SCN10A; (-) strand; PAM type: NRG; PAM sequence: CAG
  source 1..20: mol_type = other DNA
tgaatacaagttgggtatct

SEQ ID NO: 24112 - DNA, 20 bp, synthetic construct
  misc_feature 1..20: note = Description of Artificial Sequence: Synthetic oligonucleotide
  misc_feature 1..20: note = Target: SCN10A; (-) strand; PAM type: NRG; PAM sequence: GGG
  source 1..20: mol_type = other DNA
catttttatgaatacaagtt

SEQ ID NO: 24113 - DNA, 20 bp, synthetic construct
  misc_feature 1..20: note = Description of Artificial Sequence: Synthetic oligonucleotide
  misc_feature 1..20: note = Target: SCN10A; (-) strand; PAM type: NRG; PAM sequence: TGG
  source 1..20: mol_type = other DNA
ccatttttatgaatacaagt

SEQ ID NO: 24114 - DNA, 20 bp, synthetic construct
  misc_feature 1..20: note = Description of Artificial Sequence: Synthetic oligonucleotide
  misc_feature 1..20: note = Target: SCN10A; (-) strand; PAM type: NRG; PAM sequence: AAG
  source 1..20: mol_type = other DNA
attaccatttttatgaatac

SEQ ID NO: 24115 - DNA, 20 bp, synthetic construct
  misc_feature 1..20: note = Description of Artificial Sequence: Synthetic oligonucleotide
  misc_feature 1..20: note = Target: SCN10A; (-) strand; PAM type: NRG; PAM sequence: AGG
  source 1..20: mol_type = other DNA
tacacagagttttaaaaata

SEQ ID NO: 24116 - DNA, 20 bp, synthetic construct
  misc_feature 1..20: note = Description of Artificial Sequence: Synthetic oligonucleotide
  misc_feature 1..20: note = Target: SCN10A; (-) strand; PAM type: NRG; PAM sequence: AAG
  source 1..20: mol_type = other DNA
ttacacagagttttaaaaat

SEQ ID NO: 24117 - DNA, 20 bp, synthetic construct
  misc_feature 1..20: note = Description of Artificial Sequence: Synthetic oligonucleotide
  misc_feature 1..20: note = Target: SCN10A; (-) strand; PAM type: NRG; PAM sequence: GAG
  source 1..20: mol_type = other DNA
aaatgggaagggcttacaca

SEQ ID NO: 24118 - DNA, 20 bp, synthetic construct
  misc_feature 1..20: note = Description of Artificial Sequence: Synthetic oligonucleotide
  misc_feature 1..20: note = Target: SCN10A; (-) strand; PAM type: NRG; PAM sequence: CAG
  source 1..20: mol_type = other DNA
gcaaatgggaagggcttaca

SEQ ID NO: 24119 - DNA, 20 bp, synthetic construct
  misc_feature 1..20: note = Description of Artificial Sequence: Synthetic oligonucleotide
  misc_feature 1..20: note = Target: SCN10A; (-) strand; PAM type: NRG; PAM sequence: GGG
  source 1..20: mol_type = other DNA
ctttggctggcaaatgggaa

SEQ ID NO: 24120 - DNA, 20 bp, synthetic construct
  misc_feature 1..20: note = Description of Artificial Sequence: Synthetic oligonucleotide
  misc_feature 1..20: note = Target: SCN10A; (-) strand; PAM type: NRG; PAM sequence: AGG
  source 1..20: mol_type = other DNA
gctttggctggcaaatggga

SEQ ID NO: 24121 - DNA, 20 bp, synthetic construct
  misc_feature 1..20: note = Description of Artificial Sequence: Synthetic oligonucleotide
  misc_feature 1..20: note = Target: SCN10A; (-) strand; PAM type: NRG; PAM sequence: AAG
  source 1..20: mol_type = other DNA
tgctttggctggcaaatggg

SEQ ID NO: 24122 - DNA, 20 bp, synthetic construct
  misc_feature 1..20: note = Description of Artificial Sequence: Synthetic oligonucleotide
  misc_feature 1..20: note = Target: SCN10A; (-) strand; PAM type: NRG; PAM sequence: GGG
  source 1..20: mol_type = other DNA
aattgctttggctggcaaat

SEQ ID NO: 24123 - DNA, 20 bp, synthetic construct
  misc_feature 1..20: note = Description of Artificial Sequence: Synthetic oligonucleotide
  misc_feature 1..20: note = Target: SCN10A; (-) strand; PAM type: NRG; PAM sequence: TGG
  source 1..20: mol_type = other DNA
gaattgctttggctggcaaa

SEQ ID NO: 24124 - DNA, 20 bp, synthetic construct
  misc_feature 1..20: note = Description of Artificial Sequence: Synthetic oligonucleotide
  misc_feature 1..20: note = Target: SCN10A; (-) strand; PAM type: NRG; PAM sequence: TGG
  source 1..20: mol_type = other DNA
ccacactgaattgctttggc

SEQ ID NO: 24125 - DNA, 20 bp, synthetic construct
  misc_feature 1..20: note = Description of Artificial Sequence: Synthetic oligonucleotide
  misc_feature 1..20: note = Target: SCN10A; (-) strand; PAM type: NRG; PAM sequence: TGG
  source 1..20: mol_type = other DNA
tctcccacactgaattgctt

SEQ ID NO: 24126 - DNA, 20 bp, synthetic construct
  misc_feature 1..20: note = Description of Artificial Sequence: Synthetic oligonucleotide
  misc_feature 1..20: note = Target: SCN10A; (-) strand; PAM type: NRG; PAM sequence: AGG
  source 1..20: mol_type = other DNA
aaatgaaaagtgagtaagag

SEQ ID NO: 24127 - DNA, 20 bp, synthetic construct
  misc_feature 1..20: note = Description of Artificial Sequence: Synthetic oligonucleotide
  misc_feature 1..20: note = Target: SCN10A; (-) strand; PAM type: NRG; PAM sequence: GAG
  source 1..20: mol_type = other DNA
gaaatgaaaagtgagtaaga

SEQ ID NO: 24128 - DNA, 20 bp, synthetic construct
  misc_feature 1..20: note = Description of Artificial Sequence: Synthetic oligonucleotide
  misc_feature 1..20: note = Target: SCN10A; (-) strand; PAM type: NRG; PAM sequence: GAG
  source 1..20: mol_type = other DNA
ctgaaatgaaaagtgagtaa

SEQ ID NO: 24129 - DNA, 20 bp, synthetic construct
  misc_feature 1..20: note = Description of Artificial Sequence: Synthetic oligonucleotide
  misc_feature 1..20: note = Target: SCN10A; (-) strand; PAM type: NRG; PAM sequence: AAG
  source 1..20: mol_type = other DNA
ggctgaaatgaaaagtgagt

SEQ ID NO: 24130 - DNA, 20 bp, synthetic construct
  misc_feature 1..20: note = Description of Artificial Sequence: Synthetic oligonucleotide
  misc_feature 1..20: note = Target: SCN10A; (-) strand; PAM type: NRG; PAM sequence: GAG
  source 1..20: mol_type = other DNA
actgggctgaaatgaaaagt

SEQ ID NO: 24131 - DNA, 20 bp, synthetic construct
  misc_feature 1..20: note = Description of Artificial Sequence: Synthetic oligonucleotide
  misc_feature 1..20: note = Target: SCN10A; (-) strand; PAM type: NRG; PAM sequence: AAG
  source 1..20: mol_type = other DNA
gcctactgggctgaaatgaa

SEQ ID NO: 24132 - DNA, 20 bp, synthetic construct
  misc_feature 1..20: note = Description of Artificial Sequence: Synthetic oligonucleotide
  misc_feature 1..20: note = Target: SCN10A; (-) strand; PAM type: NRG; PAM sequence: GGG
  source 1..20: mol_type = other DNA
gtacatctctttggcctact

SEQ ID NO: 24133 - DNA, 20 bp, synthetic construct
  misc_feature 1..20: note = Description of Artificial Sequence: Synthetic oligonucleotide
  misc_feature 1..20: note = Target: SCN10A; (-) strand; PAM type: NRG; PAM sequence: TGG
  source 1..20: mol_type = other DNA
tgtacatctctttggcctac

SEQ ID NO: 24134 - DNA, 20 bp, synthetic construct
  misc_feature 1..20: note = Description of Artificial Sequence: Synthetic oligonucleotide
  misc_feature 1..20: note = Target: SCN10A; (-) strand; PAM type: NRG; PAM sequence: TGG
  source 1..20: mol_type = other DNA
tcacttagtgtacatctctt

SEQ ID NO: 24135 - DNA, 20 bp, synthetic construct
  misc_feature 1..20: note = Description of Artificial Sequence: Synthetic oligonucleotide
  misc_feature 1..20: note = Target: SCN10A; (-) strand; PAM type: NRG; PAM sequence: TAG
  source 1..20: mol_type = other DNA
acaaactgattgtggtcact

SEQ ID NO: 24136 - DNA, 20 bp, synthetic construct
  misc_feature 1..20: note = Description of Artificial Sequence: Synthetic oligonucleotide
  misc_feature 1..20: note = Target: SCN10A; (-) strand; PAM type: NRG; PAM sequence: TGG
  source 1..20: mol_type = other DNA
ttgtgaatacaaactgattg

SEQ ID NO: 24137 - DNA, 20 bp, synthetic construct
  misc_feature 1..20: note = Description of Artificial Sequence: Synthetic oligonucleotide
  misc_feature 1..20: note = Target: SCN10A; (-) strand; PAM type: NRG; PAM sequence: TGG
  source 1..20: mol_type = other DNA
tttgctgttgaggtacacag

SEQ ID NO: 24138 - DNA, 20 bp, synthetic construct
  misc_feature 1..20: note = Description of Artificial Sequence: Synthetic oligonucleotide
  misc_feature 1..20: note = Target: SCN10A; (-) strand; PAM type: NRG; PAM sequence: CAG
  source 1..20: mol_type = other DNA
tgatttgctgttgaggtaca

SEQ ID NO: 24139 - DNA, 20 bp, synthetic construct
  misc_feature 1..20: note = Description of Artificial Sequence: Synthetic oligonucleotide
  misc_feature 1..20: note = Target: SCN10A; (-) strand; PAM type: NRG; PAM sequence: AGG
  source 1..20: mol_type = other DNA
cagattctgatttgctgttg

SEQ ID NO: 24140 - DNA, 20 bp, synthetic construct
  misc_feature 1..20: note = Description of Artificial Sequence: Synthetic oligonucleotide
  misc_feature 1..20: note = Target: SCN10A; (-) strand; PAM type: NRG; PAM sequence: GAG
  source 1..20: mol_type = other DNA
ccagattctgatttgctgtt

SEQ ID NO: 24141 - DNA, 20 bp, synthetic construct
  misc_feature 1..20: note = Description of Artificial Sequence: Synthetic oligonucleotide
  misc_feature 1..20: note = Target: SCN10A; (-) strand; PAM type: NRG; PAM sequence: CAG
  source 1..20: mol_type = other DNA
gggggtctgtaatatgcctc

SEQ ID NO: 24142 - DNA, 20 bp, synthetic construct
  misc_feature 1..20: note = Description of Artificial Sequence: Synthetic oligonucleotide
  misc_feature 1..20: note = Target: SCN10A; (-) strand; PAM type: NRG; PAM sequence: GGG
  source 1..20: mol_type = other DNA
tattcacggaacgcagctgg

SEQ ID NO: 24143 - DNA, 20 bp, synthetic construct
  misc_feature 1..20: note = Description of Artificial Sequence: Synthetic oligonucleotide
  misc_feature 1..20: note = Target: SCN10A; (-) strand; PAM type: NRG; PAM sequence: GGG
  source 1..20: mol_type = other DNA
ttattcacggaacgcagctg

SEQ ID NO: 24144 - DNA, 20 bp, synthetic construct
  misc_feature 1..20: note = Description of Artificial Sequence: Synthetic oligonucleotide
  misc_feature 1..20: note = Target: SCN10A; (-) strand; PAM type: NRG; PAM sequence: GGG
  source 1..20: mol_type = other DNA
cttattcacggaacgcagct

SEQ ID NO: 24145 - DNA, 20 bp, synthetic construct
  misc_feature 1..20: note = Description of Artificial Sequence: Synthetic oligonucleotide
  misc_feature 1..20: note = Target: SCN10A; (-) strand; PAM type: NRG; PAM sequence: TGG
  source 1..20: mol_type = other DNA
ccttattcacggaacgcagc

SEQ ID NO: 24146 - DNA, 20 bp, synthetic construct
  misc_feature 1..20: note = Description of Artificial Sequence: Synthetic oligonucleotide
  misc_feature 1..20: note = Target: SCN10A; (-) strand; PAM type: NRG; PAM sequence: CAG
  source 1..20: mol_type = other DNA
cataccttattcacggaacg

SEQ ID NO: 24147 - DNA, 20 bp, synthetic construct
  misc_feature 1..20: note = Description of Artificial Sequence: Synthetic oligonucleotide
  misc_feature 1..20: note = Target: SCN10A; (-) strand; PAM type: NRG; PAM sequence: CGG
  source 1..20: mol_type = other DNA
gctagtgcataccttattca

SEQ ID NO: 24148 - DNA, 20 bp, synthetic construct
  misc_feature 1..20: note = Description of Artificial Sequence: Synthetic oligonucleotide
  misc_feature 1..20: note = Target: SCN10A; (-) strand; PAM type: NRG; PAM sequence: TAG
  source 1..20: mol_type = other DNA
ctgctcccagatcccaatgc

SEQ ID NO: 24149 - DNA, 20 bp, synthetic construct
  misc_feature 1..20: note = Description of Artificial Sequence: Synthetic oligonucleotide
  misc_feature 1..20: note = Target: SCN10A; (-) strand; PAM type: NRG; PAM sequence: CAG
  source 1..20: mol_type = other DNA
cagatagaagatgctgctcc

SEQ ID NO: 24150 - DNA, 20 bp, synthetic construct
  misc_feature 1..20: note = Description of Artificial Sequence: Synthetic oligonucleotide
  misc_feature 1..20: note = Target: SCN10A; (-) strand; PAM type: NRG; PAM sequence: AAG
  source 1..20: mol_type = other DNA
aggtatcactatccagatag

SEQ ID NO: 24151 - DNA, 20 bp, synthetic construct
  misc_feature 1..20: note = Description of Artificial Sequence: Synthetic oligonucleotide
  misc_feature 1..20: note = Target: SCN10A; (-) strand; PAM type: NRG; PAM sequence: TAG
  source 1..20: mol_type = other DNA
gaaaggtatcactatccaga

SEQ ID NO: 24152 - DNA, 20 bp, synthetic construct
  misc_feature 1..20: note = Description of Artificial Sequence: Synthetic oligonucleotide
  misc_feature 1..20: note = Target: SCN10A; (-) strand; PAM type: NRG; PAM sequence: CAG
  source 1..20: mol_type = other DNA
caaggaaaggtatcactatc

SEQ ID NO: 24153 - DNA, 20 bp, synthetic construct
  misc_feature 1..20: note = Description of Artificial Sequence: Synthetic oligonucleotide
  misc_feature 1..20: note = Target: SCN10A; (-) strand; PAM type: NRG; PAM sequence: AGG
  source 1..20: mol_type = other DNA
gccacatggtcagcaaggaa

SEQ ID NO: 24154 - DNA, 20 bp, synthetic construct
  misc_feature 1..20: note = Description of Artificial Sequence: Synthetic oligonucleotide
  misc_feature 1..20: note = Target: SCN10A; (-) strand; PAM type: NRG; PAM sequence: AAG
  source 1..20: mol_type = other DNA
agccacatggtcagcaagga

SEQ ID NO: 24155 - DNA, 20 bp, synthetic construct
  misc_feature 1..20: note = Description of Artificial Sequence: Synthetic oligonucleotide
  misc_feature 1..20: note = Target: SCN10A; (-) strand; PAM type: NRG; PAM sequence: AGG
  source 1..20: mol_type = other DNA
ctccagccacatggtcagca

SEQ ID NO: 24156 - DNA, 20 bp, synthetic construct
  misc_feature 1..20: note = Description of Artificial Sequence: Synthetic oligonucleotide
  misc_feature 1..20: note = Target: SCN10A; (-) strand; PAM type: NRG; PAM sequence: AAG
  source 1..20: mol_type = other DNA
actccagccacatggtcagc

SEQ ID NO: 24157 - DNA, 20 bp, synthetic construct
  misc_feature 1..20: note = Description of Artificial Sequence: Synthetic oligonucleotide
  misc_feature 1..20: note = Target: SCN10A; (-) strand; PAM type: NRG; PAM sequence: CAG
  source 1..20: mol_type = other DNA
agaaactccagccacatggt

SEQ ID NO: 24158 - DNA, 20 bp, synthetic construct
  misc_feature 1..20: note = Description of Artificial Sequence: Synthetic oligonucleotide
  misc_feature 1..20: note = Target: SCN10A; (-) strand; PAM type: NRG; PAM sequence: TGG
  source 1..20: mol_type = other DNA
ttgaagaaactccagccaca

SEQ ID NO: 24159 - DNA, 20 bp, synthetic construct
  misc_feature 1..20: note = Description of Artificial Sequence: Synthetic oligonucleotide
  misc_feature 1..20: note = Target: SCN10A; (-) strand; PAM type: NRG; PAM sequence: CAG
  source 1..20: mol_type = other DNA
aattgccattgaagaaactc

SEQ ID NO: 24160 - DNA, 20 bp, synthetic construct
  misc_feature 1..20: note = Description of Artificial Sequence: Synthetic oligonucleotide
  misc_feature 1..20: note = Target: SCN10A; (-) strand; PAM type: NRG; PAM sequence: AAG
  source 1..20: mol_type = other DNA
aaggtgttaaattgccattg

SEQ ID NO: 24161 - DNA, 20 bp, synthetic construct
  misc_feature 1..20: note = Description of Artificial Sequence: Synthetic oligonucleotide
  misc_feature 1..20: note = Target: SCN10A; (-) strand; PAM type: NRG; PAM sequence: AGG
  source 1..20: mol_type = other DNA
acttttttttaaaagaggaa

SEQ ID NO: 24162 - DNA, 20 bp, synthetic construct
  misc_feature 1..20: note = Description of Artificial Sequence: Synthetic oligonucleotide
  misc_feature 1..20: note = Target: SCN10A; (-) strand; PAM type: NRG; PAM sequence: AAG
  source 1..20: mol_type = other DNA
aacttttttttaaaagagga

SEQ ID NO: 24163 - DNA, 20 bp, synthetic construct
  misc_feature 1..20: note = Description of Artificial Sequence: Synthetic oligonucleotide
  misc_feature 1..20: note = Target: SCN10A; (-) strand; PAM type: NRG; PAM sequence: AGG
  source 1..20: mol_type = other DNA
ccaaaacttttttttaaaag

SEQ ID NO: 24164 - DNA, 20 bp, synthetic construct
  misc_feature 1..20: note = Description of Artificial Sequence: Synthetic oligonucleotide
  misc_feature 1..20: note = Target: SCN10A; (-) strand; PAM type: NRG; PAM sequence: GAG
  source 1..20: mol_type = other DNA
accaaaacttttttttaaaa

SEQ ID NO: 24165 - DNA, 20 bp, synthetic construct
  misc_feature 1..20: note = Description of Artificial Sequence: Synthetic oligonucleotide
  misc_feature 1..20: note = Target: SCN10A; (-) strand; PAM type: NRG; PAM sequence: AAG
  source 1..20: mol_type = other DNA
ttaccaaaacttttttttaa

SEQ ID NO: 24166 - DNA, 20 bp, synthetic construct
  misc_feature 1..20: note = Description of Artificial Sequence: Synthetic oligonucleotide
  misc_feature 1..20: note = Target: SCN10A; (-) strand; PAM type: NRG; PAM sequence: TGG
  source 1..20: mol_type = other DNA
gtacttaaaaatggtgaaag

SEQ ID NO: 24167 - DNA, 20 bp, synthetic construct
  misc_feature 1..20: note = Description of Artificial Sequence: Synthetic oligonucleotide
  misc_feature 1..20: note = Target: SCN10A; (-) strand; PAM type: NRG; PAM sequence: AAG
  source 1..20: mol_type = other DNA
tgtgtacttaaaaatggtga

SEQ ID NO: 24168 - DNA, 20 bp, synthetic construct
  misc_feature 1..20: note = Description of Artificial Sequence: Synthetic oligonucleotide
  misc_feature 1..20: note = Target: SCN10A; (-) strand; PAM type: NRG; PAM sequence: TGG
  source 1..20: mol_type = other DNA
ctaaattgtgtacttaaaaa

SEQ ID NO: 24169 - DNA, 20 bp, synthetic construct
  misc_feature 1..20: note = Description of Artificial Sequence: Synthetic oligonucleotide
  misc_feature 1..20: note = Target: SCN10A; (-) strand; PAM type: NRG; PAM sequence: TAG
  source 1..20: mol_type = other DNA
ttggaaacagatagtggtga

SEQ ID NO: 24170 - DNA, 20 bp, synthetic construct
  misc_feature 1..20: note = Description of Artificial Sequence: Synthetic oligonucleotide
  misc_feature 1..20: note = Target: SCN10A; (-) strand; PAM type: NRG; PAM sequence: TGG
  source 1..20: mol_type = other DNA
aaaagtttggaaacagatag

SEQ ID NO: 24171 - DNA, 20 bp, synthetic construct
  misc_feature 1..20: note = Description of Artificial Sequence: Synthetic oligonucleotide
  misc_feature 1..20: note = Target: SCN10A; (-) strand; PAM type: NRG; PAM sequence: TAG
  source 1..20: mol_type = other DNA
taaaaaagtttggaaacaga

SEQ ID NO: 24172 - DNA, 20 bp, synthetic construct
  misc_feature 1..20: note = Description of Artificial Sequence: Synthetic oligonucleotide
  misc_feature 1..20: note = Target: SCN10A; (-) strand; PAM type: NRG; PAM sequence: CAG
  source 1..20: mol_type = other DNA
attataaaaaagtttggaaa

SEQ ID NO: 24173 - DNA, 20 bp, synthetic construct
  misc_feature 1..20: note = Description of Artificial Sequence: Synthetic oligonucleotide
  misc_feature 1..20: note = Target: SCN10A; (-) strand; PAM type: NRG; PAM sequence: TGG
  source 1..20: mol_type = other DNA
ttcgggattataaaaaagtt

SEQ ID NO: 24174 - DNA, 20 bp, synthetic construct
  misc_feature 1..20: note = Description of Artificial Sequence: Synthetic oligonucleotide
  misc_feature 1..20: note = Target: SCN10A; (-) strand; PAM type: NRG; PAM sequence: AAG
  source 1..20: mol_type = other DNA
ttctgttcgggattataaaa

SEQ ID NO: 24175 - DNA, 20 bp, synthetic construct
  misc_feature 1..20: note = Description of Artificial Sequence: Synthetic oligonucleotide
  misc_feature 1..20: note = Target: SCN10A; (-) strand; PAM type: NRG; PAM sequence: GGG
  source 1..20: mol_type = other DNA
taatgggtacatttctgttc

SEQ ID NO: 24176 - DNA, 20 bp, synthetic construct
  misc_feature 1..20: note = Description of Artificial Sequence: Synthetic oligonucleotide
  misc_feature 1..20: note = Target: SCN10A; (-) strand; PAM type: NRG; PAM sequence: CGG
  source 1..20: mol_type = other DNA
ttaatgggtacatttctgtt

SEQ ID NO: 24177 - DNA, 20 bp, synthetic construct
  misc_feature 1..20: note = Description of Artificial Sequence: Synthetic oligonucleotide
  misc_feature 1..20: note = Target: SCN10A; (-) strand; PAM type: NRG; PAM sequence: GGG
  source 1..20: mol_type = other DNA
atggggagttattatttaat

SEQ ID NO: 24178 - DNA, 20 bp, synthetic construct
  misc_feature 1..20: note = Description of Artificial Sequence: Synthetic oligonucleotide
  misc_feature 1..20: note = Target: SCN10A; (-) strand; PAM type: NRG; PAM sequence: TGG
  source 1..20: mol_type = other DNA
aatggggagttattatttaa

SEQ ID NO: 24179 - DNA, 20 bp, synthetic construct
  misc_feature 1..20: note = Description of Artificial Sequence: Synthetic oligonucleotide
  misc_feature 1..20: note = Target: SCN10A; (-) strand; PAM type: NRG; PAM sequence: GAG
  source 1..20: mol_type = other DNA
tgccagagagggggaatggg

SEQ ID NO: 24180 - DNA, 20 bp, synthetic construct
  misc_feature 1..20: note = Description of Artificial Sequence: Synthetic oligonucleotide
  misc_feature 1..20: note = Target: SCN10A; (-) strand; PAM type: NRG; PAM sequence: GGG
  source 1..20: mol_type = other DNA
gttgccagagagggggaatg

SEQ ID NO: 24181 - DNA, 20 bp, synthetic construct
  misc_feature 1..20: note = Description of Artificial Sequence: Synthetic oligonucleotide
  misc_feature 1..20: note = Target: SCN10A; (-) strand; PAM type: NRG; PAM sequence: GGG
  source 1..20: mol_type = other DNA
agttgccagagagggggaat

SEQ ID NO: 24182 - DNA, 20 bp, synthetic construct
  misc_feature 1..20: note = Description of Artificial Sequence: Synthetic oligonucleotide
  misc_feature 1..20: note = Target: SCN10A; (-) strand; PAM type: NRG; PAM sequence: TGG
  source 1..20: mol_type = other DNA
aagttgccagagagggggaa

SEQ ID NO: 24183 - DNA, 20 bp, synthetic construct
  misc_feature 1..20: note = Description of Artificial Sequence: Synthetic oligonucleotide
  misc_feature 1..20: note = Target: SCN10A; (-) strand; PAM type: NRG; PAM sequence: GGG
  source 1..20: mol_type = other DNA
aatggaagttgccagagagg

SEQ ID NO: 24184 - DNA, 20 bp, synthetic construct
  misc_feature 1..20: note = Description of Artificial Sequence: Synthetic oligonucleotide
  misc_feature 1..20: note = Target: SCN10A; (-) strand; PAM type: NRG; PAM sequence: GGG
  source 1..20: mol_type = other DNA
gaatggaagttgccagagag

SEQ ID NO: 24185 - DNA, 20 bp, synthetic construct
  misc_feature 1..20: note = Description of Artificial Sequence: Synthetic oligonucleotide
  misc_feature 1..20: note = Target: SCN10A; (-) strand; PAM type: NRG; PAM sequence: GGG
  source 1..20: mol_type = other DNA
agaatggaagttgccagaga

SEQ ID NO: 24186 - DNA, 20 bp, synthetic construct
  misc_feature 1..20: note = Description of Artificial Sequence: Synthetic oligonucleotide
  misc_feature 1..20: note = Target: SCN10A; (-) strand; PAM type: NRG; PAM sequence: AGG
  source 1..20: mol_type = other DNA
tagaatggaagttgccagag

SEQ ID NO: 24187 - DNA, 20 bp, synthetic construct
  misc_feature 1..20: note = Description of Artificial Sequence: Synthetic oligonucleotide
  misc_feature 1..20: note = Target: SCN10A; (-) strand; PAM type: NRG; PAM sequence: GAG
  source 1..20: mol_type = other DNA
gtagaatggaagttgccaga

SEQ ID NO: 24188 - DNA, 20 bp, synthetic construct
  misc_feature 1..20: note = Description of Artificial Sequence: Synthetic oligonucleotide
  misc_feature 1..20: note = Target: SCN10A; (-) strand; PAM type: NRG; PAM sequence: GAG
  source 1..20: mol_type = other DNA
aagtagaatggaagttgcca

SEQ ID NO: 24189 - DNA, 20 bp, synthetic construct
  misc_feature 1..20: note = Description of Artificial Sequence: Synthetic oligonucleotide
  misc_feature 1..20: note = Target: SCN10A; (-) strand; PAM type: NRG; PAM sequence: CAG
  source 1..20: mol_type = other DNA
gaaagtagaatggaagttgc

SEQ ID NO: 24190 - DNA, 20 bp, synthetic construct
  misc_feature 1..20: note = Description of Artificial Sequence: Synthetic oligonucleotide
  misc_feature 1..20: note = Target: SCN10A; (-) strand; PAM type: NRG; PAM sequence: AAG
  source 1..20: mol_type = other DNA
ggagacagaaagtagaatgg

SEQ ID NO: 24191 - DNA, 20 bp, synthetic construct
  misc_feature 1..20: note = Description of Artificial Sequence: Synthetic oligonucleotide
  misc_feature 1..20: note = Target: SCN10A; (-) strand; PAM type: NRG; PAM sequence: TGG
  source 1..20: mol_type = other DNA
catggagacagaaagtagaa

SEQ ID NO: 24192 - DNA, 20 bp, synthetic construct
  misc_feature 1..20: note = Description of Artificial Sequence: Synthetic oligonucleotide
  misc_feature 1..20: note = Target: SCN10A; (-) strand; PAM type: NRG; PAM sequence: TAG
  source 1..20: mol_type = other DNA
aaattcatggagacagaaag

SEQ ID NO: 24193 - DNA, 20 bp, synthetic construct
  misc_feature 1..20: note = Description of Artificial Sequence: Synthetic oligonucleotide
  misc_feature 1..20: note = Target: SCN10A; (-) strand; PAM type: NRG; PAM sequence: AAG
  source 1..20: mol_type = other DNA
ggcaaattcatggagacaga

SEQ ID NO: 24194 - DNA, 20 bp, synthetic construct
  misc_feature 1..20: note = Description of Artificial Sequence: Synthetic oligonucleotide
  misc_feature 1..20: note = Target: SCN10A; (-) strand; PAM type: NRG; PAM sequence: CAG
  source 1..20: mol_type = other DNA
aacaggcaaattcatggaga

SEQ ID NO: 24195 - DNA, 20 bp, synthetic construct
  misc_feature 1..20: note = Description of Artificial Sequence: Synthetic oligonucleotide
  misc_feature 1..20: note = Target: SCN10A; (-) strand; PAM type: NRG; PAM sequence: GAG
  source 1..20: mol_type = other DNA
ctagaacaggcaaattcatg

SEQ ID NO: 24196 - DNA, 20 bp, synthetic construct
  misc_feature 1..20: note = Description of Artificial Sequence: Synthetic oligonucleotide
  misc_feature 1..20: note = Target: SCN10A; (-) strand; PAM type: NRG; PAM sequence: TGG
  source 1..20: mol_type = other DNA
acctagaacaggcaaattca

SEQ ID NO: 24197 - DNA, 20 bp, synthetic construct
  misc_feature 1..20: note = Description of Artificial Sequence: Synthetic oligonucleotide
  misc_feature 1..20: note = Target: SCN10A; (-) strand; PAM type: NRG; PAM sequence: AGG
  source 1..20: mol_type = other DNA
ctttagtaggtacctagaac

SEQ ID NO: 24198 - DNA, 20 bp, synthetic construct
  misc_feature 1..20: note = Description of Artificial Sequence: Synthetic oligonucleotide
  misc_feature 1..20: note = Target: SCN10A; (-) strand; PAM type: NRG; PAM sequence: CAG
  source 1..20: mol_type = other DNA
cctttagtaggtacctagaa

SEQ ID NO: 24199 - DNA, 20 bp, synthetic construct
  misc_feature 1..20: note = Description of Artificial Sequence: Synthetic oligonucleotide
  misc_feature 1..20: note = Target: SCN10A; (-) strand; PAM type: NRG; PAM sequence: TAG
  source 1..20: mol_type = other DNA
ttccacctttagtaggtacc

SEQ ID NO: 24200 - DNA, 20 bp, synthetic construct
  misc_feature 1..20: note = Description of Artificial Sequence: Synthetic oligonucleotide
  misc_feature 1..20: note = Target: SCN10A; (-) strand; PAM type: NRG; PAM sequence: AGG
  source 1..20: mol_type = other DNA
tgcatgattccacctttagt

SEQ ID NO: 24201 - DNA, 20 bp, synthetic construct
  misc_feature 1..20: note = Description of Artificial Sequence: Synthetic oligonucleotide
  misc_feature 1..20: note = Target: SCN10A; (-) strand; PAM type: NRG; PAM sequence: TAG
  source 1..20: mol_type = other DNA
ttgcatgattccacctttag

SEQ ID NO: 24202 - DNA, 20 bp, synthetic construct
  misc_feature 1..20: note = Description of Artificial Sequence: Synthetic oligonucleotide
  misc_feature 1..20: note = Target: SCN10A; (-) strand; PAM type: NRG; PAM sequence: TAG
  source 1..20: mol_type = other DNA
atgttgcatgattccacctt

SEQ ID NO: 24203 - DNA, 20 bp, synthetic construct
  misc_feature 1..20: note = Description of Artificial Sequence: Synthetic oligonucleotide
  misc_feature 1..20: note = Target: SCN10A; (-) strand; PAM type: NRG; PAM sequence: AAG
  source 1..20: mol_type = other DNA
gtaaaataactcaaacgcaa

SEQ ID NO: 24204 - DNA, 20 bp, synthetic construct
  misc_feature 1..20: note = Description of Artificial Sequence: Synthetic oligonucleotide
  misc_feature 1..20: note = Target: SCN10A; (-) strand; PAM type: NRG; PAM sequence: AAG
  source 1..20: mol_type = other DNA
cattgacaaagcattgtgct

SEQ ID NO: 24205 - DNA, 20 bp, synthetic construct
  misc_feature 1..20: note = Description of Artificial Sequence: Synthetic oligonucleotide
  misc_feature 1..20: note = Target: SCN10A; (-) strand; PAM type: NRG; PAM sequence: AAG
  source 1..20: mol_type = other DNA
tacatgccacaacattgaca

SEQ ID NO: 24206 - DNA, 20 bp, synthetic construct
  misc_feature 1..20: note = Description of Artificial Sequence: Synthetic oligonucleotide
  misc_feature 1..20: note = Target: SCN10A; (-) strand; PAM type: NRG; PAM sequence: GAG
  source 1..20: mol_type = other DNA
attcagttttaaaaatgaat

SEQ ID NO: 24207 - DNA, 20 bp, synthetic construct
  misc_feature 1..20: note = Description of Artificial Sequence: Synthetic oligonucleotide
  misc_feature 1..20: note = Target: SCN10A; (-) strand; PAM type: NRG; PAM sequence: CAG
  source 1..20: mol_type = other DNA
gtaaacaattgaatatcatt

SEQ ID NO: 24208 - DNA, 20 bp, synthetic construct
  misc_feature 1..20: note = Description of Artificial Sequence: Synthetic oligonucleotide
  misc_feature 1..20: note = Target: SCN10A; (-) strand; PAM type: NRG; PAM sequence: TAG
  source 1..20: mol_type = other DNA
agatgaatggataaaaaatg

SEQ ID NO: 24209 - DNA, 20 bp, synthetic construct
  misc_feature 1..20: note = Description of Artificial Sequence: Synthetic oligonucleotide
  misc_feature 1..20: note = Target: SCN10A; (-) strand; PAM type: NRG; PAM sequence: TGG
  source 1..20: mol_type = other DNA
tatgtccatcaacagatgaa

SEQ ID NO: 24210 - DNA, 20 bp, synthetic construct
  misc_feature 1..20: note = Description of Artificial Sequence: Synthetic oligonucleotide
  misc_feature 1..20: note = Target: SCN10A; (-) strand; PAM type: NRG; PAM sequence: CAG
  source 1..20: mol_type = other DNA
tagccaaatatgtccatcaa

SEQ ID NO: 24211 - DNA, 20 bp, synthetic construct
  misc_feature 1..20: note = Description of Artificial Sequence: Synthetic oligonucleotide
  misc_feature 1..20: note = Target: SCN10A; (-) strand; PAM type: NRG; PAM sequence: TAG
  source 1..20: mol_type = other DNA
tgtagcagcgttattcacaa

SEQ ID NO: 24212 - DNA, 20 bp, synthetic construct
  misc_feature 1..20: note = Description of Artificial Sequence: Synthetic oligonucleotide
  misc_feature 1..20: note = Target: SCN10A; (-) strand; PAM type: NRG; PAM sequence: CAG
  source 1..20: mol_type = other DNA
ttatgcactaatgtttgtag

SEQ ID NO: 24213 - DNA, 20 bp, synthetic construct
  misc_feature 1..20: note = Description of Artificial Sequence: Synthetic oligonucleotide
  misc_feature 1..20: note = Target: SCN10A; (-) strand; PAM type: NRG; PAM sequence: TAG
  source 1..20: mol_type = other DNA
ggcttatgcactaatgtttg

SEQ ID NO: 24214 - DNA, 20 bp, synthetic construct
  misc_feature 1..20: note = Description of Artificial Sequence: Synthetic oligonucleotide
  misc_feature 1..20: note = Target: SCN10A; (-) strand; PAM type: NRG; PAM sequence: TGG
  source 1..20: mol_type = other DNA
acagactttaaaaggtatgt

SEQ ID NO: 24215 - DNA, 20 bp, synthetic construct
  misc_feature 1..20: note = Description of Artificial Sequence: Synthetic oligonucleotide
  misc_feature 1..20: note = Target: SCN10A; (-) strand; PAM type: NRG; PAM sequence: AGG
  source 1..20: mol_type = other DNA
cctatgaaacagactttaaa

SEQ ID NO: 24216 - DNA, 20 bp, synthetic construct
  misc_feature 1..20: note = Description of Artificial Sequence: Synthetic oligonucleotide
  misc_feature 1..20: note = Target: SCN10A; (-) strand; PAM type: NRG; PAM sequence: AAG
  source 1..20: mol_type = other DNA
acctatgaaacagactttaa

SEQ ID NO: 24217 - DNA, 20 bp, synthetic construct
  misc_feature 1..20: note = Description of Artificial Sequence: Synthetic oligonucleotide
  misc_feature 1..20: note = Target: SCN10A; (-) strand; PAM type: NRG; PAM sequence: CAG
  source 1..20: mol_type = other DNA
attagtttgaacctatgaaa

SEQ ID NO: 24218 - DNA, 20 bp, synthetic construct
  misc_feature 1..20: note = Description of Artificial Sequence: Synthetic oligonucleotide
  misc_feature 1..20: note = Target: SCN10A; (-) strand; PAM type: NRG; PAM sequence: TAG
  source 1..20: mol_type = other DNA
tctctggtttaattaaaaat

SEQ ID NO: 24219 - DNA, 20 bp, synthetic construct
  misc_feature 1..20: note = Description of Artificial Sequence: Synthetic oligonucleotide
  misc_feature 1..20: note = Target: SCN10A; (-) strand; PAM type: NRG; PAM sequence: TGG
  source 1..20: mol_type = other DNA
attttaaaagaagagctctc

SEQ ID NO: 24220 - DNA, 20 bp, synthetic construct
  misc_feature 1..20: note = Description of Artificial Sequence: Synthetic oligonucleotide
  misc_feature 1..20: note = Target: SCN10A; (-) strand; PAM type: NRG; PAM sequence: GAG
  source 1..20: mol_type = other DNA
tgaagctaattttaaaagaa

SEQ ID NO: 24221 - DNA, 20 bp, synthetic construct
  misc_feature 1..20: note = Description of Artificial Sequence: Synthetic oligonucleotide
  misc_feature 1..20: note = Target: SCN10A; (-) strand; PAM type: NRG; PAM sequence: AAG
  source 1..20: mol_type = other DNA
catgaagctaattttaaaag

SEQ ID NO: 24222 - DNA, 20 bp, synthetic construct
  misc_feature 1..20: note = Description of Artificial Sequence: Synthetic oligonucleotide
  misc_feature 1..20: note = Target: SCN10A; (-) strand; PAM type: NRG; PAM sequence: AAG
  source 1..20: mol_type = other DNA
tatcatgaagctaattttaa

SEQ ID NO: 24223 - DNA, 20 bp, synthetic construct
  misc_feature 1..20: note = Description of Artificial Sequence: Synthetic oligonucleotide
  misc_feature 1..20: note = Target: SCN10A; (-) strand; PAM type: NRG; PAM sequence: AAG
  source 1..20: mol_type = other DNA
tttttgttctatttatcatg

SEQ ID NO: 24224 - DNA, 20 bp, synthetic construct
  misc_feature 1..20: note = Description of Artificial Sequence: Synthetic oligonucleotide
  misc_feature 1..20: note = Target: SCN10A; (-) strand; PAM type: NRG; PAM sequence: CAG
  source 1..20: mol_type = other DNA
ctatatatatgggaaagact

SEQ ID NO: 24225 - DNA, 20 bp, synthetic construct
  misc_feature 1..20: note = Description of Artificial Sequence: Synthetic oligonucleotide
  misc_feature 1..20: note = Target: SCN10A; (-) strand; PAM type: NRG; PAM sequence: AAG
  source 1..20: mol_type = other DNA
tcttcactatatatatggga

SEQ ID NO: 24226 - DNA, 20 bp, synthetic construct
  misc_feature 1..20: note = Description of Artificial Sequence: Synthetic oligonucleotide
  misc_feature 1..20: note = Target: SCN10A; (-) strand; PAM type: NRG; PAM sequence: GGG
  source 1..20: mol_type = other DNA
catatcttcactatatatat

SEQ ID NO: 24227 - DNA, 20 bp, synthetic construct
  misc_feature 1..20: note = Description of Artificial Sequence: Synthetic oligonucleotide
  misc_feature 1..20: note = Target: SCN10A; (-) strand; PAM type: NRG; PAM sequence: TGG
  source 1..20: mol_type = other DNA
gcatatcttcactatatata

SEQ ID NO: 24228 - DNA, 20 bp, synthetic construct
  misc_feature 1..20: note = Description of Artificial Sequence: Synthetic oligonucleotide
  misc_feature 1..20: note = Target: SCN10A; (-) strand; PAM type: NRG; PAM sequence: CAG
  source 1..20: mol_type = other DNA
actatgaataagtaagttgt

SEQ ID NO: 24229 - DNA, 20 bp, synthetic construct
  misc_feature 1..20: note = Description of Artificial Sequence: Synthetic oligonucleotide
  misc_feature 1..20: note = Target: SCN10A; (-) strand; PAM type: NRG; PAM sequence: AAG
  source 1..20: mol_type = other DNA
gaacaaaactatgaataagt

SEQ ID NO: 24230 - DNA, 20 bp, synthetic construct
  misc_feature 1..20: note = Description of Artificial Sequence: Synthetic oligonucleotide
  misc_feature 1..20: note = Target: SCN10A; (-) strand; PAM type: NRG; PAM sequence: AAG
  source 1..20: mol_type = other DNA
agttgaacaaaactatgaat

SEQ ID NO: 24231 - DNA, 20 bp, synthetic construct
  misc_feature 1..20: note = Description of Artificial Sequence: Synthetic oligonucleotide
  misc_feature 1..20: note = Target: SCN10A; (-) strand; PAM type: NRG; PAM sequence: TAG
  source 1..20: mol_type = other DNA
cgagcagacattttatttta

SEQ ID NO: 24232 - DNA, 20 bp, synthetic construct
  misc_feature 1..20: note = Description of Artificial Sequence: Synthetic oligonucleotide
  misc_feature 1..20: note = Target: SCN10A; (-) strand; PAM type: NRG; PAM sequence: CAG
  source 1..20: mol_type = other DNA
atgactgttaggtatacgag

SEQ ID NO: 24233 - DNA, 20 bp, synthetic construct
  misc_feature 1..20: note = Description of Artificial Sequence: Synthetic oligonucleotide
  misc_feature 1..20: note = Target: SCN10A; (-) strand; PAM type: NRG; PAM sequence: GAG
  source 1..20: mol_type = other DNA
tcaatgactgttaggtatac

SEQ ID NO: 24234 - DNA, 20 bp, synthetic construct
  misc_feature 1..20: note = Description of Artificial Sequence: Synthetic oligonucleotide
  misc_feature 1..20: note = Target: SCN10A; (-) strand; PAM type: NRG; PAM sequence: AGG
  source 1..20: mol_type = other DNA
atttaaagtcaatgactgtt

SEQ ID NO: 24235 - DNA, 20 bp, synthetic construct
  misc_feature 1..20: note = Description of Artificial Sequence: Synthetic oligonucleotide
  misc_feature 1..20: note = Target: SCN10A; (-) strand; PAM type: NRG; PAM sequence: TAG
  source 1..20: mol_type = other DNA
catttaaagtcaatgactgt

SEQ ID NO: 24236 - DNA, 20 bp, synthetic construct
  misc_feature 1..20: note = Description of Artificial Sequence: Synthetic oligonucleotide
  misc_feature 1..20: note = Target: SCN10A; (-) strand; PAM type: NRG; PAM sequence: AAG
  source 1..20: mol_type = other DNA
tataatgtgactggcattta

SEQ ID NO: 24237 - DNA, 20 bp, synthetic construct
  misc_feature 1..20: note = Description of Artificial Sequence: Synthetic oligonucleotide
  misc_feature 1..20: note = Target: SCN10A; (-) strand; PAM type: NRG; PAM sequence: TGG
  source 1..20: mol_type = other DNA
tgcattccttataatgtgac

SEQ ID NO: 24238 - DNA, 20 bp, synthetic construct
  misc_feature 1..20: note = Description of Artificial Sequence: Synthetic oligonucleotide
  misc_feature 1..20: note = Target: SCN10A; (-) strand; PAM type: NRG; PAM sequence: AAG
  source 1..20: mol_type = other DNA
tggtataattccttaattag

SEQ ID NO: 24239 - DNA, 20 bp, synthetic construct
  misc_feature 1..20: note = Description of Artificial Sequence: Synthetic oligonucleotide
  misc_feature 1..20: note = Target: SCN10A; (-) strand; PAM type: NRG; PAM sequence: TAG
  source 1..20: mol_type = other DNA
aattggtataattccttaat

SEQ ID NO: 24240 - DNA, 20 bp, synthetic construct
  misc_feature 1..20: note = Description of Artificial Sequence: Synthetic oligonucleotide
  misc_feature 1..20: note = Target: SCN10A; (-) strand; PAM type: NRG; PAM sequence: TGG
  source 1..20: mol_type = other DNA
gaagaaacaagaaaaacaat

SEQ ID NO: 24241 - DNA, 20 bp, synthetic construct
  misc_feature 1..20: note = Description of Artificial Sequence: Synthetic oligonucleotide
  misc_feature 1..20: note = Target: SCN10A; (-) strand; PAM type: NRG; PAM sequence: AAG
  source 1..20: mol_type = other DNA
attgtggttggagaagaaac

SEQ ID NO: 24242 - DNA, 20 bp, synthetic construct
  misc_feature 1..20: note = Description of Artificial Sequence: Synthetic oligonucleotide
  misc_feature 1..20: note = Target: SCN10A; (-) strand; PAM type: NRG; PAM sequence: AAG
  source 1..20: mol_type = other DNA
tacaaatattgtggttggag

SEQ ID NO: 24243 - DNA, 20 bp, synthetic construct
  misc_feature 1..20: note = Description of Artificial Sequence: Synthetic oligonucleotide
  misc_feature 1..20: note = Target: SCN10A; (-) strand; PAM type: NRG; PAM sequence: GAG
  source 1..20: mol_type = other DNA
aattacaaatattgtggttg

SEQ ID NO: 24244 - DNA, 20 bp, synthetic construct
  misc_feature 1..20: note = Description of Artificial Sequence: Synthetic oligonucleotide
  misc_feature 1..20: note = Target: SCN10A; (-) strand; PAM type: NRG; PAM sequence: TGG
  source 1..20: mol_type = other DNA
tcaattacaaatattgtggt

SEQ ID NO: 24245 - DNA, 20 bp, synthetic construct
  misc_feature 1..20: note = Description of Artificial Sequence: Synthetic oligonucleotide
  misc_feature 1..20: note = Target: SCN10A; (-) strand; PAM type: NRG; PAM sequence: TGG
  source 1..20: mol_type = other DNA
caaatcaattacaaatattg

SEQ ID NO: 24246 - DNA, 20 bp, synthetic construct
  misc_feature 1..20: note = Description of Artificial Sequence: Synthetic oligonucleotide
  misc_feature 1..20: note = Target: SCN10A; (-) strand; PAM type: NRG; PAM sequence: CAG
  source 1..20: mol_type = other DNA
ctgctggtaagatacaaaac

SEQ ID NO: 24247 - DNA, 20 bp, synthetic construct
  misc_feature 1..20: note = Description of Artificial Sequence: Synthetic oligonucleotide
  misc_feature 1..20: note = Target: SCN10A; (-) strand; PAM type: NRG; PAM sequence: AAG
  source 1..20: mol_type = other DNA
acaattgcactcctgctggt

SEQ ID NO: 24248 - DNA, 20 bp, synthetic construct
  misc_feature 1..20: note = Description of Artificial Sequence: Synthetic oligonucleotide
  misc_feature 1..20: note = Target: SCN10A; (-) strand; PAM type: NRG; PAM sequence: TGG
  source 1..20: mol_type = other DNA
aagcacaattgcactcctgc

SEQ ID NO: 24249 - DNA, 20 bp, synthetic construct
  misc_feature 1..20: note = Description of Artificial Sequence: Synthetic oligonucleotide
  misc_feature 1..20: note = Target: SCN10A; (-) strand; PAM type: NRG; PAM sequence: AAG
  source 1..20: mol_type = other DNA
ttcatcctcatatcaaaaat

SEQ ID NO: 24250 - DNA, 20 bp, synthetic construct
  misc_feature 1..20: note = Description of Artificial Sequence: Synthetic oligonucleotide
  misc_feature 1..20: note = Target: SCN10A; (-) strand; PAM type: NRG; PAM sequence: GAG
  source 1..20: mol_type = other DNA
gagaagacaacaaaactata

SEQ ID NO: 24251 - DNA, 20 bp, synthetic construct
  misc_feature 1..20: note = Description of Artificial Sequence: Synthetic oligonucleotide
  misc_feature 1..20: note = Target: SCN10A; (-) strand; PAM type: NRG; PAM sequence: TAG
  source 1..20: mol_type = other DNA
ttgagaagacaacaaaacta

SEQ ID NO: 24252 - DNA, 20 bp, synthetic construct
  misc_feature 1..20: note = Description of Artificial Sequence: Synthetic oligonucleotide
  misc_feature 1..20: note = Target: SCN10A; (-) strand; PAM type: NRG; PAM sequence: AAG
  source 1..20: mol_type = other DNA
attttatgttaaaggttgag

SEQ ID NO: 24253 - DNA, 20 bp, synthetic construct
  misc_feature 1..20: note = Description of Artificial Sequence: Synthetic oligonucleotide
  misc_feature 1..20: note = Target: SCN10A; (-) strand; PAM type: NRG; PAM sequence: GAG
  source 1..20: mol_type = other DNA
aaaattttatgttaaaggtt

SEQ ID NO: 24254 - DNA, 20 bp, synthetic construct
  misc_feature 1..20: note = Description of Artificial Sequence: Synthetic oligonucleotide
  misc_feature 1..20: note = Target: SCN10A; (-) strand; PAM type: NRG; PAM sequence: AGG
  source 1..20: mol_type = other DNA
ttgtgaaaattttatgttaa

SEQ ID NO: 24255 - DNA, 20 bp, synthetic construct
  misc_feature 1..20: note = Description of Artificial Sequence: Synthetic oligonucleotide
  misc_feature 1..20: note = Target: SCN10A; (-) strand; PAM type: NRG; PAM sequence: AAG
  source 1..20: mol_type = other DNA
attgtgaaaattttatgtta

SEQ ID NO: 24256 - DNA, 20 bp, synthetic construct
  misc_feature 1..20: note = Description of Artificial Sequence: Synthetic oligonucleotide
  misc_feature 1..20: note = Target: SCN10A; (-) strand; PAM type: NRG; PAM sequence: CAG
  source 1..20: mol_type = other DNA
agcacaaaataaggctttcc

SEQ ID NO: 24257 - DNA, 20 bp, synthetic construct
  misc_feature 1..20: note = Description of Artificial Sequence: Synthetic oligonucleotide
  misc_feature 1..20: note = Target: SCN10A; (-) strand; PAM type: NRG; PAM sequence: AGG
  source 1..20: mol_type = other DNA
tctactacaagcacaaaata

SEQ ID NO: 24258 - DNA, 20 bp, synthetic construct
  misc_feature 1..20: note = Description of Artificial Sequence: Synthetic oligonucleotide
  misc_feature 1..20: note = Target: SCN10A; (-) strand; PAM type: NRG; PAM sequence: AAG
  source 1..20: mol_type = other DNA
ctctactacaagcacaaaat

SEQ ID NO: 24259 - DNA, 20 bp, synthetic construct
  misc_feature 1..20: note = Description of Artificial Sequence: Synthetic oligonucleotide
  misc_feature 1..20: note = Target: SCN10A; (-) strand; PAM type: NRG; PAM sequence: AAG
  source 1..20: mol_type = other DNA
caattgaatatctctactac

SEQ ID NO: 24260 - DNA, 20 bp, synthetic construct
  misc_feature 1..20: note = Description of Artificial Sequence: Synthetic oligonucleotide
  misc_feature 1..20: note = Target: SCN10A; (-) strand; PAM type: NRG; PAM sequence: AAG
  source 1..20: mol_type = other DNA
ttccatattattttccaata

SEQ ID NO: 24261 - DNA, 20 bp, synthetic construct
  misc_feature 1..20: note = Description of Artificial Sequence: Synthetic oligonucleotide
  misc_feature 1..20: note = Target: SCN10A; (-) strand; PAM type: NRG; PAM sequence: AAG
  source 1..20: mol_type = other DNA
ttttgtcaagtaatgatata

SEQ ID NO: 24262 - DNA, 20 bp, synthetic construct
  misc_feature 1..20: note = Description of Artificial Sequence: Synthetic oligonucleotide
  misc_feature 1..20: note = Target: SCN10A; (-) strand; PAM type: NRG; PAM sequence: AAG
  source 1..20: mol_type = other DNA
tatctgctaacgtttttgtc

SEQ ID NO: 24263 - DNA, 20 bp, synthetic construct
  misc_feature 1..20: note = Description of Artificial Sequence: Synthetic oligonucleotide
  misc_feature 1..20: note = Target: SCN10A; (-) strand; PAM type: NRG; PAM sequence: TAG
  source 1..20: mol_type = other DNA
gaccaatgatccttttgtcc

SEQ ID NO: 24264 - DNA, 20 bp, synthetic construct
  misc_feature 1..20: note = Description of Artificial Sequence: Synthetic oligonucleotide
  misc_feature 1..20: note = Target: SCN10A; (-) strand; PAM type: NRG; PAM sequence: TGG
  source 1..20: mol_type = other DNA
taatgataattgaattttat

SEQ ID NO: 24265 - DNA, 20 bp, synthetic construct
  misc_feature 1..20: note = Description of Artificial Sequence: Synthetic oligonucleotide
  misc_feature 1..20: note = Target: SCN10A; (-) strand; PAM type: NRG; PAM sequence: GAG
  source 1..20: mol_type = other DNA
aaaaatatataagaaaatgg

SEQ ID NO: 24266 - DNA, 20 bp, synthetic construct
  misc_feature 1..20: note = Description of Artificial Sequence: Synthetic oligonucleotide
  misc_feature 1..20: note = Target: SCN10A; (-) strand; PAM type: NRG; PAM sequence: GGG
  source 1..20: mol_type = other DNA
acaaaaatatataagaaaat

SEQ ID NO: 24267 - DNA, 20 bp, synthetic construct
  misc_feature 1..20: note = Description of Artificial Sequence: Synthetic oligonucleotide
  misc_feature 1..20: note = Target: SCN10A; (-) strand; PAM type: NRG; PAM sequence: TGG
  source 1..20: mol_type = other DNA
gacaaaaatatataagaaaa

SEQ ID NO: 24268 - DNA, 20 bp, synthetic construct
  misc_feature 1..20: note = Description of Artificial Sequence: Synthetic oligonucleotide
  misc_feature 1..20: note = Target: SCN10A; (-) strand; PAM type: NRG; PAM sequence: AAG
  source 1..20: mol_type = other DNA
aaaaccagacaaaaatatat

SEQ ID NO: 24269 - DNA, 20 bp, synthetic construct
  misc_feature 1..20: note = Description of Artificial Sequence: Synthetic oligonucleotide
  misc_feature 1..20: note = Target: SCN10A; (-) strand; PAM type: NRG; PAM sequence: CAG
  source 1..20: mol_type = other DNA
tgtggataatctcccaaaac

SEQ ID NO: 24270 - DNA, 20 bp, synthetic construct
  misc_feature 1..20: note = Description of Artificial Sequence: Synthetic oligonucleotide
  misc_feature 1..20: note = Target: SCN10A; (-) strand; PAM type: NRG; PAM sequence: TGG
  source 1..20: mol_type = other DNA
agacaagtggataatggatg

SEQ ID NO: 24271 - DNA, 20 bp, synthetic construct
  misc_feature 1..20: note = Description of Artificial Sequence: Synthetic oligonucleotide
  misc_feature 1..20: note = Target: SCN10A; (-) strand; PAM type: NRG; PAM sequence: TGG
  source 1..20: mol_type = other DNA
gtcatgagacaagtggataa

SEQ ID NO: 24272 - DNA, 20 bp, synthetic construct
  misc_feature 1..20: note = Description of Artificial Sequence: Synthetic oligonucleotide
  misc_feature 1..20: note = Target: SCN10A; (-) strand; PAM type: NRG; PAM sequence: TGG
  source 1..20: mol_type = other DNA
tctgtttgtcatgagacaag

SEQ ID NO: 24273 - DNA, 20 bp, synthetic construct
  misc_feature 1..20: note = Description of Artificial Sequence: Synthetic oligonucleotide
  misc_feature 1..20: note = Target: SCN10A; (-) strand; PAM type: NRG; PAM sequence: AAG
  source 1..20: mol_type = other DNA
gaatctgtttgtcatgagac

SEQ ID NO: 24274 - DNA, 20 bp, synthetic construct
  misc_feature 1..20: note = Description of Artificial Sequence: Synthetic oligonucleotide
  misc_feature 1..20: note = Target: SCN10A; (-) strand; PAM type: NRG; PAM sequence: GAG
  source 1..20: mol_type = other DNA
agcatgaatctgtttgtcat

SEQ ID NO: 24275 - DNA, 20 bp, synthetic construct
  misc_feature 1..20: note = Description of Artificial Sequence: Synthetic oligonucleotide
  misc_feature 1..20: note = Target: SCN10A; (-) strand; PAM type: NRG; PAM sequence: AAG
  source 1..20: mol_type = other DNA
gcctccattgtaaaaataca

SEQ ID NO: 24276 - DNA, 20 bp, synthetic construct
  misc_feature 1..20: note = Description of Artificial Sequence: Synthetic oligonucleotide
  misc_feature 1..20: note = Target: SCN10A; (-) strand; PAM type: NRG; PAM sequence: TGG
  source 1..20: mol_type = other DNA
gtcacaatgtaagtaatgaa

SEQ ID NO: 24277 - DNA, 20 bp, synthetic construct
  misc_feature 1..20: note = Description of Artificial Sequence: Synthetic oligonucleotide
  misc_feature 1..20: note = Target: SCN10A; (-) strand; PAM type: NRG; PAM sequence: AAG
  source 1..20: mol_type = other DNA
gtgaaataaggtcacaatgt

SEQ ID NO: 24278 - DNA, 20 bp, synthetic construct
  misc_feature 1..20: note = Description of Artificial Sequence: Synthetic oligonucleotide
  misc_feature 1..20: note = Target: SCN10A; (-) strand; PAM type: NRG; PAM sequence: AGG
  source 1..20: mol_type = other DNA
aaatcctacaatgtgaaata

SEQ ID NO: 24279 - DNA, 20 bp, synthetic construct
  misc_feature 1..20: note = Description of Artificial Sequence: Synthetic oligonucleotide
  misc_feature 1..20: note = Target: SCN10A; (-) strand; PAM type: NRG; PAM sequence: AAG
  source 1..20: mol_type = other DNA
taaatcctacaatgtgaaat

SEQ ID NO: 24280 - DNA, 20 bp, synthetic construct
  misc_feature 1..20: note = Description of Artificial Sequence: Synthetic oligonucleotide
  misc_feature 1..20: note = Target: SCN10A; (-) strand; PAM type: NRG; PAM sequence: TAG
  source 1..20: mol_type = other DNA
cataacaataatgataaaaa

SEQ ID NO: 24281 - DNA, 20 bp, synthetic construct
  misc_feature 1..20: note = Description of Artificial Sequence: Synthetic oligonucleotide
  misc_feature 1..20: note = Target: SCN10A; (-) strand; PAM type: NRG; PAM sequence: AAG
  source 1..20: mol_type = other DNA
acttcgaaagtggttttctg

SEQ ID NO: 24282 - DNA, 20 bp, synthetic construct
  misc_feature 1..20: note = Description of Artificial Sequence: Synthetic oligonucleotide
  misc_feature 1..20: note = Target: SCN10A; (-) strand; PAM type: NRG; PAM sequence: TGG
  source 1..20: mol_type = other DNA
aagagtcatcacttcgaaag

SEQ ID NO: 24283 - DNA, 20 bp, synthetic construct
  misc_feature 1..20: note = Description of Artificial Sequence: Synthetic oligonucleotide
  misc_feature 1..20: note = Target: SCN10A; (-) strand; PAM type: NRG; PAM sequence: AAG
  source 1..20: mol_type = other DNA
aaaaagagtcatcacttcga

SEQ ID NO: 24284 - DNA, 20 bp, synthetic construct
  misc_feature 1..20: note = Description of Artificial Sequence: Synthetic oligonucleotide
  misc_feature 1..20: note = Target: SCN10A; (-) strand; PAM type: NRG; PAM sequence: GAG
  source 1..20: mol_type = other DNA
atatcacaattcaaaaaaaa

SEQ ID NO: 24285 - DNA, 20 bp, synthetic construct
  misc_feature 1..20: note = Description of Artificial Sequence: Synthetic oligonucleotide
  misc_feature 1..20: note = Target: SCN10A; (-) strand; PAM type: NRG; PAM sequence: AAG
  source 1..20: mol_type = other DNA
taatatcacaattcaaaaaa

SEQ ID NO: 24286 - DNA, 20 bp, synthetic construct
  misc_feature 1..20: note = Description of Artificial Sequence: Synthetic oligonucleotide
  misc_feature 1..20: note = Target: SCN10A; (-) strand; PAM type: NRG; PAM sequence: CAG
  source 1..20: mol_type = other DNA
tgacagttatttacacttgt

SEQ ID NO: 24287 - DNA, 20 bp, synthetic construct
  misc_feature 1..20: note = Description of Artificial Sequence: Synthetic oligonucleotide
  misc_feature 1..20: note = Target: SCN10A; (-) strand; PAM type: NRG; PAM sequence: CAG
  source 1..20: mol_type = other DNA
tgtattttattgtcacctga

SEQ ID NO: 24288 - DNA, 20 bp, synthetic construct
  misc_feature 1..20: note = Description of Artificial Sequence: Synthetic oligonucleotide
  misc_feature 1..20: note = Target: SCN10A; (-) strand; PAM type: NRG; PAM sequence: CAG
  source 1..20: mol_type = other DNA
aacatggagttaatcatagg

SEQ ID NO: 24289 - DNA, 20 bp, synthetic construct
  misc_feature 1..20: note = Description of Artificial Sequence: Synthetic oligonucleotide
  misc_feature 1..20: note = Target: SCN10A; (-) strand; PAM type: NRG; PAM sequence: AGG
  source 1..20: mol_type = other DNA
gttaacatggagttaatcat

SEQ ID NO: 24290 - DNA, 20 bp, synthetic construct
  misc_feature 1..20: note = Description of Artificial Sequence: Synthetic oligonucleotide
  misc_feature 1..20: note = Target: SCN10A; (-) strand; PAM type: NRG; PAM sequence: TAG
  source 1..20: mol_type = other DNA
ggttaacatggagttaatca

SEQ ID NO: 24291 - DNA, 20 bp, synthetic construct
  misc_feature 1..20: note = Description of Artificial Sequence: Synthetic oligonucleotide
  misc_feature 1..20: note = Target: SCN10A; (-) strand; PAM type: NRG; PAM sequence: GAG
  source 1..20: mol_type = other DNA
cattcataatggttaacatg

SEQ ID NO: 24292 - DNA, 20 bp, synthetic construct
  misc_feature 1..20: note = Description of Artificial Sequence: Synthetic oligonucleotide
  misc_feature 1..20: note = Target: SCN10A; (-) strand; PAM type: NRG; PAM sequence: TGG
  source 1..20: mol_type = other DNA
ttcattcataatggttaaca

SEQ ID NO: 24293 - DNA, 20 bp, synthetic construct
  misc_feature 1..20: note = Description of Artificial Sequence: Synthetic oligonucleotide
  misc_feature 1..20: note = Target: SCN10A; (-) strand; PAM type: NRG; PAM sequence: TGG
  source 1..20: mol_type = other DNA
aaaactgatttcattcataa

SEQ ID NO: 24294 - DNA, 20 bp, synthetic construct
  misc_feature 1..20: note = Description of Artificial Sequence: Synthetic oligonucleotide
  misc_feature 1..20: note = Target: SCN10A; (-) strand; PAM type: NRG; PAM sequence: CAG
  source 1..20: mol_type = other DNA
actttttatgttttcaaaaa

SEQ ID NO: 24295 - DNA, 20 bp, synthetic construct
  misc_feature 1..20: note = Description of Artificial Sequence: Synthetic oligonucleotide
  misc_feature 1..20: note = Target: SCN10A; (-) strand; PAM type: NRG; PAM sequence: TAG
  source 1..20: mol_type = other DNA
aagattaattattatattca

SEQ ID NO: 24296 - DNA, 20 bp, synthetic construct
  misc_feature 1..20: note = Description of Artificial Sequence: Synthetic oligonucleotide
  misc_feature 1..20: note = Target: SCN10A; (-) strand; PAM type: NRG; PAM sequence: AAG
  source 1..20: mol_type = other DNA
aattttaaaatctaacatgt

SEQ ID NO: 24297 - DNA, 20 bp, synthetic construct
  misc_feature 1..20: note = Description of Artificial Sequence: Synthetic oligonucleotide
  misc_feature 1..20: note = Target: SCN10A; (-) strand; PAM type: NRG; PAM sequence: AGG
  source 1..20: mol_type = other DNA
gtttctcaacaagtgatcta

SEQ ID NO: 24298 - DNA, 20 bp, synthetic construct
  misc_feature 1..20: note = Description of Artificial Sequence: Synthetic oligonucleotide
  misc_feature 1..20: note = Target: SCN10A; (-) strand; PAM type: NRG; PAM sequence: AAG
  source 1..20: mol_type = other DNA
tgtttctcaacaagtgatct

SEQ ID NO: 24299 - DNA, 20 bp, synthetic construct
  misc_feature 1..20: note = Description of Artificial Sequence: Synthetic oligonucleotide
  misc_feature 1..20: note = Target: SCN10A; (-) strand; PAM type: NRG; PAM sequence: AAG
  source 1..20: mol_type = other DNA
ctcctacaatgtttctcaac

SEQ ID NO: 24300 - DNA, 20 bp, synthetic construct
  misc_feature 1..20: note = Description of Artificial Sequence: Synthetic oligonucleotide
  misc_feature 1..20: note = Target: SCN10A; (-) strand; PAM type: NRG; PAM sequence: GAG
  source 1..20: mol_type = other DNA
tattcttactttgtttagca

SEQ ID NO: 24301 - DNA, 20 bp, synthetic construct
  misc_feature 1..20: note = Description of Artificial Sequence: Synthetic oligonucleotide
  misc_feature 1..20: note = Target: SCN10A; (-) strand; PAM type: NRG; PAM sequence: CAG
  source 1..20: mol_type = other DNA
cttattcttactttgtttag

SEQ ID NO: 24302 - DNA, 20 bp, synthetic construct
  misc_feature 1..20: note = Description of Artificial Sequence: Synthetic oligonucleotide
  misc_feature 1..20: note = Target: SCN10A; (-) strand; PAM type: NRG; PAM sequence: TAG
  source 1..20: mol_type = other DNA
caacttattcttactttgtt

SEQ ID NO: 24303 - DNA, 20 bp, synthetic construct
  misc_feature 1..20: note = Description of Artificial Sequence: Synthetic oligonucleotide
  misc_feature 1..20: note = Target: SCN10A; (-) strand; PAM type: NRG; PAM sequence: GGG
  source 1..20: mol_type = other DNA
ctctctcctcaattgtccct

SEQ ID NO: 24304 - DNA, 20 bp, synthetic construct
  misc_feature 1..20: note = Description of Artificial Sequence: Synthetic oligonucleotide
  misc_feature 1..20: note = Target: SCN10A; (-) strand; PAM type: NRG; PAM sequence: TGG
  source 1..20: mol_type = other DNA
actctctcctcaattgtccc

SEQ ID NO: 24305 - DNA, 20 bp, synthetic construct
  misc_feature 1..20: note = Description of Artificial Sequence: Synthetic oligonucleotide
  misc_feature 1..20: note = Target: SCN10A; (-) strand; PAM type: NRG; PAM sequence: GGG
  source 1..20: mol_type = other DNA
ctttcataaactgtcccttt

SEQ ID NO: 24306 - DNA, 20 bp, synthetic construct
  misc_feature 1..20: note = Description of Artificial Sequence: Synthetic oligonucleotide
  misc_feature 1..20: note = Target: SCN10A; (-) strand; PAM type: NRG; PAM sequence: TGG
  source 1..20: mol_type = other DNA
tctttcataaactgtccctt

SEQ ID NO: 24307 - DNA, 20 bp, synthetic construct
  misc_feature 1..20: note = Description of Artificial Sequence: Synthetic oligonucleotide
  misc_feature 1..20: note = Target: SCN10A; (-) strand; PAM type: NRG; PAM sequence: TGG
  source 1..20: mol_type = other DNA
tctattttgctaaatgaggc

SEQ ID NO: 24308 - DNA, 20 bp, synthetic construct
  misc_feature 1..20: note = Description of Artificial Sequence: Synthetic oligonucleotide
  misc_feature 1..20: note = Target: SCN10A; (-) strand; PAM type: NRG; PAM sequence: AGG
  source 1..20: mol_type = other DNA
tttatctattttgctaaatg

SEQ ID NO: 24309 - DNA, 20 bp, synthetic construct
  misc_feature 1..20: note = Description of Artificial Sequence: Synthetic oligonucleotide
  misc_feature 1..20: note = Target: SCN10A; (-) strand; PAM type: NRG; PAM sequence: GAG
  source 1..20: mol_type = other DNA
ttttatctattttgctaaat

SEQ ID NO: 24310 - DNA, 20 bp, synthetic construct
  misc_feature 1..20: note = Description of Artificial Sequence: Synthetic oligonucleotide
  misc_feature 1..20: note = Target: SCN10A; (-) strand; PAM type: NRG; PAM sequence: AGG
  source 1..20: mol_type = other DNA
tcattttgctggattcaatt

SEQ ID NO: 24311 - DNA, 20 bp, synthetic construct
  misc_feature 1..20: note = Description of Artificial Sequence: Synthetic oligonucleotide
  misc_feature 1..20: note = Target: SCN10A; (-) strand; PAM type: NRG; PAM sequence: TAG
  source 1..20: mol_type = other DNA
atcattttgctggattcaat

SEQ ID NO: 24312 - DNA, 20 bp, synthetic construct
  misc_feature 1..20: note = Description of Artificial Sequence: Synthetic oligonucleotide
  misc_feature 1..20: note = Target: SCN10A; (-) strand; PAM type: NRG; PAM sequence: TGG
  source 1..20: mol_type = other DNA
gttccagctgatcattttgc

SEQ ID NO: 24313 - DNA, 20 bp, synthetic construct
  misc_feature 1..20: note = Description of Artificial Sequence: Synthetic oligonucleotide
  misc_feature 1..20: note = Target: SCN10A; (-) strand; PAM type: NRG; PAM sequence: CAG
  source 1..20: mol_type = other DNA
tagtctatttttaatggttc

SEQ ID NO: 24314 - DNA, 20 bp, synthetic construct
  misc_feature 1..20: note = Description of Artificial Sequence: Synthetic oligonucleotide
  misc_feature 1..20: note = Target: SCN10A; (-) strand; PAM type: NRG; PAM sequence: TGG
  source 1..20: mol_type = other DNA
gtttgttagtctatttttaa

SEQ ID NO: 24315 - DNA, 20 bp, synthetic construct
  misc_feature 1..20: note = Description of Artificial Sequence: Synthetic oligonucleotide
  misc_feature 1..20: note = Target: SCN10A; (-) strand; PAM type: NRG; PAM sequence: TAG
  source 1..20: mol_type = other DNA
ctgtaaactaacaggtttgt

SEQ ID NO: 24316 - DNA, 20 bp, synthetic construct
  misc_feature 1..20: note = Description of Artificial Sequence: Synthetic oligonucleotide
  misc_feature 1..20: note = Target: SCN10A; (-) strand; PAM type: NRG; PAM sequence: AGG
  source 1..20: mol_type = other DNA
tagtaaatctgtaaactaac

SEQ ID NO: 24317 - DNA, 20 bp, synthetic construct
  misc_feature 1..20: note = Description of Artificial Sequence: Synthetic oligonucleotide
  misc_feature 1..20: note = Target: SCN10A; (-) strand; PAM type: NRG; PAM sequence: CAG
  source 1..20: mol_type = other DNA
atagtaaatctgtaaactaa

SEQ ID NO: 24318 - DNA, 20 bp, synthetic construct
  misc_feature 1..20: note = Description of Artificial Sequence: Synthetic oligonucleotide
  misc_feature 1..20: note = Target: SCN10A; (-) strand; PAM type: NRG; PAM sequence: TAG
  source 1..20: mol_type = other DNA
tagtctttcatctgttagta

SEQ ID NO: 24319 - DNA, 20 bp, synthetic construct
  misc_feature 1..20: note = Description of Artificial Sequence: Synthetic oligonucleotide
  misc_feature 1..20: note = Target: SCN10A; (-) strand; PAM type: NRG; PAM sequence: TAG
  source 1..20: mol_type = other DNA
tcatatagtctttcatctgt

SEQ ID NO: 24320 - DNA, 20 bp, synthetic construct
  misc_feature 1..20: note = Description of Artificial Sequence: Synthetic oligonucleotide
  misc_feature 1..20: note = Target: SCN10A; (-) strand; PAM type: NRG; PAM sequence: TAG
  source 1..20: mol_type = other DNA
tatttattgaggttatcata

SEQ ID NO: 24321 - DNA, 20 bp, synthetic construct
  misc_feature 1..20: note = Description of Artificial Sequence: Synthetic oligonucleotide
  misc_feature 1..20: note = Target: SCN10A; (-) strand; PAM type: NRG; PAM sequence: AGG
  source 1..20: mol_type = other DNA
cagtatttttatatttattg

SEQ ID NO: 24322 - DNA, 20 bp, synthetic construct
  misc_feature 1..20: note = Description of Artificial Sequence: Synthetic oligonucleotide
  misc_feature 1..20: note = Target: SCN10A; (-) strand; PAM type: NRG; PAM sequence: GAG
  source 1..20: mol_type = other DNA
tcagtatttttatatttatt

SEQ ID NO: 24323 - DNA, 20 bp, synthetic construct
  misc_feature 1..20: note = Description of Artificial Sequence: Synthetic oligonucleotide
  misc_feature 1..20: note = Target: SCN10A; (-) strand; PAM type: NRG; PAM sequence: CAG
  source 1..20: mol_type = other DNA
gaatgggtgttggcttctat

SEQ ID NO: 24324 - DNA, 20 bp, synthetic construct
  misc_feature 1..20: note = Description of Artificial Sequence: Synthetic oligonucleotide
  misc_feature 1..20: note = Target: SCN10A; (-) strand; PAM type: NRG; PAM sequence: TGG
  source 1..20: mol_type = other DNA
ctttcatcatgaatgggtgt

SEQ ID NO: 24325 - DNA, 20 bp, synthetic construct
  misc_feature 1..20: note = Description of Artificial Sequence: Synthetic oligonucleotide
  misc_feature 1..20: note = Target: SCN10A; (-) strand; PAM type: NRG; PAM sequence: GGG
  source 1..20: mol_type = other DNA
ttgagactttcatcatgaat

SEQ ID NO: 24326 - DNA, 20 bp, synthetic construct
  misc_feature 1..20: note = Description of Artificial Sequence: Synthetic oligonucleotide
  misc_feature 1..20: note = Target: SCN10A; (-) strand; PAM type: NRG; PAM sequence: TGG
  source 1..20: mol_type = other DNA
gttgagactttcatcatgaa

SEQ ID NO: 24327 - DNA, 20 bp, synthetic construct
  misc_feature 1..20: note = Description of Artificial Sequence: Synthetic oligonucleotide
  misc_feature 1..20: note = Target: SCN10A; (-) strand; PAM type: NRG; PAM sequence: GAG
  source 1..20: mol_type = other DNA
ttttccatttcttgtttgtt

SEQ ID NO: 24328 - DNA, 20 bp, synthetic construct
  misc_feature 1..20: note = Description of Artificial Sequence: Synthetic oligonucleotide
  misc_feature 1..20: note = Target: SCN10A; (-) strand; PAM type: NRG; PAM sequence: GAG
  source 1..20: mol_type = other DNA
cactattatgatgtttatga

SEQ ID NO: 24329 - DNA, 20 bp, synthetic construct
  misc_feature 1..20: note = Description of Artificial Sequence: Synthetic oligonucleotide
  misc_feature 1..20: note = Target: SCN10A; (-) strand; PAM type: NRG; PAM sequence: GAG
  source 1..20: mol_type = other DNA
ttcactattatgatgtttat

SEQ ID NO: 24330 - DNA, 20 bp, synthetic construct
  misc_feature 1..20: note = Description of Artificial Sequence: Synthetic oligonucleotide
  misc_feature 1..20: note = Target: SCN10A; (-) strand; PAM type: NRG; PAM sequence: AAG
  source 1..20: mol_type = other DNA
ttattttgctcttgatttta

SEQ ID NO: 24331 - DNA, 20 bp, synthetic construct
  misc_feature 1..20: note = Description of Artificial Sequence: Synthetic oligonucleotide
  misc_feature 1..20: note = Target: SCN10A; (-) strand; PAM type: NRG; PAM sequence: GAG
  source 1..20: mol_type = other DNA
taattcaaagctatgacagt

SEQ ID NO: 24332 - DNA, 20 bp, synthetic construct
  misc_feature 1..20: note = Description of Artificial Sequence: Synthetic oligonucleotide
  misc_feature 1..20: note = Target: SCN10A; (-) strand; PAM type: NRG; PAM sequence: CAG
  source 1..20: mol_type = other DNA
atggtaattcaaagctatga

SEQ ID NO: 24333 - DNA, 20 bp, synthetic construct
  misc_feature 1..20: note = Description of Artificial Sequence: Synthetic oligonucleotide
  misc_feature 1..20: note = Target: SCN10A; (-) strand; PAM type: NRG; PAM sequence: AAG
  source 1..20: mol_type = other DNA
ttcaacaagatggtaattca

SEQ ID NO: 24334 - DNA, 20 bp, synthetic construct
  misc_feature 1..20: note = Description of Artificial Sequence: Synthetic oligonucleotide
  misc_feature 1..20: note = Target: SCN10A; (-) strand; PAM type: NRG; PAM sequence: TGG
  source 1..20: mol_type = other DNA
ggccgggaccttcaacaaga

SEQ ID NO: 24335 - DNA, 20 bp, synthetic construct
  misc_feature 1..20: note = Description of Artificial Sequence: Synthetic oligonucleotide
  misc_feature 1..20: note = Target: SCN10A; (-) strand; PAM type: NRG; PAM sequence: AAG
  source 1..20: mol_type = other DNA
aattggccgggaccttcaac

SEQ ID NO: 24336 - DNA, 20 bp, synthetic construct
  misc_feature 1..20: note = Description of Artificial Sequence: Synthetic oligonucleotide
  misc_feature 1..20: note = Target: SCN10A; (-) strand; PAM type: NRG; PAM sequence: GGG
  source 1..20: mol_type = other DNA
cctgtcttattgaattggcc

SEQ ID NO: 24337 - DNA, 20 bp, synthetic construct
  misc_feature 1..20: note = Description of Artificial Sequence: Synthetic oligonucleotide
  misc_feature 1..20: note = Target: SCN10A; (-) strand; PAM type: NRG; PAM sequence: CGG
  source 1..20: mol_type = other DNA
tcctgtcttattgaattggc

SEQ ID NO: 24338 - DNA, 20 bp, synthetic construct
  misc_feature 1..20: note = Description of Artificial Sequence: Synthetic oligonucleotide
  misc_feature 1..20: note = Target: SCN10A; (-) strand; PAM type: NRG; PAM sequence: TGG
  source 1..20: mol_type = other DNA
tttttcctgtcttattgaat

SEQ ID NO: 24339 - DNA, 20 bp, synthetic construct
  misc_feature 1..20: note = Description of Artificial Sequence: Synthetic oligonucleotide
  misc_feature 1..20: note = Target: SCN10A; (-) strand; PAM type: NRG; PAM sequence: CAG
  source 1..20: mol_type = other DNA
ccttggacttcctatttaga

SEQ ID NO: 24340 - DNA, 20 bp, synthetic construct
  misc_feature 1..20: note = Description of Artificial Sequence: Synthetic oligonucleotide
  misc_feature 1..20: note = Target: SCN10A; (-) strand; PAM type: NRG; PAM sequence: TAG
  source 1..20: mol_type = other DNA
attcccttggacttcctatt

SEQ ID NO: 24341 - DNA, 20 bp, synthetic construct
  misc_feature 1..20: note = Description of Artificial Sequence: Synthetic oligonucleotide
  misc_feature 1..20: note = Target: SCN10A; (-) strand; PAM type: NRG; PAM sequence: TGG
  source 1..20: mol_type = other DNA
aatttttctgtagattccct

SEQ ID NO: 24342 - DNA, 20 bp, synthetic construct
  misc_feature 1..20: note = Description of Artificial Sequence: Synthetic oligonucleotide
  misc_feature 1..20: note = Target: SCN10A; (-) strand; PAM type: NRG; PAM sequence: TAG
  source 1..20: mol_type = other DNA
cttaaagttaaatttttctg

SEQ ID NO: 24343 - DNA, 20 bp, synthetic construct
  misc_feature 1..20: note = Description of Artificial Sequence: Synthetic oligonucleotide
  misc_feature 1..20: note = Target: SCN10A; (-) strand; PAM type: NRG; PAM sequence: AAG
  source 1..20: mol_type = other DNA
caaccctgctgagctcctta

SEQ ID NO: 24344 - DNA, 20 bp, synthetic construct
  misc_feature 1..20: note = Description of Artificial Sequence: Synthetic oligonucleotide
  misc_feature 1..20: note = Target: SCN10A; (-) strand; PAM type: NRG; PAM sequence: GAG
  source 1..20: mol_type = other DNA
ttgcatccagcaaccctgct

SEQ ID NO: 24345 - DNA, 20 bp, synthetic construct
  misc_feature 1..20: note = Description of Artificial Sequence: Synthetic oligonucleotide
  misc_feature 1..20: note = Target: SCN10A; (-) strand; PAM type: NRG; PAM sequence: CAG
  source 1..20: mol_type = other DNA
ctatatagtgattttgcatc

SEQ ID NO: 24346 - DNA, 20 bp, synthetic construct
  misc_feature 1..20: note = Description of Artificial Sequence: Synthetic oligonucleotide
  misc_feature 1..20: note = Target: SCN10A; (-) strand; PAM type: NRG; PAM sequence: TAG
  source 1..20: mol_type = other DNA
taatattattaatttctata

SEQ ID NO: 24347 - DNA, 20 bp, synthetic construct
  misc_feature 1..20: note = Description of Artificial Sequence: Synthetic oligonucleotide
  misc_feature 1..20: note = Target: SCN10A; (-) strand; PAM type: NRG; PAM sequence: TGG
  source 1..20: mol_type = other DNA
tcctaggtacattgcaattt

SEQ ID NO: 24348 - DNA, 20 bp, synthetic construct
  misc_feature 1..20: note = Description of Artificial Sequence: Synthetic oligonucleotide
  misc_feature 1..20: note = Target: SCN10A; (-) strand; PAM type: NRG; PAM sequence: AGG
  source 1..20: mol_type = other DNA
ttttataatgtctttttcct

SEQ ID NO: 24349 - DNA, 20 bp, synthetic construct
  misc_feature 1..20: note = Description of Artificial Sequence: Synthetic oligonucleotide
  misc_feature 1..20: note = Target: SCN10A; (-) strand; PAM type: NRG; PAM sequence: TAG
  source 1..20: mol_type = other DNA
attttataatgtctttttcc

SEQ ID NO: 24350 - DNA, 20 bp, synthetic construct
  misc_feature 1..20: note = Description of Artificial Sequence: Synthetic oligonucleotide
  misc_feature 1..20: note = Target: SCN10A; (-) strand; PAM type: NRG; PAM sequence: AGG
  source 1..20: mol_type = other DNA
gcagatctcttaatttatac

SEQ ID NO: 24351 - DNA, 20 bp, synthetic construct
  misc_feature 1..20: note = Description of Artificial Sequence: Synthetic oligonucleotide
  misc_feature 1..20: note = Target: SCN10A; (-) strand; PAM type: NRG; PAM sequence: CAG
  source 1..20: mol_type = other DNA
ggcagatctcttaatttata

SEQ ID NO: 24352 - DNA, 20 bp, synthetic construct
  misc_feature 1..20: note = Description of Artificial Sequence: Synthetic oligonucleotide
  misc_feature 1..20: note = Target: SCN10A; (-) strand; PAM type: NRG; PAM sequence: CAG
  source 1..20: mol_type = other DNA
cttcccacacatcagtatgg

SEQ ID NO: 24353 - DNA, 20 bp, synthetic construct
  misc_feature 1..20: note = Description of Artificial Sequence: Synthetic oligonucleotide
  misc_feature 1..20: note = Target: SCN10A; (-) strand; PAM type: NRG; PAM sequence: TGG
  source 1..20: mol_type = other DNA
agccttcccacacatcagta

SEQ ID NO: 24354 - DNA, 20 bp, synthetic construct
  misc_feature 1..20: note = Description of Artificial Sequence: Synthetic oligonucleotide
  misc_feature 1..20: note = Target: SCN10A; (-) strand; PAM type: NRG; PAM sequence: CAG
  source 1..20: mol_type = other DNA
tacgaagccttcccacacat

SEQ ID NO: 24355 - DNA, 20 bp, synthetic construct
  misc_feature 1..20: note = Description of Artificial Sequence: Synthetic oligonucleotide
  misc_feature 1..20: note = Target: SCN10A; (-) strand; PAM type: NRG; PAM sequence: AAG
  source 1..20: mol_type = other DNA
atcgccacatttacaatacg

SEQ ID NO: 24356 - DNA, 20 bp, synthetic construct
  misc_feature 1..20: note = Description of Artificial Sequence: Synthetic oligonucleotide
  misc_feature 1..20: note = Target: SCN10A; (-) strand; PAM type: NRG; PAM sequence: AAG
  source 1..20: mol_type = other DNA
aattgatttatcaccacagg

SEQ ID NO: 24357 - DNA, 20 bp, synthetic construct
  misc_feature 1..20: note = Description of Artificial Sequence: Synthetic oligonucleotide
  misc_feature 1..20: note = Target: SCN10A; (-) strand; PAM type: NRG; PAM sequence: AGG
  source 1..20: mol_type = other DNA
ctgaattgatttatcaccac

SEQ ID NO: 24358 - DNA, 20 bp, synthetic construct
  misc_feature 1..20: note = Description of Artificial Sequence: Synthetic oligonucleotide
  misc_feature 1..20: note = Target: SCN10A; (-) strand; PAM type: NRG; PAM sequence: CAG
  source 1..20: mol_type = other DNA
actgaattgatttatcacca

SEQ ID NO: 24359 - DNA, 20 bp, synthetic construct
  misc_feature 1..20: note = Description of Artificial Sequence: Synthetic oligonucleotide
  misc_feature 1..20: note = Target: SCN10A; (-) strand; PAM type: NRG; PAM sequence: TGG
  source 1..20: mol_type = other DNA
aactctgtggaaactttgtt

SEQ ID NO: 24360 - DNA, 20 bp, synthetic construct
  misc_feature 1..20: note = Description of Artificial Sequence: Synthetic oligonucleotide
  misc_feature 1..20: note = Target: SCN10A; (-) strand; PAM type: NRG; PAM sequence: TGG
  source 1..20: mol_type = other DNA
gctcttttcttacaactctg

SEQ ID NO: 24361 - DNA, 20 bp, synthetic construct
  misc_feature 1..20: note = Description of Artificial Sequence: Synthetic oligonucleotide
  misc_feature 1..20: note = Target: SCN10A; (-) strand; PAM type: NRG; PAM sequence: CAG
  source 1..20: mol_type = other DNA
agtttaagggtcacattttc

SEQ ID NO: 24362 - DNA, 20 bp, synthetic construct
  misc_feature 1..20: note = Description of Artificial Sequence: Synthetic oligonucleotide
  misc_feature 1..20: note = Target: SCN10A; (-) strand; PAM type: NRG; PAM sequence: GGG
  source 1..20: mol_type = other DNA
acttttccatatcagtttaa

SEQ ID NO: 24363 - DNA, 20 bp, synthetic construct
  misc_feature 1..20: note = Description of Artificial Sequence: Synthetic oligonucleotide
  misc_feature 1..20: note = Target: SCN10A; (-) strand; PAM type: NRG; PAM sequence: AGG
  source 1..20: mol_type = other DNA
tacttttccatatcagttta

SEQ ID NO: 24364 - DNA, 20 bp, synthetic construct
  misc_feature 1..20: note = Description of Artificial Sequence: Synthetic oligonucleotide
  misc_feature 1..20: note = Target: SCN10A; (-) strand; PAM type: NRG; PAM sequence: AAG
  source 1..20: mol_type = other DNA
ttacttttccatatcagttt

SEQ ID NO: 24365 - DNA, 20 bp, synthetic construct
  misc_feature 1..20: note = Description of Artificial Sequence: Synthetic oligonucleotide
  misc_feature 1..20: note = Target: SCN10A; (-) strand; PAM type: NRG; PAM sequence: CAG
  source 1..20: mol_type = other DNA
gtttctttacttttccatat

SEQ ID NO: 24366 - DNA, 20 bp, synthetic construct
  misc_feature 1..20: note = Description of Artificial Sequence: Synthetic oligonucleotide
  misc_feature 1..20: note = Target: SCN10A; (-) strand; PAM type: NRG; PAM sequence: TGG
  source 1..20: mol_type = other DNA
tgtcttcttgaaaattattt

SEQ ID NO: 24367 - DNA, 20 bp, synthetic construct
  misc_feature 1..20: note = Description of Artificial Sequence: Synthetic oligonucleotide
  misc_feature 1..20: note = Target: SCN10A; (-) strand; PAM type: NRG; PAM sequence: TGG
  source 1..20: mol_type = other DNA
ctctatagtaagatttgacc

SEQ ID NO: 24368 - DNA, 20 bp, synthetic construct
  misc_feature 1..20: note = Description of Artificial Sequence: Synthetic oligonucleotide
  misc_feature 1..20: note = Target: SCN10A; (-) strand; PAM type: NRG; PAM sequence: AAG
  source 1..20: mol_type = other DNA
ggatttaaatgctctatagt

SEQ ID NO: 24369 - DNA, 20 bp, synthetic construct
  misc_feature 1..20: note = Description of Artificial Sequence: Synthetic oligonucleotide
  misc_feature 1..20: note = Target: SCN10A; (-) strand; PAM type: NRG; PAM sequence: TAG
  source 1..20: mol_type = other DNA
acgtggatttaaatgctcta

SEQ ID NO: 24370 - DNA, 20 bp, synthetic construct
  misc_feature 1..20: note = Description of Artificial Sequence: Synthetic oligonucleotide
  misc_feature 1..20: note = Target: SCN10A; (-) strand; PAM type: NRG; PAM sequence: TGG
  source 1..20: mol_type = other DNA
catcctgagtcaacaccacg

SEQ ID NO: 24371 - DNA, 20 bp, synthetic construct
  misc_feature 1..20: note = Description of Artificial Sequence: Synthetic oligonucleotide
  misc_feature 1..20: note = Target: SCN10A; (-) strand; PAM type: NRG; PAM sequence: GAG
  source 1..20: mol_type = other DNA
taatctcattgtcacatcct

SEQ ID NO: 24372 - DNA, 20 bp, synthetic construct
  misc_feature 1..20: note = Description of Artificial Sequence: Synthetic oligonucleotide
  misc_feature 1..20: note = Target: SCN10A; (-) strand; PAM type: NRG; PAM sequence: CAG
  source 1..20: mol_type = other DNA
tctactgaatctgtttctcc

SEQ ID NO: 24373 - DNA, 20 bp, synthetic construct
  misc_feature 1..20: note = Description of Artificial Sequence: Synthetic oligonucleotide
  misc_feature 1..20: note = Target: SCN10A; (-) strand; PAM type: NRG; PAM sequence: CAG
  source 1..20: mol_type = other DNA
ccactgcttctgccatgcac

SEQ ID NO: 24374 - DNA, 20 bp, synthetic construct
  misc_feature 1..20: note = Description of Artificial Sequence: Synthetic oligonucleotide
  misc_feature 1..20: note = Target: SCN10A; (-) strand; PAM type: NRG; PAM sequence: TGG
  source 1..20: mol_type = other DNA
tcaatacatcatttcccaag

SEQ ID NO: 24375 - DNA, 20 bp, synthetic construct
  misc_feature 1..20: note = Description of Artificial Sequence: Synthetic oligonucleotide
  misc_feature 1..20: note = Target: SCN10A; (-) strand; PAM type: NRG; PAM sequence: AAG
  source 1..20: mol_type = other DNA
ttttcaatacatcatttccc

SEQ ID NO: 24376 - DNA, 20 bp, synthetic construct
  misc_feature 1..20: note = Description of Artificial Sequence: Synthetic oligonucleotide
  misc_feature 1..20: note = Target: SCN10A; (-) strand; PAM type: NRG; PAM sequence: TGG
  source 1..20: mol_type = other DNA
gcttccaatatttttccata

SEQ ID NO: 24377 - DNA, 20 bp, synthetic construct
  misc_feature 1..20: note = Description of Artificial Sequence: Synthetic oligonucleotide
  misc_feature 1..20: note = Target: SCN10A; (-) strand; PAM type: NRG; PAM sequence: AGG
  source 1..20: mol_type = other DNA
gtatgtgtgtggtatgagat

SEQ ID NO: 24378 - DNA, 20 bp, synthetic construct
  misc_feature 1..20: note = Description of Artificial Sequence: Synthetic oligonucleotide
  misc_feature 1..20: note = Target: SCN10A; (-) strand; PAM type: NRG; PAM sequence: TAG
  source 1..20: mol_type = other DNA
tgtatgtgtgtggtatgaga

SEQ ID NO: 24379 - DNA, 20 bp, synthetic construct
  misc_feature 1..20: note = Description of Artificial Sequence: Synthetic oligonucleotide
  misc_feature 1..20: note = Target: SCN10A; (-) strand; PAM type: NRG; PAM sequence: GAG
  source 1..20: mol_type = other DNA
tttttgtatgtgtgtggtat

SEQ ID NO: 24380 - DNA, 20 bp, synthetic construct
  misc_feature 1..20: note = Description of Artificial Sequence: Synthetic oligonucleotide
  misc_feature 1..20: note = Target: SCN10A; (-) strand; PAM type: NRG; PAM sequence: TGG
  source 1..20: mol_type = other DNA
aatttatttttgtatgtgtg

SEQ ID NO: 24381 - DNA, 20 bp, synthetic construct
  misc_feature 1..20: note = Description of Artificial Sequence: Synthetic oligonucleotide
  misc_feature 1..20: note = Target: SCN10A; (-) strand; PAM type: NRG; PAM sequence: TAG
  source 1..20: mol_type = other DNA
atttaggtatttcaatctcc

SEQ ID NO: 24382 - DNA, 20 bp, synthetic construct
  misc_feature 1..20: note = Description of Artificial Sequence: Synthetic oligonucleotide
  misc_feature 1..20: note = Target: SCN10A; (-) strand; PAM type: NRG; PAM sequence: AGG
  source 1..20: mol_type = other DNA
cagttttcctttctacattt

SEQ ID NO: 24383 - DNA, 20 bp, synthetic construct
  misc_feature 1..20: note = Description of Artificial Sequence: Synthetic oligonucleotide
  misc_feature 1..20: note = Target: SCN10A; (-) strand; PAM type: NRG; PAM sequence: TAG
  source 1..20: mol_type = other DNA
acagttttcctttctacatt

SEQ ID NO: 24384 - DNA, 20 bp, synthetic construct
  misc_feature 1..20: note = Description of Artificial Sequence: Synthetic oligonucleotide
  misc_feature 1..20: note = Target: SCN10A; (-) strand; PAM type: NRG; PAM sequence: CAG
  source 1..20: mol_type = other DNA
gtgttttctcctcaaagtta

SEQ ID NO: 24385 - DNA, 20 bp, synthetic construct
  misc_feature 1..20: note = Description of Artificial Sequence: Synthetic oligonucleotide
  misc_feature 1..20: note = Target: SCN10A; (-) strand; PAM type: NRG; PAM sequence: AAG
  source 1..20: mol_type = other DNA
tatcctgtgttttctcctca

SEQ ID NO: 24386 - DNA, 20 bp, synthetic construct
  misc_feature 1..20: note = Description of Artificial Sequence: Synthetic oligonucleotide
  misc_feature 1..20: note = Target: SCN10A; (-) strand; PAM type: NRG; PAM sequence: AAG
  source 1..20: mol_type = other DNA
ttgccatatagtattccata

SEQ ID NO: 24387 - DNA, 20 bp, synthetic construct
  misc_feature 1..20: note = Description of Artificial Sequence: Synthetic oligonucleotide
  misc_feature 1..20: note = Target: SCN10A; (-) strand; PAM type: NRG; PAM sequence: TAG
  source 1..20: mol_type = other DNA
attcattttttattgccata

SEQ ID NO: 24388 - DNA, 20 bp, synthetic construct
  misc_feature 1..20: note = Description of Artificial Sequence: Synthetic oligonucleotide
  misc_feature 1..20: note = Target: SCN10A; (-) strand; PAM type: NRG; PAM sequence: TAG
  source 1..20: mol_type = other DNA
tttgcccaaatggatacatg

SEQ ID NO: 24389 - DNA, 20 bp, synthetic construct
  misc_feature 1..20: note = Description of Artificial Sequence: Synthetic oligonucleotide
  misc_feature 1..20: note = Target: SCN10A; (-) strand; PAM type: NRG; PAM sequence: TGG
  source 1..20: mol_type = other DNA
gtttttgggatttgcccaaa

SEQ ID NO: 24390 - DNA, 20 bp, synthetic construct
  misc_feature 1..20: note = Description of Artificial Sequence: Synthetic oligonucleotide
  misc_feature 1..20: note = Target: SCN10A; (-) strand; PAM type: NRG; PAM sequence: GGG
  source 1..20: mol_type = other DNA
tgttttaaaattatgttttt

SEQ ID NO: 24391 - DNA, 20 bp, synthetic construct
  misc_feature 1..20: note = Description of Artificial Sequence: Synthetic oligonucleotide
  misc_feature 1..20: note = Target: SCN10A; (-) strand; PAM type: NRG; PAM sequence: TGG
  source 1..20: mol_type = other DNA
atgttttaaaattatgtttt

SEQ ID NO: 24392 - DNA, 20 bp, synthetic construct
  misc_feature 1..20: note = Description of Artificial Sequence: Synthetic oligonucleotide
  misc_feature 1..20: note = Target: SCN10A; (-) strand; PAM type: NRG; PAM sequence: TGG
  source 1..20: mol_type = other DNA
tttgtatcttttcaaattta

SEQ ID NO: 24393 - DNA, 20 bp, synthetic construct
  misc_feature 1..20: note = Description of Artificial Sequence: Synthetic oligonucleotide
  misc_feature 1..20: note = Target: SCN10A; (-) strand; PAM type: NRG; PAM sequence: AAG
  source 1..20: mol_type = other DNA
tgtttaacactgcatgcata

SEQ ID NO: 24394 - DNA, 20 bp, synthetic construct
  misc_feature 1..20: note = Description of Artificial Sequence: Synthetic oligonucleotide
  misc_feature 1..20: note = Target: SCN10A; (-) strand; PAM type: NRG; PAM sequence: GGG
  source 1..20: mol_type = other DNA
tctactgcaaacggggaagt

SEQ ID NO: 24395 - DNA, 20 bp, synthetic construct
  misc_feature 1..20: note = Description of Artificial Sequence: Synthetic oligonucleotide
  misc_feature 1..20: note = Target: SCN10A; (-) strand; PAM type: NRG; PAM sequence: TGG
  source 1..20: mol_type = other DNA
atctactgcaaacggggaag

SEQ ID NO: 24396 - DNA, 20 bp, synthetic construct
  misc_feature 1..20: note = Description of Artificial Sequence: Synthetic oligonucleotide
  misc_feature 1..20: note = Target: SCN10A; (-) strand; PAM type: NRG; PAM sequence: AAG
  source 1..20: mol_type = other DNA
tgaatctactgcaaacgggg

SEQ ID NO: 24397 - DNA, 20 bp, synthetic construct
  misc_feature 1..20: note = Description of Artificial Sequence: Synthetic oligonucleotide
  misc_feature 1..20: note = Target: SCN10A; (-) strand; PAM type: NRG; PAM sequence: GGG
  source 1..20: mol_type = other DNA
agctgaatctactgcaaacg

SEQ ID NO: 24398 - DNA, 20 bp, synthetic construct
  misc_feature 1..20: note = Description of Artificial Sequence: Synthetic oligonucleotide
  misc_feature 1..20: note = Target: SCN10A; (-) strand; PAM type: NRG; PAM sequence: GGG
  source 1..20: mol_type = other DNA
aagctgaatctactgcaaac

SEQ ID NO: 24399 - DNA, 20 bp, synthetic construct
  misc_feature 1..20: note = Description of Artificial Sequence: Synthetic oligonucleotide
  misc_feature 1..20: note = Target: SCN10A; (-) strand; PAM type: NRG; PAM sequence: CGG
  source 1..20: mol_type = other DNA
gaagctgaatctactgcaaa

SEQ ID NO: 24400 - DNA, 20 bp, synthetic construct
  misc_feature 1..20: note = Description of Artificial Sequence: Synthetic oligonucleotide
  misc_feature 1..20: note = Target: SCN10A; (-) strand; PAM type: NRG; PAM sequence: AAG
  source 1..20: mol_type = other DNA
ggcaaagaacatgtgaaatg

SEQ ID NO: 24401 - DNA, 20 bp, synthetic construct
  misc_feature 1..20: note = Description of Artificial Sequence: Synthetic oligonucleotide
  misc_feature 1..20: note = Target: SCN10A; (-) strand; PAM type: NRG; PAM sequence: AAG
  source 1..20: mol_type = other DNA
aaatgttttctcacctggca

SEQ ID NO: 24402 - DNA, 20 bp, synthetic construct
  misc_feature 1..20: note = Description of Artificial Sequence: Synthetic oligonucleotide
  misc_feature 1..20: note = Target: SCN10A; (-) strand; PAM type: NRG; PAM sequence: TGG
  source 1..20: mol_type = other DNA
aagataaatgttttctcacc

SEQ ID NO: 24403 - DNA, 20 bp, synthetic construct
  misc_feature 1..20: note = Description of Artificial Sequence: Synthetic oligonucleotide
  misc_feature 1..20: note = Target: SCN10A; (-) strand; PAM type: NRG; PAM sequence: AAG
  source 1..20: mol_type = other DNA
atagcaatttggttgtagag

SEQ ID NO: 24404 - DNA, 20 bp, synthetic construct
  misc_feature 1..20: note = Description of Artificial Sequence: Synthetic oligonucleotide
  misc_feature 1..20: note = Target: SCN10A; (-) strand; PAM type: NRG; PAM sequence: GAG
  source 1..20: mol_type = other DNA
attatagcaatttggttgta

SEQ ID NO: 24405 - DNA, 20 bp, synthetic construct
  misc_feature 1..20: note = Description of Artificial Sequence: Synthetic oligonucleotide
  misc_feature 1..20: note = Target: SCN10A; (-) strand; PAM type: NRG; PAM sequence: TAG
  source 1..20: mol_type = other DNA
aaattatagcaatttggttg

SEQ ID NO: 24406 - DNA, 20 bp, synthetic construct
  misc_feature 1..20: note = Description of Artificial Sequence: Synthetic oligonucleotide
  misc_feature 1..20: note = Target: SCN10A; (-) strand; PAM type: NRG; PAM sequence: TGG
  source 1..20: mol_type = other DNA
tttgacaaattatagcaatt

SEQ ID NO: 24407 - DNA, 20 bp, synthetic construct
  misc_feature 1..20: note = Description of Artificial Sequence: Synthetic oligonucleotide
  misc_feature 1..20: note = Target: SCN10A; (-) strand; PAM type: NRG; PAM sequence: TAG
  source 1..20: mol_type = other DNA
ggaaaacctttgacaaatta

SEQ ID NO: 24408 - DNA, 20 bp, synthetic construct
  misc_feature 1..20: note = Description of Artificial Sequence: Synthetic oligonucleotide
  misc_feature 1..20: note = Target: SCN10A; (-) strand; PAM type: NRG; PAM sequence: TGG
  source 1..20: mol_type = other DNA
ctctaagcataacaatattc

SEQ ID NO: 24409 - DNA, 20 bp, synthetic construct
  misc_feature 1..20: note = Description of Artificial Sequence: Synthetic oligonucleotide
  misc_feature 1..20: note = Target: SCN10A; (-) strand; PAM type: NRG; PAM sequence: AAG
  source 1..20: mol_type = other DNA
accctaggacactcacctct

SEQ ID NO: 24410 - DNA, 20 bp, synthetic construct
  misc_feature 1..20: note = Description of Artificial Sequence: Synthetic oligonucleotide
  misc_feature 1..20: note = Target: SCN10A; (-) strand; PAM type: NRG; PAM sequence: AGG
  source 1..20: mol_type = other DNA
aggggctctttgatgaccct

SEQ ID NO: 24411 - DNA, 20 bp, synthetic construct
  misc_feature 1..20: note = Description of Artificial Sequence: Synthetic oligonucleotide
  misc_feature 1..20: note = Target: SCN10A; (-) strand; PAM type: NRG; PAM sequence: TAG
  source 1..20: mol_type = other DNA
aaggggctctttgatgaccc

SEQ ID NO: 24412 - DNA, 20 bp, synthetic construct
  misc_feature 1..20: note = Description of Artificial Sequence: Synthetic oligonucleotide
  misc_feature 1..20: note = Target: SCN10A; (-) strand; PAM type: NRG; PAM sequence: GGG
  source 1..20: mol_type = other DNA
gtttcagagaatcattgaag

SEQ ID NO: 24413 - DNA, 20 bp, synthetic construct
  misc_feature 1..20: note = Description of Artificial Sequence: Synthetic oligonucleotide
  misc_feature 1..20: note = Target: SCN10A; (-) strand; PAM type: NRG; PAM sequence: GGG
  source 1..20: mol_type = other DNA
ggtttcagagaatcattgaa

SEQ ID NO: 24414 - DNA, 20 bp, synthetic construct
  misc_feature 1..20: note = Description of Artificial Sequence: Synthetic oligonucleotide
  misc_feature 1..20: note = Target: SCN10A; (-) strand; PAM type: NRG; PAM sequence: AGG
  source 1..20: mol_type = other DNA
tggtttcagagaatcattga

SEQ ID NO: 24415 - DNA, 20 bp, synthetic construct
  misc_feature 1..20: note = Description of Artificial Sequence: Synthetic oligonucleotide
  misc_feature 1..20: note = Target: SCN10A; (-) strand; PAM type: NRG; PAM sequence: AAG
  source 1..20: mol_type = other DNA
ctggtttcagagaatcattg

SEQ ID NO: 24416 - DNA, 20 bp, synthetic construct
  misc_feature 1..20: note = Description of Artificial Sequence: Synthetic oligonucleotide
  misc_feature 1..20: note = Target: SCN10A; (-) strand; PAM type: NRG; PAM sequence: GAG
  source 1..20: mol_type = other DNA
ctccccatgccctggtttca

SEQ ID NO: 24417 - DNA, 20 bp, synthetic construct
  misc_feature 1..20: note = Description of Artificial Sequence: Synthetic oligonucleotide
  misc_feature 1..20: note = Target: SCN10A; (-) strand; PAM type: NRG; PAM sequence: CAG
  source 1..20: mol_type = other DNA
ctctccccatgccctggttt

SEQ ID NO: 24418 - DNA, 20 bp, synthetic construct
  misc_feature 1..20: note = Description of Artificial Sequence: Synthetic oligonucleotide
  misc_feature 1..20: note = Target: SCN10A; (-) strand; PAM type: NRG; PAM sequence: TGG
  source 1..20: mol_type = other DNA
ttcctactctccccatgccc

SEQ ID NO: 24419 - DNA, 20 bp, synthetic construct
  misc_feature 1..20: note = Description of Artificial Sequence: Synthetic oligonucleotide
  misc_feature 1..20: note = Target: SCN10A; (-) strand; PAM type: NRG; PAM sequence: TAG
  source 1..20: mol_type = other DNA
attgttaagaagggcaagac

SEQ ID NO: 24420 - DNA, 20 bp, synthetic construct
  misc_feature 1..20: note = Description of Artificial Sequence: Synthetic oligonucleotide
  misc_feature 1..20: note = Target: SCN10A; (-) strand; PAM type: NRG; PAM sequence: AAG
  source 1..20: mol_type = other DNA
caaaaattgttaagaagggc

SEQ ID NO: 24421 - DNA, 20 bp, synthetic construct
  misc_feature 1..20: note = Description of Artificial Sequence: Synthetic oligonucleotide
  misc_feature 1..20: note = Target: SCN10A; (-) strand; PAM type: NRG; PAM sequence: GGG
  source 1..20: mol_type = other DNA
gggtcaaaaattgttaagaa

SEQ ID NO: 24422 - DNA, 20 bp, synthetic construct
  misc_feature 1..20: note = Description of Artificial Sequence: Synthetic oligonucleotide
  misc_feature 1..20: note = Target: SCN10A; (-) strand; PAM type: NRG; PAM sequence: AGG
  source 1..20: mol_type = other DNA
ggggtcaaaaattgttaaga

SEQ ID NO: 24423 - DNA, 20 bp, synthetic construct
  misc_feature 1..20: note = Description of Artificial Sequence: Synthetic oligonucleotide
  misc_feature 1..20: note = Target: SCN10A; (-) strand; PAM type: NRG; PAM sequence: AAG
  source 1..20: mol_type = other DNA
gggggtcaaaaattgttaag

SEQ ID NO: 24424 - DNA, 20 bp, synthetic construct
  misc_feature 1..20: note = Description of Artificial Sequence: Synthetic oligonucleotide
  misc_feature 1..20: note = Target: SCN10A; (-) strand; PAM type: NRG; PAM sequence: AAG
  source 1..20: mol_type = other DNA
gcagggggtcaaaaattgtt

SEQ ID NO: 24425 - DNA, 20 bp, synthetic construct
  misc_feature 1..20: note = Description of Artificial Sequence: Synthetic oligonucleotide
  misc_feature 1..20: note = Target: SCN10A; (-) strand; PAM type: NRG; PAM sequence: GGG
  source 1..20: mol_type = other DNA
cagaaggtaaagagagcagg

SEQ ID NO: 24426 - DNA, 20 bp, synthetic construct
  misc_feature 1..20: note = Description of Artificial Sequence: Synthetic oligonucleotide
  misc_feature 1..20: note = Target: SCN10A; (-) strand; PAM type: NRG; PAM sequence: GGG
  source 1..20: mol_type = other DNA
ccagaaggtaaagagagcag

SEQ ID NO: 24427 - DNA, 20 bp, synthetic construct
  misc_feature 1..20: note = Description of Artificial Sequence: Synthetic oligonucleotide
  misc_feature 1..20: note = Target: SCN10A; (-) strand; PAM type: NRG; PAM sequence: GGG
  source 1..20: mol_type = other DNA
accagaaggtaaagagagca

SEQ ID NO: 24428 - DNA, 20 bp, synthetic construct
  misc_feature 1..20: note = Description of Artificial Sequence: Synthetic oligonucleotide
  misc_feature 1..20: note = Target: SCN10A; (-) strand; PAM type: NRG; PAM sequence: AGG
  source 1..20: mol_type = other DNA
caccagaaggtaaagagagc

SEQ ID NO: 24429 - DNA, 20 bp, synthetic construct
  misc_feature 1..20: note = Description of Artificial Sequence: Synthetic oligonucleotide
  misc_feature 1..20: note = Target: SCN10A; (-) strand; PAM type: NRG; PAM sequence: CAG
  source 1..20: mol_type = other DNA
gcaccagaaggtaaagagag

SEQ ID NO: 24430 - DNA, 20 bp, synthetic construct
  misc_feature 1..20: note = Description of Artificial Sequence: Synthetic oligonucleotide
  misc_feature 1..20: note = Target: SCN10A; (-) strand; PAM type: NRG; PAM sequence: GAG
  source 1..20: mol_type = other DNA
tgggcaccagaaggtaaaga

SEQ ID NO: 24431 - DNA, 20 bp, synthetic construct
  misc_feature 1..20: note = Description of Artificial Sequence: Synthetic oligonucleotide
  misc_feature 1..20: note = Target: SCN10A; (-) strand; PAM type: NRG; PAM sequence: GAG
  source 1..20: mol_type = other DNA
attgggcaccagaaggtaaa

SEQ ID NO: 24432 - DNA, 20 bp, synthetic construct
  misc_feature 1..20: note = Description of Artificial Sequence: Synthetic oligonucleotide
  misc_feature 1..20: note = Target: SCN10A; (-) strand; PAM type: NRG; PAM sequence: AAG
  source 1..20: mol_type = other DNA
agattgggcaccagaaggta

SEQ ID NO: 24433 - DNA, 20 bp, synthetic construct
  misc_feature 1..20: note = Description of Artificial Sequence: Synthetic oligonucleotide
  misc_feature 1..20: note = Target: SCN10A; (-) strand; PAM type: NRG; PAM sequence: AGG
  source 1..20: mol_type = other DNA
tcctcagattgggcaccaga

SEQ ID NO: 24434 - DNA, 20 bp, synthetic construct
  misc_feature 1..20: note = Description of Artificial Sequence: Synthetic oligonucleotide
  misc_feature 1..20: note = Target: SCN10A; (-) strand; PAM type: NRG; PAM sequence: AAG
  source 1..20: mol_type = other DNA
ttcctcagattgggcaccag

SEQ ID NO: 24435 - DNA, 20 bp, synthetic construct
  misc_feature 1..20: note = Description of Artificial Sequence: Synthetic oligonucleotide
  misc_feature 1..20: note = Target: SCN10A; (-) strand; PAM type: NRG; PAM sequence: CAG
  source 1..20: mol_type = other DNA
ttcttcctcagattgggcac

SEQ ID NO: 24436 - DNA, 20 bp, synthetic construct
  misc_feature 1..20: note = Description of Artificial Sequence: Synthetic oligonucleotide
  misc_feature 1..20: note = Target: SCN10A; (-) strand; PAM type: NRG; PAM sequence: GGG
  source 1..20: mol_type = other DNA
tagaggttcttcctcagatt

SEQ ID NO: 24437 - DNA, 20 bp, synthetic construct
  misc_feature 1..20: note = Description of Artificial Sequence: Synthetic oligonucleotide
  misc_feature 1..20: note = Target: SCN10A; (-) strand; PAM type: NRG; PAM sequence: TGG
  source 1..20: mol_type = other DNA
ctagaggttcttcctcagat

SEQ ID NO: 24438 - DNA, 20 bp, synthetic construct
  misc_feature 1..20: note = Description of Artificial Sequence: Synthetic oligonucleotide
  misc_feature 1..20: note = Target: SCN10A; (-) strand; PAM type: NRG; PAM sequence: CAG
  source 1..20: mol_type = other DNA
agaaactagaggttcttcct

SEQ ID NO: 24439 - DNA, 20 bp, synthetic construct
  misc_feature 1..20: note = Description of Artificial Sequence: Synthetic oligonucleotide
  misc_feature 1..20: note = Target: SCN10A; (-) strand; PAM type: NRG; PAM sequence: AGG
  source 1..20: mol_type = other DNA
tttgcttgggaagaaactag

SEQ ID NO: 24440 - DNA, 20 bp, synthetic construct
  misc_feature 1..20: note = Description of Artificial Sequence: Synthetic oligonucleotide
  misc_feature 1..20: note = Target: SCN10A; (-) strand; PAM type: NRG; PAM sequence: GAG
  source 1..20: mol_type = other DNA
ttttgcttgggaagaaacta

SEQ ID NO: 24441 - DNA, 20 bp, synthetic construct
  misc_feature 1..20: note = Description of Artificial Sequence: Synthetic oligonucleotide
  misc_feature 1..20: note = Target: SCN10A; (-) strand; PAM type: NRG; PAM sequence: TAG
  source 1..20: mol_type = other DNA
tcttttgcttgggaagaaac

SEQ ID NO: 24442 - DNA, 20 bp, synthetic construct
  misc_feature 1..20: note = Description of Artificial Sequence: Synthetic oligonucleotide
  misc_feature 1..20: note = Target: SCN10A; (-) strand; PAM type: NRG; PAM sequence: AAG
  source 1..20: mol_type = other DNA
aatcccctcttttgcttggg

SEQ ID NO: 24443 - DNA, 20 bp, synthetic construct
  misc_feature 1..20: note = Description of Artificial Sequence: Synthetic oligonucleotide
  misc_feature 1..20: note = Target: SCN10A; (-) strand; PAM type: NRG; PAM sequence: GGG
  source 1..20: mol_type = other DNA
tctaatcccctcttttgctt

SEQ ID NO: 24444 - DNA, 20 bp, synthetic construct
  misc_feature 1..20: note = Description of Artificial Sequence: Synthetic oligonucleotide
  misc_feature 1..20: note = Target: SCN10A; (-) strand; PAM type: NRG; PAM sequence: TGG
  source 1..20: mol_type = other DNA
ttctaatcccctcttttgct

SEQ ID NO: 24445 - DNA, 20 bp, synthetic construct
  misc_feature 1..20: note = Description of Artificial Sequence: Synthetic oligonucleotide
  misc_feature 1..20: note = Target: SCN10A; (-) strand; PAM type: NRG; PAM sequence: TAG
  source 1..20: mol_type = other DNA
tgcttgtggaaagataaaga

SEQ ID NO: 24446 - DNA, 20 bp, synthetic construct
  misc_feature 1..20: note = Description of Artificial Sequence: Synthetic oligonucleotide
  misc_feature 1..20: note = Target: SCN10A; (-) strand; PAM type: NRG; PAM sequence: AAG
  source 1..20: mol_type = other DNA
tgtctgcttgtggaaagata

SEQ ID NO: 24447 - DNA, 20 bp, synthetic construct
  misc_feature 1..20: note = Description of Artificial Sequence: Synthetic oligonucleotide
  misc_feature 1..20: note = Target: SCN10A; (-) strand; PAM type: NRG; PAM sequence: AAG
  source 1..20: mol_type = other DNA
cctatctgtctgcttgtgga

SEQ ID NO: 24448 - DNA, 20 bp, synthetic construct
  misc_feature 1..20: note = Description of Artificial Sequence: Synthetic oligonucleotide
  misc_feature 1..20: note = Target: SCN10A; (-) strand; PAM type: NRG; PAM sequence: TGG
  source 1..20: mol_type = other DNA
cctgcctatctgtctgcttg

SEQ ID NO: 24449 - DNA, 20 bp, synthetic construct
  misc_feature 1..20: note = Description of Artificial Sequence: Synthetic oligonucleotide
  misc_feature 1..20: note = Target: SCN10A; (-) strand; PAM type: NRG; PAM sequence: TAG
  source 1..20: mol_type = other DNA
caattacctgctgataatgg

SEQ ID NO: 24450 - DNA, 20 bp, synthetic construct
  misc_feature 1..20: note = Description of Artificial Sequence: Synthetic oligonucleotide
  misc_feature 1..20: note = Target: SCN10A; (-) strand; PAM type: NRG; PAM sequence: TGG
  source 1..20: mol_type = other DNA
gcacaattacctgctgataa

SEQ ID NO: 24451 - DNA, 20 bp, synthetic construct
  misc_feature 1..20: note = Description of Artificial Sequence: Synthetic oligonucleotide
  misc_feature 1..20: note = Target: SCN10A; (-) strand; PAM type: NRG; PAM sequence: TAG
  source 1..20: mol_type = other DNA
attattccttgctgaaacat

SEQ ID NO: 24452 - DNA, 20 bp, synthetic construct
  misc_feature 1..20: note = Description of Artificial Sequence: Synthetic oligonucleotide
  misc_feature 1..20: note = Target: SCN10A; (-) strand; PAM type: NRG; PAM sequence: CAG
  source 1..20: mol_type = other DNA
aattgtagccagtgaggaat

SEQ ID NO: 24453 - DNA, 20 bp, synthetic construct
  misc_feature 1..20: note = Description of Artificial Sequence: Synthetic oligonucleotide
  misc_feature 1..20: note = Target: SCN10A; (-) strand; PAM type: NRG; PAM sequence: AGG
  source 1..20: mol_type = other DNA
gcattaaattgtagccagtg

SEQ ID NO: 24454 - DNA, 20 bp, synthetic construct
  misc_feature 1..20: note = Description of Artificial Sequence: Synthetic oligonucleotide
  misc_feature 1..20: note = Target: SCN10A; (-) strand; PAM type: NRG; PAM sequence: GAG
  source 1..20: mol_type = other DNA
agcattaaattgtagccagt

SEQ ID NO: 24455 - DNA, 20 bp, synthetic construct
  misc_feature 1..20: note = Description of Artificial Sequence: Synthetic oligonucleotide
  misc_feature 1..20: note = Target: SCN10A; (-) strand; PAM type: NRG; PAM sequence: CAG
  source 1..20: mol_type = other DNA
aaaaagcattaaattgtagc

SEQ ID NO: 24456 - DNA, 20 bp, synthetic construct
  misc_feature 1..20: note = Description of Artificial Sequence: Synthetic oligonucleotide
  misc_feature 1..20: note = Target: SCN10A; (-) strand; PAM type: NRG; PAM sequence: TAG
  source 1..20: mol_type = other DNA
tttgaaaaagcattaaattg

SEQ ID NO: 24457 - DNA, 20 bp, synthetic construct
  misc_feature 1..20: note = Description of Artificial Sequence: Synthetic oligonucleotide
  misc_feature 1..20: note = Target: SCN10A; (-) strand; PAM type: NRG; PAM sequence: AAG
  source 1..20: mol_type = other DNA
catgctgtatacttttgaaa

SEQ ID NO: 24458 - DNA, 20 bp, synthetic construct
  misc_feature 1..20: note = Description of Artificial Sequence: Synthetic oligonucleotide
  misc_feature 1..20: note = Target: SCN10A; (-) strand; PAM type: NRG; PAM sequence: AAG
  source 1..20: mol_type = other DNA
tgggatagactggggctcca

SEQ ID NO: 24459 - DNA, 20 bp, synthetic construct
  misc_feature 1..20: note = Description of Artificial Sequence: Synthetic oligonucleotide
  misc_feature 1..20: note = Target: SCN10A; (-) strand; PAM type: NRG; PAM sequence: GGG
  source 1..20: mol_type = other DNA
aatgtccttgggatagactg

SEQ ID NO: 24460 - DNA, 20 bp, synthetic construct
  misc_feature 1..20: note = Description of Artificial Sequence: Synthetic oligonucleotide
  misc_feature 1..20: note = Target: SCN10A; (-) strand; PAM type: NRG; PAM sequence: GGG
  source 1..20: mol_type = other DNA
aaatgtccttgggatagact

SEQ ID NO: 24461 - DNA, 20 bp, synthetic construct
  misc_feature 1..20: note = Description of Artificial Sequence: Synthetic oligonucleotide
  misc_feature 1..20: note = Target: SCN10A; (-) strand; PAM type: NRG; PAM sequence: TGG
  source 1..20: mol_type = other DNA
taaatgtccttgggatagac

SEQ ID NO: 24462 - DNA, 20 bp, synthetic construct
  misc_feature 1..20: note = Description of Artificial Sequence: Synthetic oligonucleotide
  misc_feature 1..20: note = Target: SCN10A; (-) strand; PAM type: NRG; PAM sequence: TAG
  source 1..20: mol_type = other DNA
gataataaatgtccttggga

SEQ ID NO: 24463 - DNA, 20 bp, synthetic construct
  misc_feature 1..20: note = Description of Artificial Sequence: Synthetic oligonucleotide
  misc_feature 1..20: note = Target: SCN10A; (-) strand; PAM type: NRG; PAM sequence: GGG
  source 1..20: mol_type = other DNA
ggaagataataaatgtcctt

SEQ ID NO: 24464 - DNA, 20 bp, synthetic construct
  misc_feature 1..20: note = Description of Artificial Sequence: Synthetic oligonucleotide
  misc_feature 1..20: note = Target: SCN10A; (-) strand; PAM type: NRG; PAM sequence: TGG
  source 1..20: mol_type = other DNA
aggaagataataaatgtcct

SEQ ID NO: 24465 - DNA, 20 bp, synthetic construct
  misc_feature 1..20: note = Description of Artificial Sequence: Synthetic oligonucleotide
  misc_feature 1..20: note = Target: SCN10A; (-) strand; PAM type: NRG; PAM sequence: AAG
  source 1..20: mol_type = other DNA
tgttgctgagaacccagagg

SEQ ID NO: 24466 - DNA, 20 bp, synthetic construct
  misc_feature 1..20: note = Description of Artificial Sequence: Synthetic oligonucleotide
  misc_feature 1..20: note = Target: SCN10A; (-) strand; PAM type: NRG; PAM sequence: AGG
  source 1..20: mol_type = other DNA
ctatgttgctgagaacccag

SEQ ID NO: 24467 - DNA, 20 bp, synthetic construct
  misc_feature 1..20: note = Description of Artificial Sequence: Synthetic oligonucleotide
  misc_feature 1..20: note = Target: SCN10A; (-) strand; PAM type: NRG; PAM sequence: GAG
  source 1..20: mol_type = other DNA
cctatgttgctgagaaccca

SEQ ID NO: 24468 - DNA, 20 bp, synthetic construct
  misc_feature 1..20: note = Description of Artificial Sequence: Synthetic oligonucleotide
  misc_feature 1..20: note = Target: SCN10A; (-) strand; PAM type: NRG; PAM sequence: CAG
  source 1..20: mol_type = other DNA
ttcctatgttgctgagaacc

SEQ ID NO: 24469 - DNA, 20 bp, synthetic construct
  misc_feature 1..20: note = Description of Artificial Sequence: Synthetic oligonucleotide
  misc_feature 1..20: note = Target: SCN10A; (-) strand; PAM type: NRG; PAM sequence: GAG
  source 1..20: mol_type = other DNA
tagttgtttcctatgttgct

SEQ ID NO: 24470 - DNA, 20 bp, synthetic construct
  misc_feature 1..20: note = Description of Artificial Sequence: Synthetic oligonucleotide
  misc_feature 1..20: note = Target: SCN10A; (-) strand; PAM type: NRG; PAM sequence: TAG
  source 1..20: mol_type = other DNA
tgcaaattgataatagccat

SEQ ID NO: 24471 - DNA, 20 bp, synthetic construct
  misc_feature 1..20: note = Description of Artificial Sequence: Synthetic oligonucleotide
  misc_feature 1..20: note = Target: SCN10A; (-) strand; PAM type: NRG; PAM sequence: TAG
  source 1..20: mol_type = other DNA
tttgaaatgcaaattgataa

SEQ ID NO: 24472 - DNA, 20 bp, synthetic construct
  misc_feature 1..20: note = Description of Artificial Sequence: Synthetic oligonucleotide
  misc_feature 1..20: note = Target: SCN10A; (-) strand; PAM type: NRG; PAM sequence: TAG
  source 1..20: mol_type = other DNA
cctcgtggaaataatcagac

SEQ ID NO: 24473 - DNA, 20 bp, synthetic construct
  misc_feature 1..20: note = Description of Artificial Sequence: Synthetic oligonucleotide
  misc_feature 1..20: note = Target: SCN10A; (-) strand; PAM type: NRG; PAM sequence: CAG
  source 1..20: mol_type = other DNA
cttggcctcgtggaaataat

SEQ ID NO: 24474 - DNA, 20 bp, synthetic construct
  misc_feature 1..20: note = Description of Artificial Sequence: Synthetic oligonucleotide
  misc_feature 1..20: note = Target: SCN10A; (-) strand; PAM type: NRG; PAM sequence: TGG
  source 1..20: mol_type = other DNA
gttcagcatccttggcctcg

SEQ ID NO: 24475 - DNA, 20 bp, synthetic construct
  misc_feature 1..20: note = Description of Artificial Sequence: Synthetic oligonucleotide
  misc_feature 1..20: note = Target: SCN10A; (-) strand; PAM type: NRG; PAM sequence: TGG
  source 1..20: mol_type = other DNA
tggatgatgttcagcatcct

SEQ ID NO: 24476 - DNA, 20 bp, synthetic construct
  misc_feature 1..20: note = Description of Artificial Sequence: Synthetic oligonucleotide
  misc_feature 1..20: note = Target: SCN10A; (-) strand; PAM type: NRG; PAM sequence: CAG
  source 1..20: mol_type = other DNA
gacaggtattggatgatgtt

SEQ ID NO: 24477 - DNA, 20 bp, synthetic construct
  misc_feature 1..20: note = Description of Artificial Sequence: Synthetic oligonucleotide
  misc_feature 1..20: note = Target: SCN10A; (-) strand; PAM type: NRG; PAM sequence: TGG
  source 1..20: mol_type = other DNA
ggaatttatgtgacaggtat

SEQ ID NO: 24478 - DNA, 20 bp, synthetic construct
  misc_feature 1..20: note = Description of Artificial Sequence: Synthetic oligonucleotide
  misc_feature 1..20: note = Target: SCN10A; (-) strand; PAM type: NRG; PAM sequence: AGG
  source 1..20: mol_type = other DNA
atcctgggaatttatgtgac

SEQ ID NO: 24479 - DNA, 20 bp, synthetic construct
  misc_feature 1..20: note = Description of Artificial Sequence: Synthetic oligonucleotide
  misc_feature 1..20: note = Target: SCN10A; (-) strand; PAM type: NRG; PAM sequence: CAG
  source 1..20: mol_type = other DNA
aatcctgggaatttatgtga

SEQ ID NO: 24480 - DNA, 20 bp, synthetic construct
  misc_feature 1..20: note = Description of Artificial Sequence: Synthetic oligonucleotide
  misc_feature 1..20: note = Target: SCN10A; (-) strand; PAM type: NRG; PAM sequence: GGG
  source 1..20: mol_type = other DNA
acctatatggtcacaatcct

SEQ ID NO: 24481 - DNA, 20 bp, synthetic construct
  misc_feature 1..20: note = Description of Artificial Sequence: Synthetic oligonucleotide
  misc_feature 1..20: note = Target: SCN10A; (-) strand; PAM type: NRG; PAM sequence: TGG
  source 1..20: mol_type = other DNA
tacctatatggtcacaatcc

SEQ ID NO: 24482 - DNA, 20 bp, synthetic construct
  misc_feature 1..20: note = Description of Artificial Sequence: Synthetic oligonucleotide
  misc_feature 1..20: note = Target: SCN10A; (-) strand; PAM type: NRG; PAM sequence: TGG
  source 1..20: mol_type = other DNA
catatacaaatctacctata

SEQ ID NO: 24483 - DNA, 20 bp, synthetic construct
  misc_feature 1..20: note = Description of Artificial Sequence: Synthetic oligonucleotide
  misc_feature 1..20: note = Target: SCN10A; (-) strand; PAM type: NRG; PAM sequence: AAG
  source 1..20: mol_type = other DNA
ctttatatgcacactatgaa

SEQ ID NO: 24484 - DNA, 20 bp, synthetic construct
  misc_feature 1..20: note = Description of Artificial Sequence: Synthetic oligonucleotide
  misc_feature 1..20: note = Target: SCN10A; (-) strand; PAM type: NRG; PAM sequence: GAG
  source 1..20: mol_type = other DNA
ttatcaaatccattctttag

SEQ ID NO: 24485 - DNA, 20 bp, synthetic construct
  misc_feature 1..20: note = Description of Artificial Sequence: Synthetic oligonucleotide
  misc_feature 1..20: note = Target: SCN10A; (-) strand; PAM type: NRG; PAM sequence: AGG
  source 1..20: mol_type = other DNA
aattatcaaatccattcttt

SEQ ID NO: 24486 - DNA, 20 bp, synthetic construct
  misc_feature 1..20: note = Description of Artificial Sequence: Synthetic oligonucleotide
  misc_feature 1..20: note = Target: SCN10A; (-) strand; PAM type: NRG; PAM sequence: TAG
  source 1..20: mol_type = other DNA
taattatcaaatccattctt

SEQ ID NO: 24487 - DNA, 20 bp, synthetic construct
  misc_feature 1..20: note = Description of Artificial Sequence: Synthetic oligonucleotide
  misc_feature 1..20: note = Target: SCN10A; (-) strand; PAM type: NRG; PAM sequence: CAG
  source 1..20: mol_type = other DNA
agttggatcctttccattcc

SEQ ID NO: 24488 - DNA, 20 bp, synthetic construct
  misc_feature 1..20: note = Description of Artificial Sequence: Synthetic oligonucleotide
  misc_feature 1..20: note = Target: SCN10A; (-) strand; PAM type: NRG; PAM sequence: TGG
  source 1..20: mol_type = other DNA
gccaaatcgtcttccaaagt

SEQ ID NO: 24489 - DNA, 20 bp, synthetic construct
  misc_feature 1..20: note = Description of Artificial Sequence: Synthetic oligonucleotide
  misc_feature 1..20: note = Target: SCN10A; (-) strand; PAM type: NRG; PAM sequence: AAG
  source 1..20: mol_type = other DNA
tattgccaaatcgtcttcca

SEQ ID NO: 24490 - DNA, 20 bp, synthetic construct
  misc_feature 1..20: note = Description of Artificial Sequence: Synthetic oligonucleotide
  misc_feature 1..20: note = Target: SCN10A; (-) strand; PAM type: NRG; PAM sequence: GAG
  source 1..20: mol_type = other DNA
gggtgtacattttaattttt

SEQ ID NO: 24491 - DNA, 20 bp, synthetic construct
  misc_feature 1..20: note = Description of Artificial Sequence: Synthetic oligonucleotide
  misc_feature 1..20: note = Target: SCN10A; (-) strand; PAM type: NRG; PAM sequence: GGG
  source 1..20: mol_type = other DNA
gtagaattgccaggtcaaag

SEQ ID NO: 24492 - DNA, 20 bp, synthetic construct
  misc_feature 1..20: note = Description of Artificial Sequence: Synthetic oligonucleotide
  misc_feature 1..20: note = Target: SCN10A; (-) strand; PAM type: NRG; PAM sequence: GGG
  source 1..20: mol_type = other DNA
agtagaattgccaggtcaaa

SEQ ID NO: 24493 - DNA, 20 bp, synthetic construct
  misc_feature 1..20: note = Description of Artificial Sequence: Synthetic oligonucleotide
  misc_feature 1..20: note = Target: SCN10A; (-) strand; PAM type: NRG; PAM sequence: AGG
  source 1..20: mol_type = other DNA
aagtagaattgccaggtcaa

SEQ ID NO: 24494 - DNA, 20 bp, synthetic construct
  misc_feature 1..20: note = Description of Artificial Sequence: Synthetic oligonucleotide
  misc_feature 1..20: note = Target: SCN10A; (-) strand; PAM type: NRG; PAM sequence: AAG
  source 1..20: mol_type = other DNA
gaagtagaattgccaggtca

SEQ ID NO: 24495 - DNA, 20 bp, synthetic construct
  misc_feature 1..20: note = Description of Artificial Sequence: Synthetic oligonucleotide
  misc_feature 1..20: note = Target: SCN10A; (-) strand; PAM type: NRG; PAM sequence: AGG
  source 1..20: mol_type = other DNA
tttctagaagtagaattgcc

SEQ ID NO: 24496 - DNA, 20 bp, synthetic construct
  misc_feature 1..20: note = Description of Artificial Sequence: Synthetic oligonucleotide
  misc_feature 1..20: note = Target: SCN10A; (-) strand; PAM type: NRG; PAM sequence: CAG
  source 1..20: mol_type = other DNA
atttctagaagtagaattgc

SEQ ID NO: 24497 - DNA, 20 bp, synthetic construct
  misc_feature 1..20: note = Description of Artificial Sequence: Synthetic oligonucleotide
  misc_feature 1..20: note = Target: SCN10A; (-) strand; PAM type: NRG; PAM sequence: TAG
  source 1..20: mol_type = other DNA
taaggatgaatttctagaag

SEQ ID NO: 24498 - DNA, 20 bp, synthetic construct
  misc_feature 1..20: note = Description of Artificial Sequence: Synthetic oligonucleotide
  misc_feature 1..20: note = Target: SCN10A; (-) strand; PAM type: NRG; PAM sequence: AAG
  source 1..20: mol_type = other DNA
aattaaggatgaatttctag

SEQ ID NO: 24499 - DNA, 20 bp, synthetic construct
  misc_feature 1..20: note = Description of Artificial Sequence: Synthetic oligonucleotide
  misc_feature 1..20: note = Target: SCN10A; (-) strand; PAM type: NRG; PAM sequence: TAG
  source 1..20: mol_type = other DNA
taaaattaaggatgaatttc

SEQ ID NO: 24500 - DNA, 20 bp, synthetic construct
  misc_feature 1..20: note = Description of Artificial Sequence: Synthetic oligonucleotide
  misc_feature 1..20: note = Target: SCN10A; (-) strand; PAM type: NRG; PAM sequence: AGG
  source 1..20: mol_type = other DNA
acataatatgagtaaaatta

SEQ ID NO: 24501 - DNA, 20 bp, synthetic construct
  misc_feature 1..20: note = Description of Artificial Sequence: Synthetic oligonucleotide
  misc_feature 1..20: note = Target: SCN10A; (-) strand; PAM type: NRG; PAM sequence: AAG
  source 1..20: mol_type = other DNA
cacataatatgagtaaaatt

SEQ ID NO: 24502 - DNA, 20 bp, synthetic construct
  misc_feature 1..20: note = Description of Artificial Sequence: Synthetic oligonucleotide
  misc_feature 1..20: note = Target: SCN10A; (-) strand; PAM type: NRG; PAM sequence: GAG
  source 1..20: mol_type = other DNA
tatctttgtacacataatat

SEQ ID NO: 24503 - DNA, 20 bp, synthetic construct
  misc_feature 1..20: note = Description of Artificial Sequence: Synthetic oligonucleotide
  misc_feature 1..20: note = Target: SCN10A; (-) strand; PAM type: NRG; PAM sequence: GAG
  source 1..20: mol_type = other DNA
ccacatattaattttttggt

SEQ ID NO: 24504 - DNA, 20 bp, synthetic construct
  misc_feature 1..20: note = Description of Artificial Sequence: Synthetic oligonucleotide
  misc_feature 1..20: note = Target: SCN10A; (-) strand; PAM type: NRG; PAM sequence: TGG
  source 1..20: mol_type = other DNA
gccaccacatattaattttt

SEQ ID NO: 24505 - DNA, 20 bp, synthetic construct
  misc_feature 1..20: note = Description of Artificial Sequence: Synthetic oligonucleotide
  misc_feature 1..20: note = Target: SCN10A; (-) strand; PAM type: NRG; PAM sequence: TAG
  source 1..20: mol_type = other DNA
tttaactattttcctattga

SEQ ID NO: 24506 - DNA, 20 bp, synthetic construct
  misc_feature 1..20: note = Description of Artificial Sequence: Synthetic oligonucleotide
  misc_feature 1..20: note = Target: SCN10A; (-) strand; PAM type: NRG; PAM sequence: AAG
  source 1..20: mol_type = other DNA
tcatttgcatggatgaagtg

SEQ ID NO: 24507 - DNA, 20 bp, synthetic construct
  misc_feature 1..20: note = Description of Artificial Sequence: Synthetic oligonucleotide
  misc_feature 1..20: note = Target: SCN10A; (-) strand; PAM type: NRG; PAM sequence: AAG
  source 1..20: mol_type = other DNA
agatttcatttgcatggatg

SEQ ID NO: 24508 - DNA, 20 bp, synthetic construct
  misc_feature 1..20: note = Description of Artificial Sequence: Synthetic oligonucleotide
  misc_feature 1..20: note = Target: SCN10A; (-) strand; PAM type: NRG; PAM sequence: TGG
  source 1..20: mol_type = other DNA
ctgaacagatttcatttgca

SEQ ID NO: 24509 - DNA, 20 bp, synthetic construct
  misc_feature 1..20: note = Description of Artificial Sequence: Synthetic oligonucleotide
  misc_feature 1..20: note = Target: SCN10A; (-) strand; PAM type: NRG; PAM sequence: CAG
  source 1..20: mol_type = other DNA
ttttatagaaattagctgaa

SEQ ID NO: 24510 - DNA, 20 bp, synthetic construct
  misc_feature 1..20: note = Description of Artificial Sequence: Synthetic oligonucleotide
  misc_feature 1..20: note = Target: SCN10A; (-) strand; PAM type: NRG; PAM sequence: TAG
  source 1..20: mol_type = other DNA
agcagctgttttatagaaat

SEQ ID NO: 24511 - DNA, 20 bp, synthetic construct
  misc_feature 1..20: note = Description of Artificial Sequence: Synthetic oligonucleotide
  misc_feature 1..20: note = Target: SCN10A; (-) strand; PAM type: NRG; PAM sequence: TAG
  source 1..20: mol_type = other DNA
tcccagcagcagctgtttta

SEQ ID NO: 24512 - DNA, 20 bp, synthetic construct
  misc_feature 1..20: note = Description of Artificial Sequence: Synthetic oligonucleotide
  misc_feature 1..20: note = Target: SCN10A; (-) strand; PAM type: NRG; PAM sequence: CAG
  source 1..20: mol_type = other DNA
ccccaaaaaaatcccagcag

SEQ ID NO: 24513 - DNA, 20 bp, synthetic construct
  misc_feature 1..20: note = Description of Artificial Sequence: Synthetic oligonucleotide
  misc_feature 1..20: note = Target: SCN10A; (-) strand; PAM type: NRG; PAM sequence: CAG
  source 1..20: mol_type = other DNA
catccccaaaaaaatcccag

SEQ ID NO: 24514 - DNA, 20 bp, synthetic construct
  misc_feature 1..20: note = Description of Artificial Sequence: Synthetic oligonucleotide
  misc_feature 1..20: note = Target: SCN10A; (-) strand; PAM type: NRG; PAM sequence: CAG
  source 1..20: mol_type = other DNA
tgacatccccaaaaaaatcc

SEQ ID NO: 24515 - DNA, 20 bp, synthetic construct
  misc_feature 1..20: note = Description of Artificial Sequence: Synthetic oligonucleotide
  misc_feature 1..20: note = Target: SCN10A; (-) strand; PAM type: NRG; PAM sequence: TAG
  source 1..20: mol_type = other DNA
aatgtcagtgctgcccaaat

SEQ ID NO: 24516 - DNA, 20 bp, synthetic construct
  misc_feature 1..20: note = Description of Artificial Sequence: Synthetic oligonucleotide
  misc_feature 1..20: note = Target: SCN10A; (-) strand; PAM type: NRG; PAM sequence: CAG
  source 1..20: mol_type = other DNA
attcataattgttagaatgt

SEQ ID NO: 24517 - DNA, 20 bp, synthetic construct
  misc_feature 1..20: note = Description of Artificial Sequence: Synthetic oligonucleotide
  misc_feature 1..20: note = Target: SCN10A; (-) strand; PAM type: NRG; PAM sequence: TAG
  source 1..20: mol_type = other DNA
attagaagattcataattgt

SEQ ID NO: 24518 - DNA, 20 bp, synthetic construct
  misc_feature 1..20: note = Description of Artificial Sequence: Synthetic oligonucleotide
  misc_feature 1..20: note = Target: SCN10A; (-) strand; PAM type: NRG; PAM sequence: AAG
  source 1..20: mol_type = other DNA
gtctcatgtgactggattag

SEQ ID NO: 24519 - DNA, 20 bp, synthetic construct
  misc_feature 1..20: note = Description of Artificial Sequence: Synthetic oligonucleotide
  misc_feature 1..20: note = Target: SCN10A; (-) strand; PAM type: NRG; PAM sequence: TAG
  source 1..20: mol_type = other DNA
gatgtctcatgtgactggat

SEQ ID NO: 24520 - DNA, 20 bp, synthetic construct
  misc_feature 1..20: note = Description of Artificial Sequence: Synthetic oligonucleotide
  misc_feature 1..20: note = Target: SCN10A; (-) strand; PAM type: NRG; PAM sequence: TGG
  source 1..20: mol_type = other DNA
taaaggatgtctcatgtgac

SEQ ID NO: 24521 - DNA, 20 bp, synthetic construct
  misc_feature 1..20: note = Description of Artificial Sequence: Synthetic oligonucleotide
  misc_feature 1..20: note = Target: SCN10A; (-) strand; PAM type: NRG; PAM sequence: AGG
  source 1..20: mol_type = other DNA
aaagtacctaaatgaattaa

SEQ ID NO: 24522 - DNA, 20 bp, synthetic construct
  misc_feature 1..20: note = Description of Artificial Sequence: Synthetic oligonucleotide
  misc_feature 1..20: note = Target: SCN10A; (-) strand; PAM type: NRG; PAM sequence: AAG
  source 1..20: mol_type = other DNA
taaagtacctaaatgaatta

SEQ ID NO: 24523 - DNA, 20 bp, synthetic construct
  misc_feature 1..20: note = Description of Artificial Sequence: Synthetic oligonucleotide
  misc_feature 1..20: note = Target: SCN10A; (-) strand; PAM type: NRG; PAM sequence: AAG
  source 1..20: mol_type = other DNA
cattattgagagaaatttta

SEQ ID NO: 24524 - DNA, 20 bp, synthetic construct
  misc_feature 1..20: note = Description of Artificial Sequence: Synthetic oligonucleotide
  misc_feature 1..20: note = Target: SCN10A; (-) strand; PAM type: NRG; PAM sequence: GAG
  source 1..20: mol_type = other DNA
aaataatacagcattattga

SEQ ID NO: 24525 - DNA, 20 bp, synthetic construct
  misc_feature 1..20: note = Description of Artificial Sequence: Synthetic oligonucleotide
  misc_feature 1..20: note = Target: SCN10A; (-) strand; PAM type: NRG; PAM sequence: GAG
  source 1..20: mol_type = other DNA
aaaaataatacagcattatt

SEQ ID NO: 24526 - DNA, 20 bp, synthetic construct
  misc_feature 1..20: note = Description of Artificial Sequence: Synthetic oligonucleotide
  misc_feature 1..20: note = Target: SCN10A; (-) strand; PAM type: NRG; PAM sequence: CAG
  source 1..20: mol_type = other DNA
ctttatactaaaaaataata

SEQ ID NO: 24527 - DNA, 20 bp, synthetic construct
  misc_feature 1..20: note = Description of Artificial Sequence: Synthetic oligonucleotide
  misc_feature 1..20: note = Target: SCN10A; (-) strand; PAM type: NRG; PAM sequence: AAG
  source 1..20: mol_type = other DNA
gctgttgtaaaaatatgcac

SEQ ID NO: 24528 - DNA, 20 bp, synthetic construct
  misc_feature 1..20: note = Description of Artificial Sequence: Synthetic oligonucleotide
  misc_feature 1..20: note = Target: SCN10A; (-) strand; PAM type: NRG; PAM sequence: TAG
  source 1..20: mol_type = other DNA
attacaaaatagaaaaacag

SEQ ID NO: 24529 - DNA, 20 bp, synthetic construct
  misc_feature 1..20: note = Description of Artificial Sequence: Synthetic oligonucleotide
  misc_feature 1..20: note = Target: SCN10A; (-) strand; PAM type: NRG; PAM sequence: CAG
  source 1..20: mol_type = other DNA
taaattacaaaatagaaaaa

SEQ ID NO: 24530 - DNA, 20 bp, synthetic construct
  misc_feature 1..20: note = Description of Artificial Sequence: Synthetic oligonucleotide
  misc_feature 1..20: note = Target: SCN10A; (-) strand; PAM type: NRG; PAM sequence: TAG
  source 1..20: mol_type = other DNA
aaaagcaataaattacaaaa

SEQ ID NO: 24531 - DNA, 20 bp, synthetic construct
  misc_feature 1..20: note = Description of Artificial Sequence: Synthetic oligonucleotide
  misc_feature 1..20: note = Target: SCN10A; (-) strand; PAM type: NRG; PAM sequence: AAG
  source 1..20: mol_type = other DNA
aagaagttaataattataaa

SEQ ID NO: 24532 - DNA, 20 bp, synthetic construct
  misc_feature 1..20: note = Description of Artificial Sequence: Synthetic oligonucleotide
  misc_feature 1..20: note = Target: SCN10A; (-) strand; PAM type: NRG; PAM sequence: AAG
  source 1..20: mol_type = other DNA
ggataacaaatgaaagaaag

SEQ ID NO: 24533 - DNA, 20 bp, synthetic construct
  misc_feature 1..20: note = Description of Artificial Sequence: Synthetic oligonucleotide
  misc_feature 1..20: note = Target: SCN10A; (-) strand; PAM type: NRG; PAM sequence: AAG
  source 1..20: mol_type = other DNA
aaaggataacaaatgaaaga

SEQ ID NO: 24534 - DNA, 20 bp, synthetic construct
  misc_feature 1..20: note = Description of Artificial Sequence: Synthetic oligonucleotide
  misc_feature 1..20: note = Target: SCN10A; (-) strand; PAM type: NRG; PAM sequence: AAG
  source 1..20: mol_type = other DNA
agaaaaaggataacaaatga

SEQ ID NO: 24535 - DNA, 20 bp, synthetic construct
  misc_feature 1..20: note = Description of Artificial Sequence: Synthetic oligonucleotide
  misc_feature 1..20: note = Target: SCN10A; (-) strand; PAM type: NRG; PAM sequence: AGG
  source 1..20: mol_type = other DNA
gacctaacaaaactagaaaa

SEQ ID NO: 24536 - DNA, 20 bp, synthetic construct
  misc_feature 1..20: note = Description of Artificial Sequence: Synthetic oligonucleotide
  misc_feature 1..20: note = Target: SCN10A; (-) strand; PAM type: NRG; PAM sequence: AAG
  source 1..20: mol_type = other DNA
agacctaacaaaactagaaa

SEQ ID NO: 24537 - DNA, 20 bp, synthetic construct
  misc_feature 1..20: note = Description of Artificial Sequence: Synthetic oligonucleotide
  misc_feature 1..20: note = Target: SCN10A; (-) strand; PAM type: NRG; PAM sequence: TAG
  source 1..20: mol_type = other DNA
atttaaagacctaacaaaac

SEQ ID NO: 24538 - DNA, 20 bp, synthetic construct
  misc_feature 1..20: note = Description of Artificial Sequence: Synthetic oligonucleotide
  misc_feature 1..20: note = Target: SCN10A; (-) strand; PAM type: NRG; PAM sequence: AAG
  source 1..20: mol_type = other DNA
agctgaaaagaaattattta

SEQ ID NO: 24539 - DNA, 20 bp, synthetic construct
  misc_feature 1..20: note = Description of Artificial Sequence: Synthetic oligonucleotide
  misc_feature 1..20: note = Target: SCN10A; (-) strand; PAM type: NRG; PAM sequence: AAG
  source 1..20: mol_type = other DNA
ttatatcagtaaaagctgaa

SEQ ID NO: 24540 - DNA, 20 bp, synthetic construct
  misc_feature 1..20: note = Description of Artificial Sequence: Synthetic oligonucleotide
  misc_feature 1..20: note = Target: SCN10A; (-) strand; PAM type: NRG; PAM sequence: AAG
  source 1..20: mol_type = other DNA
tagaatatttatatcagtaa

SEQ ID NO: 24541 - DNA, 20 bp, synthetic construct
  misc_feature 1..20: note = Description of Artificial Sequence: Synthetic oligonucleotide
  misc_feature 1..20: note = Target: SCN10A; (-) strand; PAM type: NRG; PAM sequence: CAG
  source 1..20: mol_type = other DNA
gaagcatagaatatttatat

SEQ ID NO: 24542 - DNA, 20 bp, synthetic construct
  misc_feature 1..20: note = Description of Artificial Sequence: Synthetic oligonucleotide
  misc_feature 1..20: note = Target: SCN10A; (-) strand; PAM type: NRG; PAM sequence: TAG
  source 1..20: mol_type = other DNA
taagtcacagcatggaagca

SEQ ID NO: 24543 - DNA, 20 bp, synthetic construct
  misc_feature 1..20: note = Description of Artificial Sequence: Synthetic oligonucleotide
  misc_feature 1..20: note = Target: SCN10A; (-) strand; PAM type: NRG; PAM sequence: AAG
  source 1..20: mol_type = other DNA
gggaataagtcacagcatgg

SEQ ID NO: 24544 - DNA, 20 bp, synthetic construct
  misc_feature 1..20: note = Description of Artificial Sequence: Synthetic oligonucleotide
  misc_feature 1..20: note = Target: SCN10A; (-) strand; PAM type: NRG; PAM sequence: TGG
  source 1..20: mol_type = other DNA
tcagggaataagtcacagca

SEQ ID NO: 24545 - DNA, 20 bp, synthetic construct
  misc_feature 1..20: note = Description of Artificial Sequence: Synthetic oligonucleotide
  misc_feature 1..20: note = Target: SCN10A; (-) strand; PAM type: NRG; PAM sequence: CAG
  source 1..20: mol_type = other DNA
catattcagggaataagtca

SEQ ID NO: 24546 - DNA, 20 bp, synthetic construct
  misc_feature 1..20: note = Description of Artificial Sequence: Synthetic oligonucleotide
  misc_feature 1..20: note = Target: SCN10A; (-) strand; PAM type: NRG; PAM sequence: AAG
  source 1..20: mol_type = other DNA
gacatacatattcagggaat

SEQ ID NO: 24547 - DNA, 20 bp, synthetic construct
  misc_feature 1..20: note = Description of Artificial Sequence: Synthetic oligonucleotide
  misc_feature 1..20: note = Target: SCN10A; (-) strand; PAM type: NRG; PAM sequence: GGG
  source 1..20: mol_type = other DNA
gttaaagacatacatattca

SEQ ID NO: 24548 - DNA, 20 bp, synthetic construct
  misc_feature 1..20: note = Description of Artificial Sequence: Synthetic oligonucleotide
  misc_feature 1..20: note = Target: SCN10A; (-) strand; PAM type: NRG; PAM sequence: AGG
  source 1..20: mol_type = other DNA
agttaaagacatacatattc

SEQ ID NO: 24549 - DNA, 20 bp, synthetic construct
  misc_feature 1..20: note = Description of Artificial Sequence: Synthetic oligonucleotide
  misc_feature 1..20: note = Target: SCN10A; (-) strand; PAM type: NRG; PAM sequence: CAG
  source 1..20: mol_type = other DNA
cagttaaagacatacatatt

SEQ ID NO: 24550 - DNA, 20 bp, synthetic construct
  misc_feature 1..20: note = Description of Artificial Sequence: Synthetic oligonucleotide
  misc_feature 1..20: note = Target: SCN10A; (-) strand; PAM type: NRG; PAM sequence: AAG
  source 1..20: mol_type = other DNA
gaacctagagagtgcagtta

SEQ ID NO: 24551 - DNA, 20 bp, synthetic construct
  misc_feature 1..20: note = Description of Artificial Sequence: Synthetic oligonucleotide
  misc_feature 1..20: note = Target: SCN10A; (-) strand; PAM type: NRG; PAM sequence: CAG
  source 1..20: mol_type = other DNA
taatcagaacctagagagtg

SEQ ID NO: 24552 - DNA, 20 bp, synthetic construct
  misc_feature 1..20: note = Description of Artificial Sequence: Synthetic oligonucleotide
  misc_feature 1..20: note = Target: SCN10A; (-) strand; PAM type: NRG; PAM sequence: GAG
  source 1..20: mol_type = other DNA
cagtttaatcagaacctaga

SEQ ID NO: 24553 - DNA, 20 bp, synthetic construct
  misc_feature 1..20: note = Description of Artificial Sequence: Synthetic oligonucleotide
  misc_feature 1..20: note = Target: SCN10A; (-) strand; PAM type: NRG; PAM sequence: GAG
  source 1..20: mol_type = other DNA
aacagtttaatcagaaccta

SEQ ID NO: 24554 - DNA, 20 bp, synthetic construct
  misc_feature 1..20: note = Description of Artificial Sequence: Synthetic oligonucleotide
  misc_feature 1..20: note = Target: SCN10A; (-) strand; PAM type: NRG; PAM sequence: TAG
  source 1..20: mol_type = other DNA
aaaacagtttaatcagaacc

SEQ ID NO: 24555 - DNA, 20 bp, synthetic construct
  misc_feature 1..20: note = Description of Artificial Sequence: Synthetic oligonucleotide
  misc_feature 1..20: note = Target: SCN10A; (-) strand; PAM type: NRG; PAM sequence: CAG
  source 1..20: mol_type = other DNA
aagataaaaaacagtttaat

SEQ ID NO: 24556 - DNA, 20 bp, synthetic construct
  misc_feature 1..20: note = Description of Artificial Sequence: Synthetic oligonucleotide
  misc_feature 1..20: note = Target: SCN10A; (-) strand; PAM type: NRG; PAM sequence: CAG
  source 1..20: mol_type = other DNA
agggaaggaaagataaaaaa

SEQ ID NO: 24557 - DNA, 20 bp, synthetic construct
  misc_feature 1..20: note = Description of Artificial Sequence: Synthetic oligonucleotide
  misc_feature 1..20: note = Target: SCN10A; (-) strand; PAM type: NRG; PAM sequence: AAG
  source 1..20: mol_type = other DNA
atataatttcgagggaagga

SEQ ID NO: 24558 - DNA, 20 bp, synthetic construct
  misc_feature 1..20: note = Description of Artificial Sequence: Synthetic oligonucleotide
  misc_feature 1..20: note = Target: SCN10A; (-) strand; PAM type: NRG; PAM sequence: AGG
  source 1..20: mol_type = other DNA
aattatataatttcgaggga

SEQ ID NO: 24559 - DNA, 20 bp, synthetic construct
  misc_feature 1..20: note = Description of Artificial Sequence: Synthetic oligonucleotide
  misc_feature 1..20: note = Target: SCN10A; (-) strand; PAM type: NRG; PAM sequence: AAG
  source 1..20: mol_type = other DNA
aaattatataatttcgaggg

SEQ ID NO: 24560 - DNA, 20 bp, synthetic construct
  misc_feature 1..20: note = Description of Artificial Sequence: Synthetic oligonucleotide
  misc_feature 1..20: note = Target: SCN10A; (-) strand; PAM type: NRG; PAM sequence: GGG
  source 1..20: mol_type = other DNA
ctaaaattatataatttcga

SEQ ID NO: 24561 - DNA, 20 bp, synthetic construct
  misc_feature 1..20: note = Description of Artificial Sequence: Synthetic oligonucleotide
  misc_feature 1..20: note = Target: SCN10A; (-) strand; PAM type: NRG; PAM sequence: AGG
  source 1..20: mol_type = other DNA
actaaaattatataatttcg

SEQ ID NO: 24562 - DNA, 20 bp, synthetic construct
  misc_feature 1..20: note = Description of Artificial Sequence: Synthetic oligonucleotide
  misc_feature 1..20: note = Target: SCN10A; (-) strand; PAM type: NRG; PAM sequence: GAG
  source 1..20: mol_type = other DNA
aactaaaattatataatttc

SEQ ID NO: 24563 - DNA, 20 bp, synthetic construct
  misc_feature 1..20: note = Description of Artificial Sequence: Synthetic oligonucleotide
  misc_feature 1..20: note = Target: SCN10A; (-) strand; PAM type: NRG; PAM sequence: AAG
  source 1..20: mol_type = other DNA
cttaaagaattcttggacaa

SEQ ID NO: 24564 - DNA, 20 bp, synthetic construct
  misc_feature 1..20: note = Description of Artificial Sequence: Synthetic oligonucleotide
  misc_feature 1..20: note = Target: SCN10A; (-) strand; PAM type: NRG; PAM sequence: TGG
  source 1..20: mol_type = other DNA
aatctctcttaaagaattct

SEQ ID NO: 24565 - DNA, 20 bp, synthetic construct
  misc_feature 1..20: note = Description of Artificial Sequence: Synthetic oligonucleotide
  misc_feature 1..20: note = Target: SCN10A; (-) strand; PAM type: NRG; PAM sequence: AAG
  source 1..20: mol_type = other DNA
atttttaaaaatctctctta

SEQ ID NO: 24566 - DNA, 20 bp, synthetic construct
  misc_feature 1..20: note = Description of Artificial Sequence: Synthetic oligonucleotide
  misc_feature 1..20: note = Target: SCN10A; (-) strand; PAM type: NRG; PAM sequence: AGG
  source 1..20: mol_type = other DNA
accaaatttaatgaaatgag

SEQ ID NO: 24567 - DNA, 20 bp, synthetic construct
  misc_feature 1..20: note = Description of Artificial Sequence: Synthetic oligonucleotide
  misc_feature 1..20: note = Target: SCN10A; (-) strand; PAM type: NRG; PAM sequence: GAG
  source 1..20: mol_type = other DNA
aaccaaatttaatgaaatga

SEQ ID NO: 24568 - DNA, 20 bp, synthetic construct
  misc_feature 1..20: note = Description of Artificial Sequence: Synthetic oligonucleotide
  misc_feature 1..20: note = Target: SCN10A; (-) strand; PAM type: NRG; PAM sequence: GAG
  source 1..20: mol_type = other DNA
ataaccaaatttaatgaaat

SEQ ID NO: 24569 - DNA, 20 bp, synthetic construct
  misc_feature 1..20: note = Description of Artificial Sequence: Synthetic oligonucleotide
  misc_feature 1..20: note = Target: SCN10A; (-) strand; PAM type: NRG; PAM sequence: GAG
  source 1..20: mol_type = other DNA
tctctgatcataatgaaata

SEQ ID NO: 24570 - DNA, 20 bp, synthetic construct
  misc_feature 1..20: note = Description of Artificial Sequence: Synthetic oligonucleotide
  misc_feature 1..20: note = Target: SCN10A; (-) strand; PAM type: NRG; PAM sequence: TAG
  source 1..20: mol_type = other DNA
attctctgatcataatgaaa

SEQ ID NO: 24571 - DNA, 20 bp, synthetic construct
  misc_feature 1..20: note = Description of Artificial Sequence: Synthetic oligonucleotide
  misc_feature 1..20: note = Target: SCN10A; (-) strand; PAM type: NRG; PAM sequence: TAG
  source 1..20: mol_type = other DNA
tccagaaagtggaaataata

SEQ ID NO: 24572 - DNA, 20 bp, synthetic construct
  misc_feature 1..20: note = Description of Artificial Sequence: Synthetic oligonucleotide
  misc_feature 1..20: note = Target: SCN10A; (-) strand; PAM type: NRG; PAM sequence: TGG
  source 1..20: mol_type = other DNA
cctcaataagctccagaaag

SEQ ID NO: 24573 - DNA, 20 bp, synthetic construct
  misc_feature 1..20: note = Description of Artificial Sequence: Synthetic oligonucleotide
  misc_feature 1..20: note = Target: SCN10A; (-) strand; PAM type: NRG; PAM sequence: AAG
  source 1..20: mol_type = other DNA
aaacctcaataagctccaga

SEQ ID NO: 24574 - DNA, 20 bp, synthetic construct
  misc_feature 1..20: note = Description of Artificial Sequence: Synthetic oligonucleotide
  misc_feature 1..20: note = Target: SCN10A; (-) strand; PAM type: NRG; PAM sequence: CAG
  source 1..20: mol_type = other DNA
acaaaaacctcaataagctc

SEQ ID NO: 24575 - DNA, 20 bp, synthetic construct
  misc_feature 1..20: note = Description of Artificial Sequence: Synthetic oligonucleotide
  misc_feature 1..20: note = Target: SCN10A; (-) strand; PAM type: NRG; PAM sequence: AAG
  source 1..20: mol_type = other DNA
gccatgacaaaaacctcaat

SEQ ID NO: 24576 - DNA, 20 bp, synthetic construct
  misc_feature 1..20: note = Description of Artificial Sequence: Synthetic oligonucleotide
  misc_feature 1..20: note = Target: SCN10A; (-) strand; PAM type: NRG; PAM sequence: AAG
  source 1..20: mol_type = other DNA
aacatatcaaaccaaatatt

SEQ ID NO: 24577 - DNA, 20 bp, synthetic construct
  misc_feature 1..20: note = Description of Artificial Sequence: Synthetic oligonucleotide
  misc_feature 1..20: note = Target: SCN10A; (-) strand; PAM type: NRG; PAM sequence: TAG
  source 1..20: mol_type = other DNA
caaactaccttccctaacaa

SEQ ID NO: 24578 - DNA, 20 bp, synthetic construct
  misc_feature 1..20: note = Description of Artificial Sequence: Synthetic oligonucleotide
  misc_feature 1..20: note = Target: SCN10A; (-) strand; PAM type: NRG; PAM sequence: TAG
  source 1..20: mol_type = other DNA
taatgtatctgattaatata

SEQ ID NO: 24579 - DNA, 20 bp, synthetic construct
  misc_feature 1..20: note = Description of Artificial Sequence: Synthetic oligonucleotide
  misc_feature 1..20: note = Target: SCN10A; (-) strand; PAM type: NRG; PAM sequence: TAG
  source 1..20: mol_type = other DNA
atgtaaaattatagatgacc

SEQ ID NO: 24580 - DNA, 20 bp, synthetic construct
  misc_feature 1..20: note = Description of Artificial Sequence: Synthetic oligonucleotide
  misc_feature 1..20: note = Target: SCN10A; (-) strand; PAM type: NRG; PAM sequence: TAG
  source 1..20: mol_type = other DNA
ttaaaaagtatgtaaaatta

SEQ ID NO: 24581 - DNA, 20 bp, synthetic construct
  misc_feature 1..20: note = Description of Artificial Sequence: Synthetic oligonucleotide
  misc_feature 1..20: note = Target: SCN10A; (-) strand; PAM type: NRG; PAM sequence: AAG
  source 1..20: mol_type = other DNA
aacagatcaaatgtattaaa

SEQ ID NO: 24582 - DNA, 20 bp, synthetic construct
  misc_feature 1..20: note = Description of Artificial Sequence: Synthetic oligonucleotide
  misc_feature 1..20: note = Target: SCN10A; (-) strand; PAM type: NRG; PAM sequence: CAG
  source 1..20: mol_type = other DNA
caattaattttagccaataa

SEQ ID NO: 24583 - DNA, 20 bp, synthetic construct
  misc_feature 1..20: note = Description of Artificial Sequence: Synthetic oligonucleotide
  misc_feature 1..20: note = Target: SCN10A; (-) strand; PAM type: NRG; PAM sequence: TAG
  source 1..20: mol_type = other DNA
tagaaattttcaattaattt

SEQ ID NO: 24584 - DNA, 20 bp, synthetic construct
  misc_feature 1..20: note = Description of Artificial Sequence: Synthetic oligonucleotide
  misc_feature 1..20: note = Target: SCN10A; (-) strand; PAM type: NRG; PAM sequence: TAG
  source 1..20: mol_type = other DNA
aaataaaaacattgtaggaa

SEQ ID NO: 24585 - DNA, 20 bp, synthetic construct
  misc_feature 1..20: note = Description of Artificial Sequence: Synthetic oligonucleotide
  misc_feature 1..20: note = Target: SCN10A; (-) strand; PAM type: NRG; PAM sequence: AGG
  source 1..20: mol_type = other DNA
aggataaataaaaacattgt

SEQ ID NO: 24586 - DNA, 20 bp, synthetic construct
  misc_feature 1..20: note = Description of Artificial Sequence: Synthetic oligonucleotide
  misc_feature 1..20: note = Target: SCN10A; (-) strand; PAM type: NRG; PAM sequence: TAG
  source 1..20: mol_type = other DNA
gaggataaataaaaacattg

SEQ ID NO: 24587 - DNA, 20 bp, synthetic construct
  misc_feature 1..20: note = Description of Artificial Sequence: Synthetic oligonucleotide
  misc_feature 1..20: note = Target: SCN10A; (-) strand; PAM type: NRG; PAM sequence: AGG
  source 1..20: mol_type = other DNA
tcagaaattattagagtagg

SEQ ID NO: 24588 - DNA, 20 bp, synthetic construct
  misc_feature 1..20: note = Description of Artificial Sequence: Synthetic oligonucleotide
  misc_feature 1..20: note = Target: SCN10A; (-) strand; PAM type: NRG; PAM sequence: GAG
  source 1..20: mol_type = other DNA
atcagaaattattagagtag

SEQ ID NO: 24589 - DNA, 20 bp, synthetic construct
  misc_feature 1..20: note = Description of Artificial Sequence: Synthetic oligonucleotide
  misc_feature 1..20: note = Target: SCN10A; (-) strand; PAM type: NRG; PAM sequence: AGG
  source 1..20: mol_type = other DNA
aaatcagaaattattagagt

SEQ ID NO: 24590 - DNA, 20 bp, synthetic construct
  misc_feature 1..20: note = Description of Artificial Sequence: Synthetic oligonucleotide
  misc_feature 1..20: note = Target: SCN10A; (-) strand; PAM type: NRG; PAM sequence: TAG
  source 1..20: mol_type = other DNA
taaatcagaaattattagag

SEQ ID NO: 24591 - DNA, 20 bp, synthetic construct
  misc_feature 1..20: note = Description of Artificial Sequence: Synthetic oligonucleotide
  misc_feature 1..20: note = Target: SCN10A; (-) strand; PAM type: NRG; PAM sequence: GAG
  source 1..20: mol_type = other DNA
ttataaatcagaaattatta

SEQ ID NO: 24592 - DNA, 20 bp, synthetic construct
  misc_feature 1..20: note = Description of Artificial Sequence: Synthetic oligonucleotide
  misc_feature 1..20: note = Target: SCN10A; (-) strand; PAM type: NRG; PAM sequence: TAG
  source 1..20: mol_type = other DNA
atttataaatcagaaattat

SEQ ID NO: 24593 - DNA, 20 bp, synthetic construct
  misc_feature 1..20: note = Description of Artificial Sequence: Synthetic oligonucleotide
  misc_feature 1..20: note = Target: SCN10A; (-) strand; PAM type: NRG; PAM sequence: CAG
  source 1..20: mol_type = other DNA
tggcaacaatatttataaat

SEQ ID NO: 24594 - DNA, 20 bp, synthetic construct
  misc_feature 1..20: note = Description of Artificial Sequence: Synthetic oligonucleotide
  misc_feature 1..20: note = Target: SCN10A; (-) strand; PAM type: NRG; PAM sequence: TGG
  source 1..20: mol_type = other DNA
tatctttgcaacaaataaga

SEQ ID NO: 24595 - DNA, 20 bp, synthetic construct
  misc_feature 1..20: note = Description of Artificial Sequence: Synthetic oligonucleotide
  misc_feature 1..20: note = Target: SCN10A; (-) strand; PAM type: NRG; PAM sequence: AAG
  source 1..20: mol_type = other DNA
tctatatctttgcaacaaat

SEQ ID NO: 24596 - DNA, 20 bp, synthetic construct
  misc_feature 1..20: note = Description of Artificial Sequence: Synthetic oligonucleotide
  misc_feature 1..20: note = Target: SCN10A; (-) strand; PAM type: NRG; PAM sequence: TAG
  source 1..20: mol_type = other DNA
catattaatattaaagacga

SEQ ID NO: 24597 - DNA, 20 bp, synthetic construct
  misc_feature 1..20: note = Description of Artificial Sequence: Synthetic oligonucleotide
  misc_feature 1..20: note = Target: SCN10A; (-) strand; PAM type: NRG; PAM sequence: AAG
  source 1..20: mol_type = other DNA
gcacagacatattaatatta

SEQ ID NO: 24598 - DNA, 20 bp, synthetic construct
  misc_feature 1..20: note = Description of Artificial Sequence: Synthetic oligonucleotide
  misc_feature 1..20: note = Target: SCN10A; (-) strand; PAM type: NRG; PAM sequence: CAG
  source 1..20: mol_type = other DNA
gaaataggacaaaaattgca

SEQ ID NO: 24599 - DNA, 20 bp, synthetic construct
  misc_feature 1..20: note = Description of Artificial Sequence: Synthetic oligonucleotide
  misc_feature 1..20: note = Target: SCN10A; (-) strand; PAM type: NRG; PAM sequence: AGG
  source 1..20: mol_type = other DNA
tcggtcaaaaagcatgaaat

SEQ ID NO: 24600 - DNA, 20 bp, synthetic construct
  misc_feature 1..20: note = Description of Artificial Sequence: Synthetic oligonucleotide
  misc_feature 1..20: note = Target: SCN10A; (-) strand; PAM type: NRG; PAM sequence: TAG
  source 1..20: mol_type = other DNA
ctcggtcaaaaagcatgaaa

SEQ ID NO: 24601 - DNA, 20 bp, synthetic construct
  misc_feature 1..20: note = Description of Artificial Sequence: Synthetic oligonucleotide
  misc_feature 1..20: note = Target: SCN10A; (-) strand; PAM type: NRG; PAM sequence: AAG
  source 1..20: mol_type = other DNA
aaagtggaatctcggtcaaa

SEQ ID NO: 24602 - DNA, 20 bp, synthetic construct
  misc_feature 1..20: note = Description of Artificial Sequence: Synthetic oligonucleotide
  misc_feature 1..20: note = Target: SCN10A; (-) strand; PAM type: NRG; PAM sequence: CGG
  source 1..20: mol_type = other DNA
tatcagagaaagtggaatct

SEQ ID NO: 24603 - DNA, 20 bp, synthetic construct
  misc_feature 1..20: note = Description of Artificial Sequence: Synthetic oligonucleotide
  misc_feature 1..20: note = Target: SCN10A; (-) strand; PAM type: NRG; PAM sequence: TGG
  source 1..20: mol_type = other DNA
gattttaatatcagagaaag

SEQ ID NO: 24604 - DNA, 20 bp, synthetic construct
  misc_feature 1..20: note = Description of Artificial Sequence: Synthetic oligonucleotide
  misc_feature 1..20: note = Target: SCN10A; (-) strand; PAM type: NRG; PAM sequence: AAG
  source 1..20: mol_type = other DNA
catgattttaatatcagaga

SEQ ID NO: 24605 - DNA, 20 bp, synthetic construct
  misc_feature 1..20: note = Description of Artificial Sequence: Synthetic oligonucleotide
  misc_feature 1..20: note = Target: SCN10A; (-) strand; PAM type: NRG; PAM sequence: GAG
  source 1..20: mol_type = other DNA
gatccatgattttaatatca

SEQ ID NO: 24606 - DNA, 20 bp, synthetic construct
  misc_feature 1..20: note = Description of Artificial Sequence: Synthetic oligonucleotide
  misc_feature 1..20: note = Target: SCN10A; (-) strand; PAM type: NRG; PAM sequence: CAG
  source 1..20: mol_type = other DNA
aggatccatgattttaatat

SEQ ID NO: 24607 - DNA, 20 bp, synthetic construct
  misc_feature 1..20: note = Description of Artificial Sequence: Synthetic oligonucleotide
  misc_feature 1..20: note = Target: SCN10A; (-) strand; PAM type: NRG; PAM sequence: AGG
  source 1..20: mol_type = other DNA
caaaggcaaacaaagaaagc

SEQ ID NO: 24608 - DNA, 20 bp, synthetic construct
  misc_feature 1..20: note = Description of Artificial Sequence: Synthetic oligonucleotide
  misc_feature 1..20: note = Target: SCN10A; (-) strand; PAM type: NRG; PAM sequence: CAG
  source 1..20: mol_type = other DNA
gcaaaggcaaacaaagaaag

SEQ ID NO: 24609 - DNA, 20 bp, synthetic construct
  misc_feature 1..20: note = Description of Artificial Sequence: Synthetic oligonucleotide
  misc_feature 1..20: note = Target: SCN10A; (-) strand; PAM type: NRG; PAM sequence: AAG
  source 1..20: mol_type = other DNA
taagcaaaggcaaacaaaga

SEQ ID NO: 24610 - DNA, 20 bp, synthetic construct
  misc_feature 1..20: note = Description of Artificial Sequence: Synthetic oligonucleotide
  misc_feature 1..20: note = Target: SCN10A; (-) strand; PAM type: NRG; PAM sequence: AAG
  source 1..20: mol_type = other DNA
gacataagcaaaggcaaaca

SEQ ID NO: 24611 - DNA, 20 bp, synthetic construct
  misc_feature 1..20: note = Description of Artificial Sequence: Synthetic oligonucleotide
  misc_feature 1..20: note = Target: SCN10A; (-) strand; PAM type: NRG; PAM sequence: AGG
  source 1..20: mol_type = other DNA
aattcaaaagacataagcaa

SEQ ID NO: 24612 - DNA, 20 bp, synthetic construct
  misc_feature 1..20: note = Description of Artificial Sequence: Synthetic oligonucleotide
  misc_feature 1..20: note = Target: SCN10A; (-) strand; PAM type: NRG; PAM sequence: AAG
  source 1..20: mol_type = other DNA
gaattcaaaagacataagca

SEQ ID NO: 24613 - DNA, 20 bp, synthetic construct
  misc_feature 1..20: note = Description of Artificial Sequence: Synthetic oligonucleotide
  misc_feature 1..20: note = Target: SCN10A; (-) strand; PAM type: NRG; PAM sequence: AAG
  source 1..20: mol_type = other DNA
ttatagaattcaaaagacat

SEQ ID NO: 24614 - DNA, 20 bp, synthetic construct
  misc_feature 1..20: note = Description of Artificial Sequence: Synthetic oligonucleotide
  misc_feature 1..20: note = Target: SCN10A; (-) strand; PAM type: NRG; PAM sequence: AAG
  source 1..20: mol_type = other DNA
gctaaaattatagaattcaa

SEQ ID NO: 24615 - DNA, 20 bp, synthetic construct
  misc_feature 1..20: note = Description of Artificial Sequence: Synthetic oligonucleotide
  misc_feature 1..20: note = Target: SCN10A; (-) strand; PAM type: NRG; PAM sequence: TAG
  source 1..20: mol_type = other DNA
atacagaaaggctaaaatta

SEQ ID NO: 24616 - DNA, 20 bp, synthetic construct
  misc_feature 1..20: note = Description of Artificial Sequence: Synthetic oligonucleotide
  misc_feature 1..20: note = Target: SCN10A; (-) strand; PAM type: NRG; PAM sequence: AGG
  source 1..20: mol_type = other DNA
ctcctcacggtgatacagaa

SEQ ID NO: 24617 - DNA, 20 bp, synthetic construct
  misc_feature 1..20: note = Description of Artificial Sequence: Synthetic oligonucleotide
  misc_feature 1..20: note = Target: SCN10A; (-) strand; PAM type: NRG; PAM sequence: AAG
  source 1..20: mol_type = other DNA
actcctcacggtgatacaga

SEQ ID NO: 24618 - DNA, 20 bp, synthetic construct
  misc_feature 1..20: note = Description of Artificial Sequence: Synthetic oligonucleotide
  misc_feature 1..20: note = Target: SCN10A; (-) strand; PAM type: NRG; PAM sequence: CAG
  source 1..20: mol_type = other DNA
aaatactcctcacggtgata

SEQ ID NO: 24619 - DNA, 20 bp, synthetic construct
  misc_feature 1..20: note = Description of Artificial Sequence: Synthetic oligonucleotide
  misc_feature 1..20: note = Target: SCN10A; (-) strand; PAM type: NRG; PAM sequence: CGG
  source 1..20: mol_type = other DNA
aataaaaaaaatactcctca

SEQ ID NO: 24620 - DNA, 20 bp, synthetic construct
  misc_feature 1..20: note = Description of Artificial Sequence: Synthetic oligonucleotide
  misc_feature 1..20: note = Target: SCN10A; (-) strand; PAM type: NRG; PAM sequence: AAG
  source 1..20: mol_type = other DNA
aaaatgcctattacattaca

SEQ ID NO: 24621 - DNA, 20 bp, synthetic construct
  misc_feature 1..20: note = Description of Artificial Sequence: Synthetic oligonucleotide
  misc_feature 1..20: note = Target: SCN10A; (-) strand; PAM type: NRG; PAM sequence: TGG
  source 1..20: mol_type = other DNA
gtcatgtcactaaatataaa

SEQ ID NO: 24622 - DNA, 20 bp, synthetic construct
  misc_feature 1..20: note = Description of Artificial Sequence: Synthetic oligonucleotide
  misc_feature 1..20: note = Target: SCN10A; (-) strand; PAM type: NRG; PAM sequence: AAG
  source 1..20: mol_type = other DNA
aatataaacaagctaagact

SEQ ID NO: 24623 - DNA, 20 bp, synthetic construct
  misc_feature 1..20: note = Description of Artificial Sequence: Synthetic oligonucleotide
  misc_feature 1..20: note = Target: SCN10A; (-) strand; PAM type: NRG; PAM sequence: AAG
  source 1..20: mol_type = other DNA
tgaaataatataaacaagct

SEQ ID NO: 24624 - DNA, 20 bp, synthetic construct
  misc_feature 1..20: note = Description of Artificial Sequence: Synthetic oligonucleotide
  misc_feature 1..20: note = Target: SCN10A; (-) strand; PAM type: NRG; PAM sequence: AAG
  source 1..20: mol_type = other DNA
tcatatgaaataatataaac

SEQ ID NO: 24625 - DNA, 20 bp, synthetic construct
  misc_feature 1..20: note = Description of Artificial Sequence: Synthetic oligonucleotide
  misc_feature 1..20: note = Target: SCN10A; (-) strand; PAM type: NRG; PAM sequence: CGG
  source 1..20: mol_type = other DNA
gaatgtattccaatatcaaa

SEQ ID NO: 24626 - DNA, 20 bp, synthetic construct
  misc_feature 1..20: note = Description of Artificial Sequence: Synthetic oligonucleotide
  misc_feature 1..20: note = Target: SCN10A; (-) strand; PAM type: NRG; PAM sequence: AAG
  source 1..20: mol_type = other DNA
taacatggtcacatttattt

SEQ ID NO: 24627 - DNA, 20 bp, synthetic construct
  misc_feature 1..20: note = Description of Artificial Sequence: Synthetic oligonucleotide
  misc_feature 1..20: note = Target: SCN10A; (-) strand; PAM type: NRG; PAM sequence: TGG
  source 1..20: mol_type = other DNA
cattaaaatgatgtataaca

SEQ ID NO: 24628 - DNA, 20 bp, synthetic construct
  misc_feature 1..20: note = Description of Artificial Sequence: Synthetic oligonucleotide
  misc_feature 1..20: note = Target: SCN10A; (-) strand; PAM type: NRG; PAM sequence: GAG
  source 1..20: mol_type = other DNA
tcattagcaaaaaaaaaagt

SEQ ID NO: 24629 - DNA, 20 bp, synthetic construct
  misc_feature 1..20: note = Description of Artificial Sequence: Synthetic oligonucleotide
  misc_feature 1..20: note = Target: SCN10A; (-) strand; PAM type: NRG; PAM sequence: AAG
  source 1..20: mol_type = other DNA
taagtcattagcaaaaaaaa

SEQ ID NO: 24630 - DNA, 20 bp, synthetic construct
  misc_feature 1..20: note = Description of Artificial Sequence: Synthetic oligonucleotide
  misc_feature 1..20: note = Target: SCN10A; (-) strand; PAM type: NRG; PAM sequence: TAG
  source 1..20: mol_type = other DNA
aacagcaagtaataagtcat

SEQ ID NO: 24631 - DNA, 20 bp, synthetic construct
  misc_feature 1..20: note = Description of Artificial Sequence: Synthetic oligonucleotide
  misc_feature 1..20: note = Target: SCN10A; (-) strand; PAM type: NRG; PAM sequence: AAG
  source 1..20: mol_type = other DNA
taaaataaacagcaagtaat

SEQ ID NO: 24632 - DNA, 20 bp, synthetic construct
  misc_feature 1..20: note = Description of Artificial Sequence: Synthetic oligonucleotide
  misc_feature 1..20: note = Target: SCN10A; (-) strand; PAM type: NRG; PAM sequence: AAG
  source 1..20: mol_type = other DNA
ataaatataaaataaacagc

SEQ ID NO: 24633 - DNA, 20 bp, synthetic construct
  misc_feature 1..20: note = Description of Artificial Sequence: Synthetic oligonucleotide
  misc_feature 1..20: note = Target: SCN10A; (-) strand; PAM type: NRG; PAM sequence: CAG
  source 1..20: mol_type = other DNA
taaaataaatataaaataaa

SEQ ID NO: 24634 - DNA, 20 bp, synthetic construct
  misc_feature 1..20: note = Description of Artificial Sequence: Synthetic oligonucleotide
  misc_feature 1..20: note = Target: SCN10A; (-) strand; PAM type: NRG; PAM sequence: TAG
  source 1..20: mol_type = other DNA
tttgtataacataatttcca

SEQ ID NO: 24635 - DNA, 20 bp, synthetic construct
  misc_feature 1..20: note = Description of Artificial Sequence: Synthetic oligonucleotide
  misc_feature 1..20: note = Target: SCN10A; (-) strand; PAM type: NRG; PAM sequence: AAG
  source 1..20: mol_type = other DNA
aacccattttgaactcaaat

SEQ ID NO: 24636 - DNA, 20 bp, synthetic construct
  misc_feature 1..20: note = Description of Artificial Sequence: Synthetic oligonucleotide
  misc_feature 1..20: note = Target: SCN10A; (-) strand; PAM type: NRG; PAM sequence: GAG
  source 1..20: mol_type = other DNA
ccaaatgcgttgttgatgtt

SEQ ID NO: 24637 - DNA, 20 bp, synthetic construct
  misc_feature 1..20: note = Description of Artificial Sequence: Synthetic oligonucleotide
  misc_feature 1..20: note = Target: SCN10A; (-) strand; PAM type: NRG; PAM sequence: GGG
  source 1..20: mol_type = other DNA
tacctttgttagcaatccct

SEQ ID NO: 24638 - DNA, 20 bp, synthetic construct
  misc_feature 1..20: note = Description of Artificial Sequence: Synthetic oligonucleotide
  misc_feature 1..20: note = Target: SCN10A; (-) strand; PAM type: NRG; PAM sequence: TGG
  source 1..20: mol_type = other DNA
gtacctttgttagcaatccc

SEQ ID NO: 24639 - DNA, 20 bp, synthetic construct
  misc_feature 1..20: note = Description of Artificial Sequence: Synthetic oligonucleotide
  misc_feature 1..20: note = Target: SCN10A; (-) strand; PAM type: NRG; PAM sequence: TAG
  source 1..20: mol_type = other DNA
ccactgcactgtacctttgt

SEQ ID NO: 24640 - DNA, 20 bp, synthetic construct
  misc_feature 1..20: note = Description of Artificial Sequence: Synthetic oligonucleotide
  misc_feature 1..20: note = Target: SCN10A; (-) strand; PAM type: NRG; PAM sequence: AGG
  source 1..20: mol_type = other DNA
cactactctcctcatcttca

SEQ ID NO: 24641 - DNA, 20 bp, synthetic construct
  misc_feature 1..20: note = Description of Artificial Sequence: Synthetic oligonucleotide
  misc_feature 1..20: note = Target: SCN10A; (-) strand; PAM type: NRG; PAM sequence: AAG
  source 1..20: mol_type = other DNA
ccactactctcctcatcttc

SEQ ID NO: 24642 - DNA, 20 bp, synthetic construct
  misc_feature 1..20: note = Description of Artificial Sequence: Synthetic oligonucleotide
  misc_feature 1..20: note = Target: SCN10A; (-) strand; PAM type: NRG; PAM sequence: CAG
  source 1..20: mol_type = other DNA
cattgtcaacttccaatggc

SEQ ID NO: 24643 - DNA, 20 bp, synthetic construct
  misc_feature 1..20: note = Description of Artificial Sequence: Synthetic oligonucleotide
  misc_feature 1..20: note = Target: SCN10A; (-) strand; PAM type: NRG; PAM sequence: TGG
  source 1..20: mol_type = other DNA
tggtcattgtcaacttccaa

SEQ ID NO: 24644 - DNA, 20 bp, synthetic construct
  misc_feature 1..20: note = Description of Artificial Sequence: Synthetic oligonucleotide
  misc_feature 1..20: note = Target: SCN10A; (-) strand; PAM type: NRG; PAM sequence: TGG
  source 1..20: mol_type = other DNA
cttcgatgattgctctcaat

SEQ ID NO: 24645 - DNA, 20 bp, synthetic construct
  misc_feature 1..20: note = Description of Artificial Sequence: Synthetic oligonucleotide
  misc_feature 1..20: note = Target: SCN10A; (-) strand; PAM type: NRG; PAM sequence: AGG
  source 1..20: mol_type = other DNA
gcttcttgtgcagttgtaag

SEQ ID NO: 24646 - DNA, 20 bp, synthetic construct
  misc_feature 1..20: note = Description of Artificial Sequence: Synthetic oligonucleotide
  misc_feature 1..20: note = Target: SCN10A; (-) strand; PAM type: NRG; PAM sequence: GAG
  source 1..20: mol_type = other DNA
agcttcttgtgcagttgtaa

SEQ ID NO: 24647 - DNA, 20 bp, synthetic construct
  misc_feature 1..20: note = Description of Artificial Sequence: Synthetic oligonucleotide
  misc_feature 1..20: note = Target: SCN10A; (-) strand; PAM type: NRG; PAM sequence: AAG
  source 1..20: mol_type = other DNA
tcagcttcttgtgcagttgt

SEQ ID NO: 24648 - DNA, 20 bp, synthetic construct
  misc_feature 1..20: note = Description of Artificial Sequence: Synthetic oligonucleotide
  misc_feature 1..20: note = Target: SCN10A; (-) strand; PAM type: NRG; PAM sequence: CAG
  source 1..20: mol_type = other DNA
ttcttcctcagcttcttgtg

SEQ ID NO: 24649 - DNA, 20 bp, synthetic construct
  misc_feature 1..20: note = Description of Artificial Sequence: Synthetic oligonucleotide
  misc_feature 1..20: note = Target: SCN10A; (-) strand; PAM type: NRG; PAM sequence: CAG
  source 1..20: mol_type = other DNA
gtcaacgatgagttcttcct

SEQ ID NO: 24650 - DNA, 20 bp, synthetic construct
  misc_feature 1..20: note = Description of Artificial Sequence: Synthetic oligonucleotide
  misc_feature 1..20: note = Target: SCN10A; (-) strand; PAM type: NRG; PAM sequence: GAG
  source 1..20: mol_type = other DNA
accgtagaatggtcaacgat

SEQ ID NO: 24651 - DNA, 20 bp, synthetic construct
  misc_feature 1..20: note = Description of Artificial Sequence: Synthetic oligonucleotide
  misc_feature 1..20: note = Target: SCN10A; (-) strand; PAM type: NRG; PAM sequence: TGG
  source 1..20: mol_type = other DNA
actgccgaatgaccgtagaa

SEQ ID NO: 24652 - DNA, 20 bp, synthetic construct
  misc_feature 1..20: note = Description of Artificial Sequence: Synthetic oligonucleotide
  misc_feature 1..20: note = Target: SCN10A; (-) strand; PAM type: NRG; PAM sequence: TAG
  source 1..20: mol_type = other DNA
cttcaactgccgaatgaccg

SEQ ID NO: 24653 - DNA, 20 bp, synthetic construct
  misc_feature 1..20: note = Description of Artificial Sequence: Synthetic oligonucleotide
  misc_feature 1..20: note = Target: SCN10A; (-) strand; PAM type: NRG; PAM sequence: GAG
  source 1..20: mol_type = other DNA
ttatgaggcacccatttatg

SEQ ID NO: 24654 - DNA, 20 bp, synthetic construct
  misc_feature 1..20: note = Description of Artificial Sequence: Synthetic oligonucleotide
  misc_feature 1..20: note = Target: SCN10A; (-) strand; PAM type: NRG; PAM sequence: TGG
  source 1..20: mol_type = other DNA
gcttatgaggcacccattta

SEQ ID NO: 24655 - DNA, 20 bp, synthetic construct
  misc_feature 1..20: note = Description of Artificial Sequence: Synthetic oligonucleotide
  misc_feature 1..20: note = Target: SCN10A; (-) strand; PAM type: NRG; PAM sequence: AGG
  source 1..20: mol_type = other DNA
acatttttccttagcttatg

SEQ ID NO: 24656 - DNA, 20 bp, synthetic construct
  misc_feature 1..20: note = Description of Artificial Sequence: Synthetic oligonucleotide
  misc_feature 1..20: note = Target: SCN10A; (-) strand; PAM type: NRG; PAM sequence: GAG
  source 1..20: mol_type = other DNA
aacatttttccttagcttat

SEQ ID NO: 24657 - DNA, 20 bp, synthetic construct
  misc_feature 1..20: note = Description of Artificial Sequence: Synthetic oligonucleotide
  misc_feature 1..20: note = Target: SCN10A; (-) strand; PAM type: NRG; PAM sequence: TAG
  source 1..20: mol_type = other DNA
attttttaaacatttttcct

SEQ ID NO: 24658 - DNA, 20 bp, synthetic construct
  misc_feature 1..20: note = Description of Artificial Sequence: Synthetic oligonucleotide
  misc_feature 1..20: note = Target: SCN10A; (-) strand; PAM type: NRG; PAM sequence: GAG
  source 1..20: mol_type = other DNA
atttttgttgcatagaataa

SEQ ID NO: 24659 - DNA, 20 bp, synthetic construct
  misc_feature 1..20: note = Description of Artificial Sequence: Synthetic oligonucleotide
  misc_feature 1..20: note = Target: SCN10A; (-) strand; PAM type: NRG; PAM sequence: AAG
  source 1..20: mol_type = other DNA
tcatttttgttgcatagaat

SEQ ID NO: 24660 - DNA, 20 bp, synthetic construct
  misc_feature 1..20: note = Description of Artificial Sequence: Synthetic oligonucleotide
  misc_feature 1..20: note = Target: SCN10A; (-) strand; PAM type: NRG; PAM sequence: TAG
  source 1..20: mol_type = other DNA
aatagttcatttttgttgca

SEQ ID NO: 24661 - DNA, 20 bp, synthetic construct
  misc_feature 1..20: note = Description of Artificial Sequence: Synthetic oligonucleotide
  misc_feature 1..20: note = Target: SCN10A; (-) strand; PAM type: NRG; PAM sequence: TAG
  source 1..20: mol_type = other DNA
atcacaatctgattaagaaa

SEQ ID NO: 24662 - DNA, 20 bp, synthetic construct
  misc_feature 1..20: note = Description of Artificial Sequence: Synthetic oligonucleotide
  misc_feature 1..20: note = Target: SCN10A; (-) strand; PAM type: NRG; PAM sequence: AAG
  source 1..20: mol_type = other DNA
tcgcacatcacaatctgatt

SEQ ID NO: 24663 - DNA, 20 bp, synthetic construct
  misc_feature 1..20: note = Description of Artificial Sequence: Synthetic oligonucleotide
  misc_feature 1..20: note = Target: SCN10A; (-) strand; PAM type: NRG; PAM sequence: AAG
  source 1..20: mol_type = other DNA
gctggtcattgccagttgtc

SEQ ID NO: 24664 - DNA, 20 bp, synthetic construct
  misc_feature 1..20: note = Description of Artificial Sequence: Synthetic oligonucleotide
  misc_feature 1..20: note = Target: SCN10A; (-) strand; PAM type: NRG; PAM sequence: CAG
  source 1..20: mol_type = other DNA
gccaccaagctggtcattgc

SEQ ID NO: 24665 - DNA, 20 bp, synthetic construct
  misc_feature 1..20: note = Description of Artificial Sequence: Synthetic oligonucleotide
  misc_feature 1..20: note = Target: SCN10A; (-) strand; PAM type: NRG; PAM sequence: TGG
  source 1..20: mol_type = other DNA
tctcagtccagccaccaagc

SEQ ID NO: 24666 - DNA, 20 bp, synthetic construct
  misc_feature 1..20: note = Description of Artificial Sequence: Synthetic oligonucleotide
  misc_feature 1..20: note = Target: SCN10A; (-) strand; PAM type: NRG; PAM sequence: AAG
  source 1..20: mol_type = other DNA
ttcttctcagtccagccacc

SEQ ID NO: 24667 - DNA, 20 bp, synthetic construct
  misc_feature 1..20: note = Description of Artificial Sequence: Synthetic oligonucleotide
  misc_feature 1..20: note = Target: SCN10A; (-) strand; PAM type: NRG; PAM sequence: CAG
  source 1..20: mol_type = other DNA
tttggagcttcttctcagtc

SEQ ID NO: 24668 - DNA, 20 bp, synthetic construct
  misc_feature 1..20: note = Description of Artificial Sequence: Synthetic oligonucleotide
  misc_feature 1..20: note = Target: SCN10A; (-) strand; PAM type: NRG; PAM sequence: CAG
  source 1..20: mol_type = other DNA
agtgctttggagcttcttct

SEQ ID NO: 24669 - DNA, 20 bp, synthetic construct
  misc_feature 1..20: note = Description of Artificial Sequence: Synthetic oligonucleotide
  misc_feature 1..20: note = Target: SCN10A; (-) strand; PAM type: NRG; PAM sequence: GAG
  source 1..20: mol_type = other DNA
gggttttgggaagtgctttg

SEQ ID NO: 24670 - DNA, 20 bp, synthetic construct
  misc_feature 1..20: note = Description of Artificial Sequence: Synthetic oligonucleotide
  misc_feature 1..20: note = Target: SCN10A; (-) strand; PAM type: NRG; PAM sequence: TGG
  source 1..20: mol_type = other DNA
ttgggttttgggaagtgctt

SEQ ID NO: 24671 - DNA, 20 bp, synthetic construct
  misc_feature 1..20: note = Description of Artificial Sequence: Synthetic oligonucleotide
  misc_feature 1..20: note = Target: SCN10A; (-) strand; PAM type: NRG; PAM sequence: AAG
  source 1..20: mol_type = other DNA
ggtgcaagttgggttttggg

SEQ ID NO: 24672 - DNA, 20 bp, synthetic construct
  misc_feature 1..20: note = Description of Artificial Sequence: Synthetic oligonucleotide
  misc_feature 1..20: note = Target: SCN10A; (-) strand; PAM type: NRG; PAM sequence: GGG
  source 1..20: mol_type = other DNA
tttggtgcaagttgggtttt

SEQ ID NO: 24673 - DNA, 20 bp, synthetic construct
  misc_feature 1..20: note = Description of Artificial Sequence: Synthetic oligonucleotide
  misc_feature 1..20: note = Target: SCN10A; (-) strand; PAM type: NRG; PAM sequence: TGG
  source 1..20: mol_type = other DNA
ttttggtgcaagttgggttt

SEQ ID NO: 24674 - DNA, 20 bp, synthetic construct
  misc_feature 1..20: note = Description of Artificial Sequence: Synthetic oligonucleotide
  misc_feature 1..20: note = Target: SCN10A; (-) strand; PAM type: NRG; PAM sequence: GGG
  source 1..20: mol_type = other DNA
gactttttttggtgcaagtt

SEQ ID NO: 24675 - DNA, 20 bp, synthetic construct
  misc_feature 1..20: note = Description of Artificial Sequence: Synthetic oligonucleotide
  misc_feature 1..20: note = Target: SCN10A; (-) strand; PAM type: NRG; PAM sequence: TGG
  source 1..20: mol_type = other DNA
cgactttttttggtgcaagt

SEQ ID NO: 24676 - DNA, 20 bp, synthetic construct
  misc_feature 1..20: note = Description of Artificial Sequence: Synthetic oligonucleotide
  misc_feature 1..20: note = Target: SCN10A; (-) strand; PAM type: NRG; PAM sequence: AAG
  source 1..20: mol_type = other DNA
accacgactttttttggtgc

SEQ ID NO: 24677 - DNA, 20 bp, synthetic construct
  misc_feature 1..20: note = Description of Artificial Sequence: Synthetic oligonucleotide
  misc_feature 1..20: note = Target: SCN10A; (-) strand; PAM type: NRG; PAM sequence: TGG
  source 1..20: mol_type = other DNA
gcagtgaccacgactttttt

SEQ ID NO: 24678 - DNA, 20 bp, synthetic construct
  misc_feature 1..20: note = Description of Artificial Sequence: Synthetic oligonucleotide
  misc_feature 1..20: note = Target: SCN10A; (-) strand; PAM type: NRG; PAM sequence: CAG
  source 1..20: mol_type = other DNA
accggcagcagaccaccaag

SEQ ID NO: 24679 - DNA, 20 bp, synthetic construct
  misc_feature 1..20: note = Description of Artificial Sequence: Synthetic oligonucleotide
  misc_feature 1..20: note = Target: SCN10A; (-) strand; PAM type: NRG; PAM sequence: AAG
  source 1..20: mol_type = other DNA
cagaccggcagcagaccacc

SEQ ID NO: 24680 - DNA, 20 bp, synthetic construct
  misc_feature 1..20: note = Description of Artificial Sequence: Synthetic oligonucleotide
  misc_feature 1..20: note = Target: SCN10A; (-) strand; PAM type: NRG; PAM sequence: CAG
  source 1..20: mol_type = other DNA
gtagtagatcagaccggcag

SEQ ID NO: 24681 - DNA, 20 bp, synthetic construct
  misc_feature 1..20: note = Description of Artificial Sequence: Synthetic oligonucleotide
  misc_feature 1..20: note = Target: SCN10A; (-) strand; PAM type: NRG; PAM sequence: CAG
  source 1..20: mol_type = other DNA
gctgtagtagatcagaccgg

SEQ ID NO: 24682 - DNA, 20 bp, synthetic construct
  misc_feature 1..20: note = Description of Artificial Sequence: Synthetic oligonucleotide
  misc_feature 1..20: note = Target: SCN10A; (-) strand; PAM type: NRG; PAM sequence: CGG
  source 1..20: mol_type = other DNA
aaagctgtagtagatcagac

SEQ ID NO: 24683 - DNA, 20 bp, synthetic construct
  misc_feature 1..20: note = Description of Artificial Sequence: Synthetic oligonucleotide
  misc_feature 1..20: note = Target: SCN10A; (-) strand; PAM type: NRG; PAM sequence: CAG
  source 1..20: mol_type = other DNA
ttcagaaagctgtagtagat

SEQ ID NO: 24684 - DNA, 20 bp, synthetic construct
  misc_feature 1..20: note = Description of Artificial Sequence: Synthetic oligonucleotide
  misc_feature 1..20: note = Target: SCN10A; (-) strand; PAM type: NRG; PAM sequence: TAG
  source 1..20: mol_type = other DNA
tgggattcagaaagctgtag

SEQ ID NO: 24685 - DNA, 20 bp, synthetic construct
  misc_feature 1..20: note = Description of Artificial Sequence: Synthetic oligonucleotide
  misc_feature 1..20: note = Target: SCN10A; (-) strand; PAM type: NRG; PAM sequence: TAG
  source 1..20: mol_type = other DNA
tgctgggattcagaaagctg

SEQ ID NO: 24686 - DNA, 20 bp, synthetic construct
  misc_feature 1..20: note = Description of Artificial Sequence: Synthetic oligonucleotide
  misc_feature 1..20: note = Target: SCN10A; (-) strand; PAM type: NRG; PAM sequence: AAG
  source 1..20: mol_type = other DNA
tggctttgctgggattcaga

SEQ ID NO: 24687 - DNA, 20 bp, synthetic construct
  misc_feature 1..20: note = Description of Artificial Sequence: Synthetic oligonucleotide
  misc_feature 1..20: note = Target: SCN10A; (-) strand; PAM type: NRG; PAM sequence: CAG
  source 1..20: mol_type = other DNA
gtaatggctttgctgggatt

SEQ ID NO: 24688 - DNA, 20 bp, synthetic construct
  misc_feature 1..20: note = Description of Artificial Sequence: Synthetic oligonucleotide
  misc_feature 1..20: note = Target: SCN10A; (-) strand; PAM type: NRG; PAM sequence: GGG
  source 1..20: mol_type = other DNA
tcagatgtaatggctttgct

SEQ ID NO: 24689 - DNA, 20 bp, synthetic construct
  misc_feature 1..20: note = Description of Artificial Sequence: Synthetic oligonucleotide
  misc_feature 1..20: note = Target: SCN10A; (-) strand; PAM type: NRG; PAM sequence: TGG
  source 1..20: mol_type = other DNA
ctcagatgtaatggctttgc

SEQ ID NO: 24690 - DNA, 20 bp, synthetic construct
  misc_feature 1..20: note = Description of Artificial Sequence: Synthetic oligonucleotide
  misc_feature 1..20: note = Target: SCN10A; (-) strand; PAM type: NRG; PAM sequence: TGG
  source 1..20: mol_type = other DNA
aacatatttctcagatgtaa

SEQ ID NO: 24691 - DNA, 20 bp, synthetic construct
  misc_feature 1..20: note = Description of Artificial Sequence: Synthetic oligonucleotide
  misc_feature 1..20: note = Target: SCN10A; (-) strand; PAM type: NRG; PAM sequence: CAG
  source 1..20: mol_type = other DNA
gatttgctgaacatatttct

SEQ ID NO: 24692 - DNA, 20 bp, synthetic construct
  misc_feature 1..20: note = Description of Artificial Sequence: Synthetic oligonucleotide
  misc_feature 1..20: note = Target: SCN10A; (-) strand; PAM type: NRG; PAM sequence: CAG
  source 1..20: mol_type = other DNA
aatgccagctgcaggccttg

SEQ ID NO: 24693 - DNA, 20 bp, synthetic construct
  misc_feature 1..20: note = Description of Artificial Sequence: Synthetic oligonucleotide
  misc_feature 1..20: note = Target: SCN10A; (-) strand; PAM type: NRG; PAM sequence: AGG
  source 1..20: mol_type = other DNA
tgttgaccaatgccagctgc

SEQ ID NO: 24694 - DNA, 20 bp, synthetic construct
  misc_feature 1..20: note = Description of Artificial Sequence: Synthetic oligonucleotide
  misc_feature 1..20: note = Target: SCN10A; (-) strand; PAM type: NRG; PAM sequence: CAG
  source 1..20: mol_type = other DNA
ctgttgaccaatgccagctg

SEQ ID NO: 24695 - DNA, 20 bp, synthetic construct
  misc_feature 1..20: note = Description of Artificial Sequence: Synthetic oligonucleotide
  misc_feature 1..20: note = Target: SCN10A; (-) strand; PAM type: NRG; PAM sequence: CAG
  source 1..20: mol_type = other DNA
ccctttctgttgaccaatgc

SEQ ID NO: 24696 - DNA, 20 bp, synthetic construct
  misc_feature 1..20: note = Description of Artificial Sequence: Synthetic oligonucleotide
  misc_feature 1..20: note = Target: SCN10A; (-) strand; PAM type: NRG; PAM sequence: GGG
  source 1..20: mol_type = other DNA
ggttgttgtggagaagaatt

SEQ ID NO: 24697 - DNA, 20 bp, synthetic construct
  misc_feature 1..20: note = Description of Artificial Sequence: Synthetic oligonucleotide
  misc_feature 1..20: note = Target: SCN10A; (-) strand; PAM type: NRG; PAM sequence: TGG
  source 1..20: mol_type = other DNA
cggttgttgtggagaagaat

SEQ ID NO: 24698 - DNA, 20 bp, synthetic construct
  misc_feature 1..20: note = Description of Artificial Sequence: Synthetic oligonucleotide
  misc_feature 1..20: note = Target: SCN10A; (-) strand; PAM type: NRG; PAM sequence: AAG
  source 1..20: mol_type = other DNA
tgcagtcggttgttgtggag

SEQ ID NO: 24699 - DNA, 20 bp, synthetic construct
  misc_feature 1..20: note = Description of Artificial Sequence: Synthetic oligonucleotide
  misc_feature 1..20: note = Target: SCN10A; (-) strand; PAM type: NRG; PAM sequence: GAG
  source 1..20: mol_type = other DNA
acatgcagtcggttgttgtg

SEQ ID NO: 24700 - DNA, 20 bp, synthetic construct
  misc_feature 1..20: note = Description of Artificial Sequence: Synthetic oligonucleotide
  misc_feature 1..20: note = Target: SCN10A; (-) strand; PAM type: NRG; PAM sequence: TGG
  source 1..20: mol_type = other DNA
tgacatgcagtcggttgttg

SEQ ID NO: 24701 - DNA, 20 bp, synthetic construct
  misc_feature 1..20: note = Description of Artificial Sequence: Synthetic oligonucleotide
  misc_feature 1..20: note = Target: SCN10A; (-) strand; PAM type: NRG; PAM sequence: CGG
  source 1..20: mol_type = other DNA
ttggttgtgtgacatgcagt

SEQ ID NO: 24702 - DNA, 20 bp, synthetic construct
  misc_feature 1..20: note = Description of Artificial Sequence: Synthetic oligonucleotide
  misc_feature 1..20: note = Target: SCN10A; (-) strand; PAM type: NRG; PAM sequence: CAG
  source 1..20: mol_type = other DNA
actgttggttgtgtgacatg

SEQ ID NO: 24703 - DNA, 20 bp, synthetic construct
  misc_feature 1..20: note = Description of Artificial Sequence: Synthetic oligonucleotide
  misc_feature 1..20: note = Target: SCN10A; (-) strand; PAM type: NRG; PAM sequence: TGG
  source 1..20: mol_type = other DNA
tcaacttttgaagtaactgt

SEQ ID NO: 24704 - DNA, 20 bp, synthetic construct
  misc_feature 1..20: note = Description of Artificial Sequence: Synthetic oligonucleotide
  misc_feature 1..20: note = Target: SCN10A; (-) strand; PAM type: NRG; PAM sequence: AAG
  source 1..20: mol_type = other DNA
cccaattcattcaacttttg

SEQ ID NO: 24705 - DNA, 20 bp, synthetic construct
  misc_feature 1..20: note = Description of Artificial Sequence: Synthetic oligonucleotide
  misc_feature 1..20: note = Target: SCN10A; (-) strand; PAM type: NRG; PAM sequence: TAG
  source 1..20: mol_type = other DNA
gtggatgaggcaaaacttca

SEQ ID NO: 24706 - DNA, 20 bp, synthetic construct
  misc_feature 1..20: note = Description of Artificial Sequence: Synthetic oligonucleotide
  misc_feature 1..20: note = Target: SCN10A; (-) strand; PAM type: NRG; PAM sequence: AGG
  source 1..20: mol_type = other DNA
tcaggtgaatatggtggatg

SEQ ID NO: 24707 - DNA, 20 bp, synthetic construct
  misc_feature 1..20: note = Description of Artificial Sequence: Synthetic oligonucleotide
  misc_feature 1..20: note = Target: SCN10A; (-) strand; PAM type: NRG; PAM sequence: GAG
  source 1..20: mol_type = other DNA
gtcaggtgaatatggtggat

SEQ ID NO: 24708 - DNA, 20 bp, synthetic construct
  misc_feature 1..20: note = Description of Artificial Sequence: Synthetic oligonucleotide
  misc_feature 1..20: note = Target: SCN10A; (-) strand; PAM type: NRG; PAM sequence: TGG
  source 1..20: mol_type = other DNA
gagaggtcaggtgaatatgg

SEQ ID NO: 24709 - DNA, 20 bp, synthetic construct
  misc_feature 1..20: note = Description of Artificial Sequence: Synthetic oligonucleotide
  misc_feature 1..20: note = Target: SCN10A; (-) strand; PAM type: NRG; PAM sequence: TGG
  source 1..20: mol_type = other DNA
ggtgagaggtcaggtgaata

SEQ ID NO: 24710 - DNA, 20 bp, synthetic construct
  misc_feature 1..20: note = Description of Artificial Sequence: Synthetic oligonucleotide
  misc_feature 1..20: note = Target: SCN10A; (-) strand; PAM type: NRG; PAM sequence: AGG
  source 1..20: mol_type = other DNA
tagttggttggtgagaggtc

SEQ ID NO: 24711 - DNA, 20 bp, synthetic construct
  misc_feature 1..20: note = Description of Artificial Sequence: Synthetic oligonucleotide
  misc_feature 1..20: note = Target: SCN10A; (-) strand; PAM type: NRG; PAM sequence: CAG
  source 1..20: mol_type = other DNA
gtagttggttggtgagaggt

SEQ ID NO: 24712 - DNA, 20 bp, synthetic construct
  misc_feature 1..20: note = Description of Artificial Sequence: Synthetic oligonucleotide
  misc_feature 1..20: note = Target: SCN10A; (-) strand; PAM type: NRG; PAM sequence: AGG
  source 1..20: mol_type = other DNA
agtggtagttggttggtgag

SEQ ID NO: 24713 - DNA, 20 bp, synthetic construct
  misc_feature 1..20: note = Description of Artificial Sequence: Synthetic oligonucleotide
  misc_feature 1..20: note = Target: SCN10A; (-) strand; PAM type: NRG; PAM sequence: GAG
  source 1..20: mol_type = other DNA
aagtggtagttggttggtga

SEQ ID NO: 24714 - DNA, 20 bp, synthetic construct
  misc_feature 1..20: note = Description of Artificial Sequence: Synthetic oligonucleotide
  misc_feature 1..20: note = Target: SCN10A; (-) strand; PAM type: NRG; PAM sequence: GAG
  source 1..20: mol_type = other DNA
agaagtggtagttggttggt

SEQ ID NO: 24715 - DNA, 20 bp, synthetic construct
  misc_feature 1..20: note = Description of Artificial Sequence: Synthetic oligonucleotide
  misc_feature 1..20: note = Target: SCN10A; (-) strand; PAM type: NRG; PAM sequence: TGG
  source 1..20: mol_type = other DNA
ttgaagaagtggtagttggt

SEQ ID NO: 24716 - DNA, 20 bp, synthetic construct
  misc_feature 1..20: note = Description of Artificial Sequence: Synthetic oligonucleotide
  misc_feature 1..20: note = Target: SCN10A; (-) strand; PAM type: NRG; PAM sequence: TGG
  source 1..20: mol_type = other DNA
atgcttgaagaagtggtagt

SEQ ID NO: 24717 - DNA, 20 bp, synthetic construct
  misc_feature 1..20: note = Description of Artificial Sequence: Synthetic oligonucleotide
  misc_feature 1..20: note = Target: SCN10A; (-) strand; PAM type: NRG; PAM sequence: TAG
  source 1..20: mol_type = other DNA
tcagatgcttgaagaagtgg

SEQ ID NO: 24718 - DNA, 20 bp, synthetic construct
  misc_feature 1..20: note = Description of Artificial Sequence: Synthetic oligonucleotide
  misc_feature 1..20: note = Target: SCN10A; (-) strand; PAM type: NRG; PAM sequence: TGG
  source 1..20: mol_type = other DNA
tgttcagatgcttgaagaag

SEQ ID NO: 24719 - DNA, 20 bp, synthetic construct
  misc_feature 1..20: note = Description of Artificial Sequence: Synthetic oligonucleotide
  misc_feature 1..20: note = Target: SCN10A; (-) strand; PAM type: NRG; PAM sequence: AAG
  source 1..20: mol_type = other DNA
agttgttcagatgcttgaag

SEQ ID NO: 24720 - DNA, 20 bp, synthetic construct
  misc_feature 1..20: note = Description of Artificial Sequence: Synthetic oligonucleotide
  misc_feature 1..20: note = Target: SCN10A; (-) strand; PAM type: NRG; PAM sequence: AAG
  source 1..20: mol_type = other DNA
aaaagttgttcagatgcttg

SEQ ID NO: 24721 - DNA, 20 bp, synthetic construct
  misc_feature 1..20: note = Description of Artificial Sequence: Synthetic oligonucleotide
  misc_feature 1..20: note = Target: SCN10A; (-) strand; PAM type: NRG; PAM sequence: CAG
  source 1..20: mol_type = other DNA
ttcacctgcaaaaagttgtt

SEQ ID NO: 24722 - DNA, 20 bp, synthetic construct
  misc_feature 1..20: note = Description of Artificial Sequence: Synthetic oligonucleotide
  misc_feature 1..20: note = Target: SCN10A; (-) strand; PAM type: NRG; PAM sequence: AAG
  source 1..20: mol_type = other DNA
ggaagtgtttcacctgcaaa

SEQ ID NO: 24723 - DNA, 20 bp, synthetic construct
  misc_feature 1..20: note = Description of Artificial Sequence: Synthetic oligonucleotide
  misc_feature 1..20: note = Target: SCN10A; (-) strand; PAM type: NRG; PAM sequence: AAG
  source 1..20: mol_type = other DNA
ctgcatcccgctggttatgg

SEQ ID NO: 24724 - DNA, 20 bp, synthetic construct
  misc_feature 1..20: note = Description of Artificial Sequence: Synthetic oligonucleotide
  misc_feature 1..20: note = Target: SCN10A; (-) strand; PAM type: NRG; PAM sequence: TGG
  source 1..20: mol_type = other DNA
tttctgcatcccgctggtta

SEQ ID NO: 24725 - DNA, 20 bp, synthetic construct
  misc_feature 1..20: note = Description of Artificial Sequence: Synthetic oligonucleotide
  misc_feature 1..20: note = Target: SCN10A; (-) strand; PAM type: NRG; PAM sequence: TGG
  source 1..20: mol_type = other DNA
aggcattttctgcatcccgc

SEQ ID NO: 24726 - DNA, 20 bp, synthetic construct
  misc_feature 1..20: note = Description of Artificial Sequence: Synthetic oligonucleotide
  misc_feature 1..20: note = Target: SCN10A; (-) strand; PAM type: NRG; PAM sequence: AGG
  source 1..20: mol_type = other DNA
ggattcaatgaactcttgga

SEQ ID NO: 24727 - DNA, 20 bp, synthetic construct
  misc_feature 1..20: note = Description of Artificial Sequence: Synthetic oligonucleotide
  misc_feature 1..20: note = Target: SCN10A; (-) strand; PAM type: NRG; PAM sequence: AAG
  source 1..20: mol_type = other DNA
gggattcaatgaactcttgg

SEQ ID NO: 24728 - DNA, 20 bp, synthetic construct
  misc_feature 1..20: note = Description of Artificial Sequence: Synthetic oligonucleotide
  misc_feature 1..20: note = Target: SCN10A; (-) strand; PAM type: NRG; PAM sequence: TGG
  source 1..20: mol_type = other DNA
tttgggattcaatgaactct

SEQ ID NO: 24729 - DNA, 20 bp, synthetic construct
  misc_feature 1..20: note = Description of Artificial Sequence: Synthetic oligonucleotide
  misc_feature 1..20: note = Target: SCN10A; (-) strand; PAM type: NRG; PAM sequence: GGG
  source 1..20: mol_type = other DNA
agcataaaaatccatgcttt

SEQ ID NO: 24730 - DNA, 20 bp, synthetic construct
  misc_feature 1..20: note = Description of Artificial Sequence: Synthetic oligonucleotide
  misc_feature 1..20: note = Target: SCN10A; (-) strand; PAM type: NRG; PAM sequence: TGG
  source 1..20: mol_type = other DNA
tagcataaaaatccatgctt

SEQ ID NO: 24731 - DNA, 20 bp, synthetic construct
  misc_feature 1..20: note = Description of Artificial Sequence: Synthetic oligonucleotide
  misc_feature 1..20: note = Target: SCN10A; (-) strand; PAM type: NRG; PAM sequence: TAG
  source 1..20: mol_type = other DNA
aatgagtttgtttattcctg

SEQ ID NO: 24732 - DNA, 20 bp, synthetic construct
  misc_feature 1..20: note = Description of Artificial Sequence: Synthetic oligonucleotide
  misc_feature 1..20: note = Target: SCN10A; (-) strand; PAM type: NRG; PAM sequence: GAG
  source 1..20: mol_type = other DNA
catttttgccaatgagaaat

SEQ ID NO: 24733 - DNA, 20 bp, synthetic construct
  misc_feature 1..20: note = Description of Artificial Sequence: Synthetic oligonucleotide
  misc_feature 1..20: note = Target: SCN10A; (-) strand; PAM type: NRG; PAM sequence: GAG
  source 1..20: mol_type = other DNA
atcaacacatttttgccaat

SEQ ID NO: 24734 - DNA, 20 bp, synthetic construct
  misc_feature 1..20: note = Description of Artificial Sequence: Synthetic oligonucleotide
  misc_feature 1..20: note = Target: SCN10A; (-) strand; PAM type: NRG; PAM sequence: AGG
  source 1..20: mol_type = other DNA
acatctttattaatcaaagt

SEQ ID NO: 24735 - DNA, 20 bp, synthetic construct
  misc_feature 1..20: note = Description of Artificial Sequence: Synthetic oligonucleotide
  misc_feature 1..20: note = Target: SCN10A; (-) strand; PAM type: NRG; PAM sequence: TAG
  source 1..20: mol_type = other DNA
cacatctttattaatcaaag

SEQ ID NO: 24736 - DNA, 20 bp, synthetic construct
  misc_feature 1..20: note = Description of Artificial Sequence: Synthetic oligonucleotide
  misc_feature 1..20: note = Target: SCN10A; (-) strand; PAM type: NRG; PAM sequence: AAG
  source 1..20: mol_type = other DNA
aaacacatctttattaatca

SEQ ID NO: 24737 - DNA, 20 bp, synthetic construct
  misc_feature 1..20: note = Description of Artificial Sequence: Synthetic oligonucleotide
  misc_feature 1..20: note = Target: SCN10A; (-) strand; PAM type: NRG; PAM sequence: AGG
  source 1..20: mol_type = other DNA
aatattaaatcattataact

SEQ ID NO: 24738 - DNA, 20 bp, synthetic construct
  misc_feature 1..20: note = Description of Artificial Sequence: Synthetic oligonucleotide
  misc_feature 1..20: note = Target: SCN10A; (-) strand; PAM type: NRG; PAM sequence: TAG
  source 1..20: mol_type = other DNA
aaatattaaatcattataac

SEQ ID NO: 24739 - DNA, 20 bp, synthetic construct
  misc_feature 1..20: note = Description of Artificial Sequence: Synthetic oligonucleotide
  misc_feature 1..20: note = Target: SCN10A; (-) strand; PAM type: NRG; PAM sequence: CAG
  source 1..20: mol_type = other DNA
tacaaaagtaattggggttt

SEQ ID NO: 24740 - DNA, 20 bp, synthetic construct
  misc_feature 1..20: note = Description of Artificial Sequence: Synthetic oligonucleotide
  misc_feature 1..20: note = Target: SCN10A; (-) strand; PAM type: NRG; PAM sequence: GGG
  source 1..20: mol_type = other DNA
aaaaggtacaaaagtaattg

SEQ ID NO: 24741 - DNA, 20 bp, synthetic construct
  misc_feature 1..20: note = Description of Artificial Sequence: Synthetic oligonucleotide
  misc_feature 1..20: note = Target: SCN10A; (-) strand; PAM type: NRG; PAM sequence: GGG
  source 1..20: mol_type = other DNA
gaaaaggtacaaaagtaatt

SEQ ID NO: 24742 - DNA, 20 bp, synthetic construct
  misc_feature 1..20: note = Description of Artificial Sequence: Synthetic oligonucleotide
  misc_feature 1..20: note = Target: SCN10A; (-) strand; PAM type: NRG; PAM sequence: TGG
  source 1..20: mol_type = other DNA
tgaaaaggtacaaaagtaat

SEQ ID NO: 24743 - DNA, 20 bp, synthetic construct
  misc_feature 1..20: note = Description of Artificial Sequence: Synthetic oligonucleotide
  misc_feature 1..20: note = Target: SCN10A; (-) strand; PAM type: NRG; PAM sequence: AAG
  source 1..20: mol_type = other DNA
caaataatgaaaaggtacaa

SEQ ID NO: 24744 - DNA, 20 bp, synthetic construct
  misc_feature 1..20: note = Description of Artificial Sequence: Synthetic oligonucleotide
  misc_feature 1..20: note = Target: SCN10A; (-) strand; PAM type: NRG; PAM sequence: AGG
  source 1..20: mol_type = other DNA
agagatgccaaataatgaaa

SEQ ID NO: 24745 - DNA, 20 bp, synthetic construct
  misc_feature 1..20: note = Description of Artificial Sequence: Synthetic oligonucleotide
  misc_feature 1..20: note = Target: SCN10A; (-) strand; PAM type: NRG; PAM sequence: AAG
  source 1..20: mol_type = other DNA
aagagatgccaaataatgaa

SEQ ID NO: 24746 - DNA, 20 bp, synthetic construct
  misc_feature 1..20: note = Description of Artificial Sequence: Synthetic oligonucleotide
  misc_feature 1..20: note = Target: SCN10A; (-) strand; PAM type: NRG; PAM sequence: GAG
  source 1..20: mol_type = other DNA
aaaaaataaaaagcaaataa

SEQ ID NO: 24747 - DNA, 20 bp, synthetic construct
  misc_feature 1..20: note = Description of Artificial Sequence: Synthetic oligonucleotide
  misc_feature 1..20: note = Target: SCN10A; (-) strand; PAM type: NRG; PAM sequence: AAG
  source 1..20: mol_type = other DNA
tcaaaaaataaaaagcaaat

SEQ ID NO: 24748 - DNA, 20 bp, synthetic construct
  misc_feature 1..20: note = Description of Artificial Sequence: Synthetic oligonucleotide
  misc_feature 1..20: note = Target: SCN10A; (-) strand; PAM type: NRG; PAM sequence: AAG
  source 1..20: mol_type = other DNA
attgtacatcaaaaaataaa

SEQ ID NO: 24749 - DNA, 20 bp, synthetic construct
  misc_feature 1..20: note = Description of Artificial Sequence: Synthetic oligonucleotide
  misc_feature 1..20: note = Target: SCN10A; (-) strand; PAM type: NRG; PAM sequence: AAG
  source 1..20: mol_type = other DNA
tgacaaactctaaatactgg

SEQ ID NO: 24750 - DNA, 20 bp, synthetic construct
  misc_feature 1..20: note = Description of Artificial Sequence: Synthetic oligonucleotide
  misc_feature 1..20: note = Target: SCN10A; (-) strand; PAM type: NRG; PAM sequence: TGG
  source 1..20: mol_type = other DNA
atatgacaaactctaaatac

SEQ ID NO: 24751 - DNA, 20 bp, synthetic construct
  misc_feature 1..20: note = Description of Artificial Sequence: Synthetic oligonucleotide
  misc_feature 1..20: note = Target: SCN10A; (-) strand; PAM type: NRG; PAM sequence: TAG
  source 1..20: mol_type = other DNA
ggataaagatacaaactctt

SEQ ID NO: 24752 - DNA, 20 bp, synthetic construct
  misc_feature 1..20: note = Description of Artificial Sequence: Synthetic oligonucleotide
  misc_feature 1..20: note = Target: SCN10A; (-) strand; PAM type: NRG; PAM sequence: AAG
  source 1..20: mol_type = other DNA
taaagacaaccactaggata

SEQ ID NO: 24753 - DNA, 20 bp, synthetic construct
  misc_feature 1..20: note = Description of Artificial Sequence: Synthetic oligonucleotide
  misc_feature 1..20: note = Target: SCN10A; (-) strand; PAM type: NRG; PAM sequence: AGG
  source 1..20: mol_type = other DNA
tacttataaagacaaccact

SEQ ID NO: 24754 - DNA, 20 bp, synthetic construct
  misc_feature 1..20: note = Description of Artificial Sequence: Synthetic oligonucleotide
  misc_feature 1..20: note = Target: SCN10A; (-) strand; PAM type: NRG; PAM sequence: TAG
  source 1..20: mol_type = other DNA
ttacttataaagacaaccac

SEQ ID NO: 24755 - DNA, 20 bp, synthetic construct
  misc_feature 1..20: note = Description of Artificial Sequence: Synthetic oligonucleotide
  misc_feature 1..20: note = Target: SCN10A; (-) strand; PAM type: NRG; PAM sequence: AAG
  source 1..20: mol_type = other DNA
ataataagtttttacttata

SEQ ID NO: 24756 - DNA, 20 bp, synthetic construct
  misc_feature 1..20: note = Description of Artificial Sequence: Synthetic oligonucleotide
  misc_feature 1..20: note = Target: SCN10A; (-) strand; PAM type: NRG; PAM sequence: AAG
  source 1..20: mol_type = other DNA
tataattataaatttataat

SEQ ID NO: 24757 - DNA, 20 bp, synthetic construct
  misc_feature 1..20: note = Description of Artificial Sequence: Synthetic oligonucleotide
  misc_feature 1..20: note = Target: SCN10A; (-) strand; PAM type: NRG; PAM sequence: CGG
  source 1..20: mol_type = other DNA
actaaggacaatgtattaca

SEQ ID NO: 24758 - DNA, 20 bp, synthetic construct
  misc_feature 1..20: note = Description of Artificial Sequence: Synthetic oligonucleotide
  misc_feature 1..20: note = Target: SCN10A; (-) strand; PAM type: NRG; PAM sequence: AGG
  source 1..20: mol_type = other DNA
attaaagaaatagtacacta

SEQ ID NO: 24759 - DNA, 20 bp, synthetic construct
  misc_feature 1..20: note = Description of Artificial Sequence: Synthetic oligonucleotide
  misc_feature 1..20: note = Target: SCN10A; (-) strand; PAM type: NRG; PAM sequence: AAG
  source 1..20: mol_type = other DNA
gattaaagaaatagtacact

SEQ ID NO: 24760 - DNA, 20 bp, synthetic construct
  misc_feature 1..20: note = Description of Artificial Sequence: Synthetic oligonucleotide
  misc_feature 1..20: note = Target: SCN10A; (-) strand; PAM type: NRG; PAM sequence: TAG
  source 1..20: mol_type = other DNA
agagattttgattaaagaaa

SEQ ID NO: 24761 - DNA, 20 bp, synthetic construct
  misc_feature 1..20: note = Description of Artificial Sequence: Synthetic oligonucleotide
  misc_feature 1..20: note = Target: SCN10A; (-) strand; PAM type: NRG; PAM sequence: AAG
  source 1..20: mol_type = other DNA
gaaatgagagattttgatta

SEQ ID NO: 24762 - DNA, 20 bp, synthetic construct
  misc_feature 1..20: note = Description of Artificial Sequence: Synthetic oligonucleotide
  misc_feature 1..20: note = Target: SCN10A; (-) strand; PAM type: NRG; PAM sequence: GAG
  source 1..20: mol_type = other DNA
gaatcaccaaatggaaatga

SEQ ID NO: 24763 - DNA, 20 bp, synthetic construct
  misc_feature 1..20: note = Description of Artificial Sequence: Synthetic oligonucleotide
  misc_feature 1..20: note = Target: SCN10A; (-) strand; PAM type: NRG; PAM sequence: GAG
  source 1..20: mol_type = other DNA
aggaatcaccaaatggaaat

SEQ ID NO: 24764 - DNA, 20 bp, synthetic construct
  misc_feature 1..20: note = Description of Artificial Sequence: Synthetic oligonucleotide
  misc_feature 1..20: note = Target: SCN10A; (-) strand; PAM type: NRG; PAM sequence: TGG
  source 1..20: mol_type = other DNA
agaggaaaggaatcaccaaa

SEQ ID NO: 24765 - DNA, 20 bp, synthetic construct
  misc_feature 1..20: note = Description of Artificial Sequence: Synthetic oligonucleotide
  misc_feature 1..20: note = Target: SCN10A; (-) strand; PAM type: NRG; PAM sequence: AGG
  source 1..20: mol_type = other DNA
atggataaaacagagaggaa

SEQ ID NO: 24766 - DNA, 20 bp, synthetic construct
  misc_feature 1..20: note = Description of Artificial Sequence: Synthetic oligonucleotide
  misc_feature 1..20: note = Target: SCN10A; (-) strand; PAM type: NRG; PAM sequence: AAG
  source 1..20: mol_type = other DNA
aatggataaaacagagagga

SEQ ID NO: 24767 - DNA, 20 bp, synthetic construct
  misc_feature 1..20: note = Description of Artificial Sequence: Synthetic oligonucleotide
  misc_feature 1..20: note = Target: SCN10A; (-) strand; PAM type: NRG; PAM sequence: AGG
  source 1..20: mol_type = other DNA
agataatggataaaacagag

SEQ ID NO: 24768 - DNA, 20 bp, synthetic construct
  misc_feature 1..20: note = Description of Artificial Sequence: Synthetic oligonucleotide
  misc_feature 1..20: note = Target: SCN10A; (-) strand; PAM type: NRG; PAM sequence: GAG
  source 1..20: mol_type = other DNA
cagataatggataaaacaga

SEQ ID NO: 24769 - DNA, 20 bp, synthetic construct
  misc_feature 1..20: note = Description of Artificial Sequence: Synthetic oligonucleotide
  misc_feature 1..20: note = Target: SCN10A; (-) strand; PAM type: NRG; PAM sequence: GAG
  source 1..20: mol_type = other DNA
gtcagataatggataaaaca

SEQ ID NO: 24770 - DNA, 20 bp, synthetic construct
  misc_feature 1..20: note = Description of Artificial Sequence: Synthetic oligonucleotide
  misc_feature 1..20: note = Target: SCN10A; (-) strand; PAM type: NRG; PAM sequence: CAG
  source 1..20: mol_type = other DNA
cagtcagataatggataaaa

SEQ ID NO: 24771 - DNA, 20 bp, synthetic construct
  misc_feature 1..20: note = Description of Artificial Sequence: Synthetic oligonucleotide
  misc_feature 1..20: note = Target: SCN10A; (-) strand; PAM type: NRG; PAM sequence: TGG
  source 1..20: mol_type = other DNA
tattaaatacagtcagataa

SEQ ID NO: 24772 - DNA, 20 bp, synthetic construct
  misc_feature 1..20: note = Description of Artificial Sequence: Synthetic oligonucleotide
  misc_feature 1..20: note = Target: SCN10A; (-) strand; PAM type: NRG; PAM sequence: CAG
  source 1..20: mol_type = other DNA
aagatattattaaatacagt

SEQ ID NO: 24773 - DNA, 20 bp, synthetic construct
  misc_feature 1..20: note = Description of Artificial Sequence: Synthetic oligonucleotide
  misc_feature 1..20: note = Target: SCN10A; (-) strand; PAM type: NRG; PAM sequence: CAG
  source 1..20: mol_type = other DNA
caaaaagatattattaaata

SEQ ID NO: 24774 - DNA, 20 bp, synthetic construct
  misc_feature 1..20: note = Description of Artificial Sequence: Synthetic oligonucleotide
  misc_feature 1..20: note = Target: SCN10A; (-) strand; PAM type: NRG; PAM sequence: AAG
  source 1..20: mol_type = other DNA
agtacaaaggtaagcacaaa

SEQ ID NO: 24775 - DNA, 20 bp, synthetic construct
  misc_feature 1..20: note = Description of Artificial Sequence: Synthetic oligonucleotide
  misc_feature 1..20: note = Target: SCN10A; (-) strand; PAM type: NRG; PAM sequence: AAG
  source 1..20: mol_type = other DNA
acacttgacagtacaaaggt

SEQ ID NO: 24776 - DNA, 20 bp, synthetic construct
  misc_feature 1..20: note = Description of Artificial Sequence: Synthetic oligonucleotide
  misc_feature 1..20: note = Target: SCN10A; (-) strand; PAM type: NRG; PAM sequence: AGG
  source 1..20: mol_type = other DNA
aattacacttgacagtacaa

SEQ ID NO: 24777 - DNA, 20 bp, synthetic construct
  misc_feature 1..20: note = Description of Artificial Sequence: Synthetic oligonucleotide
  misc_feature 1..20: note = Target: SCN10A; (-) strand; PAM type: NRG; PAM sequence: AAG
  source 1..20: mol_type = other DNA
taattacacttgacagtaca

SEQ ID NO: 24778 - DNA, 20 bp, synthetic construct
  misc_feature 1..20: note = Description of Artificial Sequence: Synthetic oligonucleotide
  misc_feature 1..20: note = Target: SCN10A; (-) strand; PAM type: NRG; PAM sequence: CAG
  source 1..20: mol_type = other DNA
gacaaaataattacacttga

SEQ ID NO: 24779 - DNA, 20 bp, synthetic construct
  misc_feature 1..20: note = Description of Artificial Sequence: Synthetic oligonucleotide
  misc_feature 1..20: note = Target: SCN10A; (-) strand; PAM type: NRG; PAM sequence: TGG
  source 1..20: mol_type = other DNA
aaagttgacaaataaagaaa

SEQ ID NO: 24780 - DNA, 20 bp, synthetic construct
  misc_feature 1..20: note = Description of Artificial Sequence: Synthetic oligonucleotide
  misc_feature 1..20: note = Target: SCN10A; (-) strand; PAM type: NRG; PAM sequence: AAG
  source 1..20: mol_type = other DNA
ttatttaaagttgacaaata

SEQ ID NO: 24781 - DNA, 20 bp, synthetic construct
  misc_feature 1..20: note = Description of Artificial Sequence: Synthetic oligonucleotide
  misc_feature 1..20: note = Target: SCN10A; (-) strand; PAM type: NRG; PAM sequence: AAG
  source 1..20: mol_type = other DNA
aagttaaagagtattattta

SEQ ID NO: 24782 - DNA, 20 bp, synthetic construct
  misc_feature 1..20: note = Description of Artificial Sequence: Synthetic oligonucleotide
  misc_feature 1..20: note = Target: SCN10A; (-) strand; PAM type: NRG; PAM sequence: GAG
  source 1..20: mol_type = other DNA
tataataacaagaagttaaa

SEQ ID NO: 24783 - DNA, 20 bp, synthetic construct
  misc_feature 1..20: note = Description of Artificial Sequence: Synthetic oligonucleotide
  misc_feature 1..20: note = Target: SCN10A; (-) strand; PAM type: NRG; PAM sequence: AAG
  source 1..20: mol_type = other DNA
tctataataacaagaagtta

SEQ ID NO: 24784 - DNA, 20 bp, synthetic construct
  misc_feature 1..20: note = Description of Artificial Sequence: Synthetic oligonucleotide
  misc_feature 1..20: note = Target: SCN10A; (-) strand; PAM type: NRG; PAM sequence: AAG
  source 1..20: mol_type = other DNA
gctgcttctataataacaag

SEQ ID NO: 24785 - DNA, 20 bp, synthetic construct
  misc_feature 1..20: note = Description of Artificial Sequence: Synthetic oligonucleotide
  misc_feature 1..20: note = Target: SCN10A; (-) strand; PAM type: NRG; PAM sequence: AAG
  source 1..20: mol_type = other DNA
actgctgcttctataataac

SEQ ID NO: 24786 - DNA, 20 bp, synthetic construct
  misc_feature 1..20: note = Description of Artificial Sequence: Synthetic oligonucleotide
  misc_feature 1..20: note = Target: SCN10A; (-) strand; PAM type: NRG; PAM sequence: GAG
  source 1..20: mol_type = other DNA
gaggaaagaacatgtgagca

SEQ ID NO: 24787 - DNA, 20 bp, synthetic construct
  misc_feature 1..20: note = Description of Artificial Sequence: Synthetic oligonucleotide
  misc_feature 1..20: note = Target: SCN10A; (-) strand; PAM type: NRG; PAM sequence: CAG
  source 1..20: mol_type = other DNA
aagaggaaagaacatgtgag

SEQ ID NO: 24788 - DNA, 20 bp, synthetic construct
  misc_feature 1..20: note = Description of Artificial Sequence: Synthetic oligonucleotide
  misc_feature 1..20: note = Target: SCN10A; (-) strand; PAM type: NRG; PAM sequence: GAG
  source 1..20: mol_type = other DNA
agaaagaggaaagaacatgt

SEQ ID NO: 24789 - DNA, 20 bp, synthetic construct
  misc_feature 1..20: note = Description of Artificial Sequence: Synthetic oligonucleotide
  misc_feature 1..20: note = Target: SCN10A; (-) strand; PAM type: NRG; PAM sequence: AAG
  source 1..20: mol_type = other DNA
aaatggaagcagaaagagga

SEQ ID NO: 24790 - DNA, 20 bp, synthetic construct
  misc_feature 1..20: note = Description of Artificial Sequence: Synthetic oligonucleotide
  misc_feature 1..20: note = Target: SCN10A; (-) strand; PAM type: NRG; PAM sequence: AGG
  source 1..20: mol_type = other DNA
caagaaatggaagcagaaag

SEQ ID NO: 24791 - DNA, 20 bp, synthetic construct
  misc_feature 1..20: note = Description of Artificial Sequence: Synthetic oligonucleotide
  misc_feature 1..20: note = Target: SCN10A; (-) strand; PAM type: NRG; PAM sequence: GAG
  source 1..20: mol_type = other DNA
gcaagaaatggaagcagaaa

SEQ ID NO: 24792 - DNA, 20 bp, synthetic construct
  misc_feature 1..20: note = Description of Artificial Sequence: Synthetic oligonucleotide
  misc_feature 1..20: note = Target: SCN10A; (-) strand; PAM type: NRG; PAM sequence: AAG
  source 1..20: mol_type = other DNA
tagcaagaaatggaagcaga

SEQ ID NO: 24793 - DNA, 20 bp, synthetic construct
  misc_feature 1..20: note = Description of Artificial Sequence: Synthetic oligonucleotide
  misc_feature 1..20: note = Target: SCN10A; (-) strand; PAM type: NRG; PAM sequence: CAG
  source 1..20: mol_type = other DNA
caaatagcaagaaatggaag

SEQ ID NO: 24794 - DNA, 20 bp, synthetic construct
  misc_feature 1..20: note = Description of Artificial Sequence: Synthetic oligonucleotide
  misc_feature 1..20: note = Target: SCN10A; (-) strand; PAM type: NRG; PAM sequence: AAG
  source 1..20: mol_type = other DNA
atacaaatagcaagaaatgg

SEQ ID NO: 24795 - DNA, 20 bp, synthetic construct
  misc_feature 1..20: note = Description of Artificial Sequence: Synthetic oligonucleotide
  misc_feature 1..20: note = Target: SCN10A; (-) strand; PAM type: NRG; PAM sequence: TGG
  source 1..20: mol_type = other DNA
atgatacaaatagcaagaaa

SEQ ID NO: 24796 - DNA, 20 bp, synthetic construct
  misc_feature 1..20: note = Description of Artificial Sequence: Synthetic oligonucleotide
  misc_feature 1..20: note = Target: SCN10A; (-) strand; PAM type: NRG; PAM sequence: AAG
  source 1..20: mol_type = other DNA
gttgacatgatacaaatagc

SEQ ID NO: 24797 - DNA, 20 bp, synthetic construct
  misc_feature 1..20: note = Description of Artificial Sequence: Synthetic oligonucleotide
  misc_feature 1..20: note = Target: SCN10A; (-) strand; PAM type: NRG; PAM sequence: TAG
  source 1..20: mol_type = other DNA
aagtgttgacatgatacaaa

SEQ ID NO: 24798 - DNA, 20 bp, synthetic construct
  misc_feature 1..20: note = Description of Artificial Sequence: Synthetic oligonucleotide
  misc_feature 1..20: note = Target: SCN10A; (-) strand; PAM type: NRG; PAM sequence: AAG
  source 1..20: mol_type = other DNA
acaagccccagaggccctgc

SEQ ID NO: 24799 - DNA, 20 bp, synthetic construct
  misc_feature 1..20: note = Description of Artificial Sequence: Synthetic oligonucleotide
  misc_feature 1..20: note = Target: SCN10A; (-) strand; PAM type: NRG; PAM sequence: AGG
  source 1..20: mol_type = other DNA
cgctgcccaacaagccccag

SEQ ID NO: 24800 - DNA, 20 bp, synthetic construct
  misc_feature 1..20: note = Description of Artificial Sequence: Synthetic oligonucleotide
  misc_feature 1..20: note = Target: SCN10A; (-) strand; PAM type: NRG; PAM sequence: GAG
  source 1..20: mol_type = other DNA
ccgctgcccaacaagcccca

SEQ ID NO: 24801 - DNA, 20 bp, synthetic construct
  misc_feature 1..20: note = Description of Artificial Sequence: Synthetic oligonucleotide
  misc_feature 1..20: note = Target: SCN10A; (-) strand; PAM type: NRG; PAM sequence: CAG
  source 1..20: mol_type = other DNA
ccccgctgcccaacaagccc

SEQ ID NO: 24802 - DNA, 20 bp, synthetic construct
  misc_feature 1..20: note = Description of Artificial Sequence: Synthetic oligonucleotide
  misc_feature 1..20: note = Target: SCN10A; (-) strand; PAM type: NRG; PAM sequence: AAG
  source 1..20: mol_type = other DNA
taccgcccccgctgcccaac

SEQ ID NO: 24803 - DNA, 20 bp, synthetic construct
  misc_feature 1..20: note = Description of Artificial Sequence: Synthetic oligonucleotide
  misc_feature 1..20: note = Target: SCN10A; (-) strand; PAM type: NRG; PAM sequence: AGG
  source 1..20: mol_type = other DNA
ggggataaaaatgagaataa

SEQ ID NO: 24804 - DNA, 20 bp, synthetic construct
  misc_feature 1..20: note = Description of Artificial Sequence: Synthetic oligonucleotide
  misc_feature 1..20: note = Target: SCN10A; (-) strand; PAM type: NRG; PAM sequence: AAG
  source 1..20: mol_type = other DNA
gggggataaaaatgagaata

SEQ ID NO: 24805 - DNA, 20 bp, synthetic construct
  misc_feature 1..20: note = Description of Artificial Sequence: Synthetic oligonucleotide
  misc_feature 1..20: note = Target: SCN10A; (-) strand; PAM type: NRG; PAM sequence: GAG
  source 1..20: mol_type = other DNA
ctccagagggggataaaaat

SEQ ID NO: 24806 - DNA, 20 bp, synthetic construct
  misc_feature 1..20: note = Description of Artificial Sequence: Synthetic oligonucleotide
  misc_feature 1..20: note = Target: SCN10A; (-) strand; PAM type: NRG; PAM sequence: GGG
  source 1..20: mol_type = other DNA
aaccacggtgcctccagagg

SEQ ID NO: 24807 - DNA, 20 bp, synthetic construct
  misc_feature 1..20: note = Description of Artificial Sequence: Synthetic oligonucleotide
  misc_feature 1..20: note = Target: SCN10A; (-) strand; PAM type: NRG; PAM sequence: GGG
  source 1..20: mol_type = other DNA
aaaccacggtgcctccagag

SEQ ID NO: 24808 - DNA, 20 bp, synthetic construct
  misc_feature 1..20: note = Description of Artificial Sequence: Synthetic oligonucleotide
  misc_feature 1..20: note = Target: SCN10A; (-) strand; PAM type: NRG; PAM sequence: GGG
  source 1..20: mol_type = other DNA
taaaccacggtgcctccaga

SEQ ID NO: 24809 - DNA, 20 bp, synthetic construct
  misc_feature 1..20: note = Description of Artificial Sequence: Synthetic oligonucleotide
  misc_feature 1..20: note = Target: SCN10A; (-) strand; PAM type: NRG; PAM sequence: AGG
  source 1..20: mol_type = other DNA
ttaaaccacggtgcctccag

SEQ ID NO: 24810 - DNA, 20 bp, synthetic construct
  misc_feature 1..20: note = Description of Artificial Sequence: Synthetic oligonucleotide
  misc_feature 1..20: note = Target: SCN10A; (-) strand; PAM type: NRG; PAM sequence: GAG
  source 1..20: mol_type = other DNA
gttaaaccacggtgcctcca

SEQ ID NO: 24811 - DNA, 20 bp, synthetic construct
  misc_feature 1..20: note = Description of Artificial Sequence: Synthetic oligonucleotide
  misc_feature 1..20: note = Target: SCN10A; (-) strand; PAM type: NRG; PAM sequence: CAG
  source 1..20: mol_type = other DNA
ttgttaaaccacggtgcctc

SEQ ID NO: 24812 - DNA, 20 bp, synthetic construct
  misc_feature 1..20: note = Description of Artificial Sequence: Synthetic oligonucleotide
  misc_feature 1..20: note = Target: SCN10A; (-) strand; PAM type: NRG; PAM sequence: CGG
  source 1..20: mol_type = other DNA
gatcagggtttgttaaacca

SEQ ID NO: 24813 - DNA, 20 bp, synthetic construct
  misc_feature 1..20: note = Description of Artificial Sequence: Synthetic oligonucleotide
  misc_feature 1..20: note = Target: SCN10A; (-) strand; PAM type: NRG; PAM sequence: GGG
  source 1..20: mol_type = other DNA
gtaaatcacttagcagatca

SEQ ID NO: 24814 - DNA, 20 bp, synthetic construct
  misc_feature 1..20: note = Description of Artificial Sequence: Synthetic oligonucleotide
  misc_feature 1..20: note = Target: SCN10A; (-) strand; PAM type: NRG; PAM sequence: AGG
  source 1..20: mol_type = other DNA
ggtaaatcacttagcagatc

SEQ ID NO: 24815 - DNA, 20 bp, synthetic construct
  misc_feature 1..20: note = Description of Artificial Sequence: Synthetic oligonucleotide
  misc_feature 1..20: note = Target: SCN10A; (-) strand; PAM type: NRG; PAM sequence: CAG
  source 1..20: mol_type = other DNA
tggtaaatcacttagcagat

SEQ ID NO: 24816 - DNA, 20 bp, synthetic construct
  misc_feature 1..20: note = Description of Artificial Sequence: Synthetic oligonucleotide
  misc_feature 1..20: note = Target: SCN10A; (-) strand; PAM type: NRG; PAM sequence: CAG
  source 1..20: mol_type = other DNA
agaagtggtaaatcacttag

SEQ ID NO: 24817 - DNA, 20 bp, synthetic construct
  misc_feature 1..20: note = Description of Artificial Sequence: Synthetic oligonucleotide
  misc_feature 1..20: note = Target: SCN10A; (-) strand; PAM type: NRG; PAM sequence: TAG
  source 1..20: mol_type = other DNA
tggagaagtggtaaatcact

SEQ ID NO: 24818 - DNA, 20 bp, synthetic construct
  misc_feature 1..20: note = Description of Artificial Sequence: Synthetic oligonucleotide
  misc_feature 1..20: note = Target: SCN10A; (-) strand; PAM type: NRG; PAM sequence: TGG
  source 1..20: mol_type = other DNA
accaaaagtgggtggagaag

SEQ ID NO: 24819 - DNA, 20 bp, synthetic construct
  misc_feature 1..20: note = Description of Artificial Sequence: Synthetic oligonucleotide
  misc_feature 1..20: note = Target: SCN10A; (-) strand; PAM type: NRG; PAM sequence: AAG
  source 1..20: mol_type = other DNA
aagaccaaaagtgggtggag

SEQ ID NO: 24820 - DNA, 20 bp, synthetic construct
  misc_feature 1..20: note = Description of Artificial Sequence: Synthetic oligonucleotide
  misc_feature 1..20: note = Target: SCN10A; (-) strand; PAM type: NRG; PAM sequence: GAG
  source 1..20: mol_type = other DNA
tggaagaccaaaagtgggtg

SEQ ID NO: 24821 - DNA, 20 bp, synthetic construct
  misc_feature 1..20: note = Description of Artificial Sequence: Synthetic oligonucleotide
  misc_feature 1..20: note = Target: SCN10A; (-) strand; PAM type: NRG; PAM sequence: TGG
  source 1..20: mol_type = other DNA
cttggaagaccaaaagtggg

SEQ ID NO: 24822 - DNA, 20 bp, synthetic construct
  misc_feature 1..20: note = Description of Artificial Sequence: Synthetic oligonucleotide
  misc_feature 1..20: note = Target: SCN10A; (-) strand; PAM type: NRG; PAM sequence: GGG
  source 1..20: mol_type = other DNA
acacttggaagaccaaaagt

SEQ ID NO: 24823 - DNA, 20 bp, synthetic construct
  misc_feature 1..20: note = Description of Artificial Sequence: Synthetic oligonucleotide
  misc_feature 1..20: note = Target: SCN10A; (-) strand; PAM type: NRG; PAM sequence: TGG
  source 1..20: mol_type = other DNA
aacacttggaagaccaaaag

SEQ ID NO: 24824 - DNA, 20 bp, synthetic construct
  misc_feature 1..20: note = Description of Artificial Sequence: Synthetic oligonucleotide
  misc_feature 1..20: note = Target: SCN10A; (-) strand; PAM type: NRG; PAM sequence: AAG
  source 1..20: mol_type = other DNA
caaaacacttggaagaccaa

SEQ ID NO: 24825 - DNA, 20 bp, synthetic construct
  misc_feature 1..20: note = Description of Artificial Sequence: Synthetic oligonucleotide
  misc_feature 1..20: note = Target: SCN10A; (-) strand; PAM type: NRG; PAM sequence: AAG
  source 1..20: mol_type = other DNA
aatgatgtcaaaacacttgg

SEQ ID NO: 24826 - DNA, 20 bp, synthetic construct
  misc_feature 1..20: note = Description of Artificial Sequence: Synthetic oligonucleotide
  misc_feature 1..20: note = Target: SCN10A; (-) strand; PAM type: NRG; PAM sequence: TGG
  source 1..20: mol_type = other DNA
acaaatgatgtcaaaacact

SEQ ID NO: 24827 - DNA, 20 bp, synthetic construct
  misc_feature 1..20: note = Description of Artificial Sequence: Synthetic oligonucleotide
  misc_feature 1..20: note = Target: SCN10A; (-) strand; PAM type: NRG; PAM sequence: AGG
  source 1..20: mol_type = other DNA
aaagagaatggaaaacacag

SEQ ID NO: 24828 - DNA, 20 bp, synthetic construct
  misc_feature 1..20: note = Description of Artificial Sequence: Synthetic oligonucleotide
  misc_feature 1..20: note = Target: SCN10A; (-) strand; PAM type: NRG; PAM sequence: GAG
  source 1..20: mol_type = other DNA
gaaagagaatggaaaacaca

SEQ ID NO: 24829 - DNA, 20 bp, synthetic construct
  misc_feature 1..20: note = Description of Artificial Sequence: Synthetic oligonucleotide
  misc_feature 1..20: note = Target: SCN10A; (-) strand; PAM type: NRG; PAM sequence: CAG
  source 1..20: mol_type = other DNA
gagaaagagaatggaaaaca

SEQ ID NO: 24830 - DNA, 20 bp, synthetic construct
  misc_feature 1..20: note = Description of Artificial Sequence: Synthetic oligonucleotide
  misc_feature 1..20: note = Target: SCN10A; (-) strand; PAM type: NRG; PAM sequence: TGG
  source 1..20: mol_type = other DNA
aagaacaaagagaaagagaa

SEQ ID NO: 24831 - DNA, 20 bp, synthetic construct
  misc_feature 1..20: note = Description of Artificial Sequence: Synthetic oligonucleotide
  misc_feature 1..20: note = Target: SCN10A; (-) strand; PAM type: NRG; PAM sequence: GAG
  source 1..20: mol_type = other DNA
tatacaagaacaaagagaaa

SEQ ID NO: 24832 - DNA, 20 bp, synthetic construct
  misc_feature 1..20: note = Description of Artificial Sequence: Synthetic oligonucleotide
  misc_feature 1..20: note = Target: SCN10A; (-) strand; PAM type: NRG; PAM sequence: AAG
  source 1..20: mol_type = other DNA
aatatacaagaacaaagaga

SEQ ID NO: 24833 - DNA, 20 bp, synthetic construct
  misc_feature 1..20: note = Description of Artificial Sequence: Synthetic oligonucleotide
  misc_feature 1..20: note = Target: SCN10A; (-) strand; PAM type: NRG; PAM sequence: GAG
  source 1..20: mol_type = other DNA
tataaatatacaagaacaaa

SEQ ID NO: 24834 - DNA, 20 bp, synthetic construct
  misc_feature 1..20: note = Description of Artificial Sequence: Synthetic oligonucleotide
  misc_feature 1..20: note = Target: SCN10A; (-) strand; PAM type: NRG; PAM sequence: AAG
  source 1..20: mol_type = other DNA
agtataaatatacaagaaca

SEQ ID NO: 24835 - DNA, 20 bp, synthetic construct
  misc_feature 1..20: note = Description of Artificial Sequence: Synthetic oligonucleotide
  misc_feature 1..20: note = Target: SCN10A; (-) strand; PAM type: NRG; PAM sequence: AAG
  source 1..20: mol_type = other DNA
aaagaacagtataaatatac

SEQ ID NO: 24836 - DNA, 20 bp, synthetic construct
  misc_feature 1..20: note = Description of Artificial Sequence: Synthetic oligonucleotide
  misc_feature 1..20: note = Target: SCN10A; (-) strand; PAM type: NRG; PAM sequence: CAG
  source 1..20: mol_type = other DNA
tgacagcacgggggaaagaa

SEQ ID NO: 24837 - DNA, 20 bp, synthetic construct
  misc_feature 1..20: note = Description of Artificial Sequence: Synthetic oligonucleotide
  misc_feature 1..20: note = Target: SCN10A; (-) strand; PAM type: NRG; PAM sequence: AAG
  source 1..20: mol_type = other DNA
tagaatgacagcacggggga

SEQ ID NO: 24838 - DNA, 20 bp, synthetic construct
  misc_feature 1..20: note = Description of Artificial Sequence: Synthetic oligonucleotide
  misc_feature 1..20: note = Target: SCN10A; (-) strand; PAM type: NRG; PAM sequence: GGG
  source 1..20: mol_type = other DNA
ccaatagaatgacagcacgg

SEQ ID NO: 24839 - DNA, 20 bp, synthetic construct
  misc_feature 1..20: note = Description of Artificial Sequence: Synthetic oligonucleotide
  misc_feature 1..20: note = Target: SCN10A; (-) strand; PAM type: NRG; PAM sequence: GGG
  source 1..20: mol_type = other DNA
gccaatagaatgacagcacg

SEQ ID NO: 24840 - DNA, 20 bp, synthetic construct
  misc_feature 1..20: note = Description of Artificial Sequence: Synthetic oligonucleotide
  misc_feature 1..20: note = Target: SCN10A; (-) strand; PAM type: NRG; PAM sequence: GGG
  source 1..20: mol_type = other DNA
tgccaatagaatgacagcac

SEQ ID NO: 24841 - DNA, 20 bp, synthetic construct
  misc_feature 1..20: note = Description of Artificial Sequence: Synthetic oligonucleotide
  misc_feature 1..20: note = Target: SCN10A; (-) strand; PAM type: NRG; PAM sequence: CGG
  source 1..20: mol_type = other DNA
atgccaatagaatgacagca

SEQ ID NO: 24842 - DNA, 20 bp, synthetic construct
  misc_feature 1..20: note = Description of Artificial Sequence: Synthetic oligonucleotide
  misc_feature 1..20: note = Target: SCN10A; (-) strand; PAM type: NRG; PAM sequence: CAG
  source 1..20: mol_type = other DNA
tcaaaatgccaatagaatga

SEQ ID NO: 24843 - DNA, 20 bp, synthetic construct
  misc_feature 1..20: note = Description of Artificial Sequence: Synthetic oligonucleotide
  misc_feature 1..20: note = Target: SCN10A; (-) strand; PAM type: NRG; PAM sequence: TAG
  source 1..20: mol_type = other DNA
ccaccctctcaaaatgccaa

SEQ ID NO: 24844 - DNA, 20 bp, synthetic construct
  misc_feature 1..20: note = Description of Artificial Sequence: Synthetic oligonucleotide
  misc_feature 1..20: note = Target: SCN10A; (-) strand; PAM type: NRG; PAM sequence: TAG
  source 1..20: mol_type = other DNA
ttgtggttaaatatggaaga

SEQ ID NO: 24845 - DNA, 20 bp, synthetic construct
  misc_feature 1..20: note = Description of Artificial Sequence: Synthetic oligonucleotide
  misc_feature 1..20: note = Target: SCN10A; (-) strand; PAM type: NRG; PAM sequence: AAG
  source 1..20: mol_type = other DNA
gagattgtggttaaatatgg

SEQ ID NO: 24846 - DNA, 20 bp, synthetic construct
  misc_feature 1..20: note = Description of Artificial Sequence: Synthetic oligonucleotide
  misc_feature 1..20: note = Target: SCN10A; (-) strand; PAM type: NRG; PAM sequence: TGG
  source 1..20: mol_type = other DNA
ttggagattgtggttaaata

SEQ ID NO: 24847 - DNA, 20 bp, synthetic construct
  misc_feature 1..20: note = Description of Artificial Sequence: Synthetic oligonucleotide
  misc_feature 1..20: note = Target: SCN10A; (-) strand; PAM type: NRG; PAM sequence: TGG
  source 1..20: mol_type = other DNA
tgggagttatttggagattg

SEQ ID NO: 24848 - DNA, 20 bp, synthetic construct
  misc_feature 1..20: note = Description of Artificial Sequence: Synthetic oligonucleotide
  misc_feature 1..20: note = Target: SCN10A; (-) strand; PAM type: NRG; PAM sequence: GAG
  source 1..20: mol_type = other DNA
agttatttgggagttatttg

SEQ ID NO: 24849 - DNA, 20 bp, synthetic construct
  misc_feature 1..20: note = Description of Artificial Sequence: Synthetic oligonucleotide
  misc_feature 1..20: note = Target: SCN10A; (-) strand; PAM type: NRG; PAM sequence: TGG
  source 1..20: mol_type = other DNA
tgagttatttgggagttatt

SEQ ID NO: 24850 - DNA, 20 bp, synthetic construct
  misc_feature 1..20: note = Description of Artificial Sequence: Synthetic oligonucleotide
  misc_feature 1..20: note = Target: SCN10A; (-) strand; PAM type: NRG; PAM sequence: GAG
  source 1..20: mol_type = other DNA
ttgcaaaatgagttatttgg

SEQ ID NO: 24851 - DNA, 20 bp, synthetic construct
  misc_feature 1..20: note = Description of Artificial Sequence: Synthetic oligonucleotide
  misc_feature 1..20: note = Target: SCN10A; (-) strand; PAM type: NRG; PAM sequence: GGG
  source 1..20: mol_type = other DNA
ttttgcaaaatgagttattt

SEQ ID NO: 24852 - DNA, 20 bp, synthetic construct
  misc_feature 1..20: note = Description of Artificial Sequence: Synthetic oligonucleotide
  misc_feature 1..20: note = Target: SCN10A; (-) strand; PAM type: NRG; PAM sequence: TGG
  source 1..20: mol_type = other DNA
tttttgcaaaatgagttatt

SEQ ID NO: 24853 - DNA, 20 bp, synthetic construct
  misc_feature 1..20: note = Description of Artificial Sequence: Synthetic oligonucleotide
  misc_feature 1..20: note = Target: SCN10A; (-) strand; PAM type: NRG; PAM sequence: GAG
  source 1..20: mol_type = other DNA
aaaacatttttttgcaaaat

SEQ ID NO: 24854 - DNA, 20 bp, synthetic construct
  misc_feature 1..20: note = Description of Artificial Sequence: Synthetic oligonucleotide
  misc_feature 1..20: note = Target: SCN10A; (-) strand; PAM type: NRG; PAM sequence: GAG
  source 1..20: mol_type = other DNA
aaatgtctatgcttcttttg

SEQ ID NO: 24855 - DNA, 20 bp, synthetic construct
  misc_feature 1..20: note = Description of Artificial Sequence: Synthetic oligonucleotide
  misc_feature 1..20: note = Target: SCN10A; (-) strand; PAM type: NRG; PAM sequence: TGG
  source 1..20: mol_type = other DNA
taaaatgtctatgcttcttt

SEQ ID NO: 24856 - DNA, 20 bp, synthetic construct
  misc_feature 1..20: note = Description of Artificial Sequence: Synthetic oligonucleotide
  misc_feature 1..20: note = Target: SCN10A; (-) strand; PAM type: NRG; PAM sequence: TAG
  source 1..20: mol_type = other DNA
ttaatattgttgagatcata

SEQ ID NO: 24857 - DNA, 20 bp, synthetic construct
  misc_feature 1..20: note = Description of Artificial Sequence: Synthetic oligonucleotide
  misc_feature 1..20: note = Target: SCN10A; (-) strand; PAM type: NRG; PAM sequence: GAG
  source 1..20: mol_type = other DNA
aaattatatttaatattgtt

SEQ ID NO: 24858 - DNA, 20 bp, synthetic construct
  misc_feature 1..20: note = Description of Artificial Sequence: Synthetic oligonucleotide
  misc_feature 1..20: note = Target: SCN10A; (-) strand; PAM type: NRG; PAM sequence: GAG
  source 1..20: mol_type = other DNA
cagaagatggttactaagta

SEQ ID NO: 24859 - DNA, 20 bp, synthetic construct
  misc_feature 1..20: note = Description of Artificial Sequence: Synthetic oligonucleotide
  misc_feature 1..20: note = Target: SCN10A; (-) strand; PAM type: NRG; PAM sequence: TAG
  source 1..20: mol_type = other DNA
atcagaagatggttactaag

SEQ ID NO: 24860 - DNA, 20 bp, synthetic construct
  misc_feature 1..20: note = Description of Artificial Sequence: Synthetic oligonucleotide
  misc_feature 1..20: note = Target: SCN10A; (-) strand; PAM type: NRG; PAM sequence: AAG
  source 1..20: mol_type = other DNA
taaatcagaagatggttact

SEQ ID NO: 24861 - DNA, 20 bp, synthetic construct
  misc_feature 1..20: note = Description of Artificial Sequence: Synthetic oligonucleotide
  misc_feature 1..20: note = Target: SCN10A; (-) strand; PAM type: NRG; PAM sequence: TGG
  source 1..20: mol_type = other DNA
tgaaaatataaatcagaaga

SEQ ID NO: 24862 - DNA, 20 bp, synthetic construct
  misc_feature 1..20: note = Description of Artificial Sequence: Synthetic oligonucleotide
  misc_feature 1..20: note = Target: SCN10A; (-) strand; PAM type: NRG; PAM sequence: AAG
  source 1..20: mol_type = other DNA
acactgaaaatataaatcag

SEQ ID NO: 24863 - DNA, 20 bp, synthetic construct
  misc_feature 1..20: note = Description of Artificial Sequence: Synthetic oligonucleotide
  misc_feature 1..20: note = Target: SCN10A; (-) strand; PAM type: NRG; PAM sequence: CAG
  source 1..20: mol_type = other DNA
agaacactgaaaatataaat

SEQ ID NO: 24864 - DNA, 20 bp, synthetic construct
  misc_feature 1..20: note = Description of Artificial Sequence: Synthetic oligonucleotide
  misc_feature 1..20: note = Target: SCN10A; (-) strand; PAM type: NRG; PAM sequence: CAG
  source 1..20: mol_type = other DNA
aatgaccattgcaaaaaatg

SEQ ID NO: 24865 - DNA, 20 bp, synthetic construct
  misc_feature 1..20: note = Description of Artificial Sequence: Synthetic oligonucleotide
  misc_feature 1..20: note = Target: SCN10A; (-) strand; PAM type: NRG; PAM sequence: AGG
  source 1..20: mol_type = other DNA
gtattttgttaaggcaacaa

SEQ ID NO: 24866 - DNA, 20 bp, synthetic construct
  misc_feature 1..20: note = Description of Artificial Sequence: Synthetic oligonucleotide
  misc_feature 1..20: note = Target: SCN10A; (-) strand; PAM type: NRG; PAM sequence: AAG
  source 1..20: mol_type = other DNA
ggtattttgttaaggcaaca

SEQ ID NO: 24867 - DNA, 20 bp, synthetic construct
  misc_feature 1..20: note = Description of Artificial Sequence: Synthetic oligonucleotide
  misc_feature 1..20: note = Target: SCN10A; (-) strand; PAM type: NRG; PAM sequence: AGG
  source 1..20: mol_type = other DNA
cagtctatggtattttgtta

SEQ ID NO: 24868 - DNA, 20 bp, synthetic construct
  misc_feature 1..20: note = Description of Artificial Sequence: Synthetic oligonucleotide
  misc_feature 1..20: note = Target: SCN10A; (-) strand; PAM type: NRG; PAM sequence: AAG
  source 1..20: mol_type = other DNA
ccagtctatggtattttgtt

SEQ ID NO: 24869 - DNA, 20 bp, synthetic construct
  misc_feature 1..20: note = Description of Artificial Sequence: Synthetic oligonucleotide
  misc_feature 1..20: note = Target: SCN10A; (-) strand; PAM type: NRG; PAM sequence: TGG
  source 1..20: mol_type = other DNA
tgcataagccacccagtcta

SEQ ID NO: 24870 - DNA, 20 bp, synthetic construct
  misc_feature 1..20: note = Description of Artificial Sequence: Synthetic oligonucleotide
  misc_feature 1..20: note = Target: SCN10A; (-) strand; PAM type: NRG; PAM sequence: CAG
  source 1..20: mol_type = other DNA
tttctgttgcataagccacc

SEQ ID NO: 24871 - DNA, 20 bp, synthetic construct
  misc_feature 1..20: note = Description of Artificial Sequence: Synthetic oligonucleotide
  misc_feature 1..20: note = Target: SCN10A; (-) strand; PAM type: NRG; PAM sequence: AAG
  source 1..20: mol_type = other DNA
aaaataaatttctgttgcat

SEQ ID NO: 24872 - DNA, 20 bp, synthetic construct
  misc_feature 1..20: note = Description of Artificial Sequence: Synthetic oligonucleotide
  misc_feature 1..20: note = Target: SCN10A; (-) strand; PAM type: NRG; PAM sequence: GAG
  source 1..20: mol_type = other DNA
gcttcaacctccagatttgt

SEQ ID NO: 24873 - DNA, 20 bp, synthetic construct
  misc_feature 1..20: note = Description of Artificial Sequence: Synthetic oligonucleotide
  misc_feature 1..20: note = Target: SCN10A; (-) strand; PAM type: NRG; PAM sequence: CAG
  source 1..20: mol_type = other DNA
caatctcaggcttcaacctc

SEQ ID NO: 24874 - DNA, 20 bp, synthetic construct
  misc_feature 1..20: note = Description of Artificial Sequence: Synthetic oligonucleotide
  misc_feature 1..20: note = Target: SCN10A; (-) strand; PAM type: NRG; PAM sequence: AGG
  source 1..20: mol_type = other DNA
tatgctgacatcccaatctc

SEQ ID NO: 24875 - DNA, 20 bp, synthetic construct
  misc_feature 1..20: note = Description of Artificial Sequence: Synthetic oligonucleotide
  misc_feature 1..20: note = Target: SCN10A; (-) strand; PAM type: NRG; PAM sequence: CAG
  source 1..20: mol_type = other DNA
ctatgctgacatcccaatct

SEQ ID NO: 24876 - DNA, 20 bp, synthetic construct
  misc_feature 1..20: note = Description of Artificial Sequence: Synthetic oligonucleotide
  misc_feature 1..20: note = Target: SCN10A; (-) strand; PAM type: NRG; PAM sequence: CAG
  source 1..20: mol_type = other DNA
gctagaaagagagtctttcc

SEQ ID NO: 24877 - DNA, 20 bp, synthetic construct
  misc_feature 1..20: note = Description of Artificial Sequence: Synthetic oligonucleotide
  misc_feature 1..20: note = Target: SCN10A; (-) strand; PAM type: NRG; PAM sequence: GAG
  source 1..20: mol_type = other DNA
acatctataagctagaaaga

SEQ ID NO: 24878 - DNA, 20 bp, synthetic construct
  misc_feature 1..20: note = Description of Artificial Sequence: Synthetic oligonucleotide
  misc_feature 1..20: note = Target: SCN10A; (-) strand; PAM type: NRG; PAM sequence: GAG
  source 1..20: mol_type = other DNA
agacatctataagctagaaa

SEQ ID NO: 24879 - DNA, 20 bp, synthetic construct
  misc_feature 1..20: note = Description of Artificial Sequence: Synthetic oligonucleotide
  misc_feature 1..20: note = Target: SCN10A; (-) strand; PAM type: NRG; PAM sequence: AAG
  source 1..20: mol_type = other DNA
gtagacatctataagctaga

SEQ ID NO: 24880 - DNA, 20 bp, synthetic construct
  misc_feature 1..20: note = Description of Artificial Sequence: Synthetic oligonucleotide
  misc_feature 1..20: note = Target: SCN10A; (-) strand; PAM type: NRG; PAM sequence: TAG
  source 1..20: mol_type = other DNA
caaggtagacatctataagc

SEQ ID NO: 24881 - DNA, 20 bp, synthetic construct
  misc_feature 1..20: note = Description of Artificial Sequence: Synthetic oligonucleotide
  misc_feature 1..20: note = Target: SCN10A; (-) strand; PAM type: NRG; PAM sequence: AAG
  source 1..20: mol_type = other DNA
aggacaaggtagacatctat

SEQ ID NO: 24882 - DNA, 20 bp, synthetic construct
  misc_feature 1..20: note = Description of Artificial Sequence: Synthetic oligonucleotide
  misc_feature 1..20: note = Target: SCN10A; (-) strand; PAM type: NRG; PAM sequence: TAG
  source 1..20: mol_type = other DNA
gtgagaacacaaggacaagg

SEQ ID NO: 24883 - DNA, 20 bp, synthetic construct
  misc_feature 1..20: note = Description of Artificial Sequence: Synthetic oligonucleotide
  misc_feature 1..20: note = Target: SCN10A; (-) strand; PAM type: NRG; PAM sequence: AGG
  source 1..20: mol_type = other DNA
tgtgtgagaacacaaggaca

SEQ ID NO: 24884 - DNA, 20 bp, synthetic construct
  misc_feature 1..20: note = Description of Artificial Sequence: Synthetic oligonucleotide
  misc_feature 1..20: note = Target: SCN10A; (-) strand; PAM type: NRG; PAM sequence: AAG
  source 1..20: mol_type = other DNA
ttgtgtgagaacacaaggac

SEQ ID NO: 24885 - DNA, 20 bp, synthetic construct
  misc_feature 1..20: note = Description of Artificial Sequence: Synthetic oligonucleotide
  misc_feature 1..20: note = Target: SCN10A; (-) strand; PAM type: NRG; PAM sequence: AGG
  source 1..20: mol_type = other DNA
cccctttgtgtgagaacaca

SEQ ID NO: 24886 - DNA, 20 bp, synthetic construct
  misc_feature 1..20: note = Description of Artificial Sequence: Synthetic oligonucleotide
  misc_feature 1..20: note = Target: SCN10A; (-) strand; PAM type: NRG; PAM sequence: AAG
  source 1..20: mol_type = other DNA
tcccctttgtgtgagaacac

SEQ ID NO: 24887 - DNA, 20 bp, synthetic construct
  misc_feature 1..20: note = Description of Artificial Sequence: Synthetic oligonucleotide
  misc_feature 1..20: note = Target: SCN10A; (-) strand; PAM type: NRG; PAM sequence: GAG
  source 1..20: mol_type = other DNA
cagctttctcccctttgtgt

SEQ ID NO: 24888 - DNA, 20 bp, synthetic construct
  misc_feature 1..20: note = Description of Artificial Sequence: Synthetic oligonucleotide
  misc_feature 1..20: note = Target: SCN10A; (-) strand; PAM type: NRG; PAM sequence: CAG
  source 1..20: mol_type = other DNA
gtccttataagagaaagaga

SEQ ID NO: 24889 - DNA, 20 bp, synthetic construct
  misc_feature 1..20: note = Description of Artificial Sequence: Synthetic oligonucleotide
  misc_feature 1..20: note = Target: SCN10A; (-) strand; PAM type: NRG; PAM sequence: GAG
  source 1..20: mol_type = other DNA
tggtgtccttataagagaaa

SEQ ID NO: 24890 - DNA, 20 bp, synthetic construct
  misc_feature 1..20: note = Description of Artificial Sequence: Synthetic oligonucleotide
  misc_feature 1..20: note = Target: SCN10A; (-) strand; PAM type: NRG; PAM sequence: AAG
  source 1..20: mol_type = other DNA
actggtgtccttataagaga

SEQ ID NO: 24891 - DNA, 20 bp, synthetic construct
  misc_feature 1..20: note = Description of Artificial Sequence: Synthetic oligonucleotide
  misc_feature 1..20: note = Target: SCN10A; (-) strand; PAM type: NRG; PAM sequence: GAG
  source 1..20: mol_type = other DNA
tagaactggtgtccttataa

SEQ ID NO: 24892 - DNA, 20 bp, synthetic construct
  misc_feature 1..20: note = Description of Artificial Sequence: Synthetic oligonucleotide
  misc_feature 1..20: note = Target: SCN10A; (-) strand; PAM type: NRG; PAM sequence: AAG
  source 1..20: mol_type = other DNA
ggtagaactggtgtccttat

SEQ ID NO: 24893 - DNA, 20 bp, synthetic construct
  misc_feature 1..20: note = Description of Artificial Sequence: Synthetic oligonucleotide
  misc_feature 1..20: note = Target: SCN10A; (-) strand; PAM type: NRG; PAM sequence: TGG
  source 1..20: mol_type = other DNA
gagcccttaagtggtagaac

SEQ ID NO: 24894 - DNA, 20 bp, synthetic construct
  misc_feature 1..20: note = Description of Artificial Sequence: Synthetic oligonucleotide
  misc_feature 1..20: note = Target: SCN10A; (-) strand; PAM type: NRG; PAM sequence: TAG
  source 1..20: mol_type = other DNA
agagtagagcccttaagtgg

SEQ ID NO: 24895 - DNA, 20 bp, synthetic construct
  misc_feature 1..20: note = Description of Artificial Sequence: Synthetic oligonucleotide
  misc_feature 1..20: note = Target: SCN10A; (-) strand; PAM type: NRG; PAM sequence: TGG
  source 1..20: mol_type = other DNA
acaagagtagagcccttaag

SEQ ID NO: 24896 - DNA, 20 bp, synthetic construct
  misc_feature 1..20: note = Description of Artificial Sequence: Synthetic oligonucleotide
  misc_feature 1..20: note = Target: SCN10A; (-) strand; PAM type: NRG; PAM sequence: AAG
  source 1..20: mol_type = other DNA
gtcacaagagtagagccctt

SEQ ID NO: 24897 - DNA, 20 bp, synthetic construct
  misc_feature 1..20: note = Description of Artificial Sequence: Synthetic oligonucleotide
  misc_feature 1..20: note = Target: SCN10A; (-) strand; PAM type: NRG; PAM sequence: GAG
  source 1..20: mol_type = other DNA
taaatgaagtcacaagagta

SEQ ID NO: 24898 - DNA, 20 bp, synthetic construct
  misc_feature 1..20: note = Description of Artificial Sequence: Synthetic oligonucleotide
  misc_feature 1..20: note = Target: SCN10A; (-) strand; PAM type: NRG; PAM sequence: TAG
  source 1..20: mol_type = other DNA
gttaaatgaagtcacaagag

SEQ ID NO: 24899 - DNA, 20 bp, synthetic construct
  misc_feature 1..20: note = Description of Artificial Sequence: Synthetic oligonucleotide
  misc_feature 1..20: note = Target: SCN10A; (-) strand; PAM type: NRG; PAM sequence: GAG
  source 1..20: mol_type = other DNA
tgggttaaatgaagtcacaa

SEQ ID NO: 24900 - DNA, 20 bp, synthetic construct
  misc_feature 1..20: note = Description of Artificial Sequence: Synthetic oligonucleotide
  misc_feature 1..20: note = Target: SCN10A; (-) strand; PAM type: NRG; PAM sequence: AAG
  source 1..20: mol_type = other DNA
attgggttaaatgaagtcac

SEQ ID NO: 24901 - DNA, 20 bp, synthetic construct
  misc_feature 1..20: note = Description of Artificial Sequence: Synthetic oligonucleotide
  misc_feature 1..20: note = Target: SCN10A; (-) strand; PAM type: NRG; PAM sequence: AAG
  source 1..20: mol_type = other DNA
ggaggtgattgggttaaatg

SEQ ID NO: 24902 - DNA, 20 bp, synthetic construct
  misc_feature 1..20: note = Description of Artificial Sequence: Synthetic oligonucleotide
  misc_feature 1..20: note = Target: SCN10A; (-) strand; PAM type: NRG; PAM sequence: GGG
  source 1..20: mol_type = other DNA
gggcctctaaggaggtgatt

SEQ ID NO: 24903 - DNA, 20 bp, synthetic construct
  misc_feature 1..20: note = Description of Artificial Sequence: Synthetic oligonucleotide
  misc_feature 1..20: note = Target: SCN10A; (-) strand; PAM type: NRG; PAM sequence: TGG
  source 1..20: mol_type = other DNA
tgggcctctaaggaggtgat

SEQ ID NO: 24904 - DNA, 20 bp, synthetic construct
  misc_feature 1..20: note = Description of Artificial Sequence: Synthetic oligonucleotide
  misc_feature 1..20: note = Target: SCN10A; (-) strand; PAM type: NRG; PAM sequence: AGG
  source 1..20: mol_type = other DNA
tggagattgggcctctaagg

SEQ ID NO: 24905 - DNA, 20 bp, synthetic construct
  misc_feature 1..20: note = Description of Artificial Sequence: Synthetic oligonucleotide
  misc_feature 1..20: note = Target: SCN10A; (-) strand; PAM type: NRG; PAM sequence: GAG
  source 1..20: mol_type = other DNA
ttggagattgggcctctaag

SEQ ID NO: 24906 - DNA, 20 bp, synthetic construct
  misc_feature 1..20: note = Description of Artificial Sequence: Synthetic oligonucleotide
  misc_feature 1..20: note = Target: SCN10A; (-) strand; PAM type: NRG; PAM sequence: AGG
  source 1..20: mol_type = other DNA
tgttggagattgggcctcta

SEQ ID NO: 24907 - DNA, 20 bp, synthetic construct
  misc_feature 1..20: note = Description of Artificial Sequence: Synthetic oligonucleotide
  misc_feature 1..20: note = Target: SCN10A; (-) strand; PAM type: NRG; PAM sequence: AAG
  source 1..20: mol_type = other DNA
atgttggagattgggcctct

SEQ ID NO: 24908 - DNA, 20 bp, synthetic construct
  misc_feature 1..20: note = Description of Artificial Sequence: Synthetic oligonucleotide
  misc_feature 1..20: note = Target: SCN10A; (-) strand; PAM type: NRG; PAM sequence: GGG
  source 1..20: mol_type = other DNA
atgttgctatgttggagatt

SEQ ID NO: 24909 - DNA, 20 bp, synthetic construct
  misc_feature 1..20: note = Description of Artificial Sequence: Synthetic oligonucleotide
  misc_feature 1..20: note = Target: SCN10A; (-) strand; PAM type: NRG; PAM sequence: TGG
  source 1..20: mol_type = other DNA
catgttgctatgttggagat

SEQ ID NO: 24910 - DNA, 20 bp, synthetic construct
  misc_feature 1..20: note = Description of Artificial Sequence: Synthetic oligonucleotide
  misc_feature 1..20: note = Target: SCN10A; (-) strand; PAM type: NRG; PAM sequence: GAG
  source 1..20: mol_type = other DNA
ccccccatgttgctatgttg

SEQ ID NO: 24911 - DNA, 20 bp, synthetic construct
  misc_feature 1..20: note = Description of Artificial Sequence: Synthetic oligonucleotide
  misc_feature 1..20: note = Target: SCN10A; (-) strand; PAM type: NRG; PAM sequence: TGG
  source 1..20: mol_type = other DNA
aaccccccatgttgctatgt

SEQ ID NO: 24912 - DNA, 20 bp, synthetic construct
  misc_feature 1..20: note = Description of Artificial Sequence: Synthetic oligonucleotide
  misc_feature 1..20: note = Target: SCN10A; (-) strand; PAM type: NRG; PAM sequence: GAG
  source 1..20: mol_type = other DNA
ttgtcacacaagctgctatg

SEQ ID NO: 24913 - DNA, 20 bp, synthetic construct
  misc_feature 1..20: note = Description of Artificial Sequence: Synthetic oligonucleotide
  misc_feature 1..20: note = Target: SCN10A; (-) strand; PAM type: NRG; PAM sequence: TGG
  source 1..20: mol_type = other DNA
agttgtcacacaagctgcta

SEQ ID NO: 24914 - DNA, 20 bp, synthetic construct
  misc_feature 1..20: note = Description of Artificial Sequence: Synthetic oligonucleotide
  misc_feature 1..20: note = Target: SCN10A; (-) strand; PAM type: NRG; PAM sequence: AAG
  source 1..20: mol_type = other DNA
ggcatgggtagttgtcacac

SEQ ID NO: 24915 - DNA, 20 bp, synthetic construct
  misc_feature 1..20: note = Description of Artificial Sequence: Synthetic oligonucleotide
  misc_feature 1..20: note = Target: SCN10A; (-) strand; PAM type: NRG; PAM sequence: TAG
  source 1..20: mol_type = other DNA
gttccattttatggcatggg

SEQ ID NO: 24916 - DNA, 20 bp, synthetic construct
  misc_feature 1..20: note = Description of Artificial Sequence: Synthetic oligonucleotide
  misc_feature 1..20: note = Target: SCN10A; (-) strand; PAM type: NRG; PAM sequence: GGG
  source 1..20: mol_type = other DNA
cacgttccattttatggcat

SEQ ID NO: 24917 - DNA, 20 bp, synthetic construct
  misc_feature 1..20: note = Description of Artificial Sequence: Synthetic oligonucleotide
  misc_feature 1..20: note = Target: SCN10A; (-) strand; PAM type: NRG; PAM sequence: TGG
  source 1..20: mol_type = other DNA
tcacgttccattttatggca

SEQ ID NO: 24918 - DNA, 20 bp, synthetic construct
  misc_feature 1..20: note = Description of Artificial Sequence: Synthetic oligonucleotide
  misc_feature 1..20: note = Target: SCN10A; (-) strand; PAM type: NRG; PAM sequence: TGG
  source 1..20: mol_type = other DNA
gctggtcacgttccatttta

SEQ ID NO: 24919 - DNA, 20 bp, synthetic construct
  misc_feature 1..20: note = Description of Artificial Sequence: Synthetic oligonucleotide
  misc_feature 1..20: note = Target: SCN10A; (-) strand; PAM type: NRG; PAM sequence: TGG
  source 1..20: mol_type = other DNA
ggaaggagctggtgaagtgc

SEQ ID NO: 24920 - DNA, 20 bp, synthetic construct
  misc_feature 1..20: note = Description of Artificial Sequence: Synthetic oligonucleotide
  misc_feature 1..20: note = Target: SCN10A; (-) strand; PAM type: NRG; PAM sequence: AAG
  source 1..20: mol_type = other DNA
taattgggaaggagctggtg

SEQ ID NO: 24921 - DNA, 20 bp, synthetic construct
  misc_feature 1..20: note = Description of Artificial Sequence: Synthetic oligonucleotide
  misc_feature 1..20: note = Target: SCN10A; (-) strand; PAM type: NRG; PAM sequence: TGG
  source 1..20: mol_type = other DNA
ggatgtaattgggaaggagc

SEQ ID NO: 24922 - DNA, 20 bp, synthetic construct
  misc_feature 1..20: note = Description of Artificial Sequence: Synthetic oligonucleotide
  misc_feature 1..20: note = Target: SCN10A; (-) strand; PAM type: NRG; PAM sequence: GAG
  source 1..20: mol_type = other DNA
gggaggatgtaattgggaag

SEQ ID NO: 24923 - DNA, 20 bp, synthetic construct
  misc_feature 1..20: note = Description of Artificial Sequence: Synthetic oligonucleotide
  misc_feature 1..20: note = Target: SCN10A; (-) strand; PAM type: NRG; PAM sequence: AGG
  source 1..20: mol_type = other DNA
gagggaggatgtaattggga

SEQ ID NO: 24924 - DNA, 20 bp, synthetic construct
  misc_feature 1..20: note = Description of Artificial Sequence: Synthetic oligonucleotide
  misc_feature 1..20: note = Target: SCN10A; (-) strand; PAM type: NRG; PAM sequence: AAG
  source 1..20: mol_type = other DNA
agagggaggatgtaattggg

SEQ ID NO: 24925 - DNA, 20 bp, synthetic construct
  misc_feature 1..20: note = Description of Artificial Sequence: Synthetic oligonucleotide
  misc_feature 1..20: note = Target: SCN10A; (-) strand; PAM type: NRG; PAM sequence: GGG
  source 1..20: mol_type = other DNA
agaagagggaggatgtaatt

SEQ ID NO: 24926 - DNA, 20 bp, synthetic construct
  misc_feature 1..20: note = Description of Artificial Sequence: Synthetic oligonucleotide
  misc_feature 1..20: note = Target: SCN10A; (-) strand; PAM type: NRG; PAM sequence: TGG
  source 1..20: mol_type = other DNA
cagaagagggaggatgtaat

SEQ ID NO: 24927 - DNA, 20 bp, synthetic construct
  misc_feature 1..20: note = Description of Artificial Sequence: Synthetic oligonucleotide
  misc_feature 1..20: note = Target: SCN10A; (-) strand; PAM type: NRG; PAM sequence: AGG
  source 1..20: mol_type = other DNA
gcctccagggcagaagaggg

SEQ ID NO: 24928 - DNA, 20 bp, synthetic construct
  misc_feature 1..20: note = Description of Artificial Sequence: Synthetic oligonucleotide
  misc_feature 1..20: note = Target: SCN10A; (-) strand; PAM type: NRG; PAM sequence: GAG
  source 1..20: mol_type = other DNA
ggcctccagggcagaagagg

SEQ ID NO: 24929 - DNA, 20 bp, synthetic construct
  misc_feature 1..20: note = Description of Artificial Sequence: Synthetic oligonucleotide
  misc_feature 1..20: note = Target: SCN10A; (-) strand; PAM type: NRG; PAM sequence: GGG
  source 1..20: mol_type = other DNA
gtggcctccagggcagaaga

SEQ ID NO: 24930 - DNA, 20 bp, synthetic construct
  misc_feature 1..20: note = Description of Artificial Sequence: Synthetic oligonucleotide
  misc_feature 1..20: note = Target: SCN10A; (-) strand; PAM type: NRG; PAM sequence: AGG
  source 1..20: mol_type = other DNA
agtggcctccagggcagaag

SEQ ID NO: 24931 - DNA, 20 bp, synthetic construct
  misc_feature 1..20: note = Description of Artificial Sequence: Synthetic oligonucleotide
  misc_feature 1..20: note = Target: SCN10A; (-) strand; PAM type: NRG; PAM sequence: GAG
  source 1..20: mol_type = other DNA
tagtggcctccagggcagaa

SEQ ID NO: 24932 - DNA, 20 bp, synthetic construct
  misc_feature 1..20: note = Description of Artificial Sequence: Synthetic oligonucleotide
  misc_feature 1..20: note = Target: SCN10A; (-) strand; PAM type: NRG; PAM sequence: AAG
  source 1..20: mol_type = other DNA
aatagtggcctccagggcag

SEQ ID NO: 24933 - DNA, 20 bp, synthetic construct
  misc_feature 1..20: note = Description of Artificial Sequence: Synthetic oligonucleotide
  misc_feature 1..20: note = Target: SCN10A; (-) strand; PAM type: NRG; PAM sequence: CAG
  source 1..20: mol_type = other DNA
gagaatagtggcctccaggg

SEQ ID NO: 24934 - DNA, 20 bp, synthetic construct
  misc_feature 1..20: note = Description of Artificial Sequence: Synthetic oligonucleotide
  misc_feature 1..20: note = Target: SCN10A; (-) strand; PAM type: NRG; PAM sequence: GGG
  source 1..20: mol_type = other DNA
taggagaatagtggcctcca

SEQ ID NO: 24935 - DNA, 20 bp, synthetic construct
  misc_feature 1..20: note = Description of Artificial Sequence: Synthetic oligonucleotide
  misc_feature 1..20: note = Target: SCN10A; (-) strand; PAM type: NRG; PAM sequence: AGG
  source 1..20: mol_type = other DNA
ttaggagaatagtggcctcc

SEQ ID NO: 24936 - DNA, 20 bp, synthetic construct
  misc_feature 1..20: note = Description of Artificial Sequence: Synthetic oligonucleotide
  misc_feature 1..20: note = Target: SCN10A; (-) strand; PAM type: NRG; PAM sequence: CAG
  source 1..20: mol_type = other DNA
attaggagaatagtggcctc

SEQ ID NO: 24937 - DNA, 20 bp, synthetic construct
  misc_feature 1..20: note = Description of Artificial Sequence: Synthetic oligonucleotide
  misc_feature 1..20: note = Target: SCN10A; (-) strand; PAM type: NRG; PAM sequence: TGG
  source 1..20: mol_type = other DNA
accaaaaattaggagaatag

SEQ ID NO: 24938 - DNA, 20 bp, synthetic construct
  misc_feature 1..20: note = Description of Artificial Sequence: Synthetic oligonucleotide
  misc_feature 1..20: note = Target: SCN10A; (-) strand; PAM type: NRG; PAM sequence: TAG
  source 1..20: mol_type = other DNA
agtaccaaaaattaggagaa

SEQ ID NO: 24939 - DNA, 20 bp, synthetic construct
  misc_feature 1..20: note = Description of Artificial Sequence: Synthetic oligonucleotide
  misc_feature 1..20: note = Target: SCN10A; (-) strand; PAM type: NRG; PAM sequence: GAG
  source 1..20: mol_type = other DNA
gaaaaagtaccaaaaattag

SEQ ID NO: 24940 - DNA, 20 bp, synthetic construct
  misc_feature 1..20: note = Description of Artificial Sequence: Synthetic oligonucleotide
  misc_feature 1..20: note = Target: SCN10A; (-) strand; PAM type: NRG; PAM sequence: AGG
  source 1..20: mol_type = other DNA
aagaaaaagtaccaaaaatt

SEQ ID NO: 24941 - DNA, 20 bp, synthetic construct
  misc_feature 1..20: note = Description of Artificial Sequence: Synthetic oligonucleotide
  misc_feature 1..20: note = Target: SCN10A; (-) strand; PAM type: NRG; PAM sequence: TAG
  source 1..20: mol_type = other DNA
caagaaaaagtaccaaaaat

SEQ ID NO: 24942 - DNA, 20 bp, synthetic construct
  misc_feature 1..20: note = Description of Artificial Sequence: Synthetic oligonucleotide
  misc_feature 1..20: note = Target: SCN10A; (-) strand; PAM type: NRG; PAM sequence: AAG
  source 1..20: mol_type = other DNA
caataaagtaaggcaagaaa

SEQ ID NO: 24943 - DNA, 20 bp, synthetic construct
  misc_feature 1..20: note = Description of Artificial Sequence: Synthetic oligonucleotide
  misc_feature 1..20: note = Target: SCN10A; (-) strand; PAM type: NRG; PAM sequence: AAG
  source 1..20: mol_type = other DNA
aagcatcaataaagtaaggc

SEQ ID NO: 24944 - DNA, 20 bp, synthetic construct
  misc_feature 1..20: note = Description of Artificial Sequence: Synthetic oligonucleotide
  misc_feature 1..20: note = Target: SCN10A; (-) strand; PAM type: NRG; PAM sequence: AGG
  source 1..20: mol_type = other DNA
taaaaagcatcaataaagta

SEQ ID NO: 24945 - DNA, 20 bp, synthetic construct
  misc_feature 1..20: note = Description of Artificial Sequence: Synthetic oligonucleotide
  misc_feature 1..20: note = Target: SCN10A; (-) strand; PAM type: NRG; PAM sequence: AAG
  source 1..20: mol_type = other DNA
gtaaaaagcatcaataaagt

SEQ ID NO: 24946 - DNA, 20 bp, synthetic construct
  misc_feature 1..20: note = Description of Artificial Sequence: Synthetic oligonucleotide
  misc_feature 1..20: note = Target: SCN10A; (-) strand; PAM type: NRG; PAM sequence: AAG
  source 1..20: mol_type = other DNA
tgaagtaaaaagcatcaata

SEQ ID NO: 24947 - DNA, 20 bp, synthetic construct
  misc_feature 1..20: note = Description of Artificial Sequence: Synthetic oligonucleotide
  misc_feature 1..20: note = Target: SCN10A; (-) strand; PAM type: NRG; PAM sequence: AAG
  source 1..20: mol_type = other DNA
atgcatacttatgaagtaaa

SEQ ID NO: 24948 - DNA, 20 bp, synthetic construct
  misc_feature 1..20: note = Description of Artificial Sequence: Synthetic oligonucleotide
  misc_feature 1..20: note = Target: SCN10A; (-) strand; PAM type: NRG; PAM sequence: AAG
  source 1..20: mol_type = other DNA
tttaggaatgcatacttatg

SEQ ID NO: 24949 - DNA, 20 bp, synthetic construct
  misc_feature 1..20: note = Description of Artificial Sequence: Synthetic oligonucleotide
  misc_feature 1..20: note = Target: SCN10A; (-) strand; PAM type: NRG; PAM sequence: AGG
  source 1..20: mol_type = other DNA
aaaactaaactattttgttt

SEQ ID NO: 24950 - DNA, 20 bp, synthetic construct
  misc_feature 1..20: note = Description of Artificial Sequence: Synthetic oligonucleotide
  misc_feature 1..20: note = Target: SCN10A; (-) strand; PAM type: NRG; PAM sequence: TAG
  source 1..20: mol_type = other DNA
caaaactaaactattttgtt

SEQ ID NO: 24951 - DNA, 20 bp, synthetic construct
  misc_feature 1..20: note = Description of Artificial Sequence: Synthetic oligonucleotide
  misc_feature 1..20: note = Target: SCN10A; (-) strand; PAM type: NRG; PAM sequence: AAG
  source 1..20: mol_type = other DNA
tttatataaagtttgaaatc

SEQ ID NO: 24952 - DNA, 20 bp, synthetic construct
  misc_feature 1..20: note = Description of Artificial Sequence: Synthetic oligonucleotide
  misc_feature 1..20: note = Target: SCN10A; (-) strand; PAM type: NRG; PAM sequence: AAG
  source 1..20: mol_type = other DNA
aaacaaggttcatttatata

SEQ ID NO: 24953 - DNA, 20 bp, synthetic construct
  misc_feature 1..20: note = Description of Artificial Sequence: Synthetic oligonucleotide
  misc_feature 1..20: note = Target: SCN10A; (-) strand; PAM type: NRG; PAM sequence: AGG
  source 1..20: mol_type = other DNA
tgcaaaggattacataaaca

SEQ ID NO: 24954 - DNA, 20 bp, synthetic construct
  misc_feature 1..20: note = Description of Artificial Sequence: Synthetic oligonucleotide
  misc_feature 1..20: note = Target: SCN10A; (-) strand; PAM type: NRG; PAM sequence: AAG
  source 1..20: mol_type = other DNA
atgcaaaggattacataaac

SEQ ID NO: 24955 - DNA, 20 bp, synthetic construct
  misc_feature 1..20: note = Description of Artificial Sequence: Synthetic oligonucleotide
  misc_feature 1..20: note = Target: SCN10A; (-) strand; PAM type: NRG; PAM sequence: AGG
  source 1..20: mol_type = other DNA
acaaaaaaagccaaatgcaa

SEQ ID NO: 24956 - DNA, 20 bp, synthetic construct
  misc_feature 1..20: note = Description of Artificial Sequence: Synthetic oligonucleotide
  misc_feature 1..20: note = Target: SCN10A; (-) strand; PAM type: NRG; PAM sequence: AAG
  source 1..20: mol_type = other DNA
aacaaaaaaagccaaatgca

SEQ ID NO: 24957 - DNA, 20 bp, synthetic construct
  misc_feature 1..20: note = Description of Artificial Sequence: Synthetic oligonucleotide
  misc_feature 1..20: note = Target: SCN10A; (-) strand; PAM type: NRG; PAM sequence: AAG
  source 1..20: mol_type = other DNA
aaagtaatattgaacaaaaa

SEQ ID NO: 24958 - DNA, 20 bp, synthetic construct
  misc_feature 1..20: note = Description of Artificial Sequence: Synthetic oligonucleotide
  misc_feature 1..20: note = Target: SCN10A; (-) strand; PAM type: NRG; PAM sequence: AAG
  source 1..20: mol_type = other DNA
aataaggatgagtcttaaga

SEQ ID NO: 24959 - DNA, 20 bp, synthetic construct
  misc_feature 1..20: note = Description of Artificial Sequence: Synthetic oligonucleotide
  misc_feature 1..20: note = Target: SCN10A; (-) strand; PAM type: NRG; PAM sequence: AAG
  source 1..20: mol_type = other DNA
caacaataaggatgagtctt

SEQ ID NO: 24960 - DNA, 20 bp, synthetic construct
  misc_feature 1..20: note = Description of Artificial Sequence: Synthetic oligonucleotide
  misc_feature 1..20: note = Target: SCN10A; (-) strand; PAM type: NRG; PAM sequence: GAG
  source 1..20: mol_type = other DNA
tgctgcacaacaataaggat

SEQ ID NO: 24961 - DNA, 20 bp, synthetic construct
  misc_feature 1..20: note = Description of Artificial Sequence: Synthetic oligonucleotide
  misc_feature 1..20: note = Target: SCN10A; (-) strand; PAM type: NRG; PAM sequence: AGG
  source 1..20: mol_type = other DNA
tttagtgctgcacaacaata

SEQ ID NO: 24962 - DNA, 20 bp, synthetic construct
  misc_feature 1..20: note = Description of Artificial Sequence: Synthetic oligonucleotide
  misc_feature 1..20: note = Target: SCN10A; (-) strand; PAM type: NRG; PAM sequence: AAG
  source 1..20: mol_type = other DNA
ctttagtgctgcacaacaat

SEQ ID NO: 24963 - DNA, 20 bp, synthetic construct
  misc_feature 1..20: note = Description of Artificial Sequence: Synthetic oligonucleotide
  misc_feature 1..20: note = Target: SCN10A; (-) strand; PAM type: NRG; PAM sequence: TAG
  source 1..20: mol_type = other DNA
caataaaaattaataaactt

SEQ ID NO: 24964 - DNA, 20 bp, synthetic construct
  misc_feature 1..20: note = Description of Artificial Sequence: Synthetic oligonucleotide
  misc_feature 1..20: note = Target: SCN10A; (-) strand; PAM type: NRG; PAM sequence: CAG
  source 1..20: mol_type = other DNA
ttctaaaatgagaaaactta

SEQ ID NO: 24965 - DNA, 20 bp, synthetic construct
  misc_feature 1..20: note = Description of Artificial Sequence: Synthetic oligonucleotide
  misc_feature 1..20: note = Target: SCN10A; (-) strand; PAM type: NRG; PAM sequence: GAG
  source 1..20: mol_type = other DNA
tttctgttatattctaaaat

SEQ ID NO: 24966 - DNA, 20 bp, synthetic construct
  misc_feature 1..20: note = Description of Artificial Sequence: Synthetic oligonucleotide
  misc_feature 1..20: note = Target: SCN10A; (-) strand; PAM type: NRG; PAM sequence: GAG
  source 1..20: mol_type = other DNA
ctcaaatgtccataaacttt

SEQ ID NO: 24967 - DNA, 20 bp, synthetic construct
  misc_feature 1..20: note = Description of Artificial Sequence: Synthetic oligonucleotide
  misc_feature 1..20: note = Target: SCN10A; (-) strand; PAM type: NRG; PAM sequence: CGG
  source 1..20: mol_type = other DNA
tgcccataaaaaccccaaac

SEQ ID NO: 24968 - DNA, 20 bp, synthetic construct
  misc_feature 1..20: note = Description of Artificial Sequence: Synthetic oligonucleotide
  misc_feature 1..20: note = Target: SCN10A; (-) strand; PAM type: NRG; PAM sequence: AAG
  source 1..20: mol_type = other DNA
accagattacagctacaaga

SEQ ID NO: 24969 - DNA, 20 bp, synthetic construct
  misc_feature 1..20: note = Description of Artificial Sequence: Synthetic oligonucleotide
  misc_feature 1..20: note = Target: SCN10A; (-) strand; PAM type: NRG; PAM sequence: AAG
  source 1..20: mol_type = other DNA
ggacaccagattacagctac

SEQ ID NO: 24970 - DNA, 20 bp, synthetic construct
  misc_feature 1..20: note = Description of Artificial Sequence: Synthetic oligonucleotide
  misc_feature 1..20: note = Target: SCN10A; (-) strand; PAM type: NRG; PAM sequence: CAG
  source 1..20: mol_type = other DNA
tacttgtggacaccagatta

SEQ ID NO: 24971 - DNA, 20 bp, synthetic construct
  misc_feature 1..20: note = Description of Artificial Sequence: Synthetic oligonucleotide
  misc_feature 1..20: note = Target: SCN10A; (-) strand; PAM type: NRG; PAM sequence: CAG
  source 1..20: mol_type = other DNA
aaatatgtacttgtggacac

SEQ ID NO: 24972 - DNA, 20 bp, synthetic construct
  misc_feature 1..20: note = Description of Artificial Sequence: Synthetic oligonucleotide
  misc_feature 1..20: note = Target: SCN10A; (-) strand; PAM type: NRG; PAM sequence: TGG
  source 1..20: mol_type = other DNA
ttaacagaaatatgtacttg

SEQ ID NO: 24973 - DNA, 20 bp, synthetic construct
  misc_feature 1..20: note = Description of Artificial Sequence: Synthetic oligonucleotide
  misc_feature 1..20: note = Target: SCN10A; (-) strand; PAM type: NRG; PAM sequence: CAG
  source 1..20: mol_type = other DNA
ccttaggtacctatgtttaa

SEQ ID NO: 24974 - DNA, 20 bp, synthetic construct
  misc_feature 1..20: note = Description of Artificial Sequence: Synthetic oligonucleotide
  misc_feature 1..20: note = Target: SCN10A; (-) strand; PAM type: NRG; PAM sequence: AGG
  source 1..20: mol_type = other DNA
tattcttctattacaccctt

SEQ ID NO: 24975 - DNA, 20 bp, synthetic construct
  misc_feature 1..20: note = Description of Artificial Sequence: Synthetic oligonucleotide
  misc_feature 1..20: note = Target: SCN10A; (-) strand; PAM type: NRG; PAM sequence: TAG
  source 1..20: mol_type = other DNA
gtattcttctattacaccct

SEQ ID NO: 24976 - DNA, 20 bp, synthetic construct
  misc_feature 1..20: note = Description of Artificial Sequence: Synthetic oligonucleotide
  misc_feature 1..20: note = Target: SCN10A; (-) strand; PAM type: NRG; PAM sequence: AAG
  source 1..20: mol_type = other DNA
gtattatctagtaaaggtgt

SEQ ID NO: 24977 - DNA, 20 bp, synthetic construct
  misc_feature 1..20: note = Description of Artificial Sequence: Synthetic oligonucleotide
  misc_feature 1..20: note = Target: SCN10A; (-) strand; PAM type: NRG; PAM sequence: AGG
  source 1..20: mol_type = other DNA
caaggggtattatctagtaa

SEQ ID NO: 24978 - DNA, 20 bp, synthetic construct
  misc_feature 1..20: note = Description of Artificial Sequence: Synthetic oligonucleotide
  misc_feature 1..20: note = Target: SCN10A; (-) strand; PAM type: NRG; PAM sequence: AAG
  source 1..20: mol_type = other DNA
gcaaggggtattatctagta

SEQ ID NO: 24979 - DNA, 20 bp, synthetic construct
  misc_feature 1..20: note = Description of Artificial Sequence: Synthetic oligonucleotide
  misc_feature 1..20: note = Target: SCN10A; (-) strand; PAM type: NRG; PAM sequence: TAG
  source 1..20: mol_type = other DNA
ggaaagcaaggggtattatc

SEQ ID NO: 24980 - DNA, 20 bp, synthetic construct
  misc_feature 1..20: note = Description of Artificial Sequence: Synthetic oligonucleotide
  misc_feature 1..20: note = Target: SCN10A; (-) strand; PAM type: NRG; PAM sequence: GGG
  source 1..20: mol_type = other DNA
caacctctttggaaagcaag

SEQ ID NO: 24981 - DNA, 20 bp, synthetic construct
  misc_feature 1..20: note = Description of Artificial Sequence: Synthetic oligonucleotide
  misc_feature 1..20: note = Target: SCN10A; (-) strand; PAM type: NRG; PAM sequence: GGG
  source 1..20: mol_type = other DNA
acaacctctttggaaagcaa

SEQ ID NO: 24982 - DNA, 20 bp, synthetic construct
  misc_feature 1..20: note = Description of Artificial Sequence: Synthetic oligonucleotide
  misc_feature 1..20: note = Target: SCN10A; (-) strand; PAM type: NRG; PAM sequence: AGG
  source 1..20: mol_type = other DNA
gacaacctctttggaaagca

SEQ ID NO: 24983 - DNA, 20 bp, synthetic construct
  misc_feature 1..20: note = Description of Artificial Sequence: Synthetic oligonucleotide
  misc_feature 1..20: note = Target: SCN10A; (-) strand; PAM type: NRG; PAM sequence: AAG
  source 1..20: mol_type = other DNA
ggacaacctctttggaaagc

SEQ ID NO: 24984 - DNA, 20 bp, synthetic construct
  misc_feature 1..20: note = Description of Artificial Sequence: Synthetic oligonucleotide
  misc_feature 1..20: note = Target: SCN10A; (-) strand; PAM type: NRG; PAM sequence: AAG
  source 1..20: mol_type = other DNA
atttggacaacctctttgga

SEQ ID NO: 24985 - DNA, 20 bp, synthetic construct
  misc_feature 1..20: note = Description of Artificial Sequence: Synthetic oligonucleotide
  misc_feature 1..20: note = Target: SCN10A; (-) strand; PAM type: NRG; PAM sequence: TGG
  source 1..20: mol_type = other DNA
gtaaatttggacaacctctt

SEQ ID NO: 24986 - DNA, 20 bp, synthetic construct
  misc_feature 1..20: note = Description of Artificial Sequence: Synthetic oligonucleotide
  misc_feature 1..20: note = Target: SCN10A; (-) strand; PAM type: NRG; PAM sequence: TGG
  source 1..20: mol_type = other DNA
tgctggtgggagtgtaaatt

SEQ ID NO: 24987 - DNA, 20 bp, synthetic construct
  misc_feature 1..20: note = Description of Artificial Sequence: Synthetic oligonucleotide
  misc_feature 1..20: note = Target: SCN10A; (-) strand; PAM type: NRG; PAM sequence: GAG
  source 1..20: mol_type = other DNA
aactcacacactgctggtgg

SEQ ID NO: 24988 - DNA, 20 bp, synthetic construct
  misc_feature 1..20: note = Description of Artificial Sequence: Synthetic oligonucleotide
  misc_feature 1..20: note = Target: SCN10A; (-) strand; PAM type: NRG; PAM sequence: GGG
  source 1..20: mol_type = other DNA
gaaactcacacactgctggt

SEQ ID NO: 24989 - DNA, 20 bp, synthetic construct
  misc_feature 1..20: note = Description of Artificial Sequence: Synthetic oligonucleotide
  misc_feature 1..20: note = Target: SCN10A; (-) strand; PAM type: NRG; PAM sequence: TGG
  source 1..20: mol_type = other DNA
agaaactcacacactgctgg

SEQ ID NO: 24990 - DNA, 20 bp, synthetic construct
  misc_feature 1..20: note = Description of Artificial Sequence: Synthetic oligonucleotide
  misc_feature 1..20: note = Target: SCN10A; (-) strand; PAM type: NRG; PAM sequence: TGG
  source 1..20: mol_type = other DNA
aacagaaactcacacactgc

SEQ ID NO: 24991 - DNA, 20 bp, synthetic construct
  misc_feature 1..20: note = Description of Artificial Sequence: Synthetic oligonucleotide
  misc_feature 1..20: note = Target: SCN10A; (-) strand; PAM type: NRG; PAM sequence: CAG
  source 1..20: mol_type = other DNA
ttgggaatgacatggagcaa

SEQ ID NO: 24992 - DNA, 20 bp, synthetic construct
  misc_feature 1..20: note = Description of Artificial Sequence: Synthetic oligonucleotide
  misc_feature 1..20: note = Target: SCN10A; (-) strand; PAM type: NRG; PAM sequence: GAG
  source 1..20: mol_type = other DNA
caagtattgggaatgacatg

SEQ ID NO: 24993 - DNA, 20 bp, synthetic construct
  misc_feature 1..20: note = Description of Artificial Sequence: Synthetic oligonucleotide
  misc_feature 1..20: note = Target: SCN10A; (-) strand; PAM type: NRG; PAM sequence: TGG
  source 1..20: mol_type = other DNA
accaagtattgggaatgaca

SEQ ID NO: 24994 - DNA, 20 bp, synthetic construct
  misc_feature 1..20: note = Description of Artificial Sequence: Synthetic oligonucleotide
  misc_feature 1..20: note = Target: SCN10A; (-) strand; PAM type: NRG; PAM sequence: GGG
  source 1..20: mol_type = other DNA
gtgtcacaataccaagtatt

SEQ ID NO: 24995 - DNA, 20 bp, synthetic construct
  misc_feature 1..20: note = Description of Artificial Sequence: Synthetic oligonucleotide
  misc_feature 1..20: note = Target: SCN10A; (-) strand; PAM type: NRG; PAM sequence: TGG
  source 1..20: mol_type = other DNA
agtgtcacaataccaagtat

SEQ ID NO: 24996 - DNA, 20 bp, synthetic construct
  misc_feature 1..20: note = Description of Artificial Sequence: Synthetic oligonucleotide
  misc_feature 1..20: note = Target: SCN10A; (-) strand; PAM type: NRG; PAM sequence: AAG
  source 1..20: mol_type = other DNA
ttttaaagtgtcacaatacc

SEQ ID NO: 24997 - DNA, 20 bp, synthetic construct
  misc_feature 1..20: note = Description of Artificial Sequence: Synthetic oligonucleotide
  misc_feature 1..20: note = Target: SCN10A; (-) strand; PAM type: NRG; PAM sequence: AAG
  source 1..20: mol_type = other DNA
catagaagggaaatttttta

SEQ ID NO: 24998 - DNA, 20 bp, synthetic construct
  misc_feature 1..20: note = Description of Artificial Sequence: Synthetic oligonucleotide
  misc_feature 1..20: note = Target: SCN10A; (-) strand; PAM type: NRG; PAM sequence: GGG
  source 1..20: mol_type = other DNA
attacatgttcatcatagaa

SEQ ID NO: 24999 - DNA, 20 bp, synthetic construct
  misc_feature 1..20: note = Description of Artificial Sequence: Synthetic oligonucleotide
  misc_feature 1..20: note = Target: SCN10A; (-) strand; PAM type: NRG; PAM sequence: AGG
  source 1..20: mol_type = other DNA
tattacatgttcatcataga

SEQ ID NO: 25000 - DNA, 20 bp, synthetic construct
  misc_feature 1..20: note = Description of Artificial Sequence: Synthetic oligonucleotide
  misc_feature 1..20: note = Target: SCN10A; (-) strand; PAM type: NRG; PAM sequence: AAG
  source 1..20: mol_type = other DNA
ttattacatgttcatcatag

SEQ ID NO: 25001 - DNA, 20 bp, synthetic construct
  misc_feature 1..20: note = Description of Artificial Sequence: Synthetic oligonucleotide
  misc_feature 1..20: note = Target: SCN10A; (-) strand; PAM type: NRG; PAM sequence: TAG
  source 1..20: mol_type = other DNA
attttattacatgttcatca

SEQ ID NO: 25002 - DNA, 20 bp, synthetic construct
  misc_feature 1..20: note = Description of Artificial Sequence: Synthetic oligonucleotide
  misc_feature 1..20: note = Target: SCN10A; (-) strand; PAM type: NRG; PAM sequence: GAG
  source 1..20: mol_type = other DNA
ttgcaaattaaaatcacact

SEQ ID NO: 25003 - DNA, 20 bp, synthetic construct
  misc_feature 1..20: note = Description of Artificial Sequence: Synthetic oligonucleotide
  misc_feature 1..20: note = Target: SCN10A; (-) strand; PAM type: NRG; PAM sequence: GAG
  source 1..20: mol_type = other DNA
taacctttttttaaatcaaa

SEQ ID NO: 25004 - DNA, 20 bp, synthetic construct
  misc_feature 1..20: note = Description of Artificial Sequence: Synthetic oligonucleotide
  misc_feature 1..20: note = Target: SCN10A; (-) strand; PAM type: NRG; PAM sequence: AAG
  source 1..20: mol_type = other DNA
cttaacctttttttaaatca

SEQ ID NO: 25005 - DNA, 20 bp, synthetic construct
  misc_feature 1..20: note = Description of Artificial Sequence: Synthetic oligonucleotide
  misc_feature 1..20: note = Target: SCN10A; (-) strand; PAM type: NRG; PAM sequence: AAG
  source 1..20: mol_type = other DNA
aaatggccataaacatatga

SEQ ID NO: 25006 - DNA, 20 bp, synthetic construct
  misc_feature 1..20: note = Description of Artificial Sequence: Synthetic oligonucleotide
  misc_feature 1..20: note = Target: SCN10A; (-) strand; PAM type: NRG; PAM sequence: TGG
  source 1..20: mol_type = other DNA
tacaaaagtggaaatccaaa

SEQ ID NO: 25007 - DNA, 20 bp, synthetic construct
  misc_feature 1..20: note = Description of Artificial Sequence: Synthetic oligonucleotide
  misc_feature 1..20: note = Target: SCN10A; (-) strand; PAM type: NRG; PAM sequence: TGG
  source 1..20: mol_type = other DNA
gaataggcactttacaaaag

SEQ ID NO: 25008 - DNA, 20 bp, synthetic construct
  misc_feature 1..20: note = Description of Artificial Sequence: Synthetic oligonucleotide
  misc_feature 1..20: note = Target: SCN10A; (-) strand; PAM type: NRG; PAM sequence: AAG
  source 1..20: mol_type = other DNA
tttgaataggcactttacaa

SEQ ID NO: 25009 - DNA, 20 bp, synthetic construct
  misc_feature 1..20: note = Description of Artificial Sequence: Synthetic oligonucleotide
  misc_feature 1..20: note = Target: SCN10A; (-) strand; PAM type: NRG; PAM sequence: AGG
  source 1..20: mol_type = other DNA
aaatagcacaaaatttgaat

SEQ ID NO: 25010 - DNA, 20 bp, synthetic construct
  misc_feature 1..20: note = Description of Artificial Sequence: Synthetic oligonucleotide
  misc_feature 1..20: note = Target: SCN10A; (-) strand; PAM type: NRG; PAM sequence: TAG
  source 1..20: mol_type = other DNA
aaaatagcacaaaatttgaa

SEQ ID NO: 25011 - DNA, 20 bp, synthetic construct
  misc_feature 1..20: note = Description of Artificial Sequence: Synthetic oligonucleotide
  misc_feature 1..20: note = Target: SCN10A; (-) strand; PAM type: NRG; PAM sequence: TAG
  source 1..20: mol_type = other DNA
cagaacaaccacttgtaaaa

SEQ ID NO: 25012 - DNA, 20 bp, synthetic construct
  misc_feature 1..20: note = Description of Artificial Sequence: Synthetic oligonucleotide
  misc_feature 1..20: note = Target: SCN10A; (-) strand; PAM type: NRG; PAM sequence: CAG
  source 1..20: mol_type = other DNA
caaatcaattagaaaaatgt

SEQ ID NO: 25013 - DNA, 20 bp, synthetic construct
  misc_feature 1..20: note = Description of Artificial Sequence: Synthetic oligonucleotide
  misc_feature 1..20: note = Target: SCN10A; (-) strand; PAM type: NRG; PAM sequence: TAG
  source 1..20: mol_type = other DNA
aatgaactctacaaatcaat

SEQ ID NO: 25014 - DNA, 20 bp, synthetic construct
  misc_feature 1..20: note = Description of Artificial Sequence: Synthetic oligonucleotide
  misc_feature 1..20: note = Target: SCN10A; (-) strand; PAM type: NRG; PAM sequence: GAG
  source 1..20: mol_type = other DNA
aaagcaagtgcttatattca

SEQ ID NO: 25015 - DNA, 20 bp, synthetic construct
  misc_feature 1..20: note = Description of Artificial Sequence: Synthetic oligonucleotide
  misc_feature 1..20: note = Target: SCN10A; (-) strand; PAM type: NRG; PAM sequence: CAG
  source 1..20: mol_type = other DNA
aaaaagcaagtgcttatatt

SEQ ID NO: 25016 - DNA, 20 bp, synthetic construct
  misc_feature 1..20: note = Description of Artificial Sequence: Synthetic oligonucleotide
  misc_feature 1..20: note = Target: SCN10A; (-) strand; PAM type: NRG; PAM sequence: AAG
  source 1..20: mol_type = other DNA
ctttaagagcatgaaaaagc

SEQ ID NO: 25017 - DNA, 20 bp, synthetic construct
  misc_feature 1..20: note = Description of Artificial Sequence: Synthetic oligonucleotide
  misc_feature 1..20: note = Target: SCN10A; (-) strand; PAM type: NRG; PAM sequence: AAG
  source 1..20: mol_type = other DNA
acaactttaagagcatgaaa

SEQ ID NO: 25018 - DNA, 20 bp, synthetic construct
  misc_feature 1..20: note = Description of Artificial Sequence: Synthetic oligonucleotide
  misc_feature 1..20: note = Target: SCN10A; (-) strand; PAM type: NRG; PAM sequence: GAG
  source 1..20: mol_type = other DNA
tcatcagaagacaactttaa

SEQ ID NO: 25019 - DNA, 20 bp, synthetic construct
  misc_feature 1..20: note = Description of Artificial Sequence: Synthetic oligonucleotide
  misc_feature 1..20: note = Target: SCN10A; (-) strand; PAM type: NRG; PAM sequence: AAG
  source 1..20: mol_type = other DNA
gttcatcagaagacaacttt

SEQ ID NO: 25020 - DNA, 20 bp, synthetic construct
  misc_feature 1..20: note = Description of Artificial Sequence: Synthetic oligonucleotide
  misc_feature 1..20: note = Target: SCN10A; (-) strand; PAM type: NRG; PAM sequence: AAG
  source 1..20: mol_type = other DNA
taattaagaatgttcatcag

SEQ ID NO: 25021 - DNA, 20 bp, synthetic construct
  misc_feature 1..20: note = Description of Artificial Sequence: Synthetic oligonucleotide
  misc_feature 1..20: note = Target: SCN10A; (-) strand; PAM type: NRG; PAM sequence: CAG
  source 1..20: mol_type = other DNA
ctataattaagaatgttcat

SEQ ID NO: 25022 - DNA, 20 bp, synthetic construct
  misc_feature 1..20: note = Description of Artificial Sequence: Synthetic oligonucleotide
  misc_feature 1..20: note = Target: SCN10A; (-) strand; PAM type: NRG; PAM sequence: AAG
  source 1..20: mol_type = other DNA
cattttagtatactataatt

SEQ ID NO: 25023 - DNA, 20 bp, synthetic construct
  misc_feature 1..20: note = Description of Artificial Sequence: Synthetic oligonucleotide
  misc_feature 1..20: note = Target: SCN10A; (-) strand; PAM type: NRG; PAM sequence: TAG
  source 1..20: mol_type = other DNA
aggaaaaaactgatacattt

SEQ ID NO: 25024 - DNA, 20 bp, synthetic construct
  misc_feature 1..20: note = Description of Artificial Sequence: Synthetic oligonucleotide
  misc_feature 1..20: note = Target: SCN10A; (-) strand; PAM type: NRG; PAM sequence: AGG
  source 1..20: mol_type = other DNA
acaagaagcactaactatac

SEQ ID NO: 25025 - DNA, 20 bp, synthetic construct
  misc_feature 1..20: note = Description of Artificial Sequence: Synthetic oligonucleotide
  misc_feature 1..20: note = Target: SCN10A; (-) strand; PAM type: NRG; PAM sequence: CAG
  source 1..20: mol_type = other DNA
cacaagaagcactaactata

SEQ ID NO: 25026 - DNA, 20 bp, synthetic construct
  misc_feature 1..20: note = Description of Artificial Sequence: Synthetic oligonucleotide
  misc_feature 1..20: note = Target: SCN10A; (-) strand; PAM type: NRG; PAM sequence: AAG
  source 1..20: mol_type = other DNA
tttattacatatgacacaag

SEQ ID NO: 25027 - DNA, 20 bp, synthetic construct
  misc_feature 1..20: note = Description of Artificial Sequence: Synthetic oligonucleotide
  misc_feature 1..20: note = Target: SCN10A; (-) strand; PAM type: NRG; PAM sequence: AAG
  source 1..20: mol_type = other DNA
aactttattacatatgacac

SEQ ID NO: 25028 - DNA, 20 bp, synthetic construct
  misc_feature 1..20: note = Description of Artificial Sequence: Synthetic oligonucleotide
  misc_feature 1..20: note = Target: SCN10A; (-) strand; PAM type: NRG; PAM sequence: AAG
  source 1..20: mol_type = other DNA
tatctttatgacctcagact

SEQ ID NO: 25029 - DNA, 20 bp, synthetic construct
  misc_feature 1..20: note = Description of Artificial Sequence: Synthetic oligonucleotide
  misc_feature 1..20: note = Target: SCN10A; (-) strand; PAM type: NRG; PAM sequence: CAG
  source 1..20: mol_type = other DNA
gaggaatatctttatgacct

SEQ ID NO: 25030 - DNA, 20 bp, synthetic construct
  misc_feature 1..20: note = Description of Artificial Sequence: Synthetic oligonucleotide
  misc_feature 1..20: note = Target: SCN10A; (-) strand; PAM type: NRG; PAM sequence: AGG
  source 1..20: mol_type = other DNA
tttgaaaggaaaaaacaaag

SEQ ID NO: 25031 - DNA, 20 bp, synthetic construct
  misc_feature 1..20: note = Description of Artificial Sequence: Synthetic oligonucleotide
  misc_feature 1..20: note = Target: SCN10A; (-) strand; PAM type: NRG; PAM sequence: GAG
  source 1..20: mol_type = other DNA
ttttgaaaggaaaaaacaaa

SEQ ID NO: 25032 - DNA, 20 bp, synthetic construct
  misc_feature 1..20: note = Description of Artificial Sequence: Synthetic oligonucleotide
  misc_feature 1..20: note = Target: SCN10A; (-) strand; PAM type: NRG; PAM sequence: AAG
  source 1..20: mol_type = other DNA
ctttttgaaaggaaaaaaca

SEQ ID NO: 25033 - DNA, 20 bp, synthetic construct
  misc_feature 1..20: note = Description of Artificial Sequence: Synthetic oligonucleotide
  misc_feature 1..20: note = Target: SCN10A; (-) strand; PAM type: NRG; PAM sequence: AGG
  source 1..20: mol_type = other DNA
tggtggataagctttttgaa

SEQ ID NO: 25034 - DNA, 20 bp, synthetic construct
  misc_feature 1..20: note = Description of Artificial Sequence: Synthetic oligonucleotide
  misc_feature 1..20: note = Target: SCN10A; (-) strand; PAM type: NRG; PAM sequence: AAG
  source 1..20: mol_type = other DNA
gtggtggataagctttttga

SEQ ID NO: 25035 - DNA, 20 bp, synthetic construct
  misc_feature 1..20: note = Description of Artificial Sequence: Synthetic oligonucleotide
  misc_feature 1..20: note = Target: SCN10A; (-) strand; PAM type: NRG; PAM sequence: AAG
  source 1..20: mol_type = other DNA
ccgacttgatcgtggtggat

SEQ ID NO: 25036 - DNA, 20 bp, synthetic construct
  misc_feature 1..20: note = Description of Artificial Sequence: Synthetic oligonucleotide
  misc_feature 1..20: note = Target: SCN10A; (-) strand; PAM type: NRG; PAM sequence: TGG
  source 1..20: mol_type = other DNA
tgaagccgacttgatcgtgg

SEQ ID NO: 25037 - DNA, 20 bp, synthetic construct
  misc_feature 1..20: note = Description of Artificial Sequence: Synthetic oligonucleotide
  misc_feature 1..20: note = Target: SCN10A; (-) strand; PAM type: NRG; PAM sequence: TGG
  source 1..20: mol_type = other DNA
gtatgaagccgacttgatcg

SEQ ID NO: 25038 - DNA, 20 bp, synthetic construct
  misc_feature 1..20: note = Description of Artificial Sequence: Synthetic oligonucleotide
  misc_feature 1..20: note = Target: SCN10A; (-) strand; PAM type: NRG; PAM sequence: AAG
  source 1..20: mol_type = other DNA
cagctttgatcccaggtatg

SEQ ID NO: 25039 - DNA, 20 bp, synthetic construct
  misc_feature 1..20: note = Description of Artificial Sequence: Synthetic oligonucleotide
  misc_feature 1..20: note = Target: SCN10A; (-) strand; PAM type: NRG; PAM sequence: AGG
  source 1..20: mol_type = other DNA
gttgaaccagctttgatccc

SEQ ID NO: 25040 - DNA, 20 bp, synthetic construct
  misc_feature 1..20: note = Description of Artificial Sequence: Synthetic oligonucleotide
  misc_feature 1..20: note = Target: SCN10A; (-) strand; PAM type: NRG; PAM sequence: CAG
  source 1..20: mol_type = other DNA
tgttgaaccagctttgatcc

SEQ ID NO: 25041 - DNA, 20 bp, synthetic construct
  misc_feature 1..20: note = Description of Artificial Sequence: Synthetic oligonucleotide
  misc_feature 1..20: note = Target: SCN10A; (-) strand; PAM type: NRG; PAM sequence: CAG
  source 1..20: mol_type = other DNA
ttgacttgcgtatgttgaac

SEQ ID NO: 25042 - DNA, 20 bp, synthetic construct
  misc_feature 1..20: note = Description of Artificial Sequence: Synthetic oligonucleotide
  misc_feature 1..20: note = Target: SCN10A; (-) strand; PAM type: NRG; PAM sequence: TGG
  source 1..20: mol_type = other DNA
cattggttctgtttgtgtga

SEQ ID NO: 25043 - DNA, 20 bp, synthetic construct
  misc_feature 1..20: note = Description of Artificial Sequence: Synthetic oligonucleotide
  misc_feature 1..20: note = Target: SCN10A; (-) strand; PAM type: NRG; PAM sequence: TGG
  source 1..20: mol_type = other DNA
aatcacgtggtttttgtcat

SEQ ID NO: 25044 - DNA, 20 bp, synthetic construct
  misc_feature 1..20: note = Description of Artificial Sequence: Synthetic oligonucleotide
  misc_feature 1..20: note = Target: SCN10A; (-) strand; PAM type: NRG; PAM sequence: TGG
  source 1..20: mol_type = other DNA
catctattgagataatcacg

SEQ ID NO: 25045 - DNA, 20 bp, synthetic construct
  misc_feature 1..20: note = Description of Artificial Sequence: Synthetic oligonucleotide
  misc_feature 1..20: note = Target: SCN10A; (-) strand; PAM type: NRG; PAM sequence: GAG
  source 1..20: mol_type = other DNA
agaccttttctgcatctatt

SEQ ID NO: 25046 - DNA, 20 bp, synthetic construct
  misc_feature 1..20: note = Description of Artificial Sequence: Synthetic oligonucleotide
  misc_feature 1..20: note = Target: SCN10A; (-) strand; PAM type: NRG; PAM sequence: AAG
  source 1..20: mol_type = other DNA
atgggtgttgaattttgtcg

SEQ ID NO: 25047 - DNA, 20 bp, synthetic construct
  misc_feature 1..20: note = Description of Artificial Sequence: Synthetic oligonucleotide
  misc_feature 1..20: note = Target: SCN10A; (-) strand; PAM type: NRG; PAM sequence: GGG
  source 1..20: mol_type = other DNA
tgagagcttttagcatgaat

SEQ ID NO: 25048 - DNA, 20 bp, synthetic construct
  misc_feature 1..20: note = Description of Artificial Sequence: Synthetic oligonucleotide
  misc_feature 1..20: note = Target: SCN10A; (-) strand; PAM type: NRG; PAM sequence: TGG
  source 1..20: mol_type = other DNA
ttgagagcttttagcatgaa

SEQ ID NO: 25049 - DNA, 20 bp, synthetic construct
  misc_feature 1..20: note = Description of Artificial Sequence: Synthetic oligonucleotide
  misc_feature 1..20: note = Target: SCN10A; (-) strand; PAM type: NRG; PAM sequence: TAG
  source 1..20: mol_type = other DNA
cctagtttattgagagcttt

SEQ ID NO: 25050 - DNA, 20 bp, synthetic construct
  misc_feature 1..20: note = Description of Artificial Sequence: Synthetic oligonucleotide
  misc_feature 1..20: note = Target: SCN10A; (-) strand; PAM type: NRG; PAM sequence: GAG
  source 1..20: mol_type = other DNA
atcaatacctagtttattga

SEQ ID NO: 25051 - DNA, 20 bp, synthetic construct
  misc_feature 1..20: note = Description of Artificial Sequence: Synthetic oligonucleotide
  misc_feature 1..20: note = Target: SCN10A; (-) strand; PAM type: NRG; PAM sequence: GAG
  source 1..20: mol_type = other DNA
ccatcaatacctagtttatt

SEQ ID NO: 25052 - DNA, 20 bp, synthetic construct
  misc_feature 1..20: note = Description of Artificial Sequence: Synthetic oligonucleotide
  misc_feature 1..20: note = Target: SCN10A; (-) strand; PAM type: NRG; PAM sequence: TAG
  source 1..20: mol_type = other DNA
agatacattccatcaatacc

SEQ ID NO: 25053 - DNA, 20 bp, synthetic construct
  misc_feature 1..20: note = Description of Artificial Sequence: Synthetic oligonucleotide
  misc_feature 1..20: note = Target: SCN10A; (-) strand; PAM type: NRG; PAM sequence: GAG
  source 1..20: mol_type = other DNA
taaatagttcttattatttt

SEQ ID NO: 25054 - DNA, 20 bp, synthetic construct
  misc_feature 1..20: note = Description of Artificial Sequence: Synthetic oligonucleotide
  misc_feature 1..20: note = Target: SCN10A; (-) strand; PAM type: NRG; PAM sequence: TAG
  source 1..20: mol_type = other DNA
ggctgggggcttgtcataaa

SEQ ID NO: 25055 - DNA, 20 bp, synthetic construct
  misc_feature 1..20: note = Description of Artificial Sequence: Synthetic oligonucleotide
  misc_feature 1..20: note = Target: SCN10A; (-) strand; PAM type: NRG; PAM sequence: GGG
  source 1..20: mol_type = other DNA
ttcagtatgatattggctgg

SEQ ID NO: 25056 - DNA, 20 bp, synthetic construct
  misc_feature 1..20: note = Description of Artificial Sequence: Synthetic oligonucleotide
  misc_feature 1..20: note = Target: SCN10A; (-) strand; PAM type: NRG; PAM sequence: GGG
  source 1..20: mol_type = other DNA
attcagtatgatattggctg

SEQ ID NO: 25057 - DNA, 20 bp, synthetic construct
  misc_feature 1..20: note = Description of Artificial Sequence: Synthetic oligonucleotide
  misc_feature 1..20: note = Target: SCN10A; (-) strand; PAM type: NRG; PAM sequence: GGG
  source 1..20: mol_type = other DNA
cattcagtatgatattggct

SEQ ID NO: 25058 - DNA, 20 bp, synthetic construct
  misc_feature 1..20: note = Description of Artificial Sequence: Synthetic oligonucleotide
  misc_feature 1..20: note = Target: SCN10A; (-) strand; PAM type: NRG; PAM sequence: TGG
  source 1..20: mol_type = other DNA
ccattcagtatgatattggc

SEQ ID NO: 25059 - DNA, 20 bp, synthetic construct
  misc_feature 1..20: note = Description of Artificial Sequence: Synthetic oligonucleotide
  misc_feature 1..20: note = Target: SCN10A; (-) strand; PAM type: NRG; PAM sequence: TGG
  source 1..20: mol_type = other DNA
ttgcccattcagtatgatat

SEQ ID NO: 25060 - DNA, 20 bp, synthetic construct
  misc_feature 1..20: note = Description of Artificial Sequence: Synthetic oligonucleotide
  misc_feature 1..20: note = Target: SCN10A; (-) strand; PAM type: NRG; PAM sequence: CAG
  source 1..20: mol_type = other DNA
gcttccagtttttgcccatt

SEQ ID NO: 25061 - DNA, 20 bp, synthetic construct
  misc_feature 1..20: note = Description of Artificial Sequence: Synthetic oligonucleotide
  misc_feature 1..20: note = Target: SCN10A; (-) strand; PAM type: NRG; PAM sequence: CAG
  source 1..20: mol_type = other DNA
gttttcaaaggaaatgcttc

SEQ ID NO: 25062 - DNA, 20 bp, synthetic construct
  misc_feature 1..20: note = Description of Artificial Sequence: Synthetic oligonucleotide
  misc_feature 1..20: note = Target: SCN10A; (-) strand; PAM type: NRG; PAM sequence: AGG
  source 1..20: mol_type = other DNA
tgtcttgtgctggttttcaa

SEQ ID NO: 25063 - DNA, 20 bp, synthetic construct
  misc_feature 1..20: note = Description of Artificial Sequence: Synthetic oligonucleotide
  misc_feature 1..20: note = Target: SCN10A; (-) strand; PAM type: NRG; PAM sequence: AAG
  source 1..20: mol_type = other DNA
ttgtcttgtgctggttttca

SEQ ID NO: 25064 - DNA, 20 bp, synthetic construct
  misc_feature 1..20: note = Description of Artificial Sequence: Synthetic oligonucleotide
  misc_feature 1..20: note = Target: SCN10A; (-) strand; PAM type: NRG; PAM sequence: TGG
  source 1..20: mol_type = other DNA
agggcattcttgtcttgtgc

SEQ ID NO: 25065 - DNA, 20 bp, synthetic construct
  misc_feature 1..20: note = Description of Artificial Sequence: Synthetic oligonucleotide
  misc_feature 1..20: note = Target: SCN10A; (-) strand; PAM type: NRG; PAM sequence: GGG
  source 1..20: mol_type = other DNA
tgaataagagtggtgagata

SEQ ID NO: 25066 - DNA, 20 bp, synthetic construct
  misc_feature 1..20: note = Description of Artificial Sequence: Synthetic oligonucleotide
  misc_feature 1..20: note = Target: SCN10A; (-) strand; PAM type: NRG; PAM sequence: AGG
  source 1..20: mol_type = other DNA
ttgaataagagtggtgagat

SEQ ID NO: 25067 - DNA, 20 bp, synthetic construct
  misc_feature 1..20: note = Description of Artificial Sequence: Synthetic oligonucleotide
  misc_feature 1..20: note = Target: SCN10A; (-) strand; PAM type: NRG; PAM sequence: TAG
  source 1..20: mol_type = other DNA
gttgaataagagtggtgaga

SEQ ID NO: 25068 - DNA, 20 bp, synthetic construct
  misc_feature 1..20: note = Description of Artificial Sequence: Synthetic oligonucleotide
  misc_feature 1..20: note = Target: SCN10A; (-) strand; PAM type: NRG; PAM sequence: GAG
  source 1..20: mol_type = other DNA
ctatgttgaataagagtggt

SEQ ID NO: 25069 - DNA, 20 bp, synthetic construct
  misc_feature 1..20: note = Description of Artificial Sequence: Synthetic oligonucleotide
  misc_feature 1..20: note = Target: SCN10A; (-) strand; PAM type: NRG; PAM sequence: TGG
  source 1..20: mol_type = other DNA
aatactatgttgaataagag

SEQ ID NO: 25070 - DNA, 20 bp, synthetic construct
  misc_feature 1..20: note = Description of Artificial Sequence: Synthetic oligonucleotide
  misc_feature 1..20: note = Target: SCN10A; (-) strand; PAM type: NRG; PAM sequence: GAG
  source 1..20: mol_type = other DNA
tccaatactatgttgaataa

SEQ ID NO: 25071 - DNA, 20 bp, synthetic construct
  misc_feature 1..20: note = Description of Artificial Sequence: Synthetic oligonucleotide
  misc_feature 1..20: note = Target: SCN10A; (-) strand; PAM type: NRG; PAM sequence: AAG
  source 1..20: mol_type = other DNA
cttccaatactatgttgaat

SEQ ID NO: 25072 - DNA, 20 bp, synthetic construct
  misc_feature 1..20: note = Description of Artificial Sequence: Synthetic oligonucleotide
  misc_feature 1..20: note = Target: SCN10A; (-) strand; PAM type: NRG; PAM sequence: CAG
  source 1..20: mol_type = other DNA
tcttgcctgatcgccctggc

SEQ ID NO: 25073 - DNA, 20 bp, synthetic construct
  misc_feature 1..20: note = Description of Artificial Sequence: Synthetic oligonucleotide
  misc_feature 1..20: note = Target: SCN10A; (-) strand; PAM type: NRG; PAM sequence: TGG
  source 1..20: mol_type = other DNA
tttctcttgcctgatcgccc

SEQ ID NO: 25074 - DNA, 20 bp, synthetic construct
  misc_feature 1..20: note = Description of Artificial Sequence: Synthetic oligonucleotide
  misc_feature 1..20: note = Target: SCN10A; (-) strand; PAM type: NRG; PAM sequence: GAG
  source 1..20: mol_type = other DNA
agtcatgtcatctgcaaaca

SEQ ID NO: 25075 - DNA, 20 bp, synthetic construct
  misc_feature 1..20: note = Description of Artificial Sequence: Synthetic oligonucleotide
  misc_feature 1..20: note = Target: SCN10A; (-) strand; PAM type: NRG; PAM sequence: CAG
  source 1..20: mol_type = other DNA
acagtcatgtcatctgcaaa

SEQ ID NO: 25076 - DNA, 20 bp, synthetic construct
  misc_feature 1..20: note = Description of Artificial Sequence: Synthetic oligonucleotide
  misc_feature 1..20: note = Target: SCN10A; (-) strand; PAM type: NRG; PAM sequence: CAG
  source 1..20: mol_type = other DNA
gatggggttttctaaatata

SEQ ID NO: 25077 - DNA, 20 bp, synthetic construct
  misc_feature 1..20: note = Description of Artificial Sequence: Synthetic oligonucleotide
  misc_feature 1..20: note = Target: SCN10A; (-) strand; PAM type: NRG; PAM sequence: GGG
  source 1..20: mol_type = other DNA
gattttgggctgagatgatg

SEQ ID NO: 25078 - DNA, 20 bp, synthetic construct
  misc_feature 1..20: note = Description of Artificial Sequence: Synthetic oligonucleotide
  misc_feature 1..20: note = Target: SCN10A; (-) strand; PAM type: NRG; PAM sequence: GGG
  source 1..20: mol_type = other DNA
agattttgggctgagatgat

SEQ ID NO: 25079 - DNA, 20 bp, synthetic construct
  misc_feature 1..20: note = Description of Artificial Sequence: Synthetic oligonucleotide
  misc_feature 1..20: note = Target: SCN10A; (-) strand; PAM type: NRG; PAM sequence: TGG
  source 1..20: mol_type = other DNA
gagattttgggctgagatga

SEQ ID NO: 25080 - DNA, 20 bp, synthetic construct
  misc_feature 1..20: note = Description of Artificial Sequence: Synthetic oligonucleotide
  misc_feature 1..20: note = Target: SCN10A; (-) strand; PAM type: NRG; PAM sequence: GAG
  source 1..20: mol_type = other DNA
gcttaaggagattttgggct

SEQ ID NO: 25081 - DNA, 20 bp, synthetic construct
  misc_feature 1..20: note = Description of Artificial Sequence: Synthetic oligonucleotide
  misc_feature 1..20: note = Target: SCN10A; (-) strand; PAM type: NRG; PAM sequence: GGG
  source 1..20: mol_type = other DNA
tatcagcttaaggagatttt

SEQ ID NO: 25082 - DNA, 20 bp, synthetic construct
  misc_feature 1..20: note = Description of Artificial Sequence: Synthetic oligonucleotide
  misc_feature 1..20: note = Target: SCN10A; (-) strand; PAM type: NRG; PAM sequence: TGG
  source 1..20: mol_type = other DNA
ttatcagcttaaggagattt

SEQ ID NO: 25083 - DNA, 20 bp, synthetic construct
  misc_feature 1..20: note = Description of Artificial Sequence: Synthetic oligonucleotide
  misc_feature 1..20: note = Target: SCN10A; (-) strand; PAM type: NRG; PAM sequence: GAG
  source 1..20: mol_type = other DNA
aagttgcttatcagcttaag

SEQ ID NO: 25084 - DNA, 20 bp, synthetic construct
  misc_feature 1..20: note = Description of Artificial Sequence: Synthetic oligonucleotide
  misc_feature 1..20: note = Target: SCN10A; (-) strand; PAM type: NRG; PAM sequence: AGG
  source 1..20: mol_type = other DNA
tgaagttgcttatcagctta

SEQ ID NO: 25085 - DNA, 20 bp, synthetic construct
  misc_feature 1..20: note = Description of Artificial Sequence: Synthetic oligonucleotide
  misc_feature 1..20: note = Target: SCN10A; (-) strand; PAM type: NRG; PAM sequence: AAG
  source 1..20: mol_type = other DNA
ctgaagttgcttatcagctt

SEQ ID NO: 25086 - DNA, 20 bp, synthetic construct
  misc_feature 1..20: note = Description of Artificial Sequence: Synthetic oligonucleotide
  misc_feature 1..20: note = Target: SCN10A; (-) strand; PAM type: NRG; PAM sequence: CAG
  source 1..20: mol_type = other DNA
actttgctgaagttgcttat

SEQ ID NO: 25087 - DNA, 20 bp, synthetic construct
  misc_feature 1..20: note = Description of Artificial Sequence: Synthetic oligonucleotide
  misc_feature 1..20: note = Target: SCN10A; (-) strand; PAM type: NRG; PAM sequence: AAG
  source 1..20: mol_type = other DNA
tgtatcctgagactttgctg

SEQ ID NO: 25088 - DNA, 20 bp, synthetic construct
  misc_feature 1..20: note = Description of Artificial Sequence: Synthetic oligonucleotide
  misc_feature 1..20: note = Target: SCN10A; (-) strand; PAM type: NRG; PAM sequence: GAG
  source 1..20: mol_type = other DNA
gcacattgattttgtatcct

SEQ ID NO: 25089 - DNA, 20 bp, synthetic construct
  misc_feature 1..20: note = Description of Artificial Sequence: Synthetic oligonucleotide
  misc_feature 1..20: note = Target: SCN10A; (-) strand; PAM type: NRG; PAM sequence: GGG
  source 1..20: mol_type = other DNA
tttgtctgttattggtgtat

SEQ ID NO: 25090 - DNA, 20 bp, synthetic construct
  misc_feature 1..20: note = Description of Artificial Sequence: Synthetic oligonucleotide
  misc_feature 1..20: note = Target: SCN10A; (-) strand; PAM type: NRG; PAM sequence: TGG
  source 1..20: mol_type = other DNA
gtttgtctgttattggtgta

SEQ ID NO: 25091 - DNA, 20 bp, synthetic construct
  misc_feature 1..20: note = Description of Artificial Sequence: Synthetic oligonucleotide
  misc_feature 1..20: note = Target: SCN10A; (-) strand; PAM type: NRG; PAM sequence: TGG
  source 1..20: mol_type = other DNA
gctctcggtttgtctgttat

SEQ ID NO: 25092 - DNA, 20 bp, synthetic construct
  misc_feature 1..20: note = Description of Artificial Sequence: Synthetic oligonucleotide
  misc_feature 1..20: note = Target: SCN10A; (-) strand; PAM type: NRG; PAM sequence: CGG
  source 1..20: mol_type = other DNA
ttcactcatgatttggctct

SEQ ID NO: 25093 - DNA, 20 bp, synthetic construct
  misc_feature 1..20: note = Description of Artificial Sequence: Synthetic oligonucleotide
  misc_feature 1..20: note = Target: SCN10A; (-) strand; PAM type: NRG; PAM sequence: TGG
  source 1..20: mol_type = other DNA
atgggagttcactcatgatt

SEQ ID NO: 25094 - DNA, 20 bp, synthetic construct
  misc_feature 1..20: note = Description of Artificial Sequence: Synthetic oligonucleotide
  misc_feature 1..20: note = Target: SCN10A; (-) strand; PAM type: NRG; PAM sequence: GAG
  source 1..20: mol_type = other DNA
tttgttgcaattgtgaatgg

SEQ ID NO: 25095 - DNA, 20 bp, synthetic construct
  misc_feature 1..20: note = Description of Artificial Sequence: Synthetic oligonucleotide
  misc_feature 1..20: note = Target: SCN10A; (-) strand; PAM type: NRG; PAM sequence: GGG
  source 1..20: mol_type = other DNA
tctttgttgcaattgtgaat

SEQ ID NO: 25096 - DNA, 20 bp, synthetic construct
  misc_feature 1..20: note = Description of Artificial Sequence: Synthetic oligonucleotide
  misc_feature 1..20: note = Target: SCN10A; (-) strand; PAM type: NRG; PAM sequence: TGG
  source 1..20: mol_type = other DNA
ctctttgttgcaattgtgaa

SEQ ID NO: 25097 - DNA, 20 bp, synthetic construct
  misc_feature 1..20: note = Description of Artificial Sequence: Synthetic oligonucleotide
  misc_feature 1..20: note = Target: SCN10A; (-) strand; PAM type: NRG; PAM sequence: TAG
  source 1..20: mol_type = other DNA
tcccttgtaagttgtatttc

SEQ ID NO: 25098 - DNA, 20 bp, synthetic construct
  misc_feature 1..20: note = Description of Artificial Sequence: Synthetic oligonucleotide
  misc_feature 1..20: note = Target: SCN10A; (-) strand; PAM type: NRG; PAM sequence: AAG
  source 1..20: mol_type = other DNA
aggtccttcacatcccttgt

SEQ ID NO: 25099 - DNA, 20 bp, synthetic construct
  misc_feature 1..20: note = Description of Artificial Sequence: Synthetic oligonucleotide
  misc_feature 1..20: note = Target: SCN10A; (-) strand; PAM type: NRG; PAM sequence: AGG
  source 1..20: mol_type = other DNA
atttttagttctccttgaag

SEQ ID NO: 25100 - DNA, 20 bp, synthetic construct
  misc_feature 1..20: note = Description of Artificial Sequence: Synthetic oligonucleotide
  misc_feature 1..20: note = Target: SCN10A; (-) strand; PAM type: NRG; PAM sequence: GAG
  source 1..20: mol_type = other DNA
gatttttagttctccttgaa

SEQ ID NO: 25101 - DNA, 20 bp, synthetic construct
  misc_feature 1..20: note = Description of Artificial Sequence: Synthetic oligonucleotide
  misc_feature 1..20: note = Target: SCN10A; (-) strand; PAM type: NRG; PAM sequence: AAG
  source 1..20: mol_type = other DNA
gtgatttttagttctccttg

SEQ ID NO: 25102 - DNA, 20 bp, synthetic construct
  misc_feature 1..20: note = Description of Artificial Sequence: Synthetic oligonucleotide
  misc_feature 1..20: note = Target: SCN10A; (-) strand; PAM type: NRG; PAM sequence: TAG
  source 1..20: mol_type = other DNA
tttccttgagcagtgatttt

SEQ ID NO: 25103 - DNA, 20 bp, synthetic construct
  misc_feature 1..20: note = Description of Artificial Sequence: Synthetic oligonucleotide
  misc_feature 1..20: note = Target: SCN10A; (-) strand; PAM type: NRG; PAM sequence: CAG
  source 1..20: mol_type = other DNA
tcctctcttatttccttgag

SEQ ID NO: 25104 - DNA, 20 bp, synthetic construct
  misc_feature 1..20: note = Description of Artificial Sequence: Synthetic oligonucleotide
  misc_feature 1..20: note = Target: SCN10A; (-) strand; PAM type: NRG; PAM sequence: GAG
  source 1..20: mol_type = other DNA
gtgtcctctcttatttcctt

SEQ ID NO: 25105 - DNA, 20 bp, synthetic construct
  misc_feature 1..20: note = Description of Artificial Sequence: Synthetic oligonucleotide
  misc_feature 1..20: note = Target: SCN10A; (-) strand; PAM type: NRG; PAM sequence: TGG
  source 1..20: mol_type = other DNA
atttttcctatccatgagca

SEQ ID NO: 25106 - DNA, 20 bp, synthetic construct
  misc_feature 1..20: note = Description of Artificial Sequence: Synthetic oligonucleotide
  misc_feature 1..20: note = Target: SCN10A; (-) strand; PAM type: NRG; PAM sequence: GAG
  source 1..20: mol_type = other DNA
tattgatttttcctatccat

SEQ ID NO: 25107 - DNA, 20 bp, synthetic construct
  misc_feature 1..20: note = Description of Artificial Sequence: Synthetic oligonucleotide
  misc_feature 1..20: note = Target: SCN10A; (-) strand; PAM type: NRG; PAM sequence: TGG
  source 1..20: mol_type = other DNA
ataaattactttgggcagta

SEQ ID NO: 25108 - DNA, 20 bp, synthetic construct
  misc_feature 1..20: note = Description of Artificial Sequence: Synthetic oligonucleotide
  misc_feature 1..20: note = Target: SCN10A; (-) strand; PAM type: NRG; PAM sequence: CAG
  source 1..20: mol_type = other DNA
aatctataaattactttggg

SEQ ID NO: 25109 - DNA, 20 bp, synthetic construct
  misc_feature 1..20: note = Description of Artificial Sequence: Synthetic oligonucleotide
  misc_feature 1..20: note = Target: SCN10A; (-) strand; PAM type: NRG; PAM sequence: GGG
  source 1..20: mol_type = other DNA
ttgaatctataaattacttt

SEQ ID NO: 25110 - DNA, 20 bp, synthetic construct
  misc_feature 1..20: note = Description of Artificial Sequence: Synthetic oligonucleotide
  misc_feature 1..20: note = Target: SCN10A; (-) strand; PAM type: NRG; PAM sequence: TGG
  source 1..20: mol_type = other DNA
attgaatctataaattactt

SEQ ID NO: 25111 - DNA, 20 bp, synthetic construct
  misc_feature 1..20: note = Description of Artificial Sequence: Synthetic oligonucleotide
  misc_feature 1..20: note = Target: SCN10A; (-) strand; PAM type: NRG; PAM sequence: GGG
  source 1..20: mol_type = other DNA
aagtcagtggtagcttgatg

SEQ ID NO: 25112 - DNA, 20 bp, synthetic construct
  misc_feature 1..20: note = Description of Artificial Sequence: Synthetic oligonucleotide
  misc_feature 1..20: note = Target: SCN10A; (-) strand; PAM type: NRG; PAM sequence: GGG
  source 1..20: mol_type = other DNA
aaagtcagtggtagcttgat

SEQ ID NO: 25113 - DNA, 20 bp, synthetic construct
  misc_feature 1..20: note = Description of Artificial Sequence: Synthetic oligonucleotide
  misc_feature 1..20: note = Target: SCN10A; (-) strand; PAM type: NRG; PAM sequence: TGG
  source 1..20: mol_type = other DNA
gaaagtcagtggtagcttga

SEQ ID NO: 25114 - DNA, 20 bp, synthetic construct
  misc_feature 1..20: note = Description of Artificial Sequence: Synthetic oligonucleotide
  misc_feature 1..20: note = Target: SCN10A; (-) strand; PAM type: NRG; PAM sequence: TAG
  source 1..20: mol_type = other DNA
tctgtgaagaaagtcagtgg

SEQ ID NO: 25115 - DNA, 20 bp, synthetic construct
  misc_feature 1..20: note = Description of Artificial Sequence: Synthetic oligonucleotide
  misc_feature 1..20: note = Target: SCN10A; (-) strand; PAM type: NRG; PAM sequence: TGG
  source 1..20: mol_type = other DNA
aattctgtgaagaaagtcag

SEQ ID NO: 25116 - DNA, 20 bp, synthetic construct
  misc_feature 1..20: note = Description of Artificial Sequence: Synthetic oligonucleotide
  misc_feature 1..20: note = Target: SCN10A; (-) strand; PAM type: NRG; PAM sequence: CAG
  source 1..20: mol_type = other DNA
tctaattctgtgaagaaagt

SEQ ID NO: 25117 - DNA, 20 bp, synthetic construct
  misc_feature 1..20: note = Description of Artificial Sequence: Synthetic oligonucleotide
  misc_feature 1..20: note = Target: SCN10A; (-) strand; PAM type: NRG; PAM sequence: AAG
  source 1..20: mol_type = other DNA
tttttctaattctgtgaaga

SEQ ID NO: 25118 - DNA, 20 bp, synthetic construct
  misc_feature 1..20: note = Description of Artificial Sequence: Synthetic oligonucleotide
  misc_feature 1..20: note = Target: SCN10A; (-) strand; PAM type: NRG; PAM sequence: AAG
  source 1..20: mol_type = other DNA
tagatttttctaattctgtg

SEQ ID NO: 25119 - DNA, 20 bp, synthetic construct
  misc_feature 1..20: note = Description of Artificial Sequence: Synthetic oligonucleotide
  misc_feature 1..20: note = Target: SCN10A; (-) strand; PAM type: NRG; PAM sequence: TAG
  source 1..20: mol_type = other DNA
gttccacatgaaatttaaag

SEQ ID NO: 25120 - DNA, 20 bp, synthetic construct
  misc_feature 1..20: note = Description of Artificial Sequence: Synthetic oligonucleotide
  misc_feature 1..20: note = Target: SCN10A; (-) strand; PAM type: NRG; PAM sequence: AAG
  source 1..20: mol_type = other DNA
tttgttccacatgaaattta

SEQ ID NO: 25121 - DNA, 20 bp, synthetic construct
  misc_feature 1..20: note = Description of Artificial Sequence: Synthetic oligonucleotide
  misc_feature 1..20: note = Target: SCN10A; (-) strand; PAM type: NRG; PAM sequence: GGG
  source 1..20: mol_type = other DNA
tagaattgtcttgactatgc

SEQ ID NO: 25122 - DNA, 20 bp, synthetic construct
  misc_feature 1..20: note = Description of Artificial Sequence: Synthetic oligonucleotide
  misc_feature 1..20: note = Target: SCN10A; (-) strand; PAM type: NRG; PAM sequence: CGG
  source 1..20: mol_type = other DNA
ttagaattgtcttgactatg

SEQ ID NO: 25123 - DNA, 20 bp, synthetic construct
  misc_feature 1..20: note = Description of Artificial Sequence: Synthetic oligonucleotide
  misc_feature 1..20: note = Target: SCN10A; (-) strand; PAM type: NRG; PAM sequence: TAG
  source 1..20: mol_type = other DNA
ccaactttcttctttttgct

SEQ ID NO: 25124 - DNA, 20 bp, synthetic construct
  misc_feature 1..20: note = Description of Artificial Sequence: Synthetic oligonucleotide
  misc_feature 1..20: note = Target: SCN10A; (-) strand; PAM type: NRG; PAM sequence: TAG
  source 1..20: mol_type = other DNA
tagtatagcttgaagtcagg

SEQ ID NO: 25125 - DNA, 20 bp, synthetic construct
  misc_feature 1..20: note = Description of Artificial Sequence: Synthetic oligonucleotide
  misc_feature 1..20: note = Target: SCN10A; (-) strand; PAM type: NRG; PAM sequence: AGG
  source 1..20: mol_type = other DNA
ttgtagtatagcttgaagtc

SEQ ID NO: 25126 - DNA, 20 bp, synthetic construct
  misc_feature 1..20: note = Description of Artificial Sequence: Synthetic oligonucleotide
  misc_feature 1..20: note = Target: SCN10A; (-) strand; PAM type: NRG; PAM sequence: CAG
  source 1..20: mol_type = other DNA
tttgtagtatagcttgaagt

SEQ ID NO: 25127 - DNA, 20 bp, synthetic construct
  misc_feature 1..20: note = Description of Artificial Sequence: Synthetic oligonucleotide
  misc_feature 1..20: note = Target: SCN10A; (-) strand; PAM type: NRG; PAM sequence: AAG
  source 1..20: mol_type = other DNA
tagctttgtagtatagcttg

SEQ ID NO: 25128 - DNA, 20 bp, synthetic construct
  misc_feature 1..20: note = Description of Artificial Sequence: Synthetic oligonucleotide
  misc_feature 1..20: note = Target: SCN10A; (-) strand; PAM type: NRG; PAM sequence: TAG
  source 1..20: mol_type = other DNA
gttactgtagctttgtagta

SEQ ID NO: 25129 - DNA, 20 bp, synthetic construct
  misc_feature 1..20: note = Description of Artificial Sequence: Synthetic oligonucleotide
  misc_feature 1..20: note = Target: SCN10A; (-) strand; PAM type: NRG; PAM sequence: TAG
  source 1..20: mol_type = other DNA
ttttggttactgtagctttg

SEQ ID NO: 25130 - DNA, 20 bp, synthetic construct
  misc_feature 1..20: note = Description of Artificial Sequence: Synthetic oligonucleotide
  misc_feature 1..20: note = Target: SCN10A; (-) strand; PAM type: NRG; PAM sequence: TAG
  source 1..20: mol_type = other DNA
cctcgctgttttggttactg

SEQ ID NO: 25131 - DNA, 20 bp, synthetic construct
  misc_feature 1..20: note = Description of Artificial Sequence: Synthetic oligonucleotide
  misc_feature 1..20: note = Target: SCN10A; (-) strand; PAM type: NRG; PAM sequence: TGG
  source 1..20: mol_type = other DNA
gtaccagtacctcgctgttt

SEQ ID NO: 25132 - DNA, 20 bp, synthetic construct
  misc_feature 1..20: note = Description of Artificial Sequence: Synthetic oligonucleotide
  misc_feature 1..20: note = Target: SCN10A; (-) strand; PAM type: NRG; PAM sequence: CAG
  source 1..20: mol_type = other DNA
ctagatatctgttttggtac

SEQ ID NO: 25133 - DNA, 20 bp, synthetic construct
  misc_feature 1..20: note = Description of Artificial Sequence: Synthetic oligonucleotide
  misc_feature 1..20: note = Target: SCN10A; (-) strand; PAM type: NRG; PAM sequence: TGG
  source 1..20: mol_type = other DNA
attggtctagatatctgttt

SEQ ID NO: 25134 - DNA, 20 bp, synthetic construct
  misc_feature 1..20: note = Description of Artificial Sequence: Synthetic oligonucleotide
  misc_feature 1..20: note = Target: SCN10A; (-) strand; PAM type: NRG; PAM sequence: TAG
  source 1..20: mol_type = other DNA
tctgttctgttccattggtc

SEQ ID NO: 25135 - DNA, 20 bp, synthetic construct
  misc_feature 1..20: note = Description of Artificial Sequence: Synthetic oligonucleotide
  misc_feature 1..20: note = Target: SCN10A; (-) strand; PAM type: NRG; PAM sequence: TGG
  source 1..20: mol_type = other DNA
aggcctctgttctgttccat

SEQ ID NO: 25136 - DNA, 20 bp, synthetic construct
  misc_feature 1..20: note = Description of Artificial Sequence: Synthetic oligonucleotide
  misc_feature 1..20: note = Target: SCN10A; (-) strand; PAM type: NRG; PAM sequence: AGG
  source 1..20: mol_type = other DNA
gatatgcggtgttacttctg

SEQ ID NO: 25137 - DNA, 20 bp, synthetic construct
  misc_feature 1..20: note = Description of Artificial Sequence: Synthetic oligonucleotide
  misc_feature 1..20: note = Target: SCN10A; (-) strand; PAM type: NRG; PAM sequence: GAG
  source 1..20: mol_type = other DNA
agatatgcggtgttacttct

SEQ ID NO: 25138 - DNA, 20 bp, synthetic construct
  misc_feature 1..20: note = Description of Artificial Sequence: Synthetic oligonucleotide
  misc_feature 1..20: note = Target: SCN10A; (-) strand; PAM type: NRG; PAM sequence: CGG
  source 1..20: mol_type = other DNA
atcagatggttgtagatatg

SEQ ID NO: 25139 - DNA, 20 bp, synthetic construct
  misc_feature 1..20: note = Description of Artificial Sequence: Synthetic oligonucleotide
  misc_feature 1..20: note = Target: SCN10A; (-) strand; PAM type: NRG; PAM sequence: TAG
  source 1..20: mol_type = other DNA
tgtcaaagatcagatggttg

SEQ ID NO: 25140 - DNA, 20 bp, synthetic construct
  misc_feature 1..20: note = Description of Artificial Sequence: Synthetic oligonucleotide
  misc_feature 1..20: note = Target: SCN10A; (-) strand; PAM type: NRG; PAM sequence: TGG
  source 1..20: mol_type = other DNA
caagtttgtcaaagatcaga

SEQ ID NO: 25141 - DNA, 20 bp, synthetic construct
  misc_feature 1..20: note = Description of Artificial Sequence: Synthetic oligonucleotide
  misc_feature 1..20: note = Target: SCN10A; (-) strand; PAM type: NRG; PAM sequence: CAG
  source 1..20: mol_type = other DNA
ttgtcaagtttgtcaaagat

SEQ ID NO: 25142 - DNA, 20 bp, synthetic construct
  misc_feature 1..20: note = Description of Artificial Sequence: Synthetic oligonucleotide
  misc_feature 1..20: note = Target: SCN10A; (-) strand; PAM type: NRG; PAM sequence: AAG
  source 1..20: mol_type = other DNA
tgcttttgtcaagtttgtca

SEQ ID NO: 25143 - DNA, 20 bp, synthetic construct
  misc_feature 1..20: note = Description of Artificial Sequence: Synthetic oligonucleotide
  misc_feature 1..20: note = Target: SCN10A; (-) strand; PAM type: NRG; PAM sequence: AAG
  source 1..20: mol_type = other DNA
ccccattgcttgcttttgtc

SEQ ID NO: 25144 - DNA, 20 bp, synthetic construct
  misc_feature 1..20: note = Description of Artificial Sequence: Synthetic oligonucleotide
  misc_feature 1..20: note = Target: SCN10A; (-) strand; PAM type: NRG; PAM sequence: GGG
  source 1..20: mol_type = other DNA
cccacaccatttattaaata

SEQ ID NO: 25145 - DNA, 20 bp, synthetic construct
  misc_feature 1..20: note = Description of Artificial Sequence: Synthetic oligonucleotide
  misc_feature 1..20: note = Target: SCN10A; (-) strand; PAM type: NRG; PAM sequence: AGG
  source 1..20: mol_type = other DNA
ccccacaccatttattaaat

SEQ ID NO: 25146 - DNA, 20 bp, synthetic construct
  misc_feature 1..20: note = Description of Artificial Sequence: Synthetic oligonucleotide
  misc_feature 1..20: note = Target: SCN10A; (-) strand; PAM type: NRG; PAM sequence: TAG
  source 1..20: mol_type = other DNA
tccccacaccatttattaaa

SEQ ID NO: 25147 - DNA, 20 bp, synthetic construct
  misc_feature 1..20: note = Description of Artificial Sequence: Synthetic oligonucleotide
  misc_feature 1..20: note = Target: SCN10A; (-) strand; PAM type: NRG; PAM sequence: CAG
  source 1..20: mol_type = other DNA
attttctgcctaaggctagc

SEQ ID NO: 25148 - DNA, 20 bp, synthetic construct
  misc_feature 1..20: note = Description of Artificial Sequence: Synthetic oligonucleotide
  misc_feature 1..20: note = Target: SCN10A; (-) strand; PAM type: NRG; PAM sequence: TAG
  source 1..20: mol_type = other DNA
ttcaattttctgcctaaggc

SEQ ID NO: 25149 - DNA, 20 bp, synthetic construct
  misc_feature 1..20: note = Description of Artificial Sequence: Synthetic oligonucleotide
  misc_feature 1..20: note = Target: SCN10A; (-) strand; PAM type: NRG; PAM sequence: AGG
  source 1..20: mol_type = other DNA
tagtttcaattttctgccta

SEQ ID NO: 25150 - DNA, 20 bp, synthetic construct
  misc_feature 1..20: note = Description of Artificial Sequence: Synthetic oligonucleotide
  misc_feature 1..20: note = Target: SCN10A; (-) strand; PAM type: NRG; PAM sequence: AAG
  source 1..20: mol_type = other DNA
ctagtttcaattttctgcct

SEQ ID NO: 25151 - DNA, 20 bp, synthetic construct
  misc_feature 1..20: note = Description of Artificial Sequence: Synthetic oligonucleotide
  misc_feature 1..20: note = Target: SCN10A; (-) strand; PAM type: NRG; PAM sequence: TAG
  source 1..20: mol_type = other DNA
taaggtataaggaagggatc

SEQ ID NO: 25152 - DNA, 20 bp, synthetic construct
  misc_feature 1..20: note = Description of Artificial Sequence: Synthetic oligonucleotide
  misc_feature 1..20: note = Target: SCN10A; (-) strand; PAM type: NRG; PAM sequence: GGG
  source 1..20: mol_type = other DNA
tttgtgtaaggtataaggaa

SEQ ID NO: 25153 - DNA, 20 bp, synthetic construct
  misc_feature 1..20: note = Description of Artificial Sequence: Synthetic oligonucleotide
  misc_feature 1..20: note = Target: SCN10A; (-) strand; PAM type: NRG; PAM sequence: AGG
  source 1..20: mol_type = other DNA
ttttgtgtaaggtataagga

SEQ ID NO: 25154 - DNA, 20 bp, synthetic construct
  misc_feature 1..20: note = Description of Artificial Sequence: Synthetic oligonucleotide
  misc_feature 1..20: note = Target: SCN10A; (-) strand; PAM type: NRG; PAM sequence: AAG
  source 1..20: mol_type = other DNA
tttttgtgtaaggtataagg

SEQ ID NO: 25155 - DNA, 20 bp, synthetic construct
  misc_feature 1..20: note = Description of Artificial Sequence: Synthetic oligonucleotide
  misc_feature 1..20: note = Target: SCN10A; (-) strand; PAM type: NRG; PAM sequence: AGG
  source 1..20: mol_type = other DNA
taatttttgtgtaaggtata

SEQ ID NO: 25156 - DNA, 20 bp, synthetic construct
  misc_feature 1..20: note = Description of Artificial Sequence: Synthetic oligonucleotide
  misc_feature 1..20: note = Target: SCN10A; (-) strand; PAM type: NRG; PAM sequence: AAG
  source 1..20: mol_type = other DNA
ttaatttttgtgtaaggtat

SEQ ID NO: 25157 - DNA, 20 bp, synthetic construct
  misc_feature 1..20: note = Description of Artificial Sequence: Synthetic oligonucleotide
  misc_feature 1..20: note = Target: SCN10A; (-) strand; PAM type: NRG; PAM sequence: AGG
  source 1..20: mol_type = other DNA
cttgagttaatttttgtgta

SEQ ID NO: 25158 - DNA, 20 bp, synthetic construct
  misc_feature 1..20: note = Description of Artificial Sequence: Synthetic oligonucleotide
  misc_feature 1..20: note = Target: SCN10A; (-) strand; PAM type: NRG; PAM sequence: AAG
  source 1..20: mol_type = other DNA
tcttgagttaatttttgtgt

SEQ ID NO: 25159 - DNA, 20 bp, synthetic construct
  misc_feature 1..20: note = Description of Artificial Sequence: Synthetic oligonucleotide
  misc_feature 1..20: note = Target: SCN10A; (-) strand; PAM type: NRG; PAM sequence: GAG
  source 1..20: mol_type = other DNA
ttaagtctttaatctatctt

SEQ ID NO: 25160 - DNA, 20 bp, synthetic construct
  misc_feature 1..20: note = Description of Artificial Sequence: Synthetic oligonucleotide
  misc_feature 1..20: note = Target: SCN10A; (-) strand; PAM type: NRG; PAM sequence: AAG
  source 1..20: mol_type = other DNA
tggttttaggtcttatgttt

SEQ ID NO: 25161 - DNA, 20 bp, synthetic construct
  misc_feature 1..20: note = Description of Artificial Sequence: Synthetic oligonucleotide
  misc_feature 1..20: note = Target: SCN10A; (-) strand; PAM type: NRG; PAM sequence: AGG
  source 1..20: mol_type = other DNA
tctagggtttttatggtttt

SEQ ID NO: 25162 - DNA, 20 bp, synthetic construct
  misc_feature 1..20: note = Description of Artificial Sequence: Synthetic oligonucleotide
  misc_feature 1..20: note = Target: SCN10A; (-) strand; PAM type: NRG; PAM sequence: TAG
  source 1..20: mol_type = other DNA
ttctagggtttttatggttt

SEQ ID NO: 25163 - DNA, 20 bp, synthetic construct
  misc_feature 1..20: note = Description of Artificial Sequence: Synthetic oligonucleotide
  misc_feature 1..20: note = Target: SCN10A; (-) strand; PAM type: NRG; PAM sequence: TGG
  source 1..20: mol_type = other DNA
gttttcttctagggttttta

SEQ ID NO: 25164 - DNA, 20 bp, synthetic construct
  misc_feature 1..20: note = Description of Artificial Sequence: Synthetic oligonucleotide
  misc_feature 1..20: note = Target: SCN10A; (-) strand; PAM type: NRG; PAM sequence: GGG
  source 1..20: mol_type = other DNA
attgcctaggttttcttcta

SEQ ID NO: 25165 - DNA, 20 bp, synthetic construct
  misc_feature 1..20: note = Description of Artificial Sequence: Synthetic oligonucleotide
  misc_feature 1..20: note = Target: SCN10A; (-) strand; PAM type: NRG; PAM sequence: AGG
  source 1..20: mol_type = other DNA
tattgcctaggttttcttct

SEQ ID NO: 25166 - DNA, 20 bp, synthetic construct
  misc_feature 1..20: note = Description of Artificial Sequence: Synthetic oligonucleotide
  misc_feature 1..20: note = Target: SCN10A; (-) strand; PAM type: NRG; PAM sequence: TAG
  source 1..20: mol_type = other DNA
gtattgcctaggttttcttc

SEQ ID NO: 25167 - DNA, 20 bp, synthetic construct
  misc_feature 1..20: note = Description of Artificial Sequence: Synthetic oligonucleotide
  misc_feature 1..20: note = Target: SCN10A; (-) strand; PAM type: NRG; PAM sequence: AGG
  source 1..20: mol_type = other DNA
tgtcctgaagggtattgcct

SEQ ID NO: 25168 - DNA, 20 bp, synthetic construct
  misc_feature 1..20: note = Description of Artificial Sequence: Synthetic oligonucleotide
  misc_feature 1..20: note = Target: SCN10A; (-) strand; PAM type: NRG; PAM sequence: TAG
  source 1..20: mol_type = other DNA
atgtcctgaagggtattgcc

SEQ ID NO: 25169 - DNA, 20 bp, synthetic construct
  misc_feature 1..20: note = Description of Artificial Sequence: Synthetic oligonucleotide
  misc_feature 1..20: note = Target: SCN10A; (-) strand; PAM type: NRG; PAM sequence: GGG
  source 1..20: mol_type = other DNA
gcccatgcctatgtcctgaa

SEQ ID NO: 25170 - DNA, 20 bp, synthetic construct
  misc_feature 1..20: note = Description of Artificial Sequence: Synthetic oligonucleotide
  misc_feature 1..20: note = Target: SCN10A; (-) strand; PAM type: NRG; PAM sequence: AGG
  source 1..20: mol_type = other DNA
tgcccatgcctatgtcctga

SEQ ID NO: 25171 - DNA, 20 bp, synthetic construct
  misc_feature 1..20: note = Description of Artificial Sequence: Synthetic oligonucleotide
  misc_feature 1..20: note = Target: SCN10A; (-) strand; PAM type: NRG; PAM sequence: AAG
  source 1..20: mol_type = other DNA
ttgcccatgcctatgtcctg

SEQ ID NO: 25172 - DNA, 20 bp, synthetic construct
  misc_feature 1..20: note = Description of Artificial Sequence: Synthetic oligonucleotide
  misc_feature 1..20: note = Target: SCN10A; (-) strand; PAM type: NRG; PAM sequence: AAG
  source 1..20: mol_type = other DNA
cttttgatgtgttagtcata

SEQ ID NO: 25173 - DNA, 20 bp, synthetic construct
  misc_feature 1..20: note = Description of Artificial Sequence: Synthetic oligonucleotide
  misc_feature 1..20: note = Target: SCN10A; (-) strand; PAM type: NRG; PAM sequence: TAG
  source 1..20: mol_type = other DNA
caccattgcttttgatgtgt

SEQ ID NO: 25174 - DNA, 20 bp, synthetic construct
  misc_feature 1..20: note = Description of Artificial Sequence: Synthetic oligonucleotide
  misc_feature 1..20: note = Target: SCN10A; (-) strand; PAM type: NRG; PAM sequence: TGG
  source 1..20: mol_type = other DNA
tggattccatttgtcaattt

SEQ ID NO: 25175 - DNA, 20 bp, synthetic construct
  misc_feature 1..20: note = Description of Artificial Sequence: Synthetic oligonucleotide
  misc_feature 1..20: note = Target: SCN10A; (-) strand; PAM type: NRG; PAM sequence: TGG
  source 1..20: mol_type = other DNA
cagaagctctttagtttaat

SEQ ID NO: 25176 - DNA, 20 bp, synthetic construct
  misc_feature 1..20: note = Description of Artificial Sequence: Synthetic oligonucleotide
  misc_feature 1..20: note = Target: SCN10A; (-) strand; PAM type: NRG; PAM sequence: TAG
  source 1..20: mol_type = other DNA
tttgctgtgcagaagctctt

SEQ ID NO: 25177 - DNA, 20 bp, synthetic construct
  misc_feature 1..20: note = Description of Artificial Sequence: Synthetic oligonucleotide
  misc_feature 1..20: note = Target: SCN10A; (-) strand; PAM type: NRG; PAM sequence: AAG
  source 1..20: mol_type = other DNA
tagtttcttttgctgtgcag

SEQ ID NO: 25178 - DNA, 20 bp, synthetic construct
  misc_feature 1..20: note = Description of Artificial Sequence: Synthetic oligonucleotide
  misc_feature 1..20: note = Target: SCN10A; (-) strand; PAM type: NRG; PAM sequence: CAG
  source 1..20: mol_type = other DNA
tgatagtttcttttgctgtg

SEQ ID NO: 25179 - DNA, 20 bp, synthetic construct
  misc_feature 1..20: note = Description of Artificial Sequence: Synthetic oligonucleotide
  misc_feature 1..20: note = Target: SCN10A; (-) strand; PAM type: NRG; PAM sequence: TAG
  source 1..20: mol_type = other DNA
ttacctattcactctgatga

SEQ ID NO: 25180 - DNA, 20 bp, synthetic construct
  misc_feature 1..20: note = Description of Artificial Sequence: Synthetic oligonucleotide
  misc_feature 1..20: note = Target: SCN10A; (-) strand; PAM type: NRG; PAM sequence: AGG
  source 1..20: mol_type = other DNA
aaaattttctcccattctgt

SEQ ID NO: 25181 - DNA, 20 bp, synthetic construct
  misc_feature 1..20: note = Description of Artificial Sequence: Synthetic oligonucleotide
  misc_feature 1..20: note = Target: SCN10A; (-) strand; PAM type: NRG; PAM sequence: TAG
  source 1..20: mol_type = other DNA
aaaaattttctcccattctg

SEQ ID NO: 25182 - DNA, 20 bp, synthetic construct
  misc_feature 1..20: note = Description of Artificial Sequence: Synthetic oligonucleotide
  misc_feature 1..20: note = Target: SCN10A; (-) strand; PAM type: NRG; PAM sequence: TAG
  source 1..20: mol_type = other DNA
ttagccctttgtcagattga

SEQ ID NO: 25183 - DNA, 20 bp, synthetic construct
  misc_feature 1..20: note = Description of Artificial Sequence: Synthetic oligonucleotide
  misc_feature 1..20: note = Target: SCN10A; (-) strand; PAM type: NRG; PAM sequence: CAG
  source 1..20: mol_type = other DNA
tctggatattagccctttgt

SEQ ID NO: 25184 - DNA, 20 bp, synthetic construct
  misc_feature 1..20: note = Description of Artificial Sequence: Synthetic oligonucleotide
  misc_feature 1..20: note = Target: SCN10A; (-) strand; PAM type: NRG; PAM sequence: TAG
  source 1..20: mol_type = other DNA
tttttgtagattctggatat

SEQ ID NO: 25185 - DNA, 20 bp, synthetic construct
  misc_feature 1..20: note = Description of Artificial Sequence: Synthetic oligonucleotide
  misc_feature 1..20: note = Target: SCN10A; (-) strand; PAM type: NRG; PAM sequence: TGG
  source 1..20: mol_type = other DNA
tttaagttttttgtagattc

SEQ ID NO: 25186 - DNA, 20 bp, synthetic construct
  misc_feature 1..20: note = Description of Artificial Sequence: Synthetic oligonucleotide
  misc_feature 1..20: note = Target: SCN10A; (-) strand; PAM type: NRG; PAM sequence: TAG
  source 1..20: mol_type = other DNA
aaatttgtttaagttttttg

SEQ ID NO: 25187 - DNA, 20 bp, synthetic construct
  misc_feature 1..20: note = Description of Artificial Sequence: Synthetic oligonucleotide
  misc_feature 1..20: note = Target: SCN10A; (-) strand; PAM type: NRG; PAM sequence: AAG
  source 1..20: mol_type = other DNA
tttttcttgtaaatttgttt

SEQ ID NO: 25188 - DNA, 20 bp, synthetic construct
  misc_feature 1..20: note = Description of Artificial Sequence: Synthetic oligonucleotide
  misc_feature 1..20: note = Target: SCN10A; (-) strand; PAM type: NRG; PAM sequence: GAG
  source 1..20: mol_type = other DNA
cctttgcccactttttgatg

SEQ ID NO: 25189 - DNA, 20 bp, synthetic construct
  misc_feature 1..20: note = Description of Artificial Sequence: Synthetic oligonucleotide
  misc_feature 1..20: note = Target: SCN10A; (-) strand; PAM type: NRG; PAM sequence: TGG
  source 1..20: mol_type = other DNA
atcctttgcccactttttga

SEQ ID NO: 25190 - DNA, 20 bp, synthetic construct
  misc_feature 1..20: note = Description of Artificial Sequence: Synthetic oligonucleotide
  misc_feature 1..20: note = Target: SCN10A; (-) strand; PAM type: NRG; PAM sequence: AAG
  source 1..20: mol_type = other DNA
cataaatgtcttcttttgag

SEQ ID NO: 25191 - DNA, 20 bp, synthetic construct
  misc_feature 1..20: note = Description of Artificial Sequence: Synthetic oligonucleotide
  misc_feature 1..20: note = Target: SCN10A; (-) strand; PAM type: NRG; PAM sequence: GAG
  source 1..20: mol_type = other DNA
ctgcataaatgtcttctttt

SEQ ID NO: 25192 - DNA, 20 bp, synthetic construct
  misc_feature 1..20: note = Description of Artificial Sequence: Synthetic oligonucleotide
  misc_feature 1..20: note = Target: SCN10A; (-) strand; PAM type: NRG; PAM sequence: TGG
  source 1..20: mol_type = other DNA
gctttttatcatatgtttat

SEQ ID NO: 25193 - DNA, 20 bp, synthetic construct
  misc_feature 1..20: note = Description of Artificial Sequence: Synthetic oligonucleotide
  misc_feature 1..20: note = Target: SCN10A; (-) strand; PAM type: NRG; PAM sequence: GAG
  source 1..20: mol_type = other DNA
ctctaatgaccagtgatgat

SEQ ID NO: 25194 - DNA, 20 bp, synthetic construct
  misc_feature 1..20: note = Description of Artificial Sequence: Synthetic oligonucleotide
  misc_feature 1..20: note = Target: SCN10A; (-) strand; PAM type: NRG; PAM sequence: CAG
  source 1..20: mol_type = other DNA
actggcatttctctaatgac

SEQ ID NO: 25195 - DNA, 20 bp, synthetic construct
  misc_feature 1..20: note = Description of Artificial Sequence: Synthetic oligonucleotide
  misc_feature 1..20: note = Target: SCN10A; (-) strand; PAM type: NRG; PAM sequence: TGG
  source 1..20: mol_type = other DNA
catctcattgtggttttgac

SEQ ID NO: 25196 - DNA, 20 bp, synthetic construct
  misc_feature 1..20: note = Description of Artificial Sequence: Synthetic oligonucleotide
  misc_feature 1..20: note = Target: SCN10A; (-) strand; PAM type: NRG; PAM sequence: TGG
  source 1..20: mol_type = other DNA
tatgagactccatctcattg

SEQ ID NO: 25197 - DNA, 20 bp, synthetic construct
  misc_feature 1..20: note = Description of Artificial Sequence: Synthetic oligonucleotide
  misc_feature 1..20: note = Target: SCN10A; (-) strand; PAM type: NRG; PAM sequence: GAG
  source 1..20: mol_type = other DNA
atctccattctaactggtat

SEQ ID NO: 25198 - DNA, 20 bp, synthetic construct
  misc_feature 1..20: note = Description of Artificial Sequence: Synthetic oligonucleotide
  misc_feature 1..20: note = Target: SCN10A; (-) strand; PAM type: NRG; PAM sequence: TGG
  source 1..20: mol_type = other DNA
ttaatgatctccattctaac

SEQ ID NO: 25199 - DNA, 20 bp, synthetic construct
  misc_feature 1..20: note = Description of Artificial Sequence: Synthetic oligonucleotide
  misc_feature 1..20: note = Target: SCN10A; (-) strand; PAM type: NRG; PAM sequence: CAG
  source 1..20: mol_type = other DNA
ctatctctccacatcctctc

SEQ ID NO: 25200 - DNA, 20 bp, synthetic construct
  misc_feature 1..20: note = Description of Artificial Sequence: Synthetic oligonucleotide
  misc_feature 1..20: note = Target: SCN10A; (-) strand; PAM type: NRG; PAM sequence: AAG
  source 1..20: mol_type = other DNA
cactcccaccaacagtgtaa

SEQ ID NO: 25201 - DNA, 20 bp, synthetic construct
  misc_feature 1..20: note = Description of Artificial Sequence: Synthetic oligonucleotide
  misc_feature 1..20: note = Target: SCN10A; (-) strand; PAM type: NRG; PAM sequence: CAG
  source 1..20: mol_type = other DNA
ctaatttacactcccaccaa

SEQ ID NO: 25202 - DNA, 20 bp, synthetic construct
  misc_feature 1..20: note = Description of Artificial Sequence: Synthetic oligonucleotide
  misc_feature 1..20: note = Target: SCN10A; (-) strand; PAM type: NRG; PAM sequence: TGG
  source 1..20: mol_type = other DNA
caccacactgtcttccacaa

SEQ ID NO: 25203 - DNA, 20 bp, synthetic construct
  misc_feature 1..20: note = Description of Artificial Sequence: Synthetic oligonucleotide
  misc_feature 1..20: note = Target: SCN10A; (-) strand; PAM type: NRG; PAM sequence: AGG
  source 1..20: mol_type = other DNA
tttctggttctagatccttg

SEQ ID NO: 25204 - DNA, 20 bp, synthetic construct
  misc_feature 1..20: note = Description of Artificial Sequence: Synthetic oligonucleotide
  misc_feature 1..20: note = Target: SCN10A; (-) strand; PAM type: NRG; PAM sequence: GAG
  source 1..20: mol_type = other DNA
gtttctggttctagatcctt

SEQ ID NO: 25205 - DNA, 20 bp, synthetic construct
  misc_feature 1..20: note = Description of Artificial Sequence: Synthetic oligonucleotide
  misc_feature 1..20: note = Target: SCN10A; (-) strand; PAM type: NRG; PAM sequence: TAG
  source 1..20: mol_type = other DNA
tcaaatggtgtttctggttc

SEQ ID NO: 25206 - DNA, 20 bp, synthetic construct
  misc_feature 1..20: note = Description of Artificial Sequence: Synthetic oligonucleotide
  misc_feature 1..20: note = Target: SCN10A; (-) strand; PAM type: NRG; PAM sequence: TGG
  source 1..20: mol_type = other DNA
gctgggtcaaatggtgtttc

SEQ ID NO: 25207 - DNA, 20 bp, synthetic construct
  misc_feature 1..20: note = Description of Artificial Sequence: Synthetic oligonucleotide
  misc_feature 1..20: note = Target: SCN10A; (-) strand; PAM type: NRG; PAM sequence: TGG
  source 1..20: mol_type = other DNA
aatggaattgctgggtcaaa

SEQ ID NO: 25208 - DNA, 20 bp, synthetic construct
  misc_feature 1..20: note = Description of Artificial Sequence: Synthetic oligonucleotide
  misc_feature 1..20: note = Target: SCN10A; (-) strand; PAM type: NRG; PAM sequence: GGG
  source 1..20: mol_type = other DNA
tacccagtaatggaattgct

SEQ ID NO: 25209 - DNA, 20 bp, synthetic construct
  misc_feature 1..20: note = Description of Artificial Sequence: Synthetic oligonucleotide
  misc_feature 1..20: note = Target: SCN10A; (-) strand; PAM type: NRG; PAM sequence: TGG
  source 1..20: mol_type = other DNA
atacccagtaatggaattgc

SEQ ID NO: 25210 - DNA, 20 bp, synthetic construct
  misc_feature 1..20: note = Description of Artificial Sequence: Synthetic oligonucleotide
  misc_feature 1..20: note = Target: SCN10A; (-) strand; PAM type: NRG; PAM sequence: TGG
  source 1..20: mol_type = other DNA
tttgggtatatacccagtaa

SEQ ID NO: 25211 - DNA, 20 bp, synthetic construct
  misc_feature 1..20: note = Description of Artificial Sequence: Synthetic oligonucleotide
  misc_feature 1..20: note = Target: SCN10A; (-) strand; PAM type: NRG; PAM sequence: CAG
  source 1..20: mol_type = other DNA
taatcctttgggtatatacc

SEQ ID NO: 25212 - DNA, 20 bp, synthetic construct
  misc_feature 1..20: note = Description of Artificial Sequence: Synthetic oligonucleotide
  misc_feature 1..20: note = Target: SCN10A; (-) strand; PAM type: NRG; PAM sequence: GGG
  source 1..20: mol_type = other DNA
agaataatttataatccttt

SEQ ID NO: 25213 - DNA, 20 bp, synthetic construct
  misc_feature 1..20: note = Description of Artificial Sequence: Synthetic oligonucleotide
  misc_feature 1..20: note = Target: SCN10A; (-) strand; PAM type: NRG; PAM sequence: TGG
  source 1..20: mol_type = other DNA
tagaataatttataatcctt

SEQ ID NO: 25214 - DNA, 20 bp, synthetic construct
  misc_feature 1..20: note = Description of Artificial Sequence: Synthetic oligonucleotide
  misc_feature 1..20: note = Target: SCN10A; (-) strand; PAM type: NRG; PAM sequence: TAG
  source 1..20: mol_type = other DNA
gcatgcttgtatctttatag

SEQ ID NO: 25215 - DNA, 20 bp, synthetic construct
  misc_feature 1..20: note = Description of Artificial Sequence: Synthetic oligonucleotide
  misc_feature 1..20: note = Target: SCN10A; (-) strand; PAM type: NRG; PAM sequence: TAG
  source 1..20: mol_type = other DNA
tacgcatgcttgtatcttta

SEQ ID NO: 25216 - DNA, 20 bp, synthetic construct
  misc_feature 1..20: note = Description of Artificial Sequence: Synthetic oligonucleotide
  misc_feature 1..20: note = Target: SCN10A; (-) strand; PAM type: NRG; PAM sequence: TAG
  source 1..20: mol_type = other DNA
caagtctttgctattgtcaa

SEQ ID NO: 25217 - DNA, 20 bp, synthetic construct
  misc_feature 1..20: note = Description of Artificial Sequence: Synthetic oligonucleotide
  misc_feature 1..20: note = Target: SCN10A; (-) strand; PAM type: NRG; PAM sequence: AAG
  source 1..20: mol_type = other DNA
tgggcgtttgggttagttcc

SEQ ID NO: 25218 - DNA, 20 bp, synthetic construct
  misc_feature 1..20: note = Description of Artificial Sequence: Synthetic oligonucleotide
  misc_feature 1..20: note = Target: SCN10A; (-) strand; PAM type: NRG; PAM sequence: TAG
  source 1..20: mol_type = other DNA
tcactgatgggcgtttgggt

SEQ ID NO: 25219 - DNA, 20 bp, synthetic construct
  misc_feature 1..20: note = Description of Artificial Sequence: Synthetic oligonucleotide
  misc_feature 1..20: note = Target: SCN10A; (-) strand; PAM type: NRG; PAM sequence: GGG
  source 1..20: mol_type = other DNA
tctatcactgatgggcgttt

SEQ ID NO: 25220 - DNA, 20 bp, synthetic construct
  misc_feature 1..20: note = Description of Artificial Sequence: Synthetic oligonucleotide
  misc_feature 1..20: note = Target: SCN10A; (-) strand; PAM type: NRG; PAM sequence: TGG
  source 1..20: mol_type = other DNA
gtctatcactgatgggcgtt

SEQ ID NO: 25221 - DNA, 20 bp, synthetic construct
  misc_feature 1..20: note = Description of Artificial Sequence: Synthetic oligonucleotide
  misc_feature 1..20: note = Target: SCN10A; (-) strand; PAM type: NRG; PAM sequence: GGG
  source 1..20: mol_type = other DNA
ttatccagtctatcactgat

SEQ ID NO: 25222 - DNA, 20 bp, synthetic construct
  misc_feature 1..20: note = Description of Artificial Sequence: Synthetic oligonucleotide
  misc_feature 1..20: note = Target: SCN10A; (-) strand; PAM type: NRG; PAM sequence: TGG
  source 1..20: mol_type = other DNA
tttatccagtctatcactga

SEQ ID NO: 25223 - DNA, 20 bp, synthetic construct
  misc_feature 1..20: note = Description of Artificial Sequence: Synthetic oligonucleotide
  misc_feature 1..20: note = Target: SCN10A; (-) strand; PAM type: NRG; PAM sequence: CAG
  source 1..20: mol_type = other DNA
tgtgccatattttctttatc

SEQ ID NO: 25224 - DNA, 20 bp, synthetic construct
  misc_feature 1..20: note = Description of Artificial Sequence: Synthetic oligonucleotide
  misc_feature 1..20: note = Target: SCN10A; (-) strand; PAM type: NRG; PAM sequence: TGG
  source 1..20: mol_type = other DNA
tatggctgcatagtattcca

SEQ ID NO: 25225 - DNA, 20 bp, synthetic construct
  misc_feature 1..20: note = Description of Artificial Sequence: Synthetic oligonucleotide
  misc_feature 1..20: note = Target: SCN10A; (-) strand; PAM type: NRG; PAM sequence: TAG
  source 1..20: mol_type = other DNA
cacccttttttatggctgca

SEQ ID NO: 25226 - DNA, 20 bp, synthetic construct
  misc_feature 1..20: note = Description of Artificial Sequence: Synthetic oligonucleotide
  misc_feature 1..20: note = Target: SCN10A; (-) strand; PAM type: NRG; PAM sequence: TGG
  source 1..20: mol_type = other DNA
catgaactcaccctttttta

SEQ ID NO: 25227 - DNA, 20 bp, synthetic construct
  misc_feature 1..20: note = Description of Artificial Sequence: Synthetic oligonucleotide
  misc_feature 1..20: note = Target: SCN10A; (-) strand; PAM type: NRG; PAM sequence: AAG
  source 1..20: mol_type = other DNA
gcttcatccatgtccctgca

SEQ ID NO: 25228 - DNA, 20 bp, synthetic construct
  misc_feature 1..20: note = Description of Artificial Sequence: Synthetic oligonucleotide
  misc_feature 1..20: note = Target: SCN10A; (-) strand; PAM type: NRG; PAM sequence: CAG
  source 1..20: mol_type = other DNA
ttgctgagaatgatggtttc

SEQ ID NO: 25229 - DNA, 20 bp, synthetic construct
  misc_feature 1..20: note = Description of Artificial Sequence: Synthetic oligonucleotide
  misc_feature 1..20: note = Target: SCN10A; (-) strand; PAM type: NRG; PAM sequence: TGG
  source 1..20: mol_type = other DNA
tgtcagtttgctgagaatga

SEQ ID NO: 25230 - DNA, 20 bp, synthetic construct
  misc_feature 1..20: note = Description of Artificial Sequence: Synthetic oligonucleotide
  misc_feature 1..20: note = Target: SCN10A; (-) strand; PAM type: NRG; PAM sequence: GAG
  source 1..20: mol_type = other DNA
tgttcttatgtcagtttgct

SEQ ID NO: 25231 - DNA, 20 bp, synthetic construct
  misc_feature 1..20: note = Description of Artificial Sequence: Synthetic oligonucleotide
  misc_feature 1..20: note = Target: SCN10A; (-) strand; PAM type: NRG; PAM sequence: CAG
  source 1..20: mol_type = other DNA
ttggttttctgttcttatgt

SEQ ID NO: 25232 - DNA, 20 bp, synthetic construct
  misc_feature 1..20: note = Description of Artificial Sequence: Synthetic oligonucleotide
  misc_feature 1..20: note = Target: SCN10A; (-) strand; PAM type: NRG; PAM sequence: TGG
  source 1..20: mol_type = other DNA
gagtgagaacatgcggtgtt

SEQ ID NO: 25233 - DNA, 20 bp, synthetic construct
  misc_feature 1..20: note = Description of Artificial Sequence: Synthetic oligonucleotide
  misc_feature 1..20: note = Target: SCN10A; (-) strand; PAM type: NRG; PAM sequence: CGG
  source 1..20: mol_type = other DNA
cacctatgagtgagaacatg

SEQ ID NO: 25234 - DNA, 20 bp, synthetic construct
  misc_feature 1..20: note = Description of Artificial Sequence: Synthetic oligonucleotide
  misc_feature 1..20: note = Target: SCN10A; (-) strand; PAM type: NRG; PAM sequence: GAG
  source 1..20: mol_type = other DNA
ttcatctcccacctatgagt

SEQ ID NO: 25235 - DNA, 20 bp, synthetic construct
  misc_feature 1..20: note = Description of Artificial Sequence: Synthetic oligonucleotide
  misc_feature 1..20: note = Target: SCN10A; (-) strand; PAM type: NRG; PAM sequence: GAG
  source 1..20: mol_type = other DNA
attgttcatctcccacctat

SEQ ID NO: 25236 - DNA, 20 bp, synthetic construct
  misc_feature 1..20: note = Description of Artificial Sequence: Synthetic oligonucleotide
  misc_feature 1..20: note = Target: SCN10A; (-) strand; PAM type: NRG; PAM sequence: TGG
  source 1..20: mol_type = other DNA
cccaacccctcaacaggccc

SEQ ID NO: 25237 - DNA, 20 bp, synthetic construct
  misc_feature 1..20: note = Description of Artificial Sequence: Synthetic oligonucleotide
  misc_feature 1..20: note = Target: SCN10A; (-) strand; PAM type: NRG; PAM sequence: AGG
  source 1..20: mol_type = other DNA
ctagcccccaacccctcaac

SEQ ID NO: 25238 - DNA, 20 bp, synthetic construct
  misc_feature 1..20: note = Description of Artificial Sequence: Synthetic oligonucleotide
  misc_feature 1..20: note = Target: SCN10A; (-) strand; PAM type: NRG; PAM sequence: CAG
  source 1..20: mol_type = other DNA
cctagcccccaacccctcaa

SEQ ID NO: 25239 - DNA, 20 bp, synthetic construct
  misc_feature 1..20: note = Description of Artificial Sequence: Synthetic oligonucleotide
  misc_feature 1..20: note = Target: SCN10A; (-) strand; PAM type: NRG; PAM sequence: TAG
  source 1..20: mol_type = other DNA
tcctaatgctatccctcccc

SEQ ID NO: 25240 - DNA, 20 bp, synthetic construct
  misc_feature 1..20: note = Description of Artificial Sequence: Synthetic oligonucleotide
  misc_feature 1..20: note = Target: SCN10A; (-) strand; PAM type: NRG; PAM sequence: AGG
  source 1..20: mol_type = other DNA
atcaacccatcatctacatt

SEQ ID NO: 25241 - DNA, 20 bp, synthetic construct
  misc_feature 1..20: note = Description of Artificial Sequence: Synthetic oligonucleotide
  misc_feature 1..20: note = Target: SCN10A; (-) strand; PAM type: NRG; PAM sequence: TAG
  source 1..20: mol_type = other DNA
catcaacccatcatctacat

SEQ ID NO: 25242 - DNA, 20 bp, synthetic construct
  misc_feature 1..20: note = Description of Artificial Sequence: Synthetic oligonucleotide
  misc_feature 1..20: note = Target: SCN10A; (-) strand; PAM type: NRG; PAM sequence: TGG
  source 1..20: mol_type = other DNA
taggtatacacatgtcatgg

SEQ ID NO: 25243 - DNA, 20 bp, synthetic construct
  misc_feature 1..20: note = Description of Artificial Sequence: Synthetic oligonucleotide
  misc_feature 1..20: note = Target: SCN10A; (-) strand; PAM type: NRG; PAM sequence: TGG
  source 1..20: mol_type = other DNA
acataggtatacacatgtca

SEQ ID NO: 25244 - DNA, 20 bp, synthetic construct
  misc_feature 1..20: note = Description of Artificial Sequence: Synthetic oligonucleotide
  misc_feature 1..20: note = Target: SCN10A; (-) strand; PAM type: NRG; PAM sequence: AGG
  source 1..20: mol_type = other DNA
aaagtgcaggtttgttacat

SEQ ID NO: 25245 - DNA, 20 bp, synthetic construct
  misc_feature 1..20: note = Description of Artificial Sequence: Synthetic oligonucleotide
  misc_feature 1..20: note = Target: SCN10A; (-) strand; PAM type: NRG; PAM sequence: TAG
  source 1..20: mol_type = other DNA
gaaagtgcaggtttgttaca

SEQ ID NO: 25246 - DNA, 20 bp, synthetic construct
  misc_feature 1..20: note = Description of Artificial Sequence: Synthetic oligonucleotide
  misc_feature 1..20: note = Target: SCN10A; (-) strand; PAM type: NRG; PAM sequence: AGG
  source 1..20: mol_type = other DNA
ggtacatgtgcagaaagtgc

SEQ ID NO: 25247 - DNA, 20 bp, synthetic construct
  misc_feature 1..20: note = Description of Artificial Sequence: Synthetic oligonucleotide
  misc_feature 1..20: note = Target: SCN10A; (-) strand; PAM type: NRG; PAM sequence: CAG
  source 1..20: mol_type = other DNA
gggtacatgtgcagaaagtg

SEQ ID NO: 25248 - DNA, 20 bp, synthetic construct
  misc_feature 1..20: note = Description of Artificial Sequence: Synthetic oligonucleotide
  misc_feature 1..20: note = Target: SCN10A; (-) strand; PAM type: NRG; PAM sequence: AAG
  source 1..20: mol_type = other DNA
ttctggggtacatgtgcaga

SEQ ID NO: 25249 - DNA, 20 bp, synthetic construct
  misc_feature 1..20: note = Description of Artificial Sequence: Synthetic oligonucleotide
  misc_feature 1..20: note = Target: SCN10A; (-) strand; PAM type: NRG; PAM sequence: CAG
  source 1..20: mol_type = other DNA
taagttctggggtacatgtg

SEQ ID NO: 25250 - DNA, 20 bp, synthetic construct
  misc_feature 1..20: note = Description of Artificial Sequence: Synthetic oligonucleotide
  misc_feature 1..20: note = Target: SCN10A; (-) strand; PAM type: NRG; PAM sequence: GGG
  source 1..20: mol_type = other DNA
aaattttactttaagttctg

SEQ ID NO: 25251 - DNA, 20 bp, synthetic construct
  misc_feature 1..20: note = Description of Artificial Sequence: Synthetic oligonucleotide
  misc_feature 1..20: note = Target: SCN10A; (-) strand; PAM type: NRG; PAM sequence: GGG
  source 1..20: mol_type = other DNA
taaattttactttaagttct

SEQ ID NO: 25252 - DNA, 20 bp, synthetic construct
  misc_feature 1..20: note = Description of Artificial Sequence: Synthetic oligonucleotide
  misc_feature 1..20: note = Target: SCN10A; (-) strand; PAM type: NRG; PAM sequence: TGG
  source 1..20: mol_type = other DNA
ttaaattttactttaagttc

SEQ ID NO: 25253 - DNA, 20 bp, synthetic construct
  misc_feature 1..20: note = Description of Artificial Sequence: Synthetic oligonucleotide
  misc_feature 1..20: note = Target: SCN10A; (-) strand; PAM type: NRG; PAM sequence: AAG
  source 1..20: mol_type = other DNA
ccttttttaaattttacttt

SEQ ID NO: 25254 - DNA, 20 bp, synthetic construct
  misc_feature 1..20: note = Description of Artificial Sequence: Synthetic oligonucleotide
  misc_feature 1..20: note = Target: SCN10A; (-) strand; PAM type: NRG; PAM sequence: AAG
  source 1..20: mol_type = other DNA
ttgtgaaatgcaaatatata

SEQ ID NO: 25255 - DNA, 20 bp, synthetic construct
  misc_feature 1..20: note = Description of Artificial Sequence: Synthetic oligonucleotide
  misc_feature 1..20: note = Target: SCN10A; (-) strand; PAM type: NRG; PAM sequence: TGG
  source 1..20: mol_type = other DNA
acacaagaatcaattctagg

SEQ ID NO: 25256 - DNA, 20 bp, synthetic construct
  misc_feature 1..20: note = Description of Artificial Sequence: Synthetic oligonucleotide
  misc_feature 1..20: note = Target: SCN10A; (-) strand; PAM type: NRG; PAM sequence: AGG
  source 1..20: mol_type = other DNA
cacacacaagaatcaattct

SEQ ID NO: 25257 - DNA, 20 bp, synthetic construct
  misc_feature 1..20: note = Description of Artificial Sequence: Synthetic oligonucleotide
  misc_feature 1..20: note = Target: SCN10A; (-) strand; PAM type: NRG; PAM sequence: TAG
  source 1..20: mol_type = other DNA
ccacacacaagaatcaattc

SEQ ID NO: 25258 - DNA, 20 bp, synthetic construct
  misc_feature 1..20: note = Description of Artificial Sequence: Synthetic oligonucleotide
  misc_feature 1..20: note = Target: SCN10A; (-) strand; PAM type: NRG; PAM sequence: AAG
  source 1..20: mol_type = other DNA
tccaactttgcaccacacac

SEQ ID NO: 25259 - DNA, 20 bp, synthetic construct
  misc_feature 1..20: note = Description of Artificial Sequence: Synthetic oligonucleotide
  misc_feature 1..20: note = Target: SCN10A; (-) strand; PAM type: NRG; PAM sequence: TGG
  source 1..20: mol_type = other DNA
tgaagaattaggaatctcac

SEQ ID NO: 25260 - DNA, 20 bp, synthetic construct
  misc_feature 1..20: note = Description of Artificial Sequence: Synthetic oligonucleotide
  misc_feature 1..20: note = Target: SCN10A; (-) strand; PAM type: NRG; PAM sequence: AGG
  source 1..20: mol_type = other DNA
aaaaatgatgctgaagaatt

SEQ ID NO: 25261 - DNA, 20 bp, synthetic construct
  misc_feature 1..20: note = Description of Artificial Sequence: Synthetic oligonucleotide
  misc_feature 1..20: note = Target: SCN10A; (-) strand; PAM type: NRG; PAM sequence: TAG
  source 1..20: mol_type = other DNA
aaaaaatgatgctgaagaat

SEQ ID NO: 25262 - DNA, 20 bp, synthetic construct
  misc_feature 1..20: note = Description of Artificial Sequence: Synthetic oligonucleotide
  misc_feature 1..20: note = Target: SCN10A; (-) strand; PAM type: NRG; PAM sequence: AAG
  source 1..20: mol_type = other DNA
gtcttcaaaaaatgatgctg

SEQ ID NO: 25263 - DNA, 20 bp, synthetic construct
  misc_feature 1..20: note = Description of Artificial Sequence: Synthetic oligonucleotide
  misc_feature 1..20: note = Target: SCN10A; (-) strand; PAM type: NRG; PAM sequence: CGG
  source 1..20: mol_type = other DNA
ccagaacagcagggaaaagg

SEQ ID NO: 25264 - DNA, 20 bp, synthetic construct
  misc_feature 1..20: note = Description of Artificial Sequence: Synthetic oligonucleotide
  misc_feature 1..20: note = Target: SCN10A; (-) strand; PAM type: NRG; PAM sequence: AGG
  source 1..20: mol_type = other DNA
accccagaacagcagggaaa

SEQ ID NO: 25265 - DNA, 20 bp, synthetic construct
  misc_feature 1..20: note = Description of Artificial Sequence: Synthetic oligonucleotide
  misc_feature 1..20: note = Target: SCN10A; (-) strand; PAM type: NRG; PAM sequence: AAG
  source 1..20: mol_type = other DNA
caccccagaacagcagggaa

SEQ ID NO: 25266 - DNA, 20 bp, synthetic construct
  misc_feature 1..20: note = Description of Artificial Sequence: Synthetic oligonucleotide
  misc_feature 1..20: note = Target: SCN10A; (-) strand; PAM type: NRG; PAM sequence: GGG
  source 1..20: mol_type = other DNA
ggtggcaccccagaacagca

SEQ ID NO: 25267 - DNA, 20 bp, synthetic construct
  misc_feature 1..20: note = Description of Artificial Sequence: Synthetic oligonucleotide
  misc_feature 1..20: note = Target: SCN10A; (-) strand; PAM type: NRG; PAM sequence: AGG
  source 1..20: mol_type = other DNA
aggtggcaccccagaacagc

SEQ ID NO: 25268 - DNA, 20 bp, synthetic construct
  misc_feature 1..20: note = Description of Artificial Sequence: Synthetic oligonucleotide
  misc_feature 1..20: note = Target: SCN10A; (-) strand; PAM type: NRG; PAM sequence: CAG
  source 1..20: mol_type = other DNA
aaggtggcaccccagaacag

SEQ ID NO: 25269 - DNA, 20 bp, synthetic construct
  misc_feature 1..20: note = Description of Artificial Sequence: Synthetic oligonucleotide
  misc_feature 1..20: note = Target: SCN10A; (-) strand; PAM type: NRG; PAM sequence: CAG
  source 1..20: mol_type = other DNA
gaaaaggtggcaccccagaa

SEQ ID NO: 25270 - DNA, 20 bp, synthetic construct
  misc_feature 1..20: note = Description of Artificial Sequence: Synthetic oligonucleotide
  misc_feature 1..20: note = Target: SCN10A; (-) strand; PAM type: NRG; PAM sequence: CAG
  source 1..20: mol_type = other DNA
tgtgtgaaaaggtggcaccc

SEQ ID NO: 25271 - DNA, 20 bp, synthetic construct
  misc_feature 1..20: note = Description of Artificial Sequence: Synthetic oligonucleotide
  misc_feature 1..20: note = Target: SCN10A; (-) strand; PAM type: NRG; PAM sequence: TGG
  source 1..20: mol_type = other DNA
acatctaatgtgtgaaaagg

SEQ ID NO: 25272 - DNA, 20 bp, synthetic construct
  misc_feature 1..20: note = Description of Artificial Sequence: Synthetic oligonucleotide
  misc_feature 1..20: note = Target: SCN10A; (-) strand; PAM type: NRG; PAM sequence: AGG
  source 1..20: mol_type = other DNA
taaacatctaatgtgtgaaa

SEQ ID NO: 25273 - DNA, 20 bp, synthetic construct
  misc_feature 1..20: note = Description of Artificial Sequence: Synthetic oligonucleotide
  misc_feature 1..20: note = Target: SCN10A; (-) strand; PAM type: NRG; PAM sequence: AAG
  source 1..20: mol_type = other DNA
gtaaacatctaatgtgtgaa

SEQ ID NO: 25274 - DNA, 20 bp, synthetic construct
  misc_feature 1..20: note = Description of Artificial Sequence: Synthetic oligonucleotide
  misc_feature 1..20: note = Target: SCN10A; (-) strand; PAM type: NRG; PAM sequence: CAG
  source 1..20: mol_type = other DNA
cagcatagacagtccataaa

SEQ ID NO: 25275 - DNA, 20 bp, synthetic construct
  misc_feature 1..20: note = Description of Artificial Sequence: Synthetic oligonucleotide
  misc_feature 1..20: note = Target: SCN10A; (-) strand; PAM type: NRG; PAM sequence: CAG
  source 1..20: mol_type = other DNA
gaataatgtaacagcataga

SEQ ID NO: 25276 - DNA, 20 bp, synthetic construct
  misc_feature 1..20: note = Description of Artificial Sequence: Synthetic oligonucleotide
  misc_feature 1..20: note = Target: SCN10A; (-) strand; PAM type: NRG; PAM sequence: TAG
  source 1..20: mol_type = other DNA
gtcagaataatgtaacagca

SEQ ID NO: 25277 - DNA, 20 bp, synthetic construct
  misc_feature 1..20: note = Description of Artificial Sequence: Synthetic oligonucleotide
  misc_feature 1..20: note = Target: SCN10A; (-) strand; PAM type: NRG; PAM sequence: CAG
  source 1..20: mol_type = other DNA
gattggtcagaataatgtaa

SEQ ID NO: 25278 - DNA, 20 bp, synthetic construct
  misc_feature 1..20: note = Description of Artificial Sequence: Synthetic oligonucleotide
  misc_feature 1..20: note = Target: SCN10A; (-) strand; PAM type: NRG; PAM sequence: CAG
  source 1..20: mol_type = other DNA
gccattggtgtaagattggt

SEQ ID NO: 25279 - DNA, 20 bp, synthetic construct
  misc_feature 1..20: note = Description of Artificial Sequence: Synthetic oligonucleotide
  misc_feature 1..20: note = Target: SCN10A; (-) strand; PAM type: NRG; PAM sequence: TGG
  source 1..20: mol_type = other DNA
gtgtgccattggtgtaagat

SEQ ID NO: 25280 - DNA, 20 bp, synthetic construct
  misc_feature 1..20: note = Description of Artificial Sequence: Synthetic oligonucleotide
  misc_feature 1..20: note = Target: SCN10A; (-) strand; PAM type: NRG; PAM sequence: AAG
  source 1..20: mol_type = other DNA
aagcagtgtgccattggtgt

SEQ ID NO: 25281 - DNA, 20 bp, synthetic construct
  misc_feature 1..20: note = Description of Artificial Sequence: Synthetic oligonucleotide
  misc_feature 1..20: note = Target: SCN10A; (-) strand; PAM type: NRG; PAM sequence: TGG
  source 1..20: mol_type = other DNA
taattgaagcagtgtgccat

SEQ ID NO: 25282 - DNA, 20 bp, synthetic construct
  misc_feature 1..20: note = Description of Artificial Sequence: Synthetic oligonucleotide
  misc_feature 1..20: note = Target: SCN10A; (-) strand; PAM type: NRG; PAM sequence: CAG
  source 1..20: mol_type = other DNA
ctataaagctctaattgaag

SEQ ID NO: 25283 - DNA, 20 bp, synthetic construct
  misc_feature 1..20: note = Description of Artificial Sequence: Synthetic oligonucleotide
  misc_feature 1..20: note = Target: SCN10A; (-) strand; PAM type: NRG; PAM sequence: AAG
  source 1..20: mol_type = other DNA
ttactataaagctctaattg

SEQ ID NO: 25284 - DNA, 20 bp, synthetic construct
  misc_feature 1..20: note = Description of Artificial Sequence: Synthetic oligonucleotide
  misc_feature 1..20: note = Target: SCN10A; (-) strand; PAM type: NRG; PAM sequence: AAG
  source 1..20: mol_type = other DNA
ggatgtcgagatttactata

SEQ ID NO: 25285 - DNA, 20 bp, synthetic construct
  misc_feature 1..20: note = Description of Artificial Sequence: Synthetic oligonucleotide
  misc_feature 1..20: note = Target: SCN10A; (-) strand; PAM type: NRG; PAM sequence: GAG
  source 1..20: mol_type = other DNA
aactcattctactggatgtc

SEQ ID NO: 25286 - DNA, 20 bp, synthetic construct
  misc_feature 1..20: note = Description of Artificial Sequence: Synthetic oligonucleotide
  misc_feature 1..20: note = Target: SCN10A; (-) strand; PAM type: NRG; PAM sequence: TGG
  source 1..20: mol_type = other DNA
agtgggagaactcattctac

SEQ ID NO: 25287 - DNA, 20 bp, synthetic construct
  misc_feature 1..20: note = Description of Artificial Sequence: Synthetic oligonucleotide
  misc_feature 1..20: note = Target: SCN10A; (-) strand; PAM type: NRG; PAM sequence: GAG
  source 1..20: mol_type = other DNA
gaggaagaaatacaaagtgg

SEQ ID NO: 25288 - DNA, 20 bp, synthetic construct
  misc_feature 1..20: note = Description of Artificial Sequence: Synthetic oligonucleotide
  misc_feature 1..20: note = Target: SCN10A; (-) strand; PAM type: NRG; PAM sequence: GGG
  source 1..20: mol_type = other DNA
ttgaggaagaaatacaaagt

SEQ ID NO: 25289 - DNA, 20 bp, synthetic construct
  misc_feature 1..20: note = Description of Artificial Sequence: Synthetic oligonucleotide
  misc_feature 1..20: note = Target: SCN10A; (-) strand; PAM type: NRG; PAM sequence: TGG
  source 1..20: mol_type = other DNA
tttgaggaagaaatacaaag

SEQ ID NO: 25290 - DNA, 20 bp, synthetic construct
  misc_feature 1..20: note = Description of Artificial Sequence: Synthetic oligonucleotide
  misc_feature 1..20: note = Target: SCN10A; (-) strand; PAM type: NRG; PAM sequence: AAG
  source 1..20: mol_type = other DNA
acttttgaggaagaaataca

SEQ ID NO: 25291 - DNA, 20 bp, synthetic construct
  misc_feature 1..20: note = Description of Artificial Sequence: Synthetic oligonucleotide
  misc_feature 1..20: note = Target: SCN10A; (-) strand; PAM type: NRG; PAM sequence: AAG
  source 1..20: mol_type = other DNA
tagccaagaaacttttgagg

SEQ ID NO: 25292 - DNA, 20 bp, synthetic construct
  misc_feature 1..20: note = Description of Artificial Sequence: Synthetic oligonucleotide
  misc_feature 1..20: note = Target: SCN10A; (-) strand; PAM type: NRG; PAM sequence: AGG
  source 1..20: mol_type = other DNA
ttatagccaagaaacttttg

SEQ ID NO: 25293 - DNA, 20 bp, synthetic construct
  misc_feature 1..20: note = Description of Artificial Sequence: Synthetic oligonucleotide
  misc_feature 1..20: note = Target: SCN10A; (-) strand; PAM type: NRG; PAM sequence: GAG
  source 1..20: mol_type = other DNA
attatagccaagaaactttt

SEQ ID NO: 25294 - DNA, 20 bp, synthetic construct
  misc_feature 1..20: note = Description of Artificial Sequence: Synthetic oligonucleotide
  misc_feature 1..20: note = Target: SCN10A; (-) strand; PAM type: NRG; PAM sequence: AAG
  source 1..20: mol_type = other DNA
ttaaagagcaaattatagcc

SEQ ID NO: 25295 - DNA, 20 bp, synthetic construct
  misc_feature 1..20: note = Description of Artificial Sequence: Synthetic oligonucleotide
  misc_feature 1..20: note = Target: SCN10A; (-) strand; PAM type: NRG; PAM sequence: TAG
  source 1..20: mol_type = other DNA
aaattttaaagagcaaatta

SEQ ID NO: 25296 - DNA, 20 bp, synthetic construct
  misc_feature 1..20: note = Description of Artificial Sequence: Synthetic oligonucleotide
  misc_feature 1..20: note = Target: SCN10A; (-) strand; PAM type: NRG; PAM sequence: GAG
  source 1..20: mol_type = other DNA
agtttacatgaaattttaaa

SEQ ID NO: 25297 - DNA, 20 bp, synthetic construct
  misc_feature 1..20: note = Description of Artificial Sequence: Synthetic oligonucleotide
  misc_feature 1..20: note = Target: SCN10A; (-) strand; PAM type: NRG; PAM sequence: AAG
  source 1..20: mol_type = other DNA
aaagtttacatgaaatttta

SEQ ID NO: 25298 - DNA, 20 bp, synthetic construct
  misc_feature 1..20: note = Description of Artificial Sequence: Synthetic oligonucleotide
  misc_feature 1..20: note = Target: SCN10A; (-) strand; PAM type: NRG; PAM sequence: AAG
  source 1..20: mol_type = other DNA
ctttaaattttcttcctcaa

SEQ ID NO: 25299 - DNA, 20 bp, synthetic construct
  misc_feature 1..20: note = Description of Artificial Sequence: Synthetic oligonucleotide
  misc_feature 1..20: note = Target: SCN10A; (-) strand; PAM type: NRG; PAM sequence: TGG
  source 1..20: mol_type = other DNA
atatttcaacaggcttcttt

SEQ ID NO: 25300 - DNA, 20 bp, synthetic construct
  misc_feature 1..20: note = Description of Artificial Sequence: Synthetic oligonucleotide
  misc_feature 1..20: note = Target: SCN10A; (-) strand; PAM type: NRG; PAM sequence: AGG
  source 1..20: mol_type = other DNA
cctcaaatcaatatttcaac

SEQ ID NO: 25301 - DNA, 20 bp, synthetic construct
  misc_feature 1..20: note = Description of Artificial Sequence: Synthetic oligonucleotide
  misc_feature 1..20: note = Target: SCN10A; (-) strand; PAM type: NRG; PAM sequence: CAG
  source 1..20: mol_type = other DNA
tcctcaaatcaatatttcaa

SEQ ID NO: 25302 - DNA, 20 bp, synthetic construct
  misc_feature 1..20: note = Description of Artificial Sequence: Synthetic oligonucleotide
  misc_feature 1..20: note = Target: SCN10A; (-) strand; PAM type: NRG; PAM sequence: AAG
  source 1..20: mol_type = other DNA
ttcaaagtctcaatattgta

SEQ ID NO: 25303 - DNA, 20 bp, synthetic construct
  misc_feature 1..20: note = Description of Artificial Sequence: Synthetic oligonucleotide
  misc_feature 1..20: note = Target: SCN10A; (-) strand; PAM type: NRG; PAM sequence: AAG
  source 1..20: mol_type = other DNA
gagacatgttctcagattca

SEQ ID NO: 25304 - DNA, 20 bp, synthetic construct
  misc_feature 1..20: note = Description of Artificial Sequence: Synthetic oligonucleotide
  misc_feature 1..20: note = Target: SCN10A; (-) strand; PAM type: NRG; PAM sequence: CAG
  source 1..20: mol_type = other DNA
tcagtggggagacatgttct

SEQ ID NO: 25305 - DNA, 20 bp, synthetic construct
  misc_feature 1..20: note = Description of Artificial Sequence: Synthetic oligonucleotide
  misc_feature 1..20: note = Target: SCN10A; (-) strand; PAM type: NRG; PAM sequence: GAG
  source 1..20: mol_type = other DNA
aagaaaaccaaatcagtggg

SEQ ID NO: 25306 - DNA, 20 bp, synthetic construct
  misc_feature 1..20: note = Description of Artificial Sequence: Synthetic oligonucleotide
  misc_feature 1..20: note = Target: SCN10A; (-) strand; PAM type: NRG; PAM sequence: GGG
  source 1..20: mol_type = other DNA
taaagaaaaccaaatcagtg

SEQ ID NO: 25307 - DNA, 20 bp, synthetic construct
  misc_feature 1..20: note = Description of Artificial Sequence: Synthetic oligonucleotide
  misc_feature 1..20: note = Target: SCN10A; (-) strand; PAM type: NRG; PAM sequence: GGG
  source 1..20: mol_type = other DNA
ttaaagaaaaccaaatcagt

SEQ ID NO: 25308 - DNA, 20 bp, synthetic construct
  misc_feature 1..20: note = Description of Artificial Sequence: Synthetic oligonucleotide
  misc_feature 1..20: note = Target: SCN10A; (-) strand; PAM type: NRG; PAM sequence: TGG
  source 1..20: mol_type = other DNA
tttaaagaaaaccaaatcag

SEQ ID NO: 25309 - DNA, 20 bp, synthetic construct
  misc_feature 1..20: note = Description of Artificial Sequence: Synthetic oligonucleotide
  misc_feature 1..20: note = Target: SCN10A; (-) strand; PAM type: NRG; PAM sequence: CAG
  source 1..20: mol_type = other DNA
gtttttaaagaaaaccaaat

SEQ ID NO: 25310 - DNA, 20 bp, synthetic construct
  misc_feature 1..20: note = Description of Artificial Sequence: Synthetic oligonucleotide
  misc_feature 1..20: note = Target: SCN10A; (-) strand; PAM type: NRG; PAM sequence: AAG
  source 1..20: mol_type = other DNA
agtattgtgtaaagttttta

SEQ ID NO: 25311 - DNA, 20 bp, synthetic construct
  misc_feature 1..20: note = Description of Artificial Sequence: Synthetic oligonucleotide
  misc_feature 1..20: note = Target: SCN10A; (-) strand; PAM type: NRG; PAM sequence: AAG
  source 1..20: mol_type = other DNA
attataataagtattgtgta

SEQ ID NO: 25312 - DNA, 20 bp, synthetic construct
  misc_feature 1..20: note = Description of Artificial Sequence: Synthetic oligonucleotide
  misc_feature 1..20: note = Target: SCN10A; (-) strand; PAM type: NRG; PAM sequence: AAG
  source 1..20: mol_type = other DNA
tctataaggaaaattataat

SEQ ID NO: 25313 - DNA, 20 bp, synthetic construct
  misc_feature 1..20: note = Description of Artificial Sequence: Synthetic oligonucleotide
  misc_feature 1..20: note = Target: SCN10A; (-) strand; PAM type: NRG; PAM sequence: AGG
  source 1..20: mol_type = other DNA
gtataagtgagatctctata

SEQ ID NO: 25314 - DNA, 20 bp, synthetic construct
  misc_feature 1..20: note = Description of Artificial Sequence: Synthetic oligonucleotide
  misc_feature 1..20: note = Target: SCN10A; (-) strand; PAM type: NRG; PAM sequence: AAG
  source 1..20: mol_type = other DNA
agtataagtgagatctctat

SEQ ID NO: 25315 - DNA, 20 bp, synthetic construct
  misc_feature 1..20: note = Description of Artificial Sequence: Synthetic oligonucleotide
  misc_feature 1..20: note = Target: SCN10A; (-) strand; PAM type: NRG; PAM sequence: GAG
  source 1..20: mol_type = other DNA
aagattatcaaagtataagt

SEQ ID NO: 25316 - DNA, 20 bp, synthetic construct
  misc_feature 1..20: note = Description of Artificial Sequence: Synthetic oligonucleotide
  misc_feature 1..20: note = Target: SCN10A; (-) strand; PAM type: NRG; PAM sequence: AAG
  source 1..20: mol_type = other DNA
gaataagattatcaaagtat

SEQ ID NO: 25317 - DNA, 20 bp, synthetic construct
  misc_feature 1..20: note = Description of Artificial Sequence: Synthetic oligonucleotide
  misc_feature 1..20: note = Target: SCN10A; (-) strand; PAM type: NRG; PAM sequence: AAG
  source 1..20: mol_type = other DNA
atctaggaataagattatca

SEQ ID NO: 25318 - DNA, 20 bp, synthetic construct
  misc_feature 1..20: note = Description of Artificial Sequence: Synthetic oligonucleotide
  misc_feature 1..20: note = Target: SCN10A; (-) strand; PAM type: NRG; PAM sequence: AAG
  source 1..20: mol_type = other DNA
aatgtcaagtatctaggaat

SEQ ID NO: 25319 - DNA, 20 bp, synthetic construct
  misc_feature 1..20: note = Description of Artificial Sequence: Synthetic oligonucleotide
  misc_feature 1..20: note = Target: SCN10A; (-) strand; PAM type: NRG; PAM sequence: AGG
  source 1..20: mol_type = other DNA
ttttaaaatgtcaagtatct

SEQ ID NO: 25320 - DNA, 20 bp, synthetic construct
  misc_feature 1..20: note = Description of Artificial Sequence: Synthetic oligonucleotide
  misc_feature 1..20: note = Target: SCN10A; (-) strand; PAM type: NRG; PAM sequence: TAG
  source 1..20: mol_type = other DNA
attttaaaatgtcaagtatc

SEQ ID NO: 25321 - DNA, 20 bp, synthetic construct
  misc_feature 1..20: note = Description of Artificial Sequence: Synthetic oligonucleotide
  misc_feature 1..20: note = Target: SCN10A; (-) strand; PAM type: NRG; PAM sequence: AAG
  source 1..20: mol_type = other DNA
cactggcattttaaaatgtc

SEQ ID NO: 25322 - DNA, 20 bp, synthetic construct
  misc_feature 1..20: note = Description of Artificial Sequence: Synthetic oligonucleotide
  misc_feature 1..20: note = Target: SCN10A; (-) strand; PAM type: NRG; PAM sequence: TGG
  source 1..20: mol_type = other DNA
tttaaaaataccatttacac

SEQ ID NO: 25323 - DNA, 20 bp, synthetic construct
  misc_feature 1..20: note = Description of Artificial Sequence: Synthetic oligonucleotide
  misc_feature 1..20: note = Target: SCN10A; (-) strand; PAM type: NRG; PAM sequence: TAG
  source 1..20: mol_type = other DNA
cactagcaacaaacagaaaa

SEQ ID NO: 25324 - DNA, 20 bp, synthetic construct
  misc_feature 1..20: note = Description of Artificial Sequence: Synthetic oligonucleotide
  misc_feature 1..20: note = Target: SCN10A; (-) strand; PAM type: NRG; PAM sequence: CAG
  source 1..20: mol_type = other DNA
gtatagacactagcaacaaa

SEQ ID NO: 25325 - DNA, 20 bp, synthetic construct
  misc_feature 1..20: note = Description of Artificial Sequence: Synthetic oligonucleotide
  misc_feature 1..20: note = Target: SCN10A; (-) strand; PAM type: NRG; PAM sequence: TAG
  source 1..20: mol_type = other DNA
aatcaattgtgtatagacac

SEQ ID NO: 25326 - DNA, 20 bp, synthetic construct
  misc_feature 1..20: note = Description of Artificial Sequence: Synthetic oligonucleotide
  misc_feature 1..20: note = Target: SCN10A; (-) strand; PAM type: NRG; PAM sequence: TAG
  source 1..20: mol_type = other DNA
atacataaatcaattgtgta

SEQ ID NO: 25327 - DNA, 20 bp, synthetic construct
  misc_feature 1..20: note = Description of Artificial Sequence: Synthetic oligonucleotide
  misc_feature 1..20: note = Target: SCN10A; (-) strand; PAM type: NRG; PAM sequence: GGG
  source 1..20: mol_type = other DNA
aagagtatagtaaggtagct

SEQ ID NO: 25328 - DNA, 20 bp, synthetic construct
  misc_feature 1..20: note = Description of Artificial Sequence: Synthetic oligonucleotide
  misc_feature 1..20: note = Target: SCN10A; (-) strand; PAM type: NRG; PAM sequence: TGG
  source 1..20: mol_type = other DNA
aaagagtatagtaaggtagc

SEQ ID NO: 25329 - DNA, 20 bp, synthetic construct
  misc_feature 1..20: note = Description of Artificial Sequence: Synthetic oligonucleotide
  misc_feature 1..20: note = Target: SCN10A; (-) strand; PAM type: NRG; PAM sequence: TAG
  source 1..20: mol_type = other DNA
aataaaagagtatagtaagg

SEQ ID NO: 25330 - DNA, 20 bp, synthetic construct
  misc_feature 1..20: note = Description of Artificial Sequence: Synthetic oligonucleotide
  misc_feature 1..20: note = Target: SCN10A; (-) strand; PAM type: NRG; PAM sequence: AGG
  source 1..20: mol_type = other DNA
attaataaaagagtatagta

SEQ ID NO: 25331 - DNA, 20 bp, synthetic construct
  misc_feature 1..20: note = Description of Artificial Sequence: Synthetic oligonucleotide
  misc_feature 1..20: note = Target: SCN10A; (-) strand; PAM type: NRG; PAM sequence: AAG
  source 1..20: mol_type = other DNA
aattaataaaagagtatagt

SEQ ID NO: 25332 - DNA, 20 bp, synthetic construct
  misc_feature 1..20: note = Description of Artificial Sequence: Synthetic oligonucleotide
  misc_feature 1..20: note = Target: SCN10A; (-) strand; PAM type: NRG; PAM sequence: TAG
  source 1..20: mol_type = other DNA
taagaattaataaaagagta

SEQ ID NO: 25333 - DNA, 20 bp, synthetic construct
  misc_feature 1..20: note = Description of Artificial Sequence: Synthetic oligonucleotide
  misc_feature 1..20: note = Target: SCN10A; (-) strand; PAM type: NRG; PAM sequence: GAG
  source 1..20: mol_type = other DNA
aacagtaagaattaataaaa

SEQ ID NO: 25334 - DNA, 20 bp, synthetic construct
  misc_feature 1..20: note = Description of Artificial Sequence: Synthetic oligonucleotide
  misc_feature 1..20: note = Target: SCN10A; (-) strand; PAM type: NRG; PAM sequence: AAG
  source 1..20: mol_type = other DNA
taaacagtaagaattaataa

SEQ ID NO: 25335 - DNA, 20 bp, synthetic construct
  misc_feature 1..20: note = Description of Artificial Sequence: Synthetic oligonucleotide
  misc_feature 1..20: note = Target: SCN10A; (-) strand; PAM type: NRG; PAM sequence: AAG
  source 1..20: mol_type = other DNA
ataacctagagataaacagt

SEQ ID NO: 25336 - DNA, 20 bp, synthetic construct
  misc_feature 1..20: note = Description of Artificial Sequence: Synthetic oligonucleotide
  misc_feature 1..20: note = Target: SCN10A; (-) strand; PAM type: NRG; PAM sequence: CAG
  source 1..20: mol_type = other DNA
caacataacctagagataaa

SEQ ID NO: 25337 - DNA, 20 bp, synthetic construct
  misc_feature 1..20: note = Description of Artificial Sequence: Synthetic oligonucleotide
  misc_feature 1..20: note = Target: SCN10A; (-) strand; PAM type: NRG; PAM sequence: GAG
  source 1..20: mol_type = other DNA
aaaatatccaacataaccta

SEQ ID NO: 25338 - DNA, 20 bp, synthetic construct
  misc_feature 1..20: note = Description of Artificial Sequence: Synthetic oligonucleotide
  misc_feature 1..20: note = Target: SCN10A; (-) strand; PAM type: NRG; PAM sequence: TAG
  source 1..20: mol_type = other DNA
ataaaatatccaacataacc

SEQ ID NO: 25339 - DNA, 20 bp, synthetic construct
  misc_feature 1..20: note = Description of Artificial Sequence: Synthetic oligonucleotide
  misc_feature 1..20: note = Target: SCN10A; (-) strand; PAM type: NRG; PAM sequence: AAG
  source 1..20: mol_type = other DNA
agatgtaatttacagataat

SEQ ID NO: 25340 - DNA, 20 bp, synthetic construct
  misc_feature 1..20: note = Description of Artificial Sequence: Synthetic oligonucleotide
  misc_feature 1..20: note = Target: SCN10A; (-) strand; PAM type: NRG; PAM sequence: CAG
  source 1..20: mol_type = other DNA
agtaccgaagatgtaattta

SEQ ID NO: 25341 - DNA, 20 bp, synthetic construct
  misc_feature 1..20: note = Description of Artificial Sequence: Synthetic oligonucleotide
  misc_feature 1..20: note = Target: SCN10A; (-) strand; PAM type: NRG; PAM sequence: AAG
  source 1..20: mol_type = other DNA
gcaagaagaaaaaagtaccg

SEQ ID NO: 25342 - DNA, 20 bp, synthetic construct
  misc_feature 1..20: note = Description of Artificial Sequence: Synthetic oligonucleotide
  misc_feature 1..20: note = Target: SCN10A; (-) strand; PAM type: NRG; PAM sequence: AAG
  source 1..20: mol_type = other DNA
aaaaaagtgcaagaagaaaa

SEQ ID NO: 25343 - DNA, 20 bp, synthetic construct
  misc_feature 1..20: note = Description of Artificial Sequence: Synthetic oligonucleotide
  misc_feature 1..20: note = Target: SCN10A; (-) strand; PAM type: NRG; PAM sequence: AAG
  source 1..20: mol_type = other DNA
aaagaaaaaaaaagtgcaag

SEQ ID NO: 25344 - DNA, 20 bp, synthetic construct
  misc_feature 1..20: note = Description of Artificial Sequence: Synthetic oligonucleotide
  misc_feature 1..20: note = Target: SCN10A; (-) strand; PAM type: NRG; PAM sequence: AAG
  source 1..20: mol_type = other DNA
agcaaagaaaaaaaaagtgc

SEQ ID NO: 25345 - DNA, 20 bp, synthetic construct
  misc_feature 1..20: note = Description of Artificial Sequence: Synthetic oligonucleotide
  misc_feature 1..20: note = Target: SCN10A; (-) strand; PAM type: NRG; PAM sequence: AAG
  source 1..20: mol_type = other DNA
tagtaaagcaaagaaaaaaa

SEQ ID NO: 25346 - DNA, 20 bp, synthetic construct
  misc_feature 1..20: note = Description of Artificial Sequence: Synthetic oligonucleotide
  misc_feature 1..20: note = Target: SCN10A; (-) strand; PAM type: NRG; PAM sequence: AAG
  source 1..20: mol_type = other DNA
tcagccagcatagtaaagca

SEQ ID NO: 25347 - DNA, 20 bp, synthetic construct
  misc_feature 1..20: note = Description of Artificial Sequence: Synthetic oligonucleotide
  misc_feature 1..20: note = Target: SCN10A; (-) strand; PAM type: NRG; PAM sequence: AAG
  source 1..20: mol_type = other DNA
aggtctcagccagcatagta

SEQ ID NO: 25348 - DNA, 20 bp, synthetic construct
  misc_feature 1..20: note = Description of Artificial Sequence: Synthetic oligonucleotide
  misc_feature 1..20: note = Target: SCN10A; (-) strand; PAM type: NRG; PAM sequence: TAG
  source 1..20: mol_type = other DNA
aaaggaggtctcagccagca

SEQ ID NO: 25349 - DNA, 20 bp, synthetic construct
  misc_feature 1..20: note = Description of Artificial Sequence: Synthetic oligonucleotide
  misc_feature 1..20: note = Target: SCN10A; (-) strand; PAM type: NRG; PAM sequence: CAG
  source 1..20: mol_type = other DNA
tttgtaaaggaggtctcagc

SEQ ID NO: 25350 - DNA, 20 bp, synthetic construct
  misc_feature 1..20: note = Description of Artificial Sequence: Synthetic oligonucleotide
  misc_feature 1..20: note = Target: SCN10A; (-) strand; PAM type: NRG; PAM sequence: CAG
  source 1..20: mol_type = other DNA
ccactttgtaaaggaggtct

SEQ ID NO: 25351 - DNA, 20 bp, synthetic construct
  misc_feature 1..20: note = Description of Artificial Sequence: Synthetic oligonucleotide
  misc_feature 1..20: note = Target: SCN10A; (-) strand; PAM type: NRG; PAM sequence: AGG
  source 1..20: mol_type = other DNA
tcagttccactttgtaaagg

SEQ ID NO: 25352 - DNA, 20 bp, synthetic construct
  misc_feature 1..20: note = Description of Artificial Sequence: Synthetic oligonucleotide
  misc_feature 1..20: note = Target: SCN10A; (-) strand; PAM type: NRG; PAM sequence: GAG
  source 1..20: mol_type = other DNA
ctcagttccactttgtaaag

SEQ ID NO: 25353 - DNA, 20 bp, synthetic construct
  misc_feature 1..20: note = Description of Artificial Sequence: Synthetic oligonucleotide
  misc_feature 1..20: note = Target: SCN10A; (-) strand; PAM type: NRG; PAM sequence: AGG
  source 1..20: mol_type = other DNA
ttctcagttccactttgtaa

SEQ ID NO: 25354 - DNA, 20 bp, synthetic construct
  misc_feature 1..20: note = Description of Artificial Sequence: Synthetic oligonucleotide
  misc_feature 1..20: note = Target: SCN10A; (-) strand; PAM type: NRG; PAM sequence: AAG
  source 1..20: mol_type = other DNA
cttctcagttccactttgta

SEQ ID NO: 25355 - DNA, 20 bp, synthetic construct
  misc_feature 1..20: note = Description of Artificial Sequence: Synthetic oligonucleotide
  misc_feature 1..20: note = Target: SCN10A; (-) strand; PAM type: NRG; PAM sequence: CAG
  source 1..20: mol_type = other DNA
ccaaagatgtctgttcttct

SEQ ID NO: 25356 - DNA, 20 bp, synthetic construct
  misc_feature 1..20: note = Description of Artificial Sequence: Synthetic oligonucleotide
  misc_feature 1..20: note = Target: SCN10A; (-) strand; PAM type: NRG; PAM sequence: AAG
  source 1..20: mol_type = other DNA
atcaaaagaaaaaaaaacca

SEQ ID NO: 25357 - DNA, 20 bp, synthetic construct
  misc_feature 1..20: note = Description of Artificial Sequence: Synthetic oligonucleotide
  misc_feature 1..20: note = Target: SCN10A; (-) strand; PAM type: NRG; PAM sequence: AAG
  source 1..20: mol_type = other DNA
agctttccctttgagatcaa

SEQ ID NO: 25358 - DNA, 20 bp, synthetic construct
  misc_feature 1..20: note = Description of Artificial Sequence: Synthetic oligonucleotide
  misc_feature 1..20: note = Target: SCN10A; (-) strand; PAM type: NRG; PAM sequence: GAG
  source 1..20: mol_type = other DNA
acatggaaagctttcccttt

SEQ ID NO: 25359 - DNA, 20 bp, synthetic construct
  misc_feature 1..20: note = Description of Artificial Sequence: Synthetic oligonucleotide
  misc_feature 1..20: note = Target: SCN10A; (-) strand; PAM type: NRG; PAM sequence: AAG
  source 1..20: mol_type = other DNA
tacttaattgtgaacatgga

SEQ ID NO: 25360 - DNA, 20 bp, synthetic construct
  misc_feature 1..20: note = Description of Artificial Sequence: Synthetic oligonucleotide
  misc_feature 1..20: note = Target: SCN10A; (-) strand; PAM type: NRG; PAM sequence: TGG
  source 1..20: mol_type = other DNA
gtcatacttaattgtgaaca

SEQ ID NO: 25361 - DNA, 20 bp, synthetic construct
  misc_feature 1..20: note = Description of Artificial Sequence: Synthetic oligonucleotide
  misc_feature 1..20: note = Target: SCN10A; (-) strand; PAM type: NRG; PAM sequence: AAG
  source 1..20: mol_type = other DNA
attcattgttttaaagtatc

SEQ ID NO: 25362 - DNA, 20 bp, synthetic construct
  misc_feature 1..20: note = Description of Artificial Sequence: Synthetic oligonucleotide
  misc_feature 1..20: note = Target: SCN10A; (-) strand; PAM type: NRG; PAM sequence: AAG
  source 1..20: mol_type = other DNA
aaagggtattcattgtttta

SEQ ID NO: 25363 - DNA, 20 bp, synthetic construct
  misc_feature 1..20: note = Description of Artificial Sequence: Synthetic oligonucleotide
  misc_feature 1..20: note = Target: SCN10A; (-) strand; PAM type: NRG; PAM sequence: GGG
  source 1..20: mol_type = other DNA
gattgcatcactctgataaa

SEQ ID NO: 25364 - DNA, 20 bp, synthetic construct
  misc_feature 1..20: note = Description of Artificial Sequence: Synthetic oligonucleotide
  misc_feature 1..20: note = Target: SCN10A; (-) strand; PAM type: NRG; PAM sequence: AGG
  source 1..20: mol_type = other DNA
ggattgcatcactctgataa

SEQ ID NO: 25365 - DNA, 20 bp, synthetic construct
  misc_feature 1..20: note = Description of Artificial Sequence: Synthetic oligonucleotide
  misc_feature 1..20: note = Target: SCN10A; (-) strand; PAM type: NRG; PAM sequence: AAG
  source 1..20: mol_type = other DNA
gggattgcatcactctgata

SEQ ID NO: 25366 - DNA, 20 bp, synthetic construct
  misc_feature 1..20: note = Description of Artificial Sequence: Synthetic oligonucleotide
  misc_feature 1..20: note = Target: SCN10A; (-) strand; PAM type: NRG; PAM sequence: GGG
  source 1..20: mol_type = other DNA
agtataataattttaaaaag

SEQ ID NO: 25367 - DNA, 20 bp, synthetic construct
  misc_feature 1..20: note = Description of Artificial Sequence: Synthetic oligonucleotide
  misc_feature 1..20: note = Target: SCN10A; (-) strand; PAM type: NRG; PAM sequence: GGG
  source 1..20: mol_type = other DNA
aagtataataattttaaaaa

SEQ ID NO: 25368 - DNA, 20 bp, synthetic construct
  misc_feature 1..20: note = Description of Artificial Sequence: Synthetic oligonucleotide
  misc_feature 1..20: note = Target: SCN10A; (-) strand; PAM type: NRG; PAM sequence: AGG
  source 1..20: mol_type = other DNA
aaagtataataattttaaaa

SEQ ID NO: 25369 - DNA, 20 bp, synthetic construct
  misc_feature 1..20: note = Description of Artificial Sequence: Synthetic oligonucleotide
  misc_feature 1..20: note = Target: SCN10A; (-) strand; PAM type: NRG; PAM sequence: AAG
  source 1..20: mol_type = other DNA
taaagtataataattttaaa

SEQ ID NO: 25370 - DNA, 20 bp, synthetic construct
  misc_feature 1..20: note = Description of Artificial Sequence: Synthetic oligonucleotide
  misc_feature 1..20: note = Target: SCN10A; (-) strand; PAM type: NRG; PAM sequence: AAG
  source 1..20: mol_type = other DNA
cacatgtaccccagaactta

SEQ ID NO: 25371 - DNA, 20 bp, synthetic construct
  misc_feature 1..20: note = Description of Artificial Sequence: Synthetic oligonucleotide
  misc_feature 1..20: note = Target: SCN10A; (-) strand; PAM type: NRG; PAM sequence: CAG
  source 1..20: mol_type = other DNA
cacgttctgcacatgtaccc

SEQ ID NO: 25372 - DNA, 20 bp, synthetic construct
  misc_feature 1..20: note = Description of Artificial Sequence: Synthetic oligonucleotide
  misc_feature 1..20: note = Target: SCN10A; (-) strand; PAM type: NRG; PAM sequence: CGG
  source 1..20: mol_type = other DNA
ggtacacctatgtaacaaac

SEQ ID NO: 25373 - DNA, 20 bp, synthetic construct
  misc_feature 1..20: note = Description of Artificial Sequence: Synthetic oligonucleotide
  misc_feature 1..20: note = Target: SCN10A; (-) strand; PAM type: NRG; PAM sequence: GGG
  source 1..20: mol_type = other DNA
gcagcaaaccaccatggcac

SEQ ID NO: 25374 - DNA, 20 bp, synthetic construct
  misc_feature 1..20: note = Description of Artificial Sequence: Synthetic oligonucleotide
  misc_feature 1..20: note = Target: SCN10A; (-) strand; PAM type: NRG; PAM sequence: CGG
  source 1..20: mol_type = other DNA
tgcagcaaaccaccatggca

SEQ ID NO: 25375 - DNA, 20 bp, synthetic construct
  misc_feature 1..20: note = Description of Artificial Sequence: Synthetic oligonucleotide
  misc_feature 1..20: note = Target: SCN10A; (-) strand; PAM type: NRG; PAM sequence: TGG
  source 1..20: mol_type = other DNA
aagggtgcagcaaaccacca

SEQ ID NO: 25376 - DNA, 20 bp, synthetic construct
  misc_feature 1..20: note = Description of Artificial Sequence: Synthetic oligonucleotide
  misc_feature 1..20: note = Target: SCN10A; (-) strand; PAM type: NRG; PAM sequence: CAG
  source 1..20: mol_type = other DNA
aaatgacgggttgaagggtg

SEQ ID NO: 25377 - DNA, 20 bp, synthetic construct
  misc_feature 1..20: note = Description of Artificial Sequence: Synthetic oligonucleotide
  misc_feature 1..20: note = Target: SCN10A; (-) strand; PAM type: NRG; PAM sequence: GGG
  source 1..20: mol_type = other DNA
aatgtaaatgacgggttgaa

SEQ ID NO: 25378 - DNA, 20 bp, synthetic construct
  misc_feature 1..20: note = Description of Artificial Sequence: Synthetic oligonucleotide
  misc_feature 1..20: note = Target: SCN10A; (-) strand; PAM type: NRG; PAM sequence: AGG
  source 1..20: mol_type = other DNA
taatgtaaatgacgggttga

SEQ ID NO: 25379 - DNA, 20 bp, synthetic construct
  misc_feature 1..20: note = Description of Artificial Sequence: Synthetic oligonucleotide
  misc_feature 1..20: note = Target: SCN10A; (-) strand; PAM type: NRG; PAM sequence: AAG
  source 1..20: mol_type = other DNA
ctaatgtaaatgacgggttg

SEQ ID NO: 25380 - DNA, 20 bp, synthetic construct
  misc_feature 1..20: note = Description of Artificial Sequence: Synthetic oligonucleotide
  misc_feature 1..20: note = Target: SCN10A; (-) strand; PAM type: NRG; PAM sequence: GGG
  source 1..20: mol_type = other DNA
aaatacctaatgtaaatgac

SEQ ID NO: 25381 - DNA, 20 bp, synthetic construct
  misc_feature 1..20: note = Description of Artificial Sequence: Synthetic oligonucleotide
  misc_feature 1..20: note = Target: SCN10A; (-) strand; PAM type: NRG; PAM sequence: CGG
  source 1..20: mol_type = other DNA
gaaatacctaatgtaaatga

SEQ ID NO: 25382 - DNA, 20 bp, synthetic construct
  misc_feature 1..20: note = Description of Artificial Sequence: Synthetic oligonucleotide
  misc_feature 1..20: note = Target: SCN10A; (-) strand; PAM type: NRG; PAM sequence: GAG
  source 1..20: mol_type = other DNA
taggggagggatagcattag

SEQ ID NO: 25383 - DNA, 20 bp, synthetic construct
  misc_feature 1..20: note = Description of Artificial Sequence: Synthetic oligonucleotide
  misc_feature 1..20: note = Target: SCN10A; (-) strand; PAM type: NRG; PAM sequence: AGG
  source 1..20: mol_type = other DNA
gctaggggagggatagcatt

SEQ ID NO: 25384 - DNA, 20 bp, synthetic construct
  misc_feature 1..20: note = Description of Artificial Sequence: Synthetic oligonucleotide
  misc_feature 1..20: note = Target: SCN10A; (-) strand; PAM type: NRG; PAM sequence: TAG
  source 1..20: mol_type = other DNA
ggctaggggagggatagcat

SEQ ID NO: 25385 - DNA, 20 bp, synthetic construct
  misc_feature 1..20: note = Description of Artificial Sequence: Synthetic oligonucleotide
  misc_feature 1..20: note = Target: SCN10A; (-) strand; PAM type: NRG; PAM sequence: TAG
  source 1..20: mol_type = other DNA
gtggggggctaggggaggga

SEQ ID NO: 25386 - DNA, 20 bp, synthetic construct
  misc_feature 1..20: note = Description of Artificial Sequence: Synthetic oligonucleotide
  misc_feature 1..20: note = Target: SCN10A; (-) strand; PAM type: NRG; PAM sequence: GGG
  source 1..20: mol_type = other DNA
aggggtggggggctagggga

SEQ ID NO: 25387 - DNA, 20 bp, synthetic construct
  misc_feature 1..20: note = Description of Artificial Sequence: Synthetic oligonucleotide
  misc_feature 1..20: note = Target: SCN10A; (-) strand; PAM type: NRG; PAM sequence: AGG
  source 1..20: mol_type = other DNA
gaggggtggggggctagggg

SEQ ID NO: 25388 - DNA, 20 bp, synthetic construct
  misc_feature 1..20: note = Description of Artificial Sequence: Synthetic oligonucleotide
  misc_feature 1..20: note = Target: SCN10A; (-) strand; PAM type: NRG; PAM sequence: GAG
  source 1..20: mol_type = other DNA
tgaggggtggggggctaggg

SEQ ID NO: 25389 - DNA, 20 bp, synthetic construct
  misc_feature 1..20: note = Description of Artificial Sequence: Synthetic oligonucleotide
  misc_feature 1..20: note = Target: SCN10A; (-) strand; PAM type: NRG; PAM sequence: GGG
  source 1..20: mol_type = other DNA
gttgaggggtggggggctag

SEQ ID NO: 25390 - DNA, 20 bp, synthetic construct
  misc_feature 1..20: note = Description of Artificial Sequence: Synthetic oligonucleotide
  misc_feature 1..20: note = Target: SCN10A; (-) strand; PAM type: NRG; PAM sequence: GGG
  source 1..20: mol_type = other DNA
tgttgaggggtggggggcta

SEQ ID NO: 25391 - DNA, 20 bp, synthetic construct
  misc_feature 1..20: note = Description of Artificial Sequence: Synthetic oligonucleotide
  misc_feature 1..20: note = Target: SCN10A; (-) strand; PAM type: NRG; PAM sequence: AGG
  source 1..20: mol_type = other DNA
ctgttgaggggtggggggct

SEQ ID NO: 25392 - DNA, 20 bp, synthetic construct
  misc_feature 1..20: note = Description of Artificial Sequence: Synthetic oligonucleotide
  misc_feature 1..20: note = Target: SCN10A; (-) strand; PAM type: NRG; PAM sequence: TAG
  source 1..20: mol_type = other DNA
cctgttgaggggtggggggc

SEQ ID NO: 25393 - DNA, 20 bp, synthetic construct
  misc_feature 1..20: note = Description of Artificial Sequence: Synthetic oligonucleotide
  misc_feature 1..20: note = Target: SCN10A; (-) strand; PAM type: NRG; PAM sequence: GGG
  source 1..20: mol_type = other DNA
ggggcctgttgaggggtggg

SEQ ID NO: 25394 - DNA, 20 bp, synthetic construct
  misc_feature 1..20: note = Description of Artificial Sequence: Synthetic oligonucleotide
  misc_feature 1..20: note = Target: SCN10A; (-) strand; PAM type: NRG; PAM sequence: GGG
  source 1..20: mol_type = other DNA
tggggcctgttgaggggtgg

SEQ ID NO: 25395 - DNA, 20 bp, synthetic construct
  misc_feature 1..20: note = Description of Artificial Sequence: Synthetic oligonucleotide
  misc_feature 1..20: note = Target: SCN10A; (-) strand; PAM type: NRG; PAM sequence: GGG
  source 1..20: mol_type = other DNA
ctggggcctgttgaggggtg

SEQ ID NO: 25396 - DNA, 20 bp, synthetic construct
  misc_feature 1..20: note = Description of Artificial Sequence: Synthetic oligonucleotide
  misc_feature 1..20: note = Target: SCN10A; (-) strand; PAM type: NRG; PAM sequence: GGG
  source 1..20: mol_type = other DNA
actggggcctgttgaggggt

SEQ ID NO: 25397 - DNA, 20 bp, synthetic construct
  misc_feature 1..20: note = Description of Artificial Sequence: Synthetic oligonucleotide
  misc_feature 1..20: note = Target: SCN10A; (-) strand; PAM type: NRG; PAM sequence: TGG
  source 1..20: mol_type = other DNA
cactggggcctgttgagggg

SEQ ID NO: 25398 - DNA, 20 bp, synthetic construct
  misc_feature 1..20: note = Description of Artificial Sequence: Synthetic oligonucleotide
  misc_feature 1..20: note = Target: SCN10A; (-) strand; PAM type: NRG; PAM sequence: GGG
  source 1..20: mol_type = other DNA
acacactggggcctgttgag

SEQ ID NO: 25399 - DNA, 20 bp, synthetic construct
  misc_feature 1..20: note = Description of Artificial Sequence: Synthetic oligonucleotide
  misc_feature 1..20: note = Target: SCN10A; (-) strand; PAM type: NRG; PAM sequence: GGG
  source 1..20: mol_type = other DNA
aacacactggggcctgttga

SEQ ID NO: 25400 - DNA, 20 bp, synthetic construct
  misc_feature 1..20: note = Description of Artificial Sequence: Synthetic oligonucleotide
  misc_feature 1..20: note = Target: SCN10A; (-) strand; PAM type: NRG; PAM sequence: AGG
  source 1..20: mol_type = other DNA
gaacacactggggcctgttg

SEQ ID NO: 25401 - DNA, 20 bp, synthetic construct
  misc_feature 1..20: note = Description of Artificial Sequence: Synthetic oligonucleotide
  misc_feature 1..20: note = Target: SCN10A; (-) strand; PAM type: NRG; PAM sequence: GAG
  source 1..20: mol_type = other DNA
ggaacacactggggcctgtt

SEQ ID NO: 25402 - DNA, 20 bp, synthetic construct
  misc_feature 1..20: note = Description of Artificial Sequence: Synthetic oligonucleotide
  misc_feature 1..20: note = Target: SCN10A; (-) strand; PAM type: NRG; PAM sequence: GGG
  source 1..20: mol_type = other DNA
acagggaggggaacacactg

SEQ ID NO: 25403 - DNA, 20 bp, synthetic construct
  misc_feature 1..20: note = Description of Artificial Sequence: Synthetic oligonucleotide
  misc_feature 1..20: note = Target: SCN10A; (-) strand; PAM type: NRG; PAM sequence: GGG
  source 1..20: mol_type = other DNA
cacagggaggggaacacact

SEQ ID NO: 25404 - DNA, 20 bp, synthetic construct
  misc_feature 1..20: note = Description of Artificial Sequence: Synthetic oligonucleotide
  misc_feature 1..20: note = Target: SCN10A; (-) strand; PAM type: NRG; PAM sequence: TGG
  source 1..20: mol_type = other DNA
acacagggaggggaacacac

SEQ ID NO: 25405 - DNA, 20 bp, synthetic construct
  misc_feature 1..20: note = Description of Artificial Sequence: Synthetic oligonucleotide
  misc_feature 1..20: note = Target: SCN10A; (-) strand; PAM type: NRG; PAM sequence: GGG
  source 1..20: mol_type = other DNA
gaacacatggacacagggag

SEQ ID NO: 25406 - DNA, 20 bp, synthetic construct
  misc_feature 1..20: note = Description of Artificial Sequence: Synthetic oligonucleotide
  misc_feature 1..20: note = Target: SCN10A; (-) strand; PAM type: NRG; PAM sequence: GGG
  source 1..20: mol_type = other DNA
agaacacatggacacaggga

SEQ ID NO: 25407 - DNA, 20 bp, synthetic construct
  misc_feature 1..20: note = Description of Artificial Sequence: Synthetic oligonucleotide
  misc_feature 1..20: note = Target: SCN10A; (-) strand; PAM type: NRG; PAM sequence: AGG
  source 1..20: mol_type = other DNA
gagaacacatggacacaggg

SEQ ID NO: 25408 - DNA, 20 bp, synthetic construct
  misc_feature 1..20: note = Description of Artificial Sequence: Synthetic oligonucleotide
  misc_feature 1..20: note = Target: SCN10A; (-) strand; PAM type: NRG; PAM sequence: GAG
  source 1..20: mol_type = other DNA
tgagaacacatggacacagg

SEQ ID NO: 25409 - DNA, 20 bp, synthetic construct
  misc_feature 1..20: note = Description of Artificial Sequence: Synthetic oligonucleotide
  misc_feature 1..20: note = Target: SCN10A; (-) strand; PAM type: NRG; PAM sequence: GGG
  source 1..20: mol_type = other DNA
aatgagaacacatggacaca

SEQ ID NO: 25410 - DNA, 20 bp, synthetic construct
  misc_feature 1..20: note = Description of Artificial Sequence: Synthetic oligonucleotide
  misc_feature 1..20: note = Target: SCN10A; (-) strand; PAM type: NRG; PAM sequence: AGG
  source 1..20: mol_type = other DNA
caatgagaacacatggacac

SEQ ID NO: 25411 - DNA, 20 bp, synthetic construct
  misc_feature 1..20: note = Description of Artificial Sequence: Synthetic oligonucleotide
  misc_feature 1..20: note = Target: SCN10A; (-) strand; PAM type: NRG; PAM sequence: CAG
  source 1..20: mol_type = other DNA
acaatgagaacacatggaca

SEQ ID NO: 25412 - DNA, 20 bp, synthetic construct
  misc_feature 1..20: note = Description of Artificial Sequence: Synthetic oligonucleotide
  misc_feature 1..20: note = Target: SCN10A; (-) strand; PAM type: NRG; PAM sequence: TGG
  source 1..20: mol_type = other DNA
agttgaacaatgagaacaca

SEQ ID NO: 25413 - DNA, 20 bp, synthetic construct
  misc_feature 1..20: note = Description of Artificial Sequence: Synthetic oligonucleotide
  misc_feature 1..20: note = Target: SCN10A; (-) strand; PAM type: NRG; PAM sequence: GAG
  source 1..20: mol_type = other DNA
ataagtgggagttgaacaat

SEQ ID NO: 25414 - DNA, 20 bp, synthetic construct
  misc_feature 1..20: note = Description of Artificial Sequence: Synthetic oligonucleotide
  misc_feature 1..20: note = Target: SCN10A; (-) strand; PAM type: NRG; PAM sequence: GAG
  source 1..20: mol_type = other DNA
atgttctcactcataagtgg

SEQ ID NO: 25415 - DNA, 20 bp, synthetic construct
  misc_feature 1..20: note = Description of Artificial Sequence: Synthetic oligonucleotide
  misc_feature 1..20: note = Target: SCN10A; (-) strand; PAM type: NRG; PAM sequence: GGG
  source 1..20: mol_type = other DNA
gtatgttctcactcataagt

SEQ ID NO: 25416 - DNA, 20 bp, synthetic construct
  misc_feature 1..20: note = Description of Artificial Sequence: Synthetic oligonucleotide
  misc_feature 1..20: note = Target: SCN10A; (-) strand; PAM type: NRG; PAM sequence: TGG
  source 1..20: mol_type = other DNA
cgtatgttctcactcataag

SEQ ID NO: 25417 - DNA, 20 bp, synthetic construct
  misc_feature 1..20: note = Description of Artificial Sequence: Synthetic oligonucleotide
  misc_feature 1..20: note = Target: SCN10A; (-) strand; PAM type: NRG; PAM sequence: AAG
  source 1..20: mol_type = other DNA
caccgtatgttctcactcat

SEQ ID NO: 25418 - DNA, 20 bp, synthetic construct
  misc_feature 1..20: note = Description of Artificial Sequence: Synthetic oligonucleotide
  misc_feature 1..20: note = Target: SCN10A; (-) strand; PAM type: NRG; PAM sequence: CAG
  source 1..20: mol_type = other DNA
tcagcaaactaacacaagaa

SEQ ID NO: 25419 - DNA, 20 bp, synthetic construct
  misc_feature 1..20: note = Description of Artificial Sequence: Synthetic oligonucleotide
  misc_feature 1..20: note = Target: SCN10A; (-) strand; PAM type: NRG; PAM sequence: AAG
  source 1..20: mol_type = other DNA
cattctcagcaaactaacac

SEQ ID NO: 25420 - DNA, 20 bp, synthetic construct
  misc_feature 1..20: note = Description of Artificial Sequence: Synthetic oligonucleotide
  misc_feature 1..20: note = Target: SCN10A; (-) strand; PAM type: NRG; PAM sequence: CAG
  source 1..20: mol_type = other DNA
aagctggaaaccatcattct

SEQ ID NO: 25421 - DNA, 20 bp, synthetic construct
  misc_feature 1..20: note = Description of Artificial Sequence: Synthetic oligonucleotide
  misc_feature 1..20: note = Target: SCN10A; (-) strand; PAM type: NRG; PAM sequence: TGG
  source 1..20: mol_type = other DNA
tgcagggacatggatgaagc

SEQ ID NO: 25422 - DNA, 20 bp, synthetic construct
  misc_feature 1..20: note = Description of Artificial Sequence: Synthetic oligonucleotide
  misc_feature 1..20: note = Target: SCN10A; (-) strand; PAM type: NRG; PAM sequence: AAG
  source 1..20: mol_type = other DNA
cctttgcagggacatggatg

SEQ ID NO: 25423 - DNA, 20 bp, synthetic construct
  misc_feature 1..20: note = Description of Artificial Sequence: Synthetic oligonucleotide
  misc_feature 1..20: note = Target: SCN10A; (-) strand; PAM type: NRG; PAM sequence: TGG
  source 1..20: mol_type = other DNA
tcatgtcctttgcagggaca

SEQ ID NO: 25424 - DNA, 20 bp, synthetic construct
  misc_feature 1..20: note = Description of Artificial Sequence: Synthetic oligonucleotide
  misc_feature 1..20: note = Target: SCN10A; (-) strand; PAM type: NRG; PAM sequence: GGG
  source 1..20: mol_type = other DNA
atgagttcatgtcctttgca

SEQ ID NO: 25425 - DNA, 20 bp, synthetic construct
  misc_feature 1..20: note = Description of Artificial Sequence: Synthetic oligonucleotide
  misc_feature 1..20: note = Target: SCN10A; (-) strand; PAM type: NRG; PAM sequence: AGG
  source 1..20: mol_type = other DNA
gatgagttcatgtcctttgc

SEQ ID NO: 25426 - DNA, 20 bp, synthetic construct
  misc_feature 1..20: note = Description of Artificial Sequence: Synthetic oligonucleotide
  misc_feature 1..20: note = Target: SCN10A; (-) strand; PAM type: NRG; PAM sequence: CAG
  source 1..20: mol_type = other DNA
ggatgagttcatgtcctttg

SEQ ID NO: 25427 - DNA, 20 bp, synthetic construct
  misc_feature 1..20: note = Description of Artificial Sequence: Synthetic oligonucleotide
  misc_feature 1..20: note = Target: SCN10A; (-) strand; PAM type: NRG; PAM sequence: GAG
  source 1..20: mol_type = other DNA
atgcagtcataaaaaaggat

SEQ ID NO: 25428 - DNA, 20 bp, synthetic construct
  misc_feature 1..20: note = Description of Artificial Sequence: Synthetic oligonucleotide
  misc_feature 1..20: note = Target: SCN10A; (-) strand; PAM type: NRG; PAM sequence: AGG
  source 1..20: mol_type = other DNA
atgctatgcagtcataaaaa

SEQ ID NO: 25429 - DNA, 20 bp, synthetic construct
  misc_feature 1..20: note = Description of Artificial Sequence: Synthetic oligonucleotide
  misc_feature 1..20: note = Target: SCN10A; (-) strand; PAM type: NRG; PAM sequence: AAG
  source 1..20: mol_type = other DNA
aatgctatgcagtcataaaa

SEQ ID NO: 25430 - DNA, 20 bp, synthetic construct
  misc_feature 1..20: note = Description of Artificial Sequence: Synthetic oligonucleotide
  misc_feature 1..20: note = Target: SCN10A; (-) strand; PAM type: NRG; PAM sequence: CAG
  source 1..20: mol_type = other DNA
atacaccatggaatgctatg

SEQ ID NO: 25431 - DNA, 20 bp, synthetic construct
  misc_feature 1..20: note = Description of Artificial Sequence: Synthetic oligonucleotide
  misc_feature 1..20: note = Target: SCN10A; (-) strand; PAM type: NRG; PAM sequence: TGG
  source 1..20: mol_type = other DNA
aatgtggcacatatacacca

SEQ ID NO: 25432 - DNA, 20 bp, synthetic construct
  misc_feature 1..20: note = Description of Artificial Sequence: Synthetic oligonucleotide
  misc_feature 1..20: note = Target: SCN10A; (-) strand; PAM type: NRG; PAM sequence: TGG
  source 1..20: mol_type = other DNA
gaaatagaagggaataaatg

SEQ ID NO: 25433 - DNA, 20 bp, synthetic construct
  misc_feature 1..20: note = Description of Artificial Sequence: Synthetic oligonucleotide
  misc_feature 1..20: note = Target: SCN10A; (-) strand; PAM type: NRG; PAM sequence: GGG
  source 1..20: mol_type = other DNA
ttagaaaagttgaaatagaa

SEQ ID NO: 25434 - DNA, 20 bp, synthetic construct
  misc_feature 1..20: note = Description of Artificial Sequence: Synthetic oligonucleotide
  misc_feature 1..20: note = Target: SCN10A; (-) strand; PAM type: NRG; PAM sequence: AGG
  source 1..20: mol_type = other DNA
cttagaaaagttgaaataga

SEQ ID NO: 25435 - DNA, 20 bp, synthetic construct
  misc_feature 1..20: note = Description of Artificial Sequence: Synthetic oligonucleotide
  misc_feature 1..20: note = Target: SCN10A; (-) strand; PAM type: NRG; PAM sequence: AAG
  source 1..20: mol_type = other DNA
tcttagaaaagttgaaatag

SEQ ID NO: 25436 - DNA, 20 bp, synthetic construct
  misc_feature 1..20: note = Description of Artificial Sequence: Synthetic oligonucleotide
  misc_feature 1..20: note = Target: SCN10A; (-) strand; PAM type: NRG; PAM sequence: TAG
  source 1..20: mol_type = other DNA
aattcttagaaaagttgaaa

SEQ ID NO: 25437 - DNA, 20 bp, synthetic construct
  misc_feature 1..20: note = Description of Artificial Sequence: Synthetic oligonucleotide
  misc_feature 1..20: note = Target: SCN10A; (-) strand; PAM type: NRG; PAM sequence: AAG
  source 1..20: mol_type = other DNA
ataattttaaattcttagaa

SEQ ID NO: 25438 - DNA, 20 bp, synthetic construct
  misc_feature 1..20: note = Description of Artificial Sequence: Synthetic oligonucleotide
  misc_feature 1..20: note = Target: SCN10A; (-) strand; PAM type: NRG; PAM sequence: TAG
  source 1..20: mol_type = other DNA
catttataattttaaattct

SEQ ID NO: 25439 - DNA, 20 bp, synthetic construct
  misc_feature 1..20: note = Description of Artificial Sequence: Synthetic oligonucleotide
  misc_feature 1..20: note = Target: SCN10A; (-) strand; PAM type: NRG; PAM sequence: AAG
  source 1..20: mol_type = other DNA
gatgctaaaatcatttgata

SEQ ID NO: 25440 - DNA, 20 bp, synthetic construct
  misc_feature 1..20: note = Description of Artificial Sequence: Synthetic oligonucleotide
  misc_feature 1..20: note = Target: SCN10A; (-) strand; PAM type: NRG; PAM sequence: TAG
  source 1..20: mol_type = other DNA
attaaaggaaaaggatcaca

SEQ ID NO: 25441 - DNA, 20 bp, synthetic construct
  misc_feature 1..20: note = Description of Artificial Sequence: Synthetic oligonucleotide
  misc_feature 1..20: note = Target: SCN10A; (-) strand; PAM type: NRG; PAM sequence: AGG
  source 1..20: mol_type = other DNA
tattaatagattaaaggaaa

SEQ ID NO: 25442 - DNA, 20 bp, synthetic construct
  misc_feature 1..20: note = Description of Artificial Sequence: Synthetic oligonucleotide
  misc_feature 1..20: note = Target: SCN10A; (-) strand; PAM type: NRG; PAM sequence: AAG
  source 1..20: mol_type = other DNA
ttattaatagattaaaggaa

SEQ ID NO: 25443 - DNA, 20 bp, synthetic construct
  misc_feature 1..20: note = Description of Artificial Sequence: Synthetic oligonucleotide
  misc_feature 1..20: note = Target: SCN10A; (-) strand; PAM type: NRG; PAM sequence: AGG
  source 1..20: mol_type = other DNA
tatttttattaatagattaa

SEQ ID NO: 25444 - DNA, 20 bp, synthetic construct
  misc_feature 1..20: note = Description of Artificial Sequence: Synthetic oligonucleotide
  misc_feature 1..20: note = Target: SCN10A; (-) strand; PAM type: NRG; PAM sequence: AAG
  source 1..20: mol_type = other DNA
atatttttattaatagatta

SEQ ID NO: 25445 - DNA, 20 bp, synthetic construct
  misc_feature 1..20: note = Description of Artificial Sequence: Synthetic oligonucleotide
  misc_feature 1..20: note = Target: SCN10A; (-) strand; PAM type: NRG; PAM sequence: TAG
  source 1..20: mol_type = other DNA
atacgttatatttttattaa

SEQ ID NO: 25446 - DNA, 20 bp, synthetic construct
  misc_feature 1..20: note = Description of Artificial Sequence: Synthetic oligonucleotide
  misc_feature 1..20: note = Target: SCN10A; (-) strand; PAM type: NRG; PAM sequence: CAG
  source 1..20: mol_type = other DNA
aacagtaatgcatgccacaa

SEQ ID NO: 25447 - DNA, 20 bp, synthetic construct
  misc_feature 1..20: note = Description of Artificial Sequence: Synthetic oligonucleotide
  misc_feature 1..20: note = Target: SCN10A; (-) strand; PAM type: NRG; PAM sequence: CAG
  source 1..20: mol_type = other DNA
tttttttttgctaatcataa

SEQ ID NO: 25448 - DNA, 20 bp, synthetic construct
  misc_feature 1..20: note = Description of Artificial Sequence: Synthetic oligonucleotide
  misc_feature 1..20: note = Target: SCN10A; (-) strand; PAM type: NRG; PAM sequence: GAG
  source 1..20: mol_type = other DNA
ataataacaggtgctttgca

SEQ ID NO: 25449 - DNA, 20 bp, synthetic construct
  misc_feature 1..20: note = Description of Artificial Sequence: Synthetic oligonucleotide
  misc_feature 1..20: note = Target: SCN10A; (-) strand; PAM type: NRG; PAM sequence: CAG
  source 1..20: mol_type = other DNA
ttataataacaggtgctttg

SEQ ID NO: 25450 - DNA, 20 bp, synthetic construct
  misc_feature 1..20: note = Description of Artificial Sequence: Synthetic oligonucleotide
  misc_feature 1..20: note = Target: SCN10A; (-) strand; PAM type: NRG; PAM sequence: AGG
  source 1..20: mol_type = other DNA
atacctttggttataataac

SEQ ID NO: 25451 - DNA, 20 bp, synthetic construct
  misc_feature 1..20: note = Description of Artificial Sequence: Synthetic oligonucleotide
  misc_feature 1..20: note = Target: SCN10A; (-) strand; PAM type: NRG; PAM sequence: CAG
  source 1..20: mol_type = other DNA
catacctttggttataataa

SEQ ID NO: 25452 - DNA, 20 bp, synthetic construct
  misc_feature 1..20: note = Description of Artificial Sequence: Synthetic oligonucleotide
  misc_feature 1..20: note = Target: SCN10A; (-) strand; PAM type: NRG; PAM sequence: TGG
  source 1..20: mol_type = other DNA
gcttgaacctaacatacctt

SEQ ID NO: 25453 - DNA, 20 bp, synthetic construct
  misc_feature 1..20: note = Description of Artificial Sequence: Synthetic oligonucleotide
  misc_feature 1..20: note = Target: SCN10A; (-) strand; PAM type: NRG; PAM sequence: CAG
  source 1..20: mol_type = other DNA
tgggagggatgcttccactc

SEQ ID NO: 25454 - DNA, 20 bp, synthetic construct
  misc_feature 1..20: note = Description of Artificial Sequence: Synthetic oligonucleotide
  misc_feature 1..20: note = Target: SCN10A; (-) strand; PAM type: NRG; PAM sequence: GGG
  source 1..20: mol_type = other DNA
ccatatccacacatctggga

SEQ ID NO: 25455 - DNA, 20 bp, synthetic construct
  misc_feature 1..20: note = Description of Artificial Sequence: Synthetic oligonucleotide
  misc_feature 1..20: note = Target: SCN10A; (-) strand; PAM type: NRG; PAM sequence: AGG
  source 1..20: mol_type = other DNA
tccatatccacacatctggg

SEQ ID NO: 25456 - DNA, 20 bp, synthetic construct
  misc_feature 1..20: note = Description of Artificial Sequence: Synthetic oligonucleotide
  misc_feature 1..20: note = Target: SCN10A; (-) strand; PAM type: NRG; PAM sequence: GAG
  source 1..20: mol_type = other DNA
ttccatatccacacatctgg

SEQ ID NO: 25457 - DNA, 20 bp, synthetic construct
  misc_feature 1..20: note = Description of Artificial Sequence: Synthetic oligonucleotide
  misc_feature 1..20: note = Target: SCN10A; (-) strand; PAM type: NRG; PAM sequence: GGG
  source 1..20: mol_type = other DNA
cattccatatccacacatct

SEQ ID NO: 25458 - DNA, 20 bp, synthetic construct
  misc_feature 1..20: note = Description of Artificial Sequence: Synthetic oligonucleotide
  misc_feature 1..20: note = Target: SCN10A; (-) strand; PAM type: NRG; PAM sequence: TGG
  source 1..20: mol_type = other DNA
acattccatatccacacatc

SEQ ID NO: 25459 - DNA, 20 bp, synthetic construct
  misc_feature 1..20: note = Description of Artificial Sequence: Synthetic oligonucleotide
  misc_feature 1..20: note = Target: SCN10A; (-) strand; PAM type: NRG; PAM sequence: GAG
  source 1..20: mol_type = other DNA
cctatagtttcagaatctgg

SEQ ID NO: 25460 - DNA, 20 bp, synthetic construct
  misc_feature 1..20: note = Description of Artificial Sequence: Synthetic oligonucleotide
  misc_feature 1..20: note = Target: SCN10A; (-) strand; PAM type: NRG; PAM sequence: GGG
  source 1..20: mol_type = other DNA
cccctatagtttcagaatct

SEQ ID NO: 25461 - DNA, 20 bp, synthetic construct
  misc_feature 1..20: note = Description of Artificial Sequence: Synthetic oligonucleotide
  misc_feature 1..20: note = Target: SCN10A; (-) strand; PAM type: NRG; PAM sequence: TGG
  source 1..20: mol_type = other DNA
acccctatagtttcagaatc

SEQ ID NO: 25462 - DNA, 20 bp, synthetic construct
  misc_feature 1..20: note = Description of Artificial Sequence: Synthetic oligonucleotide
  misc_feature 1..20: note = Target: SCN10A; (-) strand; PAM type: NRG; PAM sequence: CAG
  source 1..20: mol_type = other DNA
gggtgaaacccctatagttt

SEQ ID NO: 25463 - DNA, 20 bp, synthetic construct
  misc_feature 1..20: note = Description of Artificial Sequence: Synthetic oligonucleotide
  misc_feature 1..20: note = Target: SCN10A; (-) strand; PAM type: NRG; PAM sequence: TAG
  source 1..20: mol_type = other DNA
gttagtgggtgaaaccccta

SEQ ID NO: 25464 - DNA, 20 bp, synthetic construct
  misc_feature 1..20: note = Description of Artificial Sequence: Synthetic oligonucleotide
  misc_feature 1..20: note = Target: SCN10A; (-) strand; PAM type: NRG; PAM sequence: GGG
  source 1..20: mol_type = other DNA
ttctatttccctaggttagt

SEQ ID NO: 25465 - DNA, 20 bp, synthetic construct
  misc_feature 1..20: note = Description of Artificial Sequence: Synthetic oligonucleotide
  misc_feature 1..20: note = Target: SCN10A; (-) strand; PAM type: NRG; PAM sequence: TGG
  source 1..20: mol_type = other DNA
attctatttccctaggttag

SEQ ID NO: 25466 - DNA, 20 bp, synthetic construct
  misc_feature 1..20: note = Description of Artificial Sequence: Synthetic oligonucleotide
  misc_feature 1..20: note = Target: SCN10A; (-) strand; PAM type: NRG; PAM sequence: TAG
  source 1..20: mol_type = other DNA
gttattctatttccctaggt

SEQ ID NO: 25467 - DNA, 20 bp, synthetic construct
  misc_feature 1..20: note = Description of Artificial Sequence: Synthetic oligonucleotide
  misc_feature 1..20: note = Target: SCN10A; (-) strand; PAM type: NRG; PAM sequence: AGG
  source 1..20: mol_type = other DNA
tgaagttattctatttccct

SEQ ID NO: 25468 - DNA, 20 bp, synthetic construct
  misc_feature 1..20: note = Description of Artificial Sequence: Synthetic oligonucleotide
  misc_feature 1..20: note = Target: SCN10A; (-) strand; PAM type: NRG; PAM sequence: TAG
  source 1..20: mol_type = other DNA
ctgaagttattctatttccc

SEQ ID NO: 25469 - DNA, 20 bp, synthetic construct
  misc_feature 1..20: note = Description of Artificial Sequence: Synthetic oligonucleotide
  misc_feature 1..20: note = Target: SCN10A; (-) strand; PAM type: NRG; PAM sequence: AAG
  source 1..20: mol_type = other DNA
aagtaaccttagtattcctg

SEQ ID NO: 25470 - DNA, 20 bp, synthetic construct
  misc_feature 1..20: note = Description of Artificial Sequence: Synthetic oligonucleotide
  misc_feature 1..20: note = Target: SCN10A; (-) strand; PAM type: NRG; PAM sequence: TAG
  source 1..20: mol_type = other DNA
catatgcctcaaagtaacct

SEQ ID NO: 25471 - DNA, 20 bp, synthetic construct
  misc_feature 1..20: note = Description of Artificial Sequence: Synthetic oligonucleotide
  misc_feature 1..20: note = Target: SCN10A; (-) strand; PAM type: NRG; PAM sequence: AAG
  source 1..20: mol_type = other DNA
atcatgcttcatatgcctca

SEQ ID NO: 25472 - DNA, 20 bp, synthetic construct
  misc_feature 1..20: note = Description of Artificial Sequence: Synthetic oligonucleotide
  misc_feature 1..20: note = Target: SCN10A; (-) strand; PAM type: NRG; PAM sequence: AAG
  source 1..20: mol_type = other DNA
actcataaatgaagctgttt

SEQ ID NO: 25473 - DNA, 20 bp, synthetic construct
  misc_feature 1..20: note = Description of Artificial Sequence: Synthetic oligonucleotide
  misc_feature 1..20: note = Target: SCN10A; (-) strand; PAM type: NRG; PAM sequence: AAG
  source 1..20: mol_type = other DNA
tagaaaataactcataaatg

SEQ ID NO: 25474 - DNA, 20 bp, synthetic construct
  misc_feature 1..20: note = Description of Artificial Sequence: Synthetic oligonucleotide
  misc_feature 1..20: note = Target: SCN10A; (-) strand; PAM type: NRG; PAM sequence: TAG
  source 1..20: mol_type = other DNA
aaatggctctggagtatatt

SEQ ID NO: 25475 - DNA, 20 bp, synthetic construct
  misc_feature 1..20: note = Description of Artificial Sequence: Synthetic oligonucleotide
  misc_feature 1..20: note = Target: SCN10A; (-) strand; PAM type: NRG; PAM sequence: GAG
  source 1..20: mol_type = other DNA
actaagaacaaatggctctg

SEQ ID NO: 25476 - DNA, 20 bp, synthetic construct
  misc_feature 1..20: note = Description of Artificial Sequence: Synthetic oligonucleotide
  misc_feature 1..20: note = Target: SCN10A; (-) strand; PAM type: NRG; PAM sequence: TGG
  source 1..20: mol_type = other DNA
gaactaagaacaaatggctc

SEQ ID NO: 25477 - DNA, 20 bp, synthetic construct
  misc_feature 1..20: note = Description of Artificial Sequence: Synthetic oligonucleotide
  misc_feature 1..20: note = Target: SCN10A; (-) strand; PAM type: NRG; PAM sequence: TGG
  source 1..20: mol_type = other DNA
gagacagaactaagaacaaa

SEQ ID NO: 25478 - DNA, 20 bp, synthetic construct
  misc_feature 1..20: note = Description of Artificial Sequence: Synthetic oligonucleotide
  misc_feature 1..20: note = Target: SCN10A; (-) strand; PAM type: NRG; PAM sequence: AAG
  source 1..20: mol_type = other DNA
agcaaaactgagacagaact

SEQ ID NO: 25479 - DNA, 20 bp, synthetic construct
  misc_feature 1..20: note = Description of Artificial Sequence: Synthetic oligonucleotide
  misc_feature 1..20: note = Target: SCN10A; (-) strand; PAM type: NRG; PAM sequence: CAG
  source 1..20: mol_type = other DNA
agacaggagcaaaactgaga

SEQ ID NO: 25480 - DNA, 20 bp, synthetic construct
  misc_feature 1..20: note = Description of Artificial Sequence: Synthetic oligonucleotide
  misc_feature 1..20: note = Target: SCN10A; (-) strand; PAM type: NRG; PAM sequence: GAG
  source 1..20: mol_type = other DNA
agagagacaggagcaaaact

SEQ ID NO: 25481 - DNA, 20 bp, synthetic construct
  misc_feature 1..20: note = Description of Artificial Sequence: Synthetic oligonucleotide
  misc_feature 1..20: note = Target: SCN10A; (-) strand; PAM type: NRG; PAM sequence: GAG
  source 1..20: mol_type = other DNA
ctgctatgaaagagagacag

SEQ ID NO: 25482 - DNA, 20 bp, synthetic construct
  misc_feature 1..20: note = Description of Artificial Sequence: Synthetic oligonucleotide
  misc_feature 1..20: note = Target: SCN10A; (-) strand; PAM type: NRG; PAM sequence: AGG
  source 1..20: mol_type = other DNA
gcctgctatgaaagagagac

SEQ ID NO: 25483 - DNA, 20 bp, synthetic construct
  misc_feature 1..20: note = Description of Artificial Sequence: Synthetic oligonucleotide
  misc_feature 1..20: note = Target: SCN10A; (-) strand; PAM type: NRG; PAM sequence: CAG
  source 1..20: mol_type = other DNA
ggcctgctatgaaagagaga

SEQ ID NO: 25484 - DNA, 20 bp, synthetic construct
  misc_feature 1..20: note = Description of Artificial Sequence: Synthetic oligonucleotide
  misc_feature 1..20: note = Target: SCN10A; (-) strand; PAM type: NRG; PAM sequence: GAG
  source 1..20: mol_type = other DNA
agaaggcctgctatgaaaga

SEQ ID NO: 25485 - DNA, 20 bp, synthetic construct
  misc_feature 1..20: note = Description of Artificial Sequence: Synthetic oligonucleotide
  misc_feature 1..20: note = Target: SCN10A; (-) strand; PAM type: NRG; PAM sequence: GAG
  source 1..20: mol_type = other DNA
tgagaaggcctgctatgaaa

SEQ ID NO: 25486 - DNA, 20 bp, synthetic construct
  misc_feature 1..20: note = Description of Artificial Sequence: Synthetic oligonucleotide
  misc_feature 1..20: note = Target: SCN10A; (-) strand; PAM type: NRG; PAM sequence: AAG
  source 1..20: mol_type = other DNA
tttgagaaggcctgctatga

SEQ ID NO: 25487 - DNA, 20 bp, synthetic construct
  misc_feature 1..20: note = Description of Artificial Sequence: Synthetic oligonucleotide
  misc_feature 1..20: note = Target: SCN10A; (-) strand; PAM type: NRG; PAM sequence: AGG
  source 1..20: mol_type = other DNA
gagaaggtatgcttttgaga

SEQ ID NO: 25488 - DNA, 20 bp, synthetic construct
  misc_feature 1..20: note = Description of Artificial Sequence: Synthetic oligonucleotide
  misc_feature 1..20: note = Target: SCN10A; (-) strand; PAM type: NRG; PAM sequence: AAG
  source 1..20: mol_type = other DNA
agagaaggtatgcttttgag

SEQ ID NO: 25489 - DNA, 20 bp, synthetic construct
  misc_feature 1..20: note = Description of Artificial Sequence: Synthetic oligonucleotide
  misc_feature 1..20: note = Target: SCN10A; (-) strand; PAM type: NRG; PAM sequence: GAG
  source 1..20: mol_type = other DNA
cttagagaaggtatgctttt

SEQ ID NO: 25490 - DNA, 20 bp, synthetic construct
  misc_feature 1..20: note = Description of Artificial Sequence: Synthetic oligonucleotide
  misc_feature 1..20: note = Target: SCN10A; (-) strand; PAM type: NRG; PAM sequence: AGG
  source 1..20: mol_type = other DNA
acaaatgtatgccttagaga

SEQ ID NO: 25491 - DNA, 20 bp, synthetic construct
  misc_feature 1..20: note = Description of Artificial Sequence: Synthetic oligonucleotide
  misc_feature 1..20: note = Target: SCN10A; (-) strand; PAM type: NRG; PAM sequence: AAG
  source 1..20: mol_type = other DNA
cacaaatgtatgccttagag

SEQ ID NO: 25492 - DNA, 20 bp, synthetic construct
  misc_feature 1..20: note = Description of Artificial Sequence: Synthetic oligonucleotide
  misc_feature 1..20: note = Target: SCN10A; (-) strand; PAM type: NRG; PAM sequence: GAG
  source 1..20: mol_type = other DNA
acacacaaatgtatgcctta

SEQ ID NO: 25493 - DNA, 20 bp, synthetic construct
  misc_feature 1..20: note = Description of Artificial Sequence: Synthetic oligonucleotide
  misc_feature 1..20: note = Target: SCN10A; (-) strand; PAM type: NRG; PAM sequence: TAG
  source 1..20: mol_type = other DNA
gcacacacaaatgtatgcct

SEQ ID NO: 25494 - DNA, 20 bp, synthetic construct
  misc_feature 1..20: note = Description of Artificial Sequence: Synthetic oligonucleotide
  misc_feature 1..20: note = Target: SCN10A; (-) strand; PAM type: NRG; PAM sequence: TAG
  source 1..20: mol_type = other DNA
acacacactcactcacctgc

SEQ ID NO: 25495 - DNA, 20 bp, synthetic construct
  misc_feature 1..20: note = Description of Artificial Sequence: Synthetic oligonucleotide
  misc_feature 1..20: note = Target: SCN10A; (-) strand; PAM type: NRG; PAM sequence: GAG
  source 1..20: mol_type = other DNA
ctaaggtggcctgggaagat

SEQ ID NO: 25496 - DNA, 20 bp, synthetic construct
  misc_feature 1..20: note = Description of Artificial Sequence: Synthetic oligonucleotide
  misc_feature 1..20: note = Target: SCN10A; (-) strand; PAM type: NRG; PAM sequence: AAG
  source 1..20: mol_type = other DNA
aaagtctaaggtggcctggg

SEQ ID NO: 25497 - DNA, 20 bp, synthetic construct
  misc_feature 1..20: note = Description of Artificial Sequence: Synthetic oligonucleotide
  misc_feature 1..20: note = Target: SCN10A; (-) strand; PAM type: NRG; PAM sequence: GGG
  source 1..20: mol_type = other DNA
cagaaagtctaaggtggcct

SEQ ID NO: 25498 - DNA, 20 bp, synthetic construct
  misc_feature 1..20: note = Description of Artificial Sequence: Synthetic oligonucleotide
  misc_feature 1..20: note = Target: SCN10A; (-) strand; PAM type: NRG; PAM sequence: TGG
  source 1..20: mol_type = other DNA
ccagaaagtctaaggtggcc

SEQ ID NO: 25499 - DNA, 20 bp, synthetic construct
  misc_feature 1..20: note = Description of Artificial Sequence: Synthetic oligonucleotide
  misc_feature 1..20: note = Target: SCN10A; (-) strand; PAM type: NRG; PAM sequence: TGG
  source 1..20: mol_type = other DNA
cagccccagaaagtctaagg

SEQ ID NO: 25500 - DNA, 20 bp, synthetic construct
  misc_feature 1..20: note = Description of Artificial Sequence: Synthetic oligonucleotide
  misc_feature 1..20: note = Target: SCN10A; (-) strand; PAM type: NRG; PAM sequence: AGG
  source 1..20: mol_type = other DNA
tcccagccccagaaagtcta

SEQ ID NO: 25501 - DNA, 20 bp, synthetic construct
  misc_feature 1..20: note = Description of Artificial Sequence: Synthetic oligonucleotide
  misc_feature 1..20: note = Target: SCN10A; (-) strand; PAM type: NRG; PAM sequence: AAG
  source 1..20: mol_type = other DNA
gtcccagccccagaaagtct

SEQ ID NO: 25502 - DNA, 20 bp, synthetic construct
  misc_feature 1..20: note = Description of Artificial Sequence: Synthetic oligonucleotide
  misc_feature 1..20: note = Target: SCN10A; (-) strand; PAM type: NRG; PAM sequence: AAG
  source 1..20: mol_type = other DNA
gcctgagtcccagccccaga

SEQ ID NO: 25503 - DNA, 20 bp, synthetic construct
  misc_feature 1..20: note = Description of Artificial Sequence: Synthetic oligonucleotide
  misc_feature 1..20: note = Target: SCN10A; (-) strand; PAM type: NRG; PAM sequence: CAG
  source 1..20: mol_type = other DNA
aaatgcctgagtcccagccc

SEQ ID NO: 25504 - DNA, 20 bp, synthetic construct
  misc_feature 1..20: note = Description of Artificial Sequence: Synthetic oligonucleotide
  misc_feature 1..20: note = Target: SCN10A; (-) strand; PAM type: NRG; PAM sequence: CAG
  source 1..20: mol_type = other DNA
ttttttaaatgcctgagtcc

SEQ ID NO: 25505 - DNA, 20 bp, synthetic construct
  misc_feature 1..20: note = Description of Artificial Sequence: Synthetic oligonucleotide
  misc_feature 1..20: note = Target: SCN10A; (-) strand; PAM type: NRG; PAM sequence: GAG
  source 1..20: mol_type = other DNA
gggagattttttaaatgcct

SEQ ID NO: 25506 - DNA, 20 bp, synthetic construct
  misc_feature 1..20: note = Description of Artificial Sequence: Synthetic oligonucleotide
  misc_feature 1..20: note = Target: SCN10A; (-) strand; PAM type: NRG; PAM sequence: GAG
  source 1..20: mol_type = other DNA
tgcatattgcaatttttggg

SEQ ID NO: 25507 - DNA, 20 bp, synthetic construct
  misc_feature 1..20: note = Description of Artificial Sequence: Synthetic oligonucleotide
  misc_feature 1..20: note = Target: SCN10A; (-) strand; PAM type: NRG; PAM sequence: GGG
  source 1..20: mol_type = other DNA
gctgcatattgcaatttttg

SEQ ID NO: 25508 - DNA, 20 bp, synthetic construct
  misc_feature 1..20: note = Description of Artificial Sequence: Synthetic oligonucleotide
  misc_feature 1..20: note = Target: SCN10A; (-) strand; PAM type: NRG; PAM sequence: GGG
  source 1..20: mol_type = other DNA
ggctgcatattgcaattttt

SEQ ID NO: 25509 - DNA, 20 bp, synthetic construct
  misc_feature 1..20: note = Description of Artificial Sequence: Synthetic oligonucleotide
  misc_feature 1..20: note = Target: SCN10A; (-) strand; PAM type: NRG; PAM sequence: TGG
  source 1..20: mol_type = other DNA
tggctgcatattgcaatttt

SEQ ID NO: 25510 - DNA, 20 bp, synthetic construct
  misc_feature 1..20: note = Description of Artificial Sequence: Synthetic oligonucleotide
  misc_feature 1..20: note = Target: SCN10A; (-) strand; PAM type: NRG; PAM sequence: TGG
  source 1..20: mol_type = other DNA
agattagtggttctcaactt

SEQ ID NO: 25511 - DNA, 20 bp, synthetic construct
  misc_feature 1..20: note = Description of Artificial Sequence: Synthetic oligonucleotide
  misc_feature 1..20: note = Target: SCN10A; (-) strand; PAM type: NRG; PAM sequence: TGG
  source 1..20: mol_type = other DNA
ttcaaagagatacagattag

SEQ ID NO: 25512 - DNA, 20 bp, synthetic construct
  misc_feature 1..20: note = Description of Artificial Sequence: Synthetic oligonucleotide
  misc_feature 1..20: note = Target: SCN10A; (-) strand; PAM type: NRG; PAM sequence: TAG
  source 1..20: mol_type = other DNA
agtttcaaagagatacagat

SEQ ID NO: 25513 - DNA, 20 bp, synthetic construct
  misc_feature 1..20: note = Description of Artificial Sequence: Synthetic oligonucleotide
  misc_feature 1..20: note = Target: SCN10A; (-) strand; PAM type: NRG; PAM sequence: CAG
  source 1..20: mol_type = other DNA
ttttcagtttcaaagagata

SEQ ID NO: 25514 - DNA, 20 bp, synthetic construct
  misc_feature 1..20: note = Description of Artificial Sequence: Synthetic oligonucleotide
  misc_feature 1..20: note = Target: SCN10A; (-) strand; PAM type: NRG; PAM sequence: GAG
  source 1..20: mol_type = other DNA
acatgattttcagtttcaaa

SEQ ID NO: 25515 - DNA, 20 bp, synthetic construct
  misc_feature 1..20: note = Description of Artificial Sequence: Synthetic oligonucleotide
  misc_feature 1..20: note = Target: SCN10A; (-) strand; PAM type: NRG; PAM sequence: AAG
  source 1..20: mol_type = other DNA
atacatgattttcagtttca

SEQ ID NO: 25516 - DNA, 20 bp, synthetic construct
  misc_feature 1..20: note = Description of Artificial Sequence: Synthetic oligonucleotide
  misc_feature 1..20: note = Target: SCN10A; (-) strand; PAM type: NRG; PAM sequence: CAG
  source 1..20: mol_type = other DNA
tcataaacatacatgatttt

SEQ ID NO: 25517 - DNA, 20 bp, synthetic construct
  misc_feature 1..20: note = Description of Artificial Sequence: Synthetic oligonucleotide
  misc_feature 1..20: note = Target: SCN10A; (-) strand; PAM type: NRG; PAM sequence: GAG
  source 1..20: mol_type = other DNA
aaccaggtctctccttctgt

SEQ ID NO: 25518 - DNA, 20 bp, synthetic construct
  misc_feature 1..20: note = Description of Artificial Sequence: Synthetic oligonucleotide
  misc_feature 1..20: note = Target: SCN10A; (-) strand; PAM type: NRG; PAM sequence: AGG
  source 1..20: mol_type = other DNA
tatatgtctttgtaataacc

SEQ ID NO: 25519 - DNA, 20 bp, synthetic construct
  misc_feature 1..20: note = Description of Artificial Sequence: Synthetic oligonucleotide
  misc_feature 1..20: note = Target: SCN10A; (-) strand; PAM type: NRG; PAM sequence: CAG
  source 1..20: mol_type = other DNA
ctatatgtctttgtaataac

SEQ ID NO: 25520 - DNA, 20 bp, synthetic construct
  misc_feature 1..20: note = Description of Artificial Sequence: Synthetic oligonucleotide
  misc_feature 1..20: note = Target: SCN10A; (-) strand; PAM type: NRG; PAM sequence: GGG
  source 1..20: mol_type = other DNA
tatcctgccatgcctcatgt

SEQ ID NO: 25521 - DNA, 20 bp, synthetic construct
  misc_feature 1..20: note = Description of Artificial Sequence: Synthetic oligonucleotide
  misc_feature 1..20: note = Target: SCN10A; (-) strand; PAM type: NRG; PAM sequence: TGG
  source 1..20: mol_type = other DNA
ttatcctgccatgcctcatg

SEQ ID NO: 25522 - DNA, 20 bp, synthetic construct
  misc_feature 1..20: note = Description of Artificial Sequence: Synthetic oligonucleotide
  misc_feature 1..20: note = Target: SCN10A; (-) strand; PAM type: NRG; PAM sequence: CAG
  source 1..20: mol_type = other DNA
tcttttcttccttcacttgg

SEQ ID NO: 25523 - DNA, 20 bp, synthetic construct
  misc_feature 1..20: note = Description of Artificial Sequence: Synthetic oligonucleotide
  misc_feature 1..20: note = Target: SCN10A; (-) strand; PAM type: NRG; PAM sequence: TGG
  source 1..20: mol_type = other DNA
ctttcttttcttccttcact

SEQ ID NO: 25524 - DNA, 20 bp, synthetic construct
  misc_feature 1..20: note = Description of Artificial Sequence: Synthetic oligonucleotide
  misc_feature 1..20: note = Target: SCN10A; (-) strand; PAM type: NRG; PAM sequence: TAG
  source 1..20: mol_type = other DNA
tccagagaaaattgagtgag

SEQ ID NO: 25525 - DNA, 20 bp, synthetic construct
  misc_feature 1..20: note = Description of Artificial Sequence: Synthetic oligonucleotide
  misc_feature 1..20: note = Target: SCN10A; (-) strand; PAM type: NRG; PAM sequence: GAG
  source 1..20: mol_type = other DNA
ccttccagagaaaattgagt

SEQ ID NO: 25526 - DNA, 20 bp, synthetic construct
  misc_feature 1..20: note = Description of Artificial Sequence: Synthetic oligonucleotide
  misc_feature 1..20: note = Target: SCN10A; (-) strand; PAM type: NRG; PAM sequence: GAG
  source 1..20: mol_type = other DNA
ctgaccttccagagaaaatt

SEQ ID NO: 25527 - DNA, 20 bp, synthetic construct
  misc_feature 1..20: note = Description of Artificial Sequence: Synthetic oligonucleotide
  misc_feature 1..20: note = Target: SCN10A; (-) strand; PAM type: NRG; PAM sequence: GAG
  source 1..20: mol_type = other DNA
tgacccgaactgaccttcca

SEQ ID NO: 25528 - DNA, 20 bp, synthetic construct
  misc_feature 1..20: note = Description of Artificial Sequence: Synthetic oligonucleotide
  misc_feature 1..20: note = Target: SCN10A; (-) strand; PAM type: NRG; PAM sequence: CAG
  source 1..20: mol_type = other DNA
catgacccgaactgaccttc

SEQ ID NO: 25529 - DNA, 20 bp, synthetic construct
  misc_feature 1..20: note = Description of Artificial Sequence: Synthetic oligonucleotide
  misc_feature 1..20: note = Target: SCN10A; (-) strand; PAM type: NRG; PAM sequence: TGG
  source 1..20: mol_type = other DNA
atttattacggtcactattt

SEQ ID NO: 25530 - DNA, 20 bp, synthetic construct
  misc_feature 1..20: note = Description of Artificial Sequence: Synthetic oligonucleotide
  misc_feature 1..20: note = Target: SCN10A; (-) strand; PAM type: NRG; PAM sequence: CGG
  source 1..20: mol_type = other DNA
gtggttcagtttatttatta

SEQ ID NO: 25531 - DNA, 20 bp, synthetic construct
  misc_feature 1..20: note = Description of Artificial Sequence: Synthetic oligonucleotide
  misc_feature 1..20: note = Target: SCN10A; (-) strand; PAM type: NRG; PAM sequence: CAG
  source 1..20: mol_type = other DNA
cacaggcctttcaggtggtt

SEQ ID NO: 25532 - DNA, 20 bp, synthetic construct
  misc_feature 1..20: note = Description of Artificial Sequence: Synthetic oligonucleotide
  misc_feature 1..20: note = Target: SCN10A; (-) strand; PAM type: NRG; PAM sequence: TGG
  source 1..20: mol_type = other DNA
cttaacacaggcctttcagg

SEQ ID NO: 25533 - DNA, 20 bp, synthetic construct
  misc_feature 1..20: note = Description of Artificial Sequence: Synthetic oligonucleotide
  misc_feature 1..20: note = Target: SCN10A; (-) strand; PAM type: NRG; PAM sequence: AGG
  source 1..20: mol_type = other DNA
ttccttaacacaggcctttc

SEQ ID NO: 25534 - DNA, 20 bp, synthetic construct
  misc_feature 1..20: note = Description of Artificial Sequence: Synthetic oligonucleotide
  misc_feature 1..20: note = Target: SCN10A; (-) strand; PAM type: NRG; PAM sequence: CAG
  source 1..20: mol_type = other DNA
tttccttaacacaggccttt

SEQ ID NO: 25535 - DNA, 20 bp, synthetic construct
  misc_feature 1..20: note = Description of Artificial Sequence: Synthetic oligonucleotide
  misc_feature 1..20: note = Target: SCN10A; (-) strand; PAM type: NRG; PAM sequence: AGG
  source 1..20: mol_type = other DNA
tctcagcttttccttaacac

SEQ ID NO: 25536 - DNA, 20 bp, synthetic construct
  misc_feature 1..20: note = Description of Artificial Sequence: Synthetic oligonucleotide
  misc_feature 1..20: note = Target: SCN10A; (-) strand; PAM type: NRG; PAM sequence: CAG
  source 1..20: mol_type = other DNA
atctcagcttttccttaaca

SEQ ID NO: 25537 - DNA, 20 bp, synthetic construct
  misc_feature 1..20: note = Description of Artificial Sequence: Synthetic oligonucleotide
  misc_feature 1..20: note = Target: SCN10A; (-) strand; PAM type: NRG; PAM sequence: CAG
  source 1..20: mol_type = other DNA
tcacagagacttggtgatct

SEQ ID NO: 25538 - DNA, 20 bp, synthetic construct
  misc_feature 1..20: note = Description of Artificial Sequence: Synthetic oligonucleotide
  misc_feature 1..20: note = Target: SCN10A; (-) strand; PAM type: NRG; PAM sequence: TGG
  source 1..20: mol_type = other DNA
tagatgacatcacagagact

SEQ ID NO: 25539 - DNA, 20 bp, synthetic construct
  misc_feature 1..20: note = Description of Artificial Sequence: Synthetic oligonucleotide
  misc_feature 1..20: note = Target: SCN10A; (-) strand; PAM type: NRG; PAM sequence: GAG
  source 1..20: mol_type = other DNA
tgatcctagatgacatcaca

SEQ ID NO: 25540 - DNA, 20 bp, synthetic construct
  misc_feature 1..20: note = Description of Artificial Sequence: Synthetic oligonucleotide
  misc_feature 1..20: note = Target: SCN10A; (-) strand; PAM type: NRG; PAM sequence: CAG
  source 1..20: mol_type = other DNA
ggtgatcctagatgacatca

SEQ ID NO: 25541 - DNA, 20 bp, synthetic construct
  misc_feature 1..20: note = Description of Artificial Sequence: Synthetic oligonucleotide
  misc_feature 1..20: note = Target: SCN10A; (-) strand; PAM type: NRG; PAM sequence: TAG
  source 1..20: mol_type = other DNA
attcagcatcaaggtgatcc

SEQ ID NO: 25542 - DNA, 20 bp, synthetic construct
  misc_feature 1..20: note = Description of Artificial Sequence: Synthetic oligonucleotide
  misc_feature 1..20: note = Target: SCN10A; (-) strand; PAM type: NRG; PAM sequence: AGG
  source 1..20: mol_type = other DNA
aatgtaatcattcagcatca

SEQ ID NO: 25543 - DNA, 20 bp, synthetic construct
  misc_feature 1..20: note = Description of Artificial Sequence: Synthetic oligonucleotide
  misc_feature 1..20: note = Target: SCN10A; (-) strand; PAM type: NRG; PAM sequence: AAG
  source 1..20: mol_type = other DNA
gaatgtaatcattcagcatc

SEQ ID NO: 25544 - DNA, 20 bp, synthetic construct
  misc_feature 1..20: note = Description of Artificial Sequence: Synthetic oligonucleotide
  misc_feature 1..20: note = Target: SCN10A; (-) strand; PAM type: NRG; PAM sequence: CAG
  source 1..20: mol_type = other DNA
gatttatgaatgtaatcatt

SEQ ID NO: 25545 - DNA, 20 bp, synthetic construct
  misc_feature 1..20: note = Description of Artificial Sequence: Synthetic oligonucleotide
  misc_feature 1..20: note = Target: SCN10A; (-) strand; PAM type: NRG; PAM sequence: AAG
  source 1..20: mol_type = other DNA
tcataaagctaatattggct

SEQ ID NO: 25546 - DNA, 20 bp, synthetic construct
  misc_feature 1..20: note = Description of Artificial Sequence: Synthetic oligonucleotide
  misc_feature 1..20: note = Target: SCN10A; (-) strand; PAM type: NRG; PAM sequence: TGG
  source 1..20: mol_type = other DNA
caagatcataaagctaatat

SEQ ID NO: 25547 - DNA, 20 bp, synthetic construct
  misc_feature 1..20: note = Description of Artificial Sequence: Synthetic oligonucleotide
  misc_feature 1..20: note = Target: SCN10A; (-) strand; PAM type: NRG; PAM sequence: AAG
  source 1..20: mol_type = other DNA
tattatgtgacaagatcata

SEQ ID NO: 25548 - DNA, 20 bp, synthetic construct
  misc_feature 1..20: note = Description of Artificial Sequence: Synthetic oligonucleotide
  misc_feature 1..20: note = Target: SCN10A; (-) strand; PAM type: NRG; PAM sequence: AAG
  source 1..20: mol_type = other DNA
gttagtggttattatgtgac

SEQ ID NO: 25549 - DNA, 20 bp, synthetic construct
  misc_feature 1..20: note = Description of Artificial Sequence: Synthetic oligonucleotide
  misc_feature 1..20: note = Target: SCN10A; (-) strand; PAM type: NRG; PAM sequence: TGG
  source 1..20: mol_type = other DNA
aggcactcagtaaatgttag

SEQ ID NO: 25550 - DNA, 20 bp, synthetic construct
  misc_feature 1..20: note = Description of Artificial Sequence: Synthetic oligonucleotide
  misc_feature 1..20: note = Target: SCN10A; (-) strand; PAM type: NRG; PAM sequence: TAG
  source 1..20: mol_type = other DNA
cttaggcactcagtaaatgt

SEQ ID NO: 25551 - DNA, 20 bp, synthetic construct
  misc_feature 1..20: note = Description of Artificial Sequence: Synthetic oligonucleotide
  misc_feature 1..20: note = Target: SCN10A; (-) strand; PAM type: NRG; PAM sequence: CAG
  source 1..20: mol_type = other DNA
ctcagcctagcttaggcact

SEQ ID NO: 25552 - DNA, 20 bp, synthetic construct
  misc_feature 1..20: note = Description of Artificial Sequence: Synthetic oligonucleotide
  misc_feature 1..20: note = Target: SCN10A; (-) strand; PAM type: NRG; PAM sequence: AGG
  source 1..20: mol_type = other DNA
caaagtactcagcctagctt

SEQ ID NO: 25553 - DNA, 20 bp, synthetic construct
  misc_feature 1..20: note = Description of Artificial Sequence: Synthetic oligonucleotide
  misc_feature 1..20: note = Target: SCN10A; (-) strand; PAM type: NRG; PAM sequence: TAG
  source 1..20: mol_type = other DNA
acaaagtactcagcctagct

SEQ ID NO: 25554 - DNA, 20 bp, synthetic construct
  misc_feature 1..20: note = Description of Artificial Sequence: Synthetic oligonucleotide
  misc_feature 1..20: note = Target: SCN10A; (-) strand; PAM type: NRG; PAM sequence: TAG
  source 1..20: mol_type = other DNA
catggacaaagtactcagcc

SEQ ID NO: 25555 - DNA, 20 bp, synthetic construct
  misc_feature 1..20: note = Description of Artificial Sequence: Synthetic oligonucleotide
  misc_feature 1..20: note = Target: SCN10A; (-) strand; PAM type: NRG; PAM sequence: CAG
  source 1..20: mol_type = other DNA
agtaacatggacaaagtact

SEQ ID NO: 25556 - DNA, 20 bp, synthetic construct
  misc_feature 1..20: note = Description of Artificial Sequence: Synthetic oligonucleotide
  misc_feature 1..20: note = Target: SCN10A; (-) strand; PAM type: NRG; PAM sequence: AAG
  source 1..20: mol_type = other DNA
tattagaagtaacatggaca

SEQ ID NO: 25557 - DNA, 20 bp, synthetic construct
  misc_feature 1..20: note = Description of Artificial Sequence: Synthetic oligonucleotide
  misc_feature 1..20: note = Target: SCN10A; (-) strand; PAM type: NRG; PAM sequence: TGG
  source 1..20: mol_type = other DNA
cagttgtattagaagtaaca

SEQ ID NO: 25558 - DNA, 20 bp, synthetic construct
  misc_feature 1..20: note = Description of Artificial Sequence: Synthetic oligonucleotide
  misc_feature 1..20: note = Target: SCN10A; (-) strand; PAM type: NRG; PAM sequence: AAG
  source 1..20: mol_type = other DNA
ctgtagatcagttgtattag

SEQ ID NO: 25559 - DNA, 20 bp, synthetic construct
  misc_feature 1..20: note = Description of Artificial Sequence: Synthetic oligonucleotide
  misc_feature 1..20: note = Target: SCN10A; (-) strand; PAM type: NRG; PAM sequence: TAG
  source 1..20: mol_type = other DNA
cacctgtagatcagttgtat

SEQ ID NO: 25560 - DNA, 20 bp, synthetic construct
  misc_feature 1..20: note = Description of Artificial Sequence: Synthetic oligonucleotide
  misc_feature 1..20: note = Target: SCN10A; (-) strand; PAM type: NRG; PAM sequence: CAG
  source 1..20: mol_type = other DNA
atttatacccacctgtagat

SEQ ID NO: 25561 - DNA, 20 bp, synthetic construct
  misc_feature 1..20: note = Description of Artificial Sequence: Synthetic oligonucleotide
  misc_feature 1..20: note = Target: SCN10A; (-) strand; PAM type: NRG; PAM sequence: TAG
  source 1..20: mol_type = other DNA
tagatatttatacccacctg

SEQ ID NO: 25562 - DNA, 20 bp, synthetic construct
  misc_feature 1..20: note = Description of Artificial Sequence: Synthetic oligonucleotide
  misc_feature 1..20: note = Target: SCN10A; (-) strand; PAM type: NRG; PAM sequence: TAG
  source 1..20: mol_type = other DNA
tgtttctcagcttcaaaatg

SEQ ID NO: 25563 - DNA, 20 bp, synthetic construct
  misc_feature 1..20: note = Description of Artificial Sequence: Synthetic oligonucleotide
  misc_feature 1..20: note = Target: SCN10A; (-) strand; PAM type: NRG; PAM sequence: CAG
  source 1..20: mol_type = other DNA
ttttttgtcagcctgtttct

SEQ ID NO: 25564 - DNA, 20 bp, synthetic construct
  misc_feature 1..20: note = Description of Artificial Sequence: Synthetic oligonucleotide
  misc_feature 1..20: note = Target: SCN10A; (-) strand; PAM type: NRG; PAM sequence: CAG
  source 1..20: mol_type = other DNA
atttaacttttattttttgt

SEQ ID NO: 25565 - DNA, 20 bp, synthetic construct
  misc_feature 1..20: note = Description of Artificial Sequence: Synthetic oligonucleotide
  misc_feature 1..20: note = Target: SCN10A; (-) strand; PAM type: NRG; PAM sequence: AAG
  source 1..20: mol_type = other DNA
ctagctgcatgacctgagaa

SEQ ID NO: 25566 - DNA, 20 bp, synthetic construct
  misc_feature 1..20: note = Description of Artificial Sequence: Synthetic oligonucleotide
  misc_feature 1..20: note = Target: SCN10A; (-) strand; PAM type: NRG; PAM sequence: GAG
  source 1..20: mol_type = other DNA
gttgactagctgcatgacct

SEQ ID NO: 25567 - DNA, 20 bp, synthetic construct
  misc_feature 1..20: note = Description of Artificial Sequence: Synthetic oligonucleotide
  misc_feature 1..20: note = Target: SCN10A; (-) strand; PAM type: NRG; PAM sequence: TAG
  source 1..20: mol_type = other DNA
atctctgcagcatggttgac

SEQ ID NO: 25568 - DNA, 20 bp, synthetic construct
  misc_feature 1..20: note = Description of Artificial Sequence: Synthetic oligonucleotide
  misc_feature 1..20: note = Target: SCN10A; (-) strand; PAM type: NRG; PAM sequence: TGG
  source 1..20: mol_type = other DNA
gagttcacatctctgcagca

SEQ ID NO: 25569 - DNA, 20 bp, synthetic construct
  misc_feature 1..20: note = Description of Artificial Sequence: Synthetic oligonucleotide
  misc_feature 1..20: note = Target: SCN10A; (-) strand; PAM type: NRG; PAM sequence: CAG
  source 1..20: mol_type = other DNA
gataagagttcacatctctg

SEQ ID NO: 25570 - DNA, 20 bp, synthetic construct
  misc_feature 1..20: note = Description of Artificial Sequence: Synthetic oligonucleotide
  misc_feature 1..20: note = Target: SCN10A; (-) strand; PAM type: NRG; PAM sequence: GAG
  source 1..20: mol_type = other DNA
gtttgttatcaaacagataa

SEQ ID NO: 25571 - DNA, 20 bp, synthetic construct
  misc_feature 1..20: note = Description of Artificial Sequence: Synthetic oligonucleotide
  misc_feature 1..20: note = Target: SCN10A; (-) strand; PAM type: NRG; PAM sequence: AAG
  source 1..20: mol_type = other DNA
gagtttgttatcaaacagat

SEQ ID NO: 25572 - DNA, 20 bp, synthetic construct
  misc_feature 1..20: note = Description of Artificial Sequence: Synthetic oligonucleotide
  misc_feature 1..20: note = Target: SCN10A; (-) strand; PAM type: NRG; PAM sequence: CAG
  source 1..20: mol_type = other DNA
gctcagagtttgttatcaaa

SEQ ID NO: 25573 - DNA, 20 bp, synthetic construct
  misc_feature 1..20: note = Description of Artificial Sequence: Synthetic oligonucleotide
  misc_feature 1..20: note = Target: SCN10A; (-) strand; PAM type: NRG; PAM sequence: GAG
  source 1..20: mol_type = other DNA
gtttccttctatcttgctca

SEQ ID NO: 25574 - DNA, 20 bp, synthetic construct
  misc_feature 1..20: note = Description of Artificial Sequence: Synthetic oligonucleotide
  misc_feature 1..20: note = Target: SCN10A; (-) strand; PAM type: NRG; PAM sequence: CAG
  source 1..20: mol_type = other DNA
ctgtttccttctatcttgct

SEQ ID NO: 25575 - DNA, 20 bp, synthetic construct
  misc_feature 1..20: note = Description of Artificial Sequence: Synthetic oligonucleotide
  misc_feature 1..20: note = Target: SCN10A; (-) strand; PAM type: NRG; PAM sequence: GAG
  source 1..20: mol_type = other DNA
gaaggacattttggaaaagg

SEQ ID NO: 25576 - DNA, 20 bp, synthetic construct
  misc_feature 1..20: note = Description of Artificial Sequence: Synthetic oligonucleotide
  misc_feature 1..20: note = Target: SCN10A; (-) strand; PAM type: NRG; PAM sequence: GGG
  source 1..20: mol_type = other DNA
cagaaggacattttggaaaa

SEQ ID NO: 25577 - DNA, 20 bp, synthetic construct
  misc_feature 1..20: note = Description of Artificial Sequence: Synthetic oligonucleotide
  misc_feature 1..20: note = Target: SCN10A; (-) strand; PAM type: NRG; PAM sequence: AGG
  source 1..20: mol_type = other DNA
gcagaaggacattttggaaa

SEQ ID NO: 25578 - DNA, 20 bp, synthetic construct
  misc_feature 1..20: note = Description of Artificial Sequence: Synthetic oligonucleotide
  misc_feature 1..20: note = Target: SCN10A; (-) strand; PAM type: NRG; PAM sequence: AAG
  source 1..20: mol_type = other DNA
ggcagaaggacattttggaa

SEQ ID NO: 25579 - DNA, 20 bp, synthetic construct
  misc_feature 1..20: note = Description of Artificial Sequence: Synthetic oligonucleotide
  misc_feature 1..20: note = Target: SCN10A; (-) strand; PAM type: NRG; PAM sequence: TGG
  source 1..20: mol_type = other DNA
ttcggggcagaaggacattt

SEQ ID NO: 25580 - DNA, 20 bp, synthetic construct
  misc_feature 1..20: note = Description of Artificial Sequence: Synthetic oligonucleotide
  misc_feature 1..20: note = Target: SCN10A; (-) strand; PAM type: NRG; PAM sequence: AGG
  source 1..20: mol_type = other DNA
aatgaaggcttcggggcaga

SEQ ID NO: 25581 - DNA, 20 bp, synthetic construct
  misc_feature 1..20: note = Description of Artificial Sequence: Synthetic oligonucleotide
  misc_feature 1..20: note = Target: SCN10A; (-) strand; PAM type: NRG; PAM sequence: AAG
  source 1..20: mol_type = other DNA
aaatgaaggcttcggggcag

SEQ ID NO: 25582 - DNA, 20 bp, synthetic construct
  misc_feature 1..20: note = Description of Artificial Sequence: Synthetic oligonucleotide
  misc_feature 1..20: note = Target: SCN10A; (-) strand; PAM type: NRG; PAM sequence: CAG
  source 1..20: mol_type = other DNA
ctgaaatgaaggcttcgggg

SEQ ID NO: 25583 - DNA, 20 bp, synthetic construct
  misc_feature 1..20: note = Description of Artificial Sequence: Synthetic oligonucleotide
  misc_feature 1..20: note = Target: SCN10A; (-) strand; PAM type: NRG; PAM sequence: GGG
  source 1..20: mol_type = other DNA
atactgaaatgaaggcttcg

SEQ ID NO: 25584 - DNA, 20 bp, synthetic construct
  misc_feature 1..20: note = Description of Artificial Sequence: Synthetic oligonucleotide
  misc_feature 1..20: note = Target: SCN10A; (-) strand; PAM type: NRG; PAM sequence: GGG
  source 1..20: mol_type = other DNA
tatactgaaatgaaggcttc

SEQ ID NO: 25585 - DNA, 20 bp, synthetic construct
  misc_feature 1..20: note = Description of Artificial Sequence: Synthetic oligonucleotide
  misc_feature 1..20: note = Target: SCN10A; (-) strand; PAM type: NRG; PAM sequence: CGG
  source 1..20: mol_type = other DNA
gtatactgaaatgaaggctt

SEQ ID NO: 25586 - DNA, 20 bp, synthetic construct
  misc_feature 1..20: note = Description of Artificial Sequence: Synthetic oligonucleotide
  misc_feature 1..20: note = Target: SCN10A; (-) strand; PAM type: NRG; PAM sequence: AGG
  source 1..20: mol_type = other DNA
cattttgtatactgaaatga

SEQ ID NO: 25587 - DNA, 20 bp, synthetic construct
  misc_feature 1..20: note = Description of Artificial Sequence: Synthetic oligonucleotide
  misc_feature 1..20: note = Target: SCN10A; (-) strand; PAM type: NRG; PAM sequence: AAG
  source 1..20: mol_type = other DNA
ccattttgtatactgaaatg

SEQ ID NO: 25588 - DNA, 20 bp, synthetic construct
  misc_feature 1..20: note = Description of Artificial Sequence: Synthetic oligonucleotide
  misc_feature 1..20: note = Target: SCN10A; (-) strand; PAM type: NRG; PAM sequence: AGG
  source 1..20: mol_type = other DNA
catttgccagatgaaatttc

SEQ ID NO: 25589 - DNA, 20 bp, synthetic construct
  misc_feature 1..20: note = Description of Artificial Sequence: Synthetic oligonucleotide
  misc_feature 1..20: note = Target: SCN10A; (-) strand; PAM type: NRG; PAM sequence: CAG
  source 1..20: mol_type = other DNA
acatttgccagatgaaattt

SEQ ID NO: 25590 - DNA, 20 bp, synthetic construct
  misc_feature 1..20: note = Description of Artificial Sequence: Synthetic oligonucleotide
  misc_feature 1..20: note = Target: SCN10A; (-) strand; PAM type: NRG; PAM sequence: CAG
  source 1..20: mol_type = other DNA
agaataaaaaagacatttgc

SEQ ID NO: 25591 - DNA, 20 bp, synthetic construct
  misc_feature 1..20: note = Description of Artificial Sequence: Synthetic oligonucleotide
  misc_feature 1..20: note = Target: SCN10A; (-) strand; PAM type: NRG; PAM sequence: AAG
  source 1..20: mol_type = other DNA
ctttgtcttttagaataaaa

SEQ ID NO: 25592 - DNA, 20 bp, synthetic construct
  misc_feature 1..20: note = Description of Artificial Sequence: Synthetic oligonucleotide
  misc_feature 1..20: note = Target: SCN10A; (-) strand; PAM type: NRG; PAM sequence: TAG
  source 1..20: mol_type = other DNA
tctaacttttctttgtcttt

SEQ ID NO: 25593 - DNA, 20 bp, synthetic construct
  misc_feature 1..20: note = Description of Artificial Sequence: Synthetic oligonucleotide
  misc_feature 1..20: note = Target: SCN10A; (-) strand; PAM type: NRG; PAM sequence: AAG
  source 1..20: mol_type = other DNA
gtacctcttcacttatctcc

SEQ ID NO: 25594 - DNA, 20 bp, synthetic construct
  misc_feature 1..20: note = Description of Artificial Sequence: Synthetic oligonucleotide
  misc_feature 1..20: note = Target: SCN10A; (-) strand; PAM type: NRG; PAM sequence: AAG
  source 1..20: mol_type = other DNA
gatgaaactaattcccatga

SEQ ID NO: 25595 - DNA, 20 bp, synthetic construct
  misc_feature 1..20: note = Description of Artificial Sequence: Synthetic oligonucleotide
  misc_feature 1..20: note = Target: SCN10A; (-) strand; PAM type: NRG; PAM sequence: AAG
  source 1..20: mol_type = other DNA
cggtggaactgatctcaact

SEQ ID NO: 25596 - DNA, 20 bp, synthetic construct
  misc_feature 1..20: note = Description of Artificial Sequence: Synthetic oligonucleotide
  misc_feature 1..20: note = Target: SCN10A; (-) strand; PAM type: NRG; PAM sequence: TGG
  source 1..20: mol_type = other DNA
ccagaagaccatttcctcgg

SEQ ID NO: 25597 - DNA, 20 bp, synthetic construct
  misc_feature 1..20: note = Description of Artificial Sequence: Synthetic oligonucleotide
  misc_feature 1..20: note = Target: SCN10A; (-) strand; PAM type: NRG; PAM sequence: CGG
  source 1..20: mol_type = other DNA
tacccagaagaccatttcct

SEQ ID NO: 25598 - DNA, 20 bp, synthetic construct
  misc_feature 1..20: note = Description of Artificial Sequence: Synthetic oligonucleotide
  misc_feature 1..20: note = Target: SCN10A; (-) strand; PAM type: NRG; PAM sequence: AAG
  source 1..20: mol_type = other DNA
cctccaccgttcctacccag

SEQ ID NO: 25599 - DNA, 20 bp, synthetic construct
  misc_feature 1..20: note = Description of Artificial Sequence: Synthetic oligonucleotide
  misc_feature 1..20: note = Target: SCN10A; (-) strand; PAM type: NRG; PAM sequence: CAG
  source 1..20: mol_type = other DNA
ctgcctccaccgttcctacc

SEQ ID NO: 25600 - DNA, 20 bp, synthetic construct
  misc_feature 1..20: note = Description of Artificial Sequence: Synthetic oligonucleotide
  misc_feature 1..20: note = Target: SCN10A; (-) strand; PAM type: NRG; PAM sequence: CAG
  source 1..20: mol_type = other DNA
ttggggttttcttcctgagc

SEQ ID NO: 25601 - DNA, 20 bp, synthetic construct
  misc_feature 1..20: note = Description of Artificial Sequence: Synthetic oligonucleotide
  misc_feature 1..20: note = Target: SCN10A; (-) strand; PAM type: NRG; PAM sequence: GAG
  source 1..20: mol_type = other DNA
ctacttggggttttcttcct

SEQ ID NO: 25602 - DNA, 20 bp, synthetic construct
  misc_feature 1..20: note = Description of Artificial Sequence: Synthetic oligonucleotide
  misc_feature 1..20: note = Target: SCN10A; (-) strand; PAM type: NRG; PAM sequence: GGG
  source 1..20: mol_type = other DNA
ctccagcctaatcctacttg

SEQ ID NO: 25603 - DNA, 20 bp, synthetic construct
  misc_feature 1..20: note = Description of Artificial Sequence: Synthetic oligonucleotide
  misc_feature 1..20: note = Target: SCN10A; (-) strand; PAM type: NRG; PAM sequence: GGG
  source 1..20: mol_type = other DNA
actccagcctaatcctactt

SEQ ID NO: 25604 - DNA, 20 bp, synthetic construct
  misc_feature 1..20: note = Description of Artificial Sequence: Synthetic oligonucleotide
  misc_feature 1..20: note = Target: SCN10A; (-) strand; PAM type: NRG; PAM sequence: TGG
  source 1..20: mol_type = other DNA
cactccagcctaatcctact

SEQ ID NO: 25605 - DNA, 20 bp, synthetic construct
  misc_feature 1..20: note = Description of Artificial Sequence: Synthetic oligonucleotide
  misc_feature 1..20: note = Target: SCN10A; (-) strand; PAM type: NRG; PAM sequence: CAG
  source 1..20: mol_type = other DNA
ctattcagagttctccactc

SEQ ID NO: 25606 - DNA, 20 bp, synthetic construct
  misc_feature 1..20: note = Description of Artificial Sequence: Synthetic oligonucleotide
  misc_feature 1..20: note = Target: SCN10A; (-) strand; PAM type: NRG; PAM sequence: GAG
  source 1..20: mol_type = other DNA
ttctccactctagctattca

SEQ ID NO: 25607 - DNA, 20 bp, synthetic construct
  misc_feature 1..20: note = Description of Artificial Sequence: Synthetic oligonucleotide
  misc_feature 1..20: note = Target: SCN10A; (-) strand; PAM type: NRG; PAM sequence: CAG
  source 1..20: mol_type = other DNA
tattctccactctagctatt

SEQ ID NO: 25608 - DNA, 20 bp, synthetic construct
  misc_feature 1..20: note = Description of Artificial Sequence: Synthetic oligonucleotide
  misc_feature 1..20: note = Target: SCN10A; (-) strand; PAM type: NRG; PAM sequence: TAG
  source 1..20: mol_type = other DNA
gctgtcaatattctccactc

SEQ ID NO: 25609 - DNA, 20 bp, synthetic construct
  misc_feature 1..20: note = Description of Artificial Sequence: Synthetic oligonucleotide
  misc_feature 1..20: note = Target: SCN10A; (-) strand; PAM type: NRG; PAM sequence: TAG
  source 1..20: mol_type = other DNA
tttgataatccctttgccca

SEQ ID NO: 25610 - DNA, 20 bp, synthetic construct
  misc_feature 1..20: note = Description of Artificial Sequence: Synthetic oligonucleotide
  misc_feature 1..20: note = Target: SCN10A; (-) strand; PAM type: NRG; PAM sequence: TAG
  source 1..20: mol_type = other DNA
aagtgggaacaatttacctt

SEQ ID NO: 25611 - DNA, 20 bp, synthetic construct
  misc_feature 1..20: note = Description of Artificial Sequence: Synthetic oligonucleotide
  misc_feature 1..20: note = Target: SCN10A; (-) strand; PAM type: NRG; PAM sequence: GGG
  source 1..20: mol_type = other DNA
cctaagaaaaatgtccaagt

SEQ ID NO: 25612 - DNA, 20 bp, synthetic construct
  misc_feature 1..20: note = Description of Artificial Sequence: Synthetic oligonucleotide
  misc_feature 1..20: note = Target: SCN10A; (-) strand; PAM type: NRG; PAM sequence: TGG
  source 1..20: mol_type = other DNA
tcctaagaaaaatgtccaag

SEQ ID NO: 25613 - DNA, 20 bp, synthetic construct
  misc_feature 1..20: note = Description of Artificial Sequence: Synthetic oligonucleotide
  misc_feature 1..20: note = Target: SCN10A; (-) strand; PAM type: NRG; PAM sequence: AAG
  source 1..20: mol_type = other DNA
tattcctaagaaaaatgtcc

SEQ ID NO: 25614 - DNA, 20 bp, synthetic construct
  misc_feature 1..20: note = Description of Artificial Sequence: Synthetic oligonucleotide
  misc_feature 1..20: note = Target: SCN10A; (-) strand; PAM type: NRG; PAM sequence: AAG
  source 1..20: mol_type = other DNA
ttgggagcccagctattcct

SEQ ID NO: 25615 - DNA, 20 bp, synthetic construct
  misc_feature 1..20: note = Description of Artificial Sequence: Synthetic oligonucleotide
  misc_feature 1..20: note = Target: SCN10A; (-) strand; PAM type: NRG; PAM sequence: CAG
  source 1..20: mol_type = other DNA
aggaagcactgttgggagcc

SEQ ID NO: 25616 - DNA, 20 bp, synthetic construct
  misc_feature 1..20: note = Description of Artificial Sequence: Synthetic oligonucleotide
  misc_feature 1..20: note = Target: SCN10A; (-) strand; PAM type: NRG; PAM sequence: GAG
  source 1..20: mol_type = other DNA
tccttaggaagcactgttgg

SEQ ID NO: 25617 - DNA, 20 bp, synthetic construct
  misc_feature 1..20: note = Description of Artificial Sequence: Synthetic oligonucleotide
  misc_feature 1..20: note = Target: SCN10A; (-) strand; PAM type: NRG; PAM sequence: GGG
  source 1..20: mol_type = other DNA
tttccttaggaagcactgtt

SEQ ID NO: 25618 - DNA, 20 bp, synthetic construct
  misc_feature 1..20: note = Description of Artificial Sequence: Synthetic oligonucleotide
  misc_feature 1..20: note = Target: SCN10A; (-) strand; PAM type: NRG; PAM sequence: TGG
  source 1..20: mol_type = other DNA
ttttccttaggaagcactgt

SEQ ID NO: 25619 - DNA, 20 bp, synthetic construct
  misc_feature 1..20: note = Description of Artificial Sequence: Synthetic oligonucleotide
  misc_feature 1..20: note = Target: SCN10A; (-) strand; PAM type: NRG; PAM sequence: AAG
  source 1..20: mol_type = other DNA
aagttttatttttccttagg

SEQ ID NO: 25620 - DNA, 20 bp, synthetic construct
  misc_feature 1..20: note = Description of Artificial Sequence: Synthetic oligonucleotide
  misc_feature 1..20: note = Target: SCN10A; (-) strand; PAM type: NRG; PAM sequence: AGG
  source 1..20: mol_type = other DNA
ttcaagttttatttttcctt

SEQ ID NO: 25621 - DNA, 20 bp, synthetic construct
  misc_feature 1..20: note = Description of Artificial Sequence: Synthetic oligonucleotide
  misc_feature 1..20: note = Target: SCN10A; (-) strand; PAM type: NRG; PAM sequence: TAG
  source 1..20: mol_type = other DNA
cttcaagttttatttttcct

SEQ ID NO: 25622 - DNA, 20 bp, synthetic construct
  misc_feature 1..20: note = Description of Artificial Sequence: Synthetic oligonucleotide
  misc_feature 1..20: note = Target: SCN10A; (-) strand; PAM type: NRG; PAM sequence: AAG
  source 1..20: mol_type = other DNA
tgtaggtcaagtttatcttc

SEQ ID NO: 25623 - DNA, 20 bp, synthetic construct
  misc_feature 1..20: note = Description of Artificial Sequence: Synthetic oligonucleotide
  misc_feature 1..20: note = Target: SCN10A; (-) strand; PAM type: NRG; PAM sequence: AAG
  source 1..20: mol_type = other DNA
ttgtactctctctgtaggtc

SEQ ID NO: 25624 - DNA, 20 bp, synthetic construct
  misc_feature 1..20: note = Description of Artificial Sequence: Synthetic oligonucleotide
  misc_feature 1..20: note = Target: SCN10A; (-) strand; PAM type: NRG; PAM sequence: AGG
  source 1..20: mol_type = other DNA
gagtgttgtactctctctgt

SEQ ID NO: 25625 - DNA, 20 bp, synthetic construct
  misc_feature 1..20: note = Description of Artificial Sequence: Synthetic oligonucleotide
  misc_feature 1..20: note = Target: SCN10A; (-) strand; PAM type: NRG; PAM sequence: TAG
  source 1..20: mol_type = other DNA
tgagtgttgtactctctctg

SEQ ID NO: 25626 - DNA, 20 bp, synthetic construct
  misc_feature 1..20: note = Description of Artificial Sequence: Synthetic oligonucleotide
  misc_feature 1..20: note = Target: SCN10A; (-) strand; PAM type: NRG; PAM sequence: GAG
  source 1..20: mol_type = other DNA
ttctgctcaaattgaaaaat

SEQ ID NO: 25627 - DNA, 20 bp, synthetic construct
  misc_feature 1..20: note = Description of Artificial Sequence: Synthetic oligonucleotide
  misc_feature 1..20: note = Target: SCN10A; (-) strand; PAM type: NRG; PAM sequence: CAG
  source 1..20: mol_type = other DNA
tagacacatcaaggcattta

SEQ ID NO: 25628 - DNA, 20 bp, synthetic construct
  misc_feature 1..20: note = Description of Artificial Sequence: Synthetic oligonucleotide
  misc_feature 1..20: note = Target: SCN10A; (-) strand; PAM type: NRG; PAM sequence: AGG
  source 1..20: mol_type = other DNA
ctgtaaaactagacacatca

SEQ ID NO: 25629 - DNA, 20 bp, synthetic construct
  misc_feature 1..20: note = Description of Artificial Sequence: Synthetic oligonucleotide
  misc_feature 1..20: note = Target: SCN10A; (-) strand; PAM type: NRG; PAM sequence: AAG
  source 1..20: mol_type = other DNA
actgtaaaactagacacatc

SEQ ID NO: 25630 - DNA, 20 bp, synthetic construct
  misc_feature 1..20: note = Description of Artificial Sequence: Synthetic oligonucleotide
  misc_feature 1..20: note = Target: SCN10A; (-) strand; PAM type: NRG; PAM sequence: TAG
  source 1..20: mol_type = other DNA
ttcctaagtaactgtaaaac

SEQ ID NO: 25631 - DNA, 20 bp, synthetic construct
  misc_feature 1..20: note = Description of Artificial Sequence: Synthetic oligonucleotide
  misc_feature 1..20: note = Target: SCN10A; (-) strand; PAM type: NRG; PAM sequence: AAG
  source 1..20: mol_type = other DNA
ttcataatagatgtgttcct

SEQ ID NO: 25632 - DNA, 20 bp, synthetic construct
  misc_feature 1..20: note = Description of Artificial Sequence: Synthetic oligonucleotide
  misc_feature 1..20: note = Target: SCN10A; (-) strand; PAM type: NRG; PAM sequence: TAG
  source 1..20: mol_type = other DNA
tagaattttccttttcataa

SEQ ID NO: 25633 - DNA, 20 bp, synthetic construct
  misc_feature 1..20: note = Description of Artificial Sequence: Synthetic oligonucleotide
  misc_feature 1..20: note = Target: SCN10A; (-) strand; PAM type: NRG; PAM sequence: TAG
  source 1..20: mol_type = other DNA
ggaaaatgtggtttaattaa

SEQ ID NO: 25634 - DNA, 20 bp, synthetic construct
  misc_feature 1..20: note = Description of Artificial Sequence: Synthetic oligonucleotide
  misc_feature 1..20: note = Target: SCN10A; (-) strand; PAM type: NRG; PAM sequence: TGG
  source 1..20: mol_type = other DNA
tgtaagtcagcaggaaaatg

SEQ ID NO: 25635 - DNA, 20 bp, synthetic construct
  misc_feature 1..20: note = Description of Artificial Sequence: Synthetic oligonucleotide
  misc_feature 1..20: note = Target: SCN10A; (-) strand; PAM type: NRG; PAM sequence: AGG
  source 1..20: mol_type = other DNA
taatttaattgtaagtcagc

SEQ ID NO: 25636 - DNA, 20 bp, synthetic construct
  misc_feature 1..20: note = Description of Artificial Sequence: Synthetic oligonucleotide
  misc_feature 1..20: note = Target: SCN10A; (-) strand; PAM type: NRG; PAM sequence: CAG
  source 1..20: mol_type = other DNA
ttaatttaattgtaagtcag

SEQ ID NO: 25637 - DNA, 20 bp, synthetic construct
  misc_feature 1..20: note = Description of Artificial Sequence: Synthetic oligonucleotide
  misc_feature 1..20: note = Target: SCN10A; (-) strand; PAM type: NRG; PAM sequence: CAG
  source 1..20: mol_type = other DNA
ttcttaatttaattgtaagt

SEQ ID NO: 25638 - DNA, 20 bp, synthetic construct
  misc_feature 1..20: note = Description of Artificial Sequence: Synthetic oligonucleotide
  misc_feature 1..20: note = Target: SCN10A; (-) strand; PAM type: NRG; PAM sequence: AAG
  source 1..20: mol_type = other DNA
atatttcttaatttaattgt

SEQ ID NO: 25639 - DNA, 20 bp, synthetic construct
  misc_feature 1..20: note = Description of Artificial Sequence: Synthetic oligonucleotide
  misc_feature 1..20: note = Target: SCN10A; (-) strand; PAM type: NRG; PAM sequence: GAG
  source 1..20: mol_type = other DNA
attaacatttccccccatgt

SEQ ID NO: 25640 - DNA, 20 bp, synthetic construct
  misc_feature 1..20: note = Description of Artificial Sequence: Synthetic oligonucleotide
  misc_feature 1..20: note = Target: SCN10A; (-) strand; PAM type: NRG; PAM sequence: TGG
  source 1..20: mol_type = other DNA
cacgattttagtttaatcct

SEQ ID NO: 25641 - DNA, 20 bp, synthetic construct
  misc_feature 1..20: note = Description of Artificial Sequence: Synthetic oligonucleotide
  misc_feature 1..20: note = Target: SCN10A; (-) strand; PAM type: NRG; PAM sequence: TAG
  source 1..20: mol_type = other DNA
tagaattggagacacgattt

SEQ ID NO: 25642 - DNA, 20 bp, synthetic construct
  misc_feature 1..20: note = Description of Artificial Sequence: Synthetic oligonucleotide
  misc_feature 1..20: note = Target: SCN10A; (-) strand; PAM type: NRG; PAM sequence: GAG
  source 1..20: mol_type = other DNA
tttaaatatttgtagaattg

SEQ ID NO: 25643 - DNA, 20 bp, synthetic construct
  misc_feature 1..20: note = Description of Artificial Sequence: Synthetic oligonucleotide
  misc_feature 1..20: note = Target: SCN10A; (-) strand; PAM type: NRG; PAM sequence: TGG
  source 1..20: mol_type = other DNA
cttttaaatatttgtagaat

SEQ ID NO: 25644 - DNA, 20 bp, synthetic construct
  misc_feature 1..20: note = Description of Artificial Sequence: Synthetic oligonucleotide
  misc_feature 1..20: note = Target: SCN10A; (-) strand; PAM type: NRG; PAM sequence: TAG
  source 1..20: mol_type = other DNA
atattacttttaaatatttg

SEQ ID NO: 25645 - DNA, 20 bp, synthetic construct
  misc_feature 1..20: note = Description of Artificial Sequence: Synthetic oligonucleotide
  misc_feature 1..20: note = Target: SCN10A; (-) strand; PAM type: NRG; PAM sequence: AAG
  source 1..20: mol_type = other DNA
tcataactaatattatacat

SEQ ID NO: 25646 - DNA, 20 bp, synthetic construct
  misc_feature 1..20: note = Description of Artificial Sequence: Synthetic oligonucleotide
  misc_feature 1..20: note = Target: SCN10A; (-) strand; PAM type: NRG; PAM sequence: GGG
  source 1..20: mol_type = other DNA
aaaagatactagaattctca

SEQ ID NO: 25647 - DNA, 20 bp, synthetic construct
  misc_feature 1..20: note = Description of Artificial Sequence: Synthetic oligonucleotide
  misc_feature 1..20: note = Target: SCN10A; (-) strand; PAM type: NRG; PAM sequence: AGG
  source 1..20: mol_type = other DNA
caaaagatactagaattctc

SEQ ID NO: 25648 - DNA, 20 bp, synthetic construct
  misc_feature 1..20: note = Description of Artificial Sequence: Synthetic oligonucleotide
  misc_feature 1..20: note = Target: SCN10A; (-) strand; PAM type: NRG; PAM sequence: CAG
  source 1..20: mol_type = other DNA
ccaaaagatactagaattct

SEQ ID NO: 25649 - DNA, 20 bp, synthetic construct
  misc_feature 1..20: note = Description of Artificial Sequence: Synthetic oligonucleotide
  misc_feature 1..20: note = Target: SCN10A; (-) strand; PAM type: NRG; PAM sequence: TAG
  source 1..20: mol_type = other DNA
actccagccccaaaagatac

SEQ ID NO: 25650 - DNA, 20 bp, synthetic construct
  misc_feature 1..20: note = Description of Artificial Sequence: Synthetic oligonucleotide
  misc_feature 1..20: note = Target: SCN10A; (-) strand; PAM type: NRG; PAM sequence: AAG
  source 1..20: mol_type = other DNA
tttggtaactccagccccaa

SEQ ID NO: 25651 - DNA, 20 bp, synthetic construct
  misc_feature 1..20: note = Description of Artificial Sequence: Synthetic oligonucleotide
  misc_feature 1..20: note = Target: SCN10A; (-) strand; PAM type: NRG; PAM sequence: CAG
  source 1..20: mol_type = other DNA
tctcataaatttggtaactc

SEQ ID NO: 25652 - DNA, 20 bp, synthetic construct
  misc_feature 1..20: note = Description of Artificial Sequence: Synthetic oligonucleotide
  misc_feature 1..20: note = Target: SCN10A; (-) strand; PAM type: NRG; PAM sequence: TGG
  source 1..20: mol_type = other DNA
gcatttaaatctcataaatt

SEQ ID NO: 25653 - DNA, 20 bp, synthetic construct
  misc_feature 1..20: note = Description of Artificial Sequence: Synthetic oligonucleotide
  misc_feature 1..20: note = Target: SCN10A; (-) strand; PAM type: NRG; PAM sequence: AAG
  source 1..20: mol_type = other DNA
agggggtctcttcctcacaa

SEQ ID NO: 25654 - DNA, 20 bp, synthetic construct
  misc_feature 1..20: note = Description of Artificial Sequence: Synthetic oligonucleotide
  misc_feature 1..20: note = Target: SCN10A; (-) strand; PAM type: NRG; PAM sequence: GGG
  source 1..20: mol_type = other DNA
ggacagaaaagctgttgagg

SEQ ID NO: 25655 - DNA, 20 bp, synthetic construct
  misc_feature 1..20: note = Description of Artificial Sequence: Synthetic oligonucleotide
  misc_feature 1..20: note = Target: SCN10A; (-) strand; PAM type: NRG; PAM sequence: GGG
  source 1..20: mol_type = other DNA
tggacagaaaagctgttgag

SEQ ID NO: 25656 - DNA, 20 bp, synthetic construct
  misc_feature 1..20: note = Description of Artificial Sequence: Synthetic oligonucleotide
  misc_feature 1..20: note = Target: SCN10A; (-) strand; PAM type: NRG; PAM sequence: GGG
  source 1..20: mol_type = other DNA
ctggacagaaaagctgttga

SEQ ID NO: 25657 - DNA, 20 bp, synthetic construct
  misc_feature 1..20: note = Description of Artificial Sequence: Synthetic oligonucleotide
  misc_feature 1..20: note = Target: SCN10A; (-) strand; PAM type: NRG; PAM sequence: AGG
  source 1..20: mol_type = other DNA
gctggacagaaaagctgttg

SEQ ID NO: 25658 - DNA, 20 bp, synthetic construct
  misc_feature 1..20: note = Description of Artificial Sequence: Synthetic oligonucleotide
  misc_feature 1..20: note = Target: SCN10A; (-) strand; PAM type: NRG; PAM sequence: GAG
  source 1..20: mol_type = other DNA
agctggacagaaaagctgtt

SEQ ID NO: 25659 - DNA, 20 bp, synthetic construct
  misc_feature 1..20: note = Description of Artificial Sequence: Synthetic oligonucleotide
  misc_feature 1..20: note = Target: SCN10A; (-) strand; PAM type: NRG; PAM sequence: AAG
  source 1..20: mol_type = other DNA
agagtcacagctggacagaa

SEQ ID NO: 25660 - DNA, 20 bp, synthetic construct
  misc_feature 1..20: note = Description of Artificial Sequence: Synthetic oligonucleotide
  misc_feature 1..20: note = Target: SCN10A; (-) strand; PAM type: NRG; PAM sequence: CAG
  source 1..20: mol_type = other DNA
ttggtagagtcacagctgga

SEQ ID NO: 25661 - DNA, 20 bp, synthetic construct
  misc_feature 1..20: note = Description of Artificial Sequence: Synthetic oligonucleotide
  misc_feature 1..20: note = Target: SCN10A; (-) strand; PAM type: NRG; PAM sequence: TGG
  source 1..20: mol_type = other DNA
ttgcttggtagagtcacagc

SEQ ID NO: 25662 - DNA, 20 bp, synthetic construct
  misc_feature 1..20: note = Description of Artificial Sequence: Synthetic oligonucleotide
  misc_feature 1..20: note = Target: SCN10A; (-) strand; PAM type: NRG; PAM sequence: CAG
  source 1..20: mol_type = other DNA
ataattgcttggtagagtca

SEQ ID NO: 25663 - DNA, 20 bp, synthetic construct
  misc_feature 1..20: note = Description of Artificial Sequence: Synthetic oligonucleotide
  misc_feature 1..20: note = Target: SCN10A; (-) strand; PAM type: NRG; PAM sequence: GAG
  source 1..20: mol_type = other DNA
gagtaaataattgcttggta

SEQ ID NO: 25664 - DNA, 20 bp, synthetic construct
  misc_feature 1..20: note = Description of Artificial Sequence: Synthetic oligonucleotide
  misc_feature 1..20: note = Target: SCN10A; (-) strand; PAM type: NRG; PAM sequence: TAG
  source 1..20: mol_type = other DNA
atgagtaaataattgcttgg

SEQ ID NO: 25665 - DNA, 20 bp, synthetic construct
  misc_feature 1..20: note = Description of Artificial Sequence: Synthetic oligonucleotide
  misc_feature 1..20: note = Target: SCN10A; (-) strand; PAM type: NRG; PAM sequence: TGG
  source 1..20: mol_type = other DNA
ttgatgagtaaataattgct

SEQ ID NO: 25666 - DNA, 20 bp, synthetic construct
  misc_feature 1..20: note = Description of Artificial Sequence: Synthetic oligonucleotide
  misc_feature 1..20: note = Target: SCN10A; (-) strand; PAM type: NRG; PAM sequence: GAG
  source 1..20: mol_type = other DNA
tcttcatcttgagatttgat

SEQ ID NO: 25667 - DNA, 20 bp, synthetic construct
  misc_feature 1..20: note = Description of Artificial Sequence: Synthetic oligonucleotide
  misc_feature 1..20: note = Target: SCN10A; (-) strand; PAM type: NRG; PAM sequence: GAG
  source 1..20: mol_type = other DNA
gtgaatattctcttcatctt

SEQ ID NO: 25668 - DNA, 20 bp, synthetic construct
  misc_feature 1..20: note = Description of Artificial Sequence: Synthetic oligonucleotide
  misc_feature 1..20: note = Target: SCN10A; (-) strand; PAM type: NRG; PAM sequence: CAG
  source 1..20: mol_type = other DNA
cctaaaaagaaccaagtgac

SEQ ID NO: 25669 - DNA, 20 bp, synthetic construct
  misc_feature 1..20: note = Description of Artificial Sequence: Synthetic oligonucleotide
  misc_feature 1..20: note = Target: SCN10A; (-) strand; PAM type: NRG; PAM sequence: AAG
  source 1..20: mol_type = other DNA
aaaatcccctaaaaagaacc

SEQ ID NO: 25670 - DNA, 20 bp, synthetic construct
  misc_feature 1..20: note = Description of Artificial Sequence: Synthetic oligonucleotide
  misc_feature 1..20: note = Target: SCN10A; (-) strand; PAM type: NRG; PAM sequence: AAG
  source 1..20: mol_type = other DNA
tagaaataaaatcccctaaa

SEQ ID NO: 25671 - DNA, 20 bp, synthetic construct
  misc_feature 1..20: note = Description of Artificial Sequence: Synthetic oligonucleotide
  misc_feature 1..20: note = Target: SCN10A; (-) strand; PAM type: NRG; PAM sequence: TAG
  source 1..20: mol_type = other DNA
ataagtaagaaacagctaat

SEQ ID NO: 25672 - DNA, 20 bp, synthetic construct
  misc_feature 1..20: note = Description of Artificial Sequence: Synthetic oligonucleotide
  misc_feature 1..20: note = Target: SCN10A; (-) strand; PAM type: NRG; PAM sequence: CAG
  source 1..20: mol_type = other DNA
acatctggataagtaagaaa

SEQ ID NO: 25673 - DNA, 20 bp, synthetic construct
  misc_feature 1..20: note = Description of Artificial Sequence: Synthetic oligonucleotide
  misc_feature 1..20: note = Target: SCN10A; (-) strand; PAM type: NRG; PAM sequence: AAG
  source 1..20: mol_type = other DNA
tgaattacatctggataagt

SEQ ID NO: 25674 - DNA, 20 bp, synthetic construct
  misc_feature 1..20: note = Description of Artificial Sequence: Synthetic oligonucleotide
  misc_feature 1..20: note = Target: SCN10A; (-) strand; PAM type: NRG; PAM sequence: AAG
  source 1..20: mol_type = other DNA
tggttgaattacatctggat

SEQ ID NO: 25675 - DNA, 20 bp, synthetic construct
  misc_feature 1..20: note = Description of Artificial Sequence: Synthetic oligonucleotide
  misc_feature 1..20: note = Target: SCN10A; (-) strand; PAM type: NRG; PAM sequence: TGG
  source 1..20: mol_type = other DNA
gattctggttgaattacatc

SEQ ID NO: 25676 - DNA, 20 bp, synthetic construct
  misc_feature 1..20: note = Description of Artificial Sequence: Synthetic oligonucleotide
  misc_feature 1..20: note = Target: SCN10A; (-) strand; PAM type: NRG; PAM sequence: TGG
  source 1..20: mol_type = other DNA
aaactcctctttatggattc

SEQ ID NO: 25677 - DNA, 20 bp, synthetic construct
  misc_feature 1..20: note = Description of Artificial Sequence: Synthetic oligonucleotide
  misc_feature 1..20: note = Target: SCN10A; (-) strand; PAM type: NRG; PAM sequence: TGG
  source 1..20: mol_type = other DNA
aacatacaaactcctcttta

SEQ ID NO: 25678 - DNA, 20 bp, synthetic construct
  misc_feature 1..20: note = Description of Artificial Sequence: Synthetic oligonucleotide
  misc_feature 1..20: note = Target: SCN10A; (-) strand; PAM type: NRG; PAM sequence: GAG
  source 1..20: mol_type = other DNA
acatggaaattacaaataaa

SEQ ID NO: 25679 - DNA, 20 bp, synthetic construct
  misc_feature 1..20: note = Description of Artificial Sequence: Synthetic oligonucleotide
  misc_feature 1..20: note = Target: SCN10A; (-) strand; PAM type: NRG; PAM sequence: AAG
  source 1..20: mol_type = other DNA
ttacatggaaattacaaata

SEQ ID NO: 25680 - DNA, 20 bp, synthetic construct
  misc_feature 1..20: note = Description of Artificial Sequence: Synthetic oligonucleotide
  misc_feature 1..20: note = Target: SCN10A; (-) strand; PAM type: NRG; PAM sequence: TGG
  source 1..20: mol_type = other DNA
tcaaaatatatacaattaca

SEQ ID NO: 25681 - DNA, 20 bp, synthetic construct
  misc_feature 1..20: note = Description of Artificial Sequence: Synthetic oligonucleotide
  misc_feature 1..20: note = Target: SCN10A; (-) strand; PAM type: NRG; PAM sequence: TAG
  source 1..20: mol_type = other DNA
atgtgtcgtctctgcttggg

SEQ ID NO: 25682 - DNA, 20 bp, synthetic construct
  misc_feature 1..20: note = Description of Artificial Sequence: Synthetic oligonucleotide
  misc_feature 1..20: note = Target: SCN10A; (-) strand; PAM type: NRG; PAM sequence: GGG
  source 1..20: mol_type = other DNA
tcaatgtgtcgtctctgctt

SEQ ID NO: 25683 - DNA, 20 bp, synthetic construct
  misc_feature 1..20: note = Description of Artificial Sequence: Synthetic oligonucleotide
  misc_feature 1..20: note = Target: SCN10A; (-) strand; PAM type: NRG; PAM sequence: TGG
  source 1..20: mol_type = other DNA
ctcaatgtgtcgtctctgct

SEQ ID NO: 25684 - DNA, 20 bp, synthetic construct
  misc_feature 1..20: note = Description of Artificial Sequence: Synthetic oligonucleotide
  misc_feature 1..20: note = Target: SCN10A; (-) strand; PAM type: NRG; PAM sequence: GGG
  source 1..20: mol_type = other DNA
agtagggtggaaagtaatca

SEQ ID NO: 25685 - DNA, 20 bp, synthetic construct
  misc_feature 1..20: note = Description of Artificial Sequence: Synthetic oligonucleotide
  misc_feature 1..20: note = Target: SCN10A; (-) strand; PAM type: NRG; PAM sequence: AGG
  source 1..20: mol_type = other DNA
aagtagggtggaaagtaatc

SEQ ID NO: 25686 - DNA, 20 bp, synthetic construct
  misc_feature 1..20: note = Description of Artificial Sequence: Synthetic oligonucleotide
  misc_feature 1..20: note = Target: SCN10A; (-) strand; PAM type: NRG; PAM sequence: CAG
  source 1..20: mol_type = other DNA
gaagtagggtggaaagtaat

SEQ ID NO: 25687 - DNA, 20 bp, synthetic construct
  misc_feature 1..20: note = Description of Artificial Sequence: Synthetic oligonucleotide
  misc_feature 1..20: note = Target: SCN10A; (-) strand; PAM type: NRG; PAM sequence: AAG
  source 1..20: mol_type = other DNA
cagtgaggaagtagggtgga

SEQ ID NO: 25688 - DNA, 20 bp, synthetic construct
  misc_feature 1..20: note = Description of Artificial Sequence: Synthetic oligonucleotide
  misc_feature 1..20: note = Target: SCN10A; (-) strand; PAM type: NRG; PAM sequence: TGG
  source 1..20: mol_type = other DNA
tctacagtgaggaagtaggg

SEQ ID NO: 25689 - DNA, 20 bp, synthetic construct
  misc_feature 1..20: note = Description of Artificial Sequence: Synthetic oligonucleotide
  misc_feature 1..20: note = Target: SCN10A; (-) strand; PAM type: NRG; PAM sequence: GGG
  source 1..20: mol_type = other DNA
gtatctacagtgaggaagta

SEQ ID NO: 25690 - DNA, 20 bp, synthetic construct
  misc_feature 1..20: note = Description of Artificial Sequence: Synthetic oligonucleotide
  misc_feature 1..20: note = Target: SCN10A; (-) strand; PAM type: NRG; PAM sequence: AGG
  source 1..20: mol_type = other DNA
agtatctacagtgaggaagt

SEQ ID NO: 25691 - DNA, 20 bp, synthetic construct
  misc_feature 1..20: note = Description of Artificial Sequence: Synthetic oligonucleotide
  misc_feature 1..20: note = Target: SCN10A; (-) strand; PAM type: NRG; PAM sequence: TAG
  source 1..20: mol_type = other DNA
cagtatctacagtgaggaag

SEQ ID NO: 25692 - DNA, 20 bp, synthetic construct
  misc_feature 1..20: note = Description of Artificial Sequence: Synthetic oligonucleotide
  misc_feature 1..20: note = Target: SCN10A; (-) strand; PAM type: NRG; PAM sequence: AAG
  source 1..20: mol_type = other DNA
gagcagtatctacagtgagg

SEQ ID NO: 25693 - DNA, 20 bp, synthetic construct
  misc_feature 1..20: note = Description of Artificial Sequence: Synthetic oligonucleotide
  misc_feature 1..20: note = Target: SCN10A; (-) strand; PAM type: NRG; PAM sequence: AGG
  source 1..20: mol_type = other DNA
gtagagcagtatctacagtg

SEQ ID NO: 25694 - DNA, 20 bp, synthetic construct
  misc_feature 1..20: note = Description of Artificial Sequence: Synthetic oligonucleotide
  misc_feature 1..20: note = Target: SCN10A; (-) strand; PAM type: NRG; PAM sequence: GAG
  source 1..20: mol_type = other DNA
cgtagagcagtatctacagt

SEQ ID NO: 25695 - DNA, 20 bp, synthetic construct
  misc_feature 1..20: note = Description of Artificial Sequence: Synthetic oligonucleotide
  misc_feature 1..20: note = Target: SCN10A; (-) strand; PAM type: NRG; PAM sequence: CAG
  source 1..20: mol_type = other DNA
cctgcgtagagcagtatcta

SEQ ID NO: 25696 - DNA, 20 bp, synthetic construct
  misc_feature 1..20: note = Description of Artificial Sequence: Synthetic oligonucleotide
  misc_feature 1..20: note = Target: SCN10A; (-) strand; PAM type: NRG; PAM sequence: CAG
  source 1..20: mol_type = other DNA
agcctgcatcctgcgtagag

SEQ ID NO: 25697 - DNA, 20 bp, synthetic construct
  misc_feature 1..20: note = Description of Artificial Sequence: Synthetic oligonucleotide
  misc_feature 1..20: note = Target: SCN10A; (-) strand; PAM type: NRG; PAM sequence: GAG
  source 1..20: mol_type = other DNA
tccagcctgcatcctgcgta

SEQ ID NO: 25698 - DNA, 20 bp, synthetic construct
  misc_feature 1..20: note = Description of Artificial Sequence: Synthetic oligonucleotide
  misc_feature 1..20: note = Target: SCN10A; (-) strand; PAM type: NRG; PAM sequence: TAG
  source 1..20: mol_type = other DNA
agtccagcctgcatcctgcg

SEQ ID NO: 25699 - DNA, 20 bp, synthetic construct
  misc_feature 1..20: note = Description of Artificial Sequence: Synthetic oligonucleotide
  misc_feature 1..20: note = Target: SCN10A; (-) strand; PAM type: NRG; PAM sequence: CAG
  source 1..20: mol_type = other DNA
atgtagctagttaagaagtc

SEQ ID NO: 25700 - DNA, 20 bp, synthetic construct
  misc_feature 1..20: note = Description of Artificial Sequence: Synthetic oligonucleotide
  misc_feature 1..20: note = Target: SCN10A; (-) strand; PAM type: NRG; PAM sequence: AAG
  source 1..20: mol_type = other DNA
agaccatgtagctagttaag

SEQ ID NO: 25701 - DNA, 20 bp, synthetic construct
  misc_feature 1..20: note = Description of Artificial Sequence: Synthetic oligonucleotide
  misc_feature 1..20: note = Target: SCN10A; (-) strand; PAM type: NRG; PAM sequence: AAG
  source 1..20: mol_type = other DNA
ccaagaccatgtagctagtt

SEQ ID NO: 25702 - DNA, 20 bp, synthetic construct
  misc_feature 1..20: note = Description of Artificial Sequence: Synthetic oligonucleotide
  misc_feature 1..20: note = Target: SCN10A; (-) strand; PAM type: NRG; PAM sequence: TAG
  source 1..20: mol_type = other DNA
attatccaagaccatgtagc

SEQ ID NO: 25703 - DNA, 20 bp, synthetic construct
  misc_feature 1..20: note = Description of Artificial Sequence: Synthetic oligonucleotide
  misc_feature 1..20: note = Target: SCN10A; (-) strand; PAM type: NRG; PAM sequence: TAG
  source 1..20: mol_type = other DNA
gtaaattatccaagaccatg

SEQ ID NO: 25704 - DNA, 20 bp, synthetic construct
  misc_feature 1..20: note = Description of Artificial Sequence: Synthetic oligonucleotide
  misc_feature 1..20: note = Target: SCN10A; (-) strand; PAM type: NRG; PAM sequence: AAG
  source 1..20: mol_type = other DNA
aggcattaagtaaattatcc

SEQ ID NO: 25705 - DNA, 20 bp, synthetic construct
  misc_feature 1..20: note = Description of Artificial Sequence: Synthetic oligonucleotide
  misc_feature 1..20: note = Target: SCN10A; (-) strand; PAM type: NRG; PAM sequence: AAG
  source 1..20: mol_type = other DNA
aactgacacacagaggcatt

SEQ ID NO: 25706 - DNA, 20 bp, synthetic construct
  misc_feature 1..20: note = Description of Artificial Sequence: Synthetic oligonucleotide
  misc_feature 1..20: note = Target: SCN10A; (-) strand; PAM type: NRG; PAM sequence: AGG
  source 1..20: mol_type = other DNA
ataatgaaactgacacacag

SEQ ID NO: 25707 - DNA, 20 bp, synthetic construct
  misc_feature 1..20: note = Description of Artificial Sequence: Synthetic oligonucleotide
  misc_feature 1..20: note = Target: SCN10A; (-) strand; PAM type: NRG; PAM sequence: GAG
  source 1..20: mol_type = other DNA
gataatgaaactgacacaca

SEQ ID NO: 25708 - DNA, 20 bp, synthetic construct
  misc_feature 1..20: note = Description of Artificial Sequence: Synthetic oligonucleotide
  misc_feature 1..20: note = Target: SCN10A; (-) strand; PAM type: NRG; PAM sequence: CAG
  source 1..20: mol_type = other DNA
cagataatgaaactgacaca

SEQ ID NO: 25709 - DNA, 20 bp, synthetic construct
  misc_feature 1..20: note = Description of Artificial Sequence: Synthetic oligonucleotide
  misc_feature 1..20: note = Target: SCN10A; (-) strand; PAM type: NRG; PAM sequence: CAG
  source 1..20: mol_type = other DNA
agattaccatccccatttta

SEQ ID NO: 25710 - DNA, 20 bp, synthetic construct
  misc_feature 1..20: note = Description of Artificial Sequence: Synthetic oligonucleotide
  misc_feature 1..20: note = Target: SCN10A; (-) strand; PAM type: NRG; PAM sequence: GAG
  source 1..20: mol_type = other DNA
gttcaaaagcctctgaagta

SEQ ID NO: 25711 - DNA, 20 bp, synthetic construct
  misc_feature 1..20: note = Description of Artificial Sequence: Synthetic oligonucleotide
  misc_feature 1..20: note = Target: SCN10A; (-) strand; PAM type: NRG; PAM sequence: TAG
  source 1..20: mol_type = other DNA
cagttcaaaagcctctgaag

SEQ ID NO: 25712 - DNA, 20 bp, synthetic construct
  misc_feature 1..20: note = Description of Artificial Sequence: Synthetic oligonucleotide
  misc_feature 1..20: note = Target: SCN10A; (-) strand; PAM type: NRG; PAM sequence: AAG
  source 1..20: mol_type = other DNA
catcagttcaaaagcctctg

SEQ ID NO: 25713 - DNA, 20 bp, synthetic construct
  misc_feature 1..20: note = Description of Artificial Sequence: Synthetic oligonucleotide
  misc_feature 1..20: note = Target: SCN10A; (-) strand; PAM type: NRG; PAM sequence: AAG
  source 1..20: mol_type = other DNA
caataccatcatcagttcaa

SEQ ID NO: 25714 - DNA, 20 bp, synthetic construct
  misc_feature 1..20: note = Description of Artificial Sequence: Synthetic oligonucleotide
  misc_feature 1..20: note = Target: SCN10A; (-) strand; PAM type: NRG; PAM sequence: CAG
  source 1..20: mol_type = other DNA
ctaagtgtcaataccatcat

SEQ ID NO: 25715 - DNA, 20 bp, synthetic construct
  misc_feature 1..20: note = Description of Artificial Sequence: Synthetic oligonucleotide
  misc_feature 1..20: note = Target: SCN10A; (-) strand; PAM type: NRG; PAM sequence: AAG
  source 1..20: mol_type = other DNA
tcacttgctaaatacttcct

SEQ ID NO: 25716 - DNA, 20 bp, synthetic construct
  misc_feature 1..20: note = Description of Artificial Sequence: Synthetic oligonucleotide
  misc_feature 1..20: note = Target: SCN10A; (-) strand; PAM type: NRG; PAM sequence: CAG
  source 1..20: mol_type = other DNA
aaggatatttaatgacaata

SEQ ID NO: 25717 - DNA, 20 bp, synthetic construct
  misc_feature 1..20: note = Description of Artificial Sequence: Synthetic oligonucleotide
  misc_feature 1..20: note = Target: SCN10A; (-) strand; PAM type: NRG; PAM sequence: AGG
  source 1..20: mol_type = other DNA
gaattttcagattctacaga

SEQ ID NO: 25718 - DNA, 20 bp, synthetic construct
  misc_feature 1..20: note = Description of Artificial Sequence: Synthetic oligonucleotide
  misc_feature 1..20: note = Target: SCN10A; (-) strand; PAM type: NRG; PAM sequence: AAG
  source 1..20: mol_type = other DNA
tgaattttcagattctacag

SEQ ID NO: 25719 - DNA, 20 bp, synthetic construct
  misc_feature 1..20: note = Description of Artificial Sequence: Synthetic oligonucleotide
  misc_feature 1..20: note = Target: SCN10A; (-) strand; PAM type: NRG; PAM sequence: CAG
  source 1..20: mol_type = other DNA
tcttgaattttcagattcta

SEQ ID NO: 25720 - DNA, 20 bp, synthetic construct
  misc_feature 1..20: note = Description of Artificial Sequence: Synthetic oligonucleotide
  misc_feature 1..20: note = Target: SCN10A; (-) strand; PAM type: NRG; PAM sequence: CAG
  source 1..20: mol_type = other DNA
tgagctgaatcttgaatttt

SEQ ID NO: 25721 - DNA, 20 bp, synthetic construct
  misc_feature 1..20: note = Description of Artificial Sequence: Synthetic oligonucleotide
  misc_feature 1..20: note = Target: SCN10A; (-) strand; PAM type: NRG; PAM sequence: GAG
  source 1..20: mol_type = other DNA
cagcaagaattacgttttct

SEQ ID NO: 25722 - DNA, 20 bp, synthetic construct
  misc_feature 1..20: note = Description of Artificial Sequence: Synthetic oligonucleotide
  misc_feature 1..20: note = Target: SCN10A; (-) strand; PAM type: NRG; PAM sequence: AAG
  source 1..20: mol_type = other DNA
tttctttctggctggccagc

SEQ ID NO: 25723 - DNA, 20 bp, synthetic construct
  misc_feature 1..20: note = Description of Artificial Sequence: Synthetic oligonucleotide
  misc_feature 1..20: note = Target: SCN10A; (-) strand; PAM type: NRG; PAM sequence: CAG
  source 1..20: mol_type = other DNA
tttttttctttctggctggc

SEQ ID NO: 25724 - DNA, 20 bp, synthetic construct
  misc_feature 1..20: note = Description of Artificial Sequence: Synthetic oligonucleotide
  misc_feature 1..20: note = Target: SCN10A; (-) strand; PAM type: NRG; PAM sequence: TGG
  source 1..20: mol_type = other DNA
tacatttttttctttctggc

SEQ ID NO: 25725 - DNA, 20 bp, synthetic construct
  misc_feature 1..20: note = Description of Artificial Sequence: Synthetic oligonucleotide
  misc_feature 1..20: note = Target: SCN10A; (-) strand; PAM type: NRG; PAM sequence: TGG
  source 1..20: mol_type = other DNA
tttttacatttttttctttc

SEQ ID NO: 25726 - DNA, 20 bp, synthetic construct
  misc_feature 1..20: note = Description of Artificial Sequence: Synthetic oligonucleotide
  misc_feature 1..20: note = Target: SCN10A; (-) strand; PAM type: NRG; PAM sequence: AAG
  source 1..20: mol_type = other DNA
tgaagctgcacagcttgatg

SEQ ID NO: 25727 - DNA, 20 bp, synthetic construct
  misc_feature 1..20: note = Description of Artificial Sequence: Synthetic oligonucleotide
  misc_feature 1..20: note = Target: SCN10A; (-) strand; PAM type: NRG; PAM sequence: CAG
  source 1..20: mol_type = other DNA
acactcaacatgaagctgca

SEQ ID NO: 25728 - DNA, 20 bp, synthetic construct
  misc_feature 1..20: note = Description of Artificial Sequence: Synthetic oligonucleotide
  misc_feature 1..20: note = Target: SCN10A; (-) strand; PAM type: NRG; PAM sequence: AAG
  source 1..20: mol_type = other DNA
ctatctgcacactcaacatg

SEQ ID NO: 25729 - DNA, 20 bp, synthetic construct
  misc_feature 1..20: note = Description of Artificial Sequence: Synthetic oligonucleotide
  misc_feature 1..20: note = Target: SCN10A; (-) strand; PAM type: NRG; PAM sequence: CAG
  source 1..20: mol_type = other DNA
ttgagctggtaaccttggca

SEQ ID NO: 25730 - DNA, 20 bp, synthetic construct
  misc_feature 1..20: note = Description of Artificial Sequence: Synthetic oligonucleotide
  misc_feature 1..20: note = Target: SCN10A; (-) strand; PAM type: NRG; PAM sequence: TGG
  source 1..20: mol_type = other DNA
tgtcattgagctggtaacct

SEQ ID NO: 25731 - DNA, 20 bp, synthetic construct
  misc_feature 1..20: note = Description of Artificial Sequence: Synthetic oligonucleotide
  misc_feature 1..20: note = Target: SCN10A; (-) strand; PAM type: NRG; PAM sequence: TGG
  source 1..20: mol_type = other DNA
ctggacagttgtcattgagc

SEQ ID NO: 25732 - DNA, 20 bp, synthetic construct
  misc_feature 1..20: note = Description of Artificial Sequence: Synthetic oligonucleotide
  misc_feature 1..20: note = Target: SCN10A; (-) strand; PAM type: NRG; PAM sequence: GAG
  source 1..20: mol_type = other DNA
atttctggacagttgtcatt

SEQ ID NO: 25733 - DNA, 20 bp, synthetic construct
  misc_feature 1..20: note = Description of Artificial Sequence: Synthetic oligonucleotide
  misc_feature 1..20: note = Target: SCN10A; (-) strand; PAM type: NRG; PAM sequence: CAG
  source 1..20: mol_type = other DNA
cagattgttggatttctgga

SEQ ID NO: 25734 - DNA, 20 bp, synthetic construct
  misc_feature 1..20: note = Description of Artificial Sequence: Synthetic oligonucleotide
  misc_feature 1..20: note = Target: SCN10A; (-) strand; PAM type: NRG; PAM sequence: TGG
  source 1..20: mol_type = other DNA
gaggcagattgttggatttc

SEQ ID NO: 25735 - DNA, 20 bp, synthetic construct
  misc_feature 1..20: note = Description of Artificial Sequence: Synthetic oligonucleotide
  misc_feature 1..20: note = Target: SCN10A; (-) strand; PAM type: NRG; PAM sequence: TGG
  source 1..20: mol_type = other DNA
ctaactctgaggcagattgt

SEQ ID NO: 25736 - DNA, 20 bp, synthetic construct
  misc_feature 1..20: note = Description of Artificial Sequence: Synthetic oligonucleotide
  misc_feature 1..20: note = Target: SCN10A; (-) strand; PAM type: NRG; PAM sequence: CAG
  source 1..20: mol_type = other DNA
cctgctccctaactctgagg

SEQ ID NO: 25737 - DNA, 20 bp, synthetic construct
  misc_feature 1..20: note = Description of Artificial Sequence: Synthetic oligonucleotide
  misc_feature 1..20: note = Target: SCN10A; (-) strand; PAM type: NRG; PAM sequence: AGG
  source 1..20: mol_type = other DNA
taccctgctccctaactctg

SEQ ID NO: 25738 - DNA, 20 bp, synthetic construct
  misc_feature 1..20: note = Description of Artificial Sequence: Synthetic oligonucleotide
  misc_feature 1..20: note = Target: SCN10A; (-) strand; PAM type: NRG; PAM sequence: GAG
  source 1..20: mol_type = other DNA
ctaccctgctccctaactct

SEQ ID NO: 25739 - DNA, 20 bp, synthetic construct
  misc_feature 1..20: note = Description of Artificial Sequence: Synthetic oligonucleotide
  misc_feature 1..20: note = Target: SCN10A; (-) strand; PAM type: NRG; PAM sequence: GAG
  source 1..20: mol_type = other DNA
tagaaggcttcagtaaaaaa

SEQ ID NO: 25740 - DNA, 20 bp, synthetic construct
  misc_feature 1..20: note = Description of Artificial Sequence: Synthetic oligonucleotide
  misc_feature 1..20: note = Target: SCN10A; (-) strand; PAM type: NRG; PAM sequence: AAG
  source 1..20: mol_type = other DNA
cttagaaggcttcagtaaaa

SEQ ID NO: 25741 - DNA, 20 bp, synthetic construct
  misc_feature 1..20: note = Description of Artificial Sequence: Synthetic oligonucleotide
  misc_feature 1..20: note = Target: SCN10A; (-) strand; PAM type: NRG; PAM sequence: CAG
  source 1..20: mol_type = other DNA
agccttttcttagaaggctt

SEQ ID NO: 25742 - DNA, 20 bp, synthetic construct
  misc_feature 1..20: note = Description of Artificial Sequence: Synthetic oligonucleotide
  misc_feature 1..20: note = Target: SCN10A; (-) strand; PAM type: NRG; PAM sequence: AGG
  source 1..20: mol_type = other DNA
gtaaccagccttttcttaga

SEQ ID NO: 25743 - DNA, 20 bp, synthetic construct
  misc_feature 1..20: note = Description of Artificial Sequence: Synthetic oligonucleotide
  misc_feature 1..20: note = Target: SCN10A; (-) strand; PAM type: NRG; PAM sequence: AAG
  source 1..20: mol_type = other DNA
ggtaaccagccttttcttag

SEQ ID NO: 25744 - DNA, 20 bp, synthetic construct
  misc_feature 1..20: note = Description of Artificial Sequence: Synthetic oligonucleotide
  misc_feature 1..20: note = Target: SCN10A; (-) strand; PAM type: NRG; PAM sequence: TAG
  source 1..20: mol_type = other DNA
aatggtaaccagccttttct

SEQ ID NO: 25745 - DNA, 20 bp, synthetic construct
  misc_feature 1..20: note = Description of Artificial Sequence: Synthetic oligonucleotide
  misc_feature 1..20: note = Target: SCN10A; (-) strand; PAM type: NRG; PAM sequence: CAG
  source 1..20: mol_type = other DNA
gttgcctgacaaatggtaac

SEQ ID NO: 25746 - DNA, 20 bp, synthetic construct
  misc_feature 1..20: note = Description of Artificial Sequence: Synthetic oligonucleotide
  misc_feature 1..20: note = Target: SCN10A; (-) strand; PAM type: NRG; PAM sequence: TGG
  source 1..20: mol_type = other DNA
tgcctcagttgcctgacaaa

SEQ ID NO: 25747 - DNA, 20 bp, synthetic construct
  misc_feature 1..20: note = Description of Artificial Sequence: Synthetic oligonucleotide
  misc_feature 1..20: note = Target: SCN10A; (-) strand; PAM type: NRG; PAM sequence: CAG
  source 1..20: mol_type = other DNA
gtacaagaatacacctgcct

SEQ ID NO: 25748 - DNA, 20 bp, synthetic construct
  misc_feature 1..20: note = Description of Artificial Sequence: Synthetic oligonucleotide
  misc_feature 1..20: note = Target: SCN10A; (-) strand; PAM type: NRG; PAM sequence: AAG
  source 1..20: mol_type = other DNA
cttgcaggaggttgatgtac

SEQ ID NO: 25749 - DNA, 20 bp, synthetic construct
  misc_feature 1..20: note = Description of Artificial Sequence: Synthetic oligonucleotide
  misc_feature 1..20: note = Target: SCN10A; (-) strand; PAM type: NRG; PAM sequence: AGG
  source 1..20: mol_type = other DNA
atttagccctggcttgcagg

SEQ ID NO: 25750 - DNA, 20 bp, synthetic construct
  misc_feature 1..20: note = Description of Artificial Sequence: Synthetic oligonucleotide
  misc_feature 1..20: note = Target: SCN10A; (-) strand; PAM type: NRG; PAM sequence: GAG
  source 1..20: mol_type = other DNA
aatttagccctggcttgcag

SEQ ID NO: 25751 - DNA, 20 bp, synthetic construct
  misc_feature 1..20: note = Description of Artificial Sequence: Synthetic oligonucleotide
  misc_feature 1..20: note = Target: SCN10A; (-) strand; PAM type: NRG; PAM sequence: AGG
  source 1..20: mol_type = other DNA
caaatttagccctggcttgc

SEQ ID NO: 25752 - DNA, 20 bp, synthetic construct
  misc_feature 1..20: note = Description of Artificial Sequence: Synthetic oligonucleotide
  misc_feature 1..20: note = Target: SCN10A; (-) strand; PAM type: NRG; PAM sequence: CAG
  source 1..20: mol_type = other DNA
acaaatttagccctggcttg

SEQ ID NO: 25753 - DNA, 20 bp, synthetic construct
  misc_feature 1..20: note = Description of Artificial Sequence: Synthetic oligonucleotide
  misc_feature 1..20: note = Target: SCN10A; (-) strand; PAM type: NRG; PAM sequence: TGG
  source 1..20: mol_type = other DNA
ctttatgacaaatttagccc

SEQ ID NO: 25754 - DNA, 20 bp, synthetic construct
  misc_feature 1..20: note = Description of Artificial Sequence: Synthetic oligonucleotide
  misc_feature 1..20: note = Target: SCN10A; (-) strand; PAM type: NRG; PAM sequence: TAG
  source 1..20: mol_type = other DNA
gaagttctttatgacaaatt

SEQ ID NO: 25755 - DNA, 20 bp, synthetic construct
  misc_feature 1..20: note = Description of Artificial Sequence: Synthetic oligonucleotide
  misc_feature 1..20: note = Target: SCN10A; (-) strand; PAM type: NRG; PAM sequence: AAG
  source 1..20: mol_type = other DNA
ttggtcatcggaaggattgg

SEQ ID NO: 25756 - DNA, 20 bp, synthetic construct
  misc_feature 1..20: note = Description of Artificial Sequence: Synthetic oligonucleotide
  misc_feature 1..20: note = Target: SCN10A; (-) strand; PAM type: NRG; PAM sequence: TGG
  source 1..20: mol_type = other DNA
tccttggtcatcggaaggat

SEQ ID NO: 25757 - DNA, 20 bp, synthetic construct
  misc_feature 1..20: note = Description of Artificial Sequence: Synthetic oligonucleotide
  misc_feature 1..20: note = Target: SCN10A; (-) strand; PAM type: NRG; PAM sequence: AGG
  source 1..20: mol_type = other DNA
taagatccttggtcatcgga

SEQ ID NO: 25758 - DNA, 20 bp, synthetic construct
  misc_feature 1..20: note = Description of Artificial Sequence: Synthetic oligonucleotide
  misc_feature 1..20: note = Target: SCN10A; (-) strand; PAM type: NRG; PAM sequence: AAG
  source 1..20: mol_type = other DNA
ctaagatccttggtcatcgg

SEQ ID NO: 25759 - DNA, 20 bp, synthetic construct
  misc_feature 1..20: note = Description of Artificial Sequence: Synthetic oligonucleotide
  misc_feature 1..20: note = Target: SCN10A; (-) strand; PAM type: NRG; PAM sequence: CGG
  source 1..20: mol_type = other DNA
gacctaagatccttggtcat

SEQ ID NO: 25760 - DNA, 20 bp, synthetic construct
  misc_feature 1..20: note = Description of Artificial Sequence: Synthetic oligonucleotide
  misc_feature 1..20: note = Target: SCN10A; (-) strand; PAM type: NRG; PAM sequence: TGG
  source 1..20: mol_type = other DNA
tcctaatgacctaagatcct

SEQ ID NO: 25761 - DNA, 20 bp, synthetic construct
  misc_feature 1..20: note = Description of Artificial Sequence: Synthetic oligonucleotide
  misc_feature 1..20: note = Target: SCN10A; (-) strand; PAM type: NRG; PAM sequence: AAG
  source 1..20: mol_type = other DNA
tggaaagatcctaatgacct

SEQ ID NO: 25762 - DNA, 20 bp, synthetic construct
  misc_feature 1..20: note = Description of Artificial Sequence: Synthetic oligonucleotide
  misc_feature 1..20: note = Target: SCN10A; (-) strand; PAM type: NRG; PAM sequence: AAG
  source 1..20: mol_type = other DNA
tcctgggtgatcctaatgga

SEQ ID NO: 25763 - DNA, 20 bp, synthetic construct
  misc_feature 1..20: note = Description of Artificial Sequence: Synthetic oligonucleotide
  misc_feature 1..20: note = Target: SCN10A; (-) strand; PAM type: NRG; PAM sequence: TGG
  source 1..20: mol_type = other DNA
atcttcctgggtgatcctaa

SEQ ID NO: 25764 - DNA, 20 bp, synthetic construct
  misc_feature 1..20: note = Description of Artificial Sequence: Synthetic oligonucleotide
  misc_feature 1..20: note = Target: SCN10A; (-) strand; PAM type: NRG; PAM sequence: GGG
  source 1..20: mol_type = other DNA
tggtttcctaagatcttcct

SEQ ID NO: 25765 - DNA, 20 bp, synthetic construct
  misc_feature 1..20: note = Description of Artificial Sequence: Synthetic oligonucleotide
  misc_feature 1..20: note = Target: SCN10A; (-) strand; PAM type: NRG; PAM sequence: TGG
  source 1..20: mol_type = other DNA
ttggtttcctaagatcttcc

SEQ ID NO: 25766 - DNA, 20 bp, synthetic construct
  misc_feature 1..20: note = Description of Artificial Sequence: Synthetic oligonucleotide
  misc_feature 1..20: note = Target: SCN10A; (-) strand; PAM type: NRG; PAM sequence: AAG
  source 1..20: mol_type = other DNA
atactttggtttggtttcct

SEQ ID NO: 25767 - DNA, 20 bp, synthetic construct
  misc_feature 1..20: note = Description of Artificial Sequence: Synthetic oligonucleotide
  misc_feature 1..20: note = Target: SCN10A; (-) strand; PAM type: NRG; PAM sequence: TGG
  source 1..20: mol_type = other DNA
agaaaaaagatactttggtt

SEQ ID NO: 25768 - DNA, 20 bp, synthetic construct
  misc_feature 1..20: note = Description of Artificial Sequence: Synthetic oligonucleotide
  misc_feature 1..20: note = Target: SCN10A; (-) strand; PAM type: NRG; PAM sequence: TGG
  source 1..20: mol_type = other DNA
ctagtagaaaaaagatactt

SEQ ID NO: 25769 - DNA, 20 bp, synthetic construct
  misc_feature 1..20: note = Description of Artificial Sequence: Synthetic oligonucleotide
  misc_feature 1..20: note = Target: SCN10A; (-) strand; PAM type: NRG; PAM sequence: AAG
  source 1..20: mol_type = other DNA
caagccaaactagtagaaaa

SEQ ID NO: 25770 - DNA, 20 bp, synthetic construct
  misc_feature 1..20: note = Description of Artificial Sequence: Synthetic oligonucleotide
  misc_feature 1..20: note = Target: SCN10A; (-) strand; PAM type: NRG; PAM sequence: TAG
  source 1..20: mol_type = other DNA
tgcaaggcaagccaaactag

SEQ ID NO: 25771 - DNA, 20 bp, synthetic construct
  misc_feature 1..20: note = Description of Artificial Sequence: Synthetic oligonucleotide
  misc_feature 1..20: note = Target: SCN10A; (-) strand; PAM type: NRG; PAM sequence: TAG
  source 1..20: mol_type = other DNA
ttttgcaaggcaagccaaac

SEQ ID NO: 25772 - DNA, 20 bp, synthetic construct
  misc_feature 1..20: note = Description of Artificial Sequence: Synthetic oligonucleotide
  misc_feature 1..20: note = Target: SCN10A; (-) strand; PAM type: NRG; PAM sequence: AAG
  source 1..20: mol_type = other DNA
ttcaggggattttgcaaggc

SEQ ID NO: 25773 - DNA, 20 bp, synthetic construct
  misc_feature 1..20: note = Description of Artificial Sequence: Synthetic oligonucleotide
  misc_feature 1..20: note = Target: SCN10A; (-) strand; PAM type: NRG; PAM sequence: AGG
  source 1..20: mol_type = other DNA
tgctttcaggggattttgca

SEQ ID NO: 25774 - DNA, 20 bp, synthetic construct
  misc_feature 1..20: note = Description of Artificial Sequence: Synthetic oligonucleotide
  misc_feature 1..20: note = Target: SCN10A; (-) strand; PAM type: NRG; PAM sequence: AAG
  source 1..20: mol_type = other DNA
ctgctttcaggggattttgc

SEQ ID NO: 25775 - DNA, 20 bp, synthetic construct
  misc_feature 1..20: note = Description of Artificial Sequence: Synthetic oligonucleotide
  misc_feature 1..20: note = Target: SCN10A; (-) strand; PAM type: NRG; PAM sequence: GGG
  source 1..20: mol_type = other DNA
atgtcagaagctgctttcag

SEQ ID NO: 25776 - DNA, 20 bp, synthetic construct
  misc_feature 1..20: note = Description of Artificial Sequence: Synthetic oligonucleotide
  misc_feature 1..20: note = Target: SCN10A; (-) strand; PAM type: NRG; PAM sequence: GGG
  source 1..20: mol_type = other DNA
aatgtcagaagctgctttca

SEQ ID NO: 25777 - DNA, 20 bp, synthetic construct
  misc_feature 1..20: note = Description of Artificial Sequence: Synthetic oligonucleotide
  misc_feature 1..20: note = Target: SCN10A; (-) strand; PAM type: NRG; PAM sequence: AGG
  source 1..20: mol_type = other DNA
taatgtcagaagctgctttc

SEQ ID NO: 25778 - DNA, 20 bp, synthetic construct
  misc_feature 1..20: note = Description of Artificial Sequence: Synthetic oligonucleotide
  misc_feature 1..20: note = Target: SCN10A; (-) strand; PAM type: NRG; PAM sequence: CAG
  source 1..20: mol_type = other DNA
gtaatgtcagaagctgcttt

SEQ ID NO: 25779 - DNA, 20 bp, synthetic construct
  misc_feature 1..20: note = Description of Artificial Sequence: Synthetic oligonucleotide
  misc_feature 1..20: note = Target: SCN10A; (-) strand; PAM type: NRG; PAM sequence: AAG
  source 1..20: mol_type = other DNA
attgttttaggtaatgtcag

SEQ ID NO: 25780 - DNA, 20 bp, synthetic construct
  misc_feature 1..20: note = Description of Artificial Sequence: Synthetic oligonucleotide
  misc_feature 1..20: note = Target: SCN10A; (-) strand; PAM type: NRG; PAM sequence: CAG
  source 1..20: mol_type = other DNA
tgaattgttttaggtaatgt

SEQ ID NO: 25781 - DNA, 20 bp, synthetic construct
  misc_feature 1..20: note = Description of Artificial Sequence: Synthetic oligonucleotide
  misc_feature 1..20: note = Target: SCN10A; (-) strand; PAM type: NRG; PAM sequence: AGG
  source 1..20: mol_type = other DNA
tctactatatgaattgtttt

SEQ ID NO: 25782 - DNA, 20 bp, synthetic construct
  misc_feature 1..20: note = Description of Artificial Sequence: Synthetic oligonucleotide
  misc_feature 1..20: note = Target: SCN10A; (-) strand; PAM type: NRG; PAM sequence: TAG
  source 1..20: mol_type = other DNA
gtctactatatgaattgttt

SEQ ID NO: 25783 - DNA, 20 bp, synthetic construct
  misc_feature 1..20: note = Description of Artificial Sequence: Synthetic oligonucleotide
  misc_feature 1..20: note = Target: SCN10A; (-) strand; PAM type: NRG; PAM sequence: TGG
  source 1..20: mol_type = other DNA
tgtaatgattagagacacat

SEQ ID NO: 25784 - DNA, 20 bp, synthetic construct
  misc_feature 1..20: note = Description of Artificial Sequence: Synthetic oligonucleotide
  misc_feature 1..20: note = Target: SCN10A; (-) strand; PAM type: NRG; PAM sequence: GAG
  source 1..20: mol_type = other DNA
atacaagactgtaatgatta

SEQ ID NO: 25785 - DNA, 20 bp, synthetic construct
  misc_feature 1..20: note = Description of Artificial Sequence: Synthetic oligonucleotide
  misc_feature 1..20: note = Target: SCN10A; (-) strand; PAM type: NRG; PAM sequence: TAG
  source 1..20: mol_type = other DNA
ccatacaagactgtaatgat

SEQ ID NO: 25786 - DNA, 20 bp, synthetic construct
  misc_feature 1..20: note = Description of Artificial Sequence: Synthetic oligonucleotide
  misc_feature 1..20: note = Target: SCN10A; (-) strand; PAM type: NRG; PAM sequence: AAG
  source 1..20: mol_type = other DNA
atctgatgttcatgccatac

SEQ ID NO: 25787 - DNA, 20 bp, synthetic construct
  misc_feature 1..20: note = Description of Artificial Sequence: Synthetic oligonucleotide
  misc_feature 1..20: note = Target: SCN10A; (-) strand; PAM type: NRG; PAM sequence: AGG
  source 1..20: mol_type = other DNA
attactcaaaaactactagc

SEQ ID NO: 25788 - DNA, 20 bp, synthetic construct
  misc_feature 1..20: note = Description of Artificial Sequence: Synthetic oligonucleotide
  misc_feature 1..20: note = Target: SCN10A; (-) strand; PAM type: NRG; PAM sequence: CAG
  source 1..20: mol_type = other DNA
aattactcaaaaactactag

SEQ ID NO: 25789 - DNA, 20 bp, synthetic construct
  misc_feature 1..20: note = Description of Artificial Sequence: Synthetic oligonucleotide
  misc_feature 1..20: note = Target: SCN10A; (-) strand; PAM type: NRG; PAM sequence: TAG
  source 1..20: mol_type = other DNA
acaaattactcaaaaactac

SEQ ID NO: 25790 - DNA, 20 bp, synthetic construct
  misc_feature 1..20: note = Description of Artificial Sequence: Synthetic oligonucleotide
  misc_feature 1..20: note = Target: SCN10A; (-) strand; PAM type: NRG; PAM sequence: GGG
  source 1..20: mol_type = other DNA
atgggacctcattggtcatg

SEQ ID NO: 25791 - DNA, 20 bp, synthetic construct
  misc_feature 1..20: note = Description of Artificial Sequence: Synthetic oligonucleotide
  misc_feature 1..20: note = Target: SCN10A; (-) strand; PAM type: NRG; PAM sequence: GGG
  source 1..20: mol_type = other DNA
aatgggacctcattggtcat

SEQ ID NO: 25792 - DNA, 20 bp, synthetic construct
  misc_feature 1..20: note = Description of Artificial Sequence: Synthetic oligonucleotide
  misc_feature 1..20: note = Target: SCN10A; (-) strand; PAM type: NRG; PAM sequence: TGG
  source 1..20: mol_type = other DNA
caatgggacctcattggtca

SEQ ID NO: 25793 - DNA, 20 bp, synthetic construct
  misc_feature 1..20: note = Description of Artificial Sequence: Synthetic oligonucleotide
  misc_feature 1..20: note = Target: SCN10A; (-) strand; PAM type: NRG; PAM sequence: TGG
  source 1..20: mol_type = other DNA
tagtctcaatgggacctcat

SEQ ID NO: 25794 - DNA, 20 bp, synthetic construct
  misc_feature 1..20: note = Description of Artificial Sequence: Synthetic oligonucleotide
  misc_feature 1..20: note = Target: SCN10A; (-) strand; PAM type: NRG; PAM sequence: GGG
  source 1..20: mol_type = other DNA
agagcacacatagtctcaat

SEQ ID NO: 25795 - DNA, 20 bp, synthetic construct
  misc_feature 1..20: note = Description of Artificial Sequence: Synthetic oligonucleotide
  misc_feature 1..20: note = Target: SCN10A; (-) strand; PAM type: NRG; PAM sequence: TGG
  source 1..20: mol_type = other DNA
aagagcacacatagtctcaa

SEQ ID NO: 25796 - DNA, 20 bp, synthetic construct
  misc_feature 1..20: note = Description of Artificial Sequence: Synthetic oligonucleotide
  misc_feature 1..20: note = Target: SCN10A; (-) strand; PAM type: NRG; PAM sequence: TAG
  source 1..20: mol_type = other DNA
catgatgggaagagcacaca

SEQ ID NO: 25797 - DNA, 20 bp, synthetic construct
  misc_feature 1..20: note = Description of Artificial Sequence: Synthetic oligonucleotide
  misc_feature 1..20: note = Target: SCN10A; (-) strand; PAM type: NRG; PAM sequence: GAG
  source 1..20: mol_type = other DNA
aaaacagaccatgatgggaa

SEQ ID NO: 25798 - DNA, 20 bp, synthetic construct
  misc_feature 1..20: note = Description of Artificial Sequence: Synthetic oligonucleotide
  misc_feature 1..20: note = Target: SCN10A; (-) strand; PAM type: NRG; PAM sequence: AAG
  source 1..20: mol_type = other DNA
ggaaaacagaccatgatggg

SEQ ID NO: 25799 - DNA, 20 bp, synthetic construct
  misc_feature 1..20: note = Description of Artificial Sequence: Synthetic oligonucleotide
  misc_feature 1..20: note = Target: SCN10A; (-) strand; PAM type: NRG; PAM sequence: GGG
  source 1..20: mol_type = other DNA
caaggaaaacagaccatgat

SEQ ID NO: 25800 - DNA, 20 bp, synthetic construct
  misc_feature 1..20: note = Description of Artificial Sequence: Synthetic oligonucleotide
  misc_feature 1..20: note = Target: SCN10A; (-) strand; PAM type: NRG; PAM sequence: TGG
  source 1..20: mol_type = other DNA
gcaaggaaaacagaccatga

SEQ ID NO: 25801 - DNA, 20 bp, synthetic construct
  misc_feature 1..20: note = Description of Artificial Sequence: Synthetic oligonucleotide
  misc_feature 1..20: note = Target: SCN10A; (-) strand; PAM type: NRG; PAM sequence: CAG
  source 1..20: mol_type = other DNA
ctcccagagggcaaggaaaa

SEQ ID NO: 25802 - DNA, 20 bp, synthetic construct
  misc_feature 1..20: note = Description of Artificial Sequence: Synthetic oligonucleotide
  misc_feature 1..20: note = Target: SCN10A; (-) strand; PAM type: NRG; PAM sequence: AGG
  source 1..20: mol_type = other DNA
gcagcacctcccagagggca

SEQ ID NO: 25803 - DNA, 20 bp, synthetic construct
  misc_feature 1..20: note = Description of Artificial Sequence: Synthetic oligonucleotide
  misc_feature 1..20: note = Target: SCN10A; (-) strand; PAM type: NRG; PAM sequence: AAG
  source 1..20: mol_type = other DNA
agcagcacctcccagagggc

SEQ ID NO: 25804 - DNA, 20 bp, synthetic construct
  misc_feature 1..20: note = Description of Artificial Sequence: Synthetic oligonucleotide
  misc_feature 1..20: note = Target: SCN10A; (-) strand; PAM type: NRG; PAM sequence: GGG
  source 1..20: mol_type = other DNA
aaagagcagcacctcccaga

SEQ ID NO: 25805 - DNA, 20 bp, synthetic construct
  misc_feature 1..20: note = Description of Artificial Sequence: Synthetic oligonucleotide
  misc_feature 1..20: note = Target: SCN10A; (-) strand; PAM type: NRG; PAM sequence: AGG
  source 1..20: mol_type = other DNA
aaaagagcagcacctcccag

SEQ ID NO: 25806 - DNA, 20 bp, synthetic construct
  misc_feature 1..20: note = Description of Artificial Sequence: Synthetic oligonucleotide
  misc_feature 1..20: note = Target: SCN10A; (-) strand; PAM type: NRG; PAM sequence: GAG
  source 1..20: mol_type = other DNA
caaaagagcagcacctccca

SEQ ID NO: 25807 - DNA, 20 bp, synthetic construct
  misc_feature 1..20: note = Description of Artificial Sequence: Synthetic oligonucleotide
  misc_feature 1..20: note = Target: SCN10A; (-) strand; PAM type: NRG; PAM sequence: CAG
  source 1..20: mol_type = other DNA
ggcaaaagagcagcacctcc

SEQ ID NO: 25808 - DNA, 20 bp, synthetic construct
  misc_feature 1..20: note = Description of Artificial Sequence: Synthetic oligonucleotide
  misc_feature 1..20: note = Target: SCN10A; (-) strand; PAM type: NRG; PAM sequence: CAG
  source 1..20: mol_type = other DNA
ctgcttactgggcaaaagag

SEQ ID NO: 25809 - DNA, 20 bp, synthetic construct
  misc_feature 1..20: note = Description of Artificial Sequence: Synthetic oligonucleotide
  misc_feature 1..20: note = Target: SCN10A; (-) strand; PAM type: NRG; PAM sequence: GAG
  source 1..20: mol_type = other DNA
tggctgcttactgggcaaaa

SEQ ID NO: 25810 - DNA, 20 bp, synthetic construct
  misc_feature 1..20: note = Description of Artificial Sequence: Synthetic oligonucleotide
  misc_feature 1..20: note = Target: SCN10A; (-) strand; PAM type: NRG; PAM sequence: AAG
  source 1..20: mol_type = other DNA
agtggctgcttactgggcaa

SEQ ID NO: 25811 - DNA, 20 bp, synthetic construct
  misc_feature 1..20: note = Description of Artificial Sequence: Synthetic oligonucleotide
  misc_feature 1..20: note = Target: SCN10A; (-) strand; PAM type: NRG; PAM sequence: GGG
  source 1..20: mol_type = other DNA
ctgagaagtggctgcttact

SEQ ID NO: 25812 - DNA, 20 bp, synthetic construct
  misc_feature 1..20: note = Description of Artificial Sequence: Synthetic oligonucleotide
  misc_feature 1..20: note = Target: SCN10A; (-) strand; PAM type: NRG; PAM sequence: TGG
  source 1..20: mol_type = other DNA
gctgagaagtggctgcttac

SEQ ID NO: 25813 - DNA, 20 bp, synthetic construct
  misc_feature 1..20: note = Description of Artificial Sequence: Synthetic oligonucleotide
  misc_feature 1..20: note = Target: SCN10A; (-) strand; PAM type: NRG; PAM sequence: TGG
  source 1..20: mol_type = other DNA
gccatagccatgctgagaag

SEQ ID NO: 25814 - DNA, 20 bp, synthetic construct
  misc_feature 1..20: note = Description of Artificial Sequence: Synthetic oligonucleotide
  misc_feature 1..20: note = Target: SCN10A; (-) strand; PAM type: NRG; PAM sequence: AAG
  source 1..20: mol_type = other DNA
tgtgccatagccatgctgag

SEQ ID NO: 25815 - DNA, 20 bp, synthetic construct
  misc_feature 1..20: note = Description of Artificial Sequence: Synthetic oligonucleotide
  misc_feature 1..20: note = Target: SCN10A; (-) strand; PAM type: NRG; PAM sequence: GAG
  source 1..20: mol_type = other DNA
ctctgtgccatagccatgct

SEQ ID NO: 25816 - DNA, 20 bp, synthetic construct
  misc_feature 1..20: note = Description of Artificial Sequence: Synthetic oligonucleotide
  misc_feature 1..20: note = Target: SCN10A; (-) strand; PAM type: NRG; PAM sequence: TAG
  source 1..20: mol_type = other DNA
tgagttgttgctctgtgcca

SEQ ID NO: 25817 - DNA, 20 bp, synthetic construct
  misc_feature 1..20: note = Description of Artificial Sequence: Synthetic oligonucleotide
  misc_feature 1..20: note = Target: SCN10A; (-) strand; PAM type: NRG; PAM sequence: GAG
  source 1..20: mol_type = other DNA
tgggcagatgagataggcat

SEQ ID NO: 25818 - DNA, 20 bp, synthetic construct
  misc_feature 1..20: note = Description of Artificial Sequence: Synthetic oligonucleotide
  misc_feature 1..20: note = Target: SCN10A; (-) strand; PAM type: NRG; PAM sequence: AGG
  source 1..20: mol_type = other DNA
cttctttgggcagatgagat

SEQ ID NO: 25819 - DNA, 20 bp, synthetic construct
  misc_feature 1..20: note = Description of Artificial Sequence: Synthetic oligonucleotide
  misc_feature 1..20: note = Target: SCN10A; (-) strand; PAM type: NRG; PAM sequence: TAG
  source 1..20: mol_type = other DNA
ccttctttgggcagatgaga

SEQ ID NO: 25820 - DNA, 20 bp, synthetic construct
  misc_feature 1..20: note = Description of Artificial Sequence: Synthetic oligonucleotide
  misc_feature 1..20: note = Target: SCN10A; (-) strand; PAM type: NRG; PAM sequence: GAG
  source 1..20: mol_type = other DNA
caagccttctttgggcagat

SEQ ID NO: 25821 - DNA, 20 bp, synthetic construct
  misc_feature 1..20: note = Description of Artificial Sequence: Synthetic oligonucleotide
  misc_feature 1..20: note = Target: SCN10A; (-) strand; PAM type: NRG; PAM sequence: CAG
  source 1..20: mol_type = other DNA
gggcccaagccttctttggg

SEQ ID NO: 25822 - DNA, 20 bp, synthetic construct
  misc_feature 1..20: note = Description of Artificial Sequence: Synthetic oligonucleotide
  misc_feature 1..20: note = Target: SCN10A; (-) strand; PAM type: NRG; PAM sequence: GGG
  source 1..20: mol_type = other DNA
agagggcccaagccttcttt

SEQ ID NO: 25823 - DNA, 20 bp, synthetic construct
  misc_feature 1..20: note = Description of Artificial Sequence: Synthetic oligonucleotide
  misc_feature 1..20: note = Target: SCN10A; (-) strand; PAM type: NRG; PAM sequence: TGG
  source 1..20: mol_type = other DNA
aagagggcccaagccttctt

SEQ ID NO: 25824 - DNA, 20 bp, synthetic construct
  misc_feature 1..20: note = Description of Artificial Sequence: Synthetic oligonucleotide
  misc_feature 1..20: note = Target: SCN10A; (-) strand; PAM type: NRG; PAM sequence: AAG
  source 1..20: mol_type = other DNA
aacaggcagtaagagggccc

SEQ ID NO: 25825 - DNA, 20 bp, synthetic construct
  misc_feature 1..20: note = Description of Artificial Sequence: Synthetic oligonucleotide
  misc_feature 1..20: note = Target: SCN10A; (-) strand; PAM type: NRG; PAM sequence: GGG
  source 1..20: mol_type = other DNA
caacacaacaggcagtaaga

SEQ ID NO: 25826 - DNA, 20 bp, synthetic construct
  misc_feature 1..20: note = Description of Artificial Sequence: Synthetic oligonucleotide
  misc_feature 1..20: note = Target: SCN10A; (-) strand; PAM type: NRG; PAM sequence: AGG
  source 1..20: mol_type = other DNA
acaacacaacaggcagtaag

SEQ ID NO: 25827 - DNA, 20 bp, synthetic construct
  misc_feature 1..20: note = Description of Artificial Sequence: Synthetic oligonucleotide
  misc_feature 1..20: note = Target: SCN10A; (-) strand; PAM type: NRG; PAM sequence: GAG
  source 1..20: mol_type = other DNA
cacaacacaacaggcagtaa

SEQ ID NO: 25828 - DNA, 20 bp, synthetic construct
  misc_feature 1..20: note = Description of Artificial Sequence: Synthetic oligonucleotide
  misc_feature 1..20: note = Target: SCN10A; (-) strand; PAM type: NRG; PAM sequence: AAG
  source 1..20: mol_type = other DNA
cccacaacacaacaggcagt

SEQ ID NO: 25829 - DNA, 20 bp, synthetic construct
  misc_feature 1..20: note = Description of Artificial Sequence: Synthetic oligonucleotide
  misc_feature 1..20: note = Target: SCN10A; (-) strand; PAM type: NRG; PAM sequence: CAG
  source 1..20: mol_type = other DNA
tttccccacaacacaacagg

SEQ ID NO: 25830 - DNA, 20 bp, synthetic construct
  misc_feature 1..20: note = Description of Artificial Sequence: Synthetic oligonucleotide
  misc_feature 1..20: note = Target: SCN10A; (-) strand; PAM type: NRG; PAM sequence: AGG
  source 1..20: mol_type = other DNA
cgctttccccacaacacaac

SEQ ID NO: 25831 - DNA, 20 bp, synthetic construct
  misc_feature 1..20: note = Description of Artificial Sequence: Synthetic oligonucleotide
  misc_feature 1..20: note = Target: SCN10A; (-) strand; PAM type: NRG; PAM sequence: CAG
  source 1..20: mol_type = other DNA
ccgctttccccacaacacaa

SEQ ID NO: 25832 - DNA, 20 bp, synthetic construct
  misc_feature 1..20: note = Description of Artificial Sequence: Synthetic oligonucleotide
  misc_feature 1..20: note = Target: SCN10A; (-) strand; PAM type: NRG; PAM sequence: TGG
  source 1..20: mol_type = other DNA
cacattctcaccacggtgtg

SEQ ID NO: 25833 - DNA, 20 bp, synthetic construct
  misc_feature 1..20: note = Description of Artificial Sequence: Synthetic oligonucleotide
  misc_feature 1..20: note = Target: SCN10A; (-) strand; PAM type: NRG; PAM sequence: CGG
  source 1..20: mol_type = other DNA
ccccagacacattctcacca

SEQ ID NO: 25834 - DNA, 20 bp, synthetic construct
  misc_feature 1..20: note = Description of Artificial Sequence: Synthetic oligonucleotide
  misc_feature 1..20: note = Target: SCN10A; (-) strand; PAM type: NRG; PAM sequence: CAG
  source 1..20: mol_type = other DNA
gggaggtttgctgatgcccc

SEQ ID NO: 25835 - DNA, 20 bp, synthetic construct
  misc_feature 1..20: note = Description of Artificial Sequence: Synthetic oligonucleotide
  misc_feature 1..20: note = Target: SCN10A; (-) strand; PAM type: NRG; PAM sequence: AGG
  source 1..20: mol_type = other DNA
aacatcctctttatgagggg

SEQ ID NO: 25836 - DNA, 20 bp, synthetic construct
  misc_feature 1..20: note = Description of Artificial Sequence: Synthetic oligonucleotide
  misc_feature 1..20: note = Target: SCN10A; (-) strand; PAM type: NRG; PAM sequence: GAG
  source 1..20: mol_type = other DNA
aaacatcctctttatgaggg

SEQ ID NO: 25837 - DNA, 20 bp, synthetic construct
  misc_feature 1..20: note = Description of Artificial Sequence: Synthetic oligonucleotide
  misc_feature 1..20: note = Target: SCN10A; (-) strand; PAM type: NRG; PAM sequence: GGG
  source 1..20: mol_type = other DNA
aaaaacatcctctttatgag

SEQ ID NO: 25838 - DNA, 20 bp, synthetic construct
  misc_feature 1..20: note = Description of Artificial Sequence: Synthetic oligonucleotide
  misc_feature 1..20: note = Target: SCN10A; (-) strand; PAM type: NRG; PAM sequence: GGG
  source 1..20: mol_type = other DNA
gaaaaacatcctctttatga

SEQ ID NO: 25839 - DNA, 20 bp, synthetic construct
  misc_feature 1..20: note = Description of Artificial Sequence: Synthetic oligonucleotide
  misc_feature 1..20: note = Target: SCN10A; (-) strand; PAM type: NRG; PAM sequence: AGG
  source 1..20: mol_type = other DNA
tgaaaaacatcctctttatg

SEQ ID NO: 25840 - DNA, 20 bp, synthetic construct
  misc_feature 1..20: note = Description of Artificial Sequence: Synthetic oligonucleotide
  misc_feature 1..20: note = Target: SCN10A; (-) strand; PAM type: NRG; PAM sequence: GAG
  source 1..20: mol_type = other DNA
ttgaaaaacatcctctttat

SEQ ID NO: 25841 - DNA, 20 bp, synthetic construct
  misc_feature 1..20: note = Description of Artificial Sequence: Synthetic oligonucleotide
  misc_feature 1..20: note = Target: SCN10A; (-) strand; PAM type: NRG; PAM sequence: TGG
  source 1..20: mol_type = other DNA
gactaatctagacacacctg

SEQ ID NO: 25842 - DNA, 20 bp, synthetic construct
  misc_feature 1..20: note = Description of Artificial Sequence: Synthetic oligonucleotide
  misc_feature 1..20: note = Target: SCN10A; (-) strand; PAM type: NRG; PAM sequence: TAG
  source 1..20: mol_type = other DNA
ggattcacctcagactaatc

SEQ ID NO: 25843 - DNA, 20 bp, synthetic construct
  misc_feature 1..20: note = Description of Artificial Sequence: Synthetic oligonucleotide
  misc_feature 1..20: note = Target: SCN10A; (-) strand; PAM type: NRG; PAM sequence: CAG
  source 1..20: mol_type = other DNA
caggtggtttggattcacct

SEQ ID NO: 25844 - DNA, 20 bp, synthetic construct
  misc_feature 1..20: note = Description of Artificial Sequence: Synthetic oligonucleotide
  misc_feature 1..20: note = Target: SCN10A; (-) strand; PAM type: NRG; PAM sequence: TGG
  source 1..20: mol_type = other DNA
tatgcaacacacaggtggtt

SEQ ID NO: 25845 - DNA, 20 bp, synthetic construct
  misc_feature 1..20: note = Description of Artificial Sequence: Synthetic oligonucleotide
  misc_feature 1..20: note = Target: SCN10A; (-) strand; PAM type: NRG; PAM sequence: TGG
  source 1..20: mol_type = other DNA
gtgtttatgcaacacacagg

SEQ ID NO: 25846 - DNA, 20 bp, synthetic construct
  misc_feature 1..20: note = Description of Artificial Sequence: Synthetic oligonucleotide
  misc_feature 1..20: note = Target: SCN10A; (-) strand; PAM type: NRG; PAM sequence: AGG
  source 1..20: mol_type = other DNA
gaagtgtttatgcaacacac

SEQ ID NO: 25847 - DNA, 20 bp, synthetic construct
  misc_feature 1..20: note = Description of Artificial Sequence: Synthetic oligonucleotide
  misc_feature 1..20: note = Target: SCN10A; (-) strand; PAM type: NRG; PAM sequence: CAG
  source 1..20: mol_type = other DNA
agaagtgtttatgcaacaca

SEQ ID NO: 25848 - DNA, 20 bp, synthetic construct
  misc_feature 1..20: note = Description of Artificial Sequence: Synthetic oligonucleotide
  misc_feature 1..20: note = Target: SCN10A; (-) strand; PAM type: NRG; PAM sequence: AAG
  source 1..20: mol_type = other DNA
gcagtcccaagacacagaag

SEQ ID NO: 25849 - DNA, 20 bp, synthetic construct
  misc_feature 1..20: note = Description of Artificial Sequence: Synthetic oligonucleotide
  misc_feature 1..20: note = Target: SCN10A; (-) strand; PAM type: NRG; PAM sequence: AAG
  source 1..20: mol_type = other DNA
aaagcagtcccaagacacag

SEQ ID NO: 25850 - DNA, 20 bp, synthetic construct
  misc_feature 1..20: note = Description of Artificial Sequence: Synthetic oligonucleotide
  misc_feature 1..20: note = Target: SCN10A; (-) strand; PAM type: NRG; PAM sequence: CAG
  source 1..20: mol_type = other DNA
cccaaagcagtcccaagaca

SEQ ID NO: 25851 - DNA, 20 bp, synthetic construct
  misc_feature 1..20: note = Description of Artificial Sequence: Synthetic oligonucleotide
  misc_feature 1..20: note = Target: SCN10A; (-) strand; PAM type: NRG; PAM sequence: AAG
  source 1..20: mol_type = other DNA
ccacaccccaaagcagtccc

SEQ ID NO: 25852 - DNA, 20 bp, synthetic construct
  misc_feature 1..20: note = Description of Artificial Sequence: Synthetic oligonucleotide
  misc_feature 1..20: note = Target: SCN10A; (-) strand; PAM type: NRG; PAM sequence: CAG
  source 1..20: mol_type = other DNA
atgtgtcccacaccccaaag

SEQ ID NO: 25853 - DNA, 20 bp, synthetic construct
  misc_feature 1..20: note = Description of Artificial Sequence: Synthetic oligonucleotide
  misc_feature 1..20: note = Target: SCN10A; (-) strand; PAM type: NRG; PAM sequence: AAG
  source 1..20: mol_type = other DNA
ttaatgtgtcccacacccca

SEQ ID NO: 25854 - DNA, 20 bp, synthetic construct
  misc_feature 1..20: note = Description of Artificial Sequence: Synthetic oligonucleotide
  misc_feature 1..20: note = Target: SCN10A; (-) strand; PAM type: NRG; PAM sequence: GGG
  source 1..20: mol_type = other DNA
ttagattgaaaaaatggctt

SEQ ID NO: 25855 - DNA, 20 bp, synthetic construct
  misc_feature 1..20: note = Description of Artificial Sequence: Synthetic oligonucleotide
  misc_feature 1..20: note = Target: SCN10A; (-) strand; PAM type: NRG; PAM sequence: TGG
  source 1..20: mol_type = other DNA
attagattgaaaaaatggct

SEQ ID NO: 25856 - DNA, 20 bp, synthetic construct
  misc_feature 1..20: note = Description of Artificial Sequence: Synthetic oligonucleotide
  misc_feature 1..20: note = Target: SCN10A; (-) strand; PAM type: NRG; PAM sequence: TGG
  source 1..20: mol_type = other DNA
aggtcattagattgaaaaaa

SEQ ID NO: 25857 - DNA, 20 bp, synthetic construct
  misc_feature 1..20: note = Description of Artificial Sequence: Synthetic oligonucleotide
  misc_feature 1..20: note = Target: SCN10A; (-) strand; PAM type: NRG; PAM sequence: TAG
  source 1..20: mol_type = other DNA
caaaagtacaatgaggtcat

SEQ ID NO: 25858 - DNA, 20 bp, synthetic construct
  misc_feature 1..20: note = Description of Artificial Sequence: Synthetic oligonucleotide
  misc_feature 1..20: note = Target: SCN10A; (-) strand; PAM type: NRG; PAM sequence: AGG
  source 1..20: mol_type = other DNA
tgaatcccaaaagtacaatg

SEQ ID NO: 25859 - DNA, 20 bp, synthetic construct
  misc_feature 1..20: note = Description of Artificial Sequence: Synthetic oligonucleotide
  misc_feature 1..20: note = Target: SCN10A; (-) strand; PAM type: NRG; PAM sequence: GAG
  source 1..20: mol_type = other DNA
ttgaatcccaaaagtacaat

SEQ ID NO: 25860 - DNA, 20 bp, synthetic construct
  misc_feature 1..20: note = Description of Artificial Sequence: Synthetic oligonucleotide
  misc_feature 1..20: note = Target: SCN10A; (-) strand; PAM type: NRG; PAM sequence: AAG
  source 1..20: mol_type = other DNA
cttatccaattgaatcccaa

SEQ ID NO: 25861 - DNA, 20 bp, synthetic construct
  misc_feature 1..20: note = Description of Artificial Sequence: Synthetic oligonucleotide
  misc_feature 1..20: note = Target: SCN10A; (-) strand; PAM type: NRG; PAM sequence: GAG
  source 1..20: mol_type = other DNA
ttctttagaggttagcaaca

SEQ ID NO: 25862 - DNA, 20 bp, synthetic construct
  misc_feature 1..20: note = Description of Artificial Sequence: Synthetic oligonucleotide
  misc_feature 1..20: note = Target: SCN10A; (-) strand; PAM type: NRG; PAM sequence: CAG
  source 1..20: mol_type = other DNA
ccttctttagaggttagcaa

SEQ ID NO: 25863 - DNA, 20 bp, synthetic construct
  misc_feature 1..20: note = Description of Artificial Sequence: Synthetic oligonucleotide
  misc_feature 1..20: note = Target: SCN10A; (-) strand; PAM type: NRG; PAM sequence: TAG
  source 1..20: mol_type = other DNA
ccagtaccttctttagaggt

SEQ ID NO: 25864 - DNA, 20 bp, synthetic construct
  misc_feature 1..20: note = Description of Artificial Sequence: Synthetic oligonucleotide
  misc_feature 1..20: note = Target: SCN10A; (-) strand; PAM type: NRG; PAM sequence: AGG
  source 1..20: mol_type = other DNA
gtgtccagtaccttctttag

SEQ ID NO: 25865 - DNA, 20 bp, synthetic construct
  misc_feature 1..20: note = Description of Artificial Sequence: Synthetic oligonucleotide
  misc_feature 1..20: note = Target: SCN10A; (-) strand; PAM type: NRG; PAM sequence: GAG
  source 1..20: mol_type = other DNA
tgtgtccagtaccttcttta

SEQ ID NO: 25866 - DNA, 20 bp, synthetic construct
  misc_feature 1..20: note = Description of Artificial Sequence: Synthetic oligonucleotide
  misc_feature 1..20: note = Target: SCN10A; (-) strand; PAM type: NRG; PAM sequence: TAG
  source 1..20: mol_type = other DNA
actgtgtccagtaccttctt

SEQ ID NO: 25867 - DNA, 20 bp, synthetic construct
  misc_feature 1..20: note = Description of Artificial Sequence: Synthetic oligonucleotide
  misc_feature 1..20: note = Target: SCN10A; (-) strand; PAM type: NRG; PAM sequence: CAG
  source 1..20: mol_type = other DNA
tagaccttgcctactgtgtc

SEQ ID NO: 25868 - DNA, 20 bp, synthetic construct
  misc_feature 1..20: note = Description of Artificial Sequence: Synthetic oligonucleotide
  misc_feature 1..20: note = Target: SCN10A; (-) strand; PAM type: NRG; PAM sequence: TAG
  source 1..20: mol_type = other DNA
cctcttccacgtgttacaat

SEQ ID NO: 25869 - DNA, 20 bp, synthetic construct
  misc_feature 1..20: note = Description of Artificial Sequence: Synthetic oligonucleotide
  misc_feature 1..20: note = Target: SCN10A; (-) strand; PAM type: NRG; PAM sequence: AAG
  source 1..20: mol_type = other DNA
gatcagaagaacggccatca

SEQ ID NO: 25870 - DNA, 20 bp, synthetic construct
  misc_feature 1..20: note = Description of Artificial Sequence: Synthetic oligonucleotide
  misc_feature 1..20: note = Target: SCN10A; (-) strand; PAM type: NRG; PAM sequence: CGG
  source 1..20: mol_type = other DNA
tttcaacctgatcagaagaa

SEQ ID NO: 25871 - DNA, 20 bp, synthetic construct
  misc_feature 1..20: note = Description of Artificial Sequence: Synthetic oligonucleotide
  misc_feature 1..20: note = Target: SCN10A; (-) strand; PAM type: NRG; PAM sequence: AAG
  source 1..20: mol_type = other DNA
agtcctttcaacctgatcag

SEQ ID NO: 25872 - DNA, 20 bp, synthetic construct
  misc_feature 1..20: note = Description of Artificial Sequence: Synthetic oligonucleotide
  misc_feature 1..20: note = Target: SCN10A; (-) strand; PAM type: NRG; PAM sequence: CAG
  source 1..20: mol_type = other DNA
ttcagtcctttcaacctgat

SEQ ID NO: 25873 - DNA, 20 bp, synthetic construct
  misc_feature 1..20: note = Description of Artificial Sequence: Synthetic oligonucleotide
  misc_feature 1..20: note = Target: SCN10A; (-) strand; PAM type: NRG; PAM sequence: CAG
  source 1..20: mol_type = other DNA
actcgggccctgtggctatt

SEQ ID NO: 25874 - DNA, 20 bp, synthetic construct
  misc_feature 1..20: note = Description of Artificial Sequence: Synthetic oligonucleotide
  misc_feature 1..20: note = Target: SCN10A; (-) strand; PAM type: NRG; PAM sequence: TGG
  source 1..20: mol_type = other DNA
ttagtgccactcgggccctg

SEQ ID NO: 25875 - DNA, 20 bp, synthetic construct
  misc_feature 1..20: note = Description of Artificial Sequence: Synthetic oligonucleotide
  misc_feature 1..20: note = Target: SCN10A; (-) strand; PAM type: NRG; PAM sequence: GGG
  source 1..20: mol_type = other DNA
ttcccggtttagtgccactc

SEQ ID NO: 25876 - DNA, 20 bp, synthetic construct
  misc_feature 1..20: note = Description of Artificial Sequence: Synthetic oligonucleotide
  misc_feature 1..20: note = Target: SCN10A; (-) strand; PAM type: NRG; PAM sequence: CGG
  source 1..20: mol_type = other DNA
tttcccggtttagtgccact

SEQ ID NO: 25877 - DNA, 20 bp, synthetic construct
  misc_feature 1..20: note = Description of Artificial Sequence: Synthetic oligonucleotide
  misc_feature 1..20: note = Target: SCN10A; (-) strand; PAM type: NRG; PAM sequence: TAG
  source 1..20: mol_type = other DNA
gggaggaccatttcccggtt

SEQ ID NO: 25878 - DNA, 20 bp, synthetic construct
  misc_feature 1..20: note = Description of Artificial Sequence: Synthetic oligonucleotide
  misc_feature 1..20: note = Target: SCN10A; (-) strand; PAM type: NRG; PAM sequence: CGG
  source 1..20: mol_type = other DNA
acaaagggaggaccatttcc

SEQ ID NO: 25879 - DNA, 20 bp, synthetic construct
  misc_feature 1..20: note = Description of Artificial Sequence: Synthetic oligonucleotide
  misc_feature 1..20: note = Target: SCN10A; (-) strand; PAM type: NRG; PAM sequence: AGG
  source 1..20: mol_type = other DNA
ttatggtgctgaacaaaggg

SEQ ID NO: 25880 - DNA, 20 bp, synthetic construct
  misc_feature 1..20: note = Description of Artificial Sequence: Synthetic oligonucleotide
  misc_feature 1..20: note = Target: SCN10A; (-) strand; PAM type: NRG; PAM sequence: GAG
  source 1..20: mol_type = other DNA
tttatggtgctgaacaaagg

SEQ ID NO: 25881 - DNA, 20 bp, synthetic construct
  misc_feature 1..20: note = Description of Artificial Sequence: Synthetic oligonucleotide
  misc_feature 1..20: note = Target: SCN10A; (-) strand; PAM type: NRG; PAM sequence: GGG
  source 1..20: mol_type = other DNA
catttatggtgctgaacaaa

SEQ ID NO: 25882 - DNA, 20 bp, synthetic construct
  misc_feature 1..20: note = Description of Artificial Sequence: Synthetic oligonucleotide
  misc_feature 1..20: note = Target: SCN10A; (-) strand; PAM type: NRG; PAM sequence: AGG
  source 1..20: mol_type = other DNA
acatttatggtgctgaacaa

SEQ ID NO: 25883 - DNA, 20 bp, synthetic construct
  misc_feature 1..20: note = Description of Artificial Sequence: Synthetic oligonucleotide
  misc_feature 1..20: note = Target: SCN10A; (-) strand; PAM type: NRG; PAM sequence: AAG
  source 1..20: mol_type = other DNA
gacatttatggtgctgaaca

SEQ ID NO: 25884 - DNA, 20 bp, synthetic construct
  misc_feature 1..20: note = Description of Artificial Sequence: Synthetic oligonucleotide
  misc_feature 1..20: note = Target: SCN10A; (-) strand; PAM type: NRG; PAM sequence: TGG
  source 1..20: mol_type = other DNA
tgttttgtttcagacattta

SEQ ID NO: 25885 - DNA, 20 bp, synthetic construct
  misc_feature 1..20: note = Description of Artificial Sequence: Synthetic oligonucleotide
  misc_feature 1..20: note = Target: SCN10A; (-) strand; PAM type: NRG; PAM sequence: CAG
  source 1..20: mol_type = other DNA
ctttctgttttgttttgttt

SEQ ID NO: 25886 - DNA, 20 bp, synthetic construct
  misc_feature 1..20: note = Description of Artificial Sequence: Synthetic oligonucleotide
  misc_feature 1..20: note = Target: SCN10A; (-) strand; PAM type: NRG; PAM sequence: AGG
  source 1..20: mol_type = other DNA
ggaatcttgtttctcattgg

SEQ ID NO: 25887 - DNA, 20 bp, synthetic construct
  misc_feature 1..20: note = Description of Artificial Sequence: Synthetic oligonucleotide
  misc_feature 1..20: note = Target: SCN10A; (-) strand; PAM type: NRG; PAM sequence: GAG
  source 1..20: mol_type = other DNA
aggaatcttgtttctcattg

SEQ ID NO: 25888 - DNA, 20 bp, synthetic construct
  misc_feature 1..20: note = Description of Artificial Sequence: Synthetic oligonucleotide
  misc_feature 1..20: note = Target: SCN10A; (-) strand; PAM type: NRG; PAM sequence: TGG
  source 1..20: mol_type = other DNA
taaggaatcttgtttctcat

SEQ ID NO: 25889 - DNA, 20 bp, synthetic construct
  misc_feature 1..20: note = Description of Artificial Sequence: Synthetic oligonucleotide
  misc_feature 1..20: note = Target: SCN10A; (-) strand; PAM type: NRG; PAM sequence: AGG
  source 1..20: mol_type = other DNA
tttaaaaacatggttgtata

SEQ ID NO: 25890 - DNA, 20 bp, synthetic construct
  misc_feature 1..20: note = Description of Artificial Sequence: Synthetic oligonucleotide
  misc_feature 1..20: note = Target: SCN10A; (-) strand; PAM type: NRG; PAM sequence: AAG
  source 1..20: mol_type = other DNA
gtttaaaaacatggttgtat

SEQ ID NO: 25891 - DNA, 20 bp, synthetic construct
  misc_feature 1..20: note = Description of Artificial Sequence: Synthetic oligonucleotide
  misc_feature 1..20: note = Target: SCN10A; (-) strand; PAM type: NRG; PAM sequence: TGG
  source 1..20: mol_type = other DNA
gcctctcatgtttaaaaaca

SEQ ID NO: 25892 - DNA, 20 bp, synthetic construct
  misc_feature 1..20: note = Description of Artificial Sequence: Synthetic oligonucleotide
  misc_feature 1..20: note = Target: SCN10A; (-) strand; PAM type: NRG; PAM sequence: GAG
  source 1..20: mol_type = other DNA
cccttcttgctcataagcct

SEQ ID NO: 25893 - DNA, 20 bp, synthetic construct
  misc_feature 1..20: note = Description of Artificial Sequence: Synthetic oligonucleotide
  misc_feature 1..20: note = Target: SCN10A; (-) strand; PAM type: NRG; PAM sequence: AAG
  source 1..20: mol_type = other DNA
ccagagcccttcttgctcat

SEQ ID NO: 25894 - DNA, 20 bp, synthetic construct
  misc_feature 1..20: note = Description of Artificial Sequence: Synthetic oligonucleotide
  misc_feature 1..20: note = Target: SCN10A; (-) strand; PAM type: NRG; PAM sequence: GAG
  source 1..20: mol_type = other DNA
tcattgacctgtagttccca

SEQ ID NO: 25895 - DNA, 20 bp, synthetic construct
  misc_feature 1..20: note = Description of Artificial Sequence: Synthetic oligonucleotide
  misc_feature 1..20: note = Target: SCN10A; (-) strand; PAM type: NRG; PAM sequence: CAG
  source 1..20: mol_type = other DNA
tctcattgacctgtagttcc

SEQ ID NO: 25896 - DNA, 20 bp, synthetic construct
  misc_feature 1..20: note = Description of Artificial Sequence: Synthetic oligonucleotide
  misc_feature 1..20: note = Target: SCN10A; (-) strand; PAM type: NRG; PAM sequence: TAG
  source 1..20: mol_type = other DNA
atttgactctcattgacctg

SEQ ID NO: 25897 - DNA, 20 bp, synthetic construct
  misc_feature 1..20: note = Description of Artificial Sequence: Synthetic oligonucleotide
  misc_feature 1..20: note = Target: SCN10A; (-) strand; PAM type: NRG; PAM sequence: TAG
  source 1..20: mol_type = other DNA
gagggtgaggatatggcttt

SEQ ID NO: 25898 - DNA, 20 bp, synthetic construct
  misc_feature 1..20: note = Description of Artificial Sequence: Synthetic oligonucleotide
  misc_feature 1..20: note = Target: SCN10A; (-) strand; PAM type: NRG; PAM sequence: TGG
  source 1..20: mol_type = other DNA
ttgctgagagggtgaggata

SEQ ID NO: 25899 - DNA, 20 bp, synthetic construct
  misc_feature 1..20: note = Description of Artificial Sequence: Synthetic oligonucleotide
  misc_feature 1..20: note = Target: SCN10A; (-) strand; PAM type: NRG; PAM sequence: AGG
  source 1..20: mol_type = other DNA
aggatcttgctgagagggtg

SEQ ID NO: 25900 - DNA, 20 bp, synthetic construct
  misc_feature 1..20: note = Description of Artificial Sequence: Synthetic oligonucleotide
  misc_feature 1..20: note = Target: SCN10A; (-) strand; PAM type: NRG; PAM sequence: GAG
  source 1..20: mol_type = other DNA
gaggatcttgctgagagggt

SEQ ID NO: 25901 - DNA, 20 bp, synthetic construct
  misc_feature 1..20: note = Description of Artificial Sequence: Synthetic oligonucleotide
  misc_feature 1..20: note = Target: SCN10A; (-) strand; PAM type: NRG; PAM sequence: GGG
  source 1..20: mol_type = other DNA
agatgaggatcttgctgaga

SEQ ID NO: 25902 - DNA, 20 bp, synthetic construct
  misc_feature 1..20: note = Description of Artificial Sequence: Synthetic oligonucleotide
  misc_feature 1..20: note = Target: SCN10A; (-) strand; PAM type: NRG; PAM sequence: AGG
  source 1..20: mol_type = other DNA
gagatgaggatcttgctgag

SEQ ID NO: 25903 - DNA, 20 bp, synthetic construct
  misc_feature 1..20: note = Description of Artificial Sequence: Synthetic oligonucleotide
  misc_feature 1..20: note = Target: SCN10A; (-) strand; PAM type: NRG; PAM sequence: GAG
  source 1..20: mol_type = other DNA
agagatgaggatcttgctga

SEQ ID NO: 25904 - DNA, 20 bp, synthetic construct
  misc_feature 1..20: note = Description of Artificial Sequence: Synthetic oligonucleotide
  misc_feature 1..20: note = Target: SCN10A; (-) strand; PAM type: NRG; PAM sequence: GAG
  source 1..20: mol_type = other DNA
ccagagatgaggatcttgct

SEQ ID NO: 25905 - DNA, 20 bp, synthetic construct
  misc_feature 1..20: note = Description of Artificial Sequence: Synthetic oligonucleotide
  misc_feature 1..20: note = Target: SCN10A; (-) strand; PAM type: NRG; PAM sequence: AGG
  source 1..20: mol_type = other DNA
cactgtcagtcccagagatg

SEQ ID NO: 25906 - DNA, 20 bp, synthetic construct
  misc_feature 1..20: note = Description of Artificial Sequence: Synthetic oligonucleotide
  misc_feature 1..20: note = Target: SCN10A; (-) strand; PAM type: NRG; PAM sequence: GAG
  source 1..20: mol_type = other DNA
gcactgtcagtcccagagat

SEQ ID NO: 25907 - DNA, 20 bp, synthetic construct
  misc_feature 1..20: note = Description of Artificial Sequence: Synthetic oligonucleotide
  misc_feature 1..20: note = Target: SCN10A; (-) strand; PAM type: NRG; PAM sequence: GAG
  source 1..20: mol_type = other DNA
ttggtgcactgtcagtccca

SEQ ID NO: 25908 - DNA, 20 bp, synthetic construct
  misc_feature 1..20: note = Description of Artificial Sequence: Synthetic oligonucleotide
  misc_feature 1..20: note = Target: SCN10A; (-) strand; PAM type: NRG; PAM sequence: CAG
  source 1..20: mol_type = other DNA
tcttggtgcactgtcagtcc

SEQ ID NO: 25909 - DNA, 20 bp, synthetic construct
  misc_feature 1..20: note = Description of Artificial Sequence: Synthetic oligonucleotide
  misc_feature 1..20: note = Target: SCN10A; (-) strand; PAM type: NRG; PAM sequence: CAG
  source 1..20: mol_type = other DNA
ggctcatcttggtgcactgt

SEQ ID NO: 25910 - DNA, 20 bp, synthetic construct
  misc_feature 1..20: note = Description of Artificial Sequence: Synthetic oligonucleotide
  misc_feature 1..20: note = Target: SCN10A; (-) strand; PAM type: NRG; PAM sequence: TGG
  source 1..20: mol_type = other DNA
taccctcagtgggctcatct

SEQ ID NO: 25911 - DNA, 20 bp, synthetic construct
  misc_feature 1..20: note = Description of Artificial Sequence: Synthetic oligonucleotide
  misc_feature 1..20: note = Target: SCN10A; (-) strand; PAM type: NRG; PAM sequence: GGG
  source 1..20: mol_type = other DNA
tccattaaagtaccctcagt

SEQ ID NO: 25912 - DNA, 20 bp, synthetic construct
  misc_feature 1..20: note = Description of Artificial Sequence: Synthetic oligonucleotide
  misc_feature 1..20: note = Target: SCN10A; (-) strand; PAM type: NRG; PAM sequence: TGG
  source 1..20: mol_type = other DNA
gtccattaaagtaccctcag

SEQ ID NO: 25913 - DNA, 20 bp, synthetic construct
  misc_feature 1..20: note = Description of Artificial Sequence: Synthetic oligonucleotide
  misc_feature 1..20: note = Target: SCN10A; (-) strand; PAM type: NRG; PAM sequence: CAG
  source 1..20: mol_type = other DNA
tctgtccattaaagtaccct

SEQ ID NO: 25914 - DNA, 20 bp, synthetic construct
  misc_feature 1..20: note = Description of Artificial Sequence: Synthetic oligonucleotide
  misc_feature 1..20: note = Target: SCN10A; (-) strand; PAM type: NRG; PAM sequence: AAG
  source 1..20: mol_type = other DNA
gattggctgtctgtccatta

SEQ ID NO: 25915 - DNA, 20 bp, synthetic construct
  misc_feature 1..20: note = Description of Artificial Sequence: Synthetic oligonucleotide
  misc_feature 1..20: note = Target: SCN10A; (-) strand; PAM type: NRG; PAM sequence: TGG
  source 1..20: mol_type = other DNA
cctcttaccagcctgaggat

SEQ ID NO: 25916 - DNA, 20 bp, synthetic construct
  misc_feature 1..20: note = Description of Artificial Sequence: Synthetic oligonucleotide
  misc_feature 1..20: note = Target: SCN10A; (-) strand; PAM type: NRG; PAM sequence: AGG
  source 1..20: mol_type = other DNA
taacacctcttaccagcctg

SEQ ID NO: 25917 - DNA, 20 bp, synthetic construct
  misc_feature 1..20: note = Description of Artificial Sequence: Synthetic oligonucleotide
  misc_feature 1..20: note = Target: SCN10A; (-) strand; PAM type: NRG; PAM sequence: GAG
  source 1..20: mol_type = other DNA
ataacacctcttaccagcct

SEQ ID NO: 25918 - DNA, 20 bp, synthetic construct
  misc_feature 1..20: note = Description of Artificial Sequence: Synthetic oligonucleotide
  misc_feature 1..20: note = Target: SCN10A; (-) strand; PAM type: NRG; PAM sequence: CAG
  source 1..20: mol_type = other DNA
ctgggcataacacctcttac

SEQ ID NO: 25919 - DNA, 20 bp, synthetic construct
  misc_feature 1..20: note = Description of Artificial Sequence: Synthetic oligonucleotide
  misc_feature 1..20: note = Target: SCN10A; (-) strand; PAM type: NRG; PAM sequence: GGG
  source 1..20: mol_type = other DNA
tgttgccagagtcctcccct

SEQ ID NO: 25920 - DNA, 20 bp, synthetic construct
  misc_feature 1..20: note = Description of Artificial Sequence: Synthetic oligonucleotide
  misc_feature 1..20: note = Target: SCN10A; (-) strand; PAM type: NRG; PAM sequence: TGG
  source 1..20: mol_type = other DNA
ctgttgccagagtcctcccc

SEQ ID NO: 25921 - DNA, 20 bp, synthetic construct
  misc_feature 1..20: note = Description of Artificial Sequence: Synthetic oligonucleotide
  misc_feature 1..20: note = Target: SCN10A; (-) strand; PAM type: NRG; PAM sequence: GAG
  source 1..20: mol_type = other DNA
acttcaccatcctgttgcca

SEQ ID NO: 25922 - DNA, 20 bp, synthetic construct
  misc_feature 1..20: note = Description of Artificial Sequence: Synthetic oligonucleotide
  misc_feature 1..20: note = Target: SCN10A; (-) strand; PAM type: NRG; PAM sequence: CAG
  source 1..20: mol_type = other DNA
taacttcaccatcctgttgc

SEQ ID NO: 25923 - DNA, 20 bp, synthetic construct
  misc_feature 1..20: note = Description of Artificial Sequence: Synthetic oligonucleotide
  misc_feature 1..20: note = Target: SCN10A; (-) strand; PAM type: NRG; PAM sequence: GAG
  source 1..20: mol_type = other DNA
ggatggttctcttgtcagaa

SEQ ID NO: 25924 - DNA, 20 bp, synthetic construct
  misc_feature 1..20: note = Description of Artificial Sequence: Synthetic oligonucleotide
  misc_feature 1..20: note = Target: SCN10A; (-) strand; PAM type: NRG; PAM sequence: AAG
  source 1..20: mol_type = other DNA
aaggatggttctcttgtcag

SEQ ID NO: 25925 - DNA, 20 bp, synthetic construct
  misc_feature 1..20: note = Description of Artificial Sequence: Synthetic oligonucleotide
  misc_feature 1..20: note = Target: SCN10A; (-) strand; PAM type: NRG; PAM sequence: CAG
  source 1..20: mol_type = other DNA
aacaaggatggttctcttgt

SEQ ID NO: 25926 - DNA, 20 bp, synthetic construct
  misc_feature 1..20: note = Description of Artificial Sequence: Synthetic oligonucleotide
  misc_feature 1..20: note = Target: SCN10A; (-) strand; PAM type: NRG; PAM sequence: TGG
  source 1..20: mol_type = other DNA
gaaacattacaaaacaagga

SEQ ID NO: 25927 - DNA, 20 bp, synthetic construct
  misc_feature 1..20: note = Description of Artificial Sequence: Synthetic oligonucleotide
  misc_feature 1..20: note = Target: SCN10A; (-) strand; PAM type: NRG; PAM sequence: AGG
  source 1..20: mol_type = other DNA
agaagaaacattacaaaaca

SEQ ID NO: 25928 - DNA, 20 bp, synthetic construct
  misc_feature 1..20: note = Description of Artificial Sequence: Synthetic oligonucleotide
  misc_feature 1..20: note = Target: SCN10A; (-) strand; PAM type: NRG; PAM sequence: AAG
  source 1..20: mol_type = other DNA
cagaagaaacattacaaaac

SEQ ID NO: 25929 - DNA, 20 bp, synthetic construct
  misc_feature 1..20: note = Description of Artificial Sequence: Synthetic oligonucleotide
  misc_feature 1..20: note = Target: SCN10A; (-) strand; PAM type: NRG; PAM sequence: AAG
  source 1..20: mol_type = other DNA
gatgtagaaggtggagacag

SEQ ID NO: 25930 - DNA, 20 bp, synthetic construct
  misc_feature 1..20: note = Description of Artificial Sequence: Synthetic oligonucleotide
  misc_feature 1..20: note = Target: SCN10A; (-) strand; PAM type: NRG; PAM sequence: CAG
  source 1..20: mol_type = other DNA
agagatgtagaaggtggaga

SEQ ID NO: 25931 - DNA, 20 bp, synthetic construct
  misc_feature 1..20: note = Description of Artificial Sequence: Synthetic oligonucleotide
  misc_feature 1..20: note = Target: SCN10A; (-) strand; PAM type: NRG; PAM sequence: GAG
  source 1..20: mol_type = other DNA
agacagagatgtagaaggtg

SEQ ID NO: 25932 - DNA, 20 bp, synthetic construct
  misc_feature 1..20: note = Description of Artificial Sequence: Synthetic oligonucleotide
  misc_feature 1..20: note = Target: SCN10A; (-) strand; PAM type: NRG; PAM sequence: TGG
  source 1..20: mol_type = other DNA
agagacagagatgtagaagg

SEQ ID NO: 25933 - DNA, 20 bp, synthetic construct
  misc_feature 1..20: note = Description of Artificial Sequence: Synthetic oligonucleotide
  misc_feature 1..20: note = Target: SCN10A; (-) strand; PAM type: NRG; PAM sequence: AGG
  source 1..20: mol_type = other DNA
ttaagagacagagatgtaga

SEQ ID NO: 25934 - DNA, 20 bp, synthetic construct
  misc_feature 1..20: note = Description of Artificial Sequence: Synthetic oligonucleotide
  misc_feature 1..20: note = Target: SCN10A; (-) strand; PAM type: NRG; PAM sequence: AAG
  source 1..20: mol_type = other DNA
tttaagagacagagatgtag

SEQ ID NO: 25935 - DNA, 20 bp, synthetic construct
  misc_feature 1..20: note = Description of Artificial Sequence: Synthetic oligonucleotide
  misc_feature 1..20: note = Target: SCN10A; (-) strand; PAM type: NRG; PAM sequence: TAG
  source 1..20: mol_type = other DNA
ggatttaagagacagagatg

SEQ ID NO: 25936 - DNA, 20 bp, synthetic construct
  misc_feature 1..20: note = Description of Artificial Sequence: Synthetic oligonucleotide
  misc_feature 1..20: note = Target: SCN10A; (-) strand; PAM type: NRG; PAM sequence: GAG
  source 1..20: mol_type = other DNA
aggagaggatttaagagaca

SEQ ID NO: 25937 - DNA, 20 bp, synthetic construct
  misc_feature 1..20: note = Description of Artificial Sequence: Synthetic oligonucleotide
  misc_feature 1..20: note = Target: SCN10A; (-) strand; PAM type: NRG; PAM sequence: CAG
  source 1..20: mol_type = other DNA
ccaggagaggatttaagaga

SEQ ID NO: 25938 - DNA, 20 bp, synthetic construct
  misc_feature 1..20: note = Description of Artificial Sequence: Synthetic oligonucleotide
  misc_feature 1..20: note = Target: SCN10A; (-) strand; PAM type: NRG; PAM sequence: GAG
  source 1..20: mol_type = other DNA
gaaaccaggagaggatttaa

SEQ ID NO: 25939 - DNA, 20 bp, synthetic construct
  misc_feature 1..20: note = Description of Artificial Sequence: Synthetic oligonucleotide
  misc_feature 1..20: note = Target: SCN10A; (-) strand; PAM type: NRG; PAM sequence: AAG
  source 1..20: mol_type = other DNA
gagaaaccaggagaggattt

SEQ ID NO: 25940 - DNA, 20 bp, synthetic construct
  misc_feature 1..20: note = Description of Artificial Sequence: Synthetic oligonucleotide
  misc_feature 1..20: note = Target: SCN10A; (-) strand; PAM type: NRG; PAM sequence: AGG
  source 1..20: mol_type = other DNA
tcagagggagaaaccaggag

SEQ ID NO: 25941 - DNA, 20 bp, synthetic construct
  misc_feature 1..20: note = Description of Artificial Sequence: Synthetic oligonucleotide
  misc_feature 1..20: note = Target: SCN10A; (-) strand; PAM type: NRG; PAM sequence: GAG
  source 1..20: mol_type = other DNA
ctcagagggagaaaccagga

SEQ ID NO: 25942 - DNA, 20 bp, synthetic construct
  misc_feature 1..20: note = Description of Artificial Sequence: Synthetic oligonucleotide
  misc_feature 1..20: note = Target: SCN10A; (-) strand; PAM type: NRG; PAM sequence: GAG
  source 1..20: mol_type = other DNA
tcctcagagggagaaaccag

SEQ ID NO: 25943 - DNA, 20 bp, synthetic construct
  misc_feature 1..20: note = Description of Artificial Sequence: Synthetic oligonucleotide
  misc_feature 1..20: note = Target: SCN10A; (-) strand; PAM type: NRG; PAM sequence: AGG
  source 1..20: mol_type = other DNA
aatcctcagagggagaaacc

SEQ ID NO: 25944 - DNA, 20 bp, synthetic construct
  misc_feature 1..20: note = Description of Artificial Sequence: Synthetic oligonucleotide
  misc_feature 1..20: note = Target: SCN10A; (-) strand; PAM type: NRG; PAM sequence: CAG
  source 1..20: mol_type = other DNA
aaatcctcagagggagaaac

SEQ ID NO: 25945 - DNA, 20 bp, synthetic construct
  misc_feature 1..20: note = Description of Artificial Sequence: Synthetic oligonucleotide
  misc_feature 1..20: note = Target: SCN10A; (-) strand; PAM type: NRG; PAM sequence: GAG
  source 1..20: mol_type = other DNA
tcctcctaaatcctcagagg

SEQ ID NO: 25946 - DNA, 20 bp, synthetic construct
  misc_feature 1..20: note = Description of Artificial Sequence: Synthetic oligonucleotide
  misc_feature 1..20: note = Target: SCN10A; (-) strand; PAM type: NRG; PAM sequence: GGG
  source 1..20: mol_type = other DNA
tatcctcctaaatcctcaga

SEQ ID NO: 25947 - DNA, 20 bp, synthetic construct
  misc_feature 1..20: note = Description of Artificial Sequence: Synthetic oligonucleotide
  misc_feature 1..20: note = Target: SCN10A; (-) strand; PAM type: NRG; PAM sequence: AGG
  source 1..20: mol_type = other DNA
atatcctcctaaatcctcag

SEQ ID NO: 25948 - DNA, 20 bp, synthetic construct
  misc_feature 1..20: note = Description of Artificial Sequence: Synthetic oligonucleotide
  misc_feature 1..20: note = Target: SCN10A; (-) strand; PAM type: NRG; PAM sequence: GAG
  source 1..20: mol_type = other DNA
catatcctcctaaatcctca

SEQ ID NO: 25949 - DNA, 20 bp, synthetic construct
  misc_feature 1..20: note = Description of Artificial Sequence: Synthetic oligonucleotide
  misc_feature 1..20: note = Target: SCN10A; (-) strand; PAM type: NRG; PAM sequence: CAG
  source 1..20: mol_type = other DNA
ttcatatcctcctaaatcct

SEQ ID NO: 25950 - DNA, 20 bp, synthetic construct
  misc_feature 1..20: note = Description of Artificial Sequence: Synthetic oligonucleotide
  misc_feature 1..20: note = Target: SCN10A; (-) strand; PAM type: NRG; PAM sequence: GAG
  source 1..20: mol_type = other DNA
ttcctcctctcccatgccaa

SEQ ID NO: 25951 - DNA, 20 bp, synthetic construct
  misc_feature 1..20: note = Description of Artificial Sequence: Synthetic oligonucleotide
  misc_feature 1..20: note = Target: SCN10A; (-) strand; PAM type: NRG; PAM sequence: AAG
  source 1..20: mol_type = other DNA
tcttcctcctctcccatgcc

SEQ ID NO: 25952 - DNA, 20 bp, synthetic construct
  misc_feature 1..20: note = Description of Artificial Sequence: Synthetic oligonucleotide
  misc_feature 1..20: note = Target: SCN10A; (-) strand; PAM type: NRG; PAM sequence: AGG
  source 1..20: mol_type = other DNA
ggctagcagagtaaataaaa

SEQ ID NO: 25953 - DNA, 20 bp, synthetic construct
  misc_feature 1..20: note = Description of Artificial Sequence: Synthetic oligonucleotide
  misc_feature 1..20: note = Target: SCN10A; (-) strand; PAM type: NRG; PAM sequence: AAG
  source 1..20: mol_type = other DNA
tggctagcagagtaaataaa

SEQ ID NO: 25954 - DNA, 20 bp, synthetic construct
  misc_feature 1..20: note = Description of Artificial Sequence: Synthetic oligonucleotide
  misc_feature 1..20: note = Target: SCN10A; (-) strand; PAM type: NRG; PAM sequence: GAG
  source 1..20: mol_type = other DNA
catctcaaatatggctagca

SEQ ID NO: 25955 - DNA, 20 bp, synthetic construct
  misc_feature 1..20: note = Description of Artificial Sequence: Synthetic oligonucleotide
  misc_feature 1..20: note = Target: SCN10A; (-) strand; PAM type: NRG; PAM sequence: CAG
  source 1..20: mol_type = other DNA
gccatctcaaatatggctag

SEQ ID NO: 25956 - DNA, 20 bp, synthetic construct
  misc_feature 1..20: note = Description of Artificial Sequence: Synthetic oligonucleotide
  misc_feature 1..20: note = Target: SCN10A; (-) strand; PAM type: NRG; PAM sequence: TAG
  source 1..20: mol_type = other DNA
tcagccatctcaaatatggc

SEQ ID NO: 25957 - DNA, 20 bp, synthetic construct
  misc_feature 1..20: note = Description of Artificial Sequence: Synthetic oligonucleotide
  misc_feature 1..20: note = Target: SCN10A; (-) strand; PAM type: NRG; PAM sequence: TGG
  source 1..20: mol_type = other DNA
ggaatcagccatctcaaata

SEQ ID NO: 25958 - DNA, 20 bp, synthetic construct
  misc_feature 1..20: note = Description of Artificial Sequence: Synthetic oligonucleotide
  misc_feature 1..20: note = Target: SCN10A; (-) strand; PAM type: NRG; PAM sequence: CAG
  source 1..20: mol_type = other DNA
ggagttaggaggacaggaat

SEQ ID NO: 25959 - DNA, 20 bp, synthetic construct
  misc_feature 1..20: note = Description of Artificial Sequence: Synthetic oligonucleotide
  misc_feature 1..20: note = Target: SCN10A; (-) strand; PAM type: NRG; PAM sequence: AGG
  source 1..20: mol_type = other DNA
tgtttgggagttaggaggac

SEQ ID NO: 25960 - DNA, 20 bp, synthetic construct
  misc_feature 1..20: note = Description of Artificial Sequence: Synthetic oligonucleotide
  misc_feature 1..20: note = Target: SCN10A; (-) strand; PAM type: NRG; PAM sequence: CAG
  source 1..20: mol_type = other DNA
atgtttgggagttaggagga

SEQ ID NO: 25961 - DNA, 20 bp, synthetic construct
  misc_feature 1..20: note = Description of Artificial Sequence: Synthetic oligonucleotide
  misc_feature 1..20: note = Target: SCN10A; (-) strand; PAM type: NRG; PAM sequence: AGG
  source 1..20: mol_type = other DNA
atgcatgtttgggagttagg

SEQ ID NO: 25962 - DNA, 20 bp, synthetic construct
  misc_feature 1..20: note = Description of Artificial Sequence: Synthetic oligonucleotide
  misc_feature 1..20: note = Target: SCN10A; (-) strand; PAM type: NRG; PAM sequence: GAG
  source 1..20: mol_type = other DNA
aatgcatgtttgggagttag

SEQ ID NO: 25963 - DNA, 20 bp, synthetic construct
  misc_feature 1..20: note = Description of Artificial Sequence: Synthetic oligonucleotide
  misc_feature 1..20: note = Target: SCN10A; (-) strand; PAM type: NRG; PAM sequence: AGG
  source 1..20: mol_type = other DNA
tgaatgcatgtttgggagtt

SEQ ID NO: 25964 - DNA, 20 bp, synthetic construct
  misc_feature 1..20: note = Description of Artificial Sequence: Synthetic oligonucleotide
  misc_feature 1..20: note = Target: SCN10A; (-) strand; PAM type: NRG; PAM sequence: TAG
  source 1..20: mol_type = other DNA
gtgaatgcatgtttgggagt

SEQ ID NO: 25965 - DNA, 20 bp, synthetic construct
  misc_feature 1..20: note = Description of Artificial Sequence: Synthetic oligonucleotide
  misc_feature 1..20: note = Target: SCN10A; (-) strand; PAM type: NRG; PAM sequence: GAG
  source 1..20: mol_type = other DNA
aatggtgaatgcatgtttgg

SEQ ID NO: 25966 - DNA, 20 bp, synthetic construct
  misc_feature 1..20: note = Description of Artificial Sequence: Synthetic oligonucleotide
  misc_feature 1..20: note = Target: SCN10A; (-) strand; PAM type: NRG; PAM sequence: GGG
  source 1..20: mol_type = other DNA
aaaatggtgaatgcatgttt

SEQ ID NO: 25967 - DNA, 20 bp, synthetic construct
  misc_feature 1..20: note = Description of Artificial Sequence: Synthetic oligonucleotide
  misc_feature 1..20: note = Target: SCN10A; (-) strand; PAM type: NRG; PAM sequence: TGG
  source 1..20: mol_type = other DNA
aaaaatggtgaatgcatgtt

SEQ ID NO: 25968 - DNA, 20 bp, synthetic construct
  misc_feature 1..20: note = Description of Artificial Sequence: Synthetic oligonucleotide
  misc_feature 1..20: note = Target: SCN10A; (-) strand; PAM type: NRG; PAM sequence: TGG
  source 1..20: mol_type = other DNA
atgttctacgagccaaaaaa

SEQ ID NO: 25969 - DNA, 20 bp, synthetic construct
  misc_feature 1..20: note = Description of Artificial Sequence: Synthetic oligonucleotide
  misc_feature 1..20: note = Target: SCN10A; (-) strand; PAM type: NRG; PAM sequence: GAG
  source 1..20: mol_type = other DNA
ttgtatttttgatgttctac

SEQ ID NO: 25970 - DNA, 20 bp, synthetic construct
  misc_feature 1..20: note = Description of Artificial Sequence: Synthetic oligonucleotide
  misc_feature 1..20: note = Target: SCN10A; (-) strand; PAM type: NRG; PAM sequence: GAG
  source 1..20: mol_type = other DNA
agaatcagtagtttaaacaa

SEQ ID NO: 25971 - DNA, 20 bp, synthetic construct
  misc_feature 1..20: note = Description of Artificial Sequence: Synthetic oligonucleotide
  misc_feature 1..20: note = Target: SCN10A; (-) strand; PAM type: NRG; PAM sequence: AAG
  source 1..20: mol_type = other DNA
tgagaatcagtagtttaaac

SEQ ID NO: 25972 - DNA, 20 bp, synthetic construct
  misc_feature 1..20: note = Description of Artificial Sequence: Synthetic oligonucleotide
  misc_feature 1..20: note = Target: SCN10A; (-) strand; PAM type: NRG; PAM sequence: TAG
  source 1..20: mol_type = other DNA
tcaaaaagtttgagaatcag

SEQ ID NO: 25973 - DNA, 20 bp, synthetic construct
  misc_feature 1..20: note = Description of Artificial Sequence: Synthetic oligonucleotide
  misc_feature 1..20: note = Target: SCN10A; (-) strand; PAM type: NRG; PAM sequence: CAG
  source 1..20: mol_type = other DNA
aaatcaaaaagtttgagaat

SEQ ID NO: 25974 - DNA, 20 bp, synthetic construct
  misc_feature 1..20: note = Description of Artificial Sequence: Synthetic oligonucleotide
  misc_feature 1..20: note = Target: SCN10A; (-) strand; PAM type: NRG; PAM sequence: GAG
  source 1..20: mol_type = other DNA
tccctgaaatcaaaaagttt

SEQ ID NO: 25975 - DNA, 20 bp, synthetic construct
  misc_feature 1..20: note = Description of Artificial Sequence: Synthetic oligonucleotide
  misc_feature 1..20: note = Target: SCN10A; (-) strand; PAM type: NRG; PAM sequence: AAG
  source 1..20: mol_type = other DNA
taataatccctgaaatcaaa

SEQ ID NO: 25976 - DNA, 20 bp, synthetic construct
  misc_feature 1..20: note = Description of Artificial Sequence: Synthetic oligonucleotide
  misc_feature 1..20: note = Target: SCN10A; (-) strand; PAM type: NRG; PAM sequence: GAG
  source 1..20: mol_type = other DNA
gggtcctcaataaggtttga

SEQ ID NO: 25977 - DNA, 20 bp, synthetic construct
  misc_feature 1..20: note = Description of Artificial Sequence: Synthetic oligonucleotide
  misc_feature 1..20: note = Target: SCN10A; (-) strand; PAM type: NRG; PAM sequence: GAG
  source 1..20: mol_type = other DNA
tggggtcctcaataaggttt

SEQ ID NO: 25978 - DNA, 20 bp, synthetic construct
  misc_feature 1..20: note = Description of Artificial Sequence: Synthetic oligonucleotide
  misc_feature 1..20: note = Target: SCN10A; (-) strand; PAM type: NRG; PAM sequence: AGG
  source 1..20: mol_type = other DNA
gttatttggggtcctcaata

SEQ ID NO: 25979 - DNA, 20 bp, synthetic construct
  misc_feature 1..20: note = Description of Artificial Sequence: Synthetic oligonucleotide
  misc_feature 1..20: note = Target: SCN10A; (-) strand; PAM type: NRG; PAM sequence: AAG
  source 1..20: mol_type = other DNA
agttatttggggtcctcaat

SEQ ID NO: 25980 - DNA, 20 bp, synthetic construct
  misc_feature 1..20: note = Description of Artificial Sequence: Synthetic oligonucleotide
  misc_feature 1..20: note = Target: SCN10A; (-) strand; PAM type: NRG; PAM sequence: GGG
  source 1..20: mol_type = other DNA
acataaacaaaagttatttg

SEQ ID NO: 25981 - DNA, 20 bp, synthetic construct
  misc_feature 1..20: note = Description of Artificial Sequence: Synthetic oligonucleotide
  misc_feature 1..20: note = Target: SCN10A; (-) strand; PAM type: NRG; PAM sequence: GGG
  source 1..20: mol_type = other DNA
aacataaacaaaagttattt

SEQ ID NO: 25982 - DNA, 20 bp, synthetic construct
  misc_feature 1..20: note = Description of Artificial Sequence: Synthetic oligonucleotide
  misc_feature 1..20: note = Target: SCN10A; (-) strand; PAM type: NRG; PAM sequence: TGG
  source 1..20: mol_type = other DNA
caacataaacaaaagttatt

SEQ ID NO: 25983 - DNA, 20 bp, synthetic construct
  misc_feature 1..20: note = Description of Artificial Sequence: Synthetic oligonucleotide
  misc_feature 1..20: note = Target: SCN10A; (-) strand; PAM type: NRG; PAM sequence: AAG
  source 1..20: mol_type = other DNA
aaaggtatcaacataaacaa

SEQ ID NO: 25984 - DNA, 20 bp, synthetic construct
  misc_feature 1..20: note = Description of Artificial Sequence: Synthetic oligonucleotide
  misc_feature 1..20: note = Target: SCN10A; (-) strand; PAM type: NRG; PAM sequence: AGG
  source 1..20: mol_type = other DNA
tatatctggcataaacaaaa

SEQ ID NO: 25985 - DNA, 20 bp, synthetic construct
  misc_feature 1..20: note = Description of Artificial Sequence: Synthetic oligonucleotide
  misc_feature 1..20: note = Target: SCN10A; (-) strand; PAM type: NRG; PAM sequence: AAG
  source 1..20: mol_type = other DNA
atatatctggcataaacaaa

SEQ ID NO: 25986 - DNA, 20 bp, synthetic construct
  misc_feature 1..20: note = Description of Artificial Sequence: Synthetic oligonucleotide
  misc_feature 1..20: note = Target: SCN10A; (-) strand; PAM type: NRG; PAM sequence: TGG
  source 1..20: mol_type = other DNA
taatatgatatacatatatc

SEQ ID NO: 25987 - DNA, 20 bp, synthetic construct
  misc_feature 1..20: note = Description of Artificial Sequence: Synthetic oligonucleotide
  misc_feature 1..20: note = Target: SCN10A; (-) strand; PAM type: NRG; PAM sequence: AAG
  source 1..20: mol_type = other DNA
ttatgtatatataggtatat

SEQ ID NO: 25988 - DNA, 20 bp, synthetic construct
  misc_feature 1..20: note = Description of Artificial Sequence: Synthetic oligonucleotide
  misc_feature 1..20: note = Target: SCN10A; (-) strand; PAM type: NRG; PAM sequence: AGG
  source 1..20: mol_type = other DNA
gtagctagttatgtatatat

SEQ ID NO: 25989 - DNA, 20 bp, synthetic construct
  misc_feature 1..20: note = Description of Artificial Sequence: Synthetic oligonucleotide
  misc_feature 1..20: note = Target: SCN10A; (-) strand; PAM type: NRG; PAM sequence: TAG
  source 1..20: mol_type = other DNA
tgtagctagttatgtatata

SEQ ID NO: 25990 - DNA, 20 bp, synthetic construct
  misc_feature 1..20: note = Description of Artificial Sequence: Synthetic oligonucleotide
  misc_feature 1..20: note = Target: SCN10A; (-) strand; PAM type: NRG; PAM sequence: TAG
  source 1..20: mol_type = other DNA
atacaactagaccatgtagc

SEQ ID NO: 25991 - DNA, 20 bp, synthetic construct
  misc_feature 1..20: note = Description of Artificial Sequence: Synthetic oligonucleotide
  misc_feature 1..20: note = Target: SCN10A; (-) strand; PAM type: NRG; PAM sequence: TAG
  source 1..20: mol_type = other DNA
atacatacaactagaccatg

SEQ ID NO: 25992 - DNA, 20 bp, synthetic construct
  misc_feature 1..20: note = Description of Artificial Sequence: Synthetic oligonucleotide
  misc_feature 1..20: note = Target: SCN10A; (-) strand; PAM type: NRG; PAM sequence: TAG
  source 1..20: mol_type = other DNA
actatgtatatacatacaac

SEQ ID NO: 25993 - DNA, 20 bp, synthetic construct
  misc_feature 1..20: note = Description of Artificial Sequence: Synthetic oligonucleotide
  misc_feature 1..20: note = Target: SCN10A; (-) strand; PAM type: NRG; PAM sequence: GAG
  source 1..20: mol_type = other DNA
gagttttgaatttctaatat

SEQ ID NO: 25994 - DNA, 20 bp, synthetic construct
  misc_feature 1..20: note = Description of Artificial Sequence: Synthetic oligonucleotide
  misc_feature 1..20: note = Target: SCN10A; (-) strand; PAM type: NRG; PAM sequence: GAG
  source 1..20: mol_type = other DNA
cccgtgttttaaaatttcct

SEQ ID NO: 25995 - DNA, 20 bp, synthetic construct
  misc_feature 1..20: note = Description of Artificial Sequence: Synthetic oligonucleotide
  misc_feature 1..20: note = Target: SCN10A; (-) strand; PAM type: NRG; PAM sequence: TGG
  source 1..20: mol_type = other DNA
gtcatcactctaaaagctac

SEQ ID NO: 25996 - DNA, 20 bp, synthetic construct
  misc_feature 1..20: note = Description of Artificial Sequence: Synthetic oligonucleotide
  misc_feature 1..20: note = Target: SCN10A; (-) strand; PAM type: NRG; PAM sequence: AAG
  source 1..20: mol_type = other DNA
ggatgatgtcatcactctaa

SEQ ID NO: 25997 - DNA, 20 bp, synthetic construct
  misc_feature 1..20: note = Description of Artificial Sequence: Synthetic oligonucleotide
  misc_feature 1..20: note = Target: SCN10A; (-) strand; PAM type: NRG; PAM sequence: GGG
  source 1..20: mol_type = other DNA
aatatagaggctattgatgg

SEQ ID NO: 25998 - DNA, 20 bp, synthetic construct
  misc_feature 1..20: note = Description of Artificial Sequence: Synthetic oligonucleotide
  misc_feature 1..20: note = Target: SCN10A; (-) strand; PAM type: NRG; PAM sequence: GGG
  source 1..20: mol_type = other DNA
gaatatagaggctattgatg

SEQ ID NO: 25999 - DNA, 20 bp, synthetic construct
  misc_feature 1..20: note = Description of Artificial Sequence: Synthetic oligonucleotide
  misc_feature 1..20: note = Target: SCN10A; (-) strand; PAM type: NRG; PAM sequence: GGG
  source 1..20: mol_type = other DNA
tgaatatagaggctattgat

SEQ ID NO: 26000 - DNA, 20 bp, synthetic construct
  misc_feature 1..20: note = Description of Artificial Sequence: Synthetic oligonucleotide
  misc_feature 1..20: note = Target: SCN10A; (-) strand; PAM type: NRG; PAM sequence: TGG
  source 1..20: mol_type = other DNA
gtgaatatagaggctattga

SEQ ID NO: 26001 - DNA, 20 bp, synthetic construct
  misc_feature 1..20: note = Description of Artificial Sequence: Synthetic oligonucleotide
  misc_feature 1..20: note = Target: SCN10A; (-) strand; PAM type: NRG; PAM sequence: AGG
  source 1..20: mol_type = other DNA
tcatacattggtgaatatag

SEQ ID NO: 26002 - DNA, 20 bp, synthetic construct
  misc_feature 1..20: note = Description of Artificial Sequence: Synthetic oligonucleotide
  misc_feature 1..20: note = Target: SCN10A; (-) strand; PAM type: NRG; PAM sequence: GAG
  source 1..20: mol_type = other DNA
atcatacattggtgaatata

SEQ ID NO: 26003 - DNA, 20 bp, synthetic construct
  misc_feature 1..20: note = Description of Artificial Sequence: Synthetic oligonucleotide
  misc_feature 1..20: note = Target: SCN10A; (-) strand; PAM type: NRG; PAM sequence: TAG
  source 1..20: mol_type = other DNA
tgatcatacattggtgaata

SEQ ID NO: 26004 - DNA, 20 bp, synthetic construct
  misc_feature 1..20: note = Description of Artificial Sequence: Synthetic oligonucleotide
  misc_feature 1..20: note = Target: SCN10A; (-) strand; PAM type: NRG; PAM sequence: TGG
  source 1..20: mol_type = other DNA
tttctcttatgatcatacat

SEQ ID NO: 26005 - DNA, 20 bp, synthetic construct
  misc_feature 1..20: note = Description of Artificial Sequence: Synthetic oligonucleotide
  misc_feature 1..20: note = Target: SCN10A; (-) strand; PAM type: NRG; PAM sequence: TGG
  source 1..20: mol_type = other DNA
aactattgtataacaatact

SEQ ID NO: 26006 - DNA, 20 bp, synthetic construct
  misc_feature 1..20: note = Description of Artificial Sequence: Synthetic oligonucleotide
  misc_feature 1..20: note = Target: SCN10A; (-) strand; PAM type: NRG; PAM sequence: GGG
  source 1..20: mol_type = other DNA
gtccccaaaactgttttagt

SEQ ID NO: 26007 - DNA, 20 bp, synthetic construct
  misc_feature 1..20: note = Description of Artificial Sequence: Synthetic oligonucleotide
  misc_feature 1..20: note = Target: SCN10A; (-) strand; PAM type: NRG; PAM sequence: TGG
  source 1..20: mol_type = other DNA
tgtccccaaaactgttttag

SEQ ID NO: 26008 - DNA, 20 bp, synthetic construct
  misc_feature 1..20: note = Description of Artificial Sequence: Synthetic oligonucleotide
  misc_feature 1..20: note = Target: SCN10A; (-) strand; PAM type: NRG; PAM sequence: TAG
  source 1..20: mol_type = other DNA
tggtgtccccaaaactgttt

SEQ ID NO: 26009 - DNA, 20 bp, synthetic construct
  misc_feature 1..20: note = Description of Artificial Sequence: Synthetic oligonucleotide
  misc_feature 1..20: note = Target: SCN10A; (-) strand; PAM type: NRG; PAM sequence: TGG
  source 1..20: mol_type = other DNA
aactatgatcttggaacccc

SEQ ID NO: 26010 - DNA, 20 bp, synthetic construct
  misc_feature 1..20: note = Description of Artificial Sequence: Synthetic oligonucleotide
  misc_feature 1..20: note = Target: SCN10A; (-) strand; PAM type: NRG; PAM sequence: TGG
  source 1..20: mol_type = other DNA
gtggtcctcaactatgatct

SEQ ID NO: 26011 - DNA, 20 bp, synthetic construct
  misc_feature 1..20: note = Description of Artificial Sequence: Synthetic oligonucleotide
  misc_feature 1..20: note = Target: SCN10A; (-) strand; PAM type: NRG; PAM sequence: TGG
  source 1..20: mol_type = other DNA
gcaggatgaatttaagccag

SEQ ID NO: 26012 - DNA, 20 bp, synthetic construct
  misc_feature 1..20: note = Description of Artificial Sequence: Synthetic oligonucleotide
  misc_feature 1..20: note = Target: SCN10A; (-) strand; PAM type: NRG; PAM sequence: CAG
  source 1..20: mol_type = other DNA
aaagcaggatgaatttaagc

SEQ ID NO: 26013 - DNA, 20 bp, synthetic construct
  misc_feature 1..20: note = Description of Artificial Sequence: Synthetic oligonucleotide
  misc_feature 1..20: note = Target: SCN10A; (-) strand; PAM type: NRG; PAM sequence: AAG
  source 1..20: mol_type = other DNA
acagaaagcaggatgaattt

SEQ ID NO: 26014 - DNA, 20 bp, synthetic construct
  misc_feature 1..20: note = Description of Artificial Sequence: Synthetic oligonucleotide
  misc_feature 1..20: note = Target: SCN10A; (-) strand; PAM type: NRG; PAM sequence: AGG
  source 1..20: mol_type = other DNA
tggcggtgaggacagaaagc

SEQ ID NO: 26015 - DNA, 20 bp, synthetic construct
  misc_feature 1..20: note = Description of Artificial Sequence: Synthetic oligonucleotide
  misc_feature 1..20: note = Target: SCN10A; (-) strand; PAM type: NRG; PAM sequence: CAG
  source 1..20: mol_type = other DNA
atggcggtgaggacagaaag

SEQ ID NO: 26016 - DNA, 20 bp, synthetic construct
  misc_feature 1..20: note = Description of Artificial Sequence: Synthetic oligonucleotide
  misc_feature 1..20: note = Target: SCN10A; (-) strand; PAM type: NRG; PAM sequence: AAG
  source 1..20: mol_type = other DNA
agcatggcggtgaggacaga

SEQ ID NO: 26017 - DNA, 20 bp, synthetic construct
  misc_feature 1..20: note = Description of Artificial Sequence: Synthetic oligonucleotide
  misc_feature 1..20: note = Target: SCN10A; (-) strand; PAM type: NRG; PAM sequence: CAG
  source 1..20: mol_type = other DNA
gaggagcatggcggtgagga

SEQ ID NO: 26018 - DNA, 20 bp, synthetic construct
  misc_feature 1..20: note = Description of Artificial Sequence: Synthetic oligonucleotide
  misc_feature 1..20: note = Target: SCN10A; (-) strand; PAM type: NRG; PAM sequence: AGG
  source 1..20: mol_type = other DNA
gggggaggagcatggcggtg

SEQ ID NO: 26019 - DNA, 20 bp, synthetic construct
  misc_feature 1..20: note = Description of Artificial Sequence: Synthetic oligonucleotide
  misc_feature 1..20: note = Target: SCN10A; (-) strand; PAM type: NRG; PAM sequence: GAG
  source 1..20: mol_type = other DNA
tgggggaggagcatggcggt

SEQ ID NO: 26020 - DNA, 20 bp, synthetic construct
  misc_feature 1..20: note = Description of Artificial Sequence: Synthetic oligonucleotide
  misc_feature 1..20: note = Target: SCN10A; (-) strand; PAM type: NRG; PAM sequence: CGG
  source 1..20: mol_type = other DNA
aggttgggggaggagcatgg

SEQ ID NO: 26021 - DNA, 20 bp, synthetic construct
  misc_feature 1..20: note = Description of Artificial Sequence: Synthetic oligonucleotide
  misc_feature 1..20: note = Target: SCN10A; (-) strand; PAM type: NRG; PAM sequence: TGG
  source 1..20: mol_type = other DNA
ttgaggttgggggaggagca

SEQ ID NO: 26022 - DNA, 20 bp, synthetic construct
  misc_feature 1..20: note = Description of Artificial Sequence: Synthetic oligonucleotide
  misc_feature 1..20: note = Target: SCN10A; (-) strand; PAM type: NRG; PAM sequence: GAG
  source 1..20: mol_type = other DNA
acatcttgaggttgggggag

SEQ ID NO: 26023 - DNA, 20 bp, synthetic construct
  misc_feature 1..20: note = Description of Artificial Sequence: Synthetic oligonucleotide
  misc_feature 1..20: note = Target: SCN10A; (-) strand; PAM type: NRG; PAM sequence: AGG
  source 1..20: mol_type = other DNA
agacatcttgaggttggggg

SEQ ID NO: 26024 - DNA, 20 bp, synthetic construct
  misc_feature 1..20: note = Description of Artificial Sequence: Synthetic oligonucleotide
  misc_feature 1..20: note = Target: SCN10A; (-) strand; PAM type: NRG; PAM sequence: GAG
  source 1..20: mol_type = other DNA
cagacatcttgaggttgggg

SEQ ID NO: 26025 - DNA, 20 bp, synthetic construct
  misc_feature 1..20: note = Description of Artificial Sequence: Synthetic oligonucleotide
  misc_feature 1..20: note = Target: SCN10A; (-) strand; PAM type: NRG; PAM sequence: GGG
  source 1..20: mol_type = other DNA
agcagacatcttgaggttgg

SEQ ID NO: 26026 - DNA, 20 bp, synthetic construct
  misc_feature 1..20: note = Description of Artificial Sequence: Synthetic oligonucleotide
  misc_feature 1..20: note = Target: SCN10A; (-) strand; PAM type: NRG; PAM sequence: GGG
  source 1..20: mol_type = other DNA
gagcagacatcttgaggttg

SEQ ID NO: 26027 - DNA, 20 bp, synthetic construct
  misc_feature 1..20: note = Description of Artificial Sequence: Synthetic oligonucleotide
  misc_feature 1..20: note = Target: SCN10A; (-) strand; PAM type: NRG; PAM sequence: GGG
  source 1..20: mol_type = other DNA
agagcagacatcttgaggtt

SEQ ID NO: 26028 - DNA, 20 bp, synthetic construct
  misc_feature 1..20: note = Description of Artificial Sequence: Synthetic oligonucleotide
  misc_feature 1..20: note = Target: SCN10A; (-) strand; PAM type: NRG; PAM sequence: TGG
  source 1..20: mol_type = other DNA
gagagcagacatcttgaggt

SEQ ID NO: 26029 - DNA, 20 bp, synthetic construct
  misc_feature 1..20: note = Description of Artificial Sequence: Synthetic oligonucleotide
  misc_feature 1..20: note = Target: SCN10A; (-) strand; PAM type: NRG; PAM sequence: AGG
  source 1..20: mol_type = other DNA
ggtggagagcagacatcttg

SEQ ID NO: 26030 - DNA, 20 bp, synthetic construct
  misc_feature 1..20: note = Description of Artificial Sequence: Synthetic oligonucleotide
  misc_feature 1..20: note = Target: SCN10A; (-) strand; PAM type: NRG; PAM sequence: GAG
  source 1..20: mol_type = other DNA
aggtggagagcagacatctt

SEQ ID NO: 26031 - DNA, 20 bp, synthetic construct
  misc_feature 1..20: note = Description of Artificial Sequence: Synthetic oligonucleotide
  misc_feature 1..20: note = Target: SCN10A; (-) strand; PAM type: NRG; PAM sequence: CAG
  source 1..20: mol_type = other DNA
gtctctttgcaggtggagag

SEQ ID NO: 26032 - DNA, 20 bp, synthetic construct
  misc_feature 1..20: note = Description of Artificial Sequence: Synthetic oligonucleotide
  misc_feature 1..20: note = Target: SCN10A; (-) strand; PAM type: NRG; PAM sequence: GAG
  source 1..20: mol_type = other DNA
tgggtctctttgcaggtgga

SEQ ID NO: 26033 - DNA, 20 bp, synthetic construct
  misc_feature 1..20: note = Description of Artificial Sequence: Synthetic oligonucleotide
  misc_feature 1..20: note = Target: SCN10A; (-) strand; PAM type: NRG; PAM sequence: GAG
  source 1..20: mol_type = other DNA
gttgggtctctttgcaggtg

SEQ ID NO: 26034 - DNA, 20 bp, synthetic construct
  misc_feature 1..20: note = Description of Artificial Sequence: Synthetic oligonucleotide
  misc_feature 1..20: note = Target: SCN10A; (-) strand; PAM type: NRG; PAM sequence: TGG
  source 1..20: mol_type = other DNA
gagttgggtctctttgcagg

SEQ ID NO: 26035 - DNA, 20 bp, synthetic construct
  misc_feature 1..20: note = Description of Artificial Sequence: Synthetic oligonucleotide
  misc_feature 1..20: note = Target: SCN10A; (-) strand; PAM type: NRG; PAM sequence: AGG
  source 1..20: mol_type = other DNA
gaggagttgggtctctttgc

SEQ ID NO: 26036 - DNA, 20 bp, synthetic construct
  misc_feature 1..20: note = Description of Artificial Sequence: Synthetic oligonucleotide
  misc_feature 1..20: note = Target: SCN10A; (-) strand; PAM type: NRG; PAM sequence: CAG
  source 1..20: mol_type = other DNA
agaggagttgggtctctttg

SEQ ID NO: 26037 - DNA, 20 bp, synthetic construct
  misc_feature 1..20: note = Description of Artificial Sequence: Synthetic oligonucleotide
  misc_feature 1..20: note = Target: SCN10A; (-) strand; PAM type: NRG; PAM sequence: GGG
  source 1..20: mol_type = other DNA
ctggggcctccagaggagtt

SEQ ID NO: 26038 - DNA, 20 bp, synthetic construct
  misc_feature 1..20: note = Description of Artificial Sequence: Synthetic oligonucleotide
  misc_feature 1..20: note = Target: SCN10A; (-) strand; PAM type: NRG; PAM sequence: TGG
  source 1..20: mol_type = other DNA
cctggggcctccagaggagt

SEQ ID NO: 26039 - DNA, 20 bp, synthetic construct
  misc_feature 1..20: note = Description of Artificial Sequence: Synthetic oligonucleotide
  misc_feature 1..20: note = Target: SCN10A; (-) strand; PAM type: NRG; PAM sequence: GAG
  source 1..20: mol_type = other DNA
ctggcctggggcctccagag

SEQ ID NO: 26040 - DNA, 20 bp, synthetic construct
  misc_feature 1..20: note = Description of Artificial Sequence: Synthetic oligonucleotide
  misc_feature 1..20: note = Target: SCN10A; (-) strand; PAM type: NRG; PAM sequence: AGG
  source 1..20: mol_type = other DNA
ctctggcctggggcctccag

SEQ ID NO: 26041 - DNA, 20 bp, synthetic construct
  misc_feature 1..20: note = Description of Artificial Sequence: Synthetic oligonucleotide
  misc_feature 1..20: note = Target: SCN10A; (-) strand; PAM type: NRG; PAM sequence: GAG
  source 1..20: mol_type = other DNA
cctctggcctggggcctcca

SEQ ID NO: 26042 - DNA, 20 bp, synthetic construct
  misc_feature 1..20: note = Description of Artificial Sequence: Synthetic oligonucleotide
  misc_feature 1..20: note = Target: SCN10A; (-) strand; PAM type: NRG; PAM sequence: CAG
  source 1..20: mol_type = other DNA
gacctctggcctggggcctc

SEQ ID NO: 26043 - DNA, 20 bp, synthetic construct
  misc_feature 1..20: note = Description of Artificial Sequence: Synthetic oligonucleotide
  misc_feature 1..20: note = Target: SCN10A; (-) strand; PAM type: NRG; PAM sequence: GGG
  source 1..20: mol_type = other DNA
cttggatgacctctggcctg

SEQ ID NO: 26044 - DNA, 20 bp, synthetic construct
  misc_feature 1..20: note = Description of Artificial Sequence: Synthetic oligonucleotide
  misc_feature 1..20: note = Target: SCN10A; (-) strand; PAM type: NRG; PAM sequence: GGG
  source 1..20: mol_type = other DNA
ccttggatgacctctggcct

SEQ ID NO: 26045 - DNA, 20 bp, synthetic construct
  misc_feature 1..20: note = Description of Artificial Sequence: Synthetic oligonucleotide
  misc_feature 1..20: note = Target: SCN10A; (-) strand; PAM type: NRG; PAM sequence: TGG
  source 1..20: mol_type = other DNA
cccttggatgacctctggcc

SEQ ID NO: 26046 - DNA, 20 bp, synthetic construct
  misc_feature 1..20: note = Description of Artificial Sequence: Synthetic oligonucleotide
  misc_feature 1..20: note = Target: SCN10A; (-) strand; PAM type: NRG; PAM sequence: TGG
  source 1..20: mol_type = other DNA
ctgttcccttggatgacctc

SEQ ID NO: 26047 - DNA, 20 bp, synthetic construct
  misc_feature 1..20: note = Description of Artificial Sequence: Synthetic oligonucleotide
  misc_feature 1..20: note = Target: SCN10A; (-) strand; PAM type: NRG; PAM sequence: TGG
  source 1..20: mol_type = other DNA
gggaaagttggctgttccct

SEQ ID NO: 26048 - DNA, 20 bp, synthetic construct
  misc_feature 1..20: note = Description of Artificial Sequence: Synthetic oligonucleotide
  misc_feature 1..20: note = Target: SCN10A; (-) strand; PAM type: NRG; PAM sequence: TGG
  source 1..20: mol_type = other DNA
gcagagctttcagggaaagt

SEQ ID NO: 26049 - DNA, 20 bp, synthetic construct
  misc_feature 1..20: note = Description of Artificial Sequence: Synthetic oligonucleotide
  misc_feature 1..20: note = Target: SCN10A; (-) strand; PAM type: NRG; PAM sequence: AAG
  source 1..20: mol_type = other DNA
tgctgcagagctttcaggga

SEQ ID NO: 26050 - DNA, 20 bp, synthetic construct
  misc_feature 1..20: note = Description of Artificial Sequence: Synthetic oligonucleotide
  misc_feature 1..20: note = Target: SCN10A; (-) strand; PAM type: NRG; PAM sequence: GGG
  source 1..20: mol_type = other DNA
taactgctgcagagctttca

SEQ ID NO: 26051 - DNA, 20 bp, synthetic construct
  misc_feature 1..20: note = Description of Artificial Sequence: Synthetic oligonucleotide
  misc_feature 1..20: note = Target: SCN10A; (-) strand; PAM type: NRG; PAM sequence: AGG
  source 1..20: mol_type = other DNA
ataactgctgcagagctttc

SEQ ID NO: 26052 - DNA, 20 bp, synthetic construct
  misc_feature 1..20: note = Description of Artificial Sequence: Synthetic oligonucleotide
  misc_feature 1..20: note = Target: SCN10A; (-) strand; PAM type: NRG; PAM sequence: CAG
  source 1..20: mol_type = other DNA
gataactgctgcagagcttt

SEQ ID NO: 26053 - DNA, 20 bp, synthetic construct
  misc_feature 1..20: note = Description of Artificial Sequence: Synthetic oligonucleotide
  misc_feature 1..20: note = Target: SCN10A; (-) strand; PAM type: NRG; PAM sequence: GAG
  source 1..20: mol_type = other DNA
aaaagcagataactgctgca

SEQ ID NO: 26054 - DNA, 20 bp, synthetic construct
  misc_feature 1..20: note = Description of Artificial Sequence: Synthetic oligonucleotide
  misc_feature 1..20: note = Target: SCN10A; (-) strand; PAM type: NRG; PAM sequence: CAG
  source 1..20: mol_type = other DNA
tcaaaagcagataactgctg

SEQ ID NO: 26055 - DNA, 20 bp, synthetic construct
  misc_feature 1..20: note = Description of Artificial Sequence: Synthetic oligonucleotide
  misc_feature 1..20: note = Target: SCN10A; (-) strand; PAM type: NRG; PAM sequence: CAG
  source 1..20: mol_type = other DNA
taaacccacatcttcaaaag

SEQ ID NO: 26056 - DNA, 20 bp, synthetic construct
  misc_feature 1..20: note = Description of Artificial Sequence: Synthetic oligonucleotide
  misc_feature 1..20: note = Target: SCN10A; (-) strand; PAM type: NRG; PAM sequence: AAG
  source 1..20: mol_type = other DNA
aactaaacccacatcttcaa

SEQ ID NO: 26057 - DNA, 20 bp, synthetic construct
  misc_feature 1..20: note = Description of Artificial Sequence: Synthetic oligonucleotide
  misc_feature 1..20: note = Target: SCN10A; (-) strand; PAM type: NRG; PAM sequence: TAG
  source 1..20: mol_type = other DNA
aatttttatgacatttatga

SEQ ID NO: 26058 - DNA, 20 bp, synthetic construct
  misc_feature 1..20: note = Description of Artificial Sequence: Synthetic oligonucleotide
  misc_feature 1..20: note = Target: SCN10A; (-) strand; PAM type: NRG; PAM sequence: AAG
  source 1..20: mol_type = other DNA
ggtgatgtggcagtctgcta

SEQ ID NO: 26059 - DNA, 20 bp, synthetic construct
  misc_feature 1..20: note = Description of Artificial Sequence: Synthetic oligonucleotide
  misc_feature 1..20: note = Target: SCN10A; (-) strand; PAM type: NRG; PAM sequence: CAG
  source 1..20: mol_type = other DNA
cttggccctgggtgatgtgg

SEQ ID NO: 26060 - DNA, 20 bp, synthetic construct
  misc_feature 1..20: note = Description of Artificial Sequence: Synthetic oligonucleotide
  misc_feature 1..20: note = Target: SCN10A; (-) strand; PAM type: NRG; PAM sequence: TGG
  source 1..20: mol_type = other DNA
ctccttggccctgggtgatg

SEQ ID NO: 26061 - DNA, 20 bp, synthetic construct
  misc_feature 1..20: note = Description of Artificial Sequence: Synthetic oligonucleotide
  misc_feature 1..20: note = Target: SCN10A; (-) strand; PAM type: NRG; PAM sequence: GGG
  source 1..20: mol_type = other DNA
agaaagtcctccttggccct

SEQ ID NO: 26062 - DNA, 20 bp, synthetic construct
  misc_feature 1..20: note = Description of Artificial Sequence: Synthetic oligonucleotide
  misc_feature 1..20: note = Target: SCN10A; (-) strand; PAM type: NRG; PAM sequence: TGG
  source 1..20: mol_type = other DNA
cagaaagtcctccttggccc

SEQ ID NO: 26063 - DNA, 20 bp, synthetic construct
  misc_feature 1..20: note = Description of Artificial Sequence: Synthetic oligonucleotide
  misc_feature 1..20: note = Target: SCN10A; (-) strand; PAM type: NRG; PAM sequence: TGG
  source 1..20: mol_type = other DNA
ccagcccagaaagtcctcct

SEQ ID NO: 26064 - DNA, 20 bp, synthetic construct
  misc_feature 1..20: note = Description of Artificial Sequence: Synthetic oligonucleotide
  misc_feature 1..20: note = Target: SCN10A; (-) strand; PAM type: NRG; PAM sequence: AAG
  source 1..20: mol_type = other DNA
tcggtcccacccagcccaga

SEQ ID NO: 26065 - DNA, 20 bp, synthetic construct
  misc_feature 1..20: note = Description of Artificial Sequence: Synthetic oligonucleotide
  misc_feature 1..20: note = Target: SCN10A; (-) strand; PAM type: NRG; PAM sequence: CAG
  source 1..20: mol_type = other DNA
agtctcggtcccacccagcc

SEQ ID NO: 26066 - DNA, 20 bp, synthetic construct
  misc_feature 1..20: note = Description of Artificial Sequence: Synthetic oligonucleotide
  misc_feature 1..20: note = Target: SCN10A; (-) strand; PAM type: NRG; PAM sequence: CAG
  source 1..20: mol_type = other DNA
gaggaagtctcggtcccacc

SEQ ID NO: 26067 - DNA, 20 bp, synthetic construct
  misc_feature 1..20: note = Description of Artificial Sequence: Synthetic oligonucleotide
  misc_feature 1..20: note = Target: SCN10A; (-) strand; PAM type: NRG; PAM sequence: CGG
  source 1..20: mol_type = other DNA
agctcttggagaggaagtct

SEQ ID NO: 26068 - DNA, 20 bp, synthetic construct
  misc_feature 1..20: note = Description of Artificial Sequence: Synthetic oligonucleotide
  misc_feature 1..20: note = Target: SCN10A; (-) strand; PAM type: NRG; PAM sequence: AAG
  source 1..20: mol_type = other DNA
gctctcagctcttggagagg

SEQ ID NO: 26069 - DNA, 20 bp, synthetic construct
  misc_feature 1..20: note = Description of Artificial Sequence: Synthetic oligonucleotide
  misc_feature 1..20: note = Target: SCN10A; (-) strand; PAM type: NRG; PAM sequence: AGG
  source 1..20: mol_type = other DNA
tctgctctcagctcttggag

SEQ ID NO: 26070 - DNA, 20 bp, synthetic construct
  misc_feature 1..20: note = Description of Artificial Sequence: Synthetic oligonucleotide
  misc_feature 1..20: note = Target: SCN10A; (-) strand; PAM type: NRG; PAM sequence: GAG
  source 1..20: mol_type = other DNA
gtctgctctcagctcttgga

SEQ ID NO: 26071 - DNA, 20 bp, synthetic construct
  misc_feature 1..20: note = Description of Artificial Sequence: Synthetic oligonucleotide
  misc_feature 1..20: note = Target: SCN10A; (-) strand; PAM type: NRG; PAM sequence: GAG
  source 1..20: mol_type = other DNA
atgtctgctctcagctcttg

SEQ ID NO: 26072 - DNA, 20 bp, synthetic construct
  misc_feature 1..20: note = Description of Artificial Sequence: Synthetic oligonucleotide
  misc_feature 1..20: note = Target: SCN10A; (-) strand; PAM type: NRG; PAM sequence: TGG
  source 1..20: mol_type = other DNA
gaatgtctgctctcagctct

SEQ ID NO: 26073 - DNA, 20 bp, synthetic construct
  misc_feature 1..20: note = Description of Artificial Sequence: Synthetic oligonucleotide
  misc_feature 1..20: note = Target: SCN10A; (-) strand; PAM type: NRG; PAM sequence: CAG
  source 1..20: mol_type = other DNA
ctagtaggaatgtctgctct

SEQ ID NO: 26074 - DNA, 20 bp, synthetic construct
  misc_feature 1..20: note = Description of Artificial Sequence: Synthetic oligonucleotide
  misc_feature 1..20: note = Target: SCN10A; (-) strand; PAM type: NRG; PAM sequence: AGG
  source 1..20: mol_type = other DNA
accgggtaagagctactagt

SEQ ID NO: 26075 - DNA, 20 bp, synthetic construct
  misc_feature 1..20: note = Description of Artificial Sequence: Synthetic oligonucleotide
  misc_feature 1..20: note = Target: SCN10A; (-) strand; PAM type: NRG; PAM sequence: TAG
  source 1..20: mol_type = other DNA
caccgggtaagagctactag

SEQ ID NO: 26076 - DNA, 20 bp, synthetic construct
  misc_feature 1..20: note = Description of Artificial Sequence: Synthetic oligonucleotide
  misc_feature 1..20: note = Target: SCN10A; (-) strand; PAM type: NRG; PAM sequence: TAG
  source 1..20: mol_type = other DNA
acacaccgggtaagagctac

SEQ ID NO: 26077 - DNA, 20 bp, synthetic construct
  misc_feature 1..20: note = Description of Artificial Sequence: Synthetic oligonucleotide
  misc_feature 1..20: note = Target: SCN10A; (-) strand; PAM type: NRG; PAM sequence: GAG
  source 1..20: mol_type = other DNA
ctacagcacacaccgggtaa

SEQ ID NO: 26078 - DNA, 20 bp, synthetic construct
  misc_feature 1..20: note = Description of Artificial Sequence: Synthetic oligonucleotide
  misc_feature 1..20: note = Target: SCN10A; (-) strand; PAM type: NRG; PAM sequence: AAG
  source 1..20: mol_type = other DNA
ttctacagcacacaccgggt

SEQ ID NO: 26079 - DNA, 20 bp, synthetic construct
  misc_feature 1..20: note = Description of Artificial Sequence: Synthetic oligonucleotide
  misc_feature 1..20: note = Target: SCN10A; (-) strand; PAM type: NRG; PAM sequence: GGG
  source 1..20: mol_type = other DNA
tccgttctacagcacacacc

SEQ ID NO: 26080 - DNA, 20 bp, synthetic construct
  misc_feature 1..20: note = Description of Artificial Sequence: Synthetic oligonucleotide
  misc_feature 1..20: note = Target: SCN10A; (-) strand; PAM type: NRG; PAM sequence: CGG
  source 1..20: mol_type = other DNA
atccgttctacagcacacac

SEQ ID NO: 26081 - DNA, 20 bp, synthetic construct
  misc_feature 1..20: note = Description of Artificial Sequence: Synthetic oligonucleotide
  misc_feature 1..20: note = Target: SCN10A; (-) strand; PAM type: NRG; PAM sequence: CAG
  source 1..20: mol_type = other DNA
gaggatctagatccgttcta

SEQ ID NO: 26082 - DNA, 20 bp, synthetic construct
  misc_feature 1..20: note = Description of Artificial Sequence: Synthetic oligonucleotide
  misc_feature 1..20: note = Target: SCN10A; (-) strand; PAM type: NRG; PAM sequence: TAG
  source 1..20: mol_type = other DNA
cggggagcccctggaggatc

SEQ ID NO: 26083 - DNA, 20 bp, synthetic construct
  misc_feature 1..20: note = Description of Artificial Sequence: Synthetic oligonucleotide
  misc_feature 1..20: note = Target: SCN10A; (-) strand; PAM type: NRG; PAM sequence: AGG
  source 1..20: mol_type = other DNA
actgatcggggagcccctgg

SEQ ID NO: 26084 - DNA, 20 bp, synthetic construct
  misc_feature 1..20: note = Description of Artificial Sequence: Synthetic oligonucleotide
  misc_feature 1..20: note = Target: SCN10A; (-) strand; PAM type: NRG; PAM sequence: GAG
  source 1..20: mol_type = other DNA
aactgatcggggagcccctg

SEQ ID NO: 26085 - DNA, 20 bp, synthetic construct
  misc_feature 1..20: note = Description of Artificial Sequence: Synthetic oligonucleotide
  misc_feature 1..20: note = Target: SCN10A; (-) strand; PAM type: NRG; PAM sequence: TGG
  source 1..20: mol_type = other DNA
agaactgatcggggagcccc

SEQ ID NO: 26086 - DNA, 20 bp, synthetic construct
  misc_feature 1..20: note = Description of Artificial Sequence: Synthetic oligonucleotide
  misc_feature 1..20: note = Target: SCN10A; (-) strand; PAM type: NRG; PAM sequence: GAG
  source 1..20: mol_type = other DNA
tcccagcagaactgatcggg

SEQ ID NO: 26087 - DNA, 20 bp, synthetic construct
  misc_feature 1..20: note = Description of Artificial Sequence: Synthetic oligonucleotide
  misc_feature 1..20: note = Target: SCN10A; (-) strand; PAM type: NRG; PAM sequence: GGG
  source 1..20: mol_type = other DNA
gctcccagcagaactgatcg

SEQ ID NO: 26088 - DNA, 20 bp, synthetic construct
  misc_feature 1..20: note = Description of Artificial Sequence: Synthetic oligonucleotide
  misc_feature 1..20: note = Target: SCN10A; (-) strand; PAM type: NRG; PAM sequence: GGG
  source 1..20: mol_type = other DNA
agctcccagcagaactgatc

SEQ ID NO: 26089 - DNA, 20 bp, synthetic construct
  misc_feature 1..20: note = Description of Artificial Sequence: Synthetic oligonucleotide
  misc_feature 1..20: note = Target: SCN10A; (-) strand; PAM type: NRG; PAM sequence: CGG
  source 1..20: mol_type = other DNA
gagctcccagcagaactgat

SEQ ID NO: 26090 - DNA, 20 bp, synthetic construct
  misc_feature 1..20: note = Description of Artificial Sequence: Synthetic oligonucleotide
  misc_feature 1..20: note = Target: SCN10A; (-) strand; PAM type: NRG; PAM sequence: CAG
  source 1..20: mol_type = other DNA
gttctatggtgagctcccag

SEQ ID NO: 26091 - DNA, 20 bp, synthetic construct
  misc_feature 1..20: note = Description of Artificial Sequence: Synthetic oligonucleotide
  misc_feature 1..20: note = Target: SCN10A; (-) strand; PAM type: NRG; PAM sequence: CAG
  source 1..20: mol_type = other DNA
caagttctatggtgagctcc

SEQ ID NO: 26092 - DNA, 20 bp, synthetic construct
  misc_feature 1..20: note = Description of Artificial Sequence: Synthetic oligonucleotide
  misc_feature 1..20: note = Target: SCN10A; (-) strand; PAM type: NRG; PAM sequence: GAG
  source 1..20: mol_type = other DNA
agctgcccaagttctatggt

SEQ ID NO: 26093 - DNA, 20 bp, synthetic construct
  misc_feature 1..20: note = Description of Artificial Sequence: Synthetic oligonucleotide
  misc_feature 1..20: note = Target: SCN10A; (-) strand; PAM type: NRG; PAM sequence: TGG
  source 1..20: mol_type = other DNA
aaccagctgcccaagttcta

SEQ ID NO: 26094 - DNA, 20 bp, synthetic construct
  misc_feature 1..20: note = Description of Artificial Sequence: Synthetic oligonucleotide
  misc_feature 1..20: note = Target: SCN10A; (-) strand; PAM type: NRG; PAM sequence: AAG
  source 1..20: mol_type = other DNA
aagcctgcaaccagctgccc

SEQ ID NO: 26095 - DNA, 20 bp, synthetic construct
  misc_feature 1..20: note = Description of Artificial Sequence: Synthetic oligonucleotide
  misc_feature 1..20: note = Target: SCN10A; (-) strand; PAM type: NRG; PAM sequence: CAG
  source 1..20: mol_type = other DNA
tggacttgaaagcctgcaac

SEQ ID NO: 26096 - DNA, 20 bp, synthetic construct
  misc_feature 1..20: note = Description of Artificial Sequence: Synthetic oligonucleotide
  misc_feature 1..20: note = Target: SCN10A; (-) strand; PAM type: NRG; PAM sequence: AAG
  source 1..20: mol_type = other DNA
tcggccccagctggacttga

SEQ ID NO: 26097 - DNA, 20 bp, synthetic construct
  misc_feature 1..20: note = Description of Artificial Sequence: Synthetic oligonucleotide
  misc_feature 1..20: note = Target: SCN10A; (-) strand; PAM type: NRG; PAM sequence: TGG
  source 1..20: mol_type = other DNA
agagaagcctcggccccagc

SEQ ID NO: 26098 - DNA, 20 bp, synthetic construct
  misc_feature 1..20: note = Description of Artificial Sequence: Synthetic oligonucleotide
  misc_feature 1..20: note = Target: SCN10A; (-) strand; PAM type: NRG; PAM sequence: CAG
  source 1..20: mol_type = other DNA
aagaagagaagcctcggccc

SEQ ID NO: 26099 - DNA, 20 bp, synthetic construct
  misc_feature 1..20: note = Description of Artificial Sequence: Synthetic oligonucleotide
  misc_feature 1..20: note = Target: SCN10A; (-) strand; PAM type: NRG; PAM sequence: CGG
  source 1..20: mol_type = other DNA
aggaccaagaagagaagcct

SEQ ID NO: 26100 - DNA, 20 bp, synthetic construct
  misc_feature 1..20: note = Description of Artificial Sequence: Synthetic oligonucleotide
  misc_feature 1..20: note = Target: SCN10A; (-) strand; PAM type: NRG; PAM sequence: AAG
  source 1..20: mol_type = other DNA
agcagaaggaccaagaagag

SEQ ID NO: 26101 - DNA, 20 bp, synthetic construct
  misc_feature 1..20: note = Description of Artificial Sequence: Synthetic oligonucleotide
  misc_feature 1..20: note = Target: SCN10A; (-) strand; PAM type: NRG; PAM sequence: GAG
  source 1..20: mol_type = other DNA
gggagcagaaggaccaagaa

SEQ ID NO: 26102 - DNA, 20 bp, synthetic construct
  misc_feature 1..20: note = Description of Artificial Sequence: Synthetic oligonucleotide
  misc_feature 1..20: note = Target: SCN10A; (-) strand; PAM type: NRG; PAM sequence: AAG
  source 1..20: mol_type = other DNA
tagggagcagaaggaccaag

SEQ ID NO: 26103 - DNA, 20 bp, synthetic construct
  misc_feature 1..20: note = Description of Artificial Sequence: Synthetic oligonucleotide
  misc_feature 1..20: note = Target: SCN10A; (-) strand; PAM type: NRG; PAM sequence: AAG
  source 1..20: mol_type = other DNA
gcatagggagcagaaggacc

SEQ ID NO: 26104 - DNA, 20 bp, synthetic construct
  misc_feature 1..20: note = Description of Artificial Sequence: Synthetic oligonucleotide
  misc_feature 1..20: note = Target: SCN10A; (-) strand; PAM type: NRG; PAM sequence: AGG
  source 1..20: mol_type = other DNA
agagaagcatagggagcaga

SEQ ID NO: 26105 - DNA, 20 bp, synthetic construct
  misc_feature 1..20: note = Description of Artificial Sequence: Synthetic oligonucleotide
  misc_feature 1..20: note = Target: SCN10A; (-) strand; PAM type: NRG; PAM sequence: AAG
  source 1..20: mol_type = other DNA
gagagaagcatagggagcag

SEQ ID NO: 26106 - DNA, 20 bp, synthetic construct
  misc_feature 1..20: note = Description of Artificial Sequence: Synthetic oligonucleotide
  misc_feature 1..20: note = Target: SCN10A; (-) strand; PAM type: NRG; PAM sequence: CAG
  source 1..20: mol_type = other DNA
ccagagagaagcatagggag

SEQ ID NO: 26107 - DNA, 20 bp, synthetic construct
  misc_feature 1..20: note = Description of Artificial Sequence: Synthetic oligonucleotide
  misc_feature 1..20: note = Target: SCN10A; (-) strand; PAM type: NRG; PAM sequence: GAG
  source 1..20: mol_type = other DNA
aagccagagagaagcatagg

SEQ ID NO: 26108 - DNA, 20 bp, synthetic construct
  misc_feature 1..20: note = Description of Artificial Sequence: Synthetic oligonucleotide
  misc_feature 1..20: note = Target: SCN10A; (-) strand; PAM type: NRG; PAM sequence: GGG
  source 1..20: mol_type = other DNA
gaaagccagagagaagcata

SEQ ID NO: 26109 - DNA, 20 bp, synthetic construct
  misc_feature 1..20: note = Description of Artificial Sequence: Synthetic oligonucleotide
  misc_feature 1..20: note = Target: SCN10A; (-) strand; PAM type: NRG; PAM sequence: AGG
  source 1..20: mol_type = other DNA
agaaagccagagagaagcat

SEQ ID NO: 26110 - DNA, 20 bp, synthetic construct
  misc_feature 1..20: note = Description of Artificial Sequence: Synthetic oligonucleotide
  misc_feature 1..20: note = Target: SCN10A; (-) strand; PAM type: NRG; PAM sequence: TAG
  source 1..20: mol_type = other DNA
aagaaagccagagagaagca

SEQ ID NO: 26111 - DNA, 20 bp, synthetic construct
  misc_feature 1..20: note = Description of Artificial Sequence: Synthetic oligonucleotide
  misc_feature 1..20: note = Target: SCN10A; (-) strand; PAM type: NRG; PAM sequence: AAG
  source 1..20: mol_type = other DNA
gaacaaagaaagccagagag

SEQ ID NO: 26112 - DNA, 20 bp, synthetic construct
  misc_feature 1..20: note = Description of Artificial Sequence: Synthetic oligonucleotide
  misc_feature 1..20: note = Target: SCN10A; (-) strand; PAM type: NRG; PAM sequence: GAG
  source 1..20: mol_type = other DNA
agggaacaaagaaagccaga

SEQ ID NO: 26113 - DNA, 20 bp, synthetic construct
  misc_feature 1..20: note = Description of Artificial Sequence: Synthetic oligonucleotide
  misc_feature 1..20: note = Target: SCN10A; (-) strand; PAM type: NRG; PAM sequence: GAG
  source 1..20: mol_type = other DNA
gcagggaacaaagaaagcca

SEQ ID NO: 26114 - DNA, 20 bp, synthetic construct
  misc_feature 1..20: note = Description of Artificial Sequence: Synthetic oligonucleotide
  misc_feature 1..20: note = Target: SCN10A; (-) strand; PAM type: NRG; PAM sequence: CAG
  source 1..20: mol_type = other DNA
aagcagggaacaaagaaagc

SEQ ID NO: 26115 - DNA, 20 bp, synthetic construct
  misc_feature 1..20: note = Description of Artificial Sequence: Synthetic oligonucleotide
  misc_feature 1..20: note = Target: SCN10A; (-) strand; PAM type: NRG; PAM sequence: AAG
  source 1..20: mol_type = other DNA
tgccaagcagggaacaaaga

SEQ ID NO: 26116 - DNA, 20 bp, synthetic construct
  misc_feature 1..20: note = Description of Artificial Sequence: Synthetic oligonucleotide
  misc_feature 1..20: note = Target: SCN10A; (-) strand; PAM type: NRG; PAM sequence: AAG
  source 1..20: mol_type = other DNA
ttgctgccaagcagggaaca

SEQ ID NO: 26117 - DNA, 20 bp, synthetic construct
  misc_feature 1..20: note = Description of Artificial Sequence: Synthetic oligonucleotide
  misc_feature 1..20: note = Target: SCN10A; (-) strand; PAM type: NRG; PAM sequence: GGG
  source 1..20: mol_type = other DNA
aagcaaattgctgccaagca

SEQ ID NO: 26118 - DNA, 20 bp, synthetic construct
  misc_feature 1..20: note = Description of Artificial Sequence: Synthetic oligonucleotide
  misc_feature 1..20: note = Target: SCN10A; (-) strand; PAM type: NRG; PAM sequence: AGG
  source 1..20: mol_type = other DNA
gaagcaaattgctgccaagc

SEQ ID NO: 26119 - DNA, 20 bp, synthetic construct
  misc_feature 1..20: note = Description of Artificial Sequence: Synthetic oligonucleotide
  misc_feature 1..20: note = Target: SCN10A; (-) strand; PAM type: NRG; PAM sequence: CAG
  source 1..20: mol_type = other DNA
agaagcaaattgctgccaag

SEQ ID NO: 26120 - DNA, 20 bp, synthetic construct
  misc_feature 1..20: note = Description of Artificial Sequence: Synthetic oligonucleotide
  misc_feature 1..20: note = Target: SCN10A; (-) strand; PAM type: NRG; PAM sequence: AAG
  source 1..20: mol_type = other DNA
tagagaagcaaattgctgcc

SEQ ID NO: 26121 - DNA, 20 bp, synthetic construct
  misc_feature 1..20: note = Description of Artificial Sequence: Synthetic oligonucleotide
  misc_feature 1..20: note = Target: SCN10A; (-) strand; PAM type: NRG; PAM sequence: AAG
  source 1..20: mol_type = other DNA
agtcactggtggagatagag

SEQ ID NO: 26122 - DNA, 20 bp, synthetic construct
  misc_feature 1..20: note = Description of Artificial Sequence: Synthetic oligonucleotide
  misc_feature 1..20: note = Target: SCN10A; (-) strand; PAM type: NRG; PAM sequence: GAG
  source 1..20: mol_type = other DNA
cggagtcactggtggagata

SEQ ID NO: 26123 - DNA, 20 bp, synthetic construct
  misc_feature 1..20: note = Description of Artificial Sequence: Synthetic oligonucleotide
  misc_feature 1..20: note = Target: SCN10A; (-) strand; PAM type: NRG; PAM sequence: TAG
  source 1..20: mol_type = other DNA
tccggagtcactggtggaga

SEQ ID NO: 26124 - DNA, 20 bp, synthetic construct
  misc_feature 1..20: note = Description of Artificial Sequence: Synthetic oligonucleotide
  misc_feature 1..20: note = Target: SCN10A; (-) strand; PAM type: NRG; PAM sequence: GAG
  source 1..20: mol_type = other DNA
ttactccggagtcactggtg

SEQ ID NO: 26125 - DNA, 20 bp, synthetic construct
  misc_feature 1..20: note = Description of Artificial Sequence: Synthetic oligonucleotide
  misc_feature 1..20: note = Target: SCN10A; (-) strand; PAM type: NRG; PAM sequence: TGG
  source 1..20: mol_type = other DNA
ctttactccggagtcactgg

SEQ ID NO: 26126 - DNA, 20 bp, synthetic construct
  misc_feature 1..20: note = Description of Artificial Sequence: Synthetic oligonucleotide
  misc_feature 1..20: note = Target: SCN10A; (-) strand; PAM type: NRG; PAM sequence: TGG
  source 1..20: mol_type = other DNA
tcgctttactccggagtcac

SEQ ID NO: 26127 - DNA, 20 bp, synthetic construct
  misc_feature 1..20: note = Description of Artificial Sequence: Synthetic oligonucleotide
  misc_feature 1..20: note = Target: SCN10A; (-) strand; PAM type: NRG; PAM sequence: GAG
  source 1..20: mol_type = other DNA
acttccgtcgctttactccg

SEQ ID NO: 26128 - DNA, 20 bp, synthetic construct
  misc_feature 1..20: note = Description of Artificial Sequence: Synthetic oligonucleotide
  misc_feature 1..20: note = Target: SCN10A; (-) strand; PAM type: NRG; PAM sequence: CGG
  source 1..20: mol_type = other DNA
caacttccgtcgctttactc

SEQ ID NO: 26129 - DNA, 20 bp, synthetic construct
  misc_feature 1..20: note = Description of Artificial Sequence: Synthetic oligonucleotide
  misc_feature 1..20: note = Target: SCN10A; (-) strand; PAM type: NRG; PAM sequence: TGG
  source 1..20: mol_type = other DNA
gagaagatggaattccccat

SEQ ID NO: 26130 - DNA, 20 bp, synthetic construct
  misc_feature 1..20: note = Description of Artificial Sequence: Synthetic oligonucleotide
  misc_feature 1..20: note = Target: SCN10A; (-) strand; PAM type: NRG; PAM sequence: TGG
  source 1..20: mol_type = other DNA
cctgaagaagaatgagaaga

SEQ ID NO: 26131 - DNA, 20 bp, synthetic construct
  misc_feature 1..20: note = Description of Artificial Sequence: Synthetic oligonucleotide
  misc_feature 1..20: note = Target: SCN10A; (-) strand; PAM type: NRG; PAM sequence: AAG
  source 1..20: mol_type = other DNA
acttcctgaagaagaatgag

SEQ ID NO: 26132 - DNA, 20 bp, synthetic construct
  misc_feature 1..20: note = Description of Artificial Sequence: Synthetic oligonucleotide
  misc_feature 1..20: note = Target: SCN10A; (-) strand; PAM type: NRG; PAM sequence: GAG
  source 1..20: mol_type = other DNA
aatacttcctgaagaagaat

SEQ ID NO: 26133 - DNA, 20 bp, synthetic construct
  misc_feature 1..20: note = Description of Artificial Sequence: Synthetic oligonucleotide
  misc_feature 1..20: note = Target: SCN10A; (-) strand; PAM type: NRG; PAM sequence: AAG
  source 1..20: mol_type = other DNA
agtataaatacttcctgaag

SEQ ID NO: 26134 - DNA, 20 bp, synthetic construct
  misc_feature 1..20: note = Description of Artificial Sequence: Synthetic oligonucleotide
  misc_feature 1..20: note = Target: SCN10A; (-) strand; PAM type: NRG; PAM sequence: AAG
  source 1..20: mol_type = other DNA
aagagtataaatacttcctg

SEQ ID NO: 26135 - DNA, 20 bp, synthetic construct
  misc_feature 1..20: note = Description of Artificial Sequence: Synthetic oligonucleotide
  misc_feature 1..20: note = Target: SCN10A; (-) strand; PAM type: NRG; PAM sequence: GAG
  source 1..20: mol_type = other DNA
ggttatgtccactcttataa

SEQ ID NO: 26136 - DNA, 20 bp, synthetic construct
  misc_feature 1..20: note = Description of Artificial Sequence: Synthetic oligonucleotide
  misc_feature 1..20: note = Target: SCN10A; (-) strand; PAM type: NRG; PAM sequence: AAG
  source 1..20: mol_type = other DNA
gtggttatgtccactcttat

SEQ ID NO: 26137 - DNA, 20 bp, synthetic construct
  misc_feature 1..20: note = Description of Artificial Sequence: Synthetic oligonucleotide
  misc_feature 1..20: note = Target: SCN10A; (-) strand; PAM type: NRG; PAM sequence: TGG
  source 1..20: mol_type = other DNA
ggcaagctgtcacctctctg

SEQ ID NO: 26138 - DNA, 20 bp, synthetic construct
  misc_feature 1..20: note = Description of Artificial Sequence: Synthetic oligonucleotide
  misc_feature 1..20: note = Target: SCN10A; (-) strand; PAM type: NRG; PAM sequence: AAG
  source 1..20: mol_type = other DNA
gagggacagggccagtgggc

SEQ ID NO: 26139 - DNA, 20 bp, synthetic construct
  misc_feature 1..20: note = Description of Artificial Sequence: Synthetic oligonucleotide
  misc_feature 1..20: note = Target: SCN10A; (-) strand; PAM type: NRG; PAM sequence: GGG
  source 1..20: mol_type = other DNA
atgagagggacagggccagt

SEQ ID NO: 26140 - DNA, 20 bp, synthetic construct
  misc_feature 1..20: note = Description of Artificial Sequence: Synthetic oligonucleotide
  misc_feature 1..20: note = Target: SCN10A; (-) strand; PAM type: NRG; PAM sequence: TGG
  source 1..20: mol_type = other DNA
gatgagagggacagggccag

SEQ ID NO: 26141 - DNA, 20 bp, synthetic construct
  misc_feature 1..20: note = Description of Artificial Sequence: Synthetic oligonucleotide
  misc_feature 1..20: note = Target: SCN10A; (-) strand; PAM type: NRG; PAM sequence: CAG
  source 1..20: mol_type = other DNA
acagatgagagggacagggc

SEQ ID NO: 26142 - DNA, 20 bp, synthetic construct
  misc_feature 1..20: note = Description of Artificial Sequence: Synthetic oligonucleotide
  misc_feature 1..20: note = Target: SCN10A; (-) strand; PAM type: NRG; PAM sequence: GGG
  source 1..20: mol_type = other DNA
tgggacagatgagagggaca

SEQ ID NO: 26143 - DNA, 20 bp, synthetic construct
  misc_feature 1..20: note = Description of Artificial Sequence: Synthetic oligonucleotide
  misc_feature 1..20: note = Target: SCN10A; (-) strand; PAM type: NRG; PAM sequence: AGG
  source 1..20: mol_type = other DNA
atgggacagatgagagggac

SEQ ID NO: 26144 - DNA, 20 bp, synthetic construct
  misc_feature 1..20: note = Description of Artificial Sequence: Synthetic oligonucleotide
  misc_feature 1..20: note = Target: SCN10A; (-) strand; PAM type: NRG; PAM sequence: CAG
  source 1..20: mol_type = other DNA
gatgggacagatgagaggga

SEQ ID NO: 26145 - DNA, 20 bp, synthetic construct
  misc_feature 1..20: note = Description of Artificial Sequence: Synthetic oligonucleotide
  misc_feature 1..20: note = Target: SCN10A; (-) strand; PAM type: NRG; PAM sequence: GGG
  source 1..20: mol_type = other DNA
tcaagatgggacagatgaga

SEQ ID NO: 26146 - DNA, 20 bp, synthetic construct
  misc_feature 1..20: note = Description of Artificial Sequence: Synthetic oligonucleotide
  misc_feature 1..20: note = Target: SCN10A; (-) strand; PAM type: NRG; PAM sequence: AGG
  source 1..20: mol_type = other DNA
atcaagatgggacagatgag

SEQ ID NO: 26147 - DNA, 20 bp, synthetic construct
  misc_feature 1..20: note = Description of Artificial Sequence: Synthetic oligonucleotide
  misc_feature 1..20: note = Target: SCN10A; (-) strand; PAM type: NRG; PAM sequence: GAG
  source 1..20: mol_type = other DNA
aatcaagatgggacagatga

SEQ ID NO: 26148 - DNA, 20 bp, synthetic construct
  misc_feature 1..20: note = Description of Artificial Sequence: Synthetic oligonucleotide
  misc_feature 1..20: note = Target: SCN10A; (-) strand; PAM type: NRG; PAM sequence: GAG
  source 1..20: mol_type = other DNA
acaatcaagatgggacagat

SEQ ID NO: 26149 - DNA, 20 bp, synthetic construct
  misc_feature 1..20: note = Description of Artificial Sequence: Synthetic oligonucleotide
  misc_feature 1..20: note = Target: SCN10A; (-) strand; PAM type: NRG; PAM sequence: CAG
  source 1..20: mol_type = other DNA
ttctgacaatcaagatggga

SEQ ID NO: 26150 - DNA, 20 bp, synthetic construct
  misc_feature 1..20: note = Description of Artificial Sequence: Synthetic oligonucleotide
  misc_feature 1..20: note = Target: SCN10A; (-) strand; PAM type: NRG; PAM sequence: GGG
  source 1..20: mol_type = other DNA
gctgttctgacaatcaagat

SEQ ID NO: 26151 - DNA, 20 bp, synthetic construct
  misc_feature 1..20: note = Description of Artificial Sequence: Synthetic oligonucleotide
  misc_feature 1..20: note = Target: SCN10A; (-) strand; PAM type: NRG; PAM sequence: TGG
  source 1..20: mol_type = other DNA
ggctgttctgacaatcaaga

SEQ ID NO: 26152 - DNA, 20 bp, synthetic construct
  misc_feature 1..20: note = Description of Artificial Sequence: Synthetic oligonucleotide
  misc_feature 1..20: note = Target: SCN10A; (-) strand; PAM type: NRG; PAM sequence: AAG
  source 1..20: mol_type = other DNA
gaagggctgttctgacaatc

SEQ ID NO: 26153 - DNA, 20 bp, synthetic construct
  misc_feature 1..20: note = Description of Artificial Sequence: Synthetic oligonucleotide
  misc_feature 1..20: note = Target: SCN10A; (-) strand; PAM type: NRG; PAM sequence: GGG
  source 1..20: mol_type = other DNA
cagatatgagggtgggagaa

SEQ ID NO: 26154 - DNA, 20 bp, synthetic construct
  misc_feature 1..20: note = Description of Artificial Sequence: Synthetic oligonucleotide
  misc_feature 1..20: note = Target: SCN10A; (-) strand; PAM type: NRG; PAM sequence: AGG
  source 1..20: mol_type = other DNA
ccagatatgagggtgggaga

SEQ ID NO: 26155 - DNA, 20 bp, synthetic construct
  misc_feature 1..20: note = Description of Artificial Sequence: Synthetic oligonucleotide
  misc_feature 1..20: note = Target: SCN10A; (-) strand; PAM type: NRG; PAM sequence: AAG
  source 1..20: mol_type = other DNA
gccagatatgagggtgggag

SEQ ID NO: 26156 - DNA, 20 bp, synthetic construct
  misc_feature 1..20: note = Description of Artificial Sequence: Synthetic oligonucleotide
  misc_feature 1..20: note = Target: SCN10A; (-) strand; PAM type: NRG; PAM sequence: GAG
  source 1..20: mol_type = other DNA
ggggccagatatgagggtgg

SEQ ID NO: 26157 - DNA, 20 bp, synthetic construct
  misc_feature 1..20: note = Description of Artificial Sequence: Synthetic oligonucleotide
  misc_feature 1..20: note = Target: SCN10A; (-) strand; PAM type: NRG; PAM sequence: GGG
  source 1..20: mol_type = other DNA
gaggggccagatatgagggt

SEQ ID NO: 26158 - DNA, 20 bp, synthetic construct
  misc_feature 1..20: note = Description of Artificial Sequence: Synthetic oligonucleotide
  misc_feature 1..20: note = Target: SCN10A; (-) strand; PAM type: NRG; PAM sequence: TGG
  source 1..20: mol_type = other DNA
ggaggggccagatatgaggg

SEQ ID NO: 26159 - DNA, 20 bp, synthetic construct
  misc_feature 1..20: note = Description of Artificial Sequence: Synthetic oligonucleotide
  misc_feature 1..20: note = Target: SCN10A; (-) strand; PAM type: NRG; PAM sequence: GGG
  source 1..20: mol_type = other DNA
cagggaggggccagatatga

SEQ ID NO: 26160 - DNA, 20 bp, synthetic construct
  misc_feature 1..20: note = Description of Artificial Sequence: Synthetic oligonucleotide
  misc_feature 1..20: note = Target: SCN10A; (-) strand; PAM type: NRG; PAM sequence: AGG
  source 1..20: mol_type = other DNA
tcagggaggggccagatatg

SEQ ID NO: 26161 - DNA, 20 bp, synthetic construct
  misc_feature 1..20: note = Description of Artificial Sequence: Synthetic oligonucleotide
  misc_feature 1..20: note = Target: SCN10A; (-) strand; PAM type: NRG; PAM sequence: GAG
  source 1..20: mol_type = other DNA
ttcagggaggggccagatat

SEQ ID NO: 26162 - DNA, 20 bp, synthetic construct
  misc_feature 1..20: note = Description of Artificial Sequence: Synthetic oligonucleotide
  misc_feature 1..20: note = Target: SCN10A; (-) strand; PAM type: NRG; PAM sequence: CAG
  source 1..20: mol_type = other DNA
gtgtgagttcagggaggggc

SEQ ID NO: 26163 - DNA, 20 bp, synthetic construct
  misc_feature 1..20: note = Description of Artificial Sequence: Synthetic oligonucleotide
  misc_feature 1..20: note = Target: SCN10A; (-) strand; PAM type: NRG; PAM sequence: GGG
  source 1..20: mol_type = other DNA
ccaagtgtgagttcagggag

SEQ ID NO: 26164 - DNA, 20 bp, synthetic construct
  misc_feature 1..20: note = Description of Artificial Sequence: Synthetic oligonucleotide
  misc_feature 1..20: note = Target: SCN10A; (-) strand; PAM type: NRG; PAM sequence: GGG
  source 1..20: mol_type = other DNA
gccaagtgtgagttcaggga

SEQ ID NO: 26165 - DNA, 20 bp, synthetic construct
  misc_feature 1..20: note = Description of Artificial Sequence: Synthetic oligonucleotide
  misc_feature 1..20: note = Target: SCN10A; (-) strand; PAM type: NRG; PAM sequence: AGG
  source 1..20: mol_type = other DNA
agccaagtgtgagttcaggg

SEQ ID NO: 26166 - DNA, 20 bp, synthetic construct
  misc_feature 1..20: note = Description of Artificial Sequence: Synthetic oligonucleotide
  misc_feature 1..20: note = Target: SCN10A; (-) strand; PAM type: NRG; PAM sequence: GAG
  source 1..20: mol_type = other DNA
gagccaagtgtgagttcagg

SEQ ID NO: 26167 - DNA, 20 bp, synthetic construct
  misc_feature 1..20: note = Description of Artificial Sequence: Synthetic oligonucleotide
  misc_feature 1..20: note = Target: SCN10A; (-) strand; PAM type: NRG; PAM sequence: GGG
  source 1..20: mol_type = other DNA
aggagccaagtgtgagttca

SEQ ID NO: 26168 - DNA, 20 bp, synthetic construct
  misc_feature 1..20: note = Description of Artificial Sequence: Synthetic oligonucleotide
  misc_feature 1..20: note = Target: SCN10A; (-) strand; PAM type: NRG; PAM sequence: AGG
  source 1..20: mol_type = other DNA
gaggagccaagtgtgagttc

SEQ ID NO: 26169 - DNA, 20 bp, synthetic construct
  misc_feature 1..20: note = Description of Artificial Sequence: Synthetic oligonucleotide
  misc_feature 1..20: note = Target: SCN10A; (-) strand; PAM type: NRG; PAM sequence: CAG
  source 1..20: mol_type = other DNA
ggaggagccaagtgtgagtt

SEQ ID NO: 26170 - DNA, 20 bp, synthetic construct
  misc_feature 1..20: note = Description of Artificial Sequence: Synthetic oligonucleotide
  misc_feature 1..20: note = Target: SCN10A; (-) strand; PAM type: NRG; PAM sequence: GAG
  source 1..20: mol_type = other DNA
tcctgggaggagccaagtgt

SEQ ID NO: 26171 - DNA, 20 bp, synthetic construct
  misc_feature 1..20: note = Description of Artificial Sequence: Synthetic oligonucleotide
  misc_feature 1..20: note = Target: SCN10A; (-) strand; PAM type: NRG; PAM sequence: AAG
  source 1..20: mol_type = other DNA
atgggttcctgggaggagcc

SEQ ID NO: 26172 - DNA, 20 bp, synthetic construct
  misc_feature 1..20: note = Description of Artificial Sequence: Synthetic oligonucleotide
  misc_feature 1..20: note = Target: SCN10A; (-) strand; PAM type: NRG; PAM sequence: GAG
  source 1..20: mol_type = other DNA
ggggaatgggttcctgggag

SEQ ID NO: 26173 - DNA, 20 bp, synthetic construct
  misc_feature 1..20: note = Description of Artificial Sequence: Synthetic oligonucleotide
  misc_feature 1..20: note = Target: SCN10A; (-) strand; PAM type: NRG; PAM sequence: AGG
  source 1..20: mol_type = other DNA
caggggaatgggttcctggg

SEQ ID NO: 26174 - DNA, 20 bp, synthetic construct
  misc_feature 1..20: note = Description of Artificial Sequence: Synthetic oligonucleotide
  misc_feature 1..20: note = Target: SCN10A; (-) strand; PAM type: NRG; PAM sequence: GAG
  source 1..20: mol_type = other DNA
gcaggggaatgggttcctgg

SEQ ID NO: 26175 - DNA, 20 bp, synthetic construct
  misc_feature 1..20: note = Description of Artificial Sequence: Synthetic oligonucleotide
  misc_feature 1..20: note = Target: SCN10A; (-) strand; PAM type: NRG; PAM sequence: GGG
  source 1..20: mol_type = other DNA
ttgcaggggaatgggttcct

SEQ ID NO: 26176 - DNA, 20 bp, synthetic construct
  misc_feature 1..20: note = Description of Artificial Sequence: Synthetic oligonucleotide
  misc_feature 1..20: note = Target: SCN10A; (-) strand; PAM type: NRG; PAM sequence: TGG
  source 1..20: mol_type = other DNA
cttgcaggggaatgggttcc

SEQ ID NO: 26177 - DNA, 20 bp, synthetic construct
  misc_feature 1..20: note = Description of Artificial Sequence: Synthetic oligonucleotide
  misc_feature 1..20: note = Target: SCN10A; (-) strand; PAM type: NRG; PAM sequence: GGG
  source 1..20: mol_type = other DNA
tgaatgccttgcaggggaat

SEQ ID NO: 26178 - DNA, 20 bp, synthetic construct
  misc_feature 1..20: note = Description of Artificial Sequence: Synthetic oligonucleotide
  misc_feature 1..20: note = Target: SCN10A; (-) strand; PAM type: NRG; PAM sequence: TGG
  source 1..20: mol_type = other DNA
ctgaatgccttgcaggggaa

SEQ ID NO: 26179 - DNA, 20 bp, synthetic construct
  misc_feature 1..20: note = Description of Artificial Sequence: Synthetic oligonucleotide
  misc_feature 1..20: note = Target: SCN10A; (-) strand; PAM type: NRG; PAM sequence: GGG
  source 1..20: mol_type = other DNA
ctcccctgaatgccttgcag

SEQ ID NO: 26180 - DNA, 20 bp, synthetic construct
  misc_feature 1..20: note = Description of Artificial Sequence: Synthetic oligonucleotide
  misc_feature 1..20: note = Target: SCN10A; (-) strand; PAM type: NRG; PAM sequence: GGG
  source 1..20: mol_type = other DNA
cctcccctgaatgccttgca

SEQ ID NO: 26181 - DNA, 20 bp, synthetic construct
  misc_feature 1..20: note = Description of Artificial Sequence: Synthetic oligonucleotide
  misc_feature 1..20: note = Target: SCN10A; (-) strand; PAM type: NRG; PAM sequence: AGG
  source 1..20: mol_type = other DNA
gcctcccctgaatgccttgc

SEQ ID NO: 26182 - DNA, 20 bp, synthetic construct
  misc_feature 1..20: note = Description of Artificial Sequence: Synthetic oligonucleotide
  misc_feature 1..20: note = Target: SCN10A; (-) strand; PAM type: NRG; PAM sequence: CAG
  source 1..20: mol_type = other DNA
agcctcccctgaatgccttg

SEQ ID NO: 26183 - DNA, 20 bp, synthetic construct
  misc_feature 1..20: note = Description of Artificial Sequence: Synthetic oligonucleotide
  misc_feature 1..20: note = Target: SCN10A; (-) strand; PAM type: NRG; PAM sequence: CAG
  source 1..20: mol_type = other DNA
ctggaggagggttgaataaa

SEQ ID NO: 26184 - DNA, 20 bp, synthetic construct
  misc_feature 1..20: note = Description of Artificial Sequence: Synthetic oligonucleotide
  misc_feature 1..20: note = Target: SCN10A; (-) strand; PAM type: NRG; PAM sequence: GGG
  source 1..20: mol_type = other DNA
accctgaggcacctggagga

SEQ ID NO: 26185 - DNA, 20 bp, synthetic construct
  misc_feature 1..20: note = Description of Artificial Sequence: Synthetic oligonucleotide
  misc_feature 1..20: note = Target: SCN10A; (-) strand; PAM type: NRG; PAM sequence: AGG
  source 1..20: mol_type = other DNA
aaccctgaggcacctggagg

SEQ ID NO: 26186 - DNA, 20 bp, synthetic construct
  misc_feature 1..20: note = Description of Artificial Sequence: Synthetic oligonucleotide
  misc_feature 1..20: note = Target: SCN10A; (-) strand; PAM type: NRG; PAM sequence: GAG
  source 1..20: mol_type = other DNA
taaccctgaggcacctggag

SEQ ID NO: 26187 - DNA, 20 bp, synthetic construct
  misc_feature 1..20: note = Description of Artificial Sequence: Synthetic oligonucleotide
  misc_feature 1..20: note = Target: SCN10A; (-) strand; PAM type: NRG; PAM sequence: AGG
  source 1..20: mol_type = other DNA
cataaccctgaggcacctgg

SEQ ID NO: 26188 - DNA, 20 bp, synthetic construct
  misc_feature 1..20: note = Description of Artificial Sequence: Synthetic oligonucleotide
  misc_feature 1..20: note = Target: SCN10A; (-) strand; PAM type: NRG; PAM sequence: GAG
  source 1..20: mol_type = other DNA
acataaccctgaggcacctg

SEQ ID NO: 26189 - DNA, 20 bp, synthetic construct
  misc_feature 1..20: note = Description of Artificial Sequence: Synthetic oligonucleotide
  misc_feature 1..20: note = Target: SCN10A; (-) strand; PAM type: NRG; PAM sequence: TGG
  source 1..20: mol_type = other DNA
agacataaccctgaggcacc

SEQ ID NO: 26190 - DNA, 20 bp, synthetic construct
  misc_feature 1..20: note = Description of Artificial Sequence: Synthetic oligonucleotide
  misc_feature 1..20: note = Target: SCN10A; (-) strand; PAM type: NRG; PAM sequence: AGG
  source 1..20: mol_type = other DNA
ggagcaaagacataaccctg

SEQ ID NO: 26191 - DNA, 20 bp, synthetic construct
  misc_feature 1..20: note = Description of Artificial Sequence: Synthetic oligonucleotide
  misc_feature 1..20: note = Target: SCN10A; (-) strand; PAM type: NRG; PAM sequence: GAG
  source 1..20: mol_type = other DNA
gggagcaaagacataaccct

SEQ ID NO: 26192 - DNA, 20 bp, synthetic construct
  misc_feature 1..20: note = Description of Artificial Sequence: Synthetic oligonucleotide
  misc_feature 1..20: note = Target: SCN10A; (-) strand; PAM type: NRG; PAM sequence: AAG
  source 1..20: mol_type = other DNA
atagaagcacatggggagca

SEQ ID NO: 26193 - DNA, 20 bp, synthetic construct
  misc_feature 1..20: note = Description of Artificial Sequence: Synthetic oligonucleotide
  misc_feature 1..20: note = Target: SCN10A; (-) strand; PAM type: NRG; PAM sequence: GAG
  source 1..20: mol_type = other DNA
atgacatagaagcacatggg

SEQ ID NO: 26194 - DNA, 20 bp, synthetic construct
  misc_feature 1..20: note = Description of Artificial Sequence: Synthetic oligonucleotide
  misc_feature 1..20: note = Target: SCN10A; (-) strand; PAM type: NRG; PAM sequence: GGG
  source 1..20: mol_type = other DNA
caatgacatagaagcacatg

SEQ ID NO: 26195 - DNA, 20 bp, synthetic construct
  misc_feature 1..20: note = Description of Artificial Sequence: Synthetic oligonucleotide
  misc_feature 1..20: note = Target: SCN10A; (-) strand; PAM type: NRG; PAM sequence: GGG
  source 1..20: mol_type = other DNA
gcaatgacatagaagcacat

SEQ ID NO: 26196 - DNA, 20 bp, synthetic construct
  misc_feature 1..20: note = Description of Artificial Sequence: Synthetic oligonucleotide
  misc_feature 1..20: note = Target: SCN10A; (-) strand; PAM type: NRG; PAM sequence: TGG
  source 1..20: mol_type = other DNA
agcaatgacatagaagcaca

SEQ ID NO: 26197 - DNA, 20 bp, synthetic construct
  misc_feature 1..20: note = Description of Artificial Sequence: Synthetic oligonucleotide
  misc_feature 1..20: note = Target: SCN10A; (-) strand; PAM type: NRG; PAM sequence: AAG
  source 1..20: mol_type = other DNA
gtgaagaagcaatgacatag

SEQ ID NO: 26198 - DNA, 20 bp, synthetic construct
  misc_feature 1..20: note = Description of Artificial Sequence: Synthetic oligonucleotide
  misc_feature 1..20: note = Target: SCN10A; (-) strand; PAM type: NRG; PAM sequence: TAG
  source 1..20: mol_type = other DNA
gtggtgaagaagcaatgaca

SEQ ID NO: 26199 - DNA, 20 bp, synthetic construct
  misc_feature 1..20: note = Description of Artificial Sequence: Synthetic oligonucleotide
  misc_feature 1..20: note = Target: SCN10A; (-) strand; PAM type: NRG; PAM sequence: AAG
  source 1..20: mol_type = other DNA
gatggtacaaagtggtgaag

SEQ ID NO: 26200 - DNA, 20 bp, synthetic construct
  misc_feature 1..20: note = Description of Artificial Sequence: Synthetic oligonucleotide
  misc_feature 1..20: note = Target: SCN10A; (-) strand; PAM type: NRG; PAM sequence: AAG
  source 1..20: mol_type = other DNA
taggatggtacaaagtggtg

SEQ ID NO: 26201 - DNA, 20 bp, synthetic construct
  misc_feature 1..20: note = Description of Artificial Sequence: Synthetic oligonucleotide
  misc_feature 1..20: note = Target: SCN10A; (-) strand; PAM type: NRG; PAM sequence: TGG
  source 1..20: mol_type = other DNA
ggtggtaggatggtacaaag

SEQ ID NO: 26202 - DNA, 20 bp, synthetic construct
  misc_feature 1..20: note = Description of Artificial Sequence: Synthetic oligonucleotide
  misc_feature 1..20: note = Target: SCN10A; (-) strand; PAM type: NRG; PAM sequence: AAG
  source 1..20: mol_type = other DNA
ggtggtggtaggatggtaca

SEQ ID NO: 26203 - DNA, 20 bp, synthetic construct
  misc_feature 1..20: note = Description of Artificial Sequence: Synthetic oligonucleotide
  misc_feature 1..20: note = Target: SCN10A; (-) strand; PAM type: NRG; PAM sequence: TGG
  source 1..20: mol_type = other DNA
atctggtggtggtggtagga

SEQ ID NO: 26204 - DNA, 20 bp, synthetic construct
  misc_feature 1..20: note = Description of Artificial Sequence: Synthetic oligonucleotide
  misc_feature 1..20: note = Target: SCN10A; (-) strand; PAM type: NRG; PAM sequence: AGG
  source 1..20: mol_type = other DNA
ctaaatctggtggtggtggt

SEQ ID NO: 26205 - DNA, 20 bp, synthetic construct
  misc_feature 1..20: note = Description of Artificial Sequence: Synthetic oligonucleotide
  misc_feature 1..20: note = Target: SCN10A; (-) strand; PAM type: NRG; PAM sequence: TAG
  source 1..20: mol_type = other DNA
gctaaatctggtggtggtgg

SEQ ID NO: 26206 - DNA, 20 bp, synthetic construct
  misc_feature 1..20: note = Description of Artificial Sequence: Synthetic oligonucleotide
  misc_feature 1..20: note = Target: SCN10A; (-) strand; PAM type: NRG; PAM sequence: TGG
  source 1..20: mol_type = other DNA
atggctaaatctggtggtgg

SEQ ID NO: 26207 - DNA, 20 bp, synthetic construct
  misc_feature 1..20: note = Description of Artificial Sequence: Synthetic oligonucleotide
  misc_feature 1..20: note = Target: SCN10A; (-) strand; PAM type: NRG; PAM sequence: TGG
  source 1..20: mol_type = other DNA
agcatggctaaatctggtgg

SEQ ID NO: 26208 - DNA, 20 bp, synthetic construct
  misc_feature 1..20: note = Description of Artificial Sequence: Synthetic oligonucleotide
  misc_feature 1..20: note = Target: SCN10A; (-) strand; PAM type: NRG; PAM sequence: TGG
  source 1..20: mol_type = other DNA
ggcagcatggctaaatctgg

SEQ ID NO: 26209 - DNA, 20 bp, synthetic construct
  misc_feature 1..20: note = Description of Artificial Sequence: Synthetic oligonucleotide
  misc_feature 1..20: note = Target: SCN10A; (-) strand; PAM type: NRG; PAM sequence: TGG
  source 1..20: mol_type = other DNA
gagggcagcatggctaaatc

SEQ ID NO: 26210 - DNA, 20 bp, synthetic construct
  misc_feature 1..20: note = Description of Artificial Sequence: Synthetic oligonucleotide
  misc_feature 1..20: note = Target: SCN10A; (-) strand; PAM type: NRG; PAM sequence: TGG
  source 1..20: mol_type = other DNA
aatgaggagagagggcagca

SEQ ID NO: 26211 - DNA, 20 bp, synthetic construct
  misc_feature 1..20: note = Description of Artificial Sequence: Synthetic oligonucleotide
  misc_feature 1..20: note = Target: SCN10A; (-) strand; PAM type: NRG; PAM sequence: CAG
  source 1..20: mol_type = other DNA
ctggaaatgaggagagaggg

SEQ ID NO: 26212 - DNA, 20 bp, synthetic construct
  misc_feature 1..20: note = Description of Artificial Sequence: Synthetic oligonucleotide
  misc_feature 1..20: note = Target: SCN10A; (-) strand; PAM type: NRG; PAM sequence: GGG
  source 1..20: mol_type = other DNA
gtcctggaaatgaggagaga

SEQ ID NO: 26213 - DNA, 20 bp, synthetic construct
  misc_feature 1..20: note = Description of Artificial Sequence: Synthetic oligonucleotide
  misc_feature 1..20: note = Target: SCN10A; (-) strand; PAM type: NRG; PAM sequence: AGG
  source 1..20: mol_type = other DNA
ggtcctggaaatgaggagag

SEQ ID NO: 26214 - DNA, 20 bp, synthetic construct
  misc_feature 1..20: note = Description of Artificial Sequence: Synthetic oligonucleotide
  misc_feature 1..20: note = Target: SCN10A; (-) strand; PAM type: NRG; PAM sequence: GAG
  source 1..20: mol_type = other DNA
tggtcctggaaatgaggaga

SEQ ID NO: 26215 - DNA, 20 bp, synthetic construct
  misc_feature 1..20: note = Description of Artificial Sequence: Synthetic oligonucleotide
  misc_feature 1..20: note = Target: SCN10A; (-) strand; PAM type: NRG; PAM sequence: GAG
  source 1..20: mol_type = other DNA
agtggtcctggaaatgagga

SEQ ID NO: 26216 - DNA, 20 bp, synthetic construct
  misc_feature 1..20: note = Description of Artificial Sequence: Synthetic oligonucleotide
  misc_feature 1..20: note = Target: SCN10A; (-) strand; PAM type: NRG; PAM sequence: GAG
  source 1..20: mol_type = other DNA
tcagtggtcctggaaatgag

SEQ ID NO: 26217 - DNA, 20 bp, synthetic construct
  misc_feature 1..20: note = Description of Artificial Sequence: Synthetic oligonucleotide
  misc_feature 1..20: note = Target: SCN10A; (-) strand; PAM type: NRG; PAM sequence: AGG
  source 1..20: mol_type = other DNA
actcagtggtcctggaaatg

SEQ ID NO: 26218 - DNA, 20 bp, synthetic construct
  misc_feature 1..20: note = Description of Artificial Sequence: Synthetic oligonucleotide
  misc_feature 1..20: note = Target: SCN10A; (-) strand; PAM type: NRG; PAM sequence: GAG
  source 1..20: mol_type = other DNA
aactcagtggtcctggaaat

SEQ ID NO: 26219 - DNA, 20 bp, synthetic construct
  misc_feature 1..20: note = Description of Artificial Sequence: Synthetic oligonucleotide
  misc_feature 1..20: note = Target: SCN10A; (-) strand; PAM type: NRG; PAM sequence: TGG
  source 1..20: mol_type = other DNA
tgcctggaactcagtggtcc

SEQ ID NO: 26220 - DNA, 20 bp, synthetic construct
  misc_feature 1..20: note = Description of Artificial Sequence: Synthetic oligonucleotide
  misc_feature 1..20: note = Target: SCN10A; (-) strand; PAM type: NRG; PAM sequence: TGG
  source 1..20: mol_type = other DNA
ggagagtgcctggaactcag

SEQ ID NO: 26221 - DNA, 20 bp, synthetic construct
  misc_feature 1..20: note = Description of Artificial Sequence: Synthetic oligonucleotide
  misc_feature 1..20: note = Target: SCN10A; (-) strand; PAM type: NRG; PAM sequence: CAG
  source 1..20: mol_type = other DNA
atgggagagtgcctggaact

SEQ ID NO: 26222 - DNA, 20 bp, synthetic construct
  misc_feature 1..20: note = Description of Artificial Sequence: Synthetic oligonucleotide
  misc_feature 1..20: note = Target: SCN10A; (-) strand; PAM type: NRG; PAM sequence: TGG
  source 1..20: mol_type = other DNA
gatgaatatgggagagtgcc

SEQ ID NO: 26223 - DNA, 20 bp, synthetic construct
  misc_feature 1..20: note = Description of Artificial Sequence: Synthetic oligonucleotide
  misc_feature 1..20: note = Target: SCN10A; (-) strand; PAM type: NRG; PAM sequence: GAG
  source 1..20: mol_type = other DNA
agtctttgatgaatatggga

SEQ ID NO: 26224 - DNA, 20 bp, synthetic construct
  misc_feature 1..20: note = Description of Artificial Sequence: Synthetic oligonucleotide
  misc_feature 1..20: note = Target: SCN10A; (-) strand; PAM type: NRG; PAM sequence: GAG
  source 1..20: mol_type = other DNA
aaagtctttgatgaatatgg

SEQ ID NO: 26225 - DNA, 20 bp, synthetic construct
  misc_feature 1..20: note = Description of Artificial Sequence: Synthetic oligonucleotide
  misc_feature 1..20: note = Target: SCN10A; (-) strand; PAM type: NRG; PAM sequence: GGG
  source 1..20: mol_type = other DNA
ccaaagtctttgatgaatat

SEQ ID NO: 26226 - DNA, 20 bp, synthetic construct
  misc_feature 1..20: note = Description of Artificial Sequence: Synthetic oligonucleotide
  misc_feature 1..20: note = Target: SCN10A; (-) strand; PAM type: NRG; PAM sequence: TGG
  source 1..20: mol_type = other DNA
accaaagtctttgatgaata

SEQ ID NO: 26227 - DNA, 20 bp, synthetic construct
  misc_feature 1..20: note = Description of Artificial Sequence: Synthetic oligonucleotide
  misc_feature 1..20: note = Target: SCN10A; (-) strand; PAM type: NRG; PAM sequence: AAG
  source 1..20: mol_type = other DNA
ataaagtagactataaacca

SEQ ID NO: 26228 - DNA, 20 bp, synthetic construct
  misc_feature 1..20: note = Description of Artificial Sequence: Synthetic oligonucleotide
  misc_feature 1..20: note = Target: SCN10A; (-) strand; PAM type: NRG; PAM sequence: TAG
  source 1..20: mol_type = other DNA
gcatgagacttaagataaag

SEQ ID NO: 26229 - DNA, 20 bp, synthetic construct
  misc_feature 1..20: note = Description of Artificial Sequence: Synthetic oligonucleotide
  misc_feature 1..20: note = Target: SCN10A; (-) strand; PAM type: NRG; PAM sequence: AAG
  source 1..20: mol_type = other DNA
gtagcatgagacttaagata

SEQ ID NO: 26230 - DNA, 20 bp, synthetic construct
  misc_feature 1..20: note = Description of Artificial Sequence: Synthetic oligonucleotide
  misc_feature 1..20: note = Target: SCN10A; (-) strand; PAM type: NRG; PAM sequence: AAG
  source 1..20: mol_type = other DNA
aagaaagtagcatgagactt

SEQ ID NO: 26231 - DNA, 20 bp, synthetic construct
  misc_feature 1..20: note = Description of Artificial Sequence: Synthetic oligonucleotide
  misc_feature 1..20: note = Target: SCN10A; (-) strand; PAM type: NRG; PAM sequence: GAG
  source 1..20: mol_type = other DNA
ttgtgataagaaagtagcat

SEQ ID NO: 26232 - DNA, 20 bp, synthetic construct
  misc_feature 1..20: note = Description of Artificial Sequence: Synthetic oligonucleotide
  misc_feature 1..20: note = Target: SCN10A; (-) strand; PAM type: NRG; PAM sequence: TAG
  source 1..20: mol_type = other DNA
aaaagattgtgataagaaag

SEQ ID NO: 26233 - DNA, 20 bp, synthetic construct
  misc_feature 1..20: note = Description of Artificial Sequence: Synthetic oligonucleotide
  misc_feature 1..20: note = Target: SCN10A; (-) strand; PAM type: NRG; PAM sequence: AAG
  source 1..20: mol_type = other DNA
aataaaagattgtgataaga

SEQ ID NO: 26234 - DNA, 20 bp, synthetic construct
  misc_feature 1..20: note = Description of Artificial Sequence: Synthetic oligonucleotide
  misc_feature 1..20: note = Target: SCN10A; (-) strand; PAM type: NRG; PAM sequence: AAG
  source 1..20: mol_type = other DNA
aataaataaaagattgtgat

SEQ ID NO: 26235 - DNA, 20 bp, synthetic construct
  misc_feature 1..20: note = Description of Artificial Sequence: Synthetic oligonucleotide
  misc_feature 1..20: note = Target: SCN10A; (-) strand; PAM type: NRG; PAM sequence: AAG
  source 1..20: mol_type = other DNA
ttgacaatgtcaataaataa

SEQ ID NO: 26236 - DNA, 20 bp, synthetic construct
  misc_feature 1..20: note = Description of Artificial Sequence: Synthetic oligonucleotide
  misc_feature 1..20: note = Target: SCN10A; (-) strand; PAM type: NRG; PAM sequence: GAG
  source 1..20: mol_type = other DNA
aaatgaaattcaaacaggtg

SEQ ID NO: 26237 - DNA, 20 bp, synthetic construct
  misc_feature 1..20: note = Description of Artificial Sequence: Synthetic oligonucleotide
  misc_feature 1..20: note = Target: SCN10A; (-) strand; PAM type: NRG; PAM sequence: TGG
  source 1..20: mol_type = other DNA
ccaaatgaaattcaaacagg

SEQ ID NO: 26238 - DNA, 20 bp, synthetic construct
  misc_feature 1..20: note = Description of Artificial Sequence: Synthetic oligonucleotide
  misc_feature 1..20: note = Target: SCN10A; (-) strand; PAM type: NRG; PAM sequence: AGG
  source 1..20: mol_type = other DNA
ggtccaaatgaaattcaaac

SEQ ID NO: 26239 - DNA, 20 bp, synthetic construct
  misc_feature 1..20: note = Description of Artificial Sequence: Synthetic oligonucleotide
  misc_feature 1..20: note = Target: SCN10A; (-) strand; PAM type: NRG; PAM sequence: CAG
  source 1..20: mol_type = other DNA
aggtccaaatgaaattcaaa

SEQ ID NO: 26240 - DNA, 20 bp, synthetic construct
  misc_feature 1..20: note = Description of Artificial Sequence: Synthetic oligonucleotide
  misc_feature 1..20: note = Target: SCN10A; (-) strand; PAM type: NRG; PAM sequence: AGG
  source 1..20: mol_type = other DNA
ggagttctccagtaacttgg

SEQ ID NO: 26241 - DNA, 20 bp, synthetic construct
  misc_feature 1..20: note = Description of Artificial Sequence: Synthetic oligonucleotide
  misc_feature 1..20: note = Target: SCN10A; (-) strand; PAM type: NRG; PAM sequence: GAG
  source 1..20: mol_type = other DNA
tggagttctccagtaacttg

SEQ ID NO: 26242 - DNA, 20 bp, synthetic construct
  misc_feature 1..20: note = Description of Artificial Sequence: Synthetic oligonucleotide
  misc_feature 1..20: note = Target: SCN10A; (-) strand; PAM type: NRG; PAM sequence: TGG
  source 1..20: mol_type = other DNA
tctggagttctccagtaact

SEQ ID NO: 26243 - DNA, 20 bp, synthetic construct
  misc_feature 1..20: note = Description of Artificial Sequence: Synthetic oligonucleotide
  misc_feature 1..20: note = Target: SCN10A; (-) strand; PAM type: NRG; PAM sequence: CAG
  source 1..20: mol_type = other DNA
tccaataatctggagttctc

SEQ ID NO: 26244 - DNA, 20 bp, synthetic construct
  misc_feature 1..20: note = Description of Artificial Sequence: Synthetic oligonucleotide
  misc_feature 1..20: note = Target: SCN10A; (-) strand; PAM type: NRG; PAM sequence: GAG
  source 1..20: mol_type = other DNA
tgaaattctccaataatctg

SEQ ID NO: 26245 - DNA, 20 bp, synthetic construct
  misc_feature 1..20: note = Description of Artificial Sequence: Synthetic oligonucleotide
  misc_feature 1..20: note = Target: SCN10A; (-) strand; PAM type: NRG; PAM sequence: TGG
  source 1..20: mol_type = other DNA
aatgaaattctccaataatc

SEQ ID NO: 26246 - DNA, 20 bp, synthetic construct
  misc_feature 1..20: note = Description of Artificial Sequence: Synthetic oligonucleotide
  misc_feature 1..20: note = Target: SCN10A; (-) strand; PAM type: NRG; PAM sequence: AGG
  source 1..20: mol_type = other DNA
ggaggtcccagagaaattgg

SEQ ID NO: 26247 - DNA, 20 bp, synthetic construct
  misc_feature 1..20: note = Description of Artificial Sequence: Synthetic oligonucleotide
  misc_feature 1..20: note = Target: SCN10A; (-) strand; PAM type: NRG; PAM sequence: GAG
  source 1..20: mol_type = other DNA
tggaggtcccagagaaattg

SEQ ID NO: 26248 - DNA, 20 bp, synthetic construct
  misc_feature 1..20: note = Description of Artificial Sequence: Synthetic oligonucleotide
  misc_feature 1..20: note = Target: SCN10A; (-) strand; PAM type: NRG; PAM sequence: TGG
  source 1..20: mol_type = other DNA
cctggaggtcccagagaaat

SEQ ID NO: 26249 - DNA, 20 bp, synthetic construct
  misc_feature 1..20: note = Description of Artificial Sequence: Synthetic oligonucleotide
  misc_feature 1..20: note = Target: SCN10A; (-) strand; PAM type: NRG; PAM sequence: GAG
  source 1..20: mol_type = other DNA
gactgaacctggaggtccca

SEQ ID NO: 26250 - DNA, 20 bp, synthetic construct
  misc_feature 1..20: note = Description of Artificial Sequence: Synthetic oligonucleotide
  misc_feature 1..20: note = Target: SCN10A; (-) strand; PAM type: NRG; PAM sequence: CAG
  source 1..20: mol_type = other DNA
cagactgaacctggaggtcc

SEQ ID NO: 26251 - DNA, 20 bp, synthetic construct
  misc_feature 1..20: note = Description of Artificial Sequence: Synthetic oligonucleotide
  misc_feature 1..20: note = Target: SCN10A; (-) strand; PAM type: NRG; PAM sequence: AGG
  source 1..20: mol_type = other DNA
cagccacagactgaacctgg

SEQ ID NO: 26252 - DNA, 20 bp, synthetic construct
  misc_feature 1..20: note = Description of Artificial Sequence: Synthetic oligonucleotide
  misc_feature 1..20: note = Target: SCN10A; (-) strand; PAM type: NRG; PAM sequence: GAG
  source 1..20: mol_type = other DNA
tcagccacagactgaacctg

SEQ ID NO: 26253 - DNA, 20 bp, synthetic construct
  misc_feature 1..20: note = Description of Artificial Sequence: Synthetic oligonucleotide
  misc_feature 1..20: note = Target: SCN10A; (-) strand; PAM type: NRG; PAM sequence: TGG
  source 1..20: mol_type = other DNA
gttcagccacagactgaacc

SEQ ID NO: 26254 - DNA, 20 bp, synthetic construct
  misc_feature 1..20: note = Description of Artificial Sequence: Synthetic oligonucleotide
  misc_feature 1..20: note = Target: SCN10A; (-) strand; PAM type: NRG; PAM sequence: CAG
  source 1..20: mol_type = other DNA
tggggaaaagtgttcagcca

SEQ ID NO: 26255 - DNA, 20 bp, synthetic construct
  misc_feature 1..20: note = Description of Artificial Sequence: Synthetic oligonucleotide
  misc_feature 1..20: note = Target: SCN10A; (-) strand; PAM type: NRG; PAM sequence: CAG
  source 1..20: mol_type = other DNA
tggttatggggaaaagtgtt

SEQ ID NO: 26256 - DNA, 20 bp, synthetic construct
  misc_feature 1..20: note = Description of Artificial Sequence: Synthetic oligonucleotide
  misc_feature 1..20: note = Target: SCN10A; (-) strand; PAM type: NRG; PAM sequence: AAG
  source 1..20: mol_type = other DNA
tctaatctggttatggggaa

SEQ ID NO: 26257 - DNA, 20 bp, synthetic construct
  misc_feature 1..20: note = Description of Artificial Sequence: Synthetic oligonucleotide
  misc_feature 1..20: note = Target: SCN10A; (-) strand; PAM type: NRG; PAM sequence: GGG
  source 1..20: mol_type = other DNA
acaggtctaatctggttatg

SEQ ID NO: 26258 - DNA, 20 bp, synthetic construct
  misc_feature 1..20: note = Description of Artificial Sequence: Synthetic oligonucleotide
  misc_feature 1..20: note = Target: SCN10A; (-) strand; PAM type: NRG; PAM sequence: GGG
  source 1..20: mol_type = other DNA
cacaggtctaatctggttat

SEQ ID NO: 26259 - DNA, 20 bp, synthetic construct
  misc_feature 1..20: note = Description of Artificial Sequence: Synthetic oligonucleotide
  misc_feature 1..20: note = Target: SCN10A; (-) strand; PAM type: NRG; PAM sequence: TGG
  source 1..20: mol_type = other DNA
ccacaggtctaatctggtta

SEQ ID NO: 26260 - DNA, 20 bp, synthetic construct
  misc_feature 1..20: note = Description of Artificial Sequence: Synthetic oligonucleotide
  misc_feature 1..20: note = Target: SCN10A; (-) strand; PAM type: NRG; PAM sequence: TGG
  source 1..20: mol_type = other DNA
tgtggaccacaggtctaatc

SEQ ID NO: 26261 - DNA, 20 bp, synthetic construct
  misc_feature 1..20: note = Description of Artificial Sequence: Synthetic oligonucleotide
  misc_feature 1..20: note = Target: SCN10A; (-) strand; PAM type: NRG; PAM sequence: AGG
  source 1..20: mol_type = other DNA
gtggcaaaattgtggaccac

SEQ ID NO: 26262 - DNA, 20 bp, synthetic construct
  misc_feature 1..20: note = Description of Artificial Sequence: Synthetic oligonucleotide
  misc_feature 1..20: note = Target: SCN10A; (-) strand; PAM type: NRG; PAM sequence: CAG
  source 1..20: mol_type = other DNA
agtggcaaaattgtggacca

SEQ ID NO: 26263 - DNA, 20 bp, synthetic construct
  misc_feature 1..20: note = Description of Artificial Sequence: Synthetic oligonucleotide
  misc_feature 1..20: note = Target: SCN10A; (-) strand; PAM type: NRG; PAM sequence: TGG
  source 1..20: mol_type = other DNA
gtgagggagtggcaaaattg

SEQ ID NO: 26264 - DNA, 20 bp, synthetic construct
  misc_feature 1..20: note = Description of Artificial Sequence: Synthetic oligonucleotide
  misc_feature 1..20: note = Target: SCN10A; (-) strand; PAM type: NRG; PAM sequence: TGG
  source 1..20: mol_type = other DNA
ttaggataagggtgagggag

SEQ ID NO: 26265 - DNA, 20 bp, synthetic construct
  misc_feature 1..20: note = Description of Artificial Sequence: Synthetic oligonucleotide
  misc_feature 1..20: note = Target: SCN10A; (-) strand; PAM type: NRG; PAM sequence: GAG
  source 1..20: mol_type = other DNA
gatttaggataagggtgagg

SEQ ID NO: 26266 - DNA, 20 bp, synthetic construct
  misc_feature 1..20: note = Description of Artificial Sequence: Synthetic oligonucleotide
  misc_feature 1..20: note = Target: SCN10A; (-) strand; PAM type: NRG; PAM sequence: GGG
  source 1..20: mol_type = other DNA
gggatttaggataagggtga

SEQ ID NO: 26267 - DNA, 20 bp, synthetic construct
  misc_feature 1..20: note = Description of Artificial Sequence: Synthetic oligonucleotide
  misc_feature 1..20: note = Target: SCN10A; (-) strand; PAM type: NRG; PAM sequence: AGG
  source 1..20: mol_type = other DNA
tgggatttaggataagggtg

SEQ ID NO: 26268 - DNA, 20 bp, synthetic construct
  misc_feature 1..20: note = Description of Artificial Sequence: Synthetic oligonucleotide
  misc_feature 1..20: note = Target: SCN10A; (-) strand; PAM type: NRG; PAM sequence: GAG
  source 1..20: mol_type = other DNA
ttgggatttaggataagggt

SEQ ID NO: 26269 - DNA, 20 bp, synthetic construct
  misc_feature 1..20: note = Description of Artificial Sequence: Synthetic oligonucleotide
  misc_feature 1..20: note = Target: SCN10A; (-) strand; PAM type: NRG; PAM sequence: GGG
  source 1..20: mol_type = other DNA
agccttgggatttaggataa

SEQ ID NO: 26270 - DNA, 20 bp, synthetic construct
  misc_feature 1..20: note = Description of Artificial Sequence: Synthetic oligonucleotide
  misc_feature 1..20: note = Target: SCN10A; (-) strand; PAM type: NRG; PAM sequence: AGG
  source 1..20: mol_type = other DNA
tagccttgggatttaggata

SEQ ID NO: 26271 - DNA, 20 bp, synthetic construct
  misc_feature 1..20: note = Description of Artificial Sequence: Synthetic oligonucleotide
  misc_feature 1..20: note = Target: SCN10A; (-) strand; PAM type: NRG; PAM sequence: AAG
  source 1..20: mol_type = other DNA
ttagccttgggatttaggat

SEQ ID NO: 26272 - DNA, 20 bp, synthetic construct
  misc_feature 1..20: note = Description of Artificial Sequence: Synthetic oligonucleotide
  misc_feature 1..20: note = Target: SCN10A; (-) strand; PAM type: NRG; PAM sequence: AGG
  source 1..20: mol_type = other DNA
ttgacttagccttgggattt

SEQ ID NO: 26273 - DNA, 20 bp, synthetic construct
  misc_feature 1..20: note = Description of Artificial Sequence: Synthetic oligonucleotide
  misc_feature 1..20: note = Target: SCN10A; (-) strand; PAM type: NRG; PAM sequence: TAG
  source 1..20: mol_type = other DNA
attgacttagccttgggatt

SEQ ID NO: 26274 - DNA, 20 bp, synthetic construct
  misc_feature 1..20: note = Description of Artificial Sequence: Synthetic oligonucleotide
  misc_feature 1..20: note = Target: SCN10A; (-) strand; PAM type: NRG; PAM sequence: GGG
  source 1..20: mol_type = other DNA
ttctagattgacttagcctt

SEQ ID NO: 26275 - DNA, 20 bp, synthetic construct
  misc_feature 1..20: note = Description of Artificial Sequence: Synthetic oligonucleotide
  misc_feature 1..20: note = Target: SCN10A; (-) strand; PAM type: NRG; PAM sequence: TGG
  source 1..20: mol_type = other DNA
gttctagattgacttagcct

SEQ ID NO: 26276 - DNA, 20 bp, synthetic construct
  misc_feature 1..20: note = Description of Artificial Sequence: Synthetic oligonucleotide
  misc_feature 1..20: note = Target: SCN10A; (-) strand; PAM type: NRG; PAM sequence: TAG
  source 1..20: mol_type = other DNA
ggaactgttctagattgact

SEQ ID NO: 26277 - DNA, 20 bp, synthetic construct
  misc_feature 1..20: note = Description of Artificial Sequence: Synthetic oligonucleotide
  misc_feature 1..20: note = Target: SCN10A; (-) strand; PAM type: NRG; PAM sequence: TAG
  source 1..20: mol_type = other DNA
gcagttcaggggaactgttc

SEQ ID NO: 26278 - DNA, 20 bp, synthetic construct
  misc_feature 1..20: note = Description of Artificial Sequence: Synthetic oligonucleotide
  misc_feature 1..20: note = Target: SCN10A; (-) strand; PAM type: NRG; PAM sequence: GGG
  source 1..20: mol_type = other DNA
ataacccctcagcagttcag

SEQ ID NO: 26279 - DNA, 20 bp, synthetic construct
  misc_feature 1..20: note = Description of Artificial Sequence: Synthetic oligonucleotide
  misc_feature 1..20: note = Target: SCN10A; (-) strand; PAM type: NRG; PAM sequence: GGG
  source 1..20: mol_type = other DNA
cataacccctcagcagttca

SEQ ID NO: 26280 - DNA, 20 bp, synthetic construct
  misc_feature 1..20: note = Description of Artificial Sequence: Synthetic oligonucleotide
  misc_feature 1..20: note = Target: SCN10A; (-) strand; PAM type: NRG; PAM sequence: AGG
  source 1..20: mol_type = other DNA
ccataacccctcagcagttc

SEQ ID NO: 26281 - DNA, 20 bp, synthetic construct
  misc_feature 1..20: note = Description of Artificial Sequence: Synthetic oligonucleotide
  misc_feature 1..20: note = Target: SCN10A; (-) strand; PAM type: NRG; PAM sequence: CAG
  source 1..20: mol_type = other DNA
cccataacccctcagcagtt

SEQ ID NO: 26282 - DNA, 20 bp, synthetic construct
  misc_feature 1..20: note = Description of Artificial Sequence: Synthetic oligonucleotide
  misc_feature 1..20: note = Target: SCN10A; (-) strand; PAM type: NRG; PAM sequence: CAG
  source 1..20: mol_type = other DNA
ggttccccataacccctcag

SEQ ID NO: 26283 - DNA, 20 bp, synthetic construct
  misc_feature 1..20: note = Description of Artificial Sequence: Synthetic oligonucleotide
  misc_feature 1..20: note = Target: SCN10A; (-) strand; PAM type: NRG; PAM sequence: CAG
  source 1..20: mol_type = other DNA
tgaggttccccataacccct

SEQ ID NO: 26284 - DNA, 20 bp, synthetic construct
  misc_feature 1..20: note = Description of Artificial Sequence: Synthetic oligonucleotide
  misc_feature 1..20: note = Target: SCN10A; (-) strand; PAM type: NRG; PAM sequence: AGG
  source 1..20: mol_type = other DNA
atgattcccaggcaatactg

SEQ ID NO: 26285 - DNA, 20 bp, synthetic construct
  misc_feature 1..20: note = Description of Artificial Sequence: Synthetic oligonucleotide
  misc_feature 1..20: note = Target: SCN10A; (-) strand; PAM type: NRG; PAM sequence: GAG
  source 1..20: mol_type = other DNA
tatgattcccaggcaatact

SEQ ID NO: 26286 - DNA, 20 bp, synthetic construct
  misc_feature 1..20: note = Description of Artificial Sequence: Synthetic oligonucleotide
  misc_feature 1..20: note = Target: SCN10A; (-) strand; PAM type: NRG; PAM sequence: AGG
  source 1..20: mol_type = other DNA
agggataccatatgattccc

SEQ ID NO: 26287 - DNA, 20 bp, synthetic construct
  misc_feature 1..20: note = Description of Artificial Sequence: Synthetic oligonucleotide
  misc_feature 1..20: note = Target: SCN10A; (-) strand; PAM type: NRG; PAM sequence: CAG
  source 1..20: mol_type = other DNA
tagggataccatatgattcc

SEQ ID NO: 26288 - DNA, 20 bp, synthetic construct
  misc_feature 1..20: note = Description of Artificial Sequence: Synthetic oligonucleotide
  misc_feature 1..20: note = Target: SCN10A; (-) strand; PAM type: NRG; PAM sequence: GGG
  source 1..20: mol_type = other DNA
ctagaagaaactgctgacta

SEQ ID NO: 26289 - DNA, 20 bp, synthetic construct
  misc_feature 1..20: note = Description of Artificial Sequence: Synthetic oligonucleotide
  misc_feature 1..20: note = Target: SCN10A; (-) strand; PAM type: NRG; PAM sequence: AGG
  source 1..20: mol_type = other DNA
actagaagaaactgctgact

SEQ ID NO: 26290 - DNA, 20 bp, synthetic construct
  misc_feature 1..20: note = Description of Artificial Sequence: Synthetic oligonucleotide
  misc_feature 1..20: note = Target: SCN10A; (-) strand; PAM type: NRG; PAM sequence: TAG
  source 1..20: mol_type = other DNA
gactagaagaaactgctgac

SEQ ID NO: 26291 - DNA, 20 bp, synthetic construct
  misc_feature 1..20: note = Description of Artificial Sequence: Synthetic oligonucleotide
  misc_feature 1..20: note = Target: SCN10A; (-) strand; PAM type: NRG; PAM sequence: AAG
  source 1..20: mol_type = other DNA
tatttgaaacctcagactag

SEQ ID NO: 26292 - DNA, 20 bp, synthetic construct
  misc_feature 1..20: note = Description of Artificial Sequence: Synthetic oligonucleotide
  misc_feature 1..20: note = Target: SCN10A; (-) strand; PAM type: NRG; PAM sequence: TAG
  source 1..20: mol_type = other DNA
gtgtatttgaaacctcagac

SEQ ID NO: 26293 - DNA, 20 bp, synthetic construct
  misc_feature 1..20: note = Description of Artificial Sequence: Synthetic oligonucleotide
  misc_feature 1..20: note = Target: SCN10A; (-) strand; PAM type: NRG; PAM sequence: CAG
  source 1..20: mol_type = other DNA
aaagagtgtatttgaaacct

SEQ ID NO: 26294 - DNA, 20 bp, synthetic construct
  misc_feature 1..20: note = Description of Artificial Sequence: Synthetic oligonucleotide
  misc_feature 1..20: note = Target: SCN10A; (-) strand; PAM type: NRG; PAM sequence: GAG
  source 1..20: mol_type = other DNA
gacagggaatagtgagaaaa

SEQ ID NO: 26295 - DNA, 20 bp, synthetic construct
  misc_feature 1..20: note = Description of Artificial Sequence: Synthetic oligonucleotide
  misc_feature 1..20: note = Target: SCN10A; (-) strand; PAM type: NRG; PAM sequence: AAG
  source 1..20: mol_type = other DNA
aagacagggaatagtgagaa

SEQ ID NO: 26296 - DNA, 20 bp, synthetic construct
  misc_feature 1..20: note = Description of Artificial Sequence: Synthetic oligonucleotide
  misc_feature 1..20: note = Target: SCN10A; (-) strand; PAM type: NRG; PAM sequence: GAG
  source 1..20: mol_type = other DNA
aagggaagacagggaatagt

SEQ ID NO: 26297 - DNA, 20 bp, synthetic construct
  misc_feature 1..20: note = Description of Artificial Sequence: Synthetic oligonucleotide
  misc_feature 1..20: note = Target: SCN10A; (-) strand; PAM type: NRG; PAM sequence: TAG
  source 1..20: mol_type = other DNA
ctgcaagggaagacagggaa

SEQ ID NO: 26298 - DNA, 20 bp, synthetic construct
  misc_feature 1..20: note = Description of Artificial Sequence: Synthetic oligonucleotide
  misc_feature 1..20: note = Target: SCN10A; (-) strand; PAM type: NRG; PAM sequence: GGG
  source 1..20: mol_type = other DNA
gcttactgcaagggaagaca

SEQ ID NO: 26299 - DNA, 20 bp, synthetic construct
  misc_feature 1..20: note = Description of Artificial Sequence: Synthetic oligonucleotide
  misc_feature 1..20: note = Target: SCN10A; (-) strand; PAM type: NRG; PAM sequence: AGG
  source 1..20: mol_type = other DNA
ggcttactgcaagggaagac

SEQ ID NO: 26300 - DNA, 20 bp, synthetic construct
  misc_feature 1..20: note = Description of Artificial Sequence: Synthetic oligonucleotide
  misc_feature 1..20: note = Target: SCN10A; (-) strand; PAM type: NRG; PAM sequence: CAG
  source 1..20: mol_type = other DNA
tggcttactgcaagggaaga

SEQ ID NO: 26301 - DNA, 20 bp, synthetic construct
  misc_feature 1..20: note = Description of Artificial Sequence: Synthetic oligonucleotide
  misc_feature 1..20: note = Target: SCN10A; (-) strand; PAM type: NRG; PAM sequence: AAG
  source 1..20: mol_type = other DNA
tcattggcttactgcaaggg

SEQ ID NO: 26302 - DNA, 20 bp, synthetic construct
  misc_feature 1..20: note = Description of Artificial Sequence: Synthetic oligonucleotide
  misc_feature 1..20: note = Target: SCN10A; (-) strand; PAM type: NRG; PAM sequence: GGG
  source 1..20: mol_type = other DNA
tggtcattggcttactgcaa

SEQ ID NO: 26303 - DNA, 20 bp, synthetic construct
  misc_feature 1..20: note = Description of Artificial Sequence: Synthetic oligonucleotide
  misc_feature 1..20: note = Target: SCN10A; (-) strand; PAM type: NRG; PAM sequence: AGG
  source 1..20: mol_type = other DNA
atggtcattggcttactgca

SEQ ID NO: 26304 - DNA, 20 bp, synthetic construct
  misc_feature 1..20: note = Description of Artificial Sequence: Synthetic oligonucleotide
  misc_feature 1..20: note = Target: SCN10A; (-) strand; PAM type: NRG; PAM sequence: AAG
  source 1..20: mol_type = other DNA
tatggtcattggcttactgc

SEQ ID NO: 26305 - DNA, 20 bp, synthetic construct
  misc_feature 1..20: note = Description of Artificial Sequence: Synthetic oligonucleotide
  misc_feature 1..20: note = Target: SCN10A; (-) strand; PAM type: NRG; PAM sequence: TGG
  source 1..20: mol_type = other DNA
gaactaggaaatatggtcat

SEQ ID NO: 26306 - DNA, 20 bp, synthetic construct
  misc_feature 1..20: note = Description of Artificial Sequence: Synthetic oligonucleotide
  misc_feature 1..20: note = Target: SCN10A; (-) strand; PAM type: NRG; PAM sequence: TGG
  source 1..20: mol_type = other DNA
tctccatgaactaggaaata

SEQ ID NO: 26307 - DNA, 20 bp, synthetic construct
  misc_feature 1..20: note = Description of Artificial Sequence: Synthetic oligonucleotide
  misc_feature 1..20: note = Target: SCN10A; (-) strand; PAM type: NRG; PAM sequence: AGG
  source 1..20: mol_type = other DNA
tctgtttttctccatgaact

SEQ ID NO: 26308 - DNA, 20 bp, synthetic construct
  misc_feature 1..20: note = Description of Artificial Sequence: Synthetic oligonucleotide
  misc_feature 1..20: note = Target: SCN10A; (-) strand; PAM type: NRG; PAM sequence: TAG
  source 1..20: mol_type = other DNA
ttctgtttttctccatgaac

SEQ ID NO: 26309 - DNA, 20 bp, synthetic construct
  misc_feature 1..20: note = Description of Artificial Sequence: Synthetic oligonucleotide
  misc_feature 1..20: note = Target: SCN10A; (-) strand; PAM type: NRG; PAM sequence: GAG
  source 1..20: mol_type = other DNA
ttgatggtatgaagttggca

SEQ ID NO: 26310 - DNA, 20 bp, synthetic construct
  misc_feature 1..20: note = Description of Artificial Sequence: Synthetic oligonucleotide
  misc_feature 1..20: note = Target: SCN10A; (-) strand; PAM type: NRG; PAM sequence: CAG
  source 1..20: mol_type = other DNA
gtttgatggtatgaagttgg

SEQ ID NO: 26311 - DNA, 20 bp, synthetic construct
  misc_feature 1..20: note = Description of Artificial Sequence: Synthetic oligonucleotide
  misc_feature 1..20: note = Target: SCN10A; (-) strand; PAM type: NRG; PAM sequence: TGG
  source 1..20: mol_type = other DNA
gaggtttgatggtatgaagt

SEQ ID NO: 26312 - DNA, 20 bp, synthetic construct
  misc_feature 1..20: note = Description of Artificial Sequence: Synthetic oligonucleotide
  misc_feature 1..20: note = Target: SCN10A; (-) strand; PAM type: NRG; PAM sequence: AAG
  source 1..20: mol_type = other DNA
gttggaggtttgatggtatg

SEQ ID NO: 26313 - DNA, 20 bp, synthetic construct
  misc_feature 1..20: note = Description of Artificial Sequence: Synthetic oligonucleotide
  misc_feature 1..20: note = Target: SCN10A; (-) strand; PAM type: NRG; PAM sequence: TGG
  source 1..20: mol_type = other DNA
caggtgagttggaggtttga

SEQ ID NO: 26314 - DNA, 20 bp, synthetic construct
  misc_feature 1..20: note = Description of Artificial Sequence: Synthetic oligonucleotide
  misc_feature 1..20: note = Target: SCN10A; (-) strand; PAM type: NRG; PAM sequence: AGG
  source 1..20: mol_type = other DNA
tgcagacacaggtgagttgg

SEQ ID NO: 26315 - DNA, 20 bp, synthetic construct
  misc_feature 1..20: note = Description of Artificial Sequence: Synthetic oligonucleotide
  misc_feature 1..20: note = Target: SCN10A; (-) strand; PAM type: NRG; PAM sequence: GAG
  source 1..20: mol_type = other DNA
ctgcagacacaggtgagttg

SEQ ID NO: 26316 - DNA, 20 bp, synthetic construct
  misc_feature 1..20: note = Description of Artificial Sequence: Synthetic oligonucleotide
  misc_feature 1..20: note = Target: SCN10A; (-) strand; PAM type: NRG; PAM sequence: TGG
  source 1..20: mol_type = other DNA
ggctgcagacacaggtgagt

SEQ ID NO: 26317 - DNA, 20 bp, synthetic construct
  misc_feature 1..20: note = Description of Artificial Sequence: Synthetic oligonucleotide
  misc_feature 1..20: note = Target: SCN10A; (-) strand; PAM type: NRG; PAM sequence: GAG
  source 1..20: mol_type = other DNA
agaaggctgcagacacaggt

SEQ ID NO: 26318 - DNA, 20 bp, synthetic construct
  misc_feature 1..20: note = Description of Artificial Sequence: Synthetic oligonucleotide
  misc_feature 1..20: note = Target: SCN10A; (-) strand; PAM type: NRG; PAM sequence: AGG
  source 1..20: mol_type = other DNA
ggaaagaaggctgcagacac

SEQ ID NO: 26319 - DNA, 20 bp, synthetic construct
  misc_feature 1..20: note = Description of Artificial Sequence: Synthetic oligonucleotide
  misc_feature 1..20: note = Target: SCN10A; (-) strand; PAM type: NRG; PAM sequence: CAG
  source 1..20: mol_type = other DNA
aggaaagaaggctgcagaca

SEQ ID NO: 26320 - DNA, 20 bp, synthetic construct
  misc_feature 1..20: note = Description of Artificial Sequence: Synthetic oligonucleotide
  misc_feature 1..20: note = Target: SCN10A; (-) strand; PAM type: NRG; PAM sequence: CAG
  source 1..20: mol_type = other DNA
ggaaggaggaaagaaggctg

SEQ ID NO: 26321 - DNA, 20 bp, synthetic construct
  misc_feature 1..20: note = Description of Artificial Sequence: Synthetic oligonucleotide
  misc_feature 1..20: note = Target: SCN10A; (-) strand; PAM type: NRG; PAM sequence: AGG
  source 1..20: mol_type = other DNA
gagaagggaaggaggaaaga

SEQ ID NO: 26322 - DNA, 20 bp, synthetic construct
  misc_feature 1..20: note = Description of Artificial Sequence: Synthetic oligonucleotide
  misc_feature 1..20: note = Target: SCN10A; (-) strand; PAM type: NRG; PAM sequence: AAG
  source 1..20: mol_type = other DNA
agagaagggaaggaggaaag

SEQ ID NO: 26323 - DNA, 20 bp, synthetic construct
  misc_feature 1..20: note = Description of Artificial Sequence: Synthetic oligonucleotide
  misc_feature 1..20: note = Target: SCN10A; (-) strand; PAM type: NRG; PAM sequence: AAG
  source 1..20: mol_type = other DNA
gtaagagaagggaaggagga

SEQ ID NO: 26324 - DNA, 20 bp, synthetic construct
  misc_feature 1..20: note = Description of Artificial Sequence: Synthetic oligonucleotide
  misc_feature 1..20: note = Target: SCN10A; (-) strand; PAM type: NRG; PAM sequence: AGG
  source 1..20: mol_type = other DNA
tgttgtaagagaagggaagg

SEQ ID NO: 26325 - DNA, 20 bp, synthetic construct
  misc_feature 1..20: note = Description of Artificial Sequence: Synthetic oligonucleotide
  misc_feature 1..20: note = Target: SCN10A; (-) strand; PAM type: NRG; PAM sequence: GAG
  source 1..20: mol_type = other DNA
atgttgtaagagaagggaag

SEQ ID NO: 26326 - DNA, 20 bp, synthetic construct
  misc_feature 1..20: note = Description of Artificial Sequence: Synthetic oligonucleotide
  misc_feature 1..20: note = Target: SCN10A; (-) strand; PAM type: NRG; PAM sequence: AGG
  source 1..20: mol_type = other DNA
tcatgttgtaagagaaggga

SEQ ID NO: 26327 - DNA, 20 bp, synthetic construct
  misc_feature 1..20: note = Description of Artificial Sequence: Synthetic oligonucleotide
  misc_feature 1..20: note = Target: SCN10A; (-) strand; PAM type: NRG; PAM sequence: AAG
  source 1..20: mol_type = other DNA
ctcatgttgtaagagaaggg

SEQ ID NO: 26328 - DNA, 20 bp, synthetic construct
  misc_feature 1..20: note = Description of Artificial Sequence: Synthetic oligonucleotide
  misc_feature 1..20: note = Target: SCN10A; (-) strand; PAM type: NRG; PAM sequence: GGG
  source 1..20: mol_type = other DNA
cctctcatgttgtaagagaa

SEQ ID NO: 26329 - DNA, 20 bp, synthetic construct
  misc_feature 1..20: note = Description of Artificial Sequence: Synthetic oligonucleotide
  misc_feature 1..20: note = Target: SCN10A; (-) strand; PAM type: NRG; PAM sequence: AGG
  source 1..20: mol_type = other DNA
acctctcatgttgtaagaga

SEQ ID NO: 26330 - DNA, 20 bp, synthetic construct
  misc_feature 1..20: note = Description of Artificial Sequence: Synthetic oligonucleotide
  misc_feature 1..20: note = Target: SCN10A; (-) strand; PAM type: NRG; PAM sequence: AAG
  source 1..20: mol_type = other DNA
tacctctcatgttgtaagag

SEQ ID NO: 26331 - DNA, 20 bp, synthetic construct
  misc_feature 1..20: note = Description of Artificial Sequence: Synthetic oligonucleotide
  misc_feature 1..20: note = Target: SCN10A; (-) strand; PAM type: NRG; PAM sequence: GAG
  source 1..20: mol_type = other DNA
agatacctctcatgttgtaa

SEQ ID NO: 26332 - DNA, 20 bp, synthetic construct
  misc_feature 1..20: note = Description of Artificial Sequence: Synthetic oligonucleotide
  misc_feature 1..20: note = Target: SCN10A; (-) strand; PAM type: NRG; PAM sequence: AAG
  source 1..20: mol_type = other DNA
gaagatacctctcatgttgt

SEQ ID NO: 26333 - DNA, 20 bp, synthetic construct
  misc_feature 1..20: note = Description of Artificial Sequence: Synthetic oligonucleotide
  misc_feature 1..20: note = Target: SCN10A; (-) strand; PAM type: NRG; PAM sequence: AAG
  source 1..20: mol_type = other DNA
aatggtccttagaatgtagg

SEQ ID NO: 26334 - DNA, 20 bp, synthetic construct
  misc_feature 1..20: note = Description of Artificial Sequence: Synthetic oligonucleotide
  misc_feature 1..20: note = Target: SCN10A; (-) strand; PAM type: NRG; PAM sequence: AGG
  source 1..20: mol_type = other DNA
aggaatggtccttagaatgt

SEQ ID NO: 26335 - DNA, 20 bp, synthetic construct
  misc_feature 1..20: note = Description of Artificial Sequence: Synthetic oligonucleotide
  misc_feature 1..20: note = Target: SCN10A; (-) strand; PAM type: NRG; PAM sequence: TAG
  source 1..20: mol_type = other DNA
aaggaatggtccttagaatg

SEQ ID NO: 26336 - DNA, 20 bp, synthetic construct
  misc_feature 1..20: note = Description of Artificial Sequence: Synthetic oligonucleotide
  misc_feature 1..20: note = Target: SCN10A; (-) strand; PAM type: NRG; PAM sequence: TAG
  source 1..20: mol_type = other DNA
agagggaaaggaatggtcct

SEQ ID NO: 26337 - DNA, 20 bp, synthetic construct
  misc_feature 1..20: note = Description of Artificial Sequence: Synthetic oligonucleotide
  misc_feature 1..20: note = Target: SCN10A; (-) strand; PAM type: NRG; PAM sequence: TGG
  source 1..20: mol_type = other DNA
cctaagcagagggaaaggaa

SEQ ID NO: 26338 - DNA, 20 bp, synthetic construct
  misc_feature 1..20: note = Description of Artificial Sequence: Synthetic oligonucleotide
  misc_feature 1..20: note = Target: SCN10A; (-) strand; PAM type: NRG; PAM sequence: AGG
  source 1..20: mol_type = other DNA
aagatcctaagcagagggaa

SEQ ID NO: 26339 - DNA, 20 bp, synthetic construct
  misc_feature 1..20: note = Description of Artificial Sequence: Synthetic oligonucleotide
  misc_feature 1..20: note = Target: SCN10A; (-) strand; PAM type: NRG; PAM sequence: AAG
  source 1..20: mol_type = other DNA
taagatcctaagcagaggga

SEQ ID NO: 26340 - DNA, 20 bp, synthetic construct
  misc_feature 1..20: note = Description of Artificial Sequence: Synthetic oligonucleotide
  misc_feature 1..20: note = Target: SCN10A; (-) strand; PAM type: NRG; PAM sequence: GGG
  source 1..20: mol_type = other DNA
gagataagatcctaagcaga

SEQ ID NO: 26341 - DNA, 20 bp, synthetic construct
  misc_feature 1..20: note = Description of Artificial Sequence: Synthetic oligonucleotide
  misc_feature 1..20: note = Target: SCN10A; (-) strand; PAM type: NRG; PAM sequence: AGG
  source 1..20: mol_type = other DNA
tgagataagatcctaagcag

SEQ ID NO: 26342 - DNA, 20 bp, synthetic construct
  misc_feature 1..20: note = Description of Artificial Sequence: Synthetic oligonucleotide
  misc_feature 1..20: note = Target: SCN10A; (-) strand; PAM type: NRG; PAM sequence: GAG
  source 1..20: mol_type = other DNA
atgagataagatcctaagca

SEQ ID NO: 26343 - DNA, 20 bp, synthetic construct
  misc_feature 1..20: note = Description of Artificial Sequence: Synthetic oligonucleotide
  misc_feature 1..20: note = Target: SCN10A; (-) strand; PAM type: NRG; PAM sequence: CAG
  source 1..20: mol_type = other DNA
atatgagataagatcctaag

SEQ ID NO: 26344 - DNA, 20 bp, synthetic construct
  misc_feature 1..20: note = Description of Artificial Sequence: Synthetic oligonucleotide
  misc_feature 1..20: note = Target: SCN10A; (-) strand; PAM type: NRG; PAM sequence: AAG
  source 1..20: mol_type = other DNA
tagatatgagataagatcct

SEQ ID NO: 26345 - DNA, 20 bp, synthetic construct
  misc_feature 1..20: note = Description of Artificial Sequence: Synthetic oligonucleotide
  misc_feature 1..20: note = Target: SCN10A; (-) strand; PAM type: NRG; PAM sequence: AAG
  source 1..20: mol_type = other DNA
aaatgaggtagatatgagat

SEQ ID NO: 26346 - DNA, 20 bp, synthetic construct
  misc_feature 1..20: note = Description of Artificial Sequence: Synthetic oligonucleotide
  misc_feature 1..20: note = Target: SCN10A; (-) strand; PAM type: NRG; PAM sequence: GAG
  source 1..20: mol_type = other DNA
gaaaaaaatgaggtagatat

SEQ ID NO: 26347 - DNA, 20 bp, synthetic construct
  misc_feature 1..20: note = Description of Artificial Sequence: Synthetic oligonucleotide
  misc_feature 1..20: note = Target: SCN10A; (-) strand; PAM type: NRG; PAM sequence: TAG
  source 1..20: mol_type = other DNA
ggagagagaaaaaaatgagg

SEQ ID NO: 26348 - DNA, 20 bp, synthetic construct
  misc_feature 1..20: note = Description of Artificial Sequence: Synthetic oligonucleotide
  misc_feature 1..20: note = Target: SCN10A; (-) strand; PAM type: NRG; PAM sequence: AGG
  source 1..20: mol_type = other DNA
caaggagagagaaaaaaatg

SEQ ID NO: 26349 - DNA, 20 bp, synthetic construct
  misc_feature 1..20: note = Description of Artificial Sequence: Synthetic oligonucleotide
  misc_feature 1..20: note = Target: SCN10A; (-) strand; PAM type: NRG; PAM sequence: GAG
  source 1..20: mol_type = other DNA
acaaggagagagaaaaaaat

SEQ ID NO: 26350 - DNA, 20 bp, synthetic construct
  misc_feature 1..20: note = Description of Artificial Sequence: Synthetic oligonucleotide
  misc_feature 1..20: note = Target: SCN10A; (-) strand; PAM type: NRG; PAM sequence: GAG
  source 1..20: mol_type = other DNA
agagctggcagacaaggaga

SEQ ID NO: 26351 - DNA, 20 bp, synthetic construct
  misc_feature 1..20: note = Description of Artificial Sequence: Synthetic oligonucleotide
  misc_feature 1..20: note = Target: SCN10A; (-) strand; PAM type: NRG; PAM sequence: GAG
  source 1..20: mol_type = other DNA
aaagagctggcagacaagga

SEQ ID NO: 26352 - DNA, 20 bp, synthetic construct
  misc_feature 1..20: note = Description of Artificial Sequence: Synthetic oligonucleotide
  misc_feature 1..20: note = Target: SCN10A; (-) strand; PAM type: NRG; PAM sequence: GAG
  source 1..20: mol_type = other DNA
ggaaagagctggcagacaag

SEQ ID NO: 26353 - DNA, 20 bp, synthetic construct
  misc_feature 1..20: note = Description of Artificial Sequence: Synthetic oligonucleotide
  misc_feature 1..20: note = Target: SCN10A; (-) strand; PAM type: NRG; PAM sequence: AGG
  source 1..20: mol_type = other DNA
taggaaagagctggcagaca

SEQ ID NO: 26354 - DNA, 20 bp, synthetic construct
  misc_feature 1..20: note = Description of Artificial Sequence: Synthetic oligonucleotide
  misc_feature 1..20: note = Target: SCN10A; (-) strand; PAM type: NRG; PAM sequence: AAG
  source 1..20: mol_type = other DNA
ataggaaagagctggcagac

SEQ ID NO: 26355 - DNA, 20 bp, synthetic construct
  misc_feature 1..20: note = Description of Artificial Sequence: Synthetic oligonucleotide
  misc_feature 1..20: note = Target: SCN10A; (-) strand; PAM type: NRG; PAM sequence: CAG
  source 1..20: mol_type = other DNA
tgctgataggaaagagctgg

SEQ ID NO: 26356 - DNA, 20 bp, synthetic construct
  misc_feature 1..20: note = Description of Artificial Sequence: Synthetic oligonucleotide
  misc_feature 1..20: note = Target: SCN10A; (-) strand; PAM type: NRG; PAM sequence: TGG
  source 1..20: mol_type = other DNA
aaatgctgataggaaagagc

SEQ ID NO: 26357 - DNA, 20 bp, synthetic construct
  misc_feature 1..20: note = Description of Artificial Sequence: Synthetic oligonucleotide
  misc_feature 1..20: note = Target: SCN10A; (-) strand; PAM type: NRG; PAM sequence: GAG
  source 1..20: mol_type = other DNA
ctttaaatgctgataggaaa

SEQ ID NO: 26358 - DNA, 20 bp, synthetic construct
  misc_feature 1..20: note = Description of Artificial Sequence: Synthetic oligonucleotide
  misc_feature 1..20: note = Target: SCN10A; (-) strand; PAM type: NRG; PAM sequence: AAG
  source 1..20: mol_type = other DNA
atctttaaatgctgatagga

SEQ ID NO: 26359 - DNA, 20 bp, synthetic construct
  misc_feature 1..20: note = Description of Artificial Sequence: Synthetic oligonucleotide
  misc_feature 1..20: note = Target: SCN10A; (-) strand; PAM type: NRG; PAM sequence: AGG
  source 1..20: mol_type = other DNA
aagcatctttaaatgctgat

SEQ ID NO: 26360 - DNA, 20 bp, synthetic construct
  misc_feature 1..20: note = Description of Artificial Sequence: Synthetic oligonucleotide
  misc_feature 1..20: note = Target: SCN10A; (-) strand; PAM type: NRG; PAM sequence: TAG
  source 1..20: mol_type = other DNA
taagcatctttaaatgctga

SEQ ID NO: 26361 - DNA, 20 bp, synthetic construct
  misc_feature 1..20: note = Description of Artificial Sequence: Synthetic oligonucleotide
  misc_feature 1..20: note = Target: SCN10A; (-) strand; PAM type: NRG; PAM sequence: AAG
  source 1..20: mol_type = other DNA
tttaaagttggaggaaagtt

SEQ ID NO: 26362 - DNA, 20 bp, synthetic construct
  misc_feature 1..20: note = Description of Artificial Sequence: Synthetic oligonucleotide
  misc_feature 1..20: note = Target: SCN10A; (-) strand; PAM type: NRG; PAM sequence: AAG
  source 1..20: mol_type = other DNA
aagtttttaaagttggagga

SEQ ID NO: 26363 - DNA, 20 bp, synthetic construct
  misc_feature 1..20: note = Description of Artificial Sequence: Synthetic oligonucleotide
  misc_feature 1..20: note = Target: SCN10A; (-) strand; PAM type: NRG; PAM sequence: AGG
  source 1..20: mol_type = other DNA
gggaaagtttttaaagttgg

SEQ ID NO: 26364 - DNA, 20 bp, synthetic construct
  misc_feature 1..20: note = Description of Artificial Sequence: Synthetic oligonucleotide
  misc_feature 1..20: note = Target: SCN10A; (-) strand; PAM type: NRG; PAM sequence: GAG
  source 1..20: mol_type = other DNA
agggaaagtttttaaagttg

SEQ ID NO: 26365 - DNA, 20 bp, synthetic construct
  misc_feature 1..20: note = Description of Artificial Sequence: Synthetic oligonucleotide
  misc_feature 1..20: note = Target: SCN10A; (-) strand; PAM type: NRG; PAM sequence: TGG
  source 1..20: mol_type = other DNA
caagggaaagtttttaaagt

SEQ ID NO: 26366 - DNA, 20 bp, synthetic construct
  misc_feature 1..20: note = Description of Artificial Sequence: Synthetic oligonucleotide
  misc_feature 1..20: note = Target: SCN10A; (-) strand; PAM type: NRG; PAM sequence: AAG
  source 1..20: mol_type = other DNA
gcatcaagggaaagttttta

SEQ ID NO: 26367 - DNA, 20 bp, synthetic construct
  misc_feature 1..20: note = Description of Artificial Sequence: Synthetic oligonucleotide
  misc_feature 1..20: note = Target: SCN10A; (-) strand; PAM type: NRG; PAM sequence: AAG
  source 1..20: mol_type = other DNA
atgggctctgcatcaaggga

SEQ ID NO: 26368 - DNA, 20 bp, synthetic construct
  misc_feature 1..20: note = Description of Artificial Sequence: Synthetic oligonucleotide
  misc_feature 1..20: note = Target: SCN10A; (-) strand; PAM type: NRG; PAM sequence: GGG
  source 1..20: mol_type = other DNA
ctggatgggctctgcatcaa

SEQ ID NO: 26369 - DNA, 20 bp, synthetic construct
  misc_feature 1..20: note = Description of Artificial Sequence: Synthetic oligonucleotide
  misc_feature 1..20: note = Target: SCN10A; (-) strand; PAM type: NRG; PAM sequence: AGG
  source 1..20: mol_type = other DNA
cctggatgggctctgcatca

SEQ ID NO: 26370 - DNA, 20 bp, synthetic construct
  misc_feature 1..20: note = Description of Artificial Sequence: Synthetic oligonucleotide
  misc_feature 1..20: note = Target: SCN10A; (-) strand; PAM type: NRG; PAM sequence: AAG
  source 1..20: mol_type = other DNA
acctggatgggctctgcatc

SEQ ID NO: 26371 - DNA, 20 bp, synthetic construct
  misc_feature 1..20: note = Description of Artificial Sequence: Synthetic oligonucleotide
  misc_feature 1..20: note = Target: SCN10A; (-) strand; PAM type: NRG; PAM sequence: GGG
  source 1..20: mol_type = other DNA
agaggagggaagacctggat

SEQ ID NO: 26372 - DNA, 20 bp, synthetic construct
  misc_feature 1..20: note = Description of Artificial Sequence: Synthetic oligonucleotide
  misc_feature 1..20: note = Target: SCN10A; (-) strand; PAM type: NRG; PAM sequence: TGG
  source 1..20: mol_type = other DNA
gagaggagggaagacctgga

SEQ ID NO: 26373 - DNA, 20 bp, synthetic construct
  misc_feature 1..20: note = Description of Artificial Sequence: Synthetic oligonucleotide
  misc_feature 1..20: note = Target: SCN10A; (-) strand; PAM type: NRG; PAM sequence: TGG
  source 1..20: mol_type = other DNA
aggagagaggagggaagacc

SEQ ID NO: 26374 - DNA, 20 bp, synthetic construct
  misc_feature 1..20: note = Description of Artificial Sequence: Synthetic oligonucleotide
  misc_feature 1..20: note = Target: SCN10A; (-) strand; PAM type: NRG; PAM sequence: AAG
  source 1..20: mol_type = other DNA
gagaacaggagagaggaggg

SEQ ID NO: 26375 - DNA, 20 bp, synthetic construct
  misc_feature 1..20: note = Description of Artificial Sequence: Synthetic oligonucleotide
  misc_feature 1..20: note = Target: SCN10A; (-) strand; PAM type: NRG; PAM sequence: GGG
  source 1..20: mol_type = other DNA
atagagaacaggagagagga

SEQ ID NO: 26376 - DNA, 20 bp, synthetic construct
  misc_feature 1..20: note = Description of Artificial Sequence: Synthetic oligonucleotide
  misc_feature 1..20: note = Target: SCN10A; (-) strand; PAM type: NRG; PAM sequence: AGG
  source 1..20: mol_type = other DNA
aatagagaacaggagagagg

SEQ ID NO: 26377 - DNA, 20 bp, synthetic construct
  misc_feature 1..20: note = Description of Artificial Sequence: Synthetic oligonucleotide
  misc_feature 1..20: note = Target: SCN10A; (-) strand; PAM type: NRG; PAM sequence: GAG
  source 1..20: mol_type = other DNA
caatagagaacaggagagag

SEQ ID NO: 26378 - DNA, 20 bp, synthetic construct
  misc_feature 1..20: note = Description of Artificial Sequence: Synthetic oligonucleotide
  misc_feature 1..20: note = Target: SCN10A; (-) strand; PAM type: NRG; PAM sequence: AGG
  source 1..20: mol_type = other DNA
gccaatagagaacaggagag

SEQ ID NO: 26379 - DNA, 20 bp, synthetic construct
  misc_feature 1..20: note = Description of Artificial Sequence: Synthetic oligonucleotide
  misc_feature 1..20: note = Target: SCN10A; (-) strand; PAM type: NRG; PAM sequence: GAG
  source 1..20: mol_type = other DNA
agccaatagagaacaggaga

SEQ ID NO: 26380 - DNA, 20 bp, synthetic construct
  misc_feature 1..20: note = Description of Artificial Sequence: Synthetic oligonucleotide
  misc_feature 1..20: note = Target: SCN10A; (-) strand; PAM type: NRG; PAM sequence: GAG
  source 1..20: mol_type = other DNA
aaagccaatagagaacagga

SEQ ID NO: 26381 - DNA, 20 bp, synthetic construct
  misc_feature 1..20: note = Description of Artificial Sequence: Synthetic oligonucleotide
  misc_feature 1..20: note = Target: SCN10A; (-) strand; PAM type: NRG; PAM sequence: GAG
  source 1..20: mol_type = other DNA
taaaagccaatagagaacag

SEQ ID NO: 26382 - DNA, 20 bp, synthetic construct
  misc_feature 1..20: note = Description of Artificial Sequence: Synthetic oligonucleotide
  misc_feature 1..20: note = Target: SCN10A; (-) strand; PAM type: NRG; PAM sequence: AGG
  source 1..20: mol_type = other DNA
attaaaagccaatagagaac

SEQ ID NO: 26383 - DNA, 20 bp, synthetic construct
  misc_feature 1..20: note = Description of Artificial Sequence: Synthetic oligonucleotide
  misc_feature 1..20: note = Target: SCN10A; (-) strand; PAM type: NRG; PAM sequence: CAG
  source 1..20: mol_type = other DNA
tattaaaagccaatagagaa

SEQ ID NO: 26384 - DNA, 20 bp, synthetic construct
  misc_feature 1..20: note = Description of Artificial Sequence: Synthetic oligonucleotide
  misc_feature 1..20: note = Target: SCN10A; (-) strand; PAM type: NRG; PAM sequence: GAG
  source 1..20: mol_type = other DNA
tcctttattaaaagccaata

SEQ ID NO: 26385 - DNA, 20 bp, synthetic construct
  misc_feature 1..20: note = Description of Artificial Sequence: Synthetic oligonucleotide
  misc_feature 1..20: note = Target: SCN10A; (-) strand; PAM type: NRG; PAM sequence: TAG
  source 1..20: mol_type = other DNA
agtcctttattaaaagccaa

SEQ ID NO: 26386 - DNA, 20 bp, synthetic construct
  misc_feature 1..20: note = Description of Artificial Sequence: Synthetic oligonucleotide
  misc_feature 1..20: note = Target: SCN10A; (-) strand; PAM type: NRG; PAM sequence: AAG
  source 1..20: mol_type = other DNA
agaagtaagtcctttattaa

SEQ ID NO: 26387 - DNA, 20 bp, synthetic construct
  misc_feature 1..20: note = Description of Artificial Sequence: Synthetic oligonucleotide
  misc_feature 1..20: note = Target: SCN10A; (-) strand; PAM type: NRG; PAM sequence: AAG
  source 1..20: mol_type = other DNA
tggaaacagtgagtagaagt

SEQ ID NO: 26388 - DNA, 20 bp, synthetic construct
  misc_feature 1..20: note = Description of Artificial Sequence: Synthetic oligonucleotide
  misc_feature 1..20: note = Target: SCN10A; (-) strand; PAM type: NRG; PAM sequence: AAG
  source 1..20: mol_type = other DNA
tgactggaaacagtgagtag

SEQ ID NO: 26389 - DNA, 20 bp, synthetic construct
  misc_feature 1..20: note = Description of Artificial Sequence: Synthetic oligonucleotide
  misc_feature 1..20: note = Target: SCN10A; (-) strand; PAM type: NRG; PAM sequence: TAG
  source 1..20: mol_type = other DNA
aagtgactggaaacagtgag

SEQ ID NO: 26390 - DNA, 20 bp, synthetic construct
  misc_feature 1..20: note = Description of Artificial Sequence: Synthetic oligonucleotide
  misc_feature 1..20: note = Target: SCN10A; (-) strand; PAM type: NRG; PAM sequence: GAG
  source 1..20: mol_type = other DNA
gaaaagtgactggaaacagt

SEQ ID NO: 26391 - DNA, 20 bp, synthetic construct
  misc_feature 1..20: note = Description of Artificial Sequence: Synthetic oligonucleotide
  misc_feature 1..20: note = Target: SCN10A; (-) strand; PAM type: NRG; PAM sequence: CAG
  source 1..20: mol_type = other DNA
gactgaaaagtgactggaaa

SEQ ID NO: 26392 - DNA, 20 bp, synthetic construct
  misc_feature 1..20: note = Description of Artificial Sequence: Synthetic oligonucleotide
  misc_feature 1..20: note = Target: SCN10A; (-) strand; PAM type: NRG; PAM sequence: TGG
  source 1..20: mol_type = other DNA
ttcaaagactgaaaagtgac

SEQ ID NO: 26393 - DNA, 20 bp, synthetic construct
  misc_feature 1..20: note = Description of Artificial Sequence: Synthetic oligonucleotide
  misc_feature 1..20: note = Target: SCN10A; (-) strand; PAM type: NRG; PAM sequence: AAG
  source 1..20: mol_type = other DNA
tccaagcttcaaagactgaa

SEQ ID NO: 26394 - DNA, 20 bp, synthetic construct
  misc_feature 1..20: note = Description of Artificial Sequence: Synthetic oligonucleotide
  misc_feature 1..20: note = Target: SCN10A; (-) strand; PAM type: NRG; PAM sequence: AAG
  source 1..20: mol_type = other DNA
agggcaaaatccaagcttca

SEQ ID NO: 26395 - DNA, 20 bp, synthetic construct
  misc_feature 1..20: note = Description of Artificial Sequence: Synthetic oligonucleotide
  misc_feature 1..20: note = Target: SCN10A; (-) strand; PAM type: NRG; PAM sequence: AAG
  source 1..20: mol_type = other DNA
gagataggagggcaaaatcc

SEQ ID NO: 26396 - DNA, 20 bp, synthetic construct
  misc_feature 1..20: note = Description of Artificial Sequence: Synthetic oligonucleotide
  misc_feature 1..20: note = Target: SCN10A; (-) strand; PAM type: NRG; PAM sequence: GGG
  source 1..20: mol_type = other DNA
agcattttagtgagatagga

SEQ ID NO: 26397 - DNA, 20 bp, synthetic construct
  misc_feature 1..20: note = Description of Artificial Sequence: Synthetic oligonucleotide
  misc_feature 1..20: note = Target: SCN10A; (-) strand; PAM type: NRG; PAM sequence: AGG
  source 1..20: mol_type = other DNA
aagcattttagtgagatagg

SEQ ID NO: 26398 - DNA, 20 bp, synthetic construct
  misc_feature 1..20: note = Description of Artificial Sequence: Synthetic oligonucleotide
  misc_feature 1..20: note = Target: SCN10A; (-) strand; PAM type: NRG; PAM sequence: GAG
  source 1..20: mol_type = other DNA
gaagcattttagtgagatag

SEQ ID NO: 26399 - DNA, 20 bp, synthetic construct
  misc_feature 1..20: note = Description of Artificial Sequence: Synthetic oligonucleotide
  misc_feature 1..20: note = Target: SCN10A; (-) strand; PAM type: NRG; PAM sequence: AGG
  source 1..20: mol_type = other DNA
aggaagcattttagtgagat

SEQ ID NO: 26400 - DNA, 20 bp, synthetic construct
  misc_feature 1..20: note = Description of Artificial Sequence: Synthetic oligonucleotide
  misc_feature 1..20: note = Target: SCN10A; (-) strand; PAM type: NRG; PAM sequence: TAG
  source 1..20: mol_type = other DNA
aaggaagcattttagtgaga

SEQ ID NO: 26401 - DNA, 20 bp, synthetic construct
  misc_feature 1..20: note = Description of Artificial Sequence: Synthetic oligonucleotide
  misc_feature 1..20: note = Target: SCN10A; (-) strand; PAM type: NRG; PAM sequence: GAG
  source 1..20: mol_type = other DNA
ctgcaaggaagcattttagt

SEQ ID NO: 26402 - DNA, 20 bp, synthetic construct
  misc_feature 1..20: note = Description of Artificial Sequence: Synthetic oligonucleotide
  misc_feature 1..20: note = Target: SCN10A; (-) strand; PAM type: NRG; PAM sequence: TAG
  source 1..20: mol_type = other DNA
atccctgcaaggaagcattt

SEQ ID NO: 26403 - DNA, 20 bp, synthetic construct
  misc_feature 1..20: note = Description of Artificial Sequence: Synthetic oligonucleotide
  misc_feature 1..20: note = Target: SCN10A; (-) strand; PAM type: NRG; PAM sequence: AAG
  source 1..20: mol_type = other DNA
tctcttgtatccctgcaagg

SEQ ID NO: 26404 - DNA, 20 bp, synthetic construct
  misc_feature 1..20: note = Description of Artificial Sequence: Synthetic oligonucleotide
  misc_feature 1..20: note = Target: SCN10A; (-) strand; PAM type: NRG; PAM sequence: AGG
  source 1..20: mol_type = other DNA
caatctcttgtatccctgca

SEQ ID NO: 26405 - DNA, 20 bp, synthetic construct
  misc_feature 1..20: note = Description of Artificial Sequence: Synthetic oligonucleotide
  misc_feature 1..20: note = Target: SCN10A; (-) strand; PAM type: NRG; PAM sequence: AAG
  source 1..20: mol_type = other DNA
gcaatctcttgtatccctgc

SEQ ID NO: 26406 - DNA, 20 bp, synthetic construct
  misc_feature 1..20: note = Description of Artificial Sequence: Synthetic oligonucleotide
  misc_feature 1..20: note = Target: SCN10A; (-) strand; PAM type: NRG; PAM sequence: AGG
  source 1..20: mol_type = other DNA
gccccctgactttagccaca

SEQ ID NO: 26407 - DNA, 20 bp, synthetic construct
  misc_feature 1..20: note = Description of Artificial Sequence: Synthetic oligonucleotide
  misc_feature 1..20: note = Target: SCN10A; (-) strand; PAM type: NRG; PAM sequence: AAG
  source 1..20: mol_type = other DNA
ggccccctgactttagccac

SEQ ID NO: 26408 - DNA, 20 bp, synthetic construct
  misc_feature 1..20: note = Description of Artificial Sequence: Synthetic oligonucleotide
  misc_feature 1..20: note = Target: SCN10A; (-) strand; PAM type: NRG; PAM sequence: TAG
  source 1..20: mol_type = other DNA
tgagaagggccccctgactt

SEQ ID NO: 26409 - DNA, 20 bp, synthetic construct
  misc_feature 1..20: note = Description of Artificial Sequence: Synthetic oligonucleotide
  misc_feature 1..20: note = Target: SCN10A; (-) strand; PAM type: NRG; PAM sequence: GGG
  source 1..20: mol_type = other DNA
aaaaagacaagaactgagaa

SEQ ID NO: 26410 - DNA, 20 bp, synthetic construct
  misc_feature 1..20: note = Description of Artificial Sequence: Synthetic oligonucleotide
  misc_feature 1..20: note = Target: SCN10A; (-) strand; PAM type: NRG; PAM sequence: AGG
  source 1..20: mol_type = other DNA
aaaaaagacaagaactgaga

SEQ ID NO: 26411 - DNA, 20 bp, synthetic construct
  misc_feature 1..20: note = Description of Artificial Sequence: Synthetic oligonucleotide
  misc_feature 1..20: note = Target: SCN10A; (-) strand; PAM type: NRG; PAM sequence: AAG
  source 1..20: mol_type = other DNA
caaaaaagacaagaactgag

SEQ ID NO: 26412 - DNA, 20 bp, synthetic construct
  misc_feature 1..20: note = Description of Artificial Sequence: Synthetic oligonucleotide
  misc_feature 1..20: note = Target: SCN10A; (-) strand; PAM type: NRG; PAM sequence: GAG
  source 1..20: mol_type = other DNA
aaacaaaaaagacaagaact

SEQ ID NO: 26413 - DNA, 20 bp, synthetic construct
  misc_feature 1..20: note = Description of Artificial Sequence: Synthetic oligonucleotide
  misc_feature 1..20: note = Target: SCN10A; (-) strand; PAM type: NRG; PAM sequence: AAG
  source 1..20: mol_type = other DNA
aagaaaaaaacaaaaaagac

SEQ ID NO: 26414 - DNA, 20 bp, synthetic construct
  misc_feature 1..20: note = Description of Artificial Sequence: Synthetic oligonucleotide
  misc_feature 1..20: note = Target: SCN10A; (-) strand; PAM type: NRG; PAM sequence: AAG
  source 1..20: mol_type = other DNA
agaaaaagaaaaaaacaaaa

SEQ ID NO: 26415 - DNA, 20 bp, synthetic construct
  misc_feature 1..20: note = Description of Artificial Sequence: Synthetic oligonucleotide
  misc_feature 1..20: note = Target: SCN10A; (-) strand; PAM type: NRG; PAM sequence: AAG
  source 1..20: mol_type = other DNA
aaaaaaaaaagaaaaagaaa

SEQ ID NO: 26416 - DNA, 20 bp, synthetic construct
  misc_feature 1..20: note = Description of Artificial Sequence: Synthetic oligonucleotide
  misc_feature 1..20: note = Target: SCN10A; (-) strand; PAM type: NRG; PAM sequence: AAG
  source 1..20: mol_type = other DNA
ctcaaaaaaaaaaaaagaaa

SEQ ID NO: 26417 - DNA, 20 bp, synthetic construct
  misc_feature 1..20: note = Description of Artificial Sequence: Synthetic oligonucleotide
  misc_feature 1..20: note = Target: SCN10A; (-) strand; PAM type: NRG; PAM sequence: AAG
  source 1..20: mol_type = other DNA
ccctgtctcaaaaaaaaaaa

SEQ ID NO: 26418 - DNA, 20 bp, synthetic construct
  misc_feature 1..20: note = Description of Artificial Sequence: Synthetic oligonucleotide
  misc_feature 1..20: note = Target: SCN10A; (-) strand; PAM type: NRG; PAM sequence: CAG
  source 1..20: mol_type = other DNA
ctgcactctagtccgggtga

SEQ ID NO: 26419 - DNA, 20 bp, synthetic construct
  misc_feature 1..20: note = Description of Artificial Sequence: Synthetic oligonucleotide
  misc_feature 1..20: note = Target: SCN10A; (-) strand; PAM type: NRG; PAM sequence: GGG
  source 1..20: mol_type = other DNA
gcaccactgcactctagtcc

SEQ ID NO: 26420 - DNA, 20 bp, synthetic construct
  misc_feature 1..20: note = Description of Artificial Sequence: Synthetic oligonucleotide
  misc_feature 1..20: note = Target: SCN10A; (-) strand; PAM type: NRG; PAM sequence: CGG
  source 1..20: mol_type = other DNA
tgcaccactgcactctagtc

SEQ ID NO: 26421 - DNA, 20 bp, synthetic construct
  misc_feature 1..20: note = Description of Artificial Sequence: Synthetic oligonucleotide
  misc_feature 1..20: note = Target: SCN10A; (-) strand; PAM type: NRG; PAM sequence: TAG
  source 1..20: mol_type = other DNA
gagattgcaccactgcactc

SEQ ID NO: 26422 - DNA, 20 bp, synthetic construct
  misc_feature 1..20: note = Description of Artificial Sequence: Synthetic oligonucleotide
  misc_feature 1..20: note = Target: SCN10A; (-) strand; PAM type: NRG; PAM sequence: GAG
  source 1..20: mol_type = other DNA
gacagaggttgcagtgagca

SEQ ID NO: 26423 - DNA, 20 bp, synthetic construct
  misc_feature 1..20: note = Description of Artificial Sequence: Synthetic oligonucleotide
  misc_feature 1..20: note = Target: SCN10A; (-) strand; PAM type: NRG; PAM sequence: CAG
  source 1..20: mol_type = other DNA
gagacagaggttgcagtgag

SEQ ID NO: 26424 - DNA, 20 bp, synthetic construct
  misc_feature 1..20: note = Description of Artificial Sequence: Synthetic oligonucleotide
  misc_feature 1..20: note = Target: SCN10A; (-) strand; PAM type: NRG; PAM sequence: GAG
  source 1..20: mol_type = other DNA
caggagacagaggttgcagt

SEQ ID NO: 26425 - DNA, 20 bp, synthetic construct
  misc_feature 1..20: note = Description of Artificial Sequence: Synthetic oligonucleotide
  misc_feature 1..20: note = Target: SCN10A; (-) strand; PAM type: NRG; PAM sequence: CAG
  source 1..20: mol_type = other DNA
agcccaggagacagaggttg

SEQ ID NO: 26426 - DNA, 20 bp, synthetic construct
  misc_feature 1..20: note = Description of Artificial Sequence: Synthetic oligonucleotide
  misc_feature 1..20: note = Target: SCN10A; (-) strand; PAM type: NRG; PAM sequence: AGG
  source 1..20: mol_type = other DNA
tgcttgagcccaggagacag

SEQ ID NO: 26427 - DNA, 20 bp, synthetic construct
  misc_feature 1..20: note = Description of Artificial Sequence: Synthetic oligonucleotide
  misc_feature 1..20: note = Target: SCN10A; (-) strand; PAM type: NRG; PAM sequence: GAG
  source 1..20: mol_type = other DNA
ttgcttgagcccaggagaca

SEQ ID NO: 26428 - DNA, 20 bp, synthetic construct
  misc_feature 1..20: note = Description of Artificial Sequence: Synthetic oligonucleotide
  misc_feature 1..20: note = Target: SCN10A; (-) strand; PAM type: NRG; PAM sequence: CAG
  source 1..20: mol_type = other DNA
aattgcttgagcccaggaga

SEQ ID NO: 26429 - DNA, 20 bp, synthetic construct
  misc_feature 1..20: note = Description of Artificial Sequence: Synthetic oligonucleotide
  misc_feature 1..20: note = Target: SCN10A; (-) strand; PAM type: NRG; PAM sequence: GAG
  source 1..20: mol_type = other DNA
ggagaattgcttgagcccag

SEQ ID NO: 26430 - DNA, 20 bp, synthetic construct
  misc_feature 1..20: note = Description of Artificial Sequence: Synthetic oligonucleotide
  misc_feature 1..20: note = Target: SCN10A; (-) strand; PAM type: NRG; PAM sequence: AGG
  source 1..20: mol_type = other DNA
tgggagaattgcttgagccc

SEQ ID NO: 26431 - DNA, 20 bp, synthetic construct
  misc_feature 1..20: note = Description of Artificial Sequence: Synthetic oligonucleotide
  misc_feature 1..20: note = Target: SCN10A; (-) strand; PAM type: NRG; PAM sequence: CAG
  source 1..20: mol_type = other DNA
gtgggagaattgcttgagcc

SEQ ID NO: 26432 - DNA, 20 bp, synthetic construct
  misc_feature 1..20: note = Description of Artificial Sequence: Synthetic oligonucleotide
  misc_feature 1..20: note = Target: SCN10A; (-) strand; PAM type: NRG; PAM sequence: GAG
  source 1..20: mol_type = other DNA
ctgaggtgggagaattgctt

SEQ ID NO: 26433 - DNA, 20 bp, synthetic construct
  misc_feature 1..20: note = Description of Artificial Sequence: Synthetic oligonucleotide
  misc_feature 1..20: note = Target: SCN10A; (-) strand; PAM type: NRG; PAM sequence: GAG
  source 1..20: mol_type = other DNA
tattcgggaggctgaggtgg

SEQ ID NO: 26434 - DNA, 20 bp, synthetic construct
  misc_feature 1..20: note = Description of Artificial Sequence: Synthetic oligonucleotide
  misc_feature 1..20: note = Target: SCN10A; (-) strand; PAM type: NRG; PAM sequence: GGG
  source 1..20: mol_type = other DNA
gctattcgggaggctgaggt

SEQ ID NO: 26435 - DNA, 20 bp, synthetic construct
  misc_feature 1..20: note = Description of Artificial Sequence: Synthetic oligonucleotide
  misc_feature 1..20: note = Target: SCN10A; (-) strand; PAM type: NRG; PAM sequence: TGG
  source 1..20: mol_type = other DNA
agctattcgggaggctgagg

SEQ ID NO: 26436 - DNA, 20 bp, synthetic construct
  misc_feature 1..20: note = Description of Artificial Sequence: Synthetic oligonucleotide
  misc_feature 1..20: note = Target: SCN10A; (-) strand; PAM type: NRG; PAM sequence: AGG
  source 1..20: mol_type = other DNA
cccagctattcgggaggctg

SEQ ID NO: 26437 - DNA, 20 bp, synthetic construct
  misc_feature 1..20: note = Description of Artificial Sequence: Synthetic oligonucleotide
  misc_feature 1..20: note = Target: SCN10A; (-) strand; PAM type: NRG; PAM sequence: GAG
  source 1..20: mol_type = other DNA
gcccagctattcgggaggct

SEQ ID NO: 26438 - DNA, 20 bp, synthetic construct
  misc_feature 1..20: note = Description of Artificial Sequence: Synthetic oligonucleotide
  misc_feature 1..20: note = Target: SCN10A; (-) strand; PAM type: NRG; PAM sequence: AGG
  source 1..20: mol_type = other DNA
ctatagcccagctattcggg

SEQ ID NO: 26439 - DNA, 20 bp, synthetic construct
  misc_feature 1..20: note = Description of Artificial Sequence: Synthetic oligonucleotide
  misc_feature 1..20: note = Target: SCN10A; (-) strand; PAM type: NRG; PAM sequence: GAG
  source 1..20: mol_type = other DNA
cctatagcccagctattcgg

SEQ ID NO: 26440 - DNA, 20 bp, synthetic construct
  misc_feature 1..20: note = Description of Artificial Sequence: Synthetic oligonucleotide
  misc_feature 1..20: note = Target: SCN10A; (-) strand; PAM type: NRG; PAM sequence: GGG
  source 1..20: mol_type = other DNA
tgcctatagcccagctattc

SEQ ID NO: 26441 - DNA, 20 bp, synthetic construct
  misc_feature 1..20: note = Description of Artificial Sequence: Synthetic oligonucleotide
  misc_feature 1..20: note = Target: SCN10A; (-) strand; PAM type: NRG; PAM sequence: CGG
  source 1..20: mol_type = other DNA
gtgcctatagcccagctatt

SEQ ID NO: 26442 - DNA, 20 bp, synthetic construct
  misc_feature 1..20: note = Description of Artificial Sequence: Synthetic oligonucleotide
  misc_feature 1..20: note = Target: SCN10A; (-) strand; PAM type: NRG; PAM sequence: CAG
  source 1..20: mol_type = other DNA
ggtgacatgtgcctatagcc

SEQ ID NO: 26443 - DNA, 20 bp, synthetic construct
  misc_feature 1..20: note = Description of Artificial Sequence: Synthetic oligonucleotide
  misc_feature 1..20: note = Target: SCN10A; (-) strand; PAM type: NRG; PAM sequence: TAG
  source 1..20: mol_type = other DNA
agtgtggtgacatgtgccta

SEQ ID NO: 26444 - DNA, 20 bp, synthetic construct
  misc_feature 1..20: note = Description of Artificial Sequence: Synthetic oligonucleotide
  misc_feature 1..20: note = Target: SCN10A; (-) strand; PAM type: NRG; PAM sequence: TGG
  source 1..20: mol_type = other DNA
ttttcaaaactagccgagtg

SEQ ID NO: 26445 - DNA, 20 bp, synthetic construct
  misc_feature 1..20: note = Description of Artificial Sequence: Synthetic oligonucleotide
  misc_feature 1..20: note = Target: SCN10A; (-) strand; PAM type: NRG; PAM sequence: GAG
  source 1..20: mol_type = other DNA
aaattttttcaaaactagcc

SEQ ID NO: 26446 - DNA, 20 bp, synthetic construct
  misc_feature 1..20: note = Description of Artificial Sequence: Synthetic oligonucleotide
  misc_feature 1..20: note = Target: SCN10A; (-) strand; PAM type: NRG; PAM sequence: TAG
  source 1..20: mol_type = other DNA
caaaaaaattttttcaaaac

SEQ ID NO: 26447 - DNA, 20 bp, synthetic construct
  misc_feature 1..20: note = Description of Artificial Sequence: Synthetic oligonucleotide
  misc_feature 1..20: note = Target: SCN10A; (-) strand; PAM type: NRG; PAM sequence: TGG
  source 1..20: mol_type = other DNA
gatgggcctggacaatatag

SEQ ID NO: 26448 - DNA, 20 bp, synthetic construct
  misc_feature 1..20: note = Description of Artificial Sequence: Synthetic oligonucleotide
  misc_feature 1..20: note = Target: SCN10A; (-) strand; PAM type: NRG; PAM sequence: TAG
  source 1..20: mol_type = other DNA
tgagatgggcctggacaata

SEQ ID NO: 26449 - DNA, 20 bp, synthetic construct
  misc_feature 1..20: note = Description of Artificial Sequence: Synthetic oligonucleotide
  misc_feature 1..20: note = Target: SCN10A; (-) strand; PAM type: NRG; PAM sequence: TGG
  source 1..20: mol_type = other DNA
gataagaactgagatgggcc

SEQ ID NO: 26450 - DNA, 20 bp, synthetic construct
  misc_feature 1..20: note = Description of Artificial Sequence: Synthetic oligonucleotide
  misc_feature 1..20: note = Target: SCN10A; (-) strand; PAM type: NRG; PAM sequence: GGG
  source 1..20: mol_type = other DNA
atcaagataagaactgagat

SEQ ID NO: 26451 - DNA, 20 bp, synthetic construct
  misc_feature 1..20: note = Description of Artificial Sequence: Synthetic oligonucleotide
  misc_feature 1..20: note = Target: SCN10A; (-) strand; PAM type: NRG; PAM sequence: TGG
  source 1..20: mol_type = other DNA
catcaagataagaactgaga

SEQ ID NO: 26452 - DNA, 20 bp, synthetic construct
  misc_feature 1..20: note = Description of Artificial Sequence: Synthetic oligonucleotide
  misc_feature 1..20: note = Target: SCN10A; (-) strand; PAM type: NRG; PAM sequence: GAG
  source 1..20: mol_type = other DNA
ggaccatcaagataagaact

SEQ ID NO: 26453 - DNA, 20 bp, synthetic construct
  misc_feature 1..20: note = Description of Artificial Sequence: Synthetic oligonucleotide
  misc_feature 1..20: note = Target: SCN10A; (-) strand; PAM type: NRG; PAM sequence: AAG
  source 1..20: mol_type = other DNA
gccaataggaccatcaagat

SEQ ID NO: 26454 - DNA, 20 bp, synthetic construct
  misc_feature 1..20: note = Description of Artificial Sequence: Synthetic oligonucleotide
  misc_feature 1..20: note = Target: SCN10A; (-) strand; PAM type: NRG; PAM sequence: AAG
  source 1..20: mol_type = other DNA
aaacagccaataggaccatc

SEQ ID NO: 26455 - DNA, 20 bp, synthetic construct
  misc_feature 1..20: note = Description of Artificial Sequence: Synthetic oligonucleotide
  misc_feature 1..20: note = Target: SCN10A; (-) strand; PAM type: NRG; PAM sequence: AGG
  source 1..20: mol_type = other DNA
aaattgtcaaaacagccaat

SEQ ID NO: 26456 - DNA, 20 bp, synthetic construct
  misc_feature 1..20: note = Description of Artificial Sequence: Synthetic oligonucleotide
  misc_feature 1..20: note = Target: SCN10A; (-) strand; PAM type: NRG; PAM sequence: TAG
  source 1..20: mol_type = other DNA
gaaattgtcaaaacagccaa

SEQ ID NO: 26457 - DNA, 20 bp, synthetic construct
  misc_feature 1..20: note = Description of Artificial Sequence: Synthetic oligonucleotide
  misc_feature 1..20: note = Target: SCN10A; (-) strand; PAM type: NRG; PAM sequence: CAG
  source 1..20: mol_type = other DNA
taaggaggaaattgtcaaaa

SEQ ID NO: 26458 - DNA, 20 bp, synthetic construct
  misc_feature 1..20: note = Description of Artificial Sequence: Synthetic oligonucleotide
  misc_feature 1..20: note = Target: SCN10A; (-) strand; PAM type: NRG; PAM sequence: AGG
  source 1..20: mol_type = other DNA
aaatatacagtattttaagg

SEQ ID NO: 26459 - DNA, 20 bp, synthetic construct
  misc_feature 1..20: note = Description of Artificial Sequence: Synthetic oligonucleotide
  misc_feature 1..20: note = Target: SCN10A; (-) strand; PAM type: NRG; PAM sequence: GAG
  source 1..20: mol_type = other DNA
aaaatatacagtattttaag

SEQ ID NO: 26460 - DNA, 20 bp, synthetic construct
  misc_feature 1..20: note = Description of Artificial Sequence: Synthetic oligonucleotide
  misc_feature 1..20: note = Target: SCN10A; (-) strand; PAM type: NRG; PAM sequence: AGG
  source 1..20: mol_type = other DNA
ccaaaatatacagtatttta

SEQ ID NO: 26461 - DNA, 20 bp, synthetic construct
  misc_feature 1..20: note = Description of Artificial Sequence: Synthetic oligonucleotide
  misc_feature 1..20: note = Target: SCN10A; (-) strand; PAM type: NRG; PAM sequence: AAG
  source 1..20: mol_type = other DNA
gccaaaatatacagtatttt

SEQ ID NO: 26462 - DNA, 20 bp, synthetic construct
  misc_feature 1..20: note = Description of Artificial Sequence: Synthetic oligonucleotide
  misc_feature 1..20: note = Target: SCN10A; (-) strand; PAM type: NRG; PAM sequence: CAG
  source 1..20: mol_type = other DNA
gtcatggtagccaaaatata

SEQ ID NO: 26463 - DNA, 20 bp, synthetic construct
  misc_feature 1..20: note = Description of Artificial Sequence: Synthetic oligonucleotide
  misc_feature 1..20: note = Target: SCN10A; (-) strand; PAM type: NRG; PAM sequence: TAG
  source 1..20: mol_type = other DNA
aaaccaagagagtgtcatgg

SEQ ID NO: 26464 - DNA, 20 bp, synthetic construct
  misc_feature 1..20: note = Description of Artificial Sequence: Synthetic oligonucleotide
  misc_feature 1..20: note = Target: SCN10A; (-) strand; PAM type: NRG; PAM sequence: TGG
  source 1..20: mol_type = other DNA
ggaaaaccaagagagtgtca

SEQ ID NO: 26465 - DNA, 20 bp, synthetic construct
  misc_feature 1..20: note = Description of Artificial Sequence: Synthetic oligonucleotide
  misc_feature 1..20: note = Target: SCN10A; (-) strand; PAM type: NRG; PAM sequence: GAG
  source 1..20: mol_type = other DNA
gaaagttaggaaaaccaaga

SEQ ID NO: 26466 - DNA, 20 bp, synthetic construct
  misc_feature 1..20: note = Description of Artificial Sequence: Synthetic oligonucleotide
  misc_feature 1..20: note = Target: SCN10A; (-) strand; PAM type: NRG; PAM sequence: GAG
  source 1..20: mol_type = other DNA
gagaaagttaggaaaaccaa

SEQ ID NO: 26467 - DNA, 20 bp, synthetic construct
  misc_feature 1..20: note = Description of Artificial Sequence: Synthetic oligonucleotide
  misc_feature 1..20: note = Target: SCN10A; (-) strand; PAM type: NRG; PAM sequence: AAG
  source 1..20: mol_type = other DNA
gagagaaagttaggaaaacc

SEQ ID NO: 26468 - DNA, 20 bp, synthetic construct
  misc_feature 1..20: note = Description of Artificial Sequence: Synthetic oligonucleotide
  misc_feature 1..20: note = Target: SCN10A; (-) strand; PAM type: NRG; PAM sequence: AGG
  source 1..20: mol_type = other DNA
gaaggagaagagagaaagtt

SEQ ID NO: 26469 - DNA, 20 bp, synthetic construct
  misc_feature 1..20: note = Description of Artificial Sequence: Synthetic oligonucleotide
  misc_feature 1..20: note = Target: SCN10A; (-) strand; PAM type: NRG; PAM sequence: TAG
  source 1..20: mol_type = other DNA
agaaggagaagagagaaagt

SEQ ID NO: 26470 - DNA, 20 bp, synthetic construct
  misc_feature 1..20: note = Description of Artificial Sequence: Synthetic oligonucleotide
  misc_feature 1..20: note = Target: SCN10A; (-) strand; PAM type: NRG; PAM sequence: AAG
  source 1..20: mol_type = other DNA
actgagaaggagaagagaga

SEQ ID NO: 26471 - DNA, 20 bp, synthetic construct
  misc_feature 1..20: note = Description of Artificial Sequence: Synthetic oligonucleotide
  misc_feature 1..20: note = Target: SCN10A; (-) strand; PAM type: NRG; PAM sequence: GAG
  source 1..20: mol_type = other DNA
agagactgagaaggagaaga

SEQ ID NO: 26472 - DNA, 20 bp, synthetic construct
  misc_feature 1..20: note = Description of Artificial Sequence: Synthetic oligonucleotide
  misc_feature 1..20: note = Target: SCN10A; (-) strand; PAM type: NRG; PAM sequence: GAG
  source 1..20: mol_type = other DNA
ggagagactgagaaggagaa

SEQ ID NO: 26473 - DNA, 20 bp, synthetic construct
  misc_feature 1..20: note = Description of Artificial Sequence: Synthetic oligonucleotide
  misc_feature 1..20: note = Target: SCN10A; (-) strand; PAM type: NRG; PAM sequence: AAG
  source 1..20: mol_type = other DNA
aaggagagactgagaaggag

SEQ ID NO: 26474 - DNA, 20 bp, synthetic construct
  misc_feature 1..20: note = Description of Artificial Sequence: Synthetic oligonucleotide
  misc_feature 1..20: note = Target: SCN10A; (-) strand; PAM type: NRG; PAM sequence: GAG
  source 1..20: mol_type = other DNA
agaaaggagagactgagaag

SEQ ID NO: 26475 - DNA, 20 bp, synthetic construct
  misc_feature 1..20: note = Description of Artificial Sequence: Synthetic oligonucleotide
  misc_feature 1..20: note = Target: SCN10A; (-) strand; PAM type: NRG; PAM sequence: AGG
  source 1..20: mol_type = other DNA
tgagaaaggagagactgaga

SEQ ID NO: 26476 - DNA, 20 bp, synthetic construct
  misc_feature 1..20: note = Description of Artificial Sequence: Synthetic oligonucleotide
  misc_feature 1..20: note = Target: SCN10A; (-) strand; PAM type: NRG; PAM sequence: AAG
  source 1..20: mol_type = other DNA
ctgagaaaggagagactgag

SEQ ID NO: 26477 - DNA, 20 bp, synthetic construct
  misc_feature 1..20: note = Description of Artificial Sequence: Synthetic oligonucleotide
  misc_feature 1..20: note = Target: SCN10A; (-) strand; PAM type: NRG; PAM sequence: GAG
  source 1..20: mol_type = other DNA
aagctgagaaaggagagact

SEQ ID NO: 26478 - DNA, 20 bp, synthetic construct
  misc_feature 1..20: note = Description of Artificial Sequence: Synthetic oligonucleotide
  misc_feature 1..20: note = Target: SCN10A; (-) strand; PAM type: NRG; PAM sequence: GAG
  source 1..20: mol_type = other DNA
tgggaaaagctgagaaagga

SEQ ID NO: 26479 - DNA, 20 bp, synthetic construct
  misc_feature 1..20: note = Description of Artificial Sequence: Synthetic oligonucleotide
  misc_feature 1..20: note = Target: SCN10A; (-) strand; PAM type: NRG; PAM sequence: GAG
  source 1..20: mol_type = other DNA
tatgggaaaagctgagaaag

SEQ ID NO: 26480 - DNA, 20 bp, synthetic construct
  misc_feature 1..20: note = Description of Artificial Sequence: Synthetic oligonucleotide
  misc_feature 1..20: note = Target: SCN10A; (-) strand; PAM type: NRG; PAM sequence: AGG
  source 1..20: mol_type = other DNA
tgtatgggaaaagctgagaa

SEQ ID NO: 26481 - DNA, 20 bp, synthetic construct
  misc_feature 1..20: note = Description of Artificial Sequence: Synthetic oligonucleotide
  misc_feature 1..20: note = Target: SCN10A; (-) strand; PAM type: NRG; PAM sequence: AAG
  source 1..20: mol_type = other DNA
atgtatgggaaaagctgaga

SEQ ID NO: 26482 - DNA, 20 bp, synthetic construct
  misc_feature 1..20: note = Description of Artificial Sequence: Synthetic oligonucleotide
  misc_feature 1..20: note = Target: SCN10A; (-) strand; PAM type: NRG; PAM sequence: GAG
  source 1..20: mol_type = other DNA
aatcatgtatgggaaaagct

SEQ ID NO: 26483 - DNA, 20 bp, synthetic construct
  misc_feature 1..20: note = Description of Artificial Sequence: Synthetic oligonucleotide
  misc_feature 1..20: note = Target: SCN10A; (-) strand; PAM type: NRG; PAM sequence: AAG
  source 1..20: mol_type = other DNA
ttcacaatcatgtatgggaa

SEQ ID NO: 26484 - DNA, 20 bp, synthetic construct
  misc_feature 1..20: note = Description of Artificial Sequence: Synthetic oligonucleotide
  misc_feature 1..20: note = Target: SCN10A; (-) strand; PAM type: NRG; PAM sequence: GGG
  source 1..20: mol_type = other DNA
cattattcacaatcatgtat

SEQ ID NO: 26485 - DNA, 20 bp, synthetic construct
  misc_feature 1..20: note = Description of Artificial Sequence: Synthetic oligonucleotide
  misc_feature 1..20: note = Target: SCN10A; (-) strand; PAM type: NRG; PAM sequence: TGG
  source 1..20: mol_type = other DNA
ccattattcacaatcatgta

SEQ ID NO: 26486 - DNA, 20 bp, synthetic construct
  misc_feature 1..20: note = Description of Artificial Sequence: Synthetic oligonucleotide
  misc_feature 1..20: note = Target: SCN10A; (-) strand; PAM type: NRG; PAM sequence: GAG
  source 1..20: mol_type = other DNA
tattctgaaaacaaaagata

SEQ ID NO: 26487 - DNA, 20 bp, synthetic construct
  misc_feature 1..20: note = Description of Artificial Sequence: Synthetic oligonucleotide
  misc_feature 1..20: note = Target: SCN10A; (-) strand; PAM type: NRG; PAM sequence: TAG
  source 1..20: mol_type = other DNA
attattctgaaaacaaaaga

SEQ ID NO: 26488 - DNA, 20 bp, synthetic construct
  misc_feature 1..20: note = Description of Artificial Sequence: Synthetic oligonucleotide
  misc_feature 1..20: note = Target: SCN10A; (-) strand; PAM type: NRG; PAM sequence: AAG
  source 1..20: mol_type = other DNA
tgttattattctgaaaacaa

SEQ ID NO: 26489 - DNA, 20 bp, synthetic construct
  misc_feature 1..20: note = Description of Artificial Sequence: Synthetic oligonucleotide
  misc_feature 1..20: note = Target: SCN10A; (-) strand; PAM type: NRG; PAM sequence: AAG
  source 1..20: mol_type = other DNA
agtaaatgctagcgctgttg

SEQ ID NO: 26490 - DNA, 20 bp, synthetic construct
  misc_feature 1..20: note = Description of Artificial Sequence: Synthetic oligonucleotide
  misc_feature 1..20: note = Target: SCN10A; (-) strand; PAM type: NRG; PAM sequence: TAG
  source 1..20: mol_type = other DNA
agtggaatctcagtaaatgc

SEQ ID NO: 26491 - DNA, 20 bp, synthetic construct
  misc_feature 1..20: note = Description of Artificial Sequence: Synthetic oligonucleotide
  misc_feature 1..20: note = Target: SCN10A; (-) strand; PAM type: NRG; PAM sequence: CAG
  source 1..20: mol_type = other DNA
tctgaaatacagtggaatct

SEQ ID NO: 26492 - DNA, 20 bp, synthetic construct
  misc_feature 1..20: note = Description of Artificial Sequence: Synthetic oligonucleotide
  misc_feature 1..20: note = Target: SCN10A; (-) strand; PAM type: NRG; PAM sequence: TGG
  source 1..20: mol_type = other DNA
atccagagtctgaaatacag

SEQ ID NO: 26493 - DNA, 20 bp, synthetic construct
  misc_feature 1..20: note = Description of Artificial Sequence: Synthetic oligonucleotide
  misc_feature 1..20: note = Target: SCN10A; (-) strand; PAM type: NRG; PAM sequence: CAG
  source 1..20: mol_type = other DNA
ttaatccagagtctgaaata

SEQ ID NO: 26494 - DNA, 20 bp, synthetic construct
  misc_feature 1..20: note = Description of Artificial Sequence: Synthetic oligonucleotide
  misc_feature 1..20: note = Target: SCN10A; (-) strand; PAM type: NRG; PAM sequence: GAG
  source 1..20: mol_type = other DNA
catgaaaattgcttaatcca

SEQ ID NO: 26495 - DNA, 20 bp, synthetic construct
  misc_feature 1..20: note = Description of Artificial Sequence: Synthetic oligonucleotide
  misc_feature 1..20: note = Target: SCN10A; (-) strand; PAM type: NRG; PAM sequence: CAG
  source 1..20: mol_type = other DNA
tgcatgaaaattgcttaatc

SEQ ID NO: 26496 - DNA, 20 bp, synthetic construct
  misc_feature 1..20: note = Description of Artificial Sequence: Synthetic oligonucleotide
  misc_feature 1..20: note = Target: SCN10A; (-) strand; PAM type: NRG; PAM sequence: TAG
  source 1..20: mol_type = other DNA
atacttcacaggtacagtga

SEQ ID NO: 26497 - DNA, 20 bp, synthetic construct
  misc_feature 1..20: note = Description of Artificial Sequence: Synthetic oligonucleotide
  misc_feature 1..20: note = Target: SCN10A; (-) strand; PAM type: NRG; PAM sequence: CAG
  source 1..20: mol_type = other DNA
gagataatacttcacaggta

SEQ ID NO: 26498 - DNA, 20 bp, synthetic construct
  misc_feature 1..20: note = Description of Artificial Sequence: Synthetic oligonucleotide
  misc_feature 1..20: note = Target: SCN10A; (-) strand; PAM type: NRG; PAM sequence: AGG
  source 1..20: mol_type = other DNA
tattagagataatacttcac

SEQ ID NO: 26499 - DNA, 20 bp, synthetic construct
  misc_feature 1..20: note = Description of Artificial Sequence: Synthetic oligonucleotide
  misc_feature 1..20: note = Target: SCN10A; (-) strand; PAM type: NRG; PAM sequence: CAG
  source 1..20: mol_type = other DNA
atattagagataatacttca

SEQ ID NO: 26500 - DNA, 20 bp, synthetic construct
  misc_feature 1..20: note = Description of Artificial Sequence: Synthetic oligonucleotide
  misc_feature 1..20: note = Target: SCN10A; (-) strand; PAM type: NRG; PAM sequence: GAG
  source 1..20: mol_type = other DNA
ggtatcttatttatatatta

SEQ ID NO: 26501 - DNA, 20 bp, synthetic construct
  misc_feature 1..20: note = Description of Artificial Sequence: Synthetic oligonucleotide
  misc_feature 1..20: note = Target: SCN10A; (-) strand; PAM type: NRG; PAM sequence: TAG
  source 1..20: mol_type = other DNA
ctggtatcttatttatatat

SEQ ID NO: 26502 - DNA, 20 bp, synthetic construct
  misc_feature 1..20: note = Description of Artificial Sequence: Synthetic oligonucleotide
  misc_feature 1..20: note = Target: SCN10A; (-) strand; PAM type: NRG; PAM sequence: TGG
  source 1..20: mol_type = other DNA
aaattttaactttgctgctc

SEQ ID NO: 26503 - DNA, 20 bp, synthetic construct
  misc_feature 1..20: note = Description of Artificial Sequence: Synthetic oligonucleotide
  misc_feature 1..20: note = Target: SCN10A; (-) strand; PAM type: NRG; PAM sequence: TGG
  source 1..20: mol_type = other DNA
actcattagtaatgtgatct

SEQ ID NO: 26504 - DNA, 20 bp, synthetic construct
  misc_feature 1..20: note = Description of Artificial Sequence: Synthetic oligonucleotide
  misc_feature 1..20: note = Target: SCN10A; (-) strand; PAM type: NRG; PAM sequence: TAG
  source 1..20: mol_type = other DNA
agtaccgttctgccactcat

SEQ ID NO: 26505 - DNA, 20 bp, synthetic construct
  misc_feature 1..20: note = Description of Artificial Sequence: Synthetic oligonucleotide
  misc_feature 1..20: note = Target: SCN10A; (-) strand; PAM type: NRG; PAM sequence: AAG
  source 1..20: mol_type = other DNA
tggcaaacatacctgagttt

SEQ ID NO: 26506 - DNA, 20 bp, synthetic construct
  misc_feature 1..20: note = Description of Artificial Sequence: Synthetic oligonucleotide
  misc_feature 1..20: note = Target: SCN10A; (-) strand; PAM type: NRG; PAM sequence: GAG
  source 1..20: mol_type = other DNA
agattgtggcaaacatacct

SEQ ID NO: 26507 - DNA, 20 bp, synthetic construct
  misc_feature 1..20: note = Description of Artificial Sequence: Synthetic oligonucleotide
  misc_feature 1..20: note = Target: SCN10A; (-) strand; PAM type: NRG; PAM sequence: TGG
  source 1..20: mol_type = other DNA
gagatgtttccaagagattg

SEQ ID NO: 26508 - DNA, 20 bp, synthetic construct
  misc_feature 1..20: note = Description of Artificial Sequence: Synthetic oligonucleotide
  misc_feature 1..20: note = Target: SCN10A; (-) strand; PAM type: NRG; PAM sequence: GAG
  source 1..20: mol_type = other DNA
gaatgatgagatgtttccaa

SEQ ID NO: 26509 - DNA, 20 bp, synthetic construct
  misc_feature 1..20: note = Description of Artificial Sequence: Synthetic oligonucleotide
  misc_feature 1..20: note = Target: SCN10A; (-) strand; PAM type: NRG; PAM sequence: AAG
  source 1..20: mol_type = other DNA
gggaatgatgagatgtttcc

SEQ ID NO: 26510 - DNA, 20 bp, synthetic construct
  misc_feature 1..20: note = Description of Artificial Sequence: Synthetic oligonucleotide
  misc_feature 1..20: note = Target: SCN10A; (-) strand; PAM type: NRG; PAM sequence: GAG
  source 1..20: mol_type = other DNA
agtgaagatatgggaatgat

SEQ ID NO: 26511 - DNA, 20 bp, synthetic construct
  misc_feature 1..20: note = Description of Artificial Sequence: Synthetic oligonucleotide
  misc_feature 1..20: note = Target: SCN10A; (-) strand; PAM type: NRG; PAM sequence: GGG
  source 1..20: mol_type = other DNA
taaatgagaagtgaagatat

SEQ ID NO: 26512 - DNA, 20 bp, synthetic construct
  misc_feature 1..20: note = Description of Artificial Sequence: Synthetic oligonucleotide
  misc_feature 1..20: note = Target: SCN10A; (-) strand; PAM type: NRG; PAM sequence: TGG
  source 1..20: mol_type = other DNA
ataaatgagaagtgaagata

SEQ ID NO: 26513 - DNA, 20 bp, synthetic construct
  misc_feature 1..20: note = Description of Artificial Sequence: Synthetic oligonucleotide
  misc_feature 1..20: note = Target: SCN10A; (-) strand; PAM type: NRG; PAM sequence: AAG
  source 1..20: mol_type = other DNA
ctgcatataaatgagaagtg

SEQ ID NO: 26514 - DNA, 20 bp, synthetic construct
  misc_feature 1..20: note = Description of Artificial Sequence: Synthetic oligonucleotide
  misc_feature 1..20: note = Target: SCN10A; (-) strand; PAM type: NRG; PAM sequence: AAG
  source 1..20: mol_type = other DNA
gtcatctgcatataaatgag

SEQ ID NO: 26515 - DNA, 20 bp, synthetic construct
  misc_feature 1..20: note = Description of Artificial Sequence: Synthetic oligonucleotide
  misc_feature 1..20: note = Target: SCN10A; (-) strand; PAM type: NRG; PAM sequence: GAG
  source 1..20: mol_type = other DNA
tcagtcatctgcatataaat

SEQ ID NO: 26516 - DNA, 20 bp, synthetic construct
  misc_feature 1..20: note = Description of Artificial Sequence: Synthetic oligonucleotide
  misc_feature 1..20: note = Target: SCN10A; (-) strand; PAM type: NRG; PAM sequence: CAG
  source 1..20: mol_type = other DNA
gagagctacagataaagact

SEQ ID NO: 26517 - DNA, 20 bp, synthetic construct
  misc_feature 1..20: note = Description of Artificial Sequence: Synthetic oligonucleotide
  misc_feature 1..20: note = Target: SCN10A; (-) strand; PAM type: NRG; PAM sequence: AAG
  source 1..20: mol_type = other DNA
acttctgagagctacagata

SEQ ID NO: 26518 - DNA, 20 bp, synthetic construct
  misc_feature 1..20: note = Description of Artificial Sequence: Synthetic oligonucleotide
  misc_feature 1..20: note = Target: SCN10A; (-) strand; PAM type: NRG; PAM sequence: CAG
  source 1..20: mol_type = other DNA
ccatggacttctgagagcta

SEQ ID NO: 26519 - DNA, 20 bp, synthetic construct
  misc_feature 1..20: note = Description of Artificial Sequence: Synthetic oligonucleotide
  misc_feature 1..20: note = Target: SCN10A; (-) strand; PAM type: NRG; PAM sequence: GAG
  source 1..20: mol_type = other DNA
tgagccccatggacttctga

SEQ ID NO: 26520 - DNA, 20 bp, synthetic construct
  misc_feature 1..20: note = Description of Artificial Sequence: Synthetic oligonucleotide
  misc_feature 1..20: note = Target: SCN10A; (-) strand; PAM type: NRG; PAM sequence: GAG
  source 1..20: mol_type = other DNA
tctgagccccatggacttct

SEQ ID NO: 26521 - DNA, 20 bp, synthetic construct
  misc_feature 1..20: note = Description of Artificial Sequence: Synthetic oligonucleotide
  misc_feature 1..20: note = Target: SCN10A; (-) strand; PAM type: NRG; PAM sequence: TGG
  source 1..20: mol_type = other DNA
aaatgaagatctgagcccca

SEQ ID NO: 26522 - DNA, 20 bp, synthetic construct
  misc_feature 1..20: note = Description of Artificial Sequence: Synthetic oligonucleotide
  misc_feature 1..20: note = Target: SCN10A; (-) strand; PAM type: NRG; PAM sequence: GAG
  source 1..20: mol_type = other DNA
gagagatcaaatgaagatct

SEQ ID NO: 26523 - DNA, 20 bp, synthetic construct
  misc_feature 1..20: note = Description of Artificial Sequence: Synthetic oligonucleotide
  misc_feature 1..20: note = Target: SCN10A; (-) strand; PAM type: NRG; PAM sequence: AAG
  source 1..20: mol_type = other DNA
tgaagtggagagatcaaatg

SEQ ID NO: 26524 - DNA, 20 bp, synthetic construct
  misc_feature 1..20: note = Description of Artificial Sequence: Synthetic oligonucleotide
  misc_feature 1..20: note = Target: SCN10A; (-) strand; PAM type: NRG; PAM sequence: GAG
  source 1..20: mol_type = other DNA
tcatgagacactgaagtgga

SEQ ID NO: 26525 - DNA, 20 bp, synthetic construct
  misc_feature 1..20: note = Description of Artificial Sequence: Synthetic oligonucleotide
  misc_feature 1..20: note = Target: SCN10A; (-) strand; PAM type: NRG; PAM sequence: GAG
  source 1..20: mol_type = other DNA
gctcatgagacactgaagtg

SEQ ID NO: 26526 - DNA, 20 bp, synthetic construct
  misc_feature 1..20: note = Description of Artificial Sequence: Synthetic oligonucleotide
  misc_feature 1..20: note = Target: SCN10A; (-) strand; PAM type: NRG; PAM sequence: TGG
  source 1..20: mol_type = other DNA
gtgctcatgagacactgaag

SEQ ID NO: 26527 - DNA, 20 bp, synthetic construct
  misc_feature 1..20: note = Description of Artificial Sequence: Synthetic oligonucleotide
  misc_feature 1..20: note = Target: SCN10A; (-) strand; PAM type: NRG; PAM sequence: AAG
  source 1..20: mol_type = other DNA
gaggtgctcatgagacactg

SEQ ID NO: 26528 - DNA, 20 bp, synthetic construct
  misc_feature 1..20: note = Description of Artificial Sequence: Synthetic oligonucleotide
  misc_feature 1..20: note = Target: SCN10A; (-) strand; PAM type: NRG; PAM sequence: GAG
  source 1..20: mol_type = other DNA
gctgagcttgaggtgctcat

SEQ ID NO: 26529 - DNA, 20 bp, synthetic construct
  misc_feature 1..20: note = Description of Artificial Sequence: Synthetic oligonucleotide
  misc_feature 1..20: note = Target: SCN10A; (-) strand; PAM type: NRG; PAM sequence: AGG
  source 1..20: mol_type = other DNA
tttggggcatgctgagcttg

SEQ ID NO: 26530 - DNA, 20 bp, synthetic construct
  misc_feature 1..20: note = Description of Artificial Sequence: Synthetic oligonucleotide
  misc_feature 1..20: note = Target: SCN10A; (-) strand; PAM type: NRG; PAM sequence: GAG
  source 1..20: mol_type = other DNA
gtttggggcatgctgagctt

SEQ ID NO: 26531 - DNA, 20 bp, synthetic construct
  misc_feature 1..20: note = Description of Artificial Sequence: Synthetic oligonucleotide
  misc_feature 1..20: note = Target: SCN10A; (-) strand; PAM type: NRG; PAM sequence: GAG
  source 1..20: mol_type = other DNA
agtttagtttggggcatgct

SEQ ID NO: 26532 - DNA, 20 bp, synthetic construct
  misc_feature 1..20: note = Description of Artificial Sequence: Synthetic oligonucleotide
  misc_feature 1..20: note = Target: SCN10A; (-) strand; PAM type: NRG; PAM sequence: GGG
  source 1..20: mol_type = other DNA
ataattatgagtttagtttg

SEQ ID NO: 26533 - DNA, 20 bp, synthetic construct
  misc_feature 1..20: note = Description of Artificial Sequence: Synthetic oligonucleotide
  misc_feature 1..20: note = Target: SCN10A; (-) strand; PAM type: NRG; PAM sequence: GGG
  source 1..20: mol_type = other DNA
gataattatgagtttagttt

SEQ ID NO: 26534 - DNA, 20 bp, synthetic construct
  misc_feature 1..20: note = Description of Artificial Sequence: Synthetic oligonucleotide
  misc_feature 1..20: note = Target: SCN10A; (-) strand; PAM type: NRG; PAM sequence: TGG
  source 1..20: mol_type = other DNA
agataattatgagtttagtt

SEQ ID NO: 26535 - DNA, 20 bp, synthetic construct
  misc_feature 1..20: note = Description of Artificial Sequence: Synthetic oligonucleotide
  misc_feature 1..20: note = Target: SCN10A; (-) strand; PAM type: NRG; PAM sequence: TAG
  source 1..20: mol_type = other DNA
tgaggagataattatgagtt

SEQ ID NO: 26536 - DNA, 20 bp, synthetic construct
  misc_feature 1..20: note = Description of Artificial Sequence: Synthetic oligonucleotide
  misc_feature 1..20: note = Target: SCN10A; (-) strand; PAM type: NRG; PAM sequence: GAG
  source 1..20: mol_type = other DNA
agaagtgaggagataattat

SEQ ID NO: 26537 - DNA, 20 bp, synthetic construct
  misc_feature 1..20: note = Description of Artificial Sequence: Synthetic oligonucleotide
  misc_feature 1..20: note = Target: SCN10A; (-) strand; PAM type: NRG; PAM sequence: GAG
  source 1..20: mol_type = other DNA
aggtattagaaagaagtgag

SEQ ID NO: 26538 - DNA, 20 bp, synthetic construct
  misc_feature 1..20: note = Description of Artificial Sequence: Synthetic oligonucleotide
  misc_feature 1..20: note = Target: SCN10A; (-) strand; PAM type: NRG; PAM sequence: AGG
  source 1..20: mol_type = other DNA
gcaggtattagaaagaagtg

SEQ ID NO: 26539 - DNA, 20 bp, synthetic construct
  misc_feature 1..20: note = Description of Artificial Sequence: Synthetic oligonucleotide
  misc_feature 1..20: note = Target: SCN10A; (-) strand; PAM type: NRG; PAM sequence: GAG
  source 1..20: mol_type = other DNA
ggcaggtattagaaagaagt

SEQ ID NO: 26540 - DNA, 20 bp, synthetic construct
  misc_feature 1..20: note = Description of Artificial Sequence: Synthetic oligonucleotide
  misc_feature 1..20: note = Target: SCN10A; (-) strand; PAM type: NRG; PAM sequence: AAG
  source 1..20: mol_type = other DNA
gagaggcaggtattagaaag

SEQ ID NO: 26541 - DNA, 20 bp, synthetic construct
  misc_feature 1..20: note = Description of Artificial Sequence: Synthetic oligonucleotide
  misc_feature 1..20: note = Target: SCN10A; (-) strand; PAM type: NRG; PAM sequence: AAG
  source 1..20: mol_type = other DNA
gaagagaggcaggtattaga

SEQ ID NO: 26542 - DNA, 20 bp, synthetic construct
  misc_feature 1..20: note = Description of Artificial Sequence: Synthetic oligonucleotide
  misc_feature 1..20: note = Target: SCN10A; (-) strand; PAM type: NRG; PAM sequence: TAG
  source 1..20: mol_type = other DNA
catagaagagaggcaggtat

SEQ ID NO: 26543 - DNA, 20 bp, synthetic construct
  misc_feature 1..20: note = Description of Artificial Sequence: Synthetic oligonucleotide
  misc_feature 1..20: note = Target: SCN10A; (-) strand; PAM type: NRG; PAM sequence: AGG
  source 1..20: mol_type = other DNA
aaaagacatagaagagaggc

SEQ ID NO: 26544 - DNA, 20 bp, synthetic construct
  misc_feature 1..20: note = Description of Artificial Sequence: Synthetic oligonucleotide
  misc_feature 1..20: note = Target: SCN10A; (-) strand; PAM type: NRG; PAM sequence: CAG
  source 1..20: mol_type = other DNA
aaaaagacatagaagagagg

SEQ ID NO: 26545 - DNA, 20 bp, synthetic construct
  misc_feature 1..20: note = Description of Artificial Sequence: Synthetic oligonucleotide
  misc_feature 1..20: note = Target: SCN10A; (-) strand; PAM type: NRG; PAM sequence: AGG
  source 1..20: mol_type = other DNA
agtaaaaagacatagaagag

SEQ ID NO: 26546 - DNA, 20 bp, synthetic construct
  misc_feature 1..20: note = Description of Artificial Sequence: Synthetic oligonucleotide
  misc_feature 1..20: note = Target: SCN10A; (-) strand; PAM type: NRG; PAM sequence: GAG
  source 1..20: mol_type = other DNA
cagtaaaaagacatagaaga

SEQ ID NO: 26547 - DNA, 20 bp, synthetic construct
  misc_feature 1..20: note = Description of Artificial Sequence: Synthetic oligonucleotide
  misc_feature 1..20: note = Target: SCN10A; (-) strand; PAM type: NRG; PAM sequence: GAG
  source 1..20: mol_type = other DNA
ggcagtaaaaagacatagaa

SEQ ID NO: 26548 - DNA, 20 bp, synthetic construct
  misc_feature 1..20: note = Description of Artificial Sequence: Synthetic oligonucleotide
  misc_feature 1..20: note = Target: SCN10A; (-) strand; PAM type: NRG; PAM sequence: AAG
  source 1..20: mol_type = other DNA
atggcagtaaaaagacatag

SEQ ID NO: 26549 - DNA, 20 bp, synthetic construct
  misc_feature 1..20: note = Description of Artificial Sequence: Synthetic oligonucleotide
  misc_feature 1..20: note = Target: SCN10A; (-) strand; PAM type: NRG; PAM sequence: TAG
  source 1..20: mol_type = other DNA
ctaatggcagtaaaaagaca

SEQ ID NO: 26550 - DNA, 20 bp, synthetic construct
  misc_feature 1..20: note = Description of Artificial Sequence: Synthetic oligonucleotide
  misc_feature 1..20: note = Target: SCN10A; (-) strand; PAM type: NRG; PAM sequence: AAG
  source 1..20: mol_type = other DNA
ttggggctaatggcagtaaa

SEQ ID NO: 26551 - DNA, 20 bp, synthetic construct
  misc_feature 1..20: note = Description of Artificial Sequence: Synthetic oligonucleotide
  misc_feature 1..20: note = Target: SCN10A; (-) strand; PAM type: NRG; PAM sequence: CAG
  source 1..20: mol_type = other DNA
aggctatttggggctaatgg

SEQ ID NO: 26552 - DNA, 20 bp, synthetic construct
  misc_feature 1..20: note = Description of Artificial Sequence: Synthetic oligonucleotide
  misc_feature 1..20: note = Target: SCN10A; (-) strand; PAM type: NRG; PAM sequence: TGG
  source 1..20: mol_type = other DNA
aacaggctatttggggctaa

SEQ ID NO: 26553 - DNA, 20 bp, synthetic construct
  misc_feature 1..20: note = Description of Artificial Sequence: Synthetic oligonucleotide
  misc_feature 1..20: note = Target: SCN10A; (-) strand; PAM type: NRG; PAM sequence: GGG
  source 1..20: mol_type = other DNA
acacagaaacaggctatttg

SEQ ID NO: 26554 - DNA, 20 bp, synthetic construct
  misc_feature 1..20: note = Description of Artificial Sequence: Synthetic oligonucleotide
  misc_feature 1..20: note = Target: SCN10A; (-) strand; PAM type: NRG; PAM sequence: GGG
  source 1..20: mol_type = other DNA
gacacagaaacaggctattt

SEQ ID NO: 26555 - DNA, 20 bp, synthetic construct
  misc_feature 1..20: note = Description of Artificial Sequence: Synthetic oligonucleotide
  misc_feature 1..20: note = Target: SCN10A; (-) strand; PAM type: NRG; PAM sequence: TGG
  source 1..20: mol_type = other DNA
agacacagaaacaggctatt

SEQ ID NO: 26556 - DNA, 20 bp, synthetic construct
  misc_feature 1..20: note = Description of Artificial Sequence: Synthetic oligonucleotide
  misc_feature 1..20: note = Target: SCN10A; (-) strand; PAM type: NRG; PAM sequence: AGG
  source 1..20: mol_type = other DNA
ttgtggacagacacagaaac

SEQ ID NO: 26557 - DNA, 20 bp, synthetic construct
  misc_feature 1..20: note = Description of Artificial Sequence: Synthetic oligonucleotide
  misc_feature 1..20: note = Target: SCN10A; (-) strand; PAM type: NRG; PAM sequence: CAG
  source 1..20: mol_type = other DNA
gttgtggacagacacagaaa

SEQ ID NO: 26558 - DNA, 20 bp, synthetic construct
  misc_feature 1..20: note = Description of Artificial Sequence: Synthetic oligonucleotide
  misc_feature 1..20: note = Target: SCN10A; (-) strand; PAM type: NRG; PAM sequence: CAG
  source 1..20: mol_type = other DNA
acccaggttgtggacagaca

SEQ ID NO: 26559 - DNA, 20 bp, synthetic construct
  misc_feature 1..20: note = Description of Artificial Sequence: Synthetic oligonucleotide
  misc_feature 1..20: note = Target: SCN10A; (-) strand; PAM type: NRG; PAM sequence: CAG
  source 1..20: mol_type = other DNA
tatggtacccaggttgtgga

SEQ ID NO: 26560 - DNA, 20 bp, synthetic construct
  misc_feature 1..20: note = Description of Artificial Sequence: Synthetic oligonucleotide
  misc_feature 1..20: note = Target: SCN10A; (-) strand; PAM type: NRG; PAM sequence: TGG
  source 1..20: mol_type = other DNA
taattatggtacccaggttg

SEQ ID NO: 26561 - DNA, 20 bp, synthetic construct
  misc_feature 1..20: note = Description of Artificial Sequence: Synthetic oligonucleotide
  misc_feature 1..20: note = Target: SCN10A; (-) strand; PAM type: NRG; PAM sequence: AGG
  source 1..20: mol_type = other DNA
agagcataattatggtaccc

SEQ ID NO: 26562 - DNA, 20 bp, synthetic construct
  misc_feature 1..20: note = Description of Artificial Sequence: Synthetic oligonucleotide
  misc_feature 1..20: note = Target: SCN10A; (-) strand; PAM type: NRG; PAM sequence: CAG
  source 1..20: mol_type = other DNA
aagagcataattatggtacc

SEQ ID NO: 26563 - DNA, 20 bp, synthetic construct
  misc_feature 1..20: note = Description of Artificial Sequence: Synthetic oligonucleotide
  misc_feature 1..20: note = Target: SCN10A; (-) strand; PAM type: NRG; PAM sequence: TGG
  source 1..20: mol_type = other DNA
aaatagaaagagcataatta

SEQ ID NO: 26564 - DNA, 20 bp, synthetic construct
  misc_feature 1..20: note = Description of Artificial Sequence: Synthetic oligonucleotide
  misc_feature 1..20: note = Target: SCN10A; (-) strand; PAM type: NRG; PAM sequence: GAG
  source 1..20: mol_type = other DNA
tatgtggaatgaaatagaaa

SEQ ID NO: 26565 - DNA, 20 bp, synthetic construct
  misc_feature 1..20: note = Description of Artificial Sequence: Synthetic oligonucleotide
  misc_feature 1..20: note = Target: SCN10A; (-) strand; PAM type: NRG; PAM sequence: AAG
  source 1..20: mol_type = other DNA
tgtatgtggaatgaaataga

SEQ ID NO: 26566 - DNA, 20 bp, synthetic construct
  misc_feature 1..20: note = Description of Artificial Sequence: Synthetic oligonucleotide
  misc_feature 1..20: note = Target: SCN10A; (-) strand; PAM type: NRG; PAM sequence: TAG
  source 1..20: mol_type = other DNA
tgattgtatgtggaatgaaa

SEQ ID NO: 26567 - DNA, 20 bp, synthetic construct
  misc_feature 1..20: note = Description of Artificial Sequence: Synthetic oligonucleotide
  misc_feature 1..20: note = Target: SCN10A; (-) strand; PAM type: NRG; PAM sequence: TGG
  source 1..20: mol_type = other DNA
actagatgtttgattgtatg

SEQ ID NO: 26568 - DNA, 20 bp, synthetic construct
  misc_feature 1..20: note = Description of Artificial Sequence: Synthetic oligonucleotide
  misc_feature 1..20: note = Target: SCN10A; (-) strand; PAM type: NRG; PAM sequence: TAG
  source 1..20: mol_type = other DNA
ggaggcagaagcaacagcac

SEQ ID NO: 26569 - DNA, 20 bp, synthetic construct
  misc_feature 1..20: note = Description of Artificial Sequence: Synthetic oligonucleotide
  misc_feature 1..20: note = Target: SCN10A; (-) strand; PAM type: NRG; PAM sequence: CAG
  source 1..20: mol_type = other DNA
tattaaggaggcagaagcaa

SEQ ID NO: 26570 - DNA, 20 bp, synthetic construct
  misc_feature 1..20: note = Description of Artificial Sequence: Synthetic oligonucleotide
  misc_feature 1..20: note = Target: SCN10A; (-) strand; PAM type: NRG; PAM sequence: AAG
  source 1..20: mol_type = other DNA
agaagatattaaggaggcag

SEQ ID NO: 26571 - DNA, 20 bp, synthetic construct
  misc_feature 1..20: note = Description of Artificial Sequence: Synthetic oligonucleotide
  misc_feature 1..20: note = Target: SCN10A; (-) strand; PAM type: NRG; PAM sequence: CAG
  source 1..20: mol_type = other DNA
aagagaagatattaaggagg

SEQ ID NO: 26572 - DNA, 20 bp, synthetic construct
  misc_feature 1..20: note = Description of Artificial Sequence: Synthetic oligonucleotide
  misc_feature 1..20: note = Target: SCN10A; (-) strand; PAM type: NRG; PAM sequence: AGG
  source 1..20: mol_type = other DNA
atgaagagaagatattaagg

SEQ ID NO: 26573 - DNA, 20 bp, synthetic construct
  misc_feature 1..20: note = Description of Artificial Sequence: Synthetic oligonucleotide
  misc_feature 1..20: note = Target: SCN10A; (-) strand; PAM type: NRG; PAM sequence: GAG
  source 1..20: mol_type = other DNA
tatgaagagaagatattaag

SEQ ID NO: 26574 - DNA, 20 bp, synthetic construct
  misc_feature 1..20: note = Description of Artificial Sequence: Synthetic oligonucleotide
  misc_feature 1..20: note = Target: SCN10A; (-) strand; PAM type: NRG; PAM sequence: AGG
  source 1..20: mol_type = other DNA
gatatgaagagaagatatta

SEQ ID NO: 26575 - DNA, 20 bp, synthetic construct
  misc_feature 1..20: note = Description of Artificial Sequence: Synthetic oligonucleotide
  misc_feature 1..20: note = Target: SCN10A; (-) strand; PAM type: NRG; PAM sequence: AAG
  source 1..20: mol_type = other DNA
agatatgaagagaagatatt

SEQ ID NO: 26576 - DNA, 20 bp, synthetic construct
  misc_feature 1..20: note = Description of Artificial Sequence: Synthetic oligonucleotide
  misc_feature 1..20: note = Target: SCN10A; (-) strand; PAM type: NRG; PAM sequence: AAG
  source 1..20: mol_type = other DNA
ggttagagagatatgaagag

SEQ ID NO: 26577 - DNA, 20 bp, synthetic construct
  misc_feature 1..20: note = Description of Artificial Sequence: Synthetic oligonucleotide
  misc_feature 1..20: note = Target: SCN10A; (-) strand; PAM type: NRG; PAM sequence: GAG
  source 1..20: mol_type = other DNA
agaggttagagagatatgaa

SEQ ID NO: 26578 - DNA, 20 bp, synthetic construct
  misc_feature 1..20: note = Description of Artificial Sequence: Synthetic oligonucleotide
  misc_feature 1..20: note = Target: SCN10A; (-) strand; PAM type: NRG; PAM sequence: AAG
  source 1..20: mol_type = other DNA
ggagaggttagagagatatg

SEQ ID NO: 26579 - DNA, 20 bp, synthetic construct
  misc_feature 1..20: note = Description of Artificial Sequence: Synthetic oligonucleotide
  misc_feature 1..20: note = Target: SCN10A; (-) strand; PAM type: NRG; PAM sequence: GAG
  source 1..20: mol_type = other DNA
agtatgatggagaggttaga

SEQ ID NO: 26580 - DNA, 20 bp, synthetic construct
  misc_feature 1..20: note = Description of Artificial Sequence: Synthetic oligonucleotide
  misc_feature 1..20: note = Target: SCN10A; (-) strand; PAM type: NRG; PAM sequence: GAG
  source 1..20: mol_type = other DNA
gcagtatgatggagaggtta

SEQ ID NO: 26581 - DNA, 20 bp, synthetic construct
  misc_feature 1..20: note = Description of Artificial Sequence: Synthetic oligonucleotide
  misc_feature 1..20: note = Target: SCN10A; (-) strand; PAM type: NRG; PAM sequence: TAG
  source 1..20: mol_type = other DNA
cagcagtatgatggagaggt

SEQ ID NO: 26582 - DNA, 20 bp, synthetic construct
  misc_feature 1..20: note = Description of Artificial Sequence: Synthetic oligonucleotide
  misc_feature 1..20: note = Target: SCN10A; (-) strand; PAM type: NRG; PAM sequence: AGG
  source 1..20: mol_type = other DNA
ggaccagcagtatgatggag

SEQ ID NO: 26583 - DNA, 20 bp, synthetic construct
  misc_feature 1..20: note = Description of Artificial Sequence: Synthetic oligonucleotide
  misc_feature 1..20: note = Target: SCN10A; (-) strand; PAM type: NRG; PAM sequence: GAG
  source 1..20: mol_type = other DNA
tggaccagcagtatgatgga

SEQ ID NO: 26584 - DNA, 20 bp, synthetic construct
  misc_feature 1..20: note = Description of Artificial Sequence: Synthetic oligonucleotide
  misc_feature 1..20: note = Target: SCN10A; (-) strand; PAM type: NRG; PAM sequence: GAG
  source 1..20: mol_type = other DNA
attggaccagcagtatgatg

SEQ ID NO: 26585 - DNA, 20 bp, synthetic construct
  misc_feature 1..20: note = Description of Artificial Sequence: Synthetic oligonucleotide
  misc_feature 1..20: note = Target: SCN10A; (-) strand; PAM type: NRG; PAM sequence: TGG
  source 1..20: mol_type = other DNA
tgattggaccagcagtatga

SEQ ID NO: 26586 - DNA, 20 bp, synthetic construct
  misc_feature 1..20: note = Description of Artificial Sequence: Synthetic oligonucleotide
  misc_feature 1..20: note = Target: SCN10A; (-) strand; PAM type: NRG; PAM sequence: CAG
  source 1..20: mol_type = other DNA
gatgacagtgattggaccag

SEQ ID NO: 26587 - DNA, 20 bp, synthetic construct
  misc_feature 1..20: note = Description of Artificial Sequence: Synthetic oligonucleotide
  misc_feature 1..20: note = Target: SCN10A; (-) strand; PAM type: NRG; PAM sequence: CAG
  source 1..20: mol_type = other DNA
tgagatgacagtgattggac

SEQ ID NO: 26588 - DNA, 20 bp, synthetic construct
  misc_feature 1..20: note = Description of Artificial Sequence: Synthetic oligonucleotide
  misc_feature 1..20: note = Target: SCN10A; (-) strand; PAM type: NRG; PAM sequence: TGG
  source 1..20: mol_type = other DNA
gccagtgagatgacagtgat

SEQ ID NO: 26589 - DNA, 20 bp, synthetic construct
  misc_feature 1..20: note = Description of Artificial Sequence: Synthetic oligonucleotide
  misc_feature 1..20: note = Target: SCN10A; (-) strand; PAM type: NRG; PAM sequence: CAG
  source 1..20: mol_type = other DNA
atacgaggccagtgagatga

SEQ ID NO: 26590 - DNA, 20 bp, synthetic construct
  misc_feature 1..20: note = Description of Artificial Sequence: Synthetic oligonucleotide
  misc_feature 1..20: note = Target: SCN10A; (-) strand; PAM type: NRG; PAM sequence: GAG
  source 1..20: mol_type = other DNA
atgacacatacgaggccagt

SEQ ID NO: 26591 - DNA, 20 bp, synthetic construct
  misc_feature 1..20: note = Description of Artificial Sequence: Synthetic oligonucleotide
  misc_feature 1..20: note = Target: SCN10A; (-) strand; PAM type: NRG; PAM sequence: CAG
  source 1..20: mol_type = other DNA
caaaatgacacatacgaggc

SEQ ID NO: 26592 - DNA, 20 bp, synthetic construct
  misc_feature 1..20: note = Description of Artificial Sequence: Synthetic oligonucleotide
  misc_feature 1..20: note = Target: SCN10A; (-) strand; PAM type: NRG; PAM sequence: AGG
  source 1..20: mol_type = other DNA
gaatcaaaatgacacatacg

SEQ ID NO: 26593 - DNA, 20 bp, synthetic construct
  misc_feature 1..20: note = Description of Artificial Sequence: Synthetic oligonucleotide
  misc_feature 1..20: note = Target: SCN10A; (-) strand; PAM type: NRG; PAM sequence: GAG
  source 1..20: mol_type = other DNA
ggaatcaaaatgacacatac

SEQ ID NO: 26594 - DNA, 20 bp, synthetic construct
  misc_feature 1..20: note = Description of Artificial Sequence: Synthetic oligonucleotide
  misc_feature 1..20: note = Target: SCN10A; (-) strand; PAM type: NRG; PAM sequence: GGG
  source 1..20: mol_type = other DNA
taggttagaaaggactaaag

SEQ ID NO: 26595 - DNA, 20 bp, synthetic construct
  misc_feature 1..20: note = Description of Artificial Sequence: Synthetic oligonucleotide
  misc_feature 1..20: note = Target: SCN10A; (-) strand; PAM type: NRG; PAM sequence: GGG
  source 1..20: mol_type = other DNA
ataggttagaaaggactaaa

SEQ ID NO: 26596 - DNA, 20 bp, synthetic construct
  misc_feature 1..20: note = Description of Artificial Sequence: Synthetic oligonucleotide
  misc_feature 1..20: note = Target: SCN10A; (-) strand; PAM type: NRG; PAM sequence: AGG
  source 1..20: mol_type = other DNA
aataggttagaaaggactaa

SEQ ID NO: 26597 - DNA, 20 bp, synthetic construct
  misc_feature 1..20: note = Description of Artificial Sequence: Synthetic oligonucleotide
  misc_feature 1..20: note = Target: SCN10A; (-) strand; PAM type: NRG; PAM sequence: AAG
  source 1..20: mol_type = other DNA
gaataggttagaaaggacta

SEQ ID NO: 26598 - DNA, 20 bp, synthetic construct
  misc_feature 1..20: note = Description of Artificial Sequence: Synthetic oligonucleotide
  misc_feature 1..20: note = Target: SCN10A; (-) strand; PAM type: NRG; PAM sequence: AGG
  source 1..20: mol_type = other DNA
tgttggagaataggttagaa

SEQ ID NO: 26599 - DNA, 20 bp, synthetic construct
  misc_feature 1..20: note = Description of Artificial Sequence: Synthetic oligonucleotide
  misc_feature 1..20: note = Target: SCN10A; (-) strand; PAM type: NRG; PAM sequence: AAG
  source 1..20: mol_type = other DNA
ctgttggagaataggttaga

SEQ ID NO: 26600 - DNA, 20 bp, synthetic construct
  misc_feature 1..20: note = Description of Artificial Sequence: Synthetic oligonucleotide
  misc_feature 1..20: note = Target: SCN10A; (-) strand; PAM type: NRG; PAM sequence: TAG
  source 1..20: mol_type = other DNA
gccactgttggagaataggt

SEQ ID NO: 26601 - DNA, 20 bp, synthetic construct
  misc_feature 1..20: note = Description of Artificial Sequence: Synthetic oligonucleotide
  misc_feature 1..20: note = Target: SCN10A; (-) strand; PAM type: NRG; PAM sequence: AGG
  source 1..20: mol_type = other DNA
tttggccactgttggagaat

SEQ ID NO: 26602 - DNA, 20 bp, synthetic construct
  misc_feature 1..20: note = Description of Artificial Sequence: Synthetic oligonucleotide
  misc_feature 1..20: note = Target: SCN10A; (-) strand; PAM type: NRG; PAM sequence: TAG
  source 1..20: mol_type = other DNA
atttggccactgttggagaa

SEQ ID NO: 26603 - DNA, 20 bp, synthetic construct
  misc_feature 1..20: note = Description of Artificial Sequence: Synthetic oligonucleotide
  misc_feature 1..20: note = Target: SCN10A; (-) strand; PAM type: NRG; PAM sequence: GAG
  source 1..20: mol_type = other DNA
atatcatttggccactgttg

SEQ ID NO: 26604 - DNA, 20 bp, synthetic construct
  misc_feature 1..20: note = Description of Artificial Sequence: Synthetic oligonucleotide
  misc_feature 1..20: note = Target: SCN10A; (-) strand; PAM type: NRG; PAM sequence: TGG
  source 1..20: mol_type = other DNA
aaatatcatttggccactgt

SEQ ID NO: 26605 - DNA, 20 bp, synthetic construct
  misc_feature 1..20: note = Description of Artificial Sequence: Synthetic oligonucleotide
  misc_feature 1..20: note = Target: SCN10A; (-) strand; PAM type: NRG; PAM sequence: TGG
  source 1..20: mol_type = other DNA
ttcattttagaaatatcatt

SEQ ID NO: 26606 - DNA, 20 bp, synthetic construct
  misc_feature 1..20: note = Description of Artificial Sequence: Synthetic oligonucleotide
  misc_feature 1..20: note = Target: SCN10A; (-) strand; PAM type: NRG; PAM sequence: TAG
  source 1..20: mol_type = other DNA
acataaccagattttcattt

SEQ ID NO: 26607 - DNA, 20 bp, synthetic construct
  misc_feature 1..20: note = Description of Artificial Sequence: Synthetic oligonucleotide
  misc_feature 1..20: note = Target: SCN10A; (-) strand; PAM type: NRG; PAM sequence: CAG
  source 1..20: mol_type = other DNA
aaataaagatatcacataac

SEQ ID NO: 26608 - DNA, 20 bp, synthetic construct
  misc_feature 1..20: note = Description of Artificial Sequence: Synthetic oligonucleotide
  misc_feature 1..20: note = Target: SCN10A; (-) strand; PAM type: NRG; PAM sequence: AAG
  source 1..20: mol_type = other DNA
ctttagaatgattttaaata

SEQ ID NO: 26609 - DNA, 20 bp, synthetic construct
  misc_feature 1..20: note = Description of Artificial Sequence: Synthetic oligonucleotide
  misc_feature 1..20: note = Target: SCN10A; (-) strand; PAM type: NRG; PAM sequence: TAG
  source 1..20: mol_type = other DNA
ttgagtgctatggagagctt

SEQ ID NO: 26610 - DNA, 20 bp, synthetic construct
  misc_feature 1..20: note = Description of Artificial Sequence: Synthetic oligonucleotide
  misc_feature 1..20: note = Target: SCN10A; (-) strand; PAM type: NRG; PAM sequence: GAG
  source 1..20: mol_type = other DNA
gttatcttgagtgctatgga

SEQ ID NO: 26611 - DNA, 20 bp, synthetic construct
  misc_feature 1..20: note = Description of Artificial Sequence: Synthetic oligonucleotide
  misc_feature 1..20: note = Target: SCN10A; (-) strand; PAM type: NRG; PAM sequence: GAG
  source 1..20: mol_type = other DNA
gggttatcttgagtgctatg

SEQ ID NO: 26612 - DNA, 20 bp, synthetic construct
  misc_feature 1..20: note = Description of Artificial Sequence: Synthetic oligonucleotide
  misc_feature 1..20: note = Target: SCN10A; (-) strand; PAM type: NRG; PAM sequence: TGG
  source 1..20: mol_type = other DNA
ttgggttatcttgagtgcta

SEQ ID NO: 26613 - DNA, 20 bp, synthetic construct
  misc_feature 1..20: note = Description of Artificial Sequence: Synthetic oligonucleotide
  misc_feature 1..20: note = Target: SCN10A; (-) strand; PAM type: NRG; PAM sequence: GAG
  source 1..20: mol_type = other DNA
cgcacagtttgggttatctt

SEQ ID NO: 26614 - DNA, 20 bp, synthetic construct
  misc_feature 1..20: note = Description of Artificial Sequence: Synthetic oligonucleotide
  misc_feature 1..20: note = Target: SCN10A; (-) strand; PAM type: NRG; PAM sequence: GGG
  source 1..20: mol_type = other DNA
gagaggtcagcgcacagttt

SEQ ID NO: 26615 - DNA, 20 bp, synthetic construct
  misc_feature 1..20: note = Description of Artificial Sequence: Synthetic oligonucleotide
  misc_feature 1..20: note = Target: SCN10A; (-) strand; PAM type: NRG; PAM sequence: TGG
  source 1..20: mol_type = other DNA
ggagaggtcagcgcacagtt

SEQ ID NO: 26616 - DNA, 20 bp, synthetic construct
  misc_feature 1..20: note = Description of Artificial Sequence: Synthetic oligonucleotide
  misc_feature 1..20: note = Target: SCN10A; (-) strand; PAM type: NRG; PAM sequence: CAG
  source 1..20: mol_type = other DNA
atgctggagaggtcagcgca

SEQ ID NO: 26617 - DNA, 20 bp, synthetic construct
  misc_feature 1..20: note = Description of Artificial Sequence: Synthetic oligonucleotide
  misc_feature 1..20: note = Target: SCN10A; (-) strand; PAM type: NRG; PAM sequence: CAG
  source 1..20: mol_type = other DNA
gactaccatgctggagaggt

SEQ ID NO: 26618 - DNA, 20 bp, synthetic construct
  misc_feature 1..20: note = Description of Artificial Sequence: Synthetic oligonucleotide
  misc_feature 1..20: note = Target: SCN10A; (-) strand; PAM type: NRG; PAM sequence: AGG
  source 1..20: mol_type = other DNA
tggggactaccatgctggag

SEQ ID NO: 26619 - DNA, 20 bp, synthetic construct
  misc_feature 1..20: note = Description of Artificial Sequence: Synthetic oligonucleotide
  misc_feature 1..20: note = Target: SCN10A; (-) strand; PAM type: NRG; PAM sequence: GAG
  source 1..20: mol_type = other DNA
ctggggactaccatgctgga

SEQ ID NO: 26620 - DNA, 20 bp, synthetic construct
  misc_feature 1..20: note = Description of Artificial Sequence: Synthetic oligonucleotide
  misc_feature 1..20: note = Target: SCN10A; (-) strand; PAM type: NRG; PAM sequence: GAG
  source 1..20: mol_type = other DNA
ggctggggactaccatgctg

SEQ ID NO: 26621 - DNA, 20 bp, synthetic construct
  misc_feature 1..20: note = Description of Artificial Sequence: Synthetic oligonucleotide
  misc_feature 1..20: note = Target: SCN10A; (-) strand; PAM type: NRG; PAM sequence: TGG
  source 1..20: mol_type = other DNA
gtggctggggactaccatgc

SEQ ID NO: 26622 - DNA, 20 bp, synthetic construct
  misc_feature 1..20: note = Description of Artificial Sequence: Synthetic oligonucleotide
  misc_feature 1..20: note = Target: SCN10A; (-) strand; PAM type: NRG; PAM sequence: GGG
  source 1..20: mol_type = other DNA
ttataaaagtagtgtggctg

SEQ ID NO: 26623 - DNA, 20 bp, synthetic construct
  misc_feature 1..20: note = Description of Artificial Sequence: Synthetic oligonucleotide
  misc_feature 1..20: note = Target: SCN10A; (-) strand; PAM type: NRG; PAM sequence: GGG
  source 1..20: mol_type = other DNA
cttataaaagtagtgtggct

SEQ ID NO: 26624 - DNA, 20 bp, synthetic construct
  misc_feature 1..20: note = Description of Artificial Sequence: Synthetic oligonucleotide
  misc_feature 1..20: note = Target: SCN10A; (-) strand; PAM type: NRG; PAM sequence: TGG
  source 1..20: mol_type = other DNA
acttataaaagtagtgtggc

SEQ ID NO: 26625 - DNA, 20 bp, synthetic construct
  misc_feature 1..20: note = Description of Artificial Sequence: Synthetic oligonucleotide
  misc_feature 1..20: note = Target: SCN10A; (-) strand; PAM type: NRG; PAM sequence: TGG
  source 1..20: mol_type = other DNA
ataaacttataaaagtagtg

SEQ ID NO: 26626 - DNA, 20 bp, synthetic construct
  misc_feature 1..20: note = Description of Artificial Sequence: Synthetic oligonucleotide
  misc_feature 1..20: note = Target: SCN10A; (-) strand; PAM type: NRG; PAM sequence: TAG
  source 1..20: mol_type = other DNA
caaggataaacttataaaag

SEQ ID NO: 26627 - DNA, 20 bp, synthetic construct
  misc_feature 1..20: note = Description of Artificial Sequence: Synthetic oligonucleotide
  misc_feature 1..20: note = Target: SCN10A; (-) strand; PAM type: NRG; PAM sequence: AAG
  source 1..20: mol_type = other DNA
attcaaggataaacttataa

SEQ ID NO: 26628 - DNA, 20 bp, synthetic construct
  misc_feature 1..20: note = Description of Artificial Sequence: Synthetic oligonucleotide
  misc_feature 1..20: note = Target: SCN10A; (-) strand; PAM type: NRG; PAM sequence: AGG
  source 1..20: mol_type = other DNA
aaaagaatgggtcaaattca

SEQ ID NO: 26629 - DNA, 20 bp, synthetic construct
  misc_feature 1..20: note = Description of Artificial Sequence: Synthetic oligonucleotide
  misc_feature 1..20: note = Target: SCN10A; (-) strand; PAM type: NRG; PAM sequence: AAG
  source 1..20: mol_type = other DNA
aaaaagaatgggtcaaattc

SEQ ID NO: 26630 - DNA, 20 bp, synthetic construct
  misc_feature 1..20: note = Description of Artificial Sequence: Synthetic oligonucleotide
  misc_feature 1..20: note = Target: SCN10A; (-) strand; PAM type: NRG; PAM sequence: GGG
  source 1..20: mol_type = other DNA
gccttaacataaaaaagaat

SEQ ID NO: 26631 - DNA, 20 bp, synthetic construct
  misc_feature 1..20: note = Description of Artificial Sequence: Synthetic oligonucleotide
  misc_feature 1..20: note = Target: SCN10A; (-) strand; PAM type: NRG; PAM sequence: TGG
  source 1..20: mol_type = other DNA
agccttaacataaaaaagaa

SEQ ID NO: 26632 - DNA, 20 bp, synthetic construct
  misc_feature 1..20: note = Description of Artificial Sequence: Synthetic oligonucleotide
  misc_feature 1..20: note = Target: SCN10A; (-) strand; PAM type: NRG; PAM sequence: AAG
  source 1..20: mol_type = other DNA
ggaaaagccttaacataaaa

SEQ ID NO: 26633 - DNA, 20 bp, synthetic construct
  misc_feature 1..20: note = Description of Artificial Sequence: Synthetic oligonucleotide
  misc_feature 1..20: note = Target: SCN10A; (-) strand; PAM type: NRG; PAM sequence: AAG
  source 1..20: mol_type = other DNA
aaaggaaggggaatatggaa

SEQ ID NO: 26634 - DNA, 20 bp, synthetic construct
  misc_feature 1..20: note = Description of Artificial Sequence: Synthetic oligonucleotide
  misc_feature 1..20: note = Target: SCN10A; (-) strand; PAM type: NRG; PAM sequence: TGG
  source 1..20: mol_type = other DNA
taggcaaaggaaggggaata

SEQ ID NO: 26635 - DNA, 20 bp, synthetic construct
  misc_feature 1..20: note = Description of Artificial Sequence: Synthetic oligonucleotide
  misc_feature 1..20: note = Target: SCN10A; (-) strand; PAM type: NRG; PAM sequence: GGG
  source 1..20: mol_type = other DNA
ataattttaggcaaaggaag

SEQ ID NO: 26636 - DNA, 20 bp, synthetic construct
  misc_feature 1..20: note = Description of Artificial Sequence: Synthetic oligonucleotide
  misc_feature 1..20: note = Target: SCN10A; (-) strand; PAM type: NRG; PAM sequence: GGG
  source 1..20: mol_type = other DNA
gataattttaggcaaaggaa

SEQ ID NO: 26637 - DNA, 20 bp, synthetic construct
  misc_feature 1..20: note = Description of Artificial Sequence: Synthetic oligonucleotide
  misc_feature 1..20: note = Target: SCN10A; (-) strand; PAM type: NRG; PAM sequence: AGG
  source 1..20: mol_type = other DNA
agataattttaggcaaagga

SEQ ID NO: 26638 - DNA, 20 bp, synthetic construct
  misc_feature 1..20: note = Description of Artificial Sequence: Synthetic oligonucleotide
  misc_feature 1..20: note = Target: SCN10A; (-) strand; PAM type: NRG; PAM sequence: AAG
  source 1..20: mol_type = other DNA
aagataattttaggcaaagg

SEQ ID NO: 26639 - DNA, 20 bp, synthetic construct
  misc_feature 1..20: note = Description of Artificial Sequence: Synthetic oligonucleotide
  misc_feature 1..20: note = Target: SCN10A; (-) strand; PAM type: NRG; PAM sequence: AGG
  source 1..20: mol_type = other DNA
ggaaagataattttaggcaa

SEQ ID NO: 26640 - DNA, 20 bp, synthetic construct
  misc_feature 1..20: note = Description of Artificial Sequence: Synthetic oligonucleotide
  misc_feature 1..20: note = Target: SCN10A; (-) strand; PAM type: NRG; PAM sequence: AAG
  source 1..20: mol_type = other DNA
tggaaagataattttaggca

SEQ ID NO: 26641 - DNA, 20 bp, synthetic construct
  misc_feature 1..20: note = Description of Artificial Sequence: Synthetic oligonucleotide
  misc_feature 1..20: note = Target: SCN10A; (-) strand; PAM type: NRG; PAM sequence: AGG
  source 1..20: mol_type = other DNA
taaagtggaaagataatttt

SEQ ID NO: 26642 - DNA, 20 bp, synthetic construct
  misc_feature 1..20: note = Description of Artificial Sequence: Synthetic oligonucleotide
  misc_feature 1..20: note = Target: SCN10A; (-) strand; PAM type: NRG; PAM sequence: TAG
  source 1..20: mol_type = other DNA
ataaagtggaaagataattt

SEQ ID NO: 26643 - DNA, 20 bp, synthetic construct
  misc_feature 1..20: note = Description of Artificial Sequence: Synthetic oligonucleotide
  misc_feature 1..20: note = Target: SCN10A; (-) strand; PAM type: NRG; PAM sequence: AAG
  source 1..20: mol_type = other DNA
gccagacaaaataaagtgga

SEQ ID NO: 26644 - DNA, 20 bp, synthetic construct
  misc_feature 1..20: note = Description of Artificial Sequence: Synthetic oligonucleotide
  misc_feature 1..20: note = Target: SCN10A; (-) strand; PAM type: NRG; PAM sequence: TGG
  source 1..20: mol_type = other DNA
attagccagacaaaataaag

SEQ ID NO: 26645 - DNA, 20 bp, synthetic construct
  misc_feature 1..20: note = Description of Artificial Sequence: Synthetic oligonucleotide
  misc_feature 1..20: note = Target: SCN10A; (-) strand; PAM type: NRG; PAM sequence: AAG
  source 1..20: mol_type = other DNA
aggattagccagacaaaata

SEQ ID NO: 26646 - DNA, 20 bp, synthetic construct
  misc_feature 1..20: note = Description of Artificial Sequence: Synthetic oligonucleotide
  misc_feature 1..20: note = Target: SCN10A; (-) strand; PAM type: NRG; PAM sequence: CAG
  source 1..20: mol_type = other DNA
aagaataagagaggattagc

SEQ ID NO: 26647 - DNA, 20 bp, synthetic construct
  misc_feature 1..20: note = Description of Artificial Sequence: Synthetic oligonucleotide
  misc_feature 1..20: note = Target: SCN10A; (-) strand; PAM type: NRG; PAM sequence: TAG
  source 1..20: mol_type = other DNA
gtacaagaataagagaggat

SEQ ID NO: 26648 - DNA, 20 bp, synthetic construct
  misc_feature 1..20: note = Description of Artificial Sequence: Synthetic oligonucleotide
  misc_feature 1..20: note = Target: SCN10A; (-) strand; PAM type: NRG; PAM sequence: AGG
  source 1..20: mol_type = other DNA
caagagtacaagaataagag

SEQ ID NO: 26649 - DNA, 20 bp, synthetic construct
  misc_feature 1..20: note = Description of Artificial Sequence: Synthetic oligonucleotide
  misc_feature 1..20: note = Target: SCN10A; (-) strand; PAM type: NRG; PAM sequence: GAG
  source 1..20: mol_type = other DNA
ccaagagtacaagaataaga

SEQ ID NO: 26650 - DNA, 20 bp, synthetic construct
  misc_feature 1..20: note = Description of Artificial Sequence: Synthetic oligonucleotide
  misc_feature 1..20: note = Target: SCN10A; (-) strand; PAM type: NRG; PAM sequence: GAG
  source 1..20: mol_type = other DNA
agccaagagtacaagaataa

SEQ ID NO: 26651 - DNA, 20 bp, synthetic construct
  misc_feature 1..20: note = Description of Artificial Sequence: Synthetic oligonucleotide
  misc_feature 1..20: note = Target: SCN10A; (-) strand; PAM type: NRG; PAM sequence: AAG
  source 1..20: mol_type = other DNA
aaagccaagagtacaagaat

SEQ ID NO: 26652 - DNA, 20 bp, synthetic construct
  misc_feature 1..20: note = Description of Artificial Sequence: Synthetic oligonucleotide
  misc_feature 1..20: note = Target: SCN10A; (-) strand; PAM type: NRG; PAM sequence: AAG
  source 1..20: mol_type = other DNA
tgtctcaaagccaagagtac

SEQ ID NO: 26653 - DNA, 20 bp, synthetic construct
  misc_feature 1..20: note = Description of Artificial Sequence: Synthetic oligonucleotide
  misc_feature 1..20: note = Target: SCN10A; (-) strand; PAM type: NRG; PAM sequence: GAG
  source 1..20: mol_type = other DNA
agaaattgtctcaaagccaa

SEQ ID NO: 26654 - DNA, 20 bp, synthetic construct
  misc_feature 1..20: note = Description of Artificial Sequence: Synthetic oligonucleotide
  misc_feature 1..20: note = Target: SCN10A; (-) strand; PAM type: NRG; PAM sequence: AAG
  source 1..20: mol_type = other DNA
gaagaaattgtctcaaagcc

SEQ ID NO: 26655 - DNA, 20 bp, synthetic construct
  misc_feature 1..20: note = Description of Artificial Sequence: Synthetic oligonucleotide
  misc_feature 1..20: note = Target: SCN10A; (-) strand; PAM type: NRG; PAM sequence: AAG
  source 1..20: mol_type = other DNA
aaatggaagaaattgtctca

SEQ ID NO: 26656 - DNA, 20 bp, synthetic construct
  misc_feature 1..20: note = Description of Artificial Sequence: Synthetic oligonucleotide
  misc_feature 1..20: note = Target: SCN10A; (-) strand; PAM type: NRG; PAM sequence: AAG
  source 1..20: mol_type = other DNA
ttcatataggtcagaaatgg

SEQ ID NO: 26657 - DNA, 20 bp, synthetic construct
  misc_feature 1..20: note = Description of Artificial Sequence: Synthetic oligonucleotide
  misc_feature 1..20: note = Target: SCN10A; (-) strand; PAM type: NRG; PAM sequence: TGG
  source 1..20: mol_type = other DNA
gacttcatataggtcagaaa

SEQ ID NO: 26658 - DNA, 20 bp, synthetic construct
  misc_feature 1..20: note = Description of Artificial Sequence: Synthetic oligonucleotide
  misc_feature 1..20: note = Target: SCN10A; (-) strand; PAM type: NRG; PAM sequence: CAG
  source 1..20: mol_type = other DNA
aacatagacttcatataggt

SEQ ID NO: 26659 - DNA, 20 bp, synthetic construct
  misc_feature 1..20: note = Description of Artificial Sequence: Synthetic oligonucleotide
  misc_feature 1..20: note = Target: SCN10A; (-) strand; PAM type: NRG; PAM sequence: AGG
  source 1..20: mol_type = other DNA
tcctaacatagacttcatat

SEQ ID NO: 26660 - DNA, 20 bp, synthetic construct
  misc_feature 1..20: note = Description of Artificial Sequence: Synthetic oligonucleotide
  misc_feature 1..20: note = Target: SCN10A; (-) strand; PAM type: NRG; PAM sequence: TAG
  source 1..20: mol_type = other DNA
atcctaacatagacttcata

SEQ ID NO: 26661 - DNA, 20 bp, synthetic construct
  misc_feature 1..20: note = Description of Artificial Sequence: Synthetic oligonucleotide
  misc_feature 1..20: note = Target: SCN10A; (-) strand; PAM type: NRG; PAM sequence: TAG
  source 1..20: mol_type = other DNA
atgaaacaggaatcctaaca

SEQ ID NO: 26662 - DNA, 20 bp, synthetic construct
  misc_feature 1..20: note = Description of Artificial Sequence: Synthetic oligonucleotide
  misc_feature 1..20: note = Target: SCN10A; (-) strand; PAM type: NRG; PAM sequence: AGG
  source 1..20: mol_type = other DNA
gagttatgggaacatgaaac

SEQ ID NO: 26663 - DNA, 20 bp, synthetic construct
  misc_feature 1..20: note = Description of Artificial Sequence: Synthetic oligonucleotide
  misc_feature 1..20: note = Target: SCN10A; (-) strand; PAM type: NRG; PAM sequence: CAG
  source 1..20: mol_type = other DNA
agagttatgggaacatgaaa

SEQ ID NO: 26664 - DNA, 20 bp, synthetic construct
  misc_feature 1..20: note = Description of Artificial Sequence: Synthetic oligonucleotide
  misc_feature 1..20: note = Target: SCN10A; (-) strand; PAM type: NRG; PAM sequence: GGG
  source 1..20: mol_type = other DNA
gagaaagtgcagagagttat

SEQ ID NO: 26665 - DNA, 20 bp, synthetic construct
  misc_feature 1..20: note = Description of Artificial Sequence: Synthetic oligonucleotide
  misc_feature 1..20: note = Target: SCN10A; (-) strand; PAM type: NRG; PAM sequence: TGG
  source 1..20: mol_type = other DNA
agagaaagtgcagagagtta

SEQ ID NO: 26666 - DNA, 20 bp, synthetic construct
  misc_feature 1..20: note = Description of Artificial Sequence: Synthetic oligonucleotide
  misc_feature 1..20: note = Target: SCN10A; (-) strand; PAM type: NRG; PAM sequence: GAG
  source 1..20: mol_type = other DNA
gtttatagagaaagtgcaga

SEQ ID NO: 26667 - DNA, 20 bp, synthetic construct
  misc_feature 1..20: note = Description of Artificial Sequence: Synthetic oligonucleotide
  misc_feature 1..20: note = Target: SCN10A; (-) strand; PAM type: NRG; PAM sequence: GAG
  source 1..20: mol_type = other DNA
atgtttatagagaaagtgca

SEQ ID NO: 26668 - DNA, 20 bp, synthetic construct
  misc_feature 1..20: note = Description of Artificial Sequence: Synthetic oligonucleotide
  misc_feature 1..20: note = Target: SCN10A; (-) strand; PAM type: NRG; PAM sequence: CAG
  source 1..20: mol_type = other DNA
agatgtttatagagaaagtg

SEQ ID NO: 26669 - DNA, 20 bp, synthetic construct
  misc_feature 1..20: note = Description of Artificial Sequence: Synthetic oligonucleotide
  misc_feature 1..20: note = Target: SCN10A; (-) strand; PAM type: NRG; PAM sequence: AAG
  source 1..20: mol_type = other DNA
aaatcagatgtttatagaga

SEQ ID NO: 26670 - DNA, 20 bp, synthetic construct
  misc_feature 1..20: note = Description of Artificial Sequence: Synthetic oligonucleotide
  misc_feature 1..20: note = Target: SCN10A; (-) strand; PAM type: NRG; PAM sequence: GAG
  source 1..20: mol_type = other DNA
ttacaaatcagatgtttata

SEQ ID NO: 26671 - DNA, 20 bp, synthetic construct
  misc_feature 1..20: note = Description of Artificial Sequence: Synthetic oligonucleotide
  misc_feature 1..20: note = Target: SCN10A; (-) strand; PAM type: NRG; PAM sequence: TAG
  source 1..20: mol_type = other DNA
aattacaaatcagatgttta

SEQ ID NO: 26672 - DNA, 20 bp, synthetic construct
  misc_feature 1..20: note = Description of Artificial Sequence: Synthetic oligonucleotide
  misc_feature 1..20: note = Target: SCN10A; (-) strand; PAM type: NRG; PAM sequence: CAG
  source 1..20: mol_type = other DNA
ggcaaacagaaattacaaat

SEQ ID NO: 26673 - DNA, 20 bp, synthetic construct
  misc_feature 1..20: note = Description of Artificial Sequence: Synthetic oligonucleotide
  misc_feature 1..20: note = Target: SCN10A; (-) strand; PAM type: NRG; PAM sequence: CAG
  source 1..20: mol_type = other DNA
agaaacaatagaaaggcaaa

SEQ ID NO: 26674 - DNA, 20 bp, synthetic construct
  misc_feature 1..20: note = Description of Artificial Sequence: Synthetic oligonucleotide
  misc_feature 1..20: note = Target: SCN10A; (-) strand; PAM type: NRG; PAM sequence: AGG
  source 1..20: mol_type = other DNA
atttggtagaaacaatagaa

SEQ ID NO: 26675 - DNA, 20 bp, synthetic construct
  misc_feature 1..20: note = Description of Artificial Sequence: Synthetic oligonucleotide
  misc_feature 1..20: note = Target: SCN10A; (-) strand; PAM type: NRG; PAM sequence: AAG
  source 1..20: mol_type = other DNA
aatttggtagaaacaataga

SEQ ID NO: 26676 - DNA, 20 bp, synthetic construct
  misc_feature 1..20: note = Description of Artificial Sequence: Synthetic oligonucleotide
  misc_feature 1..20: note = Target: SCN10A; (-) strand; PAM type: NRG; PAM sequence: TAG
  source 1..20: mol_type = other DNA
ttacaatttggtagaaacaa

SEQ ID NO: 26677 - DNA, 20 bp, synthetic construct
  misc_feature 1..20: note = Description of Artificial Sequence: Synthetic oligonucleotide
  misc_feature 1..20: note = Target: SCN10A; (-) strand; PAM type: NRG; PAM sequence: TAG
  source 1..20: mol_type = other DNA
tcactgagcttacaatttgg

SEQ ID NO: 26678 - DNA, 20 bp, synthetic construct
  misc_feature 1..20: note = Description of Artificial Sequence: Synthetic oligonucleotide
  misc_feature 1..20: note = Target: SCN10A; (-) strand; PAM type: NRG; PAM sequence: TGG
  source 1..20: mol_type = other DNA
ctctcactgagcttacaatt

SEQ ID NO: 26679 - DNA, 20 bp, synthetic construct
  misc_feature 1..20: note = Description of Artificial Sequence: Synthetic oligonucleotide
  misc_feature 1..20: note = Target: SCN10A; (-) strand; PAM type: NRG; PAM sequence: GAG
  source 1..20: mol_type = other DNA
atgtgagtccagctctcact

SEQ ID NO: 26680 - DNA, 20 bp, synthetic construct
  misc_feature 1..20: note = Description of Artificial Sequence: Synthetic oligonucleotide
  misc_feature 1..20: note = Target: SCN10A; (-) strand; PAM type: NRG; PAM sequence: CAG
  source 1..20: mol_type = other DNA
gaacaaaatagatgtgagtc

SEQ ID NO: 26681 - DNA, 20 bp, synthetic construct
  misc_feature 1..20: note = Description of Artificial Sequence: Synthetic oligonucleotide
  misc_feature 1..20: note = Target: SCN10A; (-) strand; PAM type: NRG; PAM sequence: GAG
  source 1..20: mol_type = other DNA
atgctgaacaaaatagatgt

SEQ ID NO: 26682 - DNA, 20 bp, synthetic construct
  misc_feature 1..20: note = Description of Artificial Sequence: Synthetic oligonucleotide
  misc_feature 1..20: note = Target: SCN10A; (-) strand; PAM type: NRG; PAM sequence: TAG
  source 1..20: mol_type = other DNA
aaaatcaatgctgaacaaaa

SEQ ID NO: 26683 - DNA, 20 bp, synthetic construct
  misc_feature 1..20: note = Description of Artificial Sequence: Synthetic oligonucleotide
  misc_feature 1..20: note = Target: SCN10A; (-) strand; PAM type: NRG; PAM sequence: TGG
  source 1..20: mol_type = other DNA
ccaggcactgtactaggttc

SEQ ID NO: 26684 - DNA, 20 bp, synthetic construct
  misc_feature 1..20: note = Description of Artificial Sequence: Synthetic oligonucleotide
  misc_feature 1..20: note = Target: SCN10A; (-) strand; PAM type: NRG; PAM sequence: AGG
  source 1..20: mol_type = other DNA
ttagttccaggcactgtact

SEQ ID NO: 26685 - DNA, 20 bp, synthetic construct
  misc_feature 1..20: note = Description of Artificial Sequence: Synthetic oligonucleotide
  misc_feature 1..20: note = Target: SCN10A; (-) strand; PAM type: NRG; PAM sequence: TAG
  source 1..20: mol_type = other DNA
gttagttccaggcactgtac

SEQ ID NO: 26686 - DNA, 20 bp, synthetic construct
  misc_feature 1..20: note = Description of Artificial Sequence: Synthetic oligonucleotide
  misc_feature 1..20: note = Target: SCN10A; (-) strand; PAM type: NRG; PAM sequence: AGG
  source 1..20: mol_type = other DNA
ttctgtatctagttagttcc

SEQ ID NO: 26687 - DNA, 20 bp, synthetic construct
  misc_feature 1..20: note = Description of Artificial Sequence: Synthetic oligonucleotide
  misc_feature 1..20: note = Target: SCN10A; (-) strand; PAM type: NRG; PAM sequence: CAG
  source 1..20: mol_type = other DNA
attctgtatctagttagttc

SEQ ID NO: 26688 - DNA, 20 bp, synthetic construct
  misc_feature 1..20: note = Description of Artificial Sequence: Synthetic oligonucleotide
  misc_feature 1..20: note = Target: SCN10A; (-) strand; PAM type: NRG; PAM sequence: TAG
  source 1..20: mol_type = other DNA
ctatctattctgtatctagt

SEQ ID NO: 26689 - DNA, 20 bp, synthetic construct
  misc_feature 1..20: note = Description of Artificial Sequence: Synthetic oligonucleotide
  misc_feature 1..20: note = Target: SCN10A; (-) strand; PAM type: NRG; PAM sequence: TAG
  source 1..20: mol_type = other DNA
acaactatctattctgtatc

SEQ ID NO: 26690 - DNA, 20 bp, synthetic construct
  misc_feature 1..20: note = Description of Artificial Sequence: Synthetic oligonucleotide
  misc_feature 1..20: note = Target: SCN10A; (-) strand; PAM type: NRG; PAM sequence: AAG
  source 1..20: mol_type = other DNA
tctttagtttttcagctatt

SEQ ID NO: 26691 - DNA, 20 bp, synthetic construct
  misc_feature 1..20: note = Description of Artificial Sequence: Synthetic oligonucleotide
  misc_feature 1..20: note = Target: SCN10A; (-) strand; PAM type: NRG; PAM sequence: CAG
  source 1..20: mol_type = other DNA
caaaatgttctttagttttt

SEQ ID NO: 26692 - DNA, 20 bp, synthetic construct
  misc_feature 1..20: note = Description of Artificial Sequence: Synthetic oligonucleotide
  misc_feature 1..20: note = Target: SCN10A; (-) strand; PAM type: NRG; PAM sequence: TAG
  source 1..20: mol_type = other DNA
tttctgaacaaaatgttctt

SEQ ID NO: 26693 - DNA, 20 bp, synthetic construct
  misc_feature 1..20: note = Description of Artificial Sequence: Synthetic oligonucleotide
  misc_feature 1..20: note = Target: SCN10A; (-) strand; PAM type: NRG; PAM sequence: TGG
  source 1..20: mol_type = other DNA
gttccttatattcctattat

SEQ ID NO: 26694 - DNA, 20 bp, synthetic construct
  misc_feature 1..20: note = Description of Artificial Sequence: Synthetic oligonucleotide
  misc_feature 1..20: note = Target: SCN10A; (-) strand; PAM type: NRG; PAM sequence: TGG
  source 1..20: mol_type = other DNA
aatagactcaataatctctt

SEQ ID NO: 26695 - DNA, 20 bp, synthetic construct
  misc_feature 1..20: note = Description of Artificial Sequence: Synthetic oligonucleotide
  misc_feature 1..20: note = Target: SCN10A; (-) strand; PAM type: NRG; PAM sequence: TAG
  source 1..20: mol_type = other DNA
tgtgagctttaaaatgtcaa

SEQ ID NO: 26696 - DNA, 20 bp, synthetic construct
  misc_feature 1..20: note = Description of Artificial Sequence: Synthetic oligonucleotide
  misc_feature 1..20: note = Target: SCN10A; (-) strand; PAM type: NRG; PAM sequence: GAG
  source 1..20: mol_type = other DNA
tgcttgactttggggtgtgt

SEQ ID NO: 26697 - DNA, 20 bp, synthetic construct
  misc_feature 1..20: note = Description of Artificial Sequence: Synthetic oligonucleotide
  misc_feature 1..20: note = Target: SCN10A; (-) strand; PAM type: NRG; PAM sequence: GGG
  source 1..20: mol_type = other DNA
ccaccatctgcttgactttg

SEQ ID NO: 26698 - DNA, 20 bp, synthetic construct
  misc_feature 1..20: note = Description of Artificial Sequence: Synthetic oligonucleotide
  misc_feature 1..20: note = Target: SCN10A; (-) strand; PAM type: NRG; PAM sequence: GGG
  source 1..20: mol_type = other DNA
gccaccatctgcttgacttt

SEQ ID NO: 26699 - DNA, 20 bp, synthetic construct
  misc_feature 1..20: note = Description of Artificial Sequence: Synthetic oligonucleotide
  misc_feature 1..20: note = Target: SCN10A; (-) strand; PAM type: NRG; PAM sequence: TGG
  source 1..20: mol_type = other DNA
tgccaccatctgcttgactt

SEQ ID NO: 26700 - DNA, 20 bp, synthetic construct
  misc_feature 1..20: note = Description of Artificial Sequence: Synthetic oligonucleotide
  misc_feature 1..20: note = Target: SCN10A; (-) strand; PAM type: NRG; PAM sequence: AAG
  source 1..20: mol_type = other DNA
atcataggggtatttgattt

SEQ ID NO: 26701 - DNA, 20 bp, synthetic construct
  misc_feature 1..20: note = Description of Artificial Sequence: Synthetic oligonucleotide
  misc_feature 1..20: note = Target: SCN10A; (-) strand; PAM type: NRG; PAM sequence: GGG
  source 1..20: mol_type = other DNA
aagcaggatctccatcatag

SEQ ID NO: 26702 - DNA, 20 bp, synthetic construct
  misc_feature 1..20: note = Description of Artificial Sequence: Synthetic oligonucleotide
  misc_feature 1..20: note = Target: SCN10A; (-) strand; PAM type: NRG; PAM sequence: GGG
  source 1..20: mol_type = other DNA
caagcaggatctccatcata

SEQ ID NO: 26703 - DNA, 20 bp, synthetic construct
  misc_feature 1..20: note = Description of Artificial Sequence: Synthetic oligonucleotide
  misc_feature 1..20: note = Target: SCN10A; (-) strand; PAM type: NRG; PAM sequence: AGG
  source 1..20: mol_type = other DNA
gcaagcaggatctccatcat

SEQ ID NO: 26704 - DNA, 20 bp, synthetic construct
  misc_feature 1..20: note = Description of Artificial Sequence: Synthetic oligonucleotide
  misc_feature 1..20: note = Target: SCN10A; (-) strand; PAM type: NRG; PAM sequence: TAG
  source 1..20: mol_type = other DNA
agcaagcaggatctccatca

SEQ ID NO: 26705 - DNA, 20 bp, synthetic construct
  misc_feature 1..20: note = Description of Artificial Sequence: Synthetic oligonucleotide
  misc_feature 1..20: note = Target: SCN10A; (-) strand; PAM type: NRG; PAM sequence: AGG
  source 1..20: mol_type = other DNA
taggtatggtgggagcaagc

SEQ ID NO: 26706 - DNA, 20 bp, synthetic construct
  misc_feature 1..20: note = Description of Artificial Sequence: Synthetic oligonucleotide
  misc_feature 1..20: note = Target: SCN10A; (-) strand; PAM type: NRG; PAM sequence: CAG
  source 1..20: mol_type = other DNA
ctaggtatggtgggagcaag

SEQ ID NO: 26707 - DNA, 20 bp, synthetic construct
  misc_feature 1..20: note = Description of Artificial Sequence: Synthetic oligonucleotide
  misc_feature 1..20: note = Target: SCN10A; (-) strand; PAM type: NRG; PAM sequence: AAG
  source 1..20: mol_type = other DNA
cctctaggtatggtgggagc

SEQ ID NO: 26708 - DNA, 20 bp, synthetic construct
  misc_feature 1..20: note = Description of Artificial Sequence: Synthetic oligonucleotide
  misc_feature 1..20: note = Target: SCN10A; (-) strand; PAM type: NRG; PAM sequence: GAG
  source 1..20: mol_type = other DNA
aatacctctaggtatggtgg

SEQ ID NO: 26709 - DNA, 20 bp, synthetic construct
  misc_feature 1..20: note = Description of Artificial Sequence: Synthetic oligonucleotide
  misc_feature 1..20: note = Target: SCN10A; (-) strand; PAM type: NRG; PAM sequence: GGG
  source 1..20: mol_type = other DNA
gaaatacctctaggtatggt

SEQ ID NO: 26710 - DNA, 20 bp, synthetic construct
  misc_feature 1..20: note = Description of Artificial Sequence: Synthetic oligonucleotide
  misc_feature 1..20: note = Target: SCN10A; (-) strand; PAM type: NRG; PAM sequence: TGG
  source 1..20: mol_type = other DNA
agaaatacctctaggtatgg

SEQ ID NO: 26711 - DNA, 20 bp, synthetic construct
  misc_feature 1..20: note = Description of Artificial Sequence: Synthetic oligonucleotide
  misc_feature 1..20: note = Target: SCN10A; (-) strand; PAM type: NRG; PAM sequence: TGG
  source 1..20: mol_type = other DNA
tcaagaaatacctctaggta

SEQ ID NO: 26712 - DNA, 20 bp, synthetic construct
  misc_feature 1..20: note = Description of Artificial Sequence: Synthetic oligonucleotide
  misc_feature 1..20: note = Target: SCN10A; (-) strand; PAM type: NRG; PAM sequence: AGG
  source 1..20: mol_type = other DNA
tggattcaagaaatacctct

SEQ ID NO: 26713 - DNA, 20 bp, synthetic construct
  misc_feature 1..20: note = Description of Artificial Sequence: Synthetic oligonucleotide
  misc_feature 1..20: note = Target: SCN10A; (-) strand; PAM type: NRG; PAM sequence: TAG
  source 1..20: mol_type = other DNA
ttggattcaagaaatacctc

SEQ ID NO: 26714 - DNA, 20 bp, synthetic construct
  misc_feature 1..20: note = Description of Artificial Sequence: Synthetic oligonucleotide
  misc_feature 1..20: note = Target: SCN10A; (-) strand; PAM type: NRG; PAM sequence: AAG
  source 1..20: mol_type = other DNA
atcacagaggtattggattc

SEQ ID NO: 26715 - DNA, 20 bp, synthetic construct
  misc_feature 1..20: note = Description of Artificial Sequence: Synthetic oligonucleotide
  misc_feature 1..20: note = Target: SCN10A; (-) strand; PAM type: NRG; PAM sequence: TGG
  source 1..20: mol_type = other DNA
tgtctatatcacagaggtat

SEQ ID NO: 26716 - DNA, 20 bp, synthetic construct
  misc_feature 1..20: note = Description of Artificial Sequence: Synthetic oligonucleotide
  misc_feature 1..20: note = Target: SCN10A; (-) strand; PAM type: NRG; PAM sequence: AGG
  source 1..20: mol_type = other DNA
aagcagtgtctatatcacag

SEQ ID NO: 26717 - DNA, 20 bp, synthetic construct
  misc_feature 1..20: note = Description of Artificial Sequence: Synthetic oligonucleotide
  misc_feature 1..20: note = Target: SCN10A; (-) strand; PAM type: NRG; PAM sequence: GAG
  source 1..20: mol_type = other DNA
taagcagtgtctatatcaca

SEQ ID NO: 26718 - DNA, 20 bp, synthetic construct
  misc_feature 1..20: note = Description of Artificial Sequence: Synthetic oligonucleotide
  misc_feature 1..20: note = Target: SCN10A; (-) strand; PAM type: NRG; PAM sequence: CAG
  source 1..20: mol_type = other DNA
aataagcagtgtctatatca

SEQ ID NO: 26719 - DNA, 20 bp, synthetic construct
  misc_feature 1..20: note = Description of Artificial Sequence: Synthetic oligonucleotide
  misc_feature 1..20: note = Target: SCN10A; (-) strand; PAM type: NRG; PAM sequence: CAG
  source 1..20: mol_type = other DNA
ctagggctggtgacaataag

SEQ ID NO: 26720 - DNA, 20 bp, synthetic construct
  misc_feature 1..20: note = Description of Artificial Sequence: Synthetic oligonucleotide
  misc_feature 1..20: note = Target: SCN10A; (-) strand; PAM type: NRG; PAM sequence: AAG
  source 1..20: mol_type = other DNA
cctctagggctggtgacaat

SEQ ID NO: 26721 - DNA, 20 bp, synthetic construct
  misc_feature 1..20: note = Description of Artificial Sequence: Synthetic oligonucleotide
  misc_feature 1..20: note = Target: SCN10A; (-) strand; PAM type: NRG; PAM sequence: TGG
  source 1..20: mol_type = other DNA
accagagctgcctctagggc

SEQ ID NO: 26722 - DNA, 20 bp, synthetic construct
  misc_feature 1..20: note = Description of Artificial Sequence: Synthetic oligonucleotide
  misc_feature 1..20: note = Target: SCN10A; (-) strand; PAM type: NRG; PAM sequence: GGG
  source 1..20: mol_type = other DNA
gggtaccagagctgcctcta

SEQ ID NO: 26723 - DNA, 20 bp, synthetic construct
  misc_feature 1..20: note = Description of Artificial Sequence: Synthetic oligonucleotide
  misc_feature 1..20: note = Target: SCN10A; (-) strand; PAM type: NRG; PAM sequence: AGG
  source 1..20: mol_type = other DNA
tgggtaccagagctgcctct

SEQ ID NO: 26724 - DNA, 20 bp, synthetic construct
  misc_feature 1..20: note = Description of Artificial Sequence: Synthetic oligonucleotide
  misc_feature 1..20: note = Target: SCN10A; (-) strand; PAM type: NRG; PAM sequence: TAG
  source 1..20: mol_type = other DNA
ttgggtaccagagctgcctc

SEQ ID NO: 26725 - DNA, 20 bp, synthetic construct
  misc_feature 1..20: note = Description of Artificial Sequence: Synthetic oligonucleotide
  misc_feature 1..20: note = Target: SCN10A; (-) strand; PAM type: NRG; PAM sequence: GAG
  source 1..20: mol_type = other DNA
catatgggtattgggtacca

SEQ ID NO: 26726 - DNA, 20 bp, synthetic construct
  misc_feature 1..20: note = Description of Artificial Sequence: Synthetic oligonucleotide
  misc_feature 1..20: note = Target: SCN10A; (-) strand; PAM type: NRG; PAM sequence: CAG
  source 1..20: mol_type = other DNA
tacatatgggtattgggtac

SEQ ID NO: 26727 - DNA, 20 bp, synthetic construct
  misc_feature 1..20: note = Description of Artificial Sequence: Synthetic oligonucleotide
  misc_feature 1..20: note = Target: SCN10A; (-) strand; PAM type: NRG; PAM sequence: GGG
  source 1..20: mol_type = other DNA
gcctcctacatatgggtatt

SEQ ID NO: 26728 - DNA, 20 bp, synthetic construct
  misc_feature 1..20: note = Description of Artificial Sequence: Synthetic oligonucleotide
  misc_feature 1..20: note = Target: SCN10A; (-) strand; PAM type: NRG; PAM sequence: TGG
  source 1..20: mol_type = other DNA
agcctcctacatatgggtat

SEQ ID NO: 26729 - DNA, 20 bp, synthetic construct
  misc_feature 1..20: note = Description of Artificial Sequence: Synthetic oligonucleotide
  misc_feature 1..20: note = Target: SCN10A; (-) strand; PAM type: NRG; PAM sequence: GGG
  source 1..20: mol_type = other DNA
cagcagagcctcctacatat

SEQ ID NO: 26730 - DNA, 20 bp, synthetic construct
  misc_feature 1..20: note = Description of Artificial Sequence: Synthetic oligonucleotide
  misc_feature 1..20: note = Target: SCN10A; (-) strand; PAM type: NRG; PAM sequence: TGG
  source 1..20: mol_type = other DNA
ccagcagagcctcctacata

SEQ ID NO: 26731 - DNA, 20 bp, synthetic construct
  misc_feature 1..20: note = Description of Artificial Sequence: Synthetic oligonucleotide
  misc_feature 1..20: note = Target: SCN10A; (-) strand; PAM type: NRG; PAM sequence: GAG
  source 1..20: mol_type = other DNA
aggactggtgacaaccagca

SEQ ID NO: 26732 - DNA, 20 bp, synthetic construct
  misc_feature 1..20: note = Description of Artificial Sequence: Synthetic oligonucleotide
  misc_feature 1..20: note = Target: SCN10A; (-) strand; PAM type: NRG; PAM sequence: CAG
  source 1..20: mol_type = other DNA
gaaggactggtgacaaccag

SEQ ID NO: 26733 - DNA, 20 bp, synthetic construct
  misc_feature 1..20: note = Description of Artificial Sequence: Synthetic oligonucleotide
  misc_feature 1..20: note = Target: SCN10A; (-) strand; PAM type: NRG; PAM sequence: CAG
  source 1..20: mol_type = other DNA
atggaaggactggtgacaac

SEQ ID NO: 26734 - DNA, 20 bp, synthetic construct
  misc_feature 1..20: note = Description of Artificial Sequence: Synthetic oligonucleotide
  misc_feature 1..20: note = Target: SCN10A; (-) strand; PAM type: NRG; PAM sequence: TGG
  source 1..20: mol_type = other DNA
acttcaatgcatggaaggac

SEQ ID NO: 26735 - DNA, 20 bp, synthetic construct
  misc_feature 1..20: note = Description of Artificial Sequence: Synthetic oligonucleotide
  misc_feature 1..20: note = Target: SCN10A; (-) strand; PAM type: NRG; PAM sequence: AGG
  source 1..20: mol_type = other DNA
ccaggacttcaatgcatgga

SEQ ID NO: 26736 - DNA, 20 bp, synthetic construct
  misc_feature 1..20: note = Description of Artificial Sequence: Synthetic oligonucleotide
  misc_feature 1..20: note = Target: SCN10A; (-) strand; PAM type: NRG; PAM sequence: AAG
  source 1..20: mol_type = other DNA
cccaggacttcaatgcatgg

SEQ ID NO: 26737 - DNA, 20 bp, synthetic construct
  misc_feature 1..20: note = Description of Artificial Sequence: Synthetic oligonucleotide
  misc_feature 1..20: note = Target: SCN10A; (-) strand; PAM type: NRG; PAM sequence: TGG
  source 1..20: mol_type = other DNA
cctcccaggacttcaatgca

SEQ ID NO: 26738 - DNA, 20 bp, synthetic construct
  misc_feature 1..20: note = Description of Artificial Sequence: Synthetic oligonucleotide
  misc_feature 1..20: note = Target: SCN10A; (-) strand; PAM type: NRG; PAM sequence: AGG
  source 1..20: mol_type = other DNA
gagcagtgagtgctcctccc

SEQ ID NO: 26739 - DNA, 20 bp, synthetic construct
  misc_feature 1..20: note = Description of Artificial Sequence: Synthetic oligonucleotide
  misc_feature 1..20: note = Target: SCN10A; (-) strand; PAM type: NRG; PAM sequence: CAG
  source 1..20: mol_type = other DNA
agagcagtgagtgctcctcc

SEQ ID NO: 26740 - DNA, 20 bp, synthetic construct
  misc_feature 1..20: note = Description of Artificial Sequence: Synthetic oligonucleotide
  misc_feature 1..20: note = Target: SCN10A; (-) strand; PAM type: NRG; PAM sequence: GAG
  source 1..20: mol_type = other DNA
aggaatggtgtcagagcagt

SEQ ID NO: 26741 - DNA, 20 bp, synthetic construct
  misc_feature 1..20: note = Description of Artificial Sequence: Synthetic oligonucleotide
  misc_feature 1..20: note = Target: SCN10A; (-) strand; PAM type: NRG; PAM sequence: CAG
  source 1..20: mol_type = other DNA
gaagaggaatggtgtcagag

SEQ ID NO: 26742 - DNA, 20 bp, synthetic construct
  misc_feature 1..20: note = Description of Artificial Sequence: Synthetic oligonucleotide
  misc_feature 1..20: note = Target: SCN10A; (-) strand; PAM type: NRG; PAM sequence: GAG
  source 1..20: mol_type = other DNA
aaggaagaggaatggtgtca

SEQ ID NO: 26743 - DNA, 20 bp, synthetic construct
  misc_feature 1..20: note = Description of Artificial Sequence: Synthetic oligonucleotide
  misc_feature 1..20: note = Target: SCN10A; (-) strand; PAM type: NRG; PAM sequence: CAG
  source 1..20: mol_type = other DNA
ttaaggaagaggaatggtgt

SEQ ID NO: 26744 - DNA, 20 bp, synthetic construct
  misc_feature 1..20: note = Description of Artificial Sequence: Synthetic oligonucleotide
  misc_feature 1..20: note = Target: SCN10A; (-) strand; PAM type: NRG; PAM sequence: TGG
  source 1..20: mol_type = other DNA
aggacattaaggaagaggaa

SEQ ID NO: 26745 - DNA, 20 bp, synthetic construct
  misc_feature 1..20: note = Description of Artificial Sequence: Synthetic oligonucleotide
  misc_feature 1..20: note = Target: SCN10A; (-) strand; PAM type: NRG; PAM sequence: AGG
  source 1..20: mol_type = other DNA
aatggaggacattaaggaag

SEQ ID NO: 26746 - DNA, 20 bp, synthetic construct
  misc_feature 1..20: note = Description of Artificial Sequence: Synthetic oligonucleotide
  misc_feature 1..20: note = Target: SCN10A; (-) strand; PAM type: NRG; PAM sequence: GAG
  source 1..20: mol_type = other DNA
taatggaggacattaaggaa

SEQ ID NO: 26747 - DNA, 20 bp, synthetic construct
  misc_feature 1..20: note = Description of Artificial Sequence: Synthetic oligonucleotide
  misc_feature 1..20: note = Target: SCN10A; (-) strand; PAM type: NRG; PAM sequence: AAG
  source 1..20: mol_type = other DNA
agtaatggaggacattaagg

SEQ ID NO: 26748 - DNA, 20 bp, synthetic construct
  misc_feature 1..20: note = Description of Artificial Sequence: Synthetic oligonucleotide
  misc_feature 1..20: note = Target: SCN10A; (-) strand; PAM type: NRG; PAM sequence: AGG
  source 1..20: mol_type = other DNA
gaaagtaatggaggacatta

SEQ ID NO: 26749 - DNA, 20 bp, synthetic construct
  misc_feature 1..20: note = Description of Artificial Sequence: Synthetic oligonucleotide
  misc_feature 1..20: note = Target: SCN10A; (-) strand; PAM type: NRG; PAM sequence: AAG
  source 1..20: mol_type = other DNA
agaaagtaatggaggacatt

SEQ ID NO: 26750 - DNA, 20 bp, synthetic construct
  misc_feature 1..20: note = Description of Artificial Sequence: Synthetic oligonucleotide
  misc_feature 1..20: note = Target: SCN10A; (-) strand; PAM type: NRG; PAM sequence: AGG
  source 1..20: mol_type = other DNA
ctctcagaagaaagtaatgg

SEQ ID NO: 26751 - DNA, 20 bp, synthetic construct
  misc_feature 1..20: note = Description of Artificial Sequence: Synthetic oligonucleotide
  misc_feature 1..20: note = Target: SCN10A; (-) strand; PAM type: NRG; PAM sequence: GAG
  source 1..20: mol_type = other DNA
gctctcagaagaaagtaatg

SEQ ID NO: 26752 - DNA, 20 bp, synthetic construct
  misc_feature 1..20: note = Description of Artificial Sequence: Synthetic oligonucleotide
  misc_feature 1..20: note = Target: SCN10A; (-) strand; PAM type: NRG; PAM sequence: TGG
  source 1..20: mol_type = other DNA
aagctctcagaagaaagtaa

SEQ ID NO: 26753 - DNA, 20 bp, synthetic construct
  misc_feature 1..20: note = Description of Artificial Sequence: Synthetic oligonucleotide
  misc_feature 1..20: note = Target: SCN10A; (-) strand; PAM type: NRG; PAM sequence: AAG
  source 1..20: mol_type = other DNA
gagggaaagctctcagaaga

SEQ ID NO: 26754 - DNA, 20 bp, synthetic construct
  misc_feature 1..20: note = Description of Artificial Sequence: Synthetic oligonucleotide
  misc_feature 1..20: note = Target: SCN10A; (-) strand; PAM type: NRG; PAM sequence: AAG
  source 1..20: mol_type = other DNA
gggtgagggaaagctctcag

SEQ ID NO: 26755 - DNA, 20 bp, synthetic construct
  misc_feature 1..20: note = Description of Artificial Sequence: Synthetic oligonucleotide
  misc_feature 1..20: note = Target: SCN10A; (-) strand; PAM type: NRG; PAM sequence: CAG
  source 1..20: mol_type = other DNA
agagggtgagggaaagctct

SEQ ID NO: 26756 - DNA, 20 bp, synthetic construct
  misc_feature 1..20: note = Description of Artificial Sequence: Synthetic oligonucleotide
  misc_feature 1..20: note = Target: SCN10A; (-) strand; PAM type: NRG; PAM sequence: AAG
  source 1..20: mol_type = other DNA
gagaggaagagggtgaggga

SEQ ID NO: 26757 - DNA, 20 bp, synthetic construct
  misc_feature 1..20: note = Description of Artificial Sequence: Synthetic oligonucleotide
  misc_feature 1..20: note = Target: SCN10A; (-) strand; PAM type: NRG; PAM sequence: GGG
  source 1..20: mol_type = other DNA
ggaggagaggaagagggtga

SEQ ID NO: 26758 - DNA, 20 bp, synthetic construct
  misc_feature 1..20: note = Description of Artificial Sequence: Synthetic oligonucleotide
  misc_feature 1..20: note = Target: SCN10A; (-) strand; PAM type: NRG; PAM sequence: AGG
  source 1..20: mol_type = other DNA
aggaggagaggaagagggtg

SEQ ID NO: 26759 - DNA, 20 bp, synthetic construct
  misc_feature 1..20: note = Description of Artificial Sequence: Synthetic oligonucleotide
  misc_feature 1..20: note = Target: SCN10A; (-) strand; PAM type: NRG; PAM sequence: GAG
  source 1..20: mol_type = other DNA
caggaggagaggaagagggt

SEQ ID NO: 26760 - DNA, 20 bp, synthetic construct
  misc_feature 1..20: note = Description of Artificial Sequence: Synthetic oligonucleotide
  misc_feature 1..20: note = Target: SCN10A; (-) strand; PAM type: NRG; PAM sequence: GGG
  source 1..20: mol_type = other DNA
taggcaggaggagaggaaga

SEQ ID NO: 26761 - DNA, 20 bp, synthetic construct
  misc_feature 1..20: note = Description of Artificial Sequence: Synthetic oligonucleotide
  misc_feature 1..20: note = Target: SCN10A; (-) strand; PAM type: NRG; PAM sequence: AGG
  source 1..20: mol_type = other DNA
ataggcaggaggagaggaag

SEQ ID NO: 26762 - DNA, 20 bp, synthetic construct
  misc_feature 1..20: note = Description of Artificial Sequence: Synthetic oligonucleotide
  misc_feature 1..20: note = Target: SCN10A; (-) strand; PAM type: NRG; PAM sequence: GAG
  source 1..20: mol_type = other DNA
aataggcaggaggagaggaa

SEQ ID NO: 26763 - DNA, 20 bp, synthetic construct
  misc_feature 1..20: note = Description of Artificial Sequence: Synthetic oligonucleotide
  misc_feature 1..20: note = Target: SCN10A; (-) strand; PAM type: NRG; PAM sequence: AAG
  source 1..20: mol_type = other DNA
caaataggcaggaggagagg

SEQ ID NO: 26764 - DNA, 20 bp, synthetic construct
  misc_feature 1..20: note = Description of Artificial Sequence: Synthetic oligonucleotide
  misc_feature 1..20: note = Target: SCN10A; (-) strand; PAM type: NRG; PAM sequence: AGG
  source 1..20: mol_type = other DNA
ctacaaataggcaggaggag

SEQ ID NO: 26765 - DNA, 20 bp, synthetic construct
  misc_feature 1..20: note = Description of Artificial Sequence: Synthetic oligonucleotide
  misc_feature 1..20: note = Target: SCN10A; (-) strand; PAM type: NRG; PAM sequence: GAG
  source 1..20: mol_type = other DNA
actacaaataggcaggagga

SEQ ID NO: 26766 - DNA, 20 bp, synthetic construct
  misc_feature 1..20: note = Description of Artificial Sequence: Synthetic oligonucleotide
  misc_feature 1..20: note = Target: SCN10A; (-) strand; PAM type: NRG; PAM sequence: GAG
  source 1..20: mol_type = other DNA
caactacaaataggcaggag

SEQ ID NO: 26767 - DNA, 20 bp, synthetic construct
  misc_feature 1..20: note = Description of Artificial Sequence: Synthetic oligonucleotide
  misc_feature 1..20: note = Target: SCN10A; (-) strand; PAM type: NRG; PAM sequence: AGG
  source 1..20: mol_type = other DNA
atcaactacaaataggcagg

SEQ ID NO: 26768 - DNA, 20 bp, synthetic construct
  misc_feature 1..20: note = Description of Artificial Sequence: Synthetic oligonucleotide
  misc_feature 1..20: note = Target: SCN10A; (-) strand; PAM type: NRG; PAM sequence: GAG
  source 1..20: mol_type = other DNA
gatcaactacaaataggcag

SEQ ID NO: 26769 - DNA, 20 bp, synthetic construct
  misc_feature 1..20: note = Description of Artificial Sequence: Synthetic oligonucleotide
  misc_feature 1..20: note = Target: SCN10A; (-) strand; PAM type: NRG; PAM sequence: AGG
  source 1..20: mol_type = other DNA
cagatcaactacaaataggc

SEQ ID NO: 26770 - DNA, 20 bp, synthetic construct
  misc_feature 1..20: note = Description of Artificial Sequence: Synthetic oligonucleotide
  misc_feature 1..20: note = Target: SCN10A; (-) strand; PAM type: NRG; PAM sequence: CAG
  source 1..20: mol_type = other DNA
acagatcaactacaaatagg

SEQ ID NO: 26771 - DNA, 20 bp, synthetic construct
  misc_feature 1..20: note = Description of Artificial Sequence: Synthetic oligonucleotide
  misc_feature 1..20: note = Target: SCN10A; (-) strand; PAM type: NRG; PAM sequence: AGG
  source 1..20: mol_type = other DNA
gaaacagatcaactacaaat

SEQ ID NO: 26772 - DNA, 20 bp, synthetic construct
  misc_feature 1..20: note = Description of Artificial Sequence: Synthetic oligonucleotide
  misc_feature 1..20: note = Target: SCN10A; (-) strand; PAM type: NRG; PAM sequence: TAG
  source 1..20: mol_type = other DNA
agaaacagatcaactacaaa

SEQ ID NO: 26773 - DNA, 20 bp, synthetic construct
  misc_feature 1..20: note = Description of Artificial Sequence: Synthetic oligonucleotide
  misc_feature 1..20: note = Target: SCN10A; (-) strand; PAM type: NRG; PAM sequence: CAG
  source 1..20: mol_type = other DNA
ttgaaaagttccgtaagaaa

SEQ ID NO: 26774 - DNA, 20 bp, synthetic construct
  misc_feature 1..20: note = Description of Artificial Sequence: Synthetic oligonucleotide
  misc_feature 1..20: note = Target: SCN10A; (-) strand; PAM type: NRG; PAM sequence: AAG
  source 1..20: mol_type = other DNA
ttgactttgaaaagttccgt

SEQ ID NO: 26775 - DNA, 20 bp, synthetic construct
  misc_feature 1..20: note = Description of Artificial Sequence: Synthetic oligonucleotide
  misc_feature 1..20: note = Target: SCN10A; (-) strand; PAM type: NRG; PAM sequence: AAG
  source 1..20: mol_type = other DNA
taatgtaggttgactttgaa

SEQ ID NO: 26776 - DNA, 20 bp, synthetic construct
  misc_feature 1..20: note = Description of Artificial Sequence: Synthetic oligonucleotide
  misc_feature 1..20: note = Target: SCN10A; (-) strand; PAM type: NRG; PAM sequence: AGG
  source 1..20: mol_type = other DNA
gatgttcaattatgtaatgt

SEQ ID NO: 26777 - DNA, 20 bp, synthetic construct
  misc_feature 1..20: note = Description of Artificial Sequence: Synthetic oligonucleotide
  misc_feature 1..20: note = Target: SCN10A; (-) strand; PAM type: NRG; PAM sequence: TAG
  source 1..20: mol_type = other DNA
agatgttcaattatgtaatg

SEQ ID NO: 26778 - DNA, 20 bp, synthetic construct
  misc_feature 1..20: note = Description of Artificial Sequence: Synthetic oligonucleotide
  misc_feature 1..20: note = Target: SCN10A; (-) strand; PAM type: NRG; PAM sequence: CAG
  source 1..20: mol_type = other DNA
agttagaagaaaatagaaga

SEQ ID NO: 26779 - DNA, 20 bp, synthetic construct
  misc_feature 1..20: note = Description of Artificial Sequence: Synthetic oligonucleotide
  misc_feature 1..20: note = Target: SCN10A; (-) strand; PAM type: NRG; PAM sequence: AAG
  source 1..20: mol_type = other DNA
tctaagttagaagaaaatag

SEQ ID NO: 26780 - DNA, 20 bp, synthetic construct
  misc_feature 1..20: note = Description of Artificial Sequence: Synthetic oligonucleotide
  misc_feature 1..20: note = Target: SCN10A; (-) strand; PAM type: NRG; PAM sequence: TAG
  source 1..20: mol_type = other DNA
acttctaagttagaagaaaa

SEQ ID NO: 26781 - DNA, 20 bp, synthetic construct
  misc_feature 1..20: note = Description of Artificial Sequence: Synthetic oligonucleotide
  misc_feature 1..20: note = Target: SCN10A; (-) strand; PAM type: NRG; PAM sequence: AAG
  source 1..20: mol_type = other DNA
acatagaacttctaagttag

SEQ ID NO: 26782 - DNA, 20 bp, synthetic construct
  misc_feature 1..20: note = Description of Artificial Sequence: Synthetic oligonucleotide
  misc_feature 1..20: note = Target: SCN10A; (-) strand; PAM type: NRG; PAM sequence: TAG
  source 1..20: mol_type = other DNA
aacacatagaacttctaagt

SEQ ID NO: 26783 - DNA, 20 bp, synthetic construct
  misc_feature 1..20: note = Description of Artificial Sequence: Synthetic oligonucleotide
  misc_feature 1..20: note = Target: SCN10A; (-) strand; PAM type: NRG; PAM sequence: AAG
  source 1..20: mol_type = other DNA
acacaacacatagaacttct

SEQ ID NO: 26784 - DNA, 20 bp, synthetic construct
  misc_feature 1..20: note = Description of Artificial Sequence: Synthetic oligonucleotide
  misc_feature 1..20: note = Target: SCN10A; (-) strand; PAM type: NRG; PAM sequence: TAG
  source 1..20: mol_type = other DNA
gaatttgggcacacaacaca

SEQ ID NO: 26785 - DNA, 20 bp, synthetic construct
  misc_feature 1..20: note = Description of Artificial Sequence: Synthetic oligonucleotide
  misc_feature 1..20: note = Target: SCN10A; (-) strand; PAM type: NRG; PAM sequence: GGG
  source 1..20: mol_type = other DNA
caccatgttaatcagaattt

SEQ ID NO: 26786 - DNA, 20 bp, synthetic construct
  misc_feature 1..20: note = Description of Artificial Sequence: Synthetic oligonucleotide
  misc_feature 1..20: note = Target: SCN10A; (-) strand; PAM type: NRG; PAM sequence: TGG
  source 1..20: mol_type = other DNA
acaccatgttaatcagaatt

SEQ ID NO: 26787 - DNA, 20 bp, synthetic construct
  misc_feature 1..20: note = Description of Artificial Sequence: Synthetic oligonucleotide
  misc_feature 1..20: note = Target: SCN10A; (-) strand; PAM type: NRG; PAM sequence: CAG
  source 1..20: mol_type = other DNA
cataaatacaccatgttaat

SEQ ID NO: 26788 - DNA, 20 bp, synthetic construct
  misc_feature 1..20: note = Description of Artificial Sequence: Synthetic oligonucleotide
  misc_feature 1..20: note = Target: SCN10A; (-) strand; PAM type: NRG; PAM sequence: TGG
  source 1..20: mol_type = other DNA
tgaagtcaacagtgtttgaa

SEQ ID NO: 26789 - DNA, 20 bp, synthetic construct
  misc_feature 1..20: note = Description of Artificial Sequence: Synthetic oligonucleotide
  misc_feature 1..20: note = Target: SCN10A; (-) strand; PAM type: NRG; PAM sequence: CAG
  source 1..20: mol_type = other DNA
attaaagacactgaagtcaa

SEQ ID NO: 26790 - DNA, 20 bp, synthetic construct
  misc_feature 1..20: note = Description of Artificial Sequence: Synthetic oligonucleotide
  misc_feature 1..20: note = Target: SCN10A; (-) strand; PAM type: NRG; PAM sequence: AAG
  source 1..20: mol_type = other DNA
gggaagaattaaagacactg

SEQ ID NO: 26791 - DNA, 20 bp, synthetic construct
  misc_feature 1..20: note = Description of Artificial Sequence: Synthetic oligonucleotide
  misc_feature 1..20: note = Target: SCN10A; (-) strand; PAM type: NRG; PAM sequence: AAG
  source 1..20: mol_type = other DNA
ttctcagaagggaagaatta

SEQ ID NO: 26792 - DNA, 20 bp, synthetic construct
  misc_feature 1..20: note = Description of Artificial Sequence: Synthetic oligonucleotide
  misc_feature 1..20: note = Target: SCN10A; (-) strand; PAM type: NRG; PAM sequence: AAG
  source 1..20: mol_type = other DNA
atctttgtttctcagaaggg

SEQ ID NO: 26793 - DNA, 20 bp, synthetic construct
  misc_feature 1..20: note = Description of Artificial Sequence: Synthetic oligonucleotide
  misc_feature 1..20: note = Target: SCN10A; (-) strand; PAM type: NRG; PAM sequence: GGG
  source 1..20: mol_type = other DNA
ttaatctttgtttctcagaa

SEQ ID NO: 26794 - DNA, 20 bp, synthetic construct
  misc_feature 1..20: note = Description of Artificial Sequence: Synthetic oligonucleotide
  misc_feature 1..20: note = Target: SCN10A; (-) strand; PAM type: NRG; PAM sequence: AGG
  source 1..20: mol_type = other DNA
cttaatctttgtttctcaga

SEQ ID NO: 26795 - DNA, 20 bp, synthetic construct
  misc_feature 1..20: note = Description of Artificial Sequence: Synthetic oligonucleotide
  misc_feature 1..20: note = Target: SCN10A; (-) strand; PAM type: NRG; PAM sequence: AAG
  source 1..20: mol_type = other DNA
acttaatctttgtttctcag

SEQ ID NO: 26796 - DNA, 20 bp, synthetic construct
  misc_feature 1..20: note = Description of Artificial Sequence: Synthetic oligonucleotide
  misc_feature 1..20: note = Target: SCN10A; (-) strand; PAM type: NRG; PAM sequence: CAG
  source 1..20: mol_type = other DNA
ttaacttaatctttgtttct

SEQ ID NO: 26797 - DNA, 20 bp, synthetic construct
  misc_feature 1..20: note = Description of Artificial Sequence: Synthetic oligonucleotide
  misc_feature 1..20: note = Target: SCN10A; (-) strand; PAM type: NRG; PAM sequence: AAG
  source 1..20: mol_type = other DNA
tcccctagacaaggaagaga

SEQ ID NO: 26798 - DNA, 20 bp, synthetic construct
  misc_feature 1..20: note = Description of Artificial Sequence: Synthetic oligonucleotide
  misc_feature 1..20: note = Target: SCN10A; (-) strand; PAM type: NRG; PAM sequence: GAG
  source 1..20: mol_type = other DNA
cttctcccctagacaaggaa

SEQ ID NO: 26799 - DNA, 20 bp, synthetic construct
  misc_feature 1..20: note = Description of Artificial Sequence: Synthetic oligonucleotide
  misc_feature 1..20: note = Target: SCN10A; (-) strand; PAM type: NRG; PAM sequence: AAG
  source 1..20: mol_type = other DNA
ctcttctcccctagacaagg

SEQ ID NO: 26800 - DNA, 20 bp, synthetic construct
  misc_feature 1..20: note = Description of Artificial Sequence: Synthetic oligonucleotide
  misc_feature 1..20: note = Target: SCN10A; (-) strand; PAM type: NRG; PAM sequence: AGG
  source 1..20: mol_type = other DNA
tatctcttctcccctagaca

SEQ ID NO: 26801 - DNA, 20 bp, synthetic construct
  misc_feature 1..20: note = Description of Artificial Sequence: Synthetic oligonucleotide
  misc_feature 1..20: note = Target: SCN10A; (-) strand; PAM type: NRG; PAM sequence: AAG
  source 1..20: mol_type = other DNA
gtatctcttctcccctagac

SEQ ID NO: 26802 - DNA, 20 bp, synthetic construct
  misc_feature 1..20: note = Description of Artificial Sequence: Synthetic oligonucleotide
  misc_feature 1..20: note = Target: SCN10A; (-) strand; PAM type: NRG; PAM sequence: TAG
  source 1..20: mol_type = other DNA
tataagtatctcttctcccc

SEQ ID NO: 26803 - DNA, 20 bp, synthetic construct
  misc_feature 1..20: note = Description of Artificial Sequence: Synthetic oligonucleotide
  misc_feature 1..20: note = Target: SCN10A; (-) strand; PAM type: NRG; PAM sequence: AAG
  source 1..20: mol_type = other DNA
caaatttggttccaaactat

SEQ ID NO: 26804 - DNA, 20 bp, synthetic construct
  misc_feature 1..20: note = Description of Artificial Sequence: Synthetic oligonucleotide
  misc_feature 1..20: note = Target: SCN10A; (-) strand; PAM type: NRG; PAM sequence: TGG
  source 1..20: mol_type = other DNA
tgagtcctgggattcaaatt

SEQ ID NO: 26805 - DNA, 20 bp, synthetic construct
  misc_feature 1..20: note = Description of Artificial Sequence: Synthetic oligonucleotide
  misc_feature 1..20: note = Target: SCN10A; (-) strand; PAM type: NRG; PAM sequence: GGG
  source 1..20: mol_type = other DNA
ttactaaacaactgagtcct

SEQ ID NO: 26806 - DNA, 20 bp, synthetic construct
  misc_feature 1..20: note = Description of Artificial Sequence: Synthetic oligonucleotide
  misc_feature 1..20: note = Target: SCN10A; (-) strand; PAM type: NRG; PAM sequence: TGG
  source 1..20: mol_type = other DNA
gttactaaacaactgagtcc

SEQ ID NO: 26807 - DNA, 20 bp, synthetic construct
  misc_feature 1..20: note = Description of Artificial Sequence: Synthetic oligonucleotide
  misc_feature 1..20: note = Target: SCN10A; (-) strand; PAM type: NRG; PAM sequence: GAG
  source 1..20: mol_type = other DNA
tgcattgttactaaacaact

SEQ ID NO: 26808 - DNA, 20 bp, synthetic construct
  misc_feature 1..20: note = Description of Artificial Sequence: Synthetic oligonucleotide
  misc_feature 1..20: note = Target: SCN10A; (-) strand; PAM type: NRG; PAM sequence: GAG
  source 1..20: mol_type = other DNA
ttgcattccagtgtcactga

SEQ ID NO: 26809 - DNA, 20 bp, synthetic construct
  misc_feature 1..20: note = Description of Artificial Sequence: Synthetic oligonucleotide
  misc_feature 1..20: note = Target: SCN10A; (-) strand; PAM type: NRG; PAM sequence: GAG
  source 1..20: mol_type = other DNA
cattgcattccagtgtcact

SEQ ID NO: 26810 - DNA, 20 bp, synthetic construct
  misc_feature 1..20: note = Description of Artificial Sequence: Synthetic oligonucleotide
  misc_feature 1..20: note = Target: SCN10A; (-) strand; PAM type: NRG; PAM sequence: CAG
  source 1..20: mol_type = other DNA
caatcctcaacattgcattc

SEQ ID NO: 26811 - DNA, 20 bp, synthetic construct
  misc_feature 1..20: note = Description of Artificial Sequence: Synthetic oligonucleotide
  misc_feature 1..20: note = Target: SCN10A; (-) strand; PAM type: NRG; PAM sequence: TAG
  source 1..20: mol_type = other DNA
caggacctggaattctggct

SEQ ID NO: 26812 - DNA, 20 bp, synthetic construct
  misc_feature 1..20: note = Description of Artificial Sequence: Synthetic oligonucleotide
  misc_feature 1..20: note = Target: SCN10A; (-) strand; PAM type: NRG; PAM sequence: TGG
  source 1..20: mol_type = other DNA
agctccaggacctggaattc

SEQ ID NO: 26813 - DNA, 20 bp, synthetic construct
  misc_feature 1..20: note = Description of Artificial Sequence: Synthetic oligonucleotide
  misc_feature 1..20: note = Target: SCN10A; (-) strand; PAM type: NRG; PAM sequence: TGG
  source 1..20: mol_type = other DNA
caagctccagctccaggacc

SEQ ID NO: 26814 - DNA, 20 bp, synthetic construct
  misc_feature 1..20: note = Description of Artificial Sequence: Synthetic oligonucleotide
  misc_feature 1..20: note = Target: SCN10A; (-) strand; PAM type: NRG; PAM sequence: AGG
  source 1..20: mol_type = other DNA
tgacctcaagctccagctcc

SEQ ID NO: 26815 - DNA, 20 bp, synthetic construct
  misc_feature 1..20: note = Description of Artificial Sequence: Synthetic oligonucleotide
  misc_feature 1..20: note = Target: SCN10A; (-) strand; PAM type: NRG; PAM sequence: CAG
  source 1..20: mol_type = other DNA
ttgacctcaagctccagctc

SEQ ID NO: 26816 - DNA, 20 bp, synthetic construct
  misc_feature 1..20: note = Description of Artificial Sequence: Synthetic oligonucleotide
  misc_feature 1..20: note = Target: SCN10A; (-) strand; PAM type: NRG; PAM sequence: CAG
  source 1..20: mol_type = other DNA
tctgctttgacctcaagctc

SEQ ID NO: 26817 - DNA, 20 bp, synthetic construct
  misc_feature 1..20: note = Description of Artificial Sequence: Synthetic oligonucleotide
  misc_feature 1..20: note = Target: SCN10A; (-) strand; PAM type: NRG; PAM sequence: AAG
  source 1..20: mol_type = other DNA
gctgagtctgctttgacctc

SEQ ID NO: 26818 - DNA, 20 bp, synthetic construct
  misc_feature 1..20: note = Description of Artificial Sequence: Synthetic oligonucleotide
  misc_feature 1..20: note = Target: SCN10A; (-) strand; PAM type: NRG; PAM sequence: GAG
  source 1..20: mol_type = other DNA
atgaagtcagtctcatagct

SEQ ID NO: 26819 - DNA, 20 bp, synthetic construct
  misc_feature 1..20: note = Description of Artificial Sequence: Synthetic oligonucleotide
  misc_feature 1..20: note = Target: SCN10A; (-) strand; PAM type: NRG; PAM sequence: TAG
  source 1..20: mol_type = other DNA
ttggcatgaagtcagtctca

SEQ ID NO: 26820 - DNA, 20 bp, synthetic construct
  misc_feature 1..20: note = Description of Artificial Sequence: Synthetic oligonucleotide
  misc_feature 1..20: note = Target: SCN10A; (-) strand; PAM type: NRG; PAM sequence: CAG
  source 1..20: mol_type = other DNA
atggtcatttggcatgaagt

SEQ ID NO: 26821 - DNA, 20 bp, synthetic construct
  misc_feature 1..20: note = Description of Artificial Sequence: Synthetic oligonucleotide
  misc_feature 1..20: note = Target: SCN10A; (-) strand; PAM type: NRG; PAM sequence: AAG
  source 1..20: mol_type = other DNA
aattatggtcatttggcatg

SEQ ID NO: 26822 - DNA, 20 bp, synthetic construct
  misc_feature 1..20: note = Description of Artificial Sequence: Synthetic oligonucleotide
  misc_feature 1..20: note = Target: SCN10A; (-) strand; PAM type: NRG; PAM sequence: TGG
  source 1..20: mol_type = other DNA
ccagaataattatggtcatt

SEQ ID NO: 26823 - DNA, 20 bp, synthetic construct
  misc_feature 1..20: note = Description of Artificial Sequence: Synthetic oligonucleotide
  misc_feature 1..20: note = Target: SCN10A; (-) strand; PAM type: NRG; PAM sequence: TGG
  source 1..20: mol_type = other DNA
atggtagcccagaataatta

SEQ ID NO: 26824 - DNA, 20 bp, synthetic construct
  misc_feature 1..20: note = Description of Artificial Sequence: Synthetic oligonucleotide
  misc_feature 1..20: note = Target: SCN10A; (-) strand; PAM type: NRG; PAM sequence: CAG
  source 1..20: mol_type = other DNA
tggagggatttatggtagcc

SEQ ID NO: 26825 - DNA, 20 bp, synthetic construct
  misc_feature 1..20: note = Description of Artificial Sequence: Synthetic oligonucleotide
  misc_feature 1..20: note = Target: SCN10A; (-) strand; PAM type: NRG; PAM sequence: TAG
  source 1..20: mol_type = other DNA
ttagctggagggatttatgg

SEQ ID NO: 26826 - DNA, 20 bp, synthetic construct
  misc_feature 1..20: note = Description of Artificial Sequence: Synthetic oligonucleotide
  misc_feature 1..20: note = Target: SCN10A; (-) strand; PAM type: NRG; PAM sequence: TGG
  source 1..20: mol_type = other DNA
tccttagctggagggattta

SEQ ID NO: 26827 - DNA, 20 bp, synthetic construct
  misc_feature 1..20: note = Description of Artificial Sequence: Synthetic oligonucleotide
  misc_feature 1..20: note = Target: SCN10A; (-) strand; PAM type: NRG; PAM sequence: GGG
  source 1..20: mol_type = other DNA
caattttgtccttagctgga

SEQ ID NO: 26828 - DNA, 20 bp, synthetic construct
  misc_feature 1..20: note = Description of Artificial Sequence: Synthetic oligonucleotide
  misc_feature 1..20: note = Target: SCN10A; (-) strand; PAM type: NRG; PAM sequence: AGG
  source 1..20: mol_type = other DNA
acaattttgtccttagctgg

SEQ ID NO: 26829 - DNA, 20 bp, synthetic construct
  misc_feature 1..20: note = Description of Artificial Sequence: Synthetic oligonucleotide
  misc_feature 1..20: note = Target: SCN10A; (-) strand; PAM type: NRG; PAM sequence: GAG
  source 1..20: mol_type = other DNA
aacaattttgtccttagctg

SEQ ID NO: 26830 - DNA, 20 bp, synthetic construct
  misc_feature 1..20: note = Description of Artificial Sequence: Synthetic oligonucleotide
  misc_feature 1..20: note = Target: SCN10A; (-) strand; PAM type: NRG; PAM sequence: TGG
  source 1..20: mol_type = other DNA
aaaacaattttgtccttagc

SEQ ID NO: 26831 - DNA, 20 bp, synthetic construct
  misc_feature 1..20: note = Description of Artificial Sequence: Synthetic oligonucleotide
  misc_feature 1..20: note = Target: SCN10A; (-) strand; PAM type: NRG; PAM sequence: TAG
  source 1..20: mol_type = other DNA
gttgaaaacaattttgtcct

SEQ ID NO: 26832 - DNA, 20 bp, synthetic construct
  misc_feature 1..20: note = Description of Artificial Sequence: Synthetic oligonucleotide
  misc_feature 1..20: note = Target: SCN10A; (-) strand; PAM type: NRG; PAM sequence: TGG
  source 1..20: mol_type = other DNA
gaaagtcttaaaagaaggac

SEQ ID NO: 26833 - DNA, 20 bp, synthetic construct
  misc_feature 1..20: note = Description of Artificial Sequence: Synthetic oligonucleotide
  misc_feature 1..20: note = Target: SCN10A; (-) strand; PAM type: NRG; PAM sequence: AGG
  source 1..20: mol_type = other DNA
gatgggaaagtcttaaaaga

SEQ ID NO: 26834 - DNA, 20 bp, synthetic construct
  misc_feature 1..20: note = Description of Artificial Sequence: Synthetic oligonucleotide
  misc_feature 1..20: note = Target: SCN10A; (-) strand; PAM type: NRG; PAM sequence: AAG
  source 1..20: mol_type = other DNA
tgatgggaaagtcttaaaag

SEQ ID NO: 26835 - DNA, 20 bp, synthetic construct
  misc_feature 1..20: note = Description of Artificial Sequence: Synthetic oligonucleotide
  misc_feature 1..20: note = Target: SCN10A; (-) strand; PAM type: NRG; PAM sequence: AAG
  source 1..20: mol_type = other DNA
ttctgatgggaaagtcttaa

SEQ ID NO: 26836 - DNA, 20 bp, synthetic construct
  misc_feature 1..20: note = Description of Artificial Sequence: Synthetic oligonucleotide
  misc_feature 1..20: note = Target: SCN10A; (-) strand; PAM type: NRG; PAM sequence: AAG
  source 1..20: mol_type = other DNA
agctatcacttctgatggga

SEQ ID NO: 26837 - DNA, 20 bp, synthetic construct
  misc_feature 1..20: note = Description of Artificial Sequence: Synthetic oligonucleotide
  misc_feature 1..20: note = Target: SCN10A; (-) strand; PAM type: NRG; PAM sequence: GGG
  source 1..20: mol_type = other DNA
ccagagctatcacttctgat

SEQ ID NO: 26838 - DNA, 20 bp, synthetic construct
  misc_feature 1..20: note = Description of Artificial Sequence: Synthetic oligonucleotide
  misc_feature 1..20: note = Target: SCN10A; (-) strand; PAM type: NRG; PAM sequence: TGG
  source 1..20: mol_type = other DNA
tccagagctatcacttctga

SEQ ID NO: 26839 - DNA, 20 bp, synthetic construct
  misc_feature 1..20: note = Description of Artificial Sequence: Synthetic oligonucleotide
  misc_feature 1..20: note = Target: SCN10A; (-) strand; PAM type: NRG; PAM sequence: GAG
  source 1..20: mol_type = other DNA
atcaagggatcccaagtcca

SEQ ID NO: 26840 - DNA, 20 bp, synthetic construct
  misc_feature 1..20: note = Description of Artificial Sequence: Synthetic oligonucleotide
  misc_feature 1..20: note = Target: SCN10A; (-) strand; PAM type: NRG; PAM sequence: CAG
  source 1..20: mol_type = other DNA
caatcaagggatcccaagtc

SEQ ID NO: 26841 - DNA, 20 bp, synthetic construct
  misc_feature 1..20: note = Description of Artificial Sequence: Synthetic oligonucleotide
  misc_feature 1..20: note = Target: SCN10A; (-) strand; PAM type: NRG; PAM sequence: AAG
  source 1..20: mol_type = other DNA
cacttcaatcaagggatccc

SEQ ID NO: 26842 - DNA, 20 bp, synthetic construct
  misc_feature 1..20: note = Description of Artificial Sequence: Synthetic oligonucleotide
  misc_feature 1..20: note = Target: SCN10A; (-) strand; PAM type: NRG; PAM sequence: GGG
  source 1..20: mol_type = other DNA
tagagaaccacttcaatcaa

SEQ ID NO: 26843 - DNA, 20 bp, synthetic construct
  misc_feature 1..20: note = Description of Artificial Sequence: Synthetic oligonucleotide
  misc_feature 1..20: note = Target: SCN10A; (-) strand; PAM type: NRG; PAM sequence: AGG
  source 1..20: mol_type = other DNA
atagagaaccacttcaatca

SEQ ID NO: 26844 - DNA, 20 bp, synthetic construct
  misc_feature 1..20: note = Description of Artificial Sequence: Synthetic oligonucleotide
  misc_feature 1..20: note = Target: SCN10A; (-) strand; PAM type: NRG; PAM sequence: AAG
  source 1..20: mol_type = other DNA
tatagagaaccacttcaatc

SEQ ID NO: 26845 - DNA, 20 bp, synthetic construct
  misc_feature 1..20: note = Description of Artificial Sequence: Synthetic oligonucleotide
  misc_feature 1..20: note = Target: SCN10A; (-) strand; PAM type: NRG; PAM sequence: GAG
  source 1..20: mol_type = other DNA
gggtaatagatgggaatata

SEQ ID NO: 26846 - DNA, 20 bp, synthetic construct
  misc_feature 1..20: note = Description of Artificial Sequence: Synthetic oligonucleotide
  misc_feature 1..20: note = Target: SCN10A; (-) strand; PAM type: NRG; PAM sequence: TAG
  source 1..20: mol_type = other DNA
ctgggtaatagatgggaata

SEQ ID NO: 26847 - DNA, 20 bp, synthetic construct
  misc_feature 1..20: note = Description of Artificial Sequence: Synthetic oligonucleotide
  misc_feature 1..20: note = Target: SCN10A; (-) strand; PAM type: NRG; PAM sequence: GGG
  source 1..20: mol_type = other DNA
aaagacactgggtaatagat

SEQ ID NO: 26848 - DNA, 20 bp, synthetic construct
  misc_feature 1..20: note = Description of Artificial Sequence: Synthetic oligonucleotide
  misc_feature 1..20: note = Target: SCN10A; (-) strand; PAM type: NRG; PAM sequence: TGG
  source 1..20: mol_type = other DNA
taaagacactgggtaataga

SEQ ID NO: 26849 - DNA, 20 bp, synthetic construct
  misc_feature 1..20: note = Description of Artificial Sequence: Synthetic oligonucleotide
  misc_feature 1..20: note = Target: SCN10A; (-) strand; PAM type: NRG; PAM sequence: TAG
  source 1..20: mol_type = other DNA
catgtaaagacactgggtaa

SEQ ID NO: 26850 - DNA, 20 bp, synthetic construct
  misc_feature 1..20: note = Description of Artificial Sequence: Synthetic oligonucleotide
  misc_feature 1..20: note = Target: SCN10A; (-) strand; PAM type: NRG; PAM sequence: GGG
  source 1..20: mol_type = other DNA
gaatgtcatgtaaagacact

SEQ ID NO: 26851 - DNA, 20 bp, synthetic construct
  misc_feature 1..20: note = Description of Artificial Sequence: Synthetic oligonucleotide
  misc_feature 1..20: note = Target: SCN10A; (-) strand; PAM type: NRG; PAM sequence: TGG
  source 1..20: mol_type = other DNA
agaatgtcatgtaaagacac

SEQ ID NO: 26852 - DNA, 20 bp, synthetic construct
  misc_feature 1..20: note = Description of Artificial Sequence: Synthetic oligonucleotide
  misc_feature 1..20: note = Target: SCN10A; (-) strand; PAM type: NRG; PAM sequence: AAG
  source 1..20: mol_type = other DNA
ttttctcagaatgtcatgta

SEQ ID NO: 26853 - DNA, 20 bp, synthetic construct
  misc_feature 1..20: note = Description of Artificial Sequence: Synthetic oligonucleotide
  misc_feature 1..20: note = Target: SCN10A; (-) strand; PAM type: NRG; PAM sequence: CAG
  source 1..20: mol_type = other DNA
ttgcaccccaatagttttct

SEQ ID NO: 26854 - DNA, 20 bp, synthetic construct
  misc_feature 1..20: note = Description of Artificial Sequence: Synthetic oligonucleotide
  misc_feature 1..20: note = Target: SCN10A; (-) strand; PAM type: NRG; PAM sequence: TAG
  source 1..20: mol_type = other DNA
ataaactacttgcaccccaa

SEQ ID NO: 26855 - DNA, 20 bp, synthetic construct
  misc_feature 1..20: note = Description of Artificial Sequence: Synthetic oligonucleotide
  misc_feature 1..20: note = Target: SCN10A; (-) strand; PAM type: NRG; PAM sequence: CAG
  source 1..20: mol_type = other DNA
acattcctagaaatagctct

SEQ ID NO: 26856 - DNA, 20 bp, synthetic construct
  misc_feature 1..20: note = Description of Artificial Sequence: Synthetic oligonucleotide
  misc_feature 1..20: note = Target: SCN10A; (-) strand; PAM type: NRG; PAM sequence: TAG
  source 1..20: mol_type = other DNA
ttctatgacattcctagaaa

SEQ ID NO: 26857 - DNA, 20 bp, synthetic construct
  misc_feature 1..20: note = Description of Artificial Sequence: Synthetic oligonucleotide
  misc_feature 1..20: note = Target: SCN10A; (-) strand; PAM type: NRG; PAM sequence: TAG
  source 1..20: mol_type = other DNA
cctctcttctatgacattcc

SEQ ID NO: 26858 - DNA, 20 bp, synthetic construct
  misc_feature 1..20: note = Description of Artificial Sequence: Synthetic oligonucleotide
  misc_feature 1..20: note = Target: SCN10A; (-) strand; PAM type: NRG; PAM sequence: TGG
  source 1..20: mol_type = other DNA
agtttgcccataagagtaaa

SEQ ID NO: 26859 - DNA, 20 bp, synthetic construct
  misc_feature 1..20: note = Description of Artificial Sequence: Synthetic oligonucleotide
  misc_feature 1..20: note = Target: SCN10A; (-) strand; PAM type: NRG; PAM sequence: GAG
  source 1..20: mol_type = other DNA
tgagcccagtttgcccataa

SEQ ID NO: 26860 - DNA, 20 bp, synthetic construct
  misc_feature 1..20: note = Description of Artificial Sequence: Synthetic oligonucleotide
  misc_feature 1..20: note = Target: SCN10A; (-) strand; PAM type: NRG; PAM sequence: AAG
  source 1..20: mol_type = other DNA
tctgagcccagtttgcccat

SEQ ID NO: 26861 - DNA, 20 bp, synthetic construct
  misc_feature 1..20: note = Description of Artificial Sequence: Synthetic oligonucleotide
  misc_feature 1..20: note = Target: SCN10A; (-) strand; PAM type: NRG; PAM sequence: CAG
  source 1..20: mol_type = other DNA
cagtgaaacaattctgagcc

SEQ ID NO: 26862 - DNA, 20 bp, synthetic construct
  misc_feature 1..20: note = Description of Artificial Sequence: Synthetic oligonucleotide
  misc_feature 1..20: note = Target: SCN10A; (-) strand; PAM type: NRG; PAM sequence: GAG
  source 1..20: mol_type = other DNA
cccctcagtgaaacaattct

SEQ ID NO: 26863 - DNA, 20 bp, synthetic construct
  misc_feature 1..20: note = Description of Artificial Sequence: Synthetic oligonucleotide
  misc_feature 1..20: note = Target: SCN10A; (-) strand; PAM type: NRG; PAM sequence: CAG
  source 1..20: mol_type = other DNA
accctagtatccttacccct

SEQ ID NO: 26864 - DNA, 20 bp, synthetic construct
  misc_feature 1..20: note = Description of Artificial Sequence: Synthetic oligonucleotide
  misc_feature 1..20: note = Target: SCN10A; (-) strand; PAM type: NRG; PAM sequence: TAG
  source 1..20: mol_type = other DNA
aggactggtagataaaaccc

SEQ ID NO: 26865 - DNA, 20 bp, synthetic construct
  misc_feature 1..20: note = Description of Artificial Sequence: Synthetic oligonucleotide
  misc_feature 1..20: note = Target: SCN10A; (-) strand; PAM type: NRG; PAM sequence: TAG
  source 1..20: mol_type = other DNA
ccaataagggacaggactgg

SEQ ID NO: 26866 - DNA, 20 bp, synthetic construct
  misc_feature 1..20: note = Description of Artificial Sequence: Synthetic oligonucleotide
  misc_feature 1..20: note = Target: SCN10A; (-) strand; PAM type: NRG; PAM sequence: TGG
  source 1..20: mol_type = other DNA
caaccaataagggacaggac

SEQ ID NO: 26867 - DNA, 20 bp, synthetic construct
  misc_feature 1..20: note = Description of Artificial Sequence: Synthetic oligonucleotide
  misc_feature 1..20: note = Target: SCN10A; (-) strand; PAM type: NRG; PAM sequence: AGG
  source 1..20: mol_type = other DNA
accgtcaaccaataagggac

SEQ ID NO: 26868 - DNA, 20 bp, synthetic construct
  misc_feature 1..20: note = Description of Artificial Sequence: Synthetic oligonucleotide
  misc_feature 1..20: note = Target: SCN10A; (-) strand; PAM type: NRG; PAM sequence: CAG
  source 1..20: mol_type = other DNA
aaccgtcaaccaataaggga

SEQ ID NO: 26869 - DNA, 20 bp, synthetic construct
  misc_feature 1..20: note = Description of Artificial Sequence: Synthetic oligonucleotide
  misc_feature 1..20: note = Target: SCN10A; (-) strand; PAM type: NRG; PAM sequence: GGG
  source 1..20: mol_type = other DNA
ggacaaccgtcaaccaataa

SEQ ID NO: 26870 - DNA, 20 bp, synthetic construct
  misc_feature 1..20: note = Description of Artificial Sequence: Synthetic oligonucleotide
  misc_feature 1..20: note = Target: SCN10A; (-) strand; PAM type: NRG; PAM sequence: AGG
  source 1..20: mol_type = other DNA
aggacaaccgtcaaccaata

SEQ ID NO: 26871 - DNA, 20 bp, synthetic construct
  misc_feature 1..20: note = Description of Artificial Sequence: Synthetic oligonucleotide
  misc_feature 1..20: note = Target: SCN10A; (-) strand; PAM type: NRG; PAM sequence: AAG
  source 1..20: mol_type = other DNA
caggacaaccgtcaaccaat

SEQ ID NO: 26872 - DNA, 20 bp, synthetic construct
  misc_feature 1..20: note = Description of Artificial Sequence: Synthetic oligonucleotide
  misc_feature 1..20: note = Target: SCN10A; (-) strand; PAM type: NRG; PAM sequence: AGG
  source 1..20: mol_type = other DNA
ttctgtagagttaaaatccc

SEQ ID NO: 26873 - DNA, 20 bp, synthetic construct
  misc_feature 1..20: note = Description of Artificial Sequence: Synthetic oligonucleotide
  misc_feature 1..20: note = Target: SCN10A; (-) strand; PAM type: NRG; PAM sequence: CAG
  source 1..20: mol_type = other DNA
gttctgtagagttaaaatcc

SEQ ID NO: 26874 - DNA, 20 bp, synthetic construct
  misc_feature 1..20: note = Description of Artificial Sequence: Synthetic oligonucleotide
  misc_feature 1..20: note = Target: SCN10A; (-) strand; PAM type: NRG; PAM sequence: GAG
  source 1..20: mol_type = other DNA
ccactgaagtaagttctgta

SEQ ID NO: 26875 - DNA, 20 bp, synthetic construct
  misc_feature 1..20: note = Description of Artificial Sequence: Synthetic oligonucleotide
  misc_feature 1..20: note = Target: SCN10A; (-) strand; PAM type: NRG; PAM sequence: TAG
  source 1..20: mol_type = other DNA
ggccactgaagtaagttctg

SEQ ID NO: 26876 - DNA, 20 bp, synthetic construct
  misc_feature 1..20: note = Description of Artificial Sequence: Synthetic oligonucleotide
  misc_feature 1..20: note = Target: SCN10A; (-) strand; PAM type: NRG; PAM sequence: AAG
  source 1..20: mol_type = other DNA
ctttctctggccactgaagt

SEQ ID NO: 26877 - DNA, 20 bp, synthetic construct
  misc_feature 1..20: note = Description of Artificial Sequence: Synthetic oligonucleotide
  misc_feature 1..20: note = Target: SCN10A; (-) strand; PAM type: NRG; PAM sequence: AAG
  source 1..20: mol_type = other DNA
agggctttctctggccactg

SEQ ID NO: 26878 - DNA, 20 bp, synthetic construct
  misc_feature 1..20: note = Description of Artificial Sequence: Synthetic oligonucleotide
  misc_feature 1..20: note = Target: SCN10A; (-) strand; PAM type: NRG; PAM sequence: TGG
  source 1..20: mol_type = other DNA
tgtctgcccagggctttctc

SEQ ID NO: 26879 - DNA, 20 bp, synthetic construct
  misc_feature 1..20: note = Description of Artificial Sequence: Synthetic oligonucleotide
  misc_feature 1..20: note = Target: SCN10A; (-) strand; PAM type: NRG; PAM sequence: GGG
  source 1..20: mol_type = other DNA
ttcctgcctctgtctgccca

SEQ ID NO: 26880 - DNA, 20 bp, synthetic construct
  misc_feature 1..20: note = Description of Artificial Sequence: Synthetic oligonucleotide
  misc_feature 1..20: note = Target: SCN10A; (-) strand; PAM type: NRG; PAM sequence: AGG
  source 1..20: mol_type = other DNA
cttcctgcctctgtctgccc

SEQ ID NO: 26881 - DNA, 20 bp, synthetic construct
  misc_feature 1..20: note = Description of Artificial Sequence: Synthetic oligonucleotide
  misc_feature 1..20: note = Target: SCN10A; (-) strand; PAM type: NRG; PAM sequence: CAG
  source 1..20: mol_type = other DNA
acttcctgcctctgtctgcc

SEQ ID NO: 26882 - DNA, 20 bp, synthetic construct
  misc_feature 1..20: note = Description of Artificial Sequence: Synthetic oligonucleotide
  misc_feature 1..20: note = Target: SCN10A; (-) strand; PAM type: NRG; PAM sequence: CAG
  source 1..20: mol_type = other DNA
tctagaccagaggtcaccag

SEQ ID NO: 26883 - DNA, 20 bp, synthetic construct
  misc_feature 1..20: note = Description of Artificial Sequence: Synthetic oligonucleotide
  misc_feature 1..20: note = Target: SCN10A; (-) strand; PAM type: NRG; PAM sequence: CAG
  source 1..20: mol_type = other DNA
ggatctagaccagaggtcac

SEQ ID NO: 26884 - DNA, 20 bp, synthetic construct
  misc_feature 1..20: note = Description of Artificial Sequence: Synthetic oligonucleotide
  misc_feature 1..20: note = Target: SCN10A; (-) strand; PAM type: NRG; PAM sequence: AGG
  source 1..20: mol_type = other DNA
ttcccagggatctagaccag

SEQ ID NO: 26885 - DNA, 20 bp, synthetic construct
  misc_feature 1..20: note = Description of Artificial Sequence: Synthetic oligonucleotide
  misc_feature 1..20: note = Target: SCN10A; (-) strand; PAM type: NRG; PAM sequence: GAG
  source 1..20: mol_type = other DNA
tttcccagggatctagacca

SEQ ID NO: 26886 - DNA, 20 bp, synthetic construct
  misc_feature 1..20: note = Description of Artificial Sequence: Synthetic oligonucleotide
  misc_feature 1..20: note = Target: SCN10A; (-) strand; PAM type: NRG; PAM sequence: CAG
  source 1..20: mol_type = other DNA
catttcccagggatctagac

SEQ ID NO: 26887 - DNA, 20 bp, synthetic construct
  misc_feature 1..20: note = Description of Artificial Sequence: Synthetic oligonucleotide
  misc_feature 1..20: note = Target: SCN10A; (-) strand; PAM type: NRG; PAM sequence: TAG
  source 1..20: mol_type = other DNA
ttgctcatttcccagggatc

SEQ ID NO: 26888 - DNA, 20 bp, synthetic construct
  misc_feature 1..20: note = Description of Artificial Sequence: Synthetic oligonucleotide
  misc_feature 1..20: note = Target: SCN10A; (-) strand; PAM type: NRG; PAM sequence: GGG
  source 1..20: mol_type = other DNA
tgcaccttgctcatttccca

SEQ ID NO: 26889 - DNA, 20 bp, synthetic construct
  misc_feature 1..20: note = Description of Artificial Sequence: Synthetic oligonucleotide
  misc_feature 1..20: note = Target: SCN10A; (-) strand; PAM type: NRG; PAM sequence: AGG
  source 1..20: mol_type = other DNA
ctgcaccttgctcatttccc

SEQ ID NO: 26890 - DNA, 20 bp, synthetic construct
  misc_feature 1..20: note = Description of Artificial Sequence: Synthetic oligonucleotide
  misc_feature 1..20: note = Target: SCN10A; (-) strand; PAM type: NRG; PAM sequence: CAG
  source 1..20: mol_type = other DNA
tctgcaccttgctcatttcc

SEQ ID NO: 26891 - DNA, 20 bp, synthetic construct
  misc_feature 1..20: note = Description of Artificial Sequence: Synthetic oligonucleotide
  misc_feature 1..20: note = Target: SCN10A; (-) strand; PAM type: NRG; PAM sequence: TAG
  source 1..20: mol_type = other DNA
aattaaggttgcaaggacta

SEQ ID NO: 26892 - DNA, 20 bp, synthetic construct
  misc_feature 1..20: note = Description of Artificial Sequence: Synthetic oligonucleotide
  misc_feature 1..20: note = Target: SCN10A; (-) strand; PAM type: NRG; PAM sequence: AGG
  source 1..20: mol_type = other DNA
gattcccaattaaggttgca

SEQ ID NO: 26893 - DNA, 20 bp, synthetic construct
  misc_feature 1..20: note = Description of Artificial Sequence: Synthetic oligonucleotide
  misc_feature 1..20: note = Target: SCN10A; (-) strand; PAM type: NRG; PAM sequence: AAG
  source 1..20: mol_type = other DNA
ggattcccaattaaggttgc

SEQ ID NO: 26894 - DNA, 20 bp, synthetic construct
  misc_feature 1..20: note = Description of Artificial Sequence: Synthetic oligonucleotide
  misc_feature 1..20: note = Target: SCN10A; (-) strand; PAM type: NRG; PAM sequence: AGG
  source 1..20: mol_type = other DNA
aaaatagggattcccaatta

SEQ ID NO: 26895 - DNA, 20 bp, synthetic construct
  misc_feature 1..20: note = Description of Artificial Sequence: Synthetic oligonucleotide
  misc_feature 1..20: note = Target: SCN10A; (-) strand; PAM type: NRG; PAM sequence: AAG
  source 1..20: mol_type = other DNA
taaaatagggattcccaatt

SEQ ID NO: 26896 - DNA, 20 bp, synthetic construct
  misc_feature 1..20: note = Description of Artificial Sequence: Synthetic oligonucleotide
  misc_feature 1..20: note = Target: SCN10A; (-) strand; PAM type: NRG; PAM sequence: GGG
  source 1..20: mol_type = other DNA
ttcaactagactctaaaata

SEQ ID NO: 26897 - DNA, 20 bp, synthetic construct
  misc_feature 1..20: note = Description of Artificial Sequence: Synthetic oligonucleotide
  misc_feature 1..20: note = Target: SCN10A; (-) strand; PAM type: NRG; PAM sequence: AGG
  source 1..20: mol_type = other DNA
attcaactagactctaaaat

SEQ ID NO: 26898 - DNA, 20 bp, synthetic construct
  misc_feature 1..20: note = Description of Artificial Sequence: Synthetic oligonucleotide
  misc_feature 1..20: note = Target: SCN10A; (-) strand; PAM type: NRG; PAM sequence: TAG
  source 1..20: mol_type = other DNA
cattcaactagactctaaaa

SEQ ID NO: 26899 - DNA, 20 bp, synthetic construct
  misc_feature 1..20: note = Description of Artificial Sequence: Synthetic oligonucleotide
  misc_feature 1..20: note = Target: SCN10A; (-) strand; PAM type: NRG; PAM sequence: TAG
  source 1..20: mol_type = other DNA
ctttccccactacattcaac

SEQ ID NO: 26900 - DNA, 20 bp, synthetic construct
  misc_feature 1..20: note = Description of Artificial Sequence: Synthetic oligonucleotide
  misc_feature 1..20: note = Target: SCN10A; (-) strand; PAM type: NRG; PAM sequence: AGG
  source 1..20: mol_type = other DNA
ttgatatggctacctcacaa

SEQ ID NO: 26901 - DNA, 20 bp, synthetic construct
  misc_feature 1..20: note = Description of Artificial Sequence: Synthetic oligonucleotide
  misc_feature 1..20: note = Target: SCN10A; (-) strand; PAM type: NRG; PAM sequence: AAG
  source 1..20: mol_type = other DNA
tttgatatggctacctcaca

SEQ ID NO: 26902 - DNA, 20 bp, synthetic construct
  misc_feature 1..20: note = Description of Artificial Sequence: Synthetic oligonucleotide
  misc_feature 1..20: note = Target: SCN10A; (-) strand; PAM type: NRG; PAM sequence: TGG
  source 1..20: mol_type = other DNA
tataacacatacatttgata

SEQ ID NO: 26903 - DNA, 20 bp, synthetic construct
  misc_feature 1..20: note = Description of Artificial Sequence: Synthetic oligonucleotide
  misc_feature 1..20: note = Target: SCN10A; (-) strand; PAM type: NRG; PAM sequence: CAG
  source 1..20: mol_type = other DNA
caagaagtgagtatcaggcc

SEQ ID NO: 26904 - DNA, 20 bp, synthetic construct
  misc_feature 1..20: note = Description of Artificial Sequence: Synthetic oligonucleotide
  misc_feature 1..20: note = Target: SCN10A; (-) strand; PAM type: NRG; PAM sequence: AGG
  source 1..20: mol_type = other DNA
taatccaagaagtgagtatc

SEQ ID NO: 26905 - DNA, 20 bp, synthetic construct
  misc_feature 1..20: note = Description of Artificial Sequence: Synthetic oligonucleotide
  misc_feature 1..20: note = Target: SCN10A; (-) strand; PAM type: NRG; PAM sequence: CAG
  source 1..20: mol_type = other DNA
ttaatccaagaagtgagtat

SEQ ID NO: 26906 - DNA, 20 bp, synthetic construct
  misc_feature 1..20: note = Description of Artificial Sequence: Synthetic oligonucleotide
  misc_feature 1..20: note = Target: SCN10A; (-) strand; PAM type: NRG; PAM sequence: GAG
  source 1..20: mol_type = other DNA
cagccattaatccaagaagt

SEQ ID NO: 26907 - DNA, 20 bp, synthetic construct
  misc_feature 1..20: note = Description of Artificial Sequence: Synthetic oligonucleotide
  misc_feature 1..20: note = Target: SCN10A; (-) strand; PAM type: NRG; PAM sequence: AAG
  source 1..20: mol_type = other DNA
tcctcagccattaatccaag

SEQ ID NO: 26908 - DNA, 20 bp, synthetic construct
  misc_feature 1..20: note = Description of Artificial Sequence: Synthetic oligonucleotide
  misc_feature 1..20: note = Target: SCN10A; (-) strand; PAM type: NRG; PAM sequence: AAG
  source 1..20: mol_type = other DNA
tcctcctcagccattaatcc

SEQ ID NO: 26909 - DNA, 20 bp, synthetic construct
  misc_feature 1..20: note = Description of Artificial Sequence: Synthetic oligonucleotide
  misc_feature 1..20: note = Target: SCN10A; (-) strand; PAM type: NRG; PAM sequence: CAG
  source 1..20: mol_type = other DNA
ttcttggattgtctcctcct

SEQ ID NO: 26910 - DNA, 20 bp, synthetic construct
  misc_feature 1..20: note = Description of Artificial Sequence: Synthetic oligonucleotide
  misc_feature 1..20: note = Target: SCN10A; (-) strand; PAM type: NRG; PAM sequence: TGG
  source 1..20: mol_type = other DNA
aaactagaatagatatttct

SEQ ID NO: 26911 - DNA, 20 bp, synthetic construct
  misc_feature 1..20: note = Description of Artificial Sequence: Synthetic oligonucleotide
  misc_feature 1..20: note = Target: SCN10A; (-) strand; PAM type: NRG; PAM sequence: TAG
  source 1..20: mol_type = other DNA
agcttggagctaaactagaa

SEQ ID NO: 26912 - DNA, 20 bp, synthetic construct
  misc_feature 1..20: note = Description of Artificial Sequence: Synthetic oligonucleotide
  misc_feature 1..20: note = Target: SCN10A; (-) strand; PAM type: NRG; PAM sequence: TAG
  source 1..20: mol_type = other DNA
ggccgagcttggagctaaac

SEQ ID NO: 26913 - DNA, 20 bp, synthetic construct
  misc_feature 1..20: note = Description of Artificial Sequence: Synthetic oligonucleotide
  misc_feature 1..20: note = Target: SCN10A; (-) strand; PAM type: NRG; PAM sequence: GAG
  source 1..20: mol_type = other DNA
gaaagccagggccgagcttg

SEQ ID NO: 26914 - DNA, 20 bp, synthetic construct
  misc_feature 1..20: note = Description of Artificial Sequence: Synthetic oligonucleotide
  misc_feature 1..20: note = Target: SCN10A; (-) strand; PAM type: NRG; PAM sequence: TGG
  source 1..20: mol_type = other DNA
ttgaaagccagggccgagct

SEQ ID NO: 26915 - DNA, 20 bp, synthetic construct
  misc_feature 1..20: note = Description of Artificial Sequence: Synthetic oligonucleotide
  misc_feature 1..20: note = Target: SCN10A; (-) strand; PAM type: NRG; PAM sequence: GAG
  source 1..20: mol_type = other DNA
actgtttgaaagccagggcc

SEQ ID NO: 26916 - DNA, 20 bp, synthetic construct
  misc_feature 1..20: note = Description of Artificial Sequence: Synthetic oligonucleotide
  misc_feature 1..20: note = Target: SCN10A; (-) strand; PAM type: NRG; PAM sequence: GGG
  source 1..20: mol_type = other DNA
tgcagactgtttgaaagcca

SEQ ID NO: 26917 - DNA, 20 bp, synthetic construct
  misc_feature 1..20: note = Description of Artificial Sequence: Synthetic oligonucleotide
  misc_feature 1..20: note = Target: SCN10A; (-) strand; PAM type: NRG; PAM sequence: AGG
  source 1..20: mol_type = other DNA
atgcagactgtttgaaagcc

SEQ ID NO: 26918 - DNA, 20 bp, synthetic construct
  misc_feature 1..20: note = Description of Artificial Sequence: Synthetic oligonucleotide
  misc_feature 1..20: note = Target: SCN10A; (-) strand; PAM type: NRG; PAM sequence: CAG
  source 1..20: mol_type = other DNA
catgcagactgtttgaaagc

SEQ ID NO: 26919 - DNA, 20 bp, synthetic construct
  misc_feature 1..20: note = Description of Artificial Sequence: Synthetic oligonucleotide
  misc_feature 1..20: note = Target: SCN10A; (-) strand; PAM type: NRG; PAM sequence: AAG
  source 1..20: mol_type = other DNA
aactcatgcagactgtttga

SEQ ID NO: 26920 - DNA, 20 bp, synthetic construct
  misc_feature 1..20: note = Description of Artificial Sequence: Synthetic oligonucleotide
  misc_feature 1..20: note = Target: SCN10A; (-) strand; PAM type: NRG; PAM sequence: CAG
  source 1..20: mol_type = other DNA
tatacctgcaaaaactcatg

SEQ ID NO: 26921 - DNA, 20 bp, synthetic construct
  misc_feature 1..20: note = Description of Artificial Sequence: Synthetic oligonucleotide
  misc_feature 1..20: note = Target: SCN10A; (-) strand; PAM type: NRG; PAM sequence: GGG
  source 1..20: mol_type = other DNA
ggaacagctattaaacttaa

SEQ ID NO: 26922 - DNA, 20 bp, synthetic construct
  misc_feature 1..20: note = Description of Artificial Sequence: Synthetic oligonucleotide
  misc_feature 1..20: note = Target: SCN10A; (-) strand; PAM type: NRG; PAM sequence: AGG
  source 1..20: mol_type = other DNA
aggaacagctattaaactta

SEQ ID NO: 26923 - DNA, 20 bp, synthetic construct
  misc_feature 1..20: note = Description of Artificial Sequence: Synthetic oligonucleotide
  misc_feature 1..20: note = Target: SCN10A; (-) strand; PAM type: NRG; PAM sequence: AAG
  source 1..20: mol_type = other DNA
caggaacagctattaaactt

SEQ ID NO: 26924 - DNA, 20 bp, synthetic construct
  misc_feature 1..20: note = Description of Artificial Sequence: Synthetic oligonucleotide
  misc_feature 1..20: note = Target: SCN10A; (-) strand; PAM type: NRG; PAM sequence: CAG
  source 1..20: mol_type = other DNA
aaaggcttgcttagcaggaa

SEQ ID NO: 26925 - DNA, 20 bp, synthetic construct
  misc_feature 1..20: note = Description of Artificial Sequence: Synthetic oligonucleotide
  misc_feature 1..20: note = Target: SCN10A; (-) strand; PAM type: NRG; PAM sequence: AGG
  source 1..20: mol_type = other DNA
aatagaaaggcttgcttagc

SEQ ID NO: 26926 - DNA, 20 bp, synthetic construct
  misc_feature 1..20: note = Description of Artificial Sequence: Synthetic oligonucleotide
  misc_feature 1..20: note = Target: SCN10A; (-) strand; PAM type: NRG; PAM sequence: CAG
  source 1..20: mol_type = other DNA
gaatagaaaggcttgcttag

SEQ ID NO: 26927 - DNA, 20 bp, synthetic construct
  misc_feature 1..20: note = Description of Artificial Sequence: Synthetic oligonucleotide
  misc_feature 1..20: note = Target: SCN10A; (-) strand; PAM type: NRG; PAM sequence: TAG
  source 1..20: mol_type = other DNA
accgaatagaaaggcttgct

SEQ ID NO: 26928 - DNA, 20 bp, synthetic construct
  misc_feature 1..20: note = Description of Artificial Sequence: Synthetic oligonucleotide
  misc_feature 1..20: note = Target: SCN10A; (-) strand; PAM type: NRG; PAM sequence: AGG
  source 1..20: mol_type = other DNA
tgaatgcccaccgaatagaa

SEQ ID NO: 26929 - DNA, 20 bp, synthetic construct
  misc_feature 1..20: note = Description of Artificial Sequence: Synthetic oligonucleotide
  misc_feature 1..20: note = Target: SCN10A; (-) strand; PAM type: NRG; PAM sequence: AAG
  source 1..20: mol_type = other DNA
ctgaatgcccaccgaataga

SEQ ID NO: 26930 - DNA, 20 bp, synthetic construct
  misc_feature 1..20: note = Description of Artificial Sequence: Synthetic oligonucleotide
  misc_feature 1..20: note = Target: SCN10A; (-) strand; PAM type: NRG; PAM sequence: TAG
  source 1..20: mol_type = other DNA
agggctgaatgcccaccgaa

SEQ ID NO: 26931 - DNA, 20 bp, synthetic construct
  misc_feature 1..20: note = Description of Artificial Sequence: Synthetic oligonucleotide
  misc_feature 1..20: note = Target: SCN10A; (-) strand; PAM type: NRG; PAM sequence: GGG
  source 1..20: mol_type = other DNA
gctgttggttcatcttggga

SEQ ID NO: 26932 - DNA, 20 bp, synthetic construct
  misc_feature 1..20: note = Description of Artificial Sequence: Synthetic oligonucleotide
  misc_feature 1..20: note = Target: SCN10A; (-) strand; PAM type: NRG; PAM sequence: AGG
  source 1..20: mol_type = other DNA
cgctgttggttcatcttggg

SEQ ID NO: 26933 - DNA, 20 bp, synthetic construct
  misc_feature 1..20: note = Description of Artificial Sequence: Synthetic oligonucleotide
  misc_feature 1..20: note = Target: SCN10A; (-) strand; PAM type: NRG; PAM sequence: GAG
  source 1..20: mol_type = other DNA
tcgctgttggttcatcttgg

SEQ ID NO: 26934 - DNA, 20 bp, synthetic construct
  misc_feature 1..20: note = Description of Artificial Sequence: Synthetic oligonucleotide
  misc_feature 1..20: note = Target: SCN10A; (-) strand; PAM type: NRG; PAM sequence: GGG
  source 1..20: mol_type = other DNA
tatcgctgttggttcatctt

SEQ ID NO: 26935 - DNA, 20 bp, synthetic construct
  misc_feature 1..20: note = Description of Artificial Sequence: Synthetic oligonucleotide
  misc_feature 1..20: note = Target: SCN10A; (-) strand; PAM type: NRG; PAM sequence: TGG
  source 1..20: mol_type = other DNA
atatcgctgttggttcatct

SEQ ID NO: 26936 - DNA, 20 bp, synthetic construct
  misc_feature 1..20: note = Description of Artificial Sequence: Synthetic oligonucleotide
  misc_feature 1..20: note = Target: SCN10A; (-) strand; PAM type: NRG; PAM sequence: TGG
  source 1..20: mol_type = other DNA
ggggaaccaaatatcgctgt

SEQ ID NO: 26937 - DNA, 20 bp, synthetic construct
  misc_feature 1..20: note = Description of Artificial Sequence: Synthetic oligonucleotide
  misc_feature 1..20: note = Target: SCN10A; (-) strand; PAM type: NRG; PAM sequence: GGG
  source 1..20: mol_type = other DNA
aaaaaaaaaaaggaggcaag

SEQ ID NO: 26938 - DNA, 20 bp, synthetic construct
  misc_feature 1..20: note = Description of Artificial Sequence: Synthetic oligonucleotide
  misc_feature 1..20: note = Target: SCN10A; (-) strand; PAM type: NRG; PAM sequence: GGG
  source 1..20: mol_type = other DNA
aaaaaaaaaaaaggaggcaa

SEQ ID NO: 26939 - DNA, 20 bp, synthetic construct
  misc_feature 1..20: note = Description of Artificial Sequence: Synthetic oligonucleotide
  misc_feature 1..20: note = Target: SCN10A; (-) strand; PAM type: NRG; PAM sequence: AGG
  source 1..20: mol_type = other DNA
aaaaaaaaaaaaaggaggca

SEQ ID NO: 26940 - DNA, 20 bp, synthetic construct
  misc_feature 1..20: note = Description of Artificial Sequence: Synthetic oligonucleotide
  misc_feature 1..20: note = Target: SCN10A; (-) strand; PAM type: NRG; PAM sequence: AAG
  source 1..20: mol_type = other DNA
aaaaaaaaaaaaaaggaggc

SEQ ID NO: 26941 - DNA, 20 bp, synthetic construct
  misc_feature 1..20: note = Description of Artificial Sequence: Synthetic oligonucleotide
  misc_feature 1..20: note = Target: SCN10A; (-) strand; PAM type: NRG; PAM sequence: AGG
  source 1..20: mol_type = other DNA
aaaaaaaaaaaaaaaaaagg

SEQ ID NO: 26942 - DNA, 20 bp, synthetic construct
  misc_feature 1..20: note = Description of Artificial Sequence: Synthetic oligonucleotide
  misc_feature 1..20: note = Target: SCN10A; (-) strand; PAM type: NRG; PAM sequence: GAG
  source 1..20: mol_type = other DNA
aaaaaaaaaaaaaaaaaaag

SEQ ID NO: 26943 - DNA, 20 bp, synthetic construct
  misc_feature 1..20: note = Description of Artificial Sequence: Synthetic oligonucleotide
  misc_feature 1..20: note = Target: SCN10A; (-) strand; PAM type: NRG; PAM sequence: AGG
  source 1..20: mol_type = other DNA
aaaaaaaaaaaaaaaaaaaa

SEQ ID NO: 26944 - DNA, 20 bp, synthetic construct
  misc_feature 1..20: note = Description of Artificial Sequence: Synthetic oligonucleotide
  misc_feature 1..20: note = Target: SCN10A; (-) strand; PAM type: NRG; PAM sequence: AAG
  source 1..20: mol_type = other DNA
caaaaaaaaaaaaaaaaaaa

SEQ ID NO: 26945 - DNA, 20 bp, synthetic construct
  misc_feature 1..20: note = Description of Artificial Sequence: Synthetic oligonucleotide
  misc_feature 1..20: note = Target: SCN10A; (-) strand; PAM type: NRG; PAM sequence: GAG
  source 1..20: mol_type = other DNA
tccagcctggacaacagagt

SEQ ID NO: 26946 - DNA, 20 bp, synthetic construct
  misc_feature 1..20: note = Description of Artificial Sequence: Synthetic oligonucleotide
  misc_feature 1..20: note = Target: SCN10A; (-) strand; PAM type: NRG; PAM sequence: GAG
  source 1..20: mol_type = other DNA
gcactccagcctggacaaca

SEQ ID NO: 26947 - DNA, 20 bp, synthetic construct
  misc_feature 1..20: note = Description of Artificial Sequence: Synthetic oligonucleotide
  misc_feature 1..20: note = Target: SCN10A; (-) strand; PAM type: NRG; PAM sequence: CAG
  source 1..20: mol_type = other DNA
ctgcactccagcctggacaa

SEQ ID NO: 26948 - DNA, 20 bp, synthetic construct
  misc_feature 1..20: note = Description of Artificial Sequence: Synthetic oligonucleotide
  misc_feature 1..20: note = Target: SCN10A; (-) strand; PAM type: NRG; PAM sequence: TGG
  source 1..20: mol_type = other DNA
tgtgccactgcactccagcc

SEQ ID NO: 26949 - DNA, 20 bp, synthetic construct
  misc_feature 1..20: note = Description of Artificial Sequence: Synthetic oligonucleotide
  misc_feature 1..20: note = Target: SCN10A; (-) strand; PAM type: NRG; PAM sequence: CAG
  source 1..20: mol_type = other DNA
gtgattgtgccactgcactc

SEQ ID NO: 26950 - DNA, 20 bp, synthetic construct
  misc_feature 1..20: note = Description of Artificial Sequence: Synthetic oligonucleotide
  misc_feature 1..20: note = Target: SCN10A; (-) strand; PAM type: NRG; PAM sequence: GAG
  source 1..20: mol_type = other DNA
tgggaggtcaaggctgcaat

SEQ ID NO: 26951 - DNA, 20 bp, synthetic construct
  misc_feature 1..20: note = Description of Artificial Sequence: Synthetic oligonucleotide
  misc_feature 1..20: note = Target: SCN10A; (-) strand; PAM type: NRG; PAM sequence: AGG
  source 1..20: mol_type = other DNA
cacttgaacatgggaggtca

SEQ ID NO: 26952 - DNA, 20 bp, synthetic construct
  misc_feature 1..20: note = Description of Artificial Sequence: Synthetic oligonucleotide
  misc_feature 1..20: note = Target: SCN10A; (-) strand; PAM type: NRG; PAM sequence: AAG
  source 1..20: mol_type = other DNA
tcacttgaacatgggaggtc

SEQ ID NO: 26953 - DNA, 20 bp, synthetic construct
  misc_feature 1..20: note = Description of Artificial Sequence: Synthetic oligonucleotide
  misc_feature 1..20: note = Target: SCN10A; (-) strand; PAM type: NRG; PAM sequence: AGG
  source 1..20: mol_type = other DNA
gaggatcacttgaacatggg

SEQ ID NO: 26954 - DNA, 20 bp, synthetic construct
  misc_feature 1..20: note = Description of Artificial Sequence: Synthetic oligonucleotide
  misc_feature 1..20: note = Target: SCN10A; (-) strand; PAM type: NRG; PAM sequence: GAG
  source 1..20: mol_type = other DNA
ggaggatcacttgaacatgg

SEQ ID NO: 26955 - DNA, 20 bp, synthetic construct
  misc_feature 1..20: note = Description of Artificial Sequence: Synthetic oligonucleotide
  misc_feature 1..20: note = Target: SCN10A; (-) strand; PAM type: NRG; PAM sequence: GGG
  source 1..20: mol_type = other DNA
tgggaggatcacttgaacat

SEQ ID NO: 26956 - DNA, 20 bp, synthetic construct
  misc_feature 1..20: note = Description of Artificial Sequence: Synthetic oligonucleotide
  misc_feature 1..20: note = Target: SCN10A; (-) strand; PAM type: NRG; PAM sequence: TGG
  source 1..20: mol_type = other DNA
gtgggaggatcacttgaaca

SEQ ID NO: 26957 - DNA, 20 bp, synthetic construct
  misc_feature 1..20: note = Description of Artificial Sequence: Synthetic oligonucleotide
  misc_feature 1..20: note = Target: SCN10A; (-) strand; PAM type: NRG; PAM sequence: AGG
  source 1..20: mol_type = other DNA
acttgggaggctgaggtggg

SEQ ID NO: 26958 - DNA, 20 bp, synthetic construct
  misc_feature 1..20: note = Description of Artificial Sequence: Synthetic oligonucleotide
  misc_feature 1..20: note = Target: SCN10A; (-) strand; PAM type: NRG; PAM sequence: GAG
  source 1..20: mol_type = other DNA
tacttgggaggctgaggtgg

SEQ ID NO: 26959 - DNA, 20 bp, synthetic construct
  misc_feature 1..20: note = Description of Artificial Sequence: Synthetic oligonucleotide
  misc_feature 1..20: note = Target: SCN10A; (-) strand; PAM type: NRG; PAM sequence: GGG
  source 1..20: mol_type = other DNA
actacttgggaggctgaggt

SEQ ID NO: 26960 - DNA, 20 bp, synthetic construct
  misc_feature 1..20: note = Description of Artificial Sequence: Synthetic oligonucleotide
  misc_feature 1..20: note = Target: SCN10A; (-) strand; PAM type: NRG; PAM sequence: TGG
  source 1..20: mol_type = other DNA
cactacttgggaggctgagg

SEQ ID NO: 26961 - DNA, 20 bp, synthetic construct
  misc_feature 1..20: note = Description of Artificial Sequence: Synthetic oligonucleotide
  misc_feature 1..20: note = Target: SCN10A; (-) strand; PAM type: NRG; PAM sequence: AGG
  source 1..20: mol_type = other DNA
ttccactacttgggaggctg

SEQ ID NO: 26962 - DNA, 20 bp, synthetic construct
  misc_feature 1..20: note = Description of Artificial Sequence: Synthetic oligonucleotide
  misc_feature 1..20: note = Target: SCN10A; (-) strand; PAM type: NRG; PAM sequence: GAG
  source 1..20: mol_type = other DNA
gttccactacttgggaggct

SEQ ID NO: 26963 - DNA, 20 bp, synthetic construct
  misc_feature 1..20: note = Description of Artificial Sequence: Synthetic oligonucleotide
  misc_feature 1..20: note = Target: SCN10A; (-) strand; PAM type: NRG; PAM sequence: AGG
  source 1..20: mol_type = other DNA
ctgtagttccactacttggg

SEQ ID NO: 26964 - DNA, 20 bp, synthetic construct
  misc_feature 1..20: note = Description of Artificial Sequence: Synthetic oligonucleotide
  misc_feature 1..20: note = Target: SCN10A; (-) strand; PAM type: NRG; PAM sequence: GAG
  source 1..20: mol_type = other DNA
cctgtagttccactacttgg

SEQ ID NO: 26965 - DNA, 20 bp, synthetic construct
  misc_feature 1..20: note = Description of Artificial Sequence: Synthetic oligonucleotide
  misc_feature 1..20: note = Target: SCN10A; (-) strand; PAM type: NRG; PAM sequence: GGG
  source 1..20: mol_type = other DNA
tacctgtagttccactactt

SEQ ID NO: 26966 - DNA, 20 bp, synthetic construct
  misc_feature 1..20: note = Description of Artificial Sequence: Synthetic oligonucleotide
  misc_feature 1..20: note = Target: SCN10A; (-) strand; PAM type: NRG; PAM sequence: TGG
  source 1..20: mol_type = other DNA
atacctgtagttccactact

SEQ ID NO: 26967 - DNA, 20 bp, synthetic construct
  misc_feature 1..20: note = Description of Artificial Sequence: Synthetic oligonucleotide
  misc_feature 1..20: note = Target: SCN10A; (-) strand; PAM type: NRG; PAM sequence: TAG
  source 1..20: mol_type = other DNA
ggcgtggtggcacatacctg

SEQ ID NO: 26968 - DNA, 20 bp, synthetic construct
  misc_feature 1..20: note = Description of Artificial Sequence: Synthetic oligonucleotide
  misc_feature 1..20: note = Target: SCN10A; (-) strand; PAM type: NRG; PAM sequence: TGG
  source 1..20: mol_type = other DNA
tgaagattagccaggcgtgg

SEQ ID NO: 26969 - DNA, 20 bp, synthetic construct
  misc_feature 1..20: note = Description of Artificial Sequence: Synthetic oligonucleotide
  misc_feature 1..20: note = Target: SCN10A; (-) strand; PAM type: NRG; PAM sequence: TGG
  source 1..20: mol_type = other DNA
atatgaagattagccaggcg

SEQ ID NO: 26970 - DNA, 20 bp, synthetic construct
  misc_feature 1..20: note = Description of Artificial Sequence: Synthetic oligonucleotide
  misc_feature 1..20: note = Target: SCN10A; (-) strand; PAM type: NRG; PAM sequence: AGG
  source 1..20: mol_type = other DNA
caaaaatatgaagattagcc

SEQ ID NO: 26971 - DNA, 20 bp, synthetic construct
  misc_feature 1..20: note = Description of Artificial Sequence: Synthetic oligonucleotide
  misc_feature 1..20: note = Target: SCN10A; (-) strand; PAM type: NRG; PAM sequence: CAG
  source 1..20: mol_type = other DNA
tcaaaaatatgaagattagc

SEQ ID NO: 26972 - DNA, 20 bp, synthetic construct
  misc_feature 1..20: note = Description of Artificial Sequence: Synthetic oligonucleotide
  misc_feature 1..20: note = Target: SCN10A; (-) strand; PAM type: NRG; PAM sequence: TAG
  source 1..20: mol_type = other DNA
cccatcaaaaatatgaagat

SEQ ID NO: 26973 - DNA, 20 bp, synthetic construct
  misc_feature 1..20: note = Description of Artificial Sequence: Synthetic oligonucleotide
  misc_feature 1..20: note = Target: SCN10A; (-) strand; PAM type: NRG; PAM sequence: AAG
  source 1..20: mol_type = other DNA
aaaaccccatcaaaaatatg

SEQ ID NO: 26974 - DNA, 20 bp, synthetic construct
  misc_feature 1..20: note = Description of Artificial Sequence: Synthetic oligonucleotide
  misc_feature 1..20: note = Target: SCN10A; (-) strand; PAM type: NRG; PAM sequence: TGG
  source 1..20: mol_type = other DNA
tgagaccagcctggggaaca

SEQ ID NO: 26975 - DNA, 20 bp, synthetic construct
  misc_feature 1..20: note = Description of Artificial Sequence: Synthetic oligonucleotide
  misc_feature 1..20: note = Target: SCN10A; (-) strand; PAM type: NRG; PAM sequence: GGG
  source 1..20: mol_type = other DNA
aggagtttgagaccagcctg

SEQ ID NO: 26976 - DNA, 20 bp, synthetic construct
  misc_feature 1..20: note = Description of Artificial Sequence: Synthetic oligonucleotide
  misc_feature 1..20: note = Target: SCN10A; (+) strand; PAM type: NRG; PAM sequence: TGG
  source 1..20: mol_type = other DNA
attgtttgaattttattcta

SEQ ID NO: 26977 - DNA, 20 bp, synthetic construct
  misc_feature 1..20: note = Description of Artificial Sequence: Synthetic oligonucleotide
  misc_feature 1..20: note = Target: SCN10A; (+) strand; PAM type: NRG; PAM sequence: CAG
  source 1..20: mol_type = other DNA
tttgaattttattctatggc

SEQ ID NO: 26978 - DNA, 20 bp, synthetic construct
  misc_feature 1..20: note = Description of Artificial Sequence: Synthetic oligonucleotide
  misc_feature 1..20: note = Target: SCN10A; (+) strand; PAM type: NRG; PAM sequence: AGG
  source 1..20: mol_type = other DNA
ttgaattttattctatggcc

SEQ ID NO: 26979 - DNA, 20 bp, synthetic construct
  misc_feature 1..20: note = Description of Artificial Sequence: Synthetic oligonucleotide
  misc_feature 1..20: note = Target: SCN10A; (+) strand; PAM type: NRG; PAM sequence: CGG
  source 1..20: mol_type = other DNA
ttattctatggccaggcata

SEQ ID NO: 26980 - DNA, 20 bp, synthetic construct
  misc_feature 1..20: note = Description of Artificial Sequence: Synthetic oligonucleotide
  misc_feature 1..20: note = Target: SCN10A; (+) strand; PAM type: NRG; PAM sequence: TGG
  source 1..20: mol_type = other DNA
tacttgtatttgtacccttt

SEQ ID NO: 26981 - DNA, 20 bp, synthetic construct
  misc_feature 1..20: note = Description of Artificial Sequence: Synthetic oligonucleotide
  misc_feature 1..20: note = Target: SCN10A; (+) strand; PAM type: NRG; PAM sequence: TAG
  source 1..20: mol_type = other DNA
ttgtacccttttggtaacct

SEQ ID NO: 26982 - DNA, 20 bp, synthetic construct
  misc_feature 1..20: note = Description of Artificial Sequence: Synthetic oligonucleotide
  misc_feature 1..20: note = Target: SCN10A; (+) strand; PAM type: NRG; PAM sequence: AGG
  source 1..20: mol_type = other DNA
tgtacccttttggtaacctt

SEQ ID NO: 26983 - DNA, 20 bp, synthetic construct
  misc_feature 1..20: note = Description of Artificial Sequence: Synthetic oligonucleotide
  misc_feature 1..20: note = Target: SCN10A; (+) strand; PAM type: NRG; PAM sequence: TGG
  source 1..20: mol_type = other DNA
tggtaaccttaggttttgtg

SEQ ID NO: 26984 - DNA, 20 bp, synthetic construct
  misc_feature 1..20: note = Description of Artificial Sequence: Synthetic oligonucleotide
  misc_feature 1..20: note = Target: SCN10A; (+) strand; PAM type: NRG; PAM sequence: CAG
  source 1..20: mol_type = other DNA
tttgtgtggctttctgtaaa

SEQ ID NO: 26985 - DNA, 20 bp, synthetic construct
  misc_feature 1..20: note = Description of Artificial Sequence: Synthetic oligonucleotide
  misc_feature 1..20: note = Target: SCN10A; (+) strand; PAM type: NRG; PAM sequence: CAG
  source 1..20: mol_type = other DNA
ttgactgacactctttttcc

SEQ ID NO: 26986 - DNA, 20 bp, synthetic construct
  misc_feature 1..20: note = Description of Artificial Sequence: Synthetic oligonucleotide
  misc_feature 1..20: note = Target: SCN10A; (+) strand; PAM type: NRG; PAM sequence: GAG
  source 1..20: mol_type = other DNA
gactgacactctttttccca

SEQ ID NO: 26987 - DNA, 20 bp, synthetic construct
  misc_feature 1..20: note = Description of Artificial Sequence: Synthetic oligonucleotide
  misc_feature 1..20: note = Target: SCN10A; (+) strand; PAM type: NRG; PAM sequence: CGG
  source 1..20: mol_type = other DNA
ttctgtatgtctctatatcc

SEQ ID NO: 26988 - DNA, 20 bp, synthetic construct
  misc_feature 1..20: note = Description of Artificial Sequence: Synthetic oligonucleotide
  misc_feature 1..20: note = Target: SCN10A; (+) strand; PAM type: NRG; PAM sequence: GGG
  source 1..20: mol_type = other DNA
tctgtatgtctctatatccc

SEQ ID NO: 26989 - DNA, 20 bp, synthetic construct
  misc_feature 1..20: note = Description of Artificial Sequence: Synthetic oligonucleotide
  misc_feature 1..20: note = Target: SCN10A; (+) strand; PAM type: NRG; PAM sequence: AAG
  source 1..20: mol_type = other DNA
tttaattattattatacttt

SEQ ID NO: 26990 - DNA, 20 bp, synthetic construct
  misc_feature 1..20: note = Description of Artificial Sequence: Synthetic oligonucleotide
  misc_feature 1..20: note = Target: SCN10A; (+) strand; PAM type: NRG; PAM sequence: TAG
  source 1..20: mol_type = other DNA
tattattatactttaagttt

SEQ ID NO: 26991 - DNA, 20 bp, synthetic construct
  misc_feature 1..20: note = Description of Artificial Sequence: Synthetic oligonucleotide
  misc_feature 1..20: note = Target: SCN10A; (+) strand; PAM type: NRG; PAM sequence: AGG
  source 1..20: mol_type = other DNA
attattatactttaagtttt

SEQ ID NO: 26992 - DNA, 20 bp, synthetic construct
  misc_feature 1..20: note = Description of Artificial Sequence: Synthetic oligonucleotide
  misc_feature 1..20: note = Target: SCN10A; (+) strand; PAM type: NRG; PAM sequence: GAG
  source 1..20: mol_type = other DNA
ctttaagttttaggatacat

SEQ ID NO: 26993 - DNA, 20 bp, synthetic construct
  misc_feature 1..20: note = Description of Artificial Sequence: Synthetic oligonucleotide
  misc_feature 1..20: note = Target: SCN10A; (+) strand; PAM type: NRG; PAM sequence: CAG
  source 1..20: mol_type = other DNA
ggatacatgagcacaacgtg

SEQ ID NO: 26994 - DNA, 20 bp, synthetic construct
  misc_feature 1..20: note = Description of Artificial Sequence: Synthetic oligonucleotide
  misc_feature 1..20: note = Target: SCN10A; (+) strand; PAM type: NRG; PAM sequence: AGG
  source 1..20: mol_type = other DNA
gatacatgagcacaacgtgc

SEQ ID NO: 26995 - DNA, 20 bp, synthetic construct
  misc_feature 1..20: note = Description of Artificial Sequence: Synthetic oligonucleotide
  misc_feature 1..20: note = Target: SCN10A; (+) strand; PAM type: NRG; PAM sequence: TGG
  source 1..20: mol_type = other DNA
tatgtatacatgtgccatgt

SEQ ID NO: 26996 - DNA, 20 bp, synthetic construct
  misc_feature 1..20: note = Description of Artificial Sequence: Synthetic oligonucleotide
  misc_feature 1..20: note = Target: SCN10A; (+) strand; PAM type: NRG; PAM sequence: TAG
  source 1..20: mol_type = other DNA
cattaacttgtcatttacat

SEQ ID NO: 26997 - DNA, 20 bp, synthetic construct
  misc_feature 1..20: note = Description of Artificial Sequence: Synthetic oligonucleotide
  misc_feature 1..20: note = Target: SCN10A; (+) strand; PAM type: NRG; PAM sequence: AGG
  source 1..20: mol_type = other DNA
attaacttgtcatttacatt

SEQ ID NO: 26998 - DNA, 20 bp, synthetic construct
  misc_feature 1..20: note = Description of Artificial Sequence: Synthetic oligonucleotide
  misc_feature 1..20: note = Target: SCN10A; (+) strand; PAM type: NRG; PAM sequence: CGG
  source 1..20: mol_type = other DNA
ctccaccccacaactgtccc

SEQ ID NO: 26999 - DNA, 20 bp, synthetic construct
  misc_feature 1..20: note = Description of Artificial Sequence: Synthetic oligonucleotide
  misc_feature 1..20: note = Target: SCN10A; (+) strand; PAM type: NRG; PAM sequence: GAG
  source 1..20: mol_type = other DNA
attgttcaattcccacctat

SEQ ID NO: 27000 - DNA, 20 bp, synthetic construct
  misc_feature 1..20: note = Description of Artificial Sequence: Synthetic oligonucleotide
  misc_feature 1..20: note = Target: SCN10A; (+) strand; PAM type: NRG; PAM sequence: GAG
  source 1..20: mol_type = other DNA
ttcaattcccacctatgagt

SEQ ID NO: 27001 - DNA, 20 bp, synthetic construct
  misc_feature 1..20: note = Description of Artificial Sequence: Synthetic oligonucleotide
  misc_feature 1..20: note = Target: SCN10A; (+) strand; PAM type: NRG; PAM sequence: CGG
  source 1..20: mol_type = other DNA
cacctatgagtgagaacatg

SEQ ID NO: 27002 - DNA, 20 bp, synthetic construct
  misc_feature 1..20: note = Description of Artificial Sequence: Synthetic oligonucleotide
  misc_feature 1..20: note = Target: SCN10A; (+) strand; PAM type: NRG; PAM sequence: TGG
  source 1..20: mol_type = other DNA
gagtgagaacatgcggtgtt

SEQ ID NO: 27003 - DNA, 20 bp, synthetic construct
  misc_feature 1..20: note = Description of Artificial Sequence: Synthetic oligonucleotide
  misc_feature 1..20: note = Target: SCN10A; (+) strand; PAM type: NRG; PAM sequence: TAG
  source 1..20: mol_type = other DNA
ggttttttttgtccttgcga

SEQ ID NO: 27004 - DNA, 20 bp, synthetic construct
  misc_feature 1..20: note = Description of Artificial Sequence: Synthetic oligonucleotide
  misc_feature 1..20: note = Target: SCN10A; (+) strand; PAM type: NRG; PAM sequence: GAG
  source 1..20: mol_type = other DNA
tgtccttgcgatagtttgct

SEQ ID NO: 27005 - DNA, 20 bp, synthetic construct
  misc_feature 1..20: note = Description of Artificial Sequence: Synthetic oligonucleotide
  misc_feature 1..20: note = Target: SCN10A; (+) strand; PAM type: NRG; PAM sequence: TGG
  source 1..20: mol_type = other DNA
cgatagtttgctgagaatga

SEQ ID NO: 27006 - DNA, 20 bp, synthetic construct
  misc_feature 1..20: note = Description of Artificial Sequence: Synthetic oligonucleotide
  misc_feature 1..20: note = Target: SCN10A; (+) strand; PAM type: NRG; PAM sequence: CAG
  source 1..20: mol_type = other DNA
ttgctgagaatgatggtttc

SEQ ID NO: 27007 - DNA, 20 bp, synthetic construct
  misc_feature 1..20: note = Description of Artificial Sequence: Synthetic oligonucleotide
  misc_feature 1..20: note = Target: SCN10A; (+) strand; PAM type: NRG; PAM sequence: AAG
  source 1..20: mol_type = other DNA
gcttcatccatgtccctgca

SEQ ID NO: 27008 - DNA, 20 bp, synthetic construct
  misc_feature 1..20: note = Description of Artificial Sequence: Synthetic oligonucleotide
  misc_feature 1..20: note = Target: SCN10A; (+) strand; PAM type: NRG; PAM sequence: AGG
  source 1..20: mol_type = other DNA
cttcatccatgtccctgcaa

SEQ ID NO: 27009 - DNA, 20 bp, synthetic construct
  misc_feature 1..20: note = Description of Artificial Sequence: Synthetic oligonucleotide
  misc_feature 1..20: note = Target: SCN10A; (+) strand; PAM type: NRG; PAM sequence: TGG
  source 1..20: mol_type = other DNA
catgaactcatcatttttta

SEQ ID NO: 27010 - DNA, 20 bp, synthetic construct
  misc_feature 1..20: note = Description of Artificial Sequence: Synthetic oligonucleotide
  misc_feature 1..20: note = Target: SCN10A; (+) strand; PAM type: NRG; PAM sequence: TAG
  source 1..20: mol_type = other DNA
catcattttttatggctgca

SEQ ID NO: 27011 - DNA, 20 bp, synthetic construct
  misc_feature 1..20: note = Description of Artificial Sequence: Synthetic oligonucleotide
  misc_feature 1..20: note = Target: SCN10A; (+) strand; PAM type: NRG; PAM sequence: TGG
  source 1..20: mol_type = other DNA
tatggctgcatagtattcca

SEQ ID NO: 27012 - DNA, 20 bp, synthetic construct
  misc_feature 1..20: note = Description of Artificial Sequence: Synthetic oligonucleotide
  misc_feature 1..20: note = Target: SCN10A; (+) strand; PAM type: NRG; PAM sequence: CAG
  source 1..20: mol_type = other DNA
tgtgccacattttcttaatc

SEQ ID NO: 27013 - DNA, 20 bp, synthetic construct
  misc_feature 1..20: note = Description of Artificial Sequence: Synthetic oligonucleotide
  misc_feature 1..20: note = Target: SCN10A; (+) strand; PAM type: NRG; PAM sequence: TGG
  source 1..20: mol_type = other DNA
ttaatccagtctatcactgt

SEQ ID NO: 27014 - DNA, 20 bp, synthetic construct
  misc_feature 1..20: note = Description of Artificial Sequence: Synthetic oligonucleotide
  misc_feature 1..20: note = Target: SCN10A; (+) strand; PAM type: NRG; PAM sequence: TGG
  source 1..20: mol_type = other DNA
gtctatcactgttggacatt

SEQ ID NO: 27015 - DNA, 20 bp, synthetic construct
  misc_feature 1..20: note = Description of Artificial Sequence: Synthetic oligonucleotide
  misc_feature 1..20: note = Target: SCN10A; (+) strand; PAM type: NRG; PAM sequence: GGG
  source 1..20: mol_type = other DNA
tctatcactgttggacattt

SEQ ID NO: 27016 - DNA, 20 bp, synthetic construct
  misc_feature 1..20: note = Description of Artificial Sequence: Synthetic oligonucleotide
  misc_feature 1..20: note = Target: SCN10A; (+) strand; PAM type: NRG; PAM sequence: TGG
  source 1..20: mol_type = other DNA
tcactgttggacatttgggt

SEQ ID NO: 27017 - DNA, 20 bp, synthetic construct
  misc_feature 1..20: note = Description of Artificial Sequence: Synthetic oligonucleotide
  misc_feature 1..20: note = Target: SCN10A; (+) strand; PAM type: NRG; PAM sequence: AAG
  source 1..20: mol_type = other DNA
tggacatttgggttggttcc

SEQ ID NO: 27018 - DNA, 20 bp, synthetic construct
  misc_feature 1..20: note = Description of Artificial Sequence: Synthetic oligonucleotide
  misc_feature 1..20: note = Target: SCN10A; (+) strand; PAM type: NRG; PAM sequence: TAG
  source 1..20: mol_type = other DNA
caagtctttgctattgtgaa

SEQ ID NO: 27019 - DNA, 20 bp, synthetic construct
  misc_feature 1..20: note = Description of Artificial Sequence: Synthetic oligonucleotide
  misc_feature 1..20: note = Target: SCN10A; (+) strand; PAM type: NRG; PAM sequence: TAG
  source 1..20: mol_type = other DNA
tacgtgtgcatgtgtcttta

SEQ ID NO: 27020 - DNA, 20 bp, synthetic construct
  misc_feature 1..20: note = Description of Artificial Sequence: Synthetic oligonucleotide
  misc_feature 1..20: note = Target: SCN10A; (+) strand; PAM type: NRG; PAM sequence: CAG
  source 1..20: mol_type = other DNA
gtgtgcatgtgtctttatag

SEQ ID NO: 27021 - DNA, 20 bp, synthetic construct
  misc_feature 1..20: note = Description of Artificial Sequence: Synthetic oligonucleotide
  misc_feature 1..20: note = Target: SCN10A; (+) strand; PAM type: NRG; PAM sequence: TGG
  source 1..20: mol_type = other DNA
cagtatgatttataatcctt

SEQ ID NO: 27022 - DNA, 20 bp, synthetic construct
  misc_feature 1..20: note = Description of Artificial Sequence: Synthetic oligonucleotide
  misc_feature 1..20: note = Target: SCN10A; (+) strand; PAM type: NRG; PAM sequence: GGG
  source 1..20: mol_type = other DNA
agtatgatttataatccttt

SEQ ID NO: 27023 - DNA, 20 bp, synthetic construct
  misc_feature 1..20: note = Description of Artificial Sequence: Synthetic oligonucleotide
  misc_feature 1..20: note = Target: SCN10A; (+) strand; PAM type: NRG; PAM sequence: CAG
  source 1..20: mol_type = other DNA
taatcctttgggtatatacc

SEQ ID NO: 27024 - DNA, 20 bp, synthetic construct
  misc_feature 1..20: note = Description of Artificial Sequence: Synthetic oligonucleotide
  misc_feature 1..20: note = Target: SCN10A; (+) strand; PAM type: NRG; PAM sequence: TGG
  source 1..20: mol_type = other DNA
tttgggtatatacccagtaa

SEQ ID NO: 27025 - DNA, 20 bp, synthetic construct
  misc_feature 1..20: note = Description of Artificial Sequence: Synthetic oligonucleotide
  misc_feature 1..20: note = Target: SCN10A; (+) strand; PAM type: NRG; PAM sequence: GGG
  source 1..20: mol_type = other DNA
ttgggtatatacccagtaat

SEQ ID NO: 27026 - DNA, 20 bp, synthetic construct
  misc_feature 1..20: note = Description of Artificial Sequence: Synthetic oligonucleotide
  misc_feature 1..20: note = Target: SCN10A; (+) strand; PAM type: NRG; PAM sequence: TGG
  source 1..20: mol_type = other DNA
gtatatacccagtaatggga

SEQ ID NO: 27027 - DNA, 20 bp, synthetic construct
  misc_feature 1..20: note = Description of Artificial Sequence: Synthetic oligonucleotide
  misc_feature 1..20: note = Target: SCN10A; (+) strand; PAM type: NRG; PAM sequence: TGG
  source 1..20: mol_type = other DNA
atacccagtaatgggatggc

SEQ ID NO: 27028 - DNA, 20 bp, synthetic construct
  misc_feature 1..20: note = Description of Artificial Sequence: Synthetic oligonucleotide
  misc_feature 1..20: note = Target: SCN10A; (+) strand; PAM type: NRG; PAM sequence: GGG
  source 1..20: mol_type = other DNA
tacccagtaatgggatggct

SEQ ID NO: 27029 - DNA, 20 bp, synthetic construct
  misc_feature 1..20: note = Description of Artificial Sequence: Synthetic oligonucleotide
  misc_feature 1..20: note = Target: SCN10A; (+) strand; PAM type: NRG; PAM sequence: TGG
  source 1..20: mol_type = other DNA
aatgggatggctgggtcaaa

SEQ ID NO: 27030 - DNA, 20 bp, synthetic construct
  misc_feature 1..20: note = Description of Artificial Sequence: Synthetic oligonucleotide
  misc_feature 1..20: note = Target: SCN10A; (+) strand; PAM type: NRG; PAM sequence: TGG
  source 1..20: mol_type = other DNA
gctgggtcaaatggtatttc

SEQ ID NO: 27031 - DNA, 20 bp, synthetic construct
  misc_feature 1..20: note = Description of Artificial Sequence: Synthetic oligonucleotide
  misc_feature 1..20: note = Target: SCN10A; (+) strand; PAM type: NRG; PAM sequence: TAG
  source 1..20: mol_type = other DNA
tcaaatggtatttctggttc

SEQ ID NO: 27032 - DNA, 20 bp, synthetic construct
  misc_feature 1..20: note = Description of Artificial Sequence: Synthetic oligonucleotide
  misc_feature 1..20: note = Target: SCN10A; (+) strand; PAM type: NRG; PAM sequence: GAG
  source 1..20: mol_type = other DNA
atttctggttctagatccct

SEQ ID NO: 27033 - DNA, 20 bp, synthetic construct
  misc_feature 1..20: note = Description of Artificial Sequence: Synthetic oligonucleotide
  misc_feature 1..20: note = Target: SCN10A; (+) strand; PAM type: NRG; PAM sequence: AGG
  source 1..20: mol_type = other DNA
tttctggttctagatccctg

SEQ ID NO: 27034 - DNA, 20 bp, synthetic construct
  misc_feature 1..20: note = Description of Artificial Sequence: Synthetic oligonucleotide
  misc_feature 1..20: note = Target: SCN10A; (+) strand; PAM type: NRG; PAM sequence: TAG
  source 1..20: mol_type = other DNA
gacttccacaatgattgaac

SEQ ID NO: 27035 - DNA, 20 bp, synthetic construct
  misc_feature 1..20: note = Description of Artificial Sequence: Synthetic oligonucleotide
  misc_feature 1..20: note = Target: SCN10A; (+) strand; PAM type: NRG; PAM sequence: CAG
  source 1..20: mol_type = other DNA
acaatgattgaactagttta

SEQ ID NO: 27036 - DNA, 20 bp, synthetic construct
  misc_feature 1..20: note = Description of Artificial Sequence: Synthetic oligonucleotide
  misc_feature 1..20: note = Target: SCN10A; (+) strand; PAM type: NRG; PAM sequence: CAG
  source 1..20: mol_type = other DNA
ctagtttacagacccaccaa

SEQ ID NO: 27037 - DNA, 20 bp, synthetic construct
  misc_feature 1..20: note = Description of Artificial Sequence: Synthetic oligonucleotide
  misc_feature 1..20: note = Target: SCN10A; (+) strand; PAM type: NRG; PAM sequence: AAG
  source 1..20: mol_type = other DNA
cagacccaccaacagtgtaa

SEQ ID NO: 27038 - DNA, 20 bp, synthetic construct
  misc_feature 1..20: note = Description of Artificial Sequence: Synthetic oligonucleotide
  misc_feature 1..20: note = Target: SCN10A; (+) strand; PAM type: NRG; PAM sequence: CAG
  source 1..20: mol_type = other DNA
ctatttctccacatcctctc

SEQ ID NO: 27039 - DNA, 20 bp, synthetic construct
  misc_feature 1..20: note = Description of Artificial Sequence: Synthetic oligonucleotide
  misc_feature 1..20: note = Target: SCN10A; (+) strand; PAM type: NRG; PAM sequence: TGG
  source 1..20: mol_type = other DNA
ttaatgatcgccattctaac

SEQ ID NO: 27040 - DNA, 20 bp, synthetic construct
  misc_feature 1..20: note = Description of Artificial Sequence: Synthetic oligonucleotide
  misc_feature 1..20: note = Target: SCN10A; (+) strand; PAM type: NRG; PAM sequence: GAG
  source 1..20: mol_type = other DNA
atcgccattctaactggtgt

SEQ ID NO: 27041 - DNA, 20 bp, synthetic construct
  misc_feature 1..20: note = Description of Artificial Sequence: Synthetic oligonucleotide
  misc_feature 1..20: note = Target: SCN10A; (+) strand; PAM type: NRG; PAM sequence: TGG
  source 1..20: mol_type = other DNA
ccattctaactggtgtgaga

SEQ ID NO: 27042 - DNA, 20 bp, synthetic construct
  misc_feature 1..20: note = Description of Artificial Sequence: Synthetic oligonucleotide
  misc_feature 1..20: note = Target: SCN10A; (+) strand; PAM type: NRG; PAM sequence: TGG
  source 1..20: mol_type = other DNA
tgtgagatggtatctcattg

SEQ ID NO: 27043 - DNA, 20 bp, synthetic construct
  misc_feature 1..20: note = Description of Artificial Sequence: Synthetic oligonucleotide
  misc_feature 1..20: note = Target: SCN10A; (+) strand; PAM type: NRG; PAM sequence: TGG
  source 1..20: mol_type = other DNA
tttgatttgcatttctctga

SEQ ID NO: 27044 - DNA, 20 bp, synthetic construct
  misc_feature 1..20: note = Description of Artificial Sequence: Synthetic oligonucleotide
  misc_feature 1..20: note = Target: SCN10A; (+) strand; PAM type: NRG; PAM sequence: CAG
  source 1..20: mol_type = other DNA
atttgcatttctctgatggc

SEQ ID NO: 27045 - DNA, 20 bp, synthetic construct
  misc_feature 1..20: note = Description of Artificial Sequence: Synthetic oligonucleotide
  misc_feature 1..20: note = Target: SCN10A; (+) strand; PAM type: NRG; PAM sequence: GAG
  source 1..20: mol_type = other DNA
ctctgatggccagtgatgat

SEQ ID NO: 27046 - DNA, 20 bp, synthetic construct
  misc_feature 1..20: note = Description of Artificial Sequence: Synthetic oligonucleotide
  misc_feature 1..20: note = Target: SCN10A; (+) strand; PAM type: NRG; PAM sequence: TGG
  source 1..20: mol_type = other DNA
gcattttttcatgtgttttt

SEQ ID NO: 27047 - DNA, 20 bp, synthetic construct
  misc_feature 1..20: note = Description of Artificial Sequence: Synthetic oligonucleotide
  misc_feature 1..20: note = Target: SCN10A; (+) strand; PAM type: NRG; PAM sequence: GAG
  source 1..20: mol_type = other DNA
ctgcataaatgtcttctttt

SEQ ID NO: 27048 - DNA, 20 bp, synthetic construct
  misc_feature 1..20: note = Description of Artificial Sequence: Synthetic oligonucleotide
  misc_feature 1..20: note = Target: SCN10A; (+) strand; PAM type: NRG; PAM sequence: AAG
  source 1..20: mol_type = other DNA
cataaatgtcttcttttgag

SEQ ID NO: 27049 - DNA, 20 bp, synthetic construct
  misc_feature 1..20: note = Description of Artificial Sequence: Synthetic oligonucleotide
  misc_feature 1..20: note = Target: SCN10A; (+) strand; PAM type: NRG; PAM sequence: TGG
  source 1..20: mol_type = other DNA
atccttcgcccactttttga

SEQ ID NO: 27050 - DNA, 20 bp, synthetic construct
  misc_feature 1..20: note = Description of Artificial Sequence: Synthetic oligonucleotide
  misc_feature 1..20: note = Target: SCN10A; (+) strand; PAM type: NRG; PAM sequence: GGG
  source 1..20: mol_type = other DNA
tccttcgcccactttttgat

SEQ ID NO: 27051 - DNA, 20 bp, synthetic construct
  misc_feature 1..20: note = Description of Artificial Sequence: Synthetic oligonucleotide
  misc_feature 1..20: note = Target: SCN10A; (+) strand; PAM type: NRG; PAM sequence: GAG
  source 1..20: mol_type = other DNA
ttttccttgtaaatttgttt

SEQ ID NO: 27052 - DNA, 20 bp, synthetic construct
  misc_feature 1..20: note = Description of Artificial Sequence: Synthetic oligonucleotide
  misc_feature 1..20: note = Target: SCN10A; (+) strand; PAM type: NRG; PAM sequence: TAG
  source 1..20: mol_type = other DNA
aaatttgtttgagttcattg

SEQ ID NO: 27053 - DNA, 20 bp, synthetic construct
  misc_feature 1..20: note = Description of Artificial Sequence: Synthetic oligonucleotide
  misc_feature 1..20: note = Target: SCN10A; (+) strand; PAM type: NRG; PAM sequence: TGG
  source 1..20: mol_type = other DNA
tttgagttcattgtagattc

SEQ ID NO: 27054 - DNA, 20 bp, synthetic construct
  misc_feature 1..20: note = Description of Artificial Sequence: Synthetic oligonucleotide
  misc_feature 1..20: note = Target: SCN10A; (+) strand; PAM type: NRG; PAM sequence: TAG
  source 1..20: mol_type = other DNA
tcattgtagattctggatat

SEQ ID NO: 27055 - DNA, 20 bp, synthetic construct
  misc_feature 1..20: note = Description of Artificial Sequence: Synthetic oligonucleotide
  misc_feature 1..20: note = Target: SCN10A; (+) strand; PAM type: NRG; PAM sequence: CAG
  source 1..20: mol_type = other DNA
tctggatattagcccttcgt

SEQ ID NO: 27056 - DNA, 20 bp, synthetic construct
  misc_feature 1..20: note = Description of Artificial Sequence: Synthetic oligonucleotide
  misc_feature 1..20: note = Target: SCN10A; (+) strand; PAM type: NRG; PAM sequence: GAG
  source 1..20: mol_type = other DNA
atattagcccttcgtcagat

SEQ ID NO: 27057 - DNA, 20 bp, synthetic construct
  misc_feature 1..20: note = Description of Artificial Sequence: Synthetic oligonucleotide
  misc_feature 1..20: note = Target: SCN10A; (+) strand; PAM type: NRG; PAM sequence: TAG
  source 1..20: mol_type = other DNA
ttagcccttcgtcagatgag

SEQ ID NO: 27058 - DNA, 20 bp, synthetic construct
  misc_feature 1..20: note = Description of Artificial Sequence: Synthetic oligonucleotide
  misc_feature 1..20: note = Target: SCN10A; (+) strand; PAM type: NRG; PAM sequence: AGG
  source 1..20: mol_type = other DNA
tagcccttcgtcagatgagt

SEQ ID NO: 27059 - DNA, 20 bp, synthetic construct
  misc_feature 1..20: note = Description of Artificial Sequence: Synthetic oligonucleotide
  misc_feature 1..20: note = Target: SCN10A; (+) strand; PAM type: NRG; PAM sequence: TAG
  source 1..20: mol_type = other DNA
aaaaattttctcccatcctg

SEQ ID NO: 27060 - DNA, 20 bp, synthetic construct
  misc_feature 1..20: note = Description of Artificial Sequence: Synthetic oligonucleotide
  misc_feature 1..20: note = Target: SCN10A; (+) strand; PAM type: NRG; PAM sequence: AGG
  source 1..20: mol_type = other DNA
aaaattttctcccatcctgt

SEQ ID NO: 27061 - DNA, 20 bp, synthetic construct
  misc_feature 1..20: note = Description of Artificial Sequence: Synthetic oligonucleotide
  misc_feature 1..20: note = Target: SCN10A; (+) strand; PAM type: NRG; PAM sequence: TGG
  source 1..20: mol_type = other DNA
taggtttctgttcactctga

SEQ ID NO: 27062 - DNA, 20 bp, synthetic construct
  misc_feature 1..20: note = Description of Artificial Sequence: Synthetic oligonucleotide
  misc_feature 1..20: note = Target: SCN10A; (+) strand; PAM type: NRG; PAM sequence: TGG
  source 1..20: mol_type = other DNA
gtttctgttcactctgatgg

SEQ ID NO: 27063 - DNA, 20 bp, synthetic construct
  misc_feature 1..20: note = Description of Artificial Sequence: Synthetic oligonucleotide
  misc_feature 1..20: note = Target: SCN10A; (+) strand; PAM type: NRG; PAM sequence: CAG
  source 1..20: mol_type = other DNA
tggtggtttcttttgctgct

SEQ ID NO: 27064 - DNA, 20 bp, synthetic construct
  misc_feature 1..20: note = Description of Artificial Sequence: Synthetic oligonucleotide
  misc_feature 1..20: note = Target: SCN10A; (+) strand; PAM type: NRG; PAM sequence: AAG
  source 1..20: mol_type = other DNA
tggtttcttttgctgctcag

SEQ ID NO: 27065 - DNA, 20 bp, synthetic construct
  misc_feature 1..20: note = Description of Artificial Sequence: Synthetic oligonucleotide
  misc_feature 1..20: note = Target: SCN10A; (+) strand; PAM type: NRG; PAM sequence: TAG
  source 1..20: mol_type = other DNA
tttgctgctcagaagctctt

SEQ ID NO: 27066 - DNA, 20 bp, synthetic construct
  misc_feature 1..20: note = Description of Artificial Sequence: Synthetic oligonucleotide
  misc_feature 1..20: note = Target: SCN10A; (+) strand; PAM type: NRG; PAM sequence: GAG
  source 1..20: mol_type = other DNA
cagaagctctttagtttaat

SEQ ID NO: 27067 - DNA, 20 bp, synthetic construct
  misc_feature 1..20: note = Description of Artificial Sequence: Synthetic oligonucleotide
  misc_feature 1..20: note = Target: SCN10A; (+) strand; PAM type: NRG; PAM sequence: TGG
  source 1..20: mol_type = other DNA
acttttgttgccattgcttt

SEQ ID NO: 27068 - DNA, 20 bp, synthetic construct
  misc_feature 1..20: note = Description of Artificial Sequence: Synthetic oligonucleotide
  misc_feature 1..20: note = Target: SCN10A; (+) strand; PAM type: NRG; PAM sequence: TAG
  source 1..20: mol_type = other DNA
tgccattgcttttggtgttt

SEQ ID NO: 27069 - DNA, 20 bp, synthetic construct
  misc_feature 1..20: note = Description of Artificial Sequence: Synthetic oligonucleotide
  misc_feature 1..20: note = Target: SCN10A; (+) strand; PAM type: NRG; PAM sequence: AAG
  source 1..20: mol_type = other DNA
cttttggtgttttagacatg

SEQ ID NO: 27070 - DNA, 20 bp, synthetic construct
  misc_feature 1..20: note = Description of Artificial Sequence: Synthetic oligonucleotide
  misc_feature 1..20: note = Target: SCN10A; (+) strand; PAM type: NRG; PAM sequence: TGG
  source 1..20: mol_type = other DNA
gcccatgcctatgtcctgaa

SEQ ID NO: 27071 - DNA, 20 bp, synthetic construct
  misc_feature 1..20: note = Description of Artificial Sequence: Synthetic oligonucleotide
  misc_feature 1..20: note = Target: SCN10A; (+) strand; PAM type: NRG; PAM sequence: TAG
  source 1..20: mol_type = other DNA
atgtcctgaatggtattgcc

SEQ ID NO: 27072 - DNA, 20 bp, synthetic construct
  misc_feature 1..20: note = Description of Artificial Sequence: Synthetic oligonucleotide
  misc_feature 1..20: note = Target: SCN10A; (+) strand; PAM type: NRG; PAM sequence: AGG
  source 1..20: mol_type = other DNA
tgtcctgaatggtattgcct

SEQ ID NO: 27073 - DNA, 20 bp, synthetic construct
  misc_feature 1..20: note = Description of Artificial Sequence: Synthetic oligonucleotide
  misc_feature 1..20: note = Target: SCN10A; (+) strand; PAM type: NRG; PAM sequence: TAG
  source 1..20: mol_type = other DNA
gtattgcctaggttctcttc

SEQ ID NO: 27074 - DNA, 20 bp, synthetic construct
  misc_feature 1..20: note = Description of Artificial Sequence: Synthetic oligonucleotide
  misc_feature 1..20: note = Target: SCN10A; (+) strand; PAM type: NRG; PAM sequence: AGG
  source 1..20: mol_type = other DNA
tattgcctaggttctcttct

SEQ ID NO: 27075 - DNA, 20 bp, synthetic construct
  misc_feature 1..20: note = Description of Artificial Sequence: Synthetic oligonucleotide
  misc_feature 1..20: note = Target: SCN10A; (+) strand; PAM type: NRG; PAM sequence: GGG
  source 1..20: mol_type = other DNA
attgcctaggttctcttcta

SEQ ID NO: 27076 - DNA, 20 bp, synthetic construct
  misc_feature 1..20: note = Description of Artificial Sequence: Synthetic oligonucleotide
  misc_feature 1..20: note = Target: SCN10A; (+) strand; PAM type: NRG; PAM sequence: TGG
  source 1..20: mol_type = other DNA
gttctcttctagggttttta

SEQ ID NO: 27077 - DNA, 20 bp, synthetic construct
  misc_feature 1..20: note = Description of Artificial Sequence: Synthetic oligonucleotide
  misc_feature 1..20: note = Target: SCN10A; (+) strand; PAM type: NRG; PAM sequence: TAG
  source 1..20: mol_type = other DNA
ttctagggtttttatggttt

SEQ ID NO: 27078 - DNA, 20 bp, synthetic construct
  misc_feature 1..20: note = Description of Artificial Sequence: Synthetic oligonucleotide
  misc_feature 1..20: note = Target: SCN10A; (+) strand; PAM type: NRG; PAM sequence: AGG
  source 1..20: mol_type = other DNA
tctagggtttttatggtttt

SEQ ID NO: 27079 - DNA, 20 bp, synthetic construct
  misc_feature 1..20: note = Description of Artificial Sequence: Synthetic oligonucleotide
  misc_feature 1..20: note = Target: SCN10A; (+) strand; PAM type: NRG; PAM sequence: AAG
  source 1..20: mol_type = other DNA
tggttttaggtctaacattt

SEQ ID NO: 27080 - DNA, 20 bp, synthetic construct
  misc_feature 1..20: note = Description of Artificial Sequence: Synthetic oligonucleotide
  misc_feature 1..20: note = Target: SCN10A; (+) strand; PAM type: NRG; PAM sequence: AAG
  source 1..20: mol_type = other DNA
tcttgaattaatttttgtat

SEQ ID NO: 27081 - DNA, 20 bp, synthetic construct
  misc_feature 1..20: note = Description of Artificial Sequence: Synthetic oligonucleotide
  misc_feature 1..20: note = Target: SCN10A; (+) strand; PAM type: NRG; PAM sequence: AGG
  source 1..20: mol_type = other DNA
cttgaattaatttttgtata

SEQ ID NO: 27082 - DNA, 20 bp, synthetic construct
  misc_feature 1..20: note = Description of Artificial Sequence: Synthetic oligonucleotide
  misc_feature 1..20: note = Target: SCN10A; (+) strand; PAM type: NRG; PAM sequence: AAG
  source 1..20: mol_type = other DNA
ttaatttttgtataaggtgt

SEQ ID NO: 27083 - DNA, 20 bp, synthetic construct
  misc_feature 1..20: note = Description of Artificial Sequence: Synthetic oligonucleotide
  misc_feature 1..20: note = Target: SCN10A; (+) strand; PAM type: NRG; PAM sequence: AGG
  source 1..20: mol_type = other DNA
taatttttgtataaggtgta

SEQ ID NO: 27084 - DNA, 20 bp, synthetic construct
  misc_feature 1..20: note = Description of Artificial Sequence: Synthetic oligonucleotide
  misc_feature 1..20: note = Target: SCN10A; (+) strand; PAM type: NRG; PAM sequence: AAG
  source 1..20: mol_type = other DNA
tttttgtataaggtgtaagg

SEQ ID NO: 27085 - DNA, 20 bp, synthetic construct
  misc_feature 1..20: note = Description of Artificial Sequence: Synthetic oligonucleotide
  misc_feature 1..20: note = Target: SCN10A; (+) strand; PAM type: NRG; PAM sequence: AGG
  source 1..20: mol_type = other DNA
ttttgtataaggtgtaagga

SEQ ID NO: 27086 - DNA, 20 bp, synthetic construct
  misc_feature 1..20: note = Description of Artificial Sequence: Synthetic oligonucleotide
  misc_feature 1..20: note = Target: SCN10A; (+) strand; PAM type: NRG; PAM sequence: GGG
  source 1..20: mol_type = other DNA
tttgtataaggtgtaaggaa

SEQ ID NO: 27087 - DNA, 20 bp, synthetic construct
  misc_feature 1..20: note = Description of Artificial Sequence: Synthetic oligonucleotide
  misc_feature 1..20: note = Target: SCN10A; (+) strand; PAM type: NRG; PAM sequence: CAG
  source 1..20: mol_type = other DNA
taaggtgtaaggaagggatc

SEQ ID NO: 27088 - DNA, 20 bp, synthetic construct
  misc_feature 1..20: note = Description of Artificial Sequence: Synthetic oligonucleotide
  misc_feature 1..20: note = Target: SCN10A; (+) strand; PAM type: NRG; PAM sequence: CAG
  source 1..20: mol_type = other DNA
gtaaggaagggatccagttt

SEQ ID NO: 27089 - DNA, 20 bp, synthetic construct
  misc_feature 1..20: note = Description of Artificial Sequence: Synthetic oligonucleotide
  misc_feature 1..20: note = Target: SCN10A; (+) strand; PAM type: NRG; PAM sequence: TGG
  source 1..20: mol_type = other DNA
cagtttcagctttctccata

SEQ ID NO: 27090 - DNA, 20 bp, synthetic construct
  misc_feature 1..20: note = Description of Artificial Sequence: Synthetic oligonucleotide
  misc_feature 1..20: note = Target: SCN10A; (+) strand; PAM type: NRG; PAM sequence: TAG
  source 1..20: mol_type = other DNA
ttcagctttctccatatggc

SEQ ID NO: 27091 - DNA, 20 bp, synthetic construct
  misc_feature 1..20: note = Description of Artificial Sequence: Synthetic oligonucleotide
  misc_feature 1..20: note = Target: SCN10A; (+) strand; PAM type: NRG; PAM sequence: CAG
  source 1..20: mol_type = other DNA
gctttctccatatggctagc

SEQ ID NO: 27092 - DNA, 20 bp, synthetic construct
  misc_feature 1..20: note = Description of Artificial Sequence: Synthetic oligonucleotide
  misc_feature 1..20: note = Target: SCN10A; (+) strand; PAM type: NRG; PAM sequence: CAG
  source 1..20: mol_type = other DNA
atatggctagccagttttcc

SEQ ID NO: 27093 - DNA, 20 bp, synthetic construct
  misc_feature 1..20: note = Description of Artificial Sequence: Synthetic oligonucleotide
  misc_feature 1..20: note = Target: SCN10A; (+) strand; PAM type: NRG; PAM sequence: TAG
  source 1..20: mol_type = other DNA
tcccagcaccatttattaaa

SEQ ID NO: 27094 - DNA, 20 bp, synthetic construct
  misc_feature 1..20: note = Description of Artificial Sequence: Synthetic oligonucleotide
  misc_feature 1..20: note = Target: SCN10A; (+) strand; PAM type: NRG; PAM sequence: AGG
  source 1..20: mol_type = other DNA
cccagcaccatttattaaat

SEQ ID NO: 27095 - DNA, 20 bp, synthetic construct
  misc_feature 1..20: note = Description of Artificial Sequence: Synthetic oligonucleotide
  misc_feature 1..20: note = Target: SCN10A; (+) strand; PAM type: NRG; PAM sequence: GGG
  source 1..20: mol_type = other DNA
ccagcaccatttattaaata

SEQ ID NO: 27096 - DNA, 20 bp, synthetic construct
  misc_feature 1..20: note = Description of Artificial Sequence: Synthetic oligonucleotide
  misc_feature 1..20: note = Target: SCN10A; (+) strand; PAM type: NRG; PAM sequence: CAG
  source 1..20: mol_type = other DNA
tccccatttcttgtttttgt

SEQ ID NO: 27097 - DNA, 20 bp, synthetic construct
  misc_feature 1..20: note = Description of Artificial Sequence: Synthetic oligonucleotide
  misc_feature 1..20: note = Target: SCN10A; (+) strand; PAM type: NRG; PAM sequence: AGG
  source 1..20: mol_type = other DNA
ccccatttcttgtttttgtc

SEQ ID NO: 27098 - DNA, 20 bp, synthetic construct
  misc_feature 1..20: note = Description of Artificial Sequence: Synthetic oligonucleotide
  misc_feature 1..20: note = Target: SCN10A; (+) strand; PAM type: NRG; PAM sequence: AAG
  source 1..20: mol_type = other DNA
tgtttttgtcaggtttgtca

SEQ ID NO: 27099 - DNA, 20 bp, synthetic construct
  misc_feature 1..20: note = Description of Artificial Sequence: Synthetic oligonucleotide
  misc_feature 1..20: note = Target: SCN10A; (+) strand; PAM type: NRG; PAM sequence: CAG
  source 1..20: mol_type = other DNA
ttgtcaggtttgtcaaagat

SEQ ID NO: 27100 - DNA, 20 bp, synthetic construct
  misc_feature 1..20: note = Description of Artificial Sequence: Synthetic oligonucleotide
  misc_feature 1..20: note = Target: SCN10A; (+) strand; PAM type: NRG; PAM sequence: TAG
  source 1..20: mol_type = other DNA
caggtttgtcaaagatcaga

SEQ ID NO: 27101 - DNA, 20 bp, synthetic construct
  misc_feature 1..20: note = Description of Artificial Sequence: Synthetic oligonucleotide
  misc_feature 1..20: note = Target: SCN10A; (+) strand; PAM type: NRG; PAM sequence: TAG
  source 1..20: mol_type = other DNA
tgtcaaagatcagatagttg

SEQ ID NO: 27102 - DNA, 20 bp, synthetic construct
  misc_feature 1..20: note = Description of Artificial Sequence: Synthetic oligonucleotide
  misc_feature 1..20: note = Target: SCN10A; (+) strand; PAM type: NRG; PAM sequence: CGG
  source 1..20: mol_type = other DNA
atcagatagttgtagatatg

SEQ ID NO: 27103 - DNA, 20 bp, synthetic construct
  misc_feature 1..20: note = Description of Artificial Sequence: Synthetic oligonucleotide
  misc_feature 1..20: note = Target: SCN10A; (+) strand; PAM type: NRG; PAM sequence: GAG
  source 1..20: mol_type = other DNA
agatatgcggcattatttct

SEQ ID NO: 27104 - DNA, 20 bp, synthetic construct
  misc_feature 1..20: note = Description of Artificial Sequence: Synthetic oligonucleotide
  misc_feature 1..20: note = Target: SCN10A; (+) strand; PAM type: NRG; PAM sequence: AGG
  source 1..20: mol_type = other DNA
gatatgcggcattatttctg

SEQ ID NO: 27105 - DNA, 20 bp, synthetic construct
  misc_feature 1..20: note = Description of Artificial Sequence: Synthetic oligonucleotide
  misc_feature 1..20: note = Target: SCN10A; (+) strand; PAM type: NRG; PAM sequence: GGG
  source 1..20: mol_type = other DNA
atatgcggcattatttctga

SEQ ID NO: 27106 - DNA, 20 bp, synthetic construct
  misc_feature 1..20: note = Description of Artificial Sequence: Synthetic oligonucleotide
  misc_feature 1..20: note = Target: SCN10A; (+) strand; PAM type: NRG; PAM sequence: TGG
  source 1..20: mol_type = other DNA
agggctctgttctgttccat

SEQ ID NO: 27107 - DNA, 20 bp, synthetic construct
  misc_feature 1..20: note = Description of Artificial Sequence: Synthetic oligonucleotide
  misc_feature 1..20: note = Target: SCN10A; (+) strand; PAM type: NRG; PAM sequence: TGG
  source 1..20: mol_type = other DNA
attggtctatatctctgttt

SEQ ID NO: 27108 - DNA, 20 bp, synthetic construct
  misc_feature 1..20: note = Description of Artificial Sequence: Synthetic oligonucleotide
  misc_feature 1..20: note = Target: SCN10A; (+) strand; PAM type: NRG; PAM sequence: CAG
  source 1..20: mol_type = other DNA
ctatatctctgttttggtac

SEQ ID NO: 27109 - DNA, 20 bp, synthetic construct
  misc_feature 1..20: note = Description of Artificial Sequence: Synthetic oligonucleotide
  misc_feature 1..20: note = Target: SCN10A; (+) strand; PAM type: NRG; PAM sequence: TGG
  source 1..20: mol_type = other DNA
gtaccagtaccatgctgttt

SEQ ID NO: 27110 - DNA, 20 bp, synthetic construct
  misc_feature 1..20: note = Description of Artificial Sequence: Synthetic oligonucleotide
  misc_feature 1..20: note = Target: SCN10A; (+) strand; PAM type: NRG; PAM sequence: TAG
  source 1..20: mol_type = other DNA
ccatgctgttttggttactg

SEQ ID NO: 27111 - DNA, 20 bp, synthetic construct
  misc_feature 1..20: note = Description of Artificial Sequence: Synthetic oligonucleotide
  misc_feature 1..20: note = Target: SCN10A; (+) strand; PAM type: NRG; PAM sequence: TAG
  source 1..20: mol_type = other DNA
gttactgtagccttgtaata

SEQ ID NO: 27112 - DNA, 20 bp, synthetic construct
  misc_feature 1..20: note = Description of Artificial Sequence: Synthetic oligonucleotide
  misc_feature 1..20: note = Target: SCN10A; (+) strand; PAM type: NRG; PAM sequence: AAG
  source 1..20: mol_type = other DNA
tagccttgtaatatagtttg

SEQ ID NO: 27113 - DNA, 20 bp, synthetic construct
  misc_feature 1..20: note = Description of Artificial Sequence: Synthetic oligonucleotide
  misc_feature 1..20: note = Target: SCN10A; (+) strand; PAM type: NRG; PAM sequence: CAG
  source 1..20: mol_type = other DNA
cttgtaatatagtttgaagt

SEQ ID NO: 27114 - DNA, 20 bp, synthetic construct
  misc_feature 1..20: note = Description of Artificial Sequence: Synthetic oligonucleotide
  misc_feature 1..20: note = Target: SCN10A; (+) strand; PAM type: NRG; PAM sequence: AGG
  source 1..20: mol_type = other DNA
ttgtaatatagtttgaagtc

SEQ ID NO: 27115 - DNA, 20 bp, synthetic construct
  misc_feature 1..20: note = Description of Artificial Sequence: Synthetic oligonucleotide
  misc_feature 1..20: note = Target: SCN10A; (+) strand; PAM type: NRG; PAM sequence: TAG
  source 1..20: mol_type = other DNA
taatatagtttgaagtcagg

SEQ ID NO: 27116 - DNA, 20 bp, synthetic construct
  misc_feature 1..20: note = Description of Artificial Sequence: Synthetic oligonucleotide
  misc_feature 1..20: note = Target: SCN10A; (+) strand; PAM type: NRG; PAM sequence: CAG
  source 1..20: mol_type = other DNA
gtcaggtagcgtgatgcctc

SEQ ID NO: 27117 - DNA, 20 bp, synthetic construct
  misc_feature 1..20: note = Description of Artificial Sequence: Synthetic oligonucleotide
  misc_feature 1..20: note = Target: SCN10A; (+) strand; PAM type: NRG; PAM sequence: CAG
  source 1..20: mol_type = other DNA
gctttgttatacaccaataa

SEQ ID NO: 27118 - DNA, 20 bp, synthetic construct
  misc_feature 1..20: note = Description of Artificial Sequence: Synthetic oligonucleotide
  misc_feature 1..20: note = Target: SCN10A; (+) strand; PAM type: NRG; PAM sequence: CAG
  source 1..20: mol_type = other DNA
atacaccaataacagacaaa

SEQ ID NO: 27119 - DNA, 20 bp, synthetic construct
  misc_feature 1..20: note = Description of Artificial Sequence: Synthetic oligonucleotide
  misc_feature 1..20: note = Target: SCN10A; (+) strand; PAM type: NRG; PAM sequence: GAG
  source 1..20: mol_type = other DNA
acaccaataacagacaaaca

SEQ ID NO: 27120 - DNA, 20 bp, synthetic construct
  misc_feature 1..20: note = Description of Artificial Sequence: Synthetic oligonucleotide
  misc_feature 1..20: note = Target: SCN10A; (+) strand; PAM type: NRG; PAM sequence: GAG
  source 1..20: mol_type = other DNA
accaataacagacaaacaga

SEQ ID NO: 27121 - DNA, 20 bp, synthetic construct
  misc_feature 1..20: note = Description of Artificial Sequence: Synthetic oligonucleotide
  misc_feature 1..20: note = Target: SCN10A; (+) strand; PAM type: NRG; PAM sequence: GAG
  source 1..20: mol_type = other DNA
caaacagagagccaaatcat

SEQ ID NO: 27122 - DNA, 20 bp, synthetic construct
  misc_feature 1..20: note = Description of Artificial Sequence: Synthetic oligonucleotide
  misc_feature 1..20: note = Target: SCN10A; (+) strand; PAM type: NRG; PAM sequence: AAG
  source 1..20: mol_type = other DNA
tcccattcacaattgcttca

SEQ ID NO: 27123 - DNA, 20 bp, synthetic construct
  misc_feature 1..20: note = Description of Artificial Sequence: Synthetic oligonucleotide
  misc_feature 1..20: note = Target: SCN10A; (+) strand; PAM type: NRG; PAM sequence: GAG
  source 1..20: mol_type = other DNA
ccattcacaattgcttcaaa

SEQ ID NO: 27124 - DNA, 20 bp, synthetic construct
  misc_feature 1..20: note = Description of Artificial Sequence: Synthetic oligonucleotide
  misc_feature 1..20: note = Target: SCN10A; (+) strand; PAM type: NRG; PAM sequence: TAG
  source 1..20: mol_type = other DNA
ttcaaagagaataaaatacc

SEQ ID NO: 27125 - DNA, 20 bp, synthetic construct
  misc_feature 1..20: note = Description of Artificial Sequence: Synthetic oligonucleotide
  misc_feature 1..20: note = Target: SCN10A; (+) strand; PAM type: NRG; PAM sequence: AGG
  source 1..20: mol_type = other DNA
tcaaagagaataaaatacct

SEQ ID NO: 27126 - DNA, 20 bp, synthetic construct
  misc_feature 1..20: note = Description of Artificial Sequence: Synthetic oligonucleotide
  misc_feature 1..20: note = Target: SCN10A; (+) strand; PAM type: NRG; PAM sequence: AAG
  source 1..20: mol_type = other DNA
tacctaggaatgcaacttac

SEQ ID NO: 27127 - DNA, 20 bp, synthetic construct
  misc_feature 1..20: note = Description of Artificial Sequence: Synthetic oligonucleotide
  misc_feature 1..20: note = Target: SCN10A; (+) strand; PAM type: NRG; PAM sequence: AGG
  source 1..20: mol_type = other DNA
acctaggaatgcaacttaca

SEQ ID NO: 27128 - DNA, 20 bp, synthetic construct
  misc_feature 1..20: note = Description of Artificial Sequence: Synthetic oligonucleotide
  misc_feature 1..20: note = Target: SCN10A; (+) strand; PAM type: NRG; PAM sequence: GGG
  source 1..20: mol_type = other DNA
cctaggaatgcaacttacaa

SEQ ID NO: 27129 - DNA, 20 bp, synthetic construct
  misc_feature 1..20: note = Description of Artificial Sequence: Synthetic oligonucleotide
  misc_feature 1..20: note = Target: SCN10A; (+) strand; PAM type: NRG; PAM sequence: AAG
  source 1..20: mol_type = other DNA
tgcaacttacaagggatgtg

SEQ ID NO: 27130 - DNA, 20 bp, synthetic construct
  misc_feature 1..20: note = Description of Artificial Sequence: Synthetic oligonucleotide
  misc_feature 1..20: note = Target: SCN10A; (+) strand; PAM type: NRG; PAM sequence: AGG
  source 1..20: mol_type = other DNA
gcaacttacaagggatgtga

SEQ ID NO: 27131 - DNA, 20 bp, synthetic construct
  misc_feature 1..20: note = Description of Artificial Sequence: Synthetic oligonucleotide
  misc_feature 1..20: note = Target: SCN10A; (+) strand; PAM type: NRG; PAM sequence: AAG
  source 1..20: mol_type = other DNA
gggatgtgaaggacctcttc

SEQ ID NO: 27132 - DNA, 20 bp, synthetic construct
  misc_feature 1..20: note = Description of Artificial Sequence: Synthetic oligonucleotide
  misc_feature 1..20: note = Target: SCN10A; (+) strand; PAM type: NRG; PAM sequence: AGG
  source 1..20: mol_type = other DNA
ggatgtgaaggacctcttca

SEQ ID NO: 27133 - DNA, 20 bp, synthetic construct
  misc_feature 1..20: note = Description of Artificial Sequence: Synthetic oligonucleotide
  misc_feature 1..20: note = Target: SCN10A; (+) strand; PAM type: NRG; PAM sequence: GAG
  source 1..20: mol_type = other DNA
atgtgaaggacctcttcaag

SEQ ID NO: 27134 - DNA, 20 bp, synthetic construct
  misc_feature 1..20: note = Description of Artificial Sequence: Synthetic oligonucleotide
  misc_feature 1..20: note = Target: SCN10A; (+) strand; PAM type: NRG; PAM sequence: CAG
  source 1..20: mol_type = other DNA
gagaactacaaaccactgct

SEQ ID NO: 27135 - DNA, 20 bp, synthetic construct
  misc_feature 1..20: note = Description of Artificial Sequence: Synthetic oligonucleotide
  misc_feature 1..20: note = Target: SCN10A; (+) strand; PAM type: NRG; PAM sequence: AAG
  source 1..20: mol_type = other DNA
accactgctcagtgaaataa

SEQ ID NO: 27136 - DNA, 20 bp, synthetic construct
  misc_feature 1..20: note = Description of Artificial Sequence: Synthetic oligonucleotide
  misc_feature 1..20: note = Target: SCN10A; (+) strand; PAM type: NRG; PAM sequence: GAG
  source 1..20: mol_type = other DNA
cactgctcagtgaaataaaa

SEQ ID NO: 27137 - DNA, 20 bp, synthetic construct
  misc_feature 1..20: note = Description of Artificial Sequence: Synthetic oligonucleotide
  misc_feature 1..20: note = Target: SCN10A; (+) strand; PAM type: NRG; PAM sequence: AGG
  source 1..20: mol_type = other DNA
actgctcagtgaaataaaag

SEQ ID NO: 27138 - DNA, 20 bp, synthetic construct
  misc_feature 1..20: note = Description of Artificial Sequence: Synthetic oligonucleotide
  misc_feature 1..20: note = Target: SCN10A; (+) strand; PAM type: NRG; PAM sequence: TGG
  source 1..20: mol_type = other DNA
taaaagaggatacaaacaaa

SEQ ID NO: 27139 - DNA, 20 bp, synthetic construct
  misc_feature 1..20: note = Description of Artificial Sequence: Synthetic oligonucleotide
  misc_feature 1..20: note = Target: SCN10A; (+) strand; PAM type: NRG; PAM sequence: AAG
  source 1..20: mol_type = other DNA
aagaggatacaaacaaatgg

SEQ ID NO: 27140 - DNA, 20 bp, synthetic construct
  misc_feature 1..20: note = Description of Artificial Sequence: Synthetic oligonucleotide
  misc_feature 1..20: note = Target: SCN10A; (+) strand; PAM type: NRG; PAM sequence: TGG
  source 1..20: mol_type = other DNA
ggaagaatactccatgctca

SEQ ID NO: 27141 - DNA, 20 bp, synthetic construct
  misc_feature 1..20: note = Description of Artificial Sequence: Synthetic oligonucleotide
  misc_feature 1..20: note = Target: SCN10A; (+) strand; PAM type: NRG; PAM sequence: GGG
  source 1..20: mol_type = other DNA
gaagaatactccatgctcat

SEQ ID NO: 27142 - DNA, 20 bp, synthetic construct
  misc_feature 1..20: note = Description of Artificial Sequence: Synthetic oligonucleotide
  misc_feature 1..20: note = Target: SCN10A; (+) strand; PAM type: NRG; PAM sequence: TAG
  source 1..20: mol_type = other DNA
gaatactccatgctcatggg

SEQ ID NO: 27143 - DNA, 20 bp, synthetic construct
  misc_feature 1..20: note = Description of Artificial Sequence: Synthetic oligonucleotide
  misc_feature 1..20: note = Target: SCN10A; (+) strand; PAM type: NRG; PAM sequence: AGG
  source 1..20: mol_type = other DNA
aatactccatgctcatgggt

SEQ ID NO: 27144 - DNA, 20 bp, synthetic construct
  misc_feature 1..20: note = Description of Artificial Sequence: Synthetic oligonucleotide
  misc_feature 1..20: note = Target: SCN10A; (+) strand; PAM type: NRG; PAM sequence: AAG
  source 1..20: mol_type = other DNA
actccatgctcatgggtagg

SEQ ID NO: 27145 - DNA, 20 bp, synthetic construct
  misc_feature 1..20: note = Description of Artificial Sequence: Synthetic oligonucleotide
  misc_feature 1..20: note = Target: SCN10A; (+) strand; PAM type: NRG; PAM sequence: TGG
  source 1..20: mol_type = other DNA
aagaatcaatatcttgaaaa

SEQ ID NO: 27146 - DNA, 20 bp, synthetic construct
  misc_feature 1..20: note = Description of Artificial Sequence: Synthetic oligonucleotide
  misc_feature 1..20: note = Target: SCN10A; (+) strand; PAM type: NRG; PAM sequence: AAG
  source 1..20: mol_type = other DNA
tgaaaatggccatactgccc

SEQ ID NO: 27147 - DNA, 20 bp, synthetic construct
  misc_feature 1..20: note = Description of Artificial Sequence: Synthetic oligonucleotide
  misc_feature 1..20: note = Target: SCN10A; (+) strand; PAM type: NRG; PAM sequence: AGG
  source 1..20: mol_type = other DNA
gaaaatggccatactgccca

SEQ ID NO: 27148 - DNA, 20 bp, synthetic construct
  misc_feature 1..20: note = Description of Artificial Sequence: Synthetic oligonucleotide
  misc_feature 1..20: note = Target: SCN10A; (+) strand; PAM type: NRG; PAM sequence: TAG
  source 1..20: mol_type = other DNA
atactgcccaaggtaattta

SEQ ID NO: 27149 - DNA, 20 bp, synthetic construct
  misc_feature 1..20: note = Description of Artificial Sequence: Synthetic oligonucleotide
  misc_feature 1..20: note = Target: SCN10A; (+) strand; PAM type: NRG; PAM sequence: AAG
  source 1..20: mol_type = other DNA
gattcaatgccatccccatc

SEQ ID NO: 27150 - DNA, 20 bp, synthetic construct
  misc_feature 1..20: note = Description of Artificial Sequence: Synthetic oligonucleotide
  misc_feature 1..20: note = Target: SCN10A; (+) strand; PAM type: NRG; PAM sequence: CAG
  source 1..20: mol_type = other DNA
gctaccaatgactttcttct

SEQ ID NO: 27151 - DNA, 20 bp, synthetic construct
  misc_feature 1..20: note = Description of Artificial Sequence: Synthetic oligonucleotide
  misc_feature 1..20: note = Target: SCN10A; (+) strand; PAM type: NRG; PAM sequence: TGG
  source 1..20: mol_type = other DNA
aatgactttcttctcagaat

SEQ ID NO: 27152 - DNA, 20 bp, synthetic construct
  misc_feature 1..20: note = Description of Artificial Sequence: Synthetic oligonucleotide
  misc_feature 1..20: note = Target: SCN10A; (+) strand; PAM type: NRG; PAM sequence: AAG
  source 1..20: mol_type = other DNA
aattggaaaaaactacttta

SEQ ID NO: 27153 - DNA, 20 bp, synthetic construct
  misc_feature 1..20: note = Description of Artificial Sequence: Synthetic oligonucleotide
  misc_feature 1..20: note = Target: SCN10A; (+) strand; PAM type: NRG; PAM sequence: CGG
  source 1..20: mol_type = other DNA
aaactactttaaagttcata

SEQ ID NO: 27154 - DNA, 20 bp, synthetic construct
  misc_feature 1..20: note = Description of Artificial Sequence: Synthetic oligonucleotide
  misc_feature 1..20: note = Target: SCN10A; (+) strand; PAM type: NRG; PAM sequence: AAG
  source 1..20: mol_type = other DNA
aagttcatacggaaccaaaa

SEQ ID NO: 27155 - DNA, 20 bp, synthetic construct
  misc_feature 1..20: note = Description of Artificial Sequence: Synthetic oligonucleotide
  misc_feature 1..20: note = Target: SCN10A; (+) strand; PAM type: NRG; PAM sequence: GAG
  source 1..20: mol_type = other DNA
gttcatacggaaccaaaaaa

SEQ ID NO: 27156 - DNA, 20 bp, synthetic construct
  misc_feature 1..20: note = Description of Artificial Sequence: Synthetic oligonucleotide
  misc_feature 1..20: note = Target: SCN10A; (+) strand; PAM type: NRG; PAM sequence: AAG
  source 1..20: mol_type = other DNA
aaaaaagagcccacattgcc

SEQ ID NO: 27157 - DNA, 20 bp, synthetic construct
  misc_feature 1..20: note = Description of Artificial Sequence: Synthetic oligonucleotide
  misc_feature 1..20: note = Target: SCN10A; (+) strand; PAM type: NRG; PAM sequence: TGG
  source 1..20: mol_type = other DNA
tttaaccttacttttttgat

SEQ ID NO: 27158 - DNA, 20 bp, synthetic construct
  misc_feature 1..20: note = Description of Artificial Sequence: Synthetic oligonucleotide
  misc_feature 1..20: note = Target: SCN10A; (+) strand; PAM type: NRG; PAM sequence: TAG
  source 1..20: mol_type = other DNA
ttgattggctaattgtttct

SEQ ID NO: 27159 - DNA, 20 bp, synthetic construct
  misc_feature 1..20: note = Description of Artificial Sequence: Synthetic oligonucleotide
  misc_feature 1..20: note = Target: SCN10A; (+) strand; PAM type: NRG; PAM sequence: TAG
  source 1..20: mol_type = other DNA
tggctaattgtttcttagca

SEQ ID NO: 27160 - DNA, 20 bp, synthetic construct
  misc_feature 1..20: note = Description of Artificial Sequence: Synthetic oligonucleotide
  misc_feature 1..20: note = Target: SCN10A; (+) strand; PAM type: NRG; PAM sequence: TGG
  source 1..20: mol_type = other DNA
agttcccccttgtcctactt

SEQ ID NO: 27161 - DNA, 20 bp, synthetic construct
  misc_feature 1..20: note = Description of Artificial Sequence: Synthetic oligonucleotide
  misc_feature 1..20: note = Target: SCN10A; (+) strand; PAM type: NRG; PAM sequence: TGG
  source 1..20: mol_type = other DNA
ctctatttctgatttgttac

SEQ ID NO: 27162 - DNA, 20 bp, synthetic construct
  misc_feature 1..20: note = Description of Artificial Sequence: Synthetic oligonucleotide
  misc_feature 1..20: note = Target: SCN10A; (+) strand; PAM type: NRG; PAM sequence: AAG
  source 1..20: mol_type = other DNA
tactggcaaccctaataatt

SEQ ID NO: 27163 - DNA, 20 bp, synthetic construct
  misc_feature 1..20: note = Description of Artificial Sequence: Synthetic oligonucleotide
  misc_feature 1..20: note = Target: SCN10A; (+) strand; PAM type: NRG; PAM sequence: AAG
  source 1..20: mol_type = other DNA
taattaagtcattcattctt

SEQ ID NO: 27164 - DNA, 20 bp, synthetic construct
  misc_feature 1..20: note = Description of Artificial Sequence: Synthetic oligonucleotide
  misc_feature 1..20: note = Target: SCN10A; (+) strand; PAM type: NRG; PAM sequence: CAG
  source 1..20: mol_type = other DNA
tcattcattcttaagttaca

SEQ ID NO: 27165 - DNA, 20 bp, synthetic construct
  misc_feature 1..20: note = Description of Artificial Sequence: Synthetic oligonucleotide
  misc_feature 1..20: note = Target: SCN10A; (+) strand; PAM type: NRG; PAM sequence: TAG
  source 1..20: mol_type = other DNA
ctttacttttttttactttt

SEQ ID NO: 27166 - DNA, 20 bp, synthetic construct
  misc_feature 1..20: note = Description of Artificial Sequence: Synthetic oligonucleotide
  misc_feature 1..20: note = Target: SCN10A; (+) strand; PAM type: NRG; PAM sequence: TAG
  source 1..20: mol_type = other DNA
ttttttttactttttagcat

SEQ ID NO: 27167 - DNA, 20 bp, synthetic construct
  misc_feature 1..20: note = Description of Artificial Sequence: Synthetic oligonucleotide
  misc_feature 1..20: note = Target: SCN10A; (+) strand; PAM type: NRG; PAM sequence: AGG
  source 1..20: mol_type = other DNA
tttttttactttttagcatt

SEQ ID NO: 27168 - DNA, 20 bp, synthetic construct
  misc_feature 1..20: note = Description of Artificial Sequence: Synthetic oligonucleotide
  misc_feature 1..20: note = Target: SCN10A; (+) strand; PAM type: NRG; PAM sequence: GAG
  source 1..20: mol_type = other DNA
tttttactttttagcattag

SEQ ID NO: 27169 - DNA, 20 bp, synthetic construct
  misc_feature 1..20: note = Description of Artificial Sequence: Synthetic oligonucleotide
  misc_feature 1..20: note = Target: SCN10A; (+) strand; PAM type: NRG; PAM sequence: TAG
  source 1..20: mol_type = other DNA
attaggagaaatacctaatg

SEQ ID NO: 27170 - DNA, 20 bp, synthetic construct
  misc_feature 1..20: note = Description of Artificial Sequence: Synthetic oligonucleotide
  misc_feature 1..20: note = Target: SCN10A; (+) strand; PAM type: NRG; PAM sequence: CGG
  source 1..20: mol_type = other DNA
gaaatacctaatgtagatga

SEQ ID NO: 27171 - DNA, 20 bp, synthetic construct
  misc_feature 1..20: note = Description of Artificial Sequence: Synthetic oligonucleotide
  misc_feature 1..20: note = Target: SCN10A; (+) strand; PAM type: NRG; PAM sequence: GGG
  source 1..20: mol_type = other DNA
aaatacctaatgtagatgac

SEQ ID NO: 27172 - DNA, 20 bp, synthetic construct
  misc_feature 1..20: note = Description of Artificial Sequence: Synthetic oligonucleotide
  misc_feature 1..20: note = Target: SCN10A; (+) strand; PAM type: NRG; PAM sequence: TGG
  source 1..20: mol_type = other DNA
taatgtagatgacgggttga

SEQ ID NO: 27173 - DNA, 20 bp, synthetic construct
  misc_feature 1..20: note = Description of Artificial Sequence: Synthetic oligonucleotide
  misc_feature 1..20: note = Target: SCN10A; (+) strand; PAM type: NRG; PAM sequence: GGG
  source 1..20: mol_type = other DNA
aatgtagatgacgggttgat

SEQ ID NO: 27174 - DNA, 20 bp, synthetic construct
  misc_feature 1..20: note = Description of Artificial Sequence: Synthetic oligonucleotide
  misc_feature 1..20: note = Target: SCN10A; (+) strand; PAM type: NRG; PAM sequence: CAG
  source 1..20: mol_type = other DNA
agatgacgggttgatgggtg

SEQ ID NO: 27175 - DNA, 20 bp, synthetic construct
  misc_feature 1..20: note = Description of Artificial Sequence: Synthetic oligonucleotide
  misc_feature 1..20: note = Target: SCN10A; (+) strand; PAM type: NRG; PAM sequence: TGG
  source 1..20: mol_type = other DNA
atgggtgcagcaaaccaaca

SEQ ID NO: 27176 - DNA, 20 bp, synthetic construct
  misc_feature 1..20: note = Description of Artificial Sequence: Synthetic oligonucleotide
  misc_feature 1..20: note = Target: SCN10A; (+) strand; PAM type: NRG; PAM sequence: TAG
  source 1..20: mol_type = other DNA
tacattgtgcacatgtaccc

SEQ ID NO: 27177 - DNA, 20 bp, synthetic construct
  misc_feature 1..20: note = Description of Artificial Sequence: Synthetic oligonucleotide
  misc_feature 1..20: note = Target: SCN10A; (+) strand; PAM type: NRG; PAM sequence: AAG
  source 1..20: mol_type = other DNA
cacatgtaccctagaattta

SEQ ID NO: 27178 - DNA, 20 bp, synthetic construct
  misc_feature 1..20: note = Description of Artificial Sequence: Synthetic oligonucleotide
  misc_feature 1..20: note = Target: SCN10A; (+) strand; PAM type: NRG; PAM sequence: AAG
  source 1..20: mol_type = other DNA
ttaaagtataattttaaaaa

SEQ ID NO: 27179 - DNA, 20 bp, synthetic construct
  misc_feature 1..20: note = Description of Artificial Sequence: Synthetic oligonucleotide
  misc_feature 1..20: note = Target: SCN10A; (+) strand; PAM type: NRG; PAM sequence: AAG
  source 1..20: mol_type = other DNA
aattttaaaaaaagaaaaaa

SEQ ID NO: 27180 - DNA, 20 bp, synthetic construct
  misc_feature 1..20: note = Description of Artificial Sequence: Synthetic oligonucleotide
  misc_feature 1..20: note = Target: SCN10A; (+) strand; PAM type: NRG; PAM sequence: AGG
  source 1..20: mol_type = other DNA
attttaaaaaaagaaaaaaa

SEQ ID NO: 27181 - DNA, 20 bp, synthetic construct
  misc_feature 1..20: note = Description of Artificial Sequence: Synthetic oligonucleotide
  misc_feature 1..20: note = Target: SCN10A; (+) strand; PAM type: NRG; PAM sequence: CAG
  source 1..20: mol_type = other DNA
ttaatttatttgtaaacctt

SEQ ID NO: 27182 - DNA, 20 bp, synthetic construct
  misc_feature 1..20: note = Description of Artificial Sequence: Synthetic oligonucleotide
  misc_feature 1..20: note = Target: SCN10A; (+) strand; PAM type: NRG; PAM sequence: CAG
  source 1..20: mol_type = other DNA
gtaaaccttcagcctgtgtt

SEQ ID NO: 27183 - DNA, 20 bp, synthetic construct
  misc_feature 1..20: note = Description of Artificial Sequence: Synthetic oligonucleotide
  misc_feature 1..20: note = Target: SCN10A; (+) strand; PAM type: NRG; PAM sequence: CAG
  source 1..20: mol_type = other DNA
cttcagcctgtgttcagctc

SEQ ID NO: 27184 - DNA, 20 bp, synthetic construct
  misc_feature 1..20: note = Description of Artificial Sequence: Synthetic oligonucleotide
  misc_feature 1..20: note = Target: SCN10A; (+) strand; PAM type: NRG; PAM sequence: AAG
  source 1..20: mol_type = other DNA
ctgtgttcagctccagactg

SEQ ID NO: 27185 - DNA, 20 bp, synthetic construct
  misc_feature 1..20: note = Description of Artificial Sequence: Synthetic oligonucleotide
  misc_feature 1..20: note = Target: SCN10A; (+) strand; PAM type: NRG; PAM sequence: TAG
  source 1..20: mol_type = other DNA
tatcttgcatccctaacact

SEQ ID NO: 27186 - DNA, 20 bp, synthetic construct
  misc_feature 1..20: note = Description of Artificial Sequence: Synthetic oligonucleotide
  misc_feature 1..20: note = Target: SCN10A; (+) strand; PAM type: NRG; PAM sequence: AGG
  source 1..20: mol_type = other DNA
atcttgcatccctaacactt

SEQ ID NO: 27187 - DNA, 20 bp, synthetic construct
  misc_feature 1..20: note = Description of Artificial Sequence: Synthetic oligonucleotide
  misc_feature 1..20: note = Target: SCN10A; (+) strand; PAM type: NRG; PAM sequence: AAG
  source 1..20: mol_type = other DNA
tgcatccctaacacttagga

SEQ ID NO: 27188 - DNA, 20 bp, synthetic construct
  misc_feature 1..20: note = Description of Artificial Sequence: Synthetic oligonucleotide
  misc_feature 1..20: note = Target: SCN10A; (+) strand; PAM type: NRG; PAM sequence: AAG
  source 1..20: mol_type = other DNA
agtgacttcacttttgtctt

SEQ ID NO: 27189 - DNA, 20 bp, synthetic construct
  misc_feature 1..20: note = Description of Artificial Sequence: Synthetic oligonucleotide
  misc_feature 1..20: note = Target: SCN10A; (+) strand; PAM type: NRG; PAM sequence: CAG
  source 1..20: mol_type = other DNA
tttgtcttaagcaaatgctc

SEQ ID NO: 27190 - DNA, 20 bp, synthetic construct
  misc_feature 1..20: note = Description of Artificial Sequence: Synthetic oligonucleotide
  misc_feature 1..20: note = Target: SCN10A; (+) strand; PAM type: NRG; PAM sequence: CAG
  source 1..20: mol_type = other DNA
aagcaaatgctccagcacac

SEQ ID NO: 27191 - DNA, 20 bp, synthetic construct
  misc_feature 1..20: note = Description of Artificial Sequence: Synthetic oligonucleotide
  misc_feature 1..20: note = Target: SCN10A; (+) strand; PAM type: NRG; PAM sequence: AGG
  source 1..20: mol_type = other DNA
agcaaatgctccagcacacc

SEQ ID NO: 27192 - DNA, 20 bp, synthetic construct
  misc_feature 1..20: note = Description of Artificial Sequence: Synthetic oligonucleotide
  misc_feature 1..20: note = Target: SCN10A; (+) strand; PAM type: NRG; PAM sequence: GGG
  source 1..20: mol_type = other DNA
gcaaatgctccagcacacca

SEQ ID NO: 27193 - DNA, 20 bp, synthetic construct
  misc_feature 1..20: note = Description of Artificial Sequence: Synthetic oligonucleotide
  misc_feature 1..20: note = Target: SCN10A; (+) strand; PAM type: NRG; PAM sequence: AAG
  source 1..20: mol_type = other DNA
gatacctactattctgtgtt

SEQ ID NO: 27194 - DNA, 20 bp, synthetic construct
  misc_feature 1..20: note = Description of Artificial Sequence: Synthetic oligonucleotide
  misc_feature 1..20: note = Target: SCN10A; (+) strand; PAM type: NRG; PAM sequence: TGG
  source 1..20: mol_type = other DNA
acctactattctgtgttaag

SEQ ID NO: 27195 - DNA, 20 bp, synthetic construct
  misc_feature 1..20: note = Description of Artificial Sequence: Synthetic oligonucleotide
  misc_feature 1..20: note = Target: SCN10A; (+) strand; PAM type: NRG; PAM sequence: CAG
  source 1..20: mol_type = other DNA
atctgtgtctatgtgttatg

SEQ ID NO: 27196 - DNA, 20 bp, synthetic construct
  misc_feature 1..20: note = Description of Artificial Sequence: Synthetic oligonucleotide
  misc_feature 1..20: note = Target: SCN10A; (+) strand; PAM type: NRG; PAM sequence: TGG
  source 1..20: mol_type = other DNA
ctatgtgttatgcagtttaa

SEQ ID NO: 27197 - DNA, 20 bp, synthetic construct
  misc_feature 1..20: note = Description of Artificial Sequence: Synthetic oligonucleotide
  misc_feature 1..20: note = Target: SCN10A; (+) strand; PAM type: NRG; PAM sequence: AAG
  source 1..20: mol_type = other DNA
atgcagtttaatggtataaa

SEQ ID NO: 27198 - DNA, 20 bp, synthetic construct
  misc_feature 1..20: note = Description of Artificial Sequence: Synthetic oligonucleotide
  misc_feature 1..20: note = Target: SCN10A; (+) strand; PAM type: NRG; PAM sequence: TAG
  source 1..20: mol_type = other DNA
agtttaatggtataaaaagt

SEQ ID NO: 27199 - DNA, 20 bp, synthetic construct
  misc_feature 1..20: note = Description of Artificial Sequence: Synthetic oligonucleotide
  misc_feature 1..20: note = Target: SCN10A; (+) strand; PAM type: NRG; PAM sequence: AGG
  source 1..20: mol_type = other DNA
gtttaatggtataaaaagtt

SEQ ID NO: 27200 - DNA, 20 bp, synthetic construct
  misc_feature 1..20: note = Description of Artificial Sequence: Synthetic oligonucleotide
  misc_feature 1..20: note = Target: SCN10A; (+) strand; PAM type: NRG; PAM sequence: GGG
  source 1..20: mol_type = other DNA
tttaatggtataaaaagtta

SEQ ID NO: 27201 - DNA, 20 bp, synthetic construct
  misc_feature 1..20: note = Description of Artificial Sequence: Synthetic oligonucleotide
  misc_feature 1..20: note = Target: SCN10A; (+) strand; PAM type: NRG; PAM sequence: CGG
  source 1..20: mol_type = other DNA
aatggtataaaaagttaggg

SEQ ID NO: 27202 - DNA, 20 bp, synthetic construct
  misc_feature 1..20: note = Description of Artificial Sequence: Synthetic oligonucleotide
  misc_feature 1..20: note = Target: SCN10A; (+) strand; PAM type: NRG; PAM sequence: TGG
  source 1..20: mol_type = other DNA
aaaagttagggcggtgttta

SEQ ID NO: 27203 - DNA, 20 bp, synthetic construct
  misc_feature 1..20: note = Description of Artificial Sequence: Synthetic oligonucleotide
  misc_feature 1..20: note = Target: SCN10A; (+) strand; PAM type: NRG; PAM sequence: TGG
  source 1..20: mol_type = other DNA
agttagggcggtgtttatgg

SEQ ID NO: 27204 - DNA, 20 bp, synthetic construct
  misc_feature 1..20: note = Description of Artificial Sequence: Synthetic oligonucleotide
  misc_feature 1..20: note = Target: SCN10A; (+) strand; PAM type: NRG; PAM sequence: GAG
  source 1..20: mol_type = other DNA
ttagggcggtgtttatggtg

SEQ ID NO: 27205 - DNA, 20 bp, synthetic construct
  misc_feature 1..20: note = Description of Artificial Sequence: Synthetic oligonucleotide
  misc_feature 1..20: note = Target: SCN10A; (+) strand; PAM type: NRG; PAM sequence: AGG
  source 1..20: mol_type = other DNA
tagggcggtgtttatggtgg

SEQ ID NO: 27206 - DNA, 20 bp, synthetic construct
  misc_feature 1..20: note = Description of Artificial Sequence: Synthetic oligonucleotide
  misc_feature 1..20: note = Target: SCN10A; (+) strand; PAM type: NRG; PAM sequence: GAG
  source 1..20: mol_type = other DNA
tatggtggaggcatactttt

SEQ ID NO: 27207 - DNA, 20 bp, synthetic construct
  misc_feature 1..20: note = Description of Artificial Sequence: Synthetic oligonucleotide
  misc_feature 1..20: note = Target: SCN10A; (+) strand; PAM type: NRG; PAM sequence: CAG
  source 1..20: mol_type = other DNA
ggcatacttttgagaacttg

SEQ ID NO: 27208 - DNA, 20 bp, synthetic construct
  misc_feature 1..20: note = Description of Artificial Sequence: Synthetic oligonucleotide
  misc_feature 1..20: note = Target: SCN10A; (+) strand; PAM type: NRG; PAM sequence: AGG
  source 1..20: mol_type = other DNA
gcatacttttgagaacttgc

SEQ ID NO: 27209 - DNA, 20 bp, synthetic construct
  misc_feature 1..20: note = Description of Artificial Sequence: Synthetic oligonucleotide
  misc_feature 1..20: note = Target: SCN10A; (+) strand; PAM type: NRG; PAM sequence: CAG
  source 1..20: mol_type = other DNA
ttttgagaacttgcaggttc

SEQ ID NO: 27210 - DNA, 20 bp, synthetic construct
  misc_feature 1..20: note = Description of Artificial Sequence: Synthetic oligonucleotide
  misc_feature 1..20: note = Target: SCN10A; (+) strand; PAM type: NRG; PAM sequence: CAG
  source 1..20: mol_type = other DNA
gcaggttccagatatttgta

SEQ ID NO: 27211 - DNA, 20 bp, synthetic construct
  misc_feature 1..20: note = Description of Artificial Sequence: Synthetic oligonucleotide
  misc_feature 1..20: note = Target: SCN10A; (+) strand; PAM type: NRG; PAM sequence: CAG
  source 1..20: mol_type = other DNA
gttccagatatttgtacagt

SEQ ID NO: 27212 - DNA, 20 bp, synthetic construct
  misc_feature 1..20: note = Description of Artificial Sequence: Synthetic oligonucleotide
  misc_feature 1..20: note = Target: SCN10A; (+) strand; PAM type: NRG; PAM sequence: CAG
  source 1..20: mol_type = other DNA
tcctgtctcttatctccctt

SEQ ID NO: 27213 - DNA, 20 bp, synthetic construct
  misc_feature 1..20: note = Description of Artificial Sequence: Synthetic oligonucleotide
  misc_feature 1..20: note = Target: SCN10A; (+) strand; PAM type: NRG; PAM sequence: AAG
  source 1..20: mol_type = other DNA
tcttatctcccttcagtgct

SEQ ID NO: 27214 - DNA, 20 bp, synthetic construct
  misc_feature 1..20: note = Description of Artificial Sequence: Synthetic oligonucleotide
  misc_feature 1..20: note = Target: SCN10A; (+) strand; PAM type: NRG; PAM sequence: AGG
  source 1..20: mol_type = other DNA
cttatctcccttcagtgcta

SEQ ID NO: 27215 - DNA, 20 bp, synthetic construct
  misc_feature 1..20: note = Description of Artificial Sequence: Synthetic oligonucleotide
  misc_feature 1..20: note = Target: SCN10A; (+) strand; PAM type: NRG; PAM sequence: TGG
  source 1..20: mol_type = other DNA
gctaaggtatcctcacattc

SEQ ID NO: 27216 - DNA, 20 bp, synthetic construct
  misc_feature 1..20: note = Description of Artificial Sequence: Synthetic oligonucleotide
  misc_feature 1..20: note = Target: SCN10A; (+) strand; PAM type: NRG; PAM sequence: GGG
  source 1..20: mol_type = other DNA
ctaaggtatcctcacattct

SEQ ID NO: 27217 - DNA, 20 bp, synthetic construct
  misc_feature 1..20: note = Description of Artificial Sequence: Synthetic oligonucleotide
  misc_feature 1..20: note = Target: SCN10A; (+) strand; PAM type: NRG; PAM sequence: CAG
  source 1..20: mol_type = other DNA
ggtatcctcacattctgggc

SEQ ID NO: 27218 - DNA, 20 bp, synthetic construct
  misc_feature 1..20: note = Description of Artificial Sequence: Synthetic oligonucleotide
  misc_feature 1..20: note = Target: SCN10A; (+) strand; PAM type: NRG; PAM sequence: GAG
  source 1..20: mol_type = other DNA
tatcctcacattctgggcca

SEQ ID NO: 27219 - DNA, 20 bp, synthetic construct
  misc_feature 1..20: note = Description of Artificial Sequence: Synthetic oligonucleotide
  misc_feature 1..20: note = Target: SCN10A; (+) strand; PAM type: NRG; PAM sequence: GAG
  source 1..20: mol_type = other DNA
tcctcacattctgggccaga

SEQ ID NO: 27220 - DNA, 20 bp, synthetic construct
  misc_feature 1..20: note = Description of Artificial Sequence: Synthetic oligonucleotide
  misc_feature 1..20: note = Target: SCN10A; (+) strand; PAM type: NRG; PAM sequence: TAG
  source 1..20: mol_type = other DNA
attctgggccagagagattc

SEQ ID NO: 27221 - DNA, 20 bp, synthetic construct
  misc_feature 1..20: note = Description of Artificial Sequence: Synthetic oligonucleotide
  misc_feature 1..20: note = Target: SCN10A; (+) strand; PAM type: NRG; PAM sequence: TGG
  source 1..20: mol_type = other DNA
gattctagttttacctcttg

SEQ ID NO: 27222 - DNA, 20 bp, synthetic construct
  misc_feature 1..20: note = Description of Artificial Sequence: Synthetic oligonucleotide
  misc_feature 1..20: note = Target: SCN10A; (+) strand; PAM type: NRG; PAM sequence: GGG
  source 1..20: mol_type = other DNA
attctagttttacctcttgt

SEQ ID NO: 27223 - DNA, 20 bp, synthetic construct
  misc_feature 1..20: note = Description of Artificial Sequence: Synthetic oligonucleotide
  misc_feature 1..20: note = Target: SCN10A; (+) strand; PAM type: NRG; PAM sequence: TGG
  source 1..20: mol_type = other DNA
ctagttttacctcttgtggg

SEQ ID NO: 27224 - DNA, 20 bp, synthetic construct
  misc_feature 1..20: note = Description of Artificial Sequence: Synthetic oligonucleotide
  misc_feature 1..20: note = Target: SCN10A; (+) strand; PAM type: NRG; PAM sequence: GGG
  source 1..20: mol_type = other DNA
tagttttacctcttgtgggt

SEQ ID NO: 27225 - DNA, 20 bp, synthetic construct
  misc_feature 1..20: note = Description of Artificial Sequence: Synthetic oligonucleotide
  misc_feature 1..20: note = Target: SCN10A; (+) strand; PAM type: NRG; PAM sequence: GGG
  source 1..20: mol_type = other DNA
agttttacctcttgtgggtg

SEQ ID NO: 27226 - DNA, 20 bp, synthetic construct
  misc_feature 1..20: note = Description of Artificial Sequence: Synthetic oligonucleotide
  misc_feature 1..20: note = Target: SCN10A; (+) strand; PAM type: NRG; PAM sequence: GAG
  source 1..20: mol_type = other DNA
tacctcttgtgggtggggtt

SEQ ID NO: 27227 - DNA, 20 bp, synthetic construct
  misc_feature 1..20: note = Description of Artificial Sequence: Synthetic oligonucleotide
  misc_feature 1..20: note = Target: SCN10A; (+) strand; PAM type: NRG; PAM sequence: AAG
  source 1..20: mol_type = other DNA
ctcttgtgggtggggttgag

SEQ ID NO: 27228 - DNA, 20 bp, synthetic construct
  misc_feature 1..20: note = Description of Artificial Sequence: Synthetic oligonucleotide
  misc_feature 1..20: note = Target: SCN10A; (+) strand; PAM type: NRG; PAM sequence: AGG
  source 1..20: mol_type = other DNA
tcttgtgggtggggttgaga

SEQ ID NO: 27229 - DNA, 20 bp, synthetic construct
  misc_feature 1..20: note = Description of Artificial Sequence: Synthetic oligonucleotide
  misc_feature 1..20: note = Target: SCN10A; (+) strand; PAM type: NRG; PAM sequence: TAG
  source 1..20: mol_type = other DNA
tgtgggtggggttgagaagg

SEQ ID NO: 27230 - DNA, 20 bp, synthetic construct
  misc_feature 1..20: note = Description of Artificial Sequence: Synthetic oligonucleotide
  misc_feature 1..20: note = Target: SCN10A; (+) strand; PAM type: NRG; PAM sequence: TGG
  source 1..20: mol_type = other DNA
tggggttgagaaggtagctc

SEQ ID NO: 27231 - DNA, 20 bp, synthetic construct
  misc_feature 1..20: note = Description of Artificial Sequence: Synthetic oligonucleotide
  misc_feature 1..20: note = Target: SCN10A; (+) strand; PAM type: NRG; PAM sequence: CAG
  source 1..20: mol_type = other DNA
gagaaggtagctctggttct

SEQ ID NO: 27232 - DNA, 20 bp, synthetic construct
  misc_feature 1..20: note = Description of Artificial Sequence: Synthetic oligonucleotide
  misc_feature 1..20: note = Target: SCN10A; (+) strand; PAM type: NRG; PAM sequence: AGG
  source 1..20: mol_type = other DNA
agaaggtagctctggttctc

SEQ ID NO: 27233 - DNA, 20 bp, synthetic construct
  misc_feature 1..20: note = Description of Artificial Sequence: Synthetic oligonucleotide
  misc_feature 1..20: note = Target: SCN10A; (+) strand; PAM type: NRG; PAM sequence: TGG
  source 1..20: mol_type = other DNA
ggtagctctggttctcaggt

SEQ ID NO: 27234 - DNA, 20 bp, synthetic construct
  misc_feature 1..20: note = Description of Artificial Sequence: Synthetic oligonucleotide
  misc_feature 1..20: note = Target: SCN10A; (+) strand; PAM type: NRG; PAM sequence: TGG
  source 1..20: mol_type = other DNA
ggttctcaggttggctccca

SEQ ID NO: 27235 - DNA, 20 bp, synthetic construct
  misc_feature 1..20: note = Description of Artificial Sequence: Synthetic oligonucleotide
  misc_feature 1..20: note = Target: SCN10A; (+) strand; PAM type: NRG; PAM sequence: TAG
  source 1..20: mol_type = other DNA
ggttggctcccatggaaatc

SEQ ID NO: 27236 - DNA, 20 bp, synthetic construct
  misc_feature 1..20: note = Description of Artificial Sequence: Synthetic oligonucleotide
  misc_feature 1..20: note = Target: SCN10A; (+) strand; PAM type: NRG; PAM sequence: CAG
  source 1..20: mol_type = other DNA
ctaccttgtaattgtaccac

SEQ ID NO: 27237 - DNA, 20 bp, synthetic construct
  misc_feature 1..20: note = Description of Artificial Sequence: Synthetic oligonucleotide
  misc_feature 1..20: note = Target: SCN10A; (+) strand; PAM type: NRG; PAM sequence: AGG
  source 1..20: mol_type = other DNA
taccttgtaattgtaccacc

SEQ ID NO: 27238 - DNA, 20 bp, synthetic construct
  misc_feature 1..20: note = Description of Artificial Sequence: Synthetic oligonucleotide
  misc_feature 1..20: note = Target: SCN10A; (+) strand; PAM type: NRG; PAM sequence: TGG
  source 1..20: mol_type = other DNA
attgtaccaccaggtgaact

SEQ ID NO: 27239 - DNA, 20 bp, synthetic construct
  misc_feature 1..20: note = Description of Artificial Sequence: Synthetic oligonucleotide
  misc_feature 1..20: note = Target: SCN10A; (+) strand; PAM type: NRG; PAM sequence: TGG
  source 1..20: mol_type = other DNA
caccaggtgaacttggaaac

SEQ ID NO: 27240 - DNA, 20 bp, synthetic construct
  misc_feature 1..20: note = Description of Artificial Sequence: Synthetic oligonucleotide
  misc_feature 1..20: note = Target: SCN10A; (+) strand; PAM type: NRG; PAM sequence: TAG
  source 1..20: mol_type = other DNA
gtgaacttggaaactggctc

SEQ ID NO: 27241 - DNA, 20 bp, synthetic construct
  misc_feature 1..20: note = Description of Artificial Sequence: Synthetic oligonucleotide
  misc_feature 1..20: note = Target: SCN10A; (+) strand; PAM type: NRG; PAM sequence: AAG
  source 1..20: mol_type = other DNA
ggctctagtgaaattttcaa

SEQ ID NO: 27242 - DNA, 20 bp, synthetic construct
  misc_feature 1..20: note = Description of Artificial Sequence: Synthetic oligonucleotide
  misc_feature 1..20: note = Target: SCN10A; (+) strand; PAM type: NRG; PAM sequence: TGG
  source 1..20: mol_type = other DNA
tcaaaagataatcttgcatt

SEQ ID NO: 27243 - DNA, 20 bp, synthetic construct
  misc_feature 1..20: note = Description of Artificial Sequence: Synthetic oligonucleotide
  misc_feature 1..20: note = Target: SCN10A; (+) strand; PAM type: NRG; PAM sequence: AAG
  source 1..20: mol_type = other DNA
ccaaaaactccgtgtcatgc

SEQ ID NO: 27244 - DNA, 20 bp, synthetic construct
  misc_feature 1..20: note = Description of Artificial Sequence: Synthetic oligonucleotide
  misc_feature 1..20: note = Target: SCN10A; (+) strand; PAM type: NRG; PAM sequence: TAG
  source 1..20: mol_type = other DNA
caatgtttcccattacaatt

SEQ ID NO: 27245 - DNA, 20 bp, synthetic construct
  misc_feature 1..20: note = Description of Artificial Sequence: Synthetic oligonucleotide
  misc_feature 1..20: note = Target: SCN10A; (+) strand; PAM type: NRG; PAM sequence: AGG
  source 1..20: mol_type = other DNA
aatgtttcccattacaattt

SEQ ID NO: 27246 - DNA, 20 bp, synthetic construct
  misc_feature 1..20: note = Description of Artificial Sequence: Synthetic oligonucleotide
  misc_feature 1..20: note = Target: SCN10A; (+) strand; PAM type: NRG; PAM sequence: CAG
  source 1..20: mol_type = other DNA
atttaggaaatgcatttgtg

SEQ ID NO: 27247 - DNA, 20 bp, synthetic construct
  misc_feature 1..20: note = Description of Artificial Sequence: Synthetic oligonucleotide
  misc_feature 1..20: note = Target: SCN10A; (+) strand; PAM type: NRG; PAM sequence: GAG
  source 1..20: mol_type = other DNA
tgcatttgtgcagaaaaaat

SEQ ID NO: 27248 - DNA, 20 bp, synthetic construct
  misc_feature 1..20: note = Description of Artificial Sequence: Synthetic oligonucleotide
  misc_feature 1..20: note = Target: SCN10A; (+) strand; PAM type: NRG; PAM sequence: TGG
  source 1..20: mol_type = other DNA
tgtgcagaaaaaatgagaaa

SEQ ID NO: 27249 - DNA, 20 bp, synthetic construct
  misc_feature 1..20: note = Description of Artificial Sequence: Synthetic oligonucleotide
  misc_feature 1..20: note = Target: SCN10A; (+) strand; PAM type: NRG; PAM sequence: TAG
  source 1..20: mol_type = other DNA
agaaaaaatgagaaatggat

SEQ ID NO: 27250 - DNA, 20 bp, synthetic construct
  misc_feature 1..20: note = Description of Artificial Sequence: Synthetic oligonucleotide
  misc_feature 1..20: note = Target: SCN10A; (+) strand; PAM type: NRG; PAM sequence: TGG
  source 1..20: mol_type = other DNA
gagaaatggattagtttccc

SEQ ID NO: 27251 - DNA, 20 bp, synthetic construct
  misc_feature 1..20: note = Description of Artificial Sequence: Synthetic oligonucleotide
  misc_feature 1..20: note = Target: SCN10A; (+) strand; PAM type: NRG; PAM sequence: GGG
  source 1..20: mol_type = other DNA
agaaatggattagtttccct

SEQ ID NO: 27252 - DNA, 20 bp, synthetic construct
  misc_feature 1..20: note = Description of Artificial Sequence: Synthetic oligonucleotide
  misc_feature 1..20: note = Target: SCN10A; (+) strand; PAM type: NRG; PAM sequence: CAG
  source 1..20: mol_type = other DNA
gggatgctgtaacaaattac

SEQ ID NO: 27253 - DNA, 20 bp, synthetic construct
  misc_feature 1..20: note = Description of Artificial Sequence: Synthetic oligonucleotide
  misc_feature 1..20: note = Target: SCN10A; (+) strand; PAM type: NRG; PAM sequence: TAG
  source 1..20: mol_type = other DNA
tgtaacaaattaccagaaac

SEQ ID NO: 27254 - DNA, 20 bp, synthetic construct
  misc_feature 1..20: note = Description of Artificial Sequence: Synthetic oligonucleotide
  misc_feature 1..20: note = Target: SCN10A; (+) strand; PAM type: NRG; PAM sequence: AGG
  source 1..20: mol_type = other DNA
gtaacaaattaccagaaact

SEQ ID NO: 27255 - DNA, 20 bp, synthetic construct
  misc_feature 1..20: note = Description of Artificial Sequence: Synthetic oligonucleotide
  misc_feature 1..20: note = Target: SCN10A; (+) strand; PAM type: NRG; PAM sequence: TAG
  source 1..20: mol_type = other DNA
acaaattaccagaaactagg

SEQ ID NO: 27256 - DNA, 20 bp, synthetic construct
  misc_feature 1..20: note = Description of Artificial Sequence: Synthetic oligonucleotide
  misc_feature 1..20: note = Target: SCN10A; (+) strand; PAM type: NRG; PAM sequence: TAG
  source 1..20: mol_type = other DNA
aactaggtagatgacaataa

SEQ ID NO: 27257 - DNA, 20 bp, synthetic construct
  misc_feature 1..20: note = Description of Artificial Sequence: Synthetic oligonucleotide
  misc_feature 1..20: note = Target: SCN10A; (+) strand; PAM type: NRG; PAM sequence: GAG
  source 1..20: mol_type = other DNA
atttattctcttacacttct

SEQ ID NO: 27258 - DNA, 20 bp, synthetic construct
  misc_feature 1..20: note = Description of Artificial Sequence: Synthetic oligonucleotide
  misc_feature 1..20: note = Target: SCN10A; (+) strand; PAM type: NRG; PAM sequence: AGG
  source 1..20: mol_type = other DNA
tttattctcttacacttctg

SEQ ID NO: 27259 - DNA, 20 bp, synthetic construct
  misc_feature 1..20: note = Description of Artificial Sequence: Synthetic oligonucleotide
  misc_feature 1..20: note = Target: SCN10A; (+) strand; PAM type: NRG; PAM sequence: TAG
  source 1..20: mol_type = other DNA
ttctcttacacttctgaggc

SEQ ID NO: 27260 - DNA, 20 bp, synthetic construct
  misc_feature 1..20: note = Description of Artificial Sequence: Synthetic oligonucleotide
  misc_feature 1..20: note = Target: SCN10A; (+) strand; PAM type: NRG; PAM sequence: AAG
  source 1..20: mol_type = other DNA
gaggctagatgtctaaaatc

SEQ ID NO: 27261 - DNA, 20 bp, synthetic construct
  misc_feature 1..20: note = Description of Artificial Sequence: Synthetic oligonucleotide
  misc_feature 1..20: note = Target: SCN10A; (+) strand; PAM type: NRG; PAM sequence: AGG
  source 1..20: mol_type = other DNA
aggctagatgtctaaaatca

SEQ ID NO: 27262 - DNA, 20 bp, synthetic construct
  misc_feature 1..20: note = Description of Artificial Sequence: Synthetic oligonucleotide
  misc_feature 1..20: note = Target: SCN10A; (+) strand; PAM type: NRG; PAM sequence: TGG
  source 1..20: mol_type = other DNA
gatgtctaaaatcaaggtat

SEQ ID NO: 27263 - DNA, 20 bp, synthetic construct
  misc_feature 1..20: note = Description of Artificial Sequence: Synthetic oligonucleotide
  misc_feature 1..20: note = Target: SCN10A; (+) strand; PAM type: NRG; PAM sequence: CAG
  source 1..20: mol_type = other DNA
gtctaaaatcaaggtattgg

SEQ ID NO: 27264 - DNA, 20 bp, synthetic construct
  misc_feature 1..20: note = Description of Artificial Sequence: Synthetic oligonucleotide
  misc_feature 1..20: note = Target: SCN10A; (+) strand; PAM type: NRG; PAM sequence: GAG
  source 1..20: mol_type = other DNA
ctaaaatcaaggtattggca

SEQ ID NO: 27265 - DNA, 20 bp, synthetic construct
  misc_feature 1..20: note = Description of Artificial Sequence: Synthetic oligonucleotide
  misc_feature 1..20: note = Target: SCN10A; (+) strand; PAM type: NRG; PAM sequence: AAG
  source 1..20: mol_type = other DNA
gcagagccatgttccctctg

SEQ ID NO: 27266 - DNA, 20 bp, synthetic construct
  misc_feature 1..20: note = Description of Artificial Sequence: Synthetic oligonucleotide
  misc_feature 1..20: note = Target: SCN10A; (+) strand; PAM type: NRG; PAM sequence: CAG
  source 1..20: mol_type = other DNA
catgttccctctgaagcccg

SEQ ID NO: 27267 - DNA, 20 bp, synthetic construct
  misc_feature 1..20: note = Description of Artificial Sequence: Synthetic oligonucleotide
  misc_feature 1..20: note = Target: SCN10A; (+) strand; PAM type: NRG; PAM sequence: AGG
  source 1..20: mol_type = other DNA
atgttccctctgaagcccgc

SEQ ID NO: 27268 - DNA, 20 bp, synthetic construct
  misc_feature 1..20: note = Description of Artificial Sequence: Synthetic oligonucleotide
  misc_feature 1..20: note = Target: SCN10A; (+) strand; PAM type: NRG; PAM sequence: GAG
  source 1..20: mol_type = other DNA
tccctctgaagcccgcaggt

SEQ ID NO: 27269 - DNA, 20 bp, synthetic construct
  misc_feature 1..20: note = Description of Artificial Sequence: Synthetic oligonucleotide
  misc_feature 1..20: note = Target: SCN10A; (+) strand; PAM type: NRG; PAM sequence: TAG
  source 1..20: mol_type = other DNA
ttgccttccatgtctcctcc

SEQ ID NO: 27270 - DNA, 20 bp, synthetic construct
  misc_feature 1..20: note = Description of Artificial Sequence: Synthetic oligonucleotide
  misc_feature 1..20: note = Target: SCN10A; (+) strand; PAM type: NRG; PAM sequence: CAG
  source 1..20: mol_type = other DNA
tccatgtctcctcctagctt

SEQ ID NO: 27271 - DNA, 20 bp, synthetic construct
  misc_feature 1..20: note = Description of Artificial Sequence: Synthetic oligonucleotide
  misc_feature 1..20: note = Target: SCN10A; (+) strand; PAM type: NRG; PAM sequence: TGG
  source 1..20: mol_type = other DNA
cagcaatctttgccattcct

SEQ ID NO: 27272 - DNA, 20 bp, synthetic construct
  misc_feature 1..20: note = Description of Artificial Sequence: Synthetic oligonucleotide
  misc_feature 1..20: note = Target: SCN10A; (+) strand; PAM type: NRG; PAM sequence: CAG
  source 1..20: mol_type = other DNA
tttcttcctgtgtctccata

SEQ ID NO: 27273 - DNA, 20 bp, synthetic construct
  misc_feature 1..20: note = Description of Artificial Sequence: Synthetic oligonucleotide
  misc_feature 1..20: note = Target: SCN10A; (+) strand; PAM type: NRG; PAM sequence: TGG
  source 1..20: mol_type = other DNA
tttttttctgcatcttccca

SEQ ID NO: 27274 - DNA, 20 bp, synthetic construct
  misc_feature 1..20: note = Description of Artificial Sequence: Synthetic oligonucleotide
  misc_feature 1..20: note = Target: SCN10A; (+) strand; PAM type: NRG; PAM sequence: TAG
  source 1..20: mol_type = other DNA
ttcaaattcccctcatattt

SEQ ID NO: 27275 - DNA, 20 bp, synthetic construct
  misc_feature 1..20: note = Description of Artificial Sequence: Synthetic oligonucleotide
  misc_feature 1..20: note = Target: SCN10A; (+) strand; PAM type: NRG; PAM sequence: CAG
  source 1..20: mol_type = other DNA
ccctcatattttagcaacac

SEQ ID NO: 27276 - DNA, 20 bp, synthetic construct
  misc_feature 1..20: note = Description of Artificial Sequence: Synthetic oligonucleotide
  misc_feature 1..20: note = Target: SCN10A; (+) strand; PAM type: NRG; PAM sequence: TGG
  source 1..20: mol_type = other DNA
attttagcaacaccagtcat

SEQ ID NO: 27277 - DNA, 20 bp, synthetic construct
  misc_feature 1..20: note = Description of Artificial Sequence: Synthetic oligonucleotide
  misc_feature 1..20: note = Target: SCN10A; (+) strand; PAM type: NRG; PAM sequence: TAG
  source 1..20: mol_type = other DNA
agcaacaccagtcattggat

SEQ ID NO: 27278 - DNA, 20 bp, synthetic construct
  misc_feature 1..20: note = Description of Artificial Sequence: Synthetic oligonucleotide
  misc_feature 1..20: note = Target: SCN10A; (+) strand; PAM type: NRG; PAM sequence: AGG
  source 1..20: mol_type = other DNA
gcaacaccagtcattggatt

SEQ ID NO: 27279 - DNA, 20 bp, synthetic construct
  misc_feature 1..20: note = Description of Artificial Sequence: Synthetic oligonucleotide
  misc_feature 1..20: note = Target: SCN10A; (+) strand; PAM type: NRG; PAM sequence: GGG
  source 1..20: mol_type = other DNA
caacaccagtcattggatta

SEQ ID NO: 27280 - DNA, 20 bp, synthetic construct
  misc_feature 1..20: note = Description of Artificial Sequence: Synthetic oligonucleotide
  misc_feature 1..20: note = Target: SCN10A; (+) strand; PAM type: NRG; PAM sequence: AAG
  source 1..20: mol_type = other DNA
caaaaaccttaatgtcaaat

SEQ ID NO: 27281 - DNA, 20 bp, synthetic construct
  misc_feature 1..20: note = Description of Artificial Sequence: Synthetic oligonucleotide
  misc_feature 1..20: note = Target: SCN10A; (+) strand; PAM type: NRG; PAM sequence: AGG
  source 1..20: mol_type = other DNA
aaaaaccttaatgtcaaata

SEQ ID NO: 27282 - DNA, 20 bp, synthetic construct
  misc_feature 1..20: note = Description of Artificial Sequence: Synthetic oligonucleotide
  misc_feature 1..20: note = Target: SCN10A; (+) strand; PAM type: NRG; PAM sequence: CAG
  source 1..20: mol_type = other DNA
gtcaaataaggtcacaatca

SEQ ID NO: 27283 - DNA, 20 bp, synthetic construct
  misc_feature 1..20: note = Description of Artificial Sequence: Synthetic oligonucleotide
  misc_feature 1..20: note = Target: SCN10A; (+) strand; PAM type: NRG; PAM sequence: AGG
  source 1..20: mol_type = other DNA
tcaaataaggtcacaatcac

SEQ ID NO: 27284 - DNA, 20 bp, synthetic construct
  misc_feature 1..20: note = Description of Artificial Sequence: Synthetic oligonucleotide
  misc_feature 1..20: note = Target: SCN10A; (+) strand; PAM type: NRG; PAM sequence: TGG
  source 1..20: mol_type = other DNA
gtcacaatcacaggtactat

SEQ ID NO: 27285 - DNA, 20 bp, synthetic construct
  misc_feature 1..20: note = Description of Artificial Sequence: Synthetic oligonucleotide
  misc_feature 1..20: note = Target: SCN10A; (+) strand; PAM type: NRG; PAM sequence: TAG
  source 1..20: mol_type = other DNA
caatcacaggtactattggt

SEQ ID NO: 27286 - DNA, 20 bp, synthetic construct
  misc_feature 1..20: note = Description of Artificial Sequence: Synthetic oligonucleotide
  misc_feature 1..20: note = Target: SCN10A; (+) strand; PAM type: NRG; PAM sequence: TAG
  source 1..20: mol_type = other DNA
agaacttcaacatacccttt

SEQ ID NO: 27287 - DNA, 20 bp, synthetic construct
  misc_feature 1..20: note = Description of Artificial Sequence: Synthetic oligonucleotide
  misc_feature 1..20: note = Target: SCN10A; (+) strand; PAM type: NRG; PAM sequence: AGG
  source 1..20: mol_type = other DNA
gaacttcaacataccctttt

SEQ ID NO: 27288 - DNA, 20 bp, synthetic construct
  misc_feature 1..20: note = Description of Artificial Sequence: Synthetic oligonucleotide
  misc_feature 1..20: note = Target: SCN10A; (+) strand; PAM type: NRG; PAM sequence: GGG
  source 1..20: mol_type = other DNA
aacttcaacataccctttta

SEQ ID NO: 27289 - DNA, 20 bp, synthetic construct
  misc_feature 1..20: note = Description of Artificial Sequence: Synthetic oligonucleotide
  misc_feature 1..20: note = Target: SCN10A; (+) strand; PAM type: NRG; PAM sequence: AAG
  source 1..20: mol_type = other DNA
agggaacattattcaaccca

SEQ ID NO: 27290 - DNA, 20 bp, synthetic construct
  misc_feature 1..20: note = Description of Artificial Sequence: Synthetic oligonucleotide
  misc_feature 1..20: note = Target: SCN10A; (+) strand; PAM type: NRG; PAM sequence: AAG
  source 1..20: mol_type = other DNA
ccaaagcataattcaacata

SEQ ID NO: 27291 - DNA, 20 bp, synthetic construct
  misc_feature 1..20: note = Description of Artificial Sequence: Synthetic oligonucleotide
  misc_feature 1..20: note = Target: SCN10A; (+) strand; PAM type: NRG; PAM sequence: TAG
  source 1..20: mol_type = other DNA
ttgaattatgttcctatgtt

SEQ ID NO: 27292 - DNA, 20 bp, synthetic construct
  misc_feature 1..20: note = Description of Artificial Sequence: Synthetic oligonucleotide
  misc_feature 1..20: note = Target: SCN10A; (+) strand; PAM type: NRG; PAM sequence: AGG
  source 1..20: mol_type = other DNA
tgaattatgttcctatgttt

SEQ ID NO: 27293 - DNA, 20 bp, synthetic construct
  misc_feature 1..20: note = Description of Artificial Sequence: Synthetic oligonucleotide
  misc_feature 1..20: note = Target: SCN10A; (+) strand; PAM type: NRG; PAM sequence: GGG
  source 1..20: mol_type = other DNA
gaattatgttcctatgttta

SEQ ID NO: 27294 - DNA, 20 bp, synthetic construct
  misc_feature 1..20: note = Description of Artificial Sequence: Synthetic oligonucleotide
  misc_feature 1..20: note = Target: SCN10A; (+) strand; PAM type: NRG; PAM sequence: GAG
  source 1..20: mol_type = other DNA
attatgttcctatgtttagg

SEQ ID NO: 27295 - DNA, 20 bp, synthetic construct
  misc_feature 1..20: note = Description of Artificial Sequence: Synthetic oligonucleotide
  misc_feature 1..20: note = Target: SCN10A; (+) strand; PAM type: NRG; PAM sequence: AAG
  source 1..20: mol_type = other DNA
agggagcataattcaactca

SEQ ID NO: 27296 - DNA, 20 bp, synthetic construct
  misc_feature 1..20: note = Description of Artificial Sequence: Synthetic oligonucleotide
  misc_feature 1..20: note = Target: SCN10A; (+) strand; PAM type: NRG; PAM sequence: GAG
  source 1..20: mol_type = other DNA
ctcaaagtaaaaatactttt

SEQ ID NO: 27297 - DNA, 20 bp, synthetic construct
  misc_feature 1..20: note = Description of Artificial Sequence: Synthetic oligonucleotide
  misc_feature 1..20: note = Target: SCN10A; (+) strand; PAM type: NRG; PAM sequence: TAG
  source 1..20: mol_type = other DNA
agtaaaaatacttttgagaa

SEQ ID NO: 27298 - DNA, 20 bp, synthetic construct
  misc_feature 1..20: note = Description of Artificial Sequence: Synthetic oligonucleotide
  misc_feature 1..20: note = Target: SCN10A; (+) strand; PAM type: NRG; PAM sequence: TAG
  source 1..20: mol_type = other DNA
aatagtatcatctgctttaa

SEQ ID NO: 27299 - DNA, 20 bp, synthetic construct
  misc_feature 1..20: note = Description of Artificial Sequence: Synthetic oligonucleotide
  misc_feature 1..20: note = Target: SCN10A; (+) strand; PAM type: NRG; PAM sequence: CAG
  source 1..20: mol_type = other DNA
atcatctgctttaatagaac

SEQ ID NO: 27300 - DNA, 20 bp, synthetic construct
  misc_feature 1..20: note = Description of Artificial Sequence: Synthetic oligonucleotide
  misc_feature 1..20: note = Target: SCN10A; (+) strand; PAM type: NRG; PAM sequence: TGG
  source 1..20: mol_type = other DNA
ctttaatagaaccagtctga

SEQ ID NO: 27301 - DNA, 20 bp, synthetic construct
  misc_feature 1..20: note = Description of Artificial Sequence: Synthetic oligonucleotide
  misc_feature 1..20: note = Target: SCN10A; (+) strand; PAM type: NRG; PAM sequence: TGG
  source 1..20: mol_type = other DNA
atagaaccagtctgatggtt

SEQ ID NO: 27302 - DNA, 20 bp, synthetic construct
  misc_feature 1..20: note = Description of Artificial Sequence: Synthetic oligonucleotide
  misc_feature 1..20: note = Target: SCN10A; (+) strand; PAM type: NRG; PAM sequence: TAG
  source 1..20: mol_type = other DNA
gcccaaactctctgtccact

SEQ ID NO: 27303 - DNA, 20 bp, synthetic construct
  misc_feature 1..20: note = Description of Artificial Sequence: Synthetic oligonucleotide
  misc_feature 1..20: note = Target: SCN10A; (+) strand; PAM type: NRG; PAM sequence: TGG
  source 1..20: mol_type = other DNA
ttagctgtcttataaacact

SEQ ID NO: 27304 - DNA, 20 bp, synthetic construct
  misc_feature 1..20: note = Description of Artificial Sequence: Synthetic oligonucleotide
  misc_feature 1..20: note = Target: SCN10A; (+) strand; PAM type: NRG; PAM sequence: GGG
  source 1..20: mol_type = other DNA
tagctgtcttataaacactt

SEQ ID NO: 27305 - DNA, 20 bp, synthetic construct
  misc_feature 1..20: note = Description of Artificial Sequence: Synthetic oligonucleotide
  misc_feature 1..20: note = Target: SCN10A; (+) strand; PAM type: NRG; PAM sequence: TAG
  source 1..20: mol_type = other DNA
tgtcttataaacacttgggc

SEQ ID NO: 27306 - DNA, 20 bp, synthetic construct
  misc_feature 1..20: note = Description of Artificial Sequence: Synthetic oligonucleotide
  misc_feature 1..20: note = Target: SCN10A; (+) strand; PAM type: NRG; PAM sequence: CAG
  source 1..20: mol_type = other DNA
aaacacttgggctagtatct

SEQ ID NO: 27307 - DNA, 20 bp, synthetic construct
  misc_feature 1..20: note = Description of Artificial Sequence: Synthetic oligonucleotide
  misc_feature 1..20: note = Target: SCN10A; (+) strand; PAM type: NRG; PAM sequence: TGG
  source 1..20: mol_type = other DNA
acttgggctagtatctcaga

SEQ ID NO: 27308 - DNA, 20 bp, synthetic construct
  misc_feature 1..20: note = Description of Artificial Sequence: Synthetic oligonucleotide
  misc_feature 1..20: note = Target: SCN10A; (+) strand; PAM type: NRG; PAM sequence: TGG
  source 1..20: mol_type = other DNA
tggctttttcatcatccaca

SEQ ID NO: 27309 - DNA, 20 bp, synthetic construct
  misc_feature 1..20: note = Description of Artificial Sequence: Synthetic oligonucleotide
  misc_feature 1..20: note = Target: SCN10A; (+) strand; PAM type: NRG; PAM sequence: GGG
  source 1..20: mol_type = other DNA
ggctttttcatcatccacat

SEQ ID NO: 27310 - DNA, 20 bp, synthetic construct
  misc_feature 1..20: note = Description of Artificial Sequence: Synthetic oligonucleotide
  misc_feature 1..20: note = Target: SCN10A; (+) strand; PAM type: NRG; PAM sequence: TAG
  source 1..20: mol_type = other DNA
ttcatcatccacatgggatt

SEQ ID NO: 27311 - DNA, 20 bp, synthetic construct
  misc_feature 1..20: note = Description of Artificial Sequence: Synthetic oligonucleotide
  misc_feature 1..20: note = Target: SCN10A; (+) strand; PAM type: NRG; PAM sequence: AAG
  source 1..20: mol_type = other DNA
cacatgggatttagacgttg

SEQ ID NO: 27312 - DNA, 20 bp, synthetic construct
  misc_feature 1..20: note = Description of Artificial Sequence: Synthetic oligonucleotide
  misc_feature 1..20: note = Target: SCN10A; (+) strand; PAM type: NRG; PAM sequence: AAG
  source 1..20: mol_type = other DNA
atgggatttagacgttgaag

SEQ ID NO: 27313 - DNA, 20 bp, synthetic construct
  misc_feature 1..20: note = Description of Artificial Sequence: Synthetic oligonucleotide
  misc_feature 1..20: note = Target: SCN10A; (+) strand; PAM type: NRG; PAM sequence: CAG
  source 1..20: mol_type = other DNA
tagacgttgaagaagctgca

SEQ ID NO: 27314 - DNA, 20 bp, synthetic construct
  misc_feature 1..20: note = Description of Artificial Sequence: Synthetic oligonucleotide
  misc_feature 1..20: note = Target: SCN10A; (+) strand; PAM type: NRG; PAM sequence: CAG
  source 1..20: mol_type = other DNA
cgttgaagaagctgcacagt

SEQ ID NO: 27315 - DNA, 20 bp, synthetic construct
  misc_feature 1..20: note = Description of Artificial Sequence: Synthetic oligonucleotide
  misc_feature 1..20: note = Target: SCN10A; (+) strand; PAM type: NRG; PAM sequence: CGG
  source 1..20: mol_type = other DNA
acagtcagtatctgtgctcc

SEQ ID NO: 27316 - DNA, 20 bp, synthetic construct
  misc_feature 1..20: note = Description of Artificial Sequence: Synthetic oligonucleotide
  misc_feature 1..20: note = Target: SCN10A; (+) strand; PAM type: NRG; PAM sequence: GGG
  source 1..20: mol_type = other DNA
cagtcagtatctgtgctccc

SEQ ID NO: 27317 - DNA, 20 bp, synthetic construct
  misc_feature 1..20: note = Description of Artificial Sequence: Synthetic oligonucleotide
  misc_feature 1..20: note = Target: SCN10A; (+) strand; PAM type: NRG; PAM sequence: CAG
  source 1..20: mol_type = other DNA
agtatctgtgctcccgggtt

SEQ ID NO: 27318 - DNA, 20 bp, synthetic construct
  misc_feature 1..20: note = Description of Artificial Sequence: Synthetic oligonucleotide
  misc_feature 1..20: note = Target: SCN10A; (+) strand; PAM type: NRG; PAM sequence: TGG
  source 1..20: mol_type = other DNA
atctgtgctcccgggttcag

SEQ ID NO: 27319 - DNA, 20 bp, synthetic construct
  misc_feature 1..20: note = Description of Artificial Sequence: Synthetic oligonucleotide
  misc_feature 1..20: note = Target: SCN10A; (+) strand; PAM type: NRG; PAM sequence: GAG
  source 1..20: mol_type = other DNA
gctcccgggttcagtggtac

SEQ ID NO: 27320 - DNA, 20 bp, synthetic construct
  misc_feature 1..20: note = Description of Artificial Sequence: Synthetic oligonucleotide
  misc_feature 1..20: note = Target: SCN10A; (+) strand; PAM type: NRG; PAM sequence: GAG
  source 1..20: mol_type = other DNA
tcccgggttcagtggtacga

SEQ ID NO: 27321 - DNA, 20 bp, synthetic construct
  misc_feature 1..20: note = Description of Artificial Sequence: Synthetic oligonucleotide
  misc_feature 1..20: note = Target: SCN10A; (+) strand; PAM type: NRG; PAM sequence: GAG
  source 1..20: mol_type = other DNA
ccgggttcagtggtacgaga

SEQ ID NO: 27322 - DNA, 20 bp, synthetic construct
  misc_feature 1..20: note = Description of Artificial Sequence: Synthetic oligonucleotide
  misc_feature 1..20: note = Target: SCN10A; (+) strand; PAM type: NRG; PAM sequence: AGG
  source 1..20: mol_type = other DNA
cgggttcagtggtacgagag

SEQ ID NO: 27323 - DNA, 20 bp, synthetic construct
  misc_feature 1..20: note = Description of Artificial Sequence: Synthetic oligonucleotide
  misc_feature 1..20: note = Target: SCN10A; (+) strand; PAM type: NRG; PAM sequence: AAG
  source 1..20: mol_type = other DNA
gttcagtggtacgagagagg

SEQ ID NO: 27324 - DNA, 20 bp, synthetic construct
  misc_feature 1..20: note = Description of Artificial Sequence: Synthetic oligonucleotide
  misc_feature 1..20: note = Target: SCN10A; (+) strand; PAM type: NRG; PAM sequence: GAG
  source 1..20: mol_type = other DNA
tcagtggtacgagagaggaa

SEQ ID NO: 27325 - DNA, 20 bp, synthetic construct
  misc_feature 1..20: note = Description of Artificial Sequence: Synthetic oligonucleotide
  misc_feature 1..20: note = Target: SCN10A; (+) strand; PAM type: NRG; PAM sequence: TGG
  source 1..20: mol_type = other DNA
acgagagaggaagagttatt

SEQ ID NO: 27326 - DNA, 20 bp, synthetic construct
  misc_feature 1..20: note = Description of Artificial Sequence: Synthetic oligonucleotide
  misc_feature 1..20: note = Target: SCN10A; (+) strand; PAM type: NRG; PAM sequence: TAG
  source 1..20: mol_type = other DNA
atttggttgaactcatcttt

SEQ ID NO: 27327 - DNA, 20 bp, synthetic construct
  misc_feature 1..20: note = Description of Artificial Sequence: Synthetic oligonucleotide
  misc_feature 1..20: note = Target: SCN10A; (+) strand; PAM type: NRG; PAM sequence: CAG
  source 1..20: mol_type = other DNA
actcatcttttagaataaat

SEQ ID NO: 27328 - DNA, 20 bp, synthetic construct
  misc_feature 1..20: note = Description of Artificial Sequence: Synthetic oligonucleotide
  misc_feature 1..20: note = Target: SCN10A; (+) strand; PAM type: NRG; PAM sequence: AGG
  source 1..20: mol_type = other DNA
ctcatcttttagaataaatc

SEQ ID NO: 27329 - DNA, 20 bp, synthetic construct
  misc_feature 1..20: note = Description of Artificial Sequence: Synthetic oligonucleotide
  misc_feature 1..20: note = Target: SCN10A; (+) strand; PAM type: NRG; PAM sequence: CAG
  source 1..20: mol_type = other DNA
tttagaataaatcaggcatt

SEQ ID NO: 27330 - DNA, 20 bp, synthetic construct
  misc_feature 1..20: note = Description of Artificial Sequence: Synthetic oligonucleotide
  misc_feature 1..20: note = Target: SCN10A; (+) strand; PAM type: NRG; PAM sequence: GAG
  source 1..20: mol_type = other DNA
tagaataaatcaggcattca

SEQ ID NO: 27331 - DNA, 20 bp, synthetic construct
  misc_feature 1..20: note = Description of Artificial Sequence: Synthetic oligonucleotide
  misc_feature 1..20: note = Target: SCN10A; (+) strand; PAM type: NRG; PAM sequence: TAG
  source 1..20: mol_type = other DNA
taaatcaggcattcagagaa

SEQ ID NO: 27332 - DNA, 20 bp, synthetic construct
  misc_feature 1..20: note = Description of Artificial Sequence: Synthetic oligonucleotide
  misc_feature 1..20: note = Target: SCN10A; (+) strand; PAM type: NRG; PAM sequence: GAG
  source 1..20: mol_type = other DNA
attcagagaatagctgattt

SEQ ID NO: 27333 - DNA, 20 bp, synthetic construct
  misc_feature 1..20: note = Description of Artificial Sequence: Synthetic oligonucleotide
  misc_feature 1..20: note = Target: SCN10A; (+) strand; PAM type: NRG; PAM sequence: TGG
  source 1..20: mol_type = other DNA
agagaatagctgatttgaga

SEQ ID NO: 27334 - DNA, 20 bp, synthetic construct
  misc_feature 1..20: note = Description of Artificial Sequence: Synthetic oligonucleotide
  misc_feature 1..20: note = Target: SCN10A; (+) strand; PAM type: NRG; PAM sequence: TGG
  source 1..20: mol_type = other DNA
atagctgatttgagatggct

SEQ ID NO: 27335 - DNA, 20 bp, synthetic construct
  misc_feature 1..20: note = Description of Artificial Sequence: Synthetic oligonucleotide
  misc_feature 1..20: note = Target: SCN10A; (+) strand; PAM type: NRG; PAM sequence: TGG
  source 1..20: mol_type = other DNA
atcttattaacctgcatctg

SEQ ID NO: 27336 - DNA, 20 bp, synthetic construct
  misc_feature 1..20: note = Description of Artificial Sequence: Synthetic oligonucleotide
  misc_feature 1..20: note = Target: SCN10A; (+) strand; PAM type: NRG; PAM sequence: CAG
  source 1..20: mol_type = other DNA
ctgtggatgctgccaactcc

SEQ ID NO: 27337 - DNA, 20 bp, synthetic construct
  misc_feature 1..20: note = Description of Artificial Sequence: Synthetic oligonucleotide
  misc_feature 1..20: note = Target: SCN10A; (+) strand; PAM type: NRG; PAM sequence: AAG
  source 1..20: mol_type = other DNA
ggatgctgccaactcccagt

SEQ ID NO: 27338 - DNA, 20 bp, synthetic construct
  misc_feature 1..20: note = Description of Artificial Sequence: Synthetic oligonucleotide
  misc_feature 1..20: note = Target: SCN10A; (+) strand; PAM type: NRG; PAM sequence: GAG
  source 1..20: mol_type = other DNA
caactcccagtaagcatctt

SEQ ID NO: 27339 - DNA, 20 bp, synthetic construct
  misc_feature 1..20: note = Description of Artificial Sequence: Synthetic oligonucleotide
  misc_feature 1..20: note = Target: SCN10A; (+) strand; PAM type: NRG; PAM sequence: GAG
  source 1..20: mol_type = other DNA
actcccagtaagcatcttga

SEQ ID NO: 27340 - DNA, 20 bp, synthetic construct
  misc_feature 1..20: note = Description of Artificial Sequence: Synthetic oligonucleotide
  misc_feature 1..20: note = Target: SCN10A; (+) strand; PAM type: NRG; PAM sequence: TGG
  source 1..20: mol_type = other DNA
agagcctctttgacttctta

SEQ ID NO: 27341 - DNA, 20 bp, synthetic construct
  misc_feature 1..20: note = Description of Artificial Sequence: Synthetic oligonucleotide
  misc_feature 1..20: note = Target: SCN10A; (+) strand; PAM type: NRG; PAM sequence: GGG
  source 1..20: mol_type = other DNA
gagcctctttgacttcttat

SEQ ID NO: 27342 - DNA, 20 bp, synthetic construct
  misc_feature 1..20: note = Description of Artificial Sequence: Synthetic oligonucleotide
  misc_feature 1..20: note = Target: SCN10A; (+) strand; PAM type: NRG; PAM sequence: TAG
  source 1..20: mol_type = other DNA
tttgacttcttatgggctaa

SEQ ID NO: 27343 - DNA, 20 bp, synthetic construct
  misc_feature 1..20: note = Description of Artificial Sequence: Synthetic oligonucleotide
  misc_feature 1..20: note = Target: SCN10A; (+) strand; PAM type: NRG; PAM sequence: CAG
  source 1..20: mol_type = other DNA
ttcttatgggctaatagtga

SEQ ID NO: 27344 - DNA, 20 bp, synthetic construct
  misc_feature 1..20: note = Description of Artificial Sequence: Synthetic oligonucleotide
  misc_feature 1..20: note = Target: SCN10A; (+) strand; PAM type: NRG; PAM sequence: AAG
  source 1..20: mol_type = other DNA
atgggctaatagtgacagaa

SEQ ID NO: 27345 - DNA, 20 bp, synthetic construct
  misc_feature 1..20: note = Description of Artificial Sequence: Synthetic oligonucleotide
  misc_feature 1..20: note = Target: SCN10A; (+) strand; PAM type: NRG; PAM sequence: AGG
  source 1..20: mol_type = other DNA
tgggctaatagtgacagaaa

SEQ ID NO: 27346 - DNA, 20 bp, synthetic construct
  misc_feature 1..20: note = Description of Artificial Sequence: Synthetic oligonucleotide
  misc_feature 1..20: note = Target: SCN10A; (+) strand; PAM type: NRG; PAM sequence: GGG
  source 1..20: mol_type = other DNA
gggctaatagtgacagaaaa

SEQ ID NO: 27347 - DNA, 20 bp, synthetic construct
  misc_feature 1..20: note = Description of Artificial Sequence: Synthetic oligonucleotide
  misc_feature 1..20: note = Target: SCN10A; (+) strand; PAM type: NRG; PAM sequence: GAG
  source 1..20: mol_type = other DNA
gctaatagtgacagaaaagg

SEQ ID NO: 27348 - DNA, 20 bp, synthetic construct
  misc_feature 1..20: note = Description of Artificial Sequence: Synthetic oligonucleotide
  misc_feature 1..20: note = Target: SCN10A; (+) strand; PAM type: NRG; PAM sequence: GAG
  source 1..20: mol_type = other DNA
taatagtgacagaaaaggga

SEQ ID NO: 27349 - DNA, 20 bp, synthetic construct
  misc_feature 1..20: note = Description of Artificial Sequence: Synthetic oligonucleotide
  misc_feature 1..20: note = Target: SCN10A; (+) strand; PAM type: NRG; PAM sequence: AAG
  source 1..20: mol_type = other DNA
agtgacagaaaagggagagc

SEQ ID NO: 27350 - DNA, 20 bp, synthetic construct
  misc_feature 1..20: note = Description of Artificial Sequence: Synthetic oligonucleotide
  misc_feature 1..20: note = Target: SCN10A; (+) strand; PAM type: NRG; PAM sequence: AGG
  source 1..20: mol_type = other DNA
gtgacagaaaagggagagca

SEQ ID NO: 27351 - DNA, 20 bp, synthetic construct
  misc_feature 1..20: note = Description of Artificial Sequence: Synthetic oligonucleotide
  misc_feature 1..20: note = Target: SCN10A; (+) strand; PAM type: NRG; PAM sequence: CGG
  source 1..20: mol_type = other DNA
gaaaagggagagcaaggcct

SEQ ID NO: 27352 - DNA, 20 bp, synthetic construct
  misc_feature 1..20: note = Description of Artificial Sequence: Synthetic oligonucleotide
  misc_feature 1..20: note = Target: SCN10A; (+) strand; PAM type: NRG; PAM sequence: GAG
  source 1..20: mol_type = other DNA
ctcggcaaatctgtattctt

SEQ ID NO: 27353 - DNA, 20 bp, synthetic construct
  misc_feature 1..20: note = Description of Artificial Sequence: Synthetic oligonucleotide
  misc_feature 1..20: note = Target: SCN10A; (+) strand; PAM type: NRG; PAM sequence: AGG
  source 1..20: mol_type = other DNA
tcggcaaatctgtattcttg

SEQ ID NO: 27354 - DNA, 20 bp, synthetic construct
  misc_feature 1..20: note = Description of Artificial Sequence: Synthetic oligonucleotide
  misc_feature 1..20: note = Target: SCN10A; (+) strand; PAM type: NRG; PAM sequence: GAG
  source 1..20: mol_type = other DNA
tctgtattcttgaggcatgt

SEQ ID NO: 27355 - DNA, 20 bp, synthetic construct
  misc_feature 1..20: note = Description of Artificial Sequence: Synthetic oligonucleotide
  misc_feature 1..20: note = Target: SCN10A; (+) strand; PAM type: NRG; PAM sequence: CAG
  source 1..20: mol_type = other DNA
ttgaggcatgtgagatgtat

SEQ ID NO: 27356 - DNA, 20 bp, synthetic construct
  misc_feature 1..20: note = Description of Artificial Sequence: Synthetic oligonucleotide
  misc_feature 1..20: note = Target: SCN10A; (+) strand; PAM type: NRG; PAM sequence: TGG
  source 1..20: mol_type = other DNA
gtgctttgtaattatacaaa

SEQ ID NO: 27357 - DNA, 20 bp, synthetic construct
  misc_feature 1..20: note = Description of Artificial Sequence: Synthetic oligonucleotide
  misc_feature 1..20: note = Target: SCN10A; (+) strand; PAM type: NRG; PAM sequence: TAG
  source 1..20: mol_type = other DNA
ttatgaaatgatcaaatata

SEQ ID NO: 27358 - DNA, 20 bp, synthetic construct
  misc_feature 1..20: note = Description of Artificial Sequence: Synthetic oligonucleotide
  misc_feature 1..20: note = Target: SCN10A; (+) strand; PAM type: NRG; PAM sequence: TGG
  source 1..20: mol_type = other DNA
caaatatatagacaatgaat

SEQ ID NO: 27359 - DNA, 20 bp, synthetic construct
  misc_feature 1..20: note = Description of Artificial Sequence: Synthetic oligonucleotide
  misc_feature 1..20: note = Target: SCN10A; (+) strand; PAM type: NRG; PAM sequence: TGG
  source 1..20: mol_type = other DNA
tatttgaatctttgtgattg

SEQ ID NO: 27360 - DNA, 20 bp, synthetic construct
  misc_feature 1..20: note = Description of Artificial Sequence: Synthetic oligonucleotide
  misc_feature 1..20: note = Target: SCN10A; (+) strand; PAM type: NRG; PAM sequence: TGG
  source 1..20: mol_type = other DNA
tgaatctttgtgattgtggc

SEQ ID NO: 27361 - DNA, 20 bp, synthetic construct
  misc_feature 1..20: note = Description of Artificial Sequence: Synthetic oligonucleotide
  misc_feature 1..20: note = Target: SCN10A; (+) strand; PAM type: NRG; PAM sequence: GGG
  source 1..20: mol_type = other DNA
gaatctttgtgattgtggct

SEQ ID NO: 27362 - DNA, 20 bp, synthetic construct
  misc_feature 1..20: note = Description of Artificial Sequence: Synthetic oligonucleotide
  misc_feature 1..20: note = Target: SCN10A; (+) strand; PAM type: NRG; PAM sequence: TGG
  source 1..20: mol_type = other DNA
tttgtgattgtggctgggaa

SEQ ID NO: 27363 - DNA, 20 bp, synthetic construct
  misc_feature 1..20: note = Description of Artificial Sequence: Synthetic oligonucleotide
  misc_feature 1..20: note = Target: SCN10A; (+) strand; PAM type: NRG; PAM sequence: GGG
  source 1..20: mol_type = other DNA
ttgtgattgtggctgggaat

SEQ ID NO: 27364 - DNA, 20 bp, synthetic construct
  misc_feature 1..20: note = Description of Artificial Sequence: Synthetic oligonucleotide
  misc_feature 1..20: note = Target: SCN10A; (+) strand; PAM type: NRG; PAM sequence: AAG
  source 1..20: mol_type = other DNA
attgtggctgggaatgggcc

SEQ ID NO: 27365 - DNA, 20 bp, synthetic construct
  misc_feature 1..20: note = Description of Artificial Sequence: Synthetic oligonucleotide
  misc_feature 1..20: note = Target: SCN10A; (+) strand; PAM type: NRG; PAM sequence: GAG
  source 1..20: mol_type = other DNA
tgtggctgggaatgggccaa

SEQ ID NO: 27366 - DNA, 20 bp, synthetic construct
  misc_feature 1..20: note = Description of Artificial Sequence: Synthetic oligonucleotide
  misc_feature 1..20: note = Target: SCN10A; (+) strand; PAM type: NRG; PAM sequence: TGG
  source 1..20: mol_type = other DNA
gggaatgggccaagagttaa

SEQ ID NO: 27367 - DNA, 20 bp, synthetic construct
  misc_feature 1..20: note = Description of Artificial Sequence: Synthetic oligonucleotide
  misc_feature 1..20: note = Target: SCN10A; (+) strand; PAM type: NRG; PAM sequence: AAG
  source 1..20: mol_type = other DNA
aatgggccaagagttaatgg

SEQ ID NO: 27368 - DNA, 20 bp, synthetic construct
  misc_feature 1..20: note = Description of Artificial Sequence: Synthetic oligonucleotide
  misc_feature 1..20: note = Target: SCN10A; (+) strand; PAM type: NRG; PAM sequence: TAG
  source 1..20: mol_type = other DNA
ccctatgtcctatgttgtta

SEQ ID NO: 27369 - DNA, 20 bp, synthetic construct
  misc_feature 1..20: note = Description of Artificial Sequence: Synthetic oligonucleotide
  misc_feature 1..20: note = Target: SCN10A; (+) strand; PAM type: NRG; PAM sequence: AGG
  source 1..20: mol_type = other DNA
cctatgtcctatgttgttat

SEQ ID NO: 27370 - DNA, 20 bp, synthetic construct
  misc_feature 1..20: note = Description of Artificial Sequence: Synthetic oligonucleotide
  misc_feature 1..20: note = Target: SCN10A; (+) strand; PAM type: NRG; PAM sequence: GGG
  source 1..20: mol_type = other DNA
ctatgtcctatgttgttata

SEQ ID NO: 27371 - DNA, 20 bp, synthetic construct
  misc_feature 1..20: note = Description of Artificial Sequence: Synthetic oligonucleotide
  misc_feature 1..20: note = Target: SCN10A; (+) strand; PAM type: NRG; PAM sequence: GAG
  source 1..20: mol_type = other DNA
atgtcctatgttgttatagg

SEQ ID NO: 27372 - DNA, 20 bp, synthetic construct
  misc_feature 1..20: note = Description of Artificial Sequence: Synthetic oligonucleotide
  misc_feature 1..20: note = Target: SCN10A; (+) strand; PAM type: NRG; PAM sequence: TGG
  source 1..20: mol_type = other DNA
caaaatctgcaacatgcctt

SEQ ID NO: 27373 - DNA, 20 bp, synthetic construct
  misc_feature 1..20: note = Description of Artificial Sequence: Synthetic oligonucleotide
  misc_feature 1..20: note = Target: SCN10A; (+) strand; PAM type: NRG; PAM sequence: CAG
  source 1..20: mol_type = other DNA
ctgacaattcttactccatt

SEQ ID NO: 27374 - DNA, 20 bp, synthetic construct
  misc_feature 1..20: note = Description of Artificial Sequence: Synthetic oligonucleotide
  misc_feature 1..20: note = Target: SCN10A; (+) strand; PAM type: NRG; PAM sequence: TGG
  source 1..20: mol_type = other DNA
agttcatacaattaatcttt

SEQ ID NO: 27375 - DNA, 20 bp, synthetic construct
  misc_feature 1..20: note = Description of Artificial Sequence: Synthetic oligonucleotide
  misc_feature 1..20: note = Target: SCN10A; (+) strand; PAM type: NRG; PAM sequence: GGG
  source 1..20: mol_type = other DNA
gttcatacaattaatctttt

SEQ ID NO: 27376 - DNA, 20 bp, synthetic construct
  misc_feature 1..20: note = Description of Artificial Sequence: Synthetic oligonucleotide
  misc_feature 1..20: note = Target: SCN10A; (+) strand; PAM type: NRG; PAM sequence: GGG
  source 1..20: mol_type = other DNA
ttcatacaattaatcttttg

SEQ ID NO: 27377 - DNA, 20 bp, synthetic construct
  misc_feature 1..20: note = Description of Artificial Sequence: Synthetic oligonucleotide
  misc_feature 1..20: note = Target: SCN10A; (+) strand; PAM type: NRG; PAM sequence: GGG
  source 1..20: mol_type = other DNA
tcatacaattaatcttttgg

SEQ ID NO: 27378 - DNA, 20 bp, synthetic construct
  misc_feature 1..20: note = Description of Artificial Sequence: Synthetic oligonucleotide
  misc_feature 1..20: note = Target: SCN10A; (+) strand; PAM type: NRG; PAM sequence: TGG
  source 1..20: mol_type = other DNA
cctattttatctcttgttct

SEQ ID NO: 27379 - DNA, 20 bp, synthetic construct
  misc_feature 1..20: note = Description of Artificial Sequence: Synthetic oligonucleotide
  misc_feature 1..20: note = Target: SCN10A; (+) strand; PAM type: NRG; PAM sequence: GAG
  source 1..20: mol_type = other DNA
tattttatctcttgttcttg

SEQ ID NO: 27380 - DNA, 20 bp, synthetic construct
  misc_feature 1..20: note = Description of Artificial Sequence: Synthetic oligonucleotide
  misc_feature 1..20: note = Target: SCN10A; (+) strand; PAM type: NRG; PAM sequence: CAG
  source 1..20: mol_type = other DNA
tttatctcttgttcttggag

SEQ ID NO: 27381 - DNA, 20 bp, synthetic construct
  misc_feature 1..20: note = Description of Artificial Sequence: Synthetic oligonucleotide
  misc_feature 1..20: note = Target: SCN10A; (+) strand; PAM type: NRG; PAM sequence: TAG
  source 1..20: mol_type = other DNA
ttggagcagtgcccatcata

SEQ ID NO: 27382 - DNA, 20 bp, synthetic construct
  misc_feature 1..20: note = Description of Artificial Sequence: Synthetic oligonucleotide
  misc_feature 1..20: note = Target: SCN10A; (+) strand; PAM type: NRG; PAM sequence: CAG
  source 1..20: mol_type = other DNA
tacgtaattaataacatttg

SEQ ID NO: 27383 - DNA, 20 bp, synthetic construct
  misc_feature 1..20: note = Description of Artificial Sequence: Synthetic oligonucleotide
  misc_feature 1..20: note = Target: SCN10A; (+) strand; PAM type: NRG; PAM sequence: AGG
  source 1..20: mol_type = other DNA
acgtaattaataacatttgc

SEQ ID NO: 27384 - DNA, 20 bp, synthetic construct
  misc_feature 1..20: note = Description of Artificial Sequence: Synthetic oligonucleotide
  misc_feature 1..20: note = Target: SCN10A; (+) strand; PAM type: NRG; PAM sequence: AAG
  source 1..20: mol_type = other DNA
aacatttgcaggatgaatga

SEQ ID NO: 27385 - DNA, 20 bp, synthetic construct
  misc_feature 1..20: note = Description of Artificial Sequence: Synthetic oligonucleotide
  misc_feature 1..20: note = Target: SCN10A; (+) strand; PAM type: NRG; PAM sequence: TGG
  source 1..20: mol_type = other DNA
ggatgaatgaaagaaactac

SEQ ID NO: 27386 - DNA, 20 bp, synthetic construct
  misc_feature 1..20: note = Description of Artificial Sequence: Synthetic oligonucleotide
  misc_feature 1..20: note = Target: SCN10A; (+) strand; PAM type: NRG; PAM sequence: TGG
  source 1..20: mol_type = other DNA
tggccataccttttatctac

SEQ ID NO: 27387 - DNA, 20 bp, synthetic construct
  misc_feature 1..20: note = Description of Artificial Sequence: Synthetic oligonucleotide
  misc_feature 1..20: note = Target: SCN10A; (+) strand; PAM type: NRG; PAM sequence: TGG
  source 1..20: mol_type = other DNA
tcttctgattatattaacta

SEQ ID NO: 27388 - DNA, 20 bp, synthetic construct
  misc_feature 1..20: note = Description of Artificial Sequence: Synthetic oligonucleotide
  misc_feature 1..20: note = Target: SCN10A; (+) strand; PAM type: NRG; PAM sequence: GAG
  source 1..20: mol_type = other DNA
ttctgattatattaactatg

SEQ ID NO: 27389 - DNA, 20 bp, synthetic construct
  misc_feature 1..20: note = Description of Artificial Sequence: Synthetic oligonucleotide
  misc_feature 1..20: note = Target: SCN10A; (+) strand; PAM type: NRG; PAM sequence: TGG
  source 1..20: mol_type = other DNA
ttatattaactatggagttc

SEQ ID NO: 27390 - DNA, 20 bp, synthetic construct
  misc_feature 1..20: note = Description of Artificial Sequence: Synthetic oligonucleotide
  misc_feature 1..20: note = Target: SCN10A; (+) strand; PAM type: NRG; PAM sequence: CAG
  source 1..20: mol_type = other DNA
aactatggagttctggacgc

SEQ ID NO: 27391 - DNA, 20 bp, synthetic construct
  misc_feature 1..20: note = Description of Artificial Sequence: Synthetic oligonucleotide
  misc_feature 1..20: note = Target: SCN10A; (+) strand; PAM type: NRG; PAM sequence: AGG
  source 1..20: mol_type = other DNA
actatggagttctggacgcc

SEQ ID NO: 27392 - DNA, 20 bp, synthetic construct
  misc_feature 1..20: note = Description of Artificial Sequence: Synthetic oligonucleotide
  misc_feature 1..20: note = Target: SCN10A; (+) strand; PAM type: NRG; PAM sequence: GAG
  source 1..20: mol_type = other DNA
cctccttaatgtctgattat

SEQ ID NO: 27393 - DNA, 20 bp, synthetic construct
  misc_feature 1..20: note = Description of Artificial Sequence: Synthetic oligonucleotide
  misc_feature 1..20: note = Target: SCN10A; (+) strand; PAM type: NRG; PAM sequence: CAG
  source 1..20: mol_type = other DNA
gtctgattatgagatgtgaa

SEQ ID NO: 27394 - DNA, 20 bp, synthetic construct
  misc_feature 1..20: note = Description of Artificial Sequence: Synthetic oligonucleotide
  misc_feature 1..20: note = Target: SCN10A; (+) strand; PAM type: NRG; PAM sequence: TGG
  source 1..20: mol_type = other DNA
tatgagatgtgaacagactc

SEQ ID NO: 27395 - DNA, 20 bp, synthetic construct
  misc_feature 1..20: note = Description of Artificial Sequence: Synthetic oligonucleotide
  misc_feature 1..20: note = Target: SCN10A; (+) strand; PAM type: NRG; PAM sequence: AAG
  source 1..20: mol_type = other DNA
agactctggaatgtattcaa

SEQ ID NO: 27396 - DNA, 20 bp, synthetic construct
  misc_feature 1..20: note = Description of Artificial Sequence: Synthetic oligonucleotide
  misc_feature 1..20: note = Target: SCN10A; (+) strand; PAM type: NRG; PAM sequence: TAG
  source 1..20: mol_type = other DNA
gtattcaaaagctgcctctt

SEQ ID NO: 27397 - DNA, 20 bp, synthetic construct
  misc_feature 1..20: note = Description of Artificial Sequence: Synthetic oligonucleotide
  misc_feature 1..20: note = Target: SCN10A; (+) strand; PAM type: NRG; PAM sequence: CAG
  source 1..20: mol_type = other DNA
ctgcctctttagctacacaa

SEQ ID NO: 27398 - DNA, 20 bp, synthetic construct
  misc_feature 1..20: note = Description of Artificial Sequence: Synthetic oligonucleotide
  misc_feature 1..20: note = Target: SCN10A; (+) strand; PAM type: NRG; PAM sequence: AAG
  source 1..20: mol_type = other DNA
ctctttagctacacaacaga

SEQ ID NO: 27399 - DNA, 20 bp, synthetic construct
  misc_feature 1..20: note = Description of Artificial Sequence: Synthetic oligonucleotide
  misc_feature 1..20: note = Target: SCN10A; (+) strand; PAM type: NRG; PAM sequence: AGG
  source 1..20: mol_type = other DNA
tctttagctacacaacagaa

SEQ ID NO: 27400 - DNA, 20 bp, synthetic construct
  misc_feature 1..20: note = Description of Artificial Sequence: Synthetic oligonucleotide
  misc_feature 1..20: note = Target: SCN10A; (+) strand; PAM type: NRG; PAM sequence: CAG
  source 1..20: mol_type = other DNA
agctacacaacagaaaggtc

SEQ ID NO: 27401 - DNA, 20 bp, synthetic construct
  misc_feature 1..20: note = Description of Artificial Sequence: Synthetic oligonucleotide
  misc_feature 1..20: note = Target: SCN10A; (+) strand; PAM type: NRG; PAM sequence: CAG
  source 1..20: mol_type = other DNA
acagaaaggtccagccattt

SEQ ID NO: 27402 - DNA, 20 bp, synthetic construct
  misc_feature 1..20: note = Description of Artificial Sequence: Synthetic oligonucleotide
  misc_feature 1..20: note = Target: SCN10A; (+) strand; PAM type: NRG; PAM sequence: CAG
  source 1..20: mol_type = other DNA
aggtccagccatttcagcct

SEQ ID NO: 27403 - DNA, 20 bp, synthetic construct
  misc_feature 1..20: note = Description of Artificial Sequence: Synthetic oligonucleotide
  misc_feature 1..20: note = Target: SCN10A; (+) strand; PAM type: NRG; PAM sequence: AAG
  source 1..20: mol_type = other DNA
cagccatttcagcctcagaa

SEQ ID NO: 27404 - DNA, 20 bp, synthetic construct
  misc_feature 1..20: note = Description of Artificial Sequence: Synthetic oligonucleotide
  misc_feature 1..20: note = Target: SCN10A; (+) strand; PAM type: NRG; PAM sequence: GAG
  source 1..20: mol_type = other DNA
gccatttcagcctcagaaaa

SEQ ID NO: 27405 - DNA, 20 bp, synthetic construct
  misc_feature 1..20: note = Description of Artificial Sequence: Synthetic oligonucleotide
  misc_feature 1..20: note = Target: SCN10A; (+) strand; PAM type: NRG; PAM sequence: TGG
  source 1..20: mol_type = other DNA
gagtgcttttcccatataaa

SEQ ID NO: 27406 - DNA, 20 bp, synthetic construct
  misc_feature 1..20: note = Description of Artificial Sequence: Synthetic oligonucleotide
  misc_feature 1..20: note = Target: SCN10A; (+) strand; PAM type: NRG; PAM sequence: GGG
  source 1..20: mol_type = other DNA
agtgcttttcccatataaat

SEQ ID NO: 27407 - DNA, 20 bp, synthetic construct
  misc_feature 1..20: note = Description of Artificial Sequence: Synthetic oligonucleotide
  misc_feature 1..20: note = Target: SCN10A; (+) strand; PAM type: NRG; PAM sequence: GGG
  source 1..20: mol_type = other DNA
gtgcttttcccatataaatg

SEQ ID NO: 27408 - DNA, 20 bp, synthetic construct
  misc_feature 1..20: note = Description of Artificial Sequence: Synthetic oligonucleotide
  misc_feature 1..20: note = Target: SCN10A; (+) strand; PAM type: NRG; PAM sequence: CAG
  source 1..20: mol_type = other DNA
cttttcccatataaatgggg

SEQ ID NO: 27409 - DNA, 20 bp, synthetic construct
  misc_feature 1..20: note = Description of Artificial Sequence: Synthetic oligonucleotide
  misc_feature 1..20: note = Target: SCN10A; (+) strand; PAM type: NRG; PAM sequence: AGG
  source 1..20: mol_type = other DNA
ttttcccatataaatggggc

SEQ ID NO: 27410 - DNA, 20 bp, synthetic construct
  misc_feature 1..20: note = Description of Artificial Sequence: Synthetic oligonucleotide
  misc_feature 1..20: note = Target: SCN10A; (+) strand; PAM type: NRG; PAM sequence: TGG
  source 1..20: mol_type = other DNA
tataaatggggcaggcacca

SEQ ID NO: 27411 - DNA, 20 bp, synthetic construct
  misc_feature 1..20: note = Description of Artificial Sequence: Synthetic oligonucleotide
  misc_feature 1..20: note = Target: SCN10A; (+) strand; PAM type: NRG; PAM sequence: GAG
  source 1..20: mol_type = other DNA
taaatggggcaggcaccatg

SEQ ID NO: 27412 - DNA, 20 bp, synthetic construct
  misc_feature 1..20: note = Description of Artificial Sequence: Synthetic oligonucleotide
  misc_feature 1..20: note = Target: SCN10A; (+) strand; PAM type: NRG; PAM sequence: CAG
  source 1..20: mol_type = other DNA
gcaggcaccatggagttcta

SEQ ID NO: 27413 - DNA, 20 bp, synthetic construct
  misc_feature 1..20: note = Description of Artificial Sequence: Synthetic oligonucleotide
  misc_feature 1..20: note = Target: SCN10A; (+) strand; PAM type: NRG; PAM sequence: GAG
  source 1..20: mol_type = other DNA
accatggagttctacagcac

SEQ ID NO: 27414 - DNA, 20 bp, synthetic construct
  misc_feature 1..20: note = Description of Artificial Sequence: Synthetic oligonucleotide
  misc_feature 1..20: note = Target: SCN10A; (+) strand; PAM type: NRG; PAM sequence: AAG
  source 1..20: mol_type = other DNA
gttctacagcacgagatgcg

SEQ ID NO: 27415 - DNA, 20 bp, synthetic construct
  misc_feature 1..20: note = Description of Artificial Sequence: Synthetic oligonucleotide
  misc_feature 1..20: note = Target: SCN10A; (+) strand; PAM type: NRG; PAM sequence: TAG
  source 1..20: mol_type = other DNA
agcacgagatgcgaagtcta

SEQ ID NO: 27416 - DNA, 20 bp, synthetic construct
  misc_feature 1..20: note = Description of Artificial Sequence: Synthetic oligonucleotide
  misc_feature 1..20: note = Target: SCN10A; (+) strand; PAM type: NRG; PAM sequence: AAG
  source 1..20: mol_type = other DNA
cgagatgcgaagtctataga

SEQ ID NO: 27417 - DNA, 20 bp, synthetic construct
  misc_feature 1..20: note = Description of Artificial Sequence: Synthetic oligonucleotide
  misc_feature 1..20: note = Target: SCN10A; (+) strand; PAM type: NRG; PAM sequence: AAG
  source 1..20: mol_type = other DNA
tcccttcccaccaattttac

SEQ ID NO: 27418 - DNA, 20 bp, synthetic construct
  misc_feature 1..20: note = Description of Artificial Sequence: Synthetic oligonucleotide
  misc_feature 1..20: note = Target: SCN10A; (+) strand; PAM type: NRG; PAM sequence: GAG
  source 1..20: mol_type = other DNA
ttcccaccaattttacaagt

SEQ ID NO: 27419 - DNA, 20 bp, synthetic construct
  misc_feature 1..20: note = Description of Artificial Sequence: Synthetic oligonucleotide
  misc_feature 1..20: note = Target: SCN10A; (+) strand; PAM type: NRG; PAM sequence: AGG
  source 1..20: mol_type = other DNA
tcccaccaattttacaagtg

SEQ ID NO: 27420 - DNA, 20 bp, synthetic construct
  misc_feature 1..20: note = Description of Artificial Sequence: Synthetic oligonucleotide
  misc_feature 1..20: note = Target: SCN10A; (+) strand; PAM type: NRG; PAM sequence: AAG
  source 1..20: mol_type = other DNA
ttttacaagtgaggaaattg

SEQ ID NO: 27421 - DNA, 20 bp, synthetic construct
  misc_feature 1..20: note = Description of Artificial Sequence: Synthetic oligonucleotide
  misc_feature 1..20: note = Target: SCN10A; (+) strand; PAM type: NRG; PAM sequence: AAG
  source 1..20: mol_type = other DNA
caagtgaggaaattgaagtt

SEQ ID NO: 27422 - DNA, 20 bp, synthetic construct
  misc_feature 1..20: note = Description of Artificial Sequence: Synthetic oligonucleotide
  misc_feature 1..20: note = Target: SCN10A; (+) strand; PAM type: NRG; PAM sequence: GAG
  source 1..20: mol_type = other DNA
agtgaggaaattgaagttaa

SEQ ID NO: 27423 - DNA, 20 bp, synthetic construct
  misc_feature 1..20: note = Description of Artificial Sequence: Synthetic oligonucleotide
  misc_feature 1..20: note = Target: SCN10A; (+) strand; PAM type: NRG; PAM sequence: AGG
  source 1..20: mol_type = other DNA
gtgaggaaattgaagttaag

SEQ ID NO: 27424 - DNA, 20 bp, synthetic construct
  misc_feature 1..20: note = Description of Artificial Sequence: Synthetic oligonucleotide
  misc_feature 1..20: note = Target: SCN10A; (+) strand; PAM type: NRG; PAM sequence: GGG
  source 1..20: mol_type = other DNA
tgaggaaattgaagttaaga

SEQ ID NO: 27425 - DNA, 20 bp, synthetic construct
  misc_feature 1..20: note = Description of Artificial Sequence: Synthetic oligonucleotide
  misc_feature 1..20: note = Target: SCN10A; (+) strand; PAM type: NRG; PAM sequence: GGG
  source 1..20: mol_type = other DNA
gaggaaattgaagttaagag

SEQ ID NO: 27426 - DNA, 20 bp, synthetic construct
  misc_feature 1..20: note = Description of Artificial Sequence: Synthetic oligonucleotide
  misc_feature 1..20: note = Target: SCN10A; (+) strand; PAM type: NRG; PAM sequence: AAG
  source 1..20: mol_type = other DNA
aaattgaagttaagagggga

SEQ ID NO: 27427 - DNA, 20 bp, synthetic construct
  misc_feature 1..20: note = Description of Artificial Sequence: Synthetic oligonucleotide
  misc_feature 1..20: note = Target: SCN10A; (+) strand; PAM type: NRG; PAM sequence: TAG
  source 1..20: mol_type = other DNA
agttaagaggggaaagactt

SEQ ID NO: 27428 - DNA, 20 bp, synthetic construct
  misc_feature 1..20: note = Description of Artificial Sequence: Synthetic oligonucleotide
  misc_feature 1..20: note = Target: SCN10A; (+) strand; PAM type: NRG; PAM sequence: TGG
  source 1..20: mol_type = other DNA
gaggggaaagactttagccc

SEQ ID NO: 27429 - DNA, 20 bp, synthetic construct
  misc_feature 1..20: note = Description of Artificial Sequence: Synthetic oligonucleotide
  misc_feature 1..20: note = Target: SCN10A; (+) strand; PAM type: NRG; PAM sequence: CAG
  source 1..20: mol_type = other DNA
ggaaagactttagccctggt

SEQ ID NO: 27430 - DNA, 20 bp, synthetic construct
  misc_feature 1..20: note = Description of Artificial Sequence: Synthetic oligonucleotide
  misc_feature 1..20: note = Target: SCN10A; (+) strand; PAM type: NRG; PAM sequence: CAG
  source 1..20: mol_type = other DNA
agactttagccctggtcagc

SEQ ID NO: 27431 - DNA, 20 bp, synthetic construct
  misc_feature 1..20: note = Description of Artificial Sequence: Synthetic oligonucleotide
  misc_feature 1..20: note = Target: SCN10A; (+) strand; PAM type: NRG; PAM sequence: TGG
  source 1..20: mol_type = other DNA
gccctggtcagccagacaat

SEQ ID NO: 27432 - DNA, 20 bp, synthetic construct
  misc_feature 1..20: note = Description of Artificial Sequence: Synthetic oligonucleotide
  misc_feature 1..20: note = Target: SCN10A; (+) strand; PAM type: NRG; PAM sequence: TGG
  source 1..20: mol_type = other DNA
ctggtcagccagacaattgg

SEQ ID NO: 27433 - DNA, 20 bp, synthetic construct
  misc_feature 1..20: note = Description of Artificial Sequence: Synthetic oligonucleotide
  misc_feature 1..20: note = Target: SCN10A; (+) strand; PAM type: NRG; PAM sequence: AAG
  source 1..20: mol_type = other DNA
cagccagacaattggtggaa

SEQ ID NO: 27434 - DNA, 20 bp, synthetic construct
  misc_feature 1..20: note = Description of Artificial Sequence: Synthetic oligonucleotide
  misc_feature 1..20: note = Target: SCN10A; (+) strand; PAM type: NRG; PAM sequence: TAG
  source 1..20: mol_type = other DNA
cagacaattggtggaaaagt

SEQ ID NO: 27435 - DNA, 20 bp, synthetic construct
  misc_feature 1..20: note = Description of Artificial Sequence: Synthetic oligonucleotide
  misc_feature 1..20: note = Target: SCN10A; (+) strand; PAM type: NRG; PAM sequence: AGG
  source 1..20: mol_type = other DNA
agacaattggtggaaaagtt

SEQ ID NO: 27436 - DNA, 20 bp, synthetic construct
  misc_feature 1..20: note = Description of Artificial Sequence: Synthetic oligonucleotide
  misc_feature 1..20: note = Target: SCN10A; (+) strand; PAM type: NRG; PAM sequence: TGG
  source 1..20: mol_type = other DNA
ggaaaagttaggattccaac

SEQ ID NO: 27437 - DNA, 20 bp, synthetic construct
  misc_feature 1..20: note = Description of Artificial Sequence: Synthetic oligonucleotide
  misc_feature 1..20: note = Target: SCN10A; (+) strand; PAM type: NRG; PAM sequence: CAG
  source 1..20: mol_type = other DNA
aggattccaactggcatttc

SEQ ID NO: 27438 - DNA, 20 bp, synthetic construct
  misc_feature 1..20: note = Description of Artificial Sequence: Synthetic oligonucleotide
  misc_feature 1..20: note = Target: SCN10A; (+) strand; PAM type: NRG; PAM sequence: CAG
  source 1..20: mol_type = other DNA
caactggcatttccagatcc

SEQ ID NO: 27439 - DNA, 20 bp, synthetic construct
  misc_feature 1..20: note = Description of Artificial Sequence: Synthetic oligonucleotide
  misc_feature 1..20: note = Target: SCN10A; (+) strand; PAM type: NRG; PAM sequence: AGG
  source 1..20: mol_type = other DNA
aactggcatttccagatccc

SEQ ID NO: 27440 - DNA, 20 bp, synthetic construct
  misc_feature 1..20: note = Description of Artificial Sequence: Synthetic oligonucleotide
  misc_feature 1..20: note = Target: SCN10A; (+) strand; PAM type: NRG; PAM sequence: CAG
  source 1..20: mol_type = other DNA
ggcatttccagatcccagga

SEQ ID NO: 27441 - DNA, 20 bp, synthetic construct
  misc_feature 1..20: note = Description of Artificial Sequence: Synthetic oligonucleotide
  misc_feature 1..20: note = Target: SCN10A; (+) strand; PAM type: NRG; PAM sequence: CAG
  source 1..20: mol_type = other DNA
gtgctctttcctgctccacc

SEQ ID NO: 27442 - DNA, 20 bp, synthetic construct
  misc_feature 1..20: note = Description of Artificial Sequence: Synthetic oligonucleotide
  misc_feature 1..20: note = Target: SCN10A; (+) strand; PAM type: NRG; PAM sequence: CAG
  source 1..20: mol_type = other DNA
aatctcaaactgaaaaatat

SEQ ID NO: 27443 - DNA, 20 bp, synthetic construct
  misc_feature 1..20: note = Description of Artificial Sequence: Synthetic oligonucleotide
  misc_feature 1..20: note = Target: SCN10A; (+) strand; PAM type: NRG; PAM sequence: AGG
  source 1..20: mol_type = other DNA
atctcaaactgaaaaatatc

SEQ ID NO: 27444 - DNA, 20 bp, synthetic construct
  misc_feature 1..20: note = Description of Artificial Sequence: Synthetic oligonucleotide
  misc_feature 1..20: note = Target: SCN10A; (+) strand; PAM type: NRG; PAM sequence: CAG
  source 1..20: mol_type = other DNA
actgaaaaatatcaggatcc

SEQ ID NO: 27445 - DNA, 20 bp, synthetic construct
  misc_feature 1..20: note = Description of Artificial Sequence: Synthetic oligonucleotide
  misc_feature 1..20: note = Target: SCN10A; (+) strand; PAM type: NRG; PAM sequence: AAG
  source 1..20: mol_type = other DNA
aaaaatatcaggatcccaga

SEQ ID NO: 27446 - DNA, 20 bp, synthetic construct
  misc_feature 1..20: note = Description of Artificial Sequence: Synthetic oligonucleotide
  misc_feature 1..20: note = Target: SCN10A; (+) strand; PAM type: NRG; PAM sequence: GAG
  source 1..20: mol_type = other DNA
atatcaggatcccagaaagt

SEQ ID NO: 27447 - DNA, 20 bp, synthetic construct
  misc_feature 1..20: note = Description of Artificial Sequence: Synthetic oligonucleotide
  misc_feature 1..20: note = Target: SCN10A; (+) strand; PAM type: NRG; PAM sequence: AGG
  source 1..20: mol_type = other DNA
tatcaggatcccagaaagtg

SEQ ID NO: 27448 - DNA, 20 bp, synthetic construct
  misc_feature 1..20: note = Description of Artificial Sequence: Synthetic oligonucleotide
  misc_feature 1..20: note = Target: SCN10A; (+) strand; PAM type: NRG; PAM sequence: GGG
  source 1..20: mol_type = other DNA
atcaggatcccagaaagtga

SEQ ID NO: 27449 - DNA, 20 bp, synthetic construct
  misc_feature 1..20: note = Description of Artificial Sequence: Synthetic oligonucleotide
  misc_feature 1..20: note = Target: SCN10A; (+) strand; PAM type: NRG; PAM sequence: GGG
  source 1..20: mol_type = other DNA
tcaggatcccagaaagtgag

SEQ ID NO: 27450 - DNA, 20 bp, synthetic construct
  misc_feature 1..20: note = Description of Artificial Sequence: Synthetic oligonucleotide
  misc_feature 1..20: note = Target: SCN10A; (+) strand; PAM type: NRG; PAM sequence: AAG
  source 1..20: mol_type = other DNA
gatcccagaaagtgaggggt

SEQ ID NO: 27451 - DNA, 20 bp, synthetic construct
  misc_feature 1..20: note = Description of Artificial Sequence: Synthetic oligonucleotide
  misc_feature 1..20: note = Target: SCN10A; (+) strand; PAM type: NRG; PAM sequence: CAG
  source 1..20: mol_type = other DNA
ggggtaagtgactcatgata

SEQ ID NO: 27452 - DNA, 20 bp, synthetic construct
  misc_feature 1..20: note = Description of Artificial Sequence: Synthetic oligonucleotide
  misc_feature 1..20: note = Target: SCN10A; (+) strand; PAM type: NRG; PAM sequence: AGG
  source 1..20: mol_type = other DNA
gggtaagtgactcatgatac

SEQ ID NO: 27453 - DNA, 20 bp, synthetic construct
  misc_feature 1..20: note = Description of Artificial Sequence: Synthetic oligonucleotide
  misc_feature 1..20: note = Target: SCN10A; (+) strand; PAM type: NRG; PAM sequence: CAG
  source 1..20: mol_type = other DNA
aagtgactcatgatacaggt

SEQ ID NO: 27454 - DNA, 20 bp, synthetic construct
  misc_feature 1..20: note = Description of Artificial Sequence: Synthetic oligonucleotide
  misc_feature 1..20: note = Target: SCN10A; (+) strand; PAM type: NRG; PAM sequence: CAG
  source 1..20: mol_type = other DNA
catgatacaggtcagcatca

SEQ ID NO: 27455 - DNA, 20 bp, synthetic construct
  misc_feature 1..20: note = Description of Artificial Sequence: Synthetic oligonucleotide
  misc_feature 1..20: note = Target: SCN10A; (+) strand; PAM type: NRG; PAM sequence: AAG
  source 1..20: mol_type = other DNA
caggtcagcatcacagaaat

SEQ ID NO: 27456 - DNA, 20 bp, synthetic construct
  misc_feature 1..20: note = Description of Artificial Sequence: Synthetic oligonucleotide
  misc_feature 1..20: note = Target: SCN10A; (+) strand; PAM type: NRG; PAM sequence: GAG
  source 1..20: mol_type = other DNA
ggtcagcatcacagaaataa

SEQ ID NO: 27457 - DNA, 20 bp, synthetic construct
  misc_feature 1..20: note = Description of Artificial Sequence: Synthetic oligonucleotide
  misc_feature 1..20: note = Target: SCN10A; (+) strand; PAM type: NRG; PAM sequence: TGG
  source 1..20: mol_type = other DNA
gatgctttatgatataacgc

SEQ ID NO: 27458 - DNA, 20 bp, synthetic construct
  misc_feature 1..20: note = Description of Artificial Sequence: Synthetic oligonucleotide
  misc_feature 1..20: note = Target: SCN10A; (+) strand; PAM type: NRG; PAM sequence: TGG
  source 1..20: mol_type = other DNA
tttatgatataacgctggtg

SEQ ID NO: 27459 - DNA, 20 bp, synthetic construct
  misc_feature 1..20: note = Description of Artificial Sequence: Synthetic oligonucleotide
  misc_feature 1..20: note = Target: SCN10A; (+) strand; PAM type: NRG; PAM sequence: TGG
  source 1..20: mol_type = other DNA
tttaaaaatattaattttaa

SEQ ID NO: 27460 - DNA, 20 bp, synthetic construct
  misc_feature 1..20: note = Description of Artificial Sequence: Synthetic oligonucleotide
  misc_feature 1..20: note = Target: SCN10A; (+) strand; PAM type: NRG; PAM sequence: AAG
  source 1..20: mol_type = other DNA
taattttaatggatatctca

SEQ ID NO: 27461 - DNA, 20 bp, synthetic construct
  misc_feature 1..20: note = Description of Artificial Sequence: Synthetic oligonucleotide
  misc_feature 1..20: note = Target: SCN10A; (+) strand; PAM type: NRG; PAM sequence: AGG
  source 1..20: mol_type = other DNA
aattttaatggatatctcaa

SEQ ID NO: 27462 - DNA, 20 bp, synthetic construct
  misc_feature 1..20: note = Description of Artificial Sequence: Synthetic oligonucleotide
  misc_feature 1..20: note = Target: SCN10A; (+) strand; PAM type: NRG; PAM sequence: TAG
  source 1..20: mol_type = other DNA
ctcaaaggcttttcatgaca

SEQ ID NO: 27463 - DNA, 20 bp, synthetic construct
  misc_feature 1..20: note = Description of Artificial Sequence: Synthetic oligonucleotide
  misc_feature 1..20: note = Target: SCN10A; (+) strand; PAM type: NRG; PAM sequence: AGG
  source 1..20: mol_type = other DNA
tcaaaggcttttcatgacat

SEQ ID NO: 27464 - DNA, 20 bp, synthetic construct
  misc_feature 1..20: note = Description of Artificial Sequence: Synthetic oligonucleotide
  misc_feature 1..20: note = Target: SCN10A; (+) strand; PAM type: NRG; PAM sequence: CAG
  source 1..20: mol_type = other DNA
gcttttcatgacataggcca

SEQ ID NO: 27465 - DNA, 20 bp, synthetic construct
  misc_feature 1..20: note = Description of Artificial Sequence: Synthetic oligonucleotide
  misc_feature 1..20: note = Target: SCN10A; (+) strand; PAM type: NRG; PAM sequence: AGG
  source 1..20: mol_type = other DNA
cttttcatgacataggccac

SEQ ID NO: 27466 - DNA, 20 bp, synthetic construct
  misc_feature 1..20: note = Description of Artificial Sequence: Synthetic oligonucleotide
  misc_feature 1..20: note = Target: SCN10A; (+) strand; PAM type: NRG; PAM sequence: TGG
  source 1..20: mol_type = other DNA
ataggccacaggtgttaccc

SEQ ID NO: 27467 - DNA, 20 bp, synthetic construct
  misc_feature 1..20: note = Description of Artificial Sequence: Synthetic oligonucleotide
  misc_feature 1..20: note = Target: SCN10A; (+) strand; PAM type: NRG; PAM sequence: GGG
  source 1..20: mol_type = other DNA
taggccacaggtgttaccct

SEQ ID NO: 27468 - DNA, 20 bp, synthetic construct
  misc_feature 1..20: note = Description of Artificial Sequence: Synthetic oligonucleotide
  misc_feature 1..20: note = Target: SCN10A; (+) strand; PAM type: NRG; PAM sequence: CAG
  source 1..20: mol_type = other DNA
ccacaggtgttaccctgggt

SEQ ID NO: 27469 - DNA, 20 bp, synthetic construct
  misc_feature 1..20: note = Description of Artificial Sequence: Synthetic oligonucleotide
  misc_feature 1..20: note = Target: SCN10A; (+) strand; PAM type: NRG; PAM sequence: GAG
  source 1..20: mol_type = other DNA
acaggtgttaccctgggtca

SEQ ID NO: 27470 - DNA, 20 bp, synthetic construct
  misc_feature 1..20: note = Description of Artificial Sequence: Synthetic oligonucleotide
  misc_feature 1..20: note = Target: SCN10A; (+) strand; PAM type: NRG; PAM sequence: CAG
  source 1..20: mol_type = other DNA
ggtgttaccctgggtcagag

SEQ ID NO: 27471 - DNA, 20 bp, synthetic construct
  misc_feature 1..20: note = Description of Artificial Sequence: Synthetic oligonucleotide
  misc_feature 1..20: note = Target: SCN10A; (+) strand; PAM type: NRG; PAM sequence: CAG
  source 1..20: mol_type = other DNA
gggtcagagcagttgtccga

SEQ ID NO: 27472 - DNA, 20 bp, synthetic construct
  misc_feature 1..20: note = Description of Artificial Sequence: Synthetic oligonucleotide
  misc_feature 1..20: note = Target: SCN10A; (+) strand; PAM type: NRG; PAM sequence: CAG
  source 1..20: mol_type = other DNA
tgtccgacagctctcacatg

SEQ ID NO: 27473 - DNA, 20 bp, synthetic construct
  misc_feature 1..20: note = Description of Artificial Sequence: Synthetic oligonucleotide
  misc_feature 1..20: note = Target: SCN10A; (+) strand; PAM type: NRG; PAM sequence: TGG
  source 1..20: mol_type = other DNA
taatattgccaatctctgta

SEQ ID NO: 27474 - DNA, 20 bp, synthetic construct
  misc_feature 1..20: note = Description of Artificial Sequence: Synthetic oligonucleotide
  misc_feature 1..20: note = Target: SCN10A; (+) strand; PAM type: NRG; PAM sequence: CAG
  source 1..20: mol_type = other DNA
aatctctgtatggtgctcca

SEQ ID NO: 27475 - DNA, 20 bp, synthetic construct
  misc_feature 1..20: note = Description of Artificial Sequence: Synthetic oligonucleotide
  misc_feature 1..20: note = Target: SCN10A; (+) strand; PAM type: NRG; PAM sequence: GAG
  source 1..20: mol_type = other DNA
tctctgtatggtgctccaca

SEQ ID NO: 27476 - DNA, 20 bp, synthetic construct
  misc_feature 1..20: note = Description of Artificial Sequence: Synthetic oligonucleotide
  misc_feature 1..20: note = Target: SCN10A; (+) strand; PAM type: NRG; PAM sequence: AGG
  source 1..20: mol_type = other DNA
ctctgtatggtgctccacag

SEQ ID NO: 27477 - DNA, 20 bp, synthetic construct
  misc_feature 1..20: note = Description of Artificial Sequence: Synthetic oligonucleotide
  misc_feature 1..20: note = Target: SCN10A; (+) strand; PAM type: NRG; PAM sequence: TGG
  source 1..20: mol_type = other DNA
tgctccacagaggactacct

SEQ ID NO: 27478 - DNA, 20 bp, synthetic construct
  misc_feature 1..20: note = Description of Artificial Sequence: Synthetic oligonucleotide
  misc_feature 1..20: note = Target: SCN10A; (+) strand; PAM type: NRG; PAM sequence: CAG
  source 1..20: mol_type = other DNA
agaggactaccttggacctt

SEQ ID NO: 27479 - DNA, 20 bp, synthetic construct
  misc_feature 1..20: note = Description of Artificial Sequence: Synthetic oligonucleotide
  misc_feature 1..20: note = Target: SCN10A; (+) strand; PAM type: NRG; PAM sequence: TGG
  source 1..20: mol_type = other DNA
atgttcttgttctatatctt

SEQ ID NO: 27480 - DNA, 20 bp, synthetic construct
  misc_feature 1..20: note = Description of Artificial Sequence: Synthetic oligonucleotide
  misc_feature 1..20: note = Target: SCN10A; (+) strand; PAM type: NRG; PAM sequence: AAG
  source 1..20: mol_type = other DNA
ttcttgttctatatctttgg

SEQ ID NO: 27481 - DNA, 20 bp, synthetic construct
  misc_feature 1..20: note = Description of Artificial Sequence: Synthetic oligonucleotide
  misc_feature 1..20: note = Target: SCN10A; (+) strand; PAM type: NRG; PAM sequence: TGG
  source 1..20: mol_type = other DNA
ttctatatctttggaagttc

SEQ ID NO: 27482 - DNA, 20 bp, synthetic construct
  misc_feature 1..20: note = Description of Artificial Sequence: Synthetic oligonucleotide
  misc_feature 1..20: note = Target: SCN10A; (+) strand; PAM type: NRG; PAM sequence: GAG
  source 1..20: mol_type = other DNA
tctttggaagttctggtcct

SEQ ID NO: 27483 - DNA, 20 bp, synthetic construct
  misc_feature 1..20: note = Description of Artificial Sequence: Synthetic oligonucleotide
  misc_feature 1..20: note = Target: SCN10A; (+) strand; PAM type: NRG; PAM sequence: AAG
  source 1..20: mol_type = other DNA
ttggaagttctggtcctgag

SEQ ID NO: 27484 - DNA, 20 bp, synthetic construct
  misc_feature 1..20: note = Description of Artificial Sequence: Synthetic oligonucleotide
  misc_feature 1..20: note = Target: SCN10A; (+) strand; PAM type: NRG; PAM sequence: CAG
  source 1..20: mol_type = other DNA
tggtcctgagaagtttgtct

SEQ ID NO: 27485 - DNA, 20 bp, synthetic construct
  misc_feature 1..20: note = Description of Artificial Sequence: Synthetic oligonucleotide
  misc_feature 1..20: note = Target: SCN10A; (+) strand; PAM type: NRG; PAM sequence: AAG
  source 1..20: mol_type = other DNA
tctgattacaacaaaaataa

SEQ ID NO: 27486 - DNA, 20 bp, synthetic construct
  misc_feature 1..20: note = Description of Artificial Sequence: Synthetic oligonucleotide
  misc_feature 1..20: note = Target: SCN10A; (+) strand; PAM type: NRG; PAM sequence: AGG
  source 1..20: mol_type = other DNA
ctgattacaacaaaaataaa

SEQ ID NO: 27487 - DNA, 20 bp, synthetic construct
  misc_feature 1..20: note = Description of Artificial Sequence: Synthetic oligonucleotide
  misc_feature 1..20: note = Target: SCN10A; (+) strand; PAM type: NRG; PAM sequence: AAG
  source 1..20: mol_type = other DNA
tacaacaaaaataaaaggac

SEQ ID NO: 27488 - DNA, 20 bp, synthetic construct
  misc_feature 1..20: note = Description of Artificial Sequence: Synthetic oligonucleotide
  misc_feature 1..20: note = Target: SCN10A; (+) strand; PAM type: NRG; PAM sequence: AGG
  source 1..20: mol_type = other DNA
acaacaaaaataaaaggaca

SEQ ID NO: 27489 - DNA, 20 bp, synthetic construct
  misc_feature 1..20: note = Description of Artificial Sequence: Synthetic oligonucleotide
  misc_feature 1..20: note = Target: SCN10A; (+) strand; PAM type: NRG; PAM sequence: GGG
  source 1..20: mol_type = other DNA
caacaaaaataaaaggacaa

SEQ ID NO: 27490 - DNA, 20 bp, synthetic construct
  misc_feature 1..20: note = Description of Artificial Sequence: Synthetic oligonucleotide
  misc_feature 1..20: note = Target: SCN10A; (+) strand; PAM type: NRG; PAM sequence: TGG
  source 1..20: mol_type = other DNA
aaaggacaagggatattttc

SEQ ID NO: 27491 - DNA, 20 bp, synthetic construct
  misc_feature 1..20: note = Description of Artificial Sequence: Synthetic oligonucleotide
  misc_feature 1..20: note = Target: SCN10A; (+) strand; PAM type: NRG; PAM sequence: GAG
  source 1..20: mol_type = other DNA
aggacaagggatattttctg

SEQ ID NO: 27492 - DNA, 20 bp, synthetic construct
  misc_feature 1..20: note = Description of Artificial Sequence: Synthetic oligonucleotide
  misc_feature 1..20: note = Target: SCN10A; (+) strand; PAM type: NRG; PAM sequence: GAG
  source 1..20: mol_type = other DNA
gacaagggatattttctgga

SEQ ID NO: 27493 - DNA, 20 bp, synthetic construct
  misc_feature 1..20: note = Description of Artificial Sequence: Synthetic oligonucleotide
  misc_feature 1..20: note = Target: SCN10A; (+) strand; PAM type: NRG; PAM sequence: AAG
  source 1..20: mol_type = other DNA
agggatattttctggagagt

SEQ ID NO: 27494 - DNA, 20 bp, synthetic construct
  misc_feature 1..20: note = Description of Artificial Sequence: Synthetic oligonucleotide
  misc_feature 1..20: note = Target: SCN10A; (+) strand; PAM type: NRG; PAM sequence: GAG
  source 1..20: mol_type = other DNA
ggatattttctggagagtaa

SEQ ID NO: 27495 - DNA, 20 bp, synthetic construct
  misc_feature 1..20: note = Description of Artificial Sequence: Synthetic oligonucleotide
  misc_feature 1..20: note = Target: SCN10A; (+) strand; PAM type: NRG; PAM sequence: CAG
  source 1..20: mol_type = other DNA
catgatctgatattgaaatt

SEQ ID NO: 27496 - DNA, 20 bp, synthetic construct
  misc_feature 1..20: note = Description of Artificial Sequence: Synthetic oligonucleotide
  misc_feature 1..20: note = Target: SCN10A; (+) strand; PAM type: NRG; PAM sequence: AAG
  source 1..20: mol_type = other DNA
gatctgatattgaaattcag

SEQ ID NO: 27497 - DNA, 20 bp, synthetic construct
  misc_feature 1..20: note = Description of Artificial Sequence: Synthetic oligonucleotide
  misc_feature 1..20: note = Target: SCN10A; (+) strand; PAM type: NRG; PAM sequence: AGG
  source 1..20: mol_type = other DNA
atctgatattgaaattcaga

SEQ ID NO: 27498 - DNA, 20 bp, synthetic construct
  misc_feature 1..20: note = Description of Artificial Sequence: Synthetic oligonucleotide
  misc_feature 1..20: note = Target: SCN10A; (+) strand; PAM type: NRG; PAM sequence: GGG
  source 1..20: mol_type = other DNA
tctgatattgaaattcagaa

SEQ ID NO: 27499 - DNA, 20 bp, synthetic construct
  misc_feature 1..20: note = Description of Artificial Sequence: Synthetic oligonucleotide
  misc_feature 1..20: note = Target: SCN10A; (+) strand; PAM type: NRG; PAM sequence: CAG
  source 1..20: mol_type = other DNA
gaaattcagaagggaaatca

SEQ ID NO: 27500 - DNA, 20 bp, synthetic construct
  misc_feature 1..20: note = Description of Artificial Sequence: Synthetic oligonucleotide
  misc_feature 1..20: note = Target: SCN10A; (+) strand; PAM type: NRG; PAM sequence: TGG
  source 1..20: mol_type = other DNA
attcagaagggaaatcacag

SEQ ID NO: 27501 - DNA, 20 bp, synthetic construct
  misc_feature 1..20: note = Description of Artificial Sequence: Synthetic oligonucleotide
  misc_feature 1..20: note = Target: SCN10A; (+) strand; PAM type: NRG; PAM sequence: AAG
  source 1..20: mol_type = other DNA
cagaagggaaatcacagtgg

SEQ ID NO: 27502 - DNA, 20 bp, synthetic construct
  misc_feature 1..20: note = Description of Artificial Sequence: Synthetic oligonucleotide
  misc_feature 1..20: note = Target: SCN10A; (+) strand; PAM type: NRG; PAM sequence: TAG
  source 1..20: mol_type = other DNA
aatcacagtggaagtgctct

SEQ ID NO: 27503 - DNA, 20 bp, synthetic construct
  misc_feature 1..20: note = Description of Artificial Sequence: Synthetic oligonucleotide
  misc_feature 1..20: note = Target: SCN10A; (+) strand; PAM type: NRG; PAM sequence: TGG
  source 1..20: mol_type = other DNA
tgactcctatttgtgtatga

SEQ ID NO: 27504 - DNA, 20 bp, synthetic construct
  misc_feature 1..20: note = Description of Artificial Sequence: Synthetic oligonucleotide
  misc_feature 1..20: note = Target: SCN10A; (+) strand; PAM type: NRG; PAM sequence: AAG
  source 1..20: mol_type = other DNA
tgtgtatgatggttttttca

SEQ ID NO: 27505 - DNA, 20 bp, synthetic construct
  misc_feature 1..20: note = Description of Artificial Sequence: Synthetic oligonucleotide
  misc_feature 1..20: note = Target: SCN10A; (+) strand; PAM type: NRG; PAM sequence: AGG
  source 1..20: mol_type = other DNA
gtgtatgatggttttttcaa

SEQ ID NO: 27506 - DNA, 20 bp, synthetic construct
  misc_feature 1..20: note = Description of Artificial Sequence: Synthetic oligonucleotide
  misc_feature 1..20: note = Target: SCN10A; (+) strand; PAM type: NRG; PAM sequence: TGG
  source 1..20: mol_type = other DNA
tatgatggttttttcaaagg

SEQ ID NO: 27507 - DNA, 20 bp, synthetic construct
  misc_feature 1..20: note = Description of Artificial Sequence: Synthetic oligonucleotide
  misc_feature 1..20: note = Target: SCN10A; (+) strand; PAM type: NRG; PAM sequence: CAG
  source 1..20: mol_type = other DNA
gttttttcaaaggtggttac

SEQ ID NO: 27508 - DNA, 20 bp, synthetic construct
  misc_feature 1..20: note = Description of Artificial Sequence: Synthetic oligonucleotide
  misc_feature 1..20: note = Target: SCN10A; (+) strand; PAM type: NRG; PAM sequence: CAG
  source 1..20: mol_type = other DNA
taccagttgcattccctgcc

SEQ ID NO: 27509 - DNA, 20 bp, synthetic construct
  misc_feature 1..20: note = Description of Artificial Sequence: Synthetic oligonucleotide
  misc_feature 1..20: note = Target: SCN10A; (+) strand; PAM type: NRG; PAM sequence: CAG
  source 1..20: mol_type = other DNA
cccagttctgacattgtgac

SEQ ID NO: 27510 - DNA, 20 bp, synthetic construct
  misc_feature 1..20: note = Description of Artificial Sequence: Synthetic oligonucleotide
  misc_feature 1..20: note = Target: SCN10A; (+) strand; PAM type: NRG; PAM sequence: TGG
  source 1..20: mol_type = other DNA
agttctgacattgtgaccag

SEQ ID NO: 27511 - DNA, 20 bp, synthetic construct
  misc_feature 1..20: note = Description of Artificial Sequence: Synthetic oligonucleotide
  misc_feature 1..20: note = Target: SCN10A; (+) strand; PAM type: NRG; PAM sequence: TGG
  source 1..20: mol_type = other DNA
ttgtgaccagtggcatgcat

SEQ ID NO: 27512 - DNA, 20 bp, synthetic construct
  misc_feature 1..20: note = Description of Artificial Sequence: Synthetic oligonucleotide
  misc_feature 1..20: note = Target: SCN10A; (+) strand; PAM type: NRG; PAM sequence: GAG
  source 1..20: mol_type = other DNA
gaccagtggcatgcattggt

SEQ ID NO: 27513 - DNA, 20 bp, synthetic construct
  misc_feature 1..20: note = Description of Artificial Sequence: Synthetic oligonucleotide
  misc_feature 1..20: note = Target: SCN10A; (+) strand; PAM type: NRG; PAM sequence: AGG
  source 1..20: mol_type = other DNA
accagtggcatgcattggtg

SEQ ID NO: 27514 - DNA, 20 bp, synthetic construct
  misc_feature 1..20: note = Description of Artificial Sequence: Synthetic oligonucleotide
  misc_feature 1..20: note = Target: SCN10A; (+) strand; PAM type: NRG; PAM sequence: TAG
  source 1..20: mol_type = other DNA
ggcatgcattggtgaggctg

SEQ ID NO: 27515 - DNA, 20 bp, synthetic construct
  misc_feature 1..20: note = Description of Artificial Sequence: Synthetic oligonucleotide
  misc_feature 1..20: note = Target: SCN10A; (+) strand; PAM type: NRG; PAM sequence: TGG
  source 1..20: mol_type = other DNA
tgcattggtgaggctgtagc

SEQ ID NO: 27516 - DNA, 20 bp, synthetic construct
  misc_feature 1..20: note = Description of Artificial Sequence: Synthetic oligonucleotide
  misc_feature 1..20: note = Target: SCN10A; (+) strand; PAM type: NRG; PAM sequence: GGG
  source 1..20: mol_type = other DNA
gcattggtgaggctgtagct

SEQ ID NO: 27517 - DNA, 20 bp, synthetic construct
  misc_feature 1..20: note = Description of Artificial Sequence: Synthetic oligonucleotide
  misc_feature 1..20: note = Target: SCN10A; (+) strand; PAM type: NRG; PAM sequence: TGG
  source 1..20: mol_type = other DNA
tagctgggtgtgatctgcaa

SEQ ID NO: 27518 - DNA, 20 bp, synthetic construct
  misc_feature 1..20: note = Description of Artificial Sequence: Synthetic oligonucleotide
  misc_feature 1..20: note = Target: SCN10A; (+) strand; PAM type: NRG; PAM sequence: GGG
  source 1..20: mol_type = other DNA
agctgggtgtgatctgcaat

SEQ ID NO: 27519 - DNA, 20 bp, synthetic construct
  misc_feature 1..20: note = Description of Artificial Sequence: Synthetic oligonucleotide
  misc_feature 1..20: note = Target: SCN10A; (+) strand; PAM type: NRG; PAM sequence: AAG
  source 1..20: mol_type = other DNA
gggtgtgatctgcaatggga

SEQ ID NO: 27520 - DNA, 20 bp, synthetic construct
  misc_feature 1..20: note = Description of Artificial Sequence: Synthetic oligonucleotide
  misc_feature 1..20: note = Target: SCN10A; (+) strand; PAM type: NRG; PAM sequence: GAG
  source 1..20: mol_type = other DNA
gtgtgatctgcaatgggaaa

SEQ ID NO: 27521 - DNA, 20 bp, synthetic construct
  misc_feature 1..20: note = Description of Artificial Sequence: Synthetic oligonucleotide
  misc_feature 1..20: note = Target: SCN10A; (+) strand; PAM type: NRG; PAM sequence: CAG
  source 1..20: mol_type = other DNA
gcaatgggaaagagttaaca

SEQ ID NO: 27522 - DNA, 20 bp, synthetic construct
  misc_feature 1..20: note = Description of Artificial Sequence: Synthetic oligonucleotide
  misc_feature 1..20: note = Target: SCN10A; (+) strand; PAM type: NRG; PAM sequence: GAG
  source 1..20: mol_type = other DNA
aatgggaaagagttaacaca

SEQ ID NO: 27523 - DNA, 20 bp, synthetic construct
  misc_feature 1..20: note = Description of Artificial Sequence: Synthetic oligonucleotide
  misc_feature 1..20: note = Target: SCN10A; (+) strand; PAM type: NRG; PAM sequence: CAG
  source 1..20: mol_type = other DNA
gggaaagagttaacacagag

SEQ ID NO: 27524 - DNA, 20 bp, synthetic construct
  misc_feature 1..20: note = Description of Artificial Sequence: Synthetic oligonucleotide
  misc_feature 1..20: note = Target: SCN10A; (+) strand; PAM type: NRG; PAM sequence: AAG
  source 1..20: mol_type = other DNA
aaagagttaacacagagcag

SEQ ID NO: 27525 - DNA, 20 bp, synthetic construct
  misc_feature 1..20: note = Description of Artificial Sequence: Synthetic oligonucleotide
  misc_feature 1..20: note = Target: SCN10A; (+) strand; PAM type: NRG; PAM sequence: AGG
  source 1..20: mol_type = other DNA
aagagttaacacagagcaga

SEQ ID NO: 27526 - DNA, 20 bp, synthetic construct
  misc_feature 1..20: note = Description of Artificial Sequence: Synthetic oligonucleotide
  misc_feature 1..20: note = Target: SCN10A; (+) strand; PAM type: NRG; PAM sequence: CAG
  source 1..20: mol_type = other DNA
gcatcataactgaacatatc

SEQ ID NO: 27527 - DNA, 20 bp, synthetic construct
  misc_feature 1..20: note = Description of Artificial Sequence: Synthetic oligonucleotide
  misc_feature 1..20: note = Target: SCN10A; (+) strand; PAM type: NRG; PAM sequence: AGG
  source 1..20: mol_type = other DNA
catcataactgaacatatcc

SEQ ID NO: 27528 - DNA, 20 bp, synthetic construct
  misc_feature 1..20: note = Description of Artificial Sequence: Synthetic oligonucleotide
  misc_feature 1..20: note = Target: SCN10A; (+) strand; PAM type: NRG; PAM sequence: TGG
  source 1..20: mol_type = other DNA
ataactgaacatatccaggc

SEQ ID NO: 27529 - DNA, 20 bp, synthetic construct
  misc_feature 1..20: note = Description of Artificial Sequence: Synthetic oligonucleotide
  misc_feature 1..20: note = Target: SCN10A; (+) strand; PAM type: NRG; PAM sequence: GAG
  source 1..20: mol_type = other DNA
aactgaacatatccaggctg

SEQ ID NO: 27530 - DNA, 20 bp, synthetic construct
  misc_feature 1..20: note = Description of Artificial Sequence: Synthetic oligonucleotide
  misc_feature 1..20: note = Target: SCN10A; (+) strand; PAM type: NRG; PAM sequence: TAG
  source 1..20: mol_type = other DNA
ccaggctggagtgttctcac

SEQ ID NO: 27531 - DNA, 20 bp, synthetic construct
  misc_feature 1..20: note = Description of Artificial Sequence: Synthetic oligonucleotide
  misc_feature 1..20: note = Target: SCN10A; (+) strand; PAM type: NRG; PAM sequence: AGG
  source 1..20: mol_type = other DNA
caggctggagtgttctcact

SEQ ID NO: 27532 - DNA, 20 bp, synthetic construct
  misc_feature 1..20: note = Description of Artificial Sequence: Synthetic oligonucleotide
  misc_feature 1..20: note = Target: SCN10A; (+) strand; PAM type: NRG; PAM sequence: GGG
  source 1..20: mol_type = other DNA
aggctggagtgttctcacta

SEQ ID NO: 27533 - DNA, 20 bp, synthetic construct
  misc_feature 1..20: note = Description of Artificial Sequence: Synthetic oligonucleotide
  misc_feature 1..20: note = Target: SCN10A; (+) strand; PAM type: NRG; PAM sequence: CAG
  source 1..20: mol_type = other DNA
ggagtgttctcactagggcc

SEQ ID NO: 27534 - DNA, 20 bp, synthetic construct
  misc_feature 1..20: note = Description of Artificial Sequence: Synthetic oligonucleotide
  misc_feature 1..20: note = Target: SCN10A; (+) strand; PAM type: NRG; PAM sequence: AGG
  source 1..20: mol_type = other DNA
gagtgttctcactagggccc

SEQ ID NO: 27535 - DNA, 20 bp, synthetic construct
  misc_feature 1..20: note = Description of Artificial Sequence: Synthetic oligonucleotide
  misc_feature 1..20: note = Target: SCN10A; (+) strand; PAM type: NRG; PAM sequence: GGG
  source 1..20: mol_type = other DNA
agtgttctcactagggccca

SEQ ID NO: 27536 - DNA, 20 bp, synthetic construct
  misc_feature 1..20: note = Description of Artificial Sequence: Synthetic oligonucleotide
  misc_feature 1..20: note = Target: SCN10A; (+) strand; PAM type: NRG; PAM sequence: GGG
  source 1..20: mol_type = other DNA
gtgttctcactagggcccag

SEQ ID NO: 27537 - DNA, 20 bp, synthetic construct
  misc_feature 1..20: note = Description of Artificial Sequence: Synthetic oligonucleotide
  misc_feature 1..20: note = Target: SCN10A; (+) strand; PAM type: NRG; PAM sequence: CAG
  source 1..20: mol_type = other DNA
cactagggcccaggggcaat

SEQ ID NO: 27538 - DNA, 20 bp, synthetic construct
  misc_feature 1..20: note = Description of Artificial Sequence: Synthetic oligonucleotide
  misc_feature 1..20: note = Target: SCN10A; (+) strand; PAM type: NRG; PAM sequence: TGG
  source 1..20: mol_type = other DNA
aggggcaatcagctccatac

SEQ ID NO: 27539 - DNA, 20 bp, synthetic construct
  misc_feature 1..20: note = Description of Artificial Sequence: Synthetic oligonucleotide
  misc_feature 1..20: note = Target: SCN10A; (+) strand; PAM type: NRG; PAM sequence: TGG
  source 1..20: mol_type = other DNA
ggcaatcagctccatactgg

SEQ ID NO: 27540 - DNA, 20 bp, synthetic construct
  misc_feature 1..20: note = Description of Artificial Sequence: Synthetic oligonucleotide
  misc_feature 1..20: note = Target: SCN10A; (+) strand; PAM type: NRG; PAM sequence: GAG
  source 1..20: mol_type = other DNA
cttcatcttcattttgtatt

SEQ ID NO: 27541 - DNA, 20 bp, synthetic construct
  misc_feature 1..20: note = Description of Artificial Sequence: Synthetic oligonucleotide
  misc_feature 1..20: note = Target: SCN10A; (+) strand; PAM type: NRG; PAM sequence: TAG
  source 1..20: mol_type = other DNA
atcttcattttgtattgagc

SEQ ID NO: 27542 - DNA, 20 bp, synthetic construct
  misc_feature 1..20: note = Description of Artificial Sequence: Synthetic oligonucleotide
  misc_feature 1..20: note = Target: SCN10A; (+) strand; PAM type: NRG; PAM sequence: AAG
  source 1..20: mol_type = other DNA
ctcatgttgactctatcact

SEQ ID NO: 27543 - DNA, 20 bp, synthetic construct
  misc_feature 1..20: note = Description of Artificial Sequence: Synthetic oligonucleotide
  misc_feature 1..20: note = Target: SCN10A; (+) strand; PAM type: NRG; PAM sequence: AGG
  source 1..20: mol_type = other DNA
tcatgttgactctatcacta

SEQ ID NO: 27544 - DNA, 20 bp, synthetic construct
  misc_feature 1..20: note = Description of Artificial Sequence: Synthetic oligonucleotide
  misc_feature 1..20: note = Target: SCN10A; (+) strand; PAM type: NRG; PAM sequence: TAG
  source 1..20: mol_type = other DNA
gactctatcactaaggcctc

SEQ ID NO: 27545 - DNA, 20 bp, synthetic construct
  misc_feature 1..20: note = Description of Artificial Sequence: Synthetic oligonucleotide
  misc_feature 1..20: note = Target: SCN10A; (+) strand; PAM type: NRG; PAM sequence: TAG
  source 1..20: mol_type = other DNA
ggcctctagtgacactctca

SEQ ID NO: 27546 - DNA, 20 bp, synthetic construct
  misc_feature 1..20: note = Description of Artificial Sequence: Synthetic oligonucleotide
  misc_feature 1..20: note = Target: SCN10A; (+) strand; PAM type: NRG; PAM sequence: AGG
  source 1..20: mol_type = other DNA
gcctctagtgacactctcat

SEQ ID NO: 27547 - DNA, 20 bp, synthetic construct
  misc_feature 1..20: note = Description of Artificial Sequence: Synthetic oligonucleotide
  misc_feature 1..20: note = Target: SCN10A; (+) strand; PAM type: NRG; PAM sequence: CGG
  source 1..20: mol_type = other DNA
ctagtgacactctcatagga

SEQ ID NO: 27548 - DNA, 20 bp, synthetic construct
  misc_feature 1..20: note = Description of Artificial Sequence: Synthetic oligonucleotide
  misc_feature 1..20: note = Target: SCN10A; (+) strand; PAM type: NRG; PAM sequence: TGG
  source 1..20: mol_type = other DNA
gtgacactctcataggacgg

SEQ ID NO: 27549 - DNA, 20 bp, synthetic construct
  misc_feature 1..20: note = Description of Artificial Sequence: Synthetic oligonucleotide
  misc_feature 1..20: note = Target: SCN10A; (+) strand; PAM type: NRG; PAM sequence: GGG
  source 1..20: mol_type = other DNA
tgacactctcataggacggt

SEQ ID NO: 27550 - DNA, 20 bp, synthetic construct
  misc_feature 1..20: note = Description of Artificial Sequence: Synthetic oligonucleotide
  misc_feature 1..20: note = Target: SCN10A; (+) strand; PAM type: NRG; PAM sequence: TGG
  source 1..20: mol_type = other DNA
ataggacggtgggaatgatg

SEQ ID NO: 27551 - DNA, 20 bp, synthetic construct
  misc_feature 1..20: note = Description of Artificial Sequence: Synthetic oligonucleotide
  misc_feature 1..20: note = Target: SCN10A; (+) strand; PAM type: NRG; PAM sequence: CAG
  source 1..20: mol_type = other DNA
ggacggtgggaatgatgtgg

SEQ ID NO: 27552 - DNA, 20 bp, synthetic construct
  misc_feature 1..20: note = Description of Artificial Sequence: Synthetic oligonucleotide
  misc_feature 1..20: note = Target: SCN10A; (+) strand; PAM type: NRG; PAM sequence: AAG
  source 1..20: mol_type = other DNA
cggtgggaatgatgtggcag

SEQ ID NO: 27553 - DNA, 20 bp, synthetic construct
  misc_feature 1..20: note = Description of Artificial Sequence: Synthetic oligonucleotide
  misc_feature 1..20: note = Target: SCN10A; (+) strand; PAM type: NRG; PAM sequence: CAG
  source 1..20: mol_type = other DNA
tgggaatgatgtggcagaag

SEQ ID NO: 27554 - DNA, 20 bp, synthetic construct
  misc_feature 1..20: note = Description of Artificial Sequence: Synthetic oligonucleotide
  misc_feature 1..20: note = Target: SCN10A; (+) strand; PAM type: NRG; PAM sequence: CAG
  source 1..20: mol_type = other DNA
tgatgtggcagaagcagttt

SEQ ID NO: 27555 - DNA, 20 bp, synthetic construct
  misc_feature 1..20: note = Description of Artificial Sequence: Synthetic oligonucleotide
  misc_feature 1..20: note = Target: SCN10A; (+) strand; PAM type: NRG; PAM sequence: TGG
  source 1..20: mol_type = other DNA
gaagcagtttcagatttgtc

SEQ ID NO: 27556 - DNA, 20 bp, synthetic construct
  misc_feature 1..20: note = Description of Artificial Sequence: Synthetic oligonucleotide
  misc_feature 1..20: note = Target: SCN10A; (+) strand; PAM type: NRG; PAM sequence: GGG
  source 1..20: mol_type = other DNA
aagcagtttcagatttgtct

SEQ ID NO: 27557 - DNA, 20 bp, synthetic construct
  misc_feature 1..20: note = Description of Artificial Sequence: Synthetic oligonucleotide
  misc_feature 1..20: note = Target: SCN10A; (+) strand; PAM type: NRG; PAM sequence: GAG
  source 1..20: mol_type = other DNA
gcagtttcagatttgtctgg

SEQ ID NO: 27558 - DNA, 20 bp, synthetic construct
  misc_feature 1..20: note = Description of Artificial Sequence: Synthetic oligonucleotide
  misc_feature 1..20: note = Target: SCN10A; (+) strand; PAM type: NRG; PAM sequence: TGG
  source 1..20: mol_type = other DNA
aatgcaacaaaaccttcatc

SEQ ID NO: 27559 - DNA, 20 bp, synthetic construct
  misc_feature 1..20: note = Description of Artificial Sequence: Synthetic oligonucleotide
  misc_feature 1..20: note = Target: SCN10A; (+) strand; PAM type: NRG; PAM sequence: GGG
  source 1..20: mol_type = other DNA
atgcaacaaaaccttcatct

SEQ ID NO: 27560 - DNA, 20 bp, synthetic construct
  misc_feature 1..20: note = Description of Artificial Sequence: Synthetic oligonucleotide
  misc_feature 1..20: note = Target: SCN10A; (+) strand; PAM type: NRG; PAM sequence: GAG
  source 1..20: mol_type = other DNA
gcaacaaaaccttcatctgg

SEQ ID NO: 27561 - DNA, 20 bp, synthetic construct
  misc_feature 1..20: note = Description of Artificial Sequence: Synthetic oligonucleotide
  misc_feature 1..20: note = Target: SCN10A; (+) strand; PAM type: NRG; PAM sequence: CAG
  source 1..20: mol_type = other DNA
accttcatctgggagtgatg

SEQ ID NO: 27562 - DNA, 20 bp, synthetic construct
  misc_feature 1..20: note = Description of Artificial Sequence: Synthetic oligonucleotide
  misc_feature 1..20: note = Target: SCN10A; (+) strand; PAM type: NRG; PAM sequence: CAG
  source 1..20: mol_type = other DNA
gagtgatgcagcctcctcct

SEQ ID NO: 27563 - DNA, 20 bp, synthetic construct
  misc_feature 1..20: note = Description of Artificial Sequence: Synthetic oligonucleotide
  misc_feature 1..20: note = Target: SCN10A; (+) strand; PAM type: NRG; PAM sequence: TGG
  source 1..20: mol_type = other DNA
tgcagcctcctcctcagctc

SEQ ID NO: 27564 - DNA, 20 bp, synthetic construct
  misc_feature 1..20: note = Description of Artificial Sequence: Synthetic oligonucleotide
  misc_feature 1..20: note = Target: SCN10A; (+) strand; PAM type: NRG; PAM sequence: GGG
  source 1..20: mol_type = other DNA
gcagcctcctcctcagctct

SEQ ID NO: 27565 - DNA, 20 bp, synthetic construct
  misc_feature 1..20: note = Description of Artificial Sequence: Synthetic oligonucleotide
  misc_feature 1..20: note = Target: SCN10A; (+) strand; PAM type: NRG; PAM sequence: TGG
  source 1..20: mol_type = other DNA
tcctcagctctgggcacaca

SEQ ID NO: 27566 - DNA, 20 bp, synthetic construct
  misc_feature 1..20: note = Description of Artificial Sequence: Synthetic oligonucleotide
  misc_feature 1..20: note = Target: SCN10A; (+) strand; PAM type: NRG; PAM sequence: GGG
  source 1..20: mol_type = other DNA
cctcagctctgggcacacat

SEQ ID NO: 27567 - DNA, 20 bp, synthetic construct
  misc_feature 1..20: note = Description of Artificial Sequence: Synthetic oligonucleotide
  misc_feature 1..20: note = Target: SCN10A; (+) strand; PAM type: NRG; PAM sequence: GGG
  source 1..20: mol_type = other DNA
ctcagctctgggcacacatg

SEQ ID NO: 27568 - DNA, 20 bp, synthetic construct
  misc_feature 1..20: note = Description of Artificial Sequence: Synthetic oligonucleotide
  misc_feature 1..20: note = Target: SCN10A; (+) strand; PAM type: NRG; PAM sequence: TAG
  source 1..20: mol_type = other DNA
tctgggcacacatggggtgt

SEQ ID NO: 27569 - DNA, 20 bp, synthetic construct
  misc_feature 1..20: note = Description of Artificial Sequence: Synthetic oligonucleotide
  misc_feature 1..20: note = Target: SCN10A; (+) strand; PAM type: NRG; PAM sequence: GAG
  source 1..20: mol_type = other DNA
tgggcacacatggggtgtta

SEQ ID NO: 27570 - DNA, 20 bp, synthetic construct
  misc_feature 1..20: note = Description of Artificial Sequence: Synthetic oligonucleotide
  misc_feature 1..20: note = Target: SCN10A; (+) strand; PAM type: NRG; PAM sequence: GAG
  source 1..20: mol_type = other DNA
ggcacacatggggtgttaga

SEQ ID NO: 27571 - DNA, 20 bp, synthetic construct
  misc_feature 1..20: note = Description of Artificial Sequence: Synthetic oligonucleotide
  misc_feature 1..20: note = Target: SCN10A; (+) strand; PAM type: NRG; PAM sequence: TGG
  source 1..20: mol_type = other DNA
tggggtgttagagagtgcca

SEQ ID NO: 27572 - DNA, 20 bp, synthetic construct
  misc_feature 1..20: note = Description of Artificial Sequence: Synthetic oligonucleotide
  misc_feature 1..20: note = Target: SCN10A; (+) strand; PAM type: NRG; PAM sequence: GAG
  source 1..20: mol_type = other DNA
gggtgttagagagtgccatg

SEQ ID NO: 27573 - DNA, 20 bp, synthetic construct
  misc_feature 1..20: note = Description of Artificial Sequence: Synthetic oligonucleotide
  misc_feature 1..20: note = Target: SCN10A; (+) strand; PAM type: NRG; PAM sequence: CGG
  source 1..20: mol_type = other DNA
tgttagagagtgccatggag

SEQ ID NO: 27574 - DNA, 20 bp, synthetic construct
  misc_feature 1..20: note = Description of Artificial Sequence: Synthetic oligonucleotide
  misc_feature 1..20: note = Target: SCN10A; (+) strand; PAM type: NRG; PAM sequence: CAG
  source 1..20: mol_type = other DNA
gagagtgccatggagcggtg

SEQ ID NO: 27575 - DNA, 20 bp, synthetic construct
  misc_feature 1..20: note = Description of Artificial Sequence: Synthetic oligonucleotide
  misc_feature 1..20: note = Target: SCN10A; (+) strand; PAM type: NRG; PAM sequence: TAG
  source 1..20: mol_type = other DNA
ccatggagcggtgcagcaca

SEQ ID NO: 27576 - DNA, 20 bp, synthetic construct
  misc_feature 1..20: note = Description of Artificial Sequence: Synthetic oligonucleotide
  misc_feature 1..20: note = Target: SCN10A; (+) strand; PAM type: NRG; PAM sequence: TAG
  source 1..20: mol_type = other DNA
ggtgcagcacatagctccga

SEQ ID NO: 27577 - DNA, 20 bp, synthetic construct
  misc_feature 1..20: note = Description of Artificial Sequence: Synthetic oligonucleotide
  misc_feature 1..20: note = Target: SCN10A; (+) strand; PAM type: NRG; PAM sequence: AGG
  source 1..20: mol_type = other DNA
gtgcagcacatagctccgat

SEQ ID NO: 27578 - DNA, 20 bp, synthetic construct
  misc_feature 1..20: note = Description of Artificial Sequence: Synthetic oligonucleotide
  misc_feature 1..20: note = Target: SCN10A; (+) strand; PAM type: NRG; PAM sequence: CAG
  source 1..20: mol_type = other DNA
ccgataggccttttgaatga

SEQ ID NO: 27579 - DNA, 20 bp, synthetic construct
  misc_feature 1..20: note = Description of Artificial Sequence: Synthetic oligonucleotide
  misc_feature 1..20: note = Target: SCN10A; (+) strand; PAM type: NRG; PAM sequence: TGG
  source 1..20: mol_type = other DNA
ataggccttttgaatgacag

SEQ ID NO: 27580 - DNA, 20 bp, synthetic construct
  misc_feature 1..20: note = Description of Artificial Sequence: Synthetic oligonucleotide
  misc_feature 1..20: note = Target: SCN10A; (+) strand; PAM type: NRG; PAM sequence: CGG
  source 1..20: mol_type = other DNA
aaatgtcttcttgcttccat

SEQ ID NO: 27581 - DNA, 20 bp, synthetic construct
  misc_feature 1..20: note = Description of Artificial Sequence: Synthetic oligonucleotide
  misc_feature 1..20: note = Target: SCN10A; (+) strand; PAM type: NRG; PAM sequence: GAG
  source 1..20: mol_type = other DNA
atgtcttcttgcttccatcg

SEQ ID NO: 27582 - DNA, 20 bp, synthetic construct
  misc_feature 1..20: note = Description of Artificial Sequence: Synthetic oligonucleotide
  misc_feature 1..20: note = Target: SCN10A; (+) strand; PAM type: NRG; PAM sequence: GAG
  source 1..20: mol_type = other DNA
gtcttcttgcttccatcgga

SEQ ID NO: 27583 - DNA, 20 bp, synthetic construct
  misc_feature 1..20: note = Description of Artificial Sequence: Synthetic oligonucleotide
  misc_feature 1..20: note = Target: SCN10A; (+) strand; PAM type: NRG; PAM sequence: TGG
  source 1..20: mol_type = other DNA
ttcttgcttccatcggagag

SEQ ID NO: 27584 - DNA, 20 bp, synthetic construct
  misc_feature 1..20: note = Description of Artificial Sequence: Synthetic oligonucleotide
  misc_feature 1..20: note = Target: SCN10A; (+) strand; PAM type: NRG; PAM sequence: TGG
  source 1..20: mol_type = other DNA
catcggagagtggttgctat

SEQ ID NO: 27585 - DNA, 20 bp, synthetic construct
  misc_feature 1..20: note = Description of Artificial Sequence: Synthetic oligonucleotide
  misc_feature 1..20: note = Target: SCN10A; (+) strand; PAM type: NRG; PAM sequence: TAG
  source 1..20: mol_type = other DNA
gagtggttgctattggttca

SEQ ID NO: 27586 - DNA, 20 bp, synthetic construct
  misc_feature 1..20: note = Description of Artificial Sequence: Synthetic oligonucleotide
  misc_feature 1..20: note = Target: SCN10A; (+) strand; PAM type: NRG; PAM sequence: AGG
  source 1..20: mol_type = other DNA
agtggttgctattggttcat

SEQ ID NO: 27587 - DNA, 20 bp, synthetic construct
  misc_feature 1..20: note = Description of Artificial Sequence: Synthetic oligonucleotide
  misc_feature 1..20: note = Target: SCN10A; (+) strand; PAM type: NRG; PAM sequence: AAG
  source 1..20: mol_type = other DNA
ggttcataggatgattttga

SEQ ID NO: 27588 - DNA, 20 bp, synthetic construct
  misc_feature 1..20: note = Description of Artificial Sequence: Synthetic oligonucleotide
  misc_feature 1..20: note = Target: SCN10A; (+) strand; PAM type: NRG; PAM sequence: TAG
  source 1..20: mol_type = other DNA
ataggatgattttgaaagat

SEQ ID NO: 27589 - DNA, 20 bp, synthetic construct
  misc_feature 1..20: note = Description of Artificial Sequence: Synthetic oligonucleotide
  misc_feature 1..20: note = Target: SCN10A; (+) strand; PAM type: NRG; PAM sequence: CAG
  source 1..20: mol_type = other DNA
ttctcctccatatttgcctt

SEQ ID NO: 27590 - DNA, 20 bp, synthetic construct
  misc_feature 1..20: note = Description of Artificial Sequence: Synthetic oligonucleotide
  misc_feature 1..20: note = Target: SCN10A; (+) strand; PAM type: NRG; PAM sequence: GAG
  source 1..20: mol_type = other DNA
ctcctccatatttgccttca

SEQ ID NO: 27591 - DNA, 20 bp, synthetic construct
  misc_feature 1..20: note = Description of Artificial Sequence: Synthetic oligonucleotide
  misc_feature 1..20: note = Target: SCN10A; (+) strand; PAM type: NRG; PAM sequence: CGG
  source 1..20: mol_type = other DNA
cttcagagaatccaactccc

SEQ ID NO: 27592 - DNA, 20 bp, synthetic construct
  misc_feature 1..20: note = Description of Artificial Sequence: Synthetic oligonucleotide
  misc_feature 1..20: note = Target: SCN10A; (+) strand; PAM type: NRG; PAM sequence: TAG
  source 1..20: mol_type = other DNA
tccaactccccggattctcc

SEQ ID NO: 27593 - DNA, 20 bp, synthetic construct
  misc_feature 1..20: note = Description of Artificial Sequence: Synthetic oligonucleotide
  misc_feature 1..20: note = Target: SCN10A; (+) strand; PAM type: NRG; PAM sequence: AGG
  source 1..20: mol_type = other DNA
ccaactccccggattctcct

SEQ ID NO: 27594 - DNA, 20 bp, synthetic construct
  misc_feature 1..20: note = Description of Artificial Sequence: Synthetic oligonucleotide
  misc_feature 1..20: note = Target: SCN10A; (+) strand; PAM type: NRG; PAM sequence: TGG
  source 1..20: mol_type = other DNA
ggattctcctaggacattct

SEQ ID NO: 27595 - DNA, 20 bp, synthetic construct
  misc_feature 1..20: note = Description of Artificial Sequence: Synthetic oligonucleotide
  misc_feature 1..20: note = Target: SCN10A; (+) strand; PAM type: NRG; PAM sequence: AAG
  source 1..20: mol_type = other DNA
tcctaggacattcttggtga

SEQ ID NO: 27596 - DNA, 20 bp, synthetic construct
  misc_feature 1..20: note = Description of Artificial Sequence: Synthetic oligonucleotide
  misc_feature 1..20: note = Target: SCN10A; (+) strand; PAM type: NRG; PAM sequence: AAG
  source 1..20: mol_type = other DNA
acattcttggtgaaagcaaa

SEQ ID NO: 27597 - DNA, 20 bp, synthetic construct
  misc_feature 1..20: note = Description of Artificial Sequence: Synthetic oligonucleotide
  misc_feature 1..20: note = Target: SCN10A; (+) strand; PAM type: NRG; PAM sequence: AGG
  source 1..20: mol_type = other DNA
cattcttggtgaaagcaaaa

SEQ ID NO: 27598 - DNA, 20 bp, synthetic construct
  misc_feature 1..20: note = Description of Artificial Sequence: Synthetic oligonucleotide
  misc_feature 1..20: note = Target: SCN10A; (+) strand; PAM type: NRG; PAM sequence: AAG
  source 1..20: mol_type = other DNA
tgaaagcaaaaaggatgtcc

SEQ ID NO: 27599 - DNA, 20 bp, synthetic construct
  misc_feature 1..20: note = Description of Artificial Sequence: Synthetic oligonucleotide
  misc_feature 1..20: note = Target: SCN10A; (+) strand; PAM type: NRG; PAM sequence: CAG
  source 1..20: mol_type = other DNA
aagcaaaaaggatgtccaag

SEQ ID NO: 27600 - DNA, 20 bp, synthetic construct
  misc_feature 1..20: note = Description of Artificial Sequence: Synthetic oligonucleotide
  misc_feature 1..20: note = Target: SCN10A; (+) strand; PAM type: NRG; PAM sequence: TGG
  source 1..20: mol_type = other DNA
caaaaaggatgtccaagcag

SEQ ID NO: 27601 - DNA, 20 bp, synthetic construct
  misc_feature 1..20: note = Description of Artificial Sequence: Synthetic oligonucleotide
  misc_feature 1..20: note = Target: SCN10A; (+) strand; PAM type: NRG; PAM sequence: CAG
  source 1..20: mol_type = other DNA
caagcagtggatcttatctc

SEQ ID NO: 27602 - DNA, 20 bp, synthetic construct
  misc_feature 1..20: note = Description of Artificial Sequence: Synthetic oligonucleotide
  misc_feature 1..20: note = Target: SCN10A; (+) strand; PAM type: NRG; PAM sequence: AGG
  source 1..20: mol_type = other DNA
aagcagtggatcttatctcc

SEQ ID NO: 27603 - DNA, 20 bp, synthetic construct
  misc_feature 1..20: note = Description of Artificial Sequence: Synthetic oligonucleotide
  misc_feature 1..20: note = Target: SCN10A; (+) strand; PAM type: NRG; PAM sequence: GGG
  source 1..20: mol_type = other DNA
agcagtggatcttatctcca

SEQ ID NO: 27604 - DNA, 20 bp, synthetic construct
  misc_feature 1..20: note = Description of Artificial Sequence: Synthetic oligonucleotide
  misc_feature 1..20: note = Target: SCN10A; (+) strand; PAM type: NRG; PAM sequence: AAG
  source 1..20: mol_type = other DNA
gatcttatctccagggacca

SEQ ID NO: 27605 - DNA, 20 bp, synthetic construct
  misc_feature 1..20: note = Description of Artificial Sequence: Synthetic oligonucleotide
  misc_feature 1..20: note = Target: SCN10A; (+) strand; PAM type: NRG; PAM sequence: AGG
  source 1..20: mol_type = other DNA
atcttatctccagggaccaa

SEQ ID NO: 27606 - DNA, 20 bp, synthetic construct
  misc_feature 1..20: note = Description of Artificial Sequence: Synthetic oligonucleotide
  misc_feature 1..20: note = Target: SCN10A; (+) strand; PAM type: NRG; PAM sequence: CAG
  source 1..20: mol_type = other DNA
ttatctccagggaccaaagg

SEQ ID NO: 27607 - DNA, 20 bp, synthetic construct
  misc_feature 1..20: note = Description of Artificial Sequence: Synthetic oligonucleotide
  misc_feature 1..20: note = Target: SCN10A; (+) strand; PAM type: NRG; PAM sequence: AGG
  source 1..20: mol_type = other DNA
tatctccagggaccaaaggc

SEQ ID NO: 27608 - DNA, 20 bp, synthetic construct
  misc_feature 1..20: note = Description of Artificial Sequence: Synthetic oligonucleotide
  misc_feature 1..20: note = Target: SCN10A; (+) strand; PAM type: NRG; PAM sequence: TGG
  source 1..20: mol_type = other DNA
ggaccaaaggcaggtccatc

SEQ ID NO: 27609 - DNA, 20 bp, synthetic construct
  misc_feature 1..20: note = Description of Artificial Sequence: Synthetic oligonucleotide
  misc_feature 1..20: note = Target: SCN10A; (+) strand; PAM type: NRG; PAM sequence: CAG
  source 1..20: mol_type = other DNA
aaaggcaggtccatctggat

SEQ ID NO: 27610 - DNA, 20 bp, synthetic construct
  misc_feature 1..20: note = Description of Artificial Sequence: Synthetic oligonucleotide
  misc_feature 1..20: note = Target: SCN10A; (+) strand; PAM type: NRG; PAM sequence: TGG
  source 1..20: mol_type = other DNA
ctggatcagtatatttcgat

SEQ ID NO: 27611 - DNA, 20 bp, synthetic construct
  misc_feature 1..20: note = Description of Artificial Sequence: Synthetic oligonucleotide
  misc_feature 1..20: note = Target: SCN10A; (+) strand; PAM type: NRG; PAM sequence: GGG
  source 1..20: mol_type = other DNA
tggatcagtatatttcgatt

SEQ ID NO: 27612 - DNA, 20 bp, synthetic construct
  misc_feature 1..20: note = Description of Artificial Sequence: Synthetic oligonucleotide
  misc_feature 1..20: note = Target: SCN10A; (+) strand; PAM type: NRG; PAM sequence: TGG
  source 1..20: mol_type = other DNA
agtatatttcgattgggttt

SEQ ID NO: 27613 - DNA, 20 bp, synthetic construct
  misc_feature 1..20: note = Description of Artificial Sequence: Synthetic oligonucleotide
  misc_feature 1..20: note = Target: SCN10A; (+) strand; PAM type: NRG; PAM sequence: GGG
  source 1..20: mol_type = other DNA
gtatatttcgattgggtttt

SEQ ID NO: 27614 - DNA, 20 bp, synthetic construct
  misc_feature 1..20: note = Description of Artificial Sequence: Synthetic oligonucleotide
  misc_feature 1..20: note = Target: SCN10A; (+) strand; PAM type: NRG; PAM sequence: CAG
  source 1..20: mol_type = other DNA
cgattgggttttgggattct

SEQ ID NO: 27615 - DNA, 20 bp, synthetic construct
  misc_feature 1..20: note = Description of Artificial Sequence: Synthetic oligonucleotide
  misc_feature 1..20: note = Target: SCN10A; (+) strand; PAM type: NRG; PAM sequence: AGG
  source 1..20: mol_type = other DNA
gattgggttttgggattctc

SEQ ID NO: 27616 - DNA, 20 bp, synthetic construct
  misc_feature 1..20: note = Description of Artificial Sequence: Synthetic oligonucleotide
  misc_feature 1..20: note = Target: SCN10A; (+) strand; PAM type: NRG; PAM sequence: GGG
  source 1..20: mol_type = other DNA
attgggttttgggattctca

SEQ ID NO: 27617 - DNA, 20 bp, synthetic construct
  misc_feature 1..20: note = Description of Artificial Sequence: Synthetic oligonucleotide
  misc_feature 1..20: note = Target: SCN10A; (+) strand; PAM type: NRG; PAM sequence: GGG
  source 1..20: mol_type = other DNA
ttgggttttgggattctcag

SEQ ID NO: 27618 - DNA, 20 bp, synthetic construct
  misc_feature 1..20: note = Description of Artificial Sequence: Synthetic oligonucleotide
  misc_feature 1..20: note = Target: SCN10A; (+) strand; PAM type: NRG; PAM sequence: CAG
  source 1..20: mol_type = other DNA
ttttgggattctcaggggac

SEQ ID NO: 27619 - DNA, 20 bp, synthetic construct
  misc_feature 1..20: note = Description of Artificial Sequence: Synthetic oligonucleotide
  misc_feature 1..20: note = Target: SCN10A; (+) strand; PAM type: NRG; PAM sequence: GAG
  source 1..20: mol_type = other DNA
ttgggattctcaggggacca

SEQ ID NO: 27620 - DNA, 20 bp, synthetic construct
  misc_feature 1..20: note = Description of Artificial Sequence: Synthetic oligonucleotide
  misc_feature 1..20: note = Target: SCN10A; (+) strand; PAM type: NRG; PAM sequence: GAG
  source 1..20: mol_type = other DNA
gggattctcaggggaccaga

SEQ ID NO: 27621 - DNA, 20 bp, synthetic construct
  misc_feature 1..20: note = Description of Artificial Sequence: Synthetic oligonucleotide
  misc_feature 1..20: note = Target: SCN10A; (+) strand; PAM type: NRG; PAM sequence: GAG
  source 1..20: mol_type = other DNA
gattctcaggggaccagaga

SEQ ID NO: 27622 - DNA, 20 bp, synthetic construct
  misc_feature 1..20: note = Description of Artificial Sequence: Synthetic oligonucleotide
  misc_feature 1..20: note = Target: SCN10A; (+) strand; PAM type: NRG; PAM sequence: AAG
  source 1..20: mol_type = other DNA
gaccagagagagtgtctgca

SEQ ID NO: 27623 - DNA, 20 bp, synthetic construct
  misc_feature 1..20: note = Description of Artificial Sequence: Synthetic oligonucleotide
  misc_feature 1..20: note = Target: SCN10A; (+) strand; PAM type: NRG; PAM sequence: GAG
  source 1..20: mol_type = other DNA
agagagtgtctgcaaagtcc

SEQ ID NO: 27624 - DNA, 20 bp, synthetic construct
  misc_feature 1..20: note = Description of Artificial Sequence: Synthetic oligonucleotide
  misc_feature 1..20: note = Target: SCN10A; (+) strand; PAM type: NRG; PAM sequence: GAG
  source 1..20: mol_type = other DNA
agagtgtctgcaaagtccga

SEQ ID NO: 27625 - DNA, 20 bp, synthetic construct
  misc_feature 1..20: note = Description of Artificial Sequence: Synthetic oligonucleotide
  misc_feature 1..20: note = Target: SCN10A; (+) strand; PAM type: NRG; PAM sequence: GAG
  source 1..20: mol_type = other DNA
agtgtctgcaaagtccgaga

SEQ ID NO: 27626 - DNA, 20 bp, synthetic construct
  misc_feature 1..20: note = Description of Artificial Sequence: Synthetic oligonucleotide
  misc_feature 1..20: note = Target: SCN10A; (+) strand; PAM type: NRG; PAM sequence: CAG
  source 1..20: mol_type = other DNA
gtctgcaaagtccgagagag

SEQ ID NO: 27627 - DNA, 20 bp, synthetic construct
  misc_feature 1..20: note = Description of Artificial Sequence: Synthetic oligonucleotide
  misc_feature 1..20: note = Target: SCN10A; (+) strand; PAM type: NRG; PAM sequence: AAG
  source 1..20: mol_type = other DNA
caaagtccgagagagcagaa

SEQ ID NO: 27628 - DNA, 20 bp, synthetic construct
  misc_feature 1..20: note = Description of Artificial Sequence: Synthetic oligonucleotide
  misc_feature 1..20: note = Target: SCN10A; (+) strand; PAM type: NRG; PAM sequence: AGG
  source 1..20: mol_type = other DNA
aaagtccgagagagcagaaa

SEQ ID NO: 27629 - DNA, 20 bp, synthetic construct
  misc_feature 1..20: note = Description of Artificial Sequence: Synthetic oligonucleotide
  misc_feature 1..20: note = Target: SCN10A; (+) strand; PAM type: NRG; PAM sequence: GAG
  source 1..20: mol_type = other DNA
agcagaaaaggtaataaact

SEQ ID NO: 27630 - DNA, 20 bp, synthetic construct
  misc_feature 1..20: note = Description of Artificial Sequence: Synthetic oligonucleotide
  misc_feature 1..20: note = Target: SCN10A; (+) strand; PAM type: NRG; PAM sequence: TGG
  source 1..20: mol_type = other DNA
agaaaaggtaataaactgag

SEQ ID NO: 27631 - DNA, 20 bp, synthetic construct
  misc_feature 1..20: note = Description of Artificial Sequence: Synthetic oligonucleotide
  misc_feature 1..20: note = Target: SCN10A; (+) strand; PAM type: NRG; PAM sequence: TGG
  source 1..20: mol_type = other DNA
gtaataaactgagtggcctc

SEQ ID NO: 27632 - DNA, 20 bp, synthetic construct
  misc_feature 1..20: note = Description of Artificial Sequence: Synthetic oligonucleotide
  misc_feature 1..20: note = Target: SCN10A; (+) strand; PAM type: NRG; PAM sequence: GGG
  source 1..20: mol_type = other DNA
taataaactgagtggcctct

SEQ ID NO: 27633 - DNA, 20 bp, synthetic construct
  misc_feature 1..20: note = Description of Artificial Sequence: Synthetic oligonucleotide
  misc_feature 1..20: note = Target: SCN10A; (+) strand; PAM type: NRG; PAM sequence: CAG
  source 1..20: mol_type = other DNA
cctctgggtcaaacttctcc

SEQ ID NO: 27634 - DNA, 20 bp, synthetic construct
  misc_feature 1..20: note = Description of Artificial Sequence: Synthetic oligonucleotide
  misc_feature 1..20: note = Target: SCN10A; (+) strand; PAM type: NRG; PAM sequence: AGG
  source 1..20: mol_type = other DNA
ctctgggtcaaacttctccc

SEQ ID NO: 27635 - DNA, 20 bp, synthetic construct
  misc_feature 1..20: note = Description of Artificial Sequence: Synthetic oligonucleotide
  misc_feature 1..20: note = Target: SCN10A; (+) strand; PAM type: NRG; PAM sequence: TAG
  source 1..20: mol_type = other DNA
caaacttctcccaggtctca

SEQ ID NO: 27636 - DNA, 20 bp, synthetic construct
  misc_feature 1..20: note = Description of Artificial Sequence: Synthetic oligonucleotide
  misc_feature 1..20: note = Target: SCN10A; (+) strand; PAM type: NRG; PAM sequence: AAG
  source 1..20: mol_type = other DNA
aggtctcatagaacatgtca

SEQ ID NO: 27637 - DNA, 20 bp, synthetic construct
  misc_feature 1..20: note = Description of Artificial Sequence: Synthetic oligonucleotide
  misc_feature 1..20: note = Target: SCN10A; (+) strand; PAM type: NRG; PAM sequence: CAG
  source 1..20: mol_type = other DNA
atgtcaaagtcgtcctcact

SEQ ID NO: 27638 - DNA, 20 bp, synthetic construct
  misc_feature 1..20: note = Description of Artificial Sequence: Synthetic oligonucleotide
  misc_feature 1..20: note = Target: SCN10A; (+) strand; PAM type: NRG; PAM sequence: AGG
  source 1..20: mol_type = other DNA
tgtcaaagtcgtcctcactc

SEQ ID NO: 27639 - DNA, 20 bp, synthetic construct
  misc_feature 1..20: note = Description of Artificial Sequence: Synthetic oligonucleotide
  misc_feature 1..20: note = Target: SCN10A; (+) strand; PAM type: NRG; PAM sequence: GGG
  source 1..20: mol_type = other DNA
gtcaaagtcgtcctcactca

SEQ ID NO: 27640 - DNA, 20 bp, synthetic construct
  misc_feature 1..20: note = Description of Artificial Sequence: Synthetic oligonucleotide
  misc_feature 1..20: note = Target: SCN10A; (+) strand; PAM type: NRG; PAM sequence: GGG
  source 1..20: mol_type = other DNA
tcaaagtcgtcctcactcag

SEQ ID NO: 27641 - DNA, 20 bp, synthetic construct
  misc_feature 1..20: note = Description of Artificial Sequence: Synthetic oligonucleotide
  misc_feature 1..20: note = Target: SCN10A; (+) strand; PAM type: NRG; PAM sequence: CAG
  source 1..20: mol_type = other DNA
gtcgtcctcactcaggggct

SEQ ID NO: 27642 - DNA, 20 bp, synthetic construct
  misc_feature 1..20: note = Description of Artificial Sequence: Synthetic oligonucleotide
  misc_feature 1..20: note = Target: SCN10A; (+) strand; PAM type: NRG; PAM sequence: TGG
  source 1..20: mol_type = other DNA
gggctcagtgctctcctccg

SEQ ID NO: 27643 - DNA, 20 bp, synthetic construct
  misc_feature 1..20: note = Description of Artificial Sequence: Synthetic oligonucleotide
  misc_feature 1..20: note = Target: SCN10A; (+) strand; PAM type: NRG; PAM sequence: AAG
  source 1..20: mol_type = other DNA
tctcctccgtggccacattg

SEQ ID NO: 27644 - DNA, 20 bp, synthetic construct
  misc_feature 1..20: note = Description of Artificial Sequence: Synthetic oligonucleotide
  misc_feature 1..20: note = Target: SCN10A; (+) strand; PAM type: NRG; PAM sequence: CAG
  source 1..20: mol_type = other DNA
gtggccacattgaagttctc

SEQ ID NO: 27645 - DNA, 20 bp, synthetic construct
  misc_feature 1..20: note = Description of Artificial Sequence: Synthetic oligonucleotide
  misc_feature 1..20: note = Target: SCN10A; (+) strand; PAM type: NRG; PAM sequence: GAG
  source 1..20: mol_type = other DNA
atgtacatgttgaccatgat

SEQ ID NO: 27646 - DNA, 20 bp, synthetic construct
  misc_feature 1..20: note = Description of Artificial Sequence: Synthetic oligonucleotide
  misc_feature 1..20: note = Target: SCN10A; (+) strand; PAM type: NRG; PAM sequence: AGG
  source 1..20: mol_type = other DNA
tgtacatgttgaccatgatg

SEQ ID NO: 27647 - DNA, 20 bp, synthetic construct
  misc_feature 1..20: note = Description of Artificial Sequence: Synthetic oligonucleotide
  misc_feature 1..20: note = Target: SCN10A; (+) strand; PAM type: NRG; PAM sequence: AAG
  source 1..20: mol_type = other DNA
acatgttgaccatgatgagg

SEQ ID NO: 27648 - DNA, 20 bp, synthetic construct
  misc_feature 1..20: note = Description of Artificial Sequence: Synthetic oligonucleotide
  misc_feature 1..20: note = Target: SCN10A; (+) strand; PAM type: NRG; PAM sequence: AGG
  source 1..20: mol_type = other DNA
catgttgaccatgatgagga

SEQ ID NO: 27649 - DNA, 20 bp, synthetic construct
  misc_feature 1..20: note = Description of Artificial Sequence: Synthetic oligonucleotide
  misc_feature 1..20: note = Target: SCN10A; (+) strand; PAM type: NRG; PAM sequence: GAG
  source 1..20: mol_type = other DNA
tgttgaccatgatgaggaag

SEQ ID NO: 27650 - DNA, 20 bp, synthetic construct
  misc_feature 1..20: note = Description of Artificial Sequence: Synthetic oligonucleotide
  misc_feature 1..20: note = Target: SCN10A; (+) strand; PAM type: NRG; PAM sequence: TAG
  source 1..20: mol_type = other DNA
tgaggaaggagatgatgatg

SEQ ID NO: 27651 - DNA, 20 bp, synthetic construct
  misc_feature 1..20: note = Description of Artificial Sequence: Synthetic oligonucleotide
  misc_feature 1..20: note = Target: SCN10A; (+) strand; PAM type: NRG; PAM sequence: AGG
  source 1..20: mol_type = other DNA
gaggaaggagatgatgatgt

SEQ ID NO: 27652 - DNA, 20 bp, synthetic construct
  misc_feature 1..20: note = Description of Artificial Sequence: Synthetic oligonucleotide
  misc_feature 1..20: note = Target: SCN10A; (+) strand; PAM type: NRG; PAM sequence: TGG
  source 1..20: mol_type = other DNA
gaaggagatgatgatgtagg

SEQ ID NO: 27653 - DNA, 20 bp, synthetic construct
  misc_feature 1..20: note = Description of Artificial Sequence: Synthetic oligonucleotide
  misc_feature 1..20: note = Target: SCN10A; (+) strand; PAM type: NRG; PAM sequence: AAG
  source 1..20: mol_type = other DNA
agatgatgatgtaggtggtg

SEQ ID NO: 27654 - DNA, 20 bp, synthetic construct
  misc_feature 1..20: note = Description of Artificial Sequence: Synthetic oligonucleotide
  misc_feature 1..20: note = Target: SCN10A; (+) strand; PAM type: NRG; PAM sequence: AAG
  source 1..20: mol_type = other DNA
tgatgatgtaggtggtgaag

SEQ ID NO: 27655 - DNA, 20 bp, synthetic construct
  misc_feature 1..20: note = Description of Artificial Sequence: Synthetic oligonucleotide
  misc_feature 1..20: note = Target: SCN10A; (+) strand; PAM type: NRG; PAM sequence: CGG
  source 1..20: mol_type = other DNA
ggtgaagaagatgatgccta

SEQ ID NO: 27656 - DNA, 20 bp, synthetic construct
  misc_feature 1..20: note = Description of Artificial Sequence: Synthetic oligonucleotide
  misc_feature 1..20: note = Target: SCN10A; (+) strand; PAM type: NRG; PAM sequence: TGG
  source 1..20: mol_type = other DNA
aagaagatgatgcctacggc

SEQ ID NO: 27657 - DNA, 20 bp, synthetic construct
  misc_feature 1..20: note = Description of Artificial Sequence: Synthetic oligonucleotide
  misc_feature 1..20: note = Target: SCN10A; (+) strand; PAM type: NRG; PAM sequence: GGG
  source 1..20: mol_type = other DNA
agaagatgatgcctacggct

SEQ ID NO: 27658 - DNA, 20 bp, synthetic construct
  misc_feature 1..20: note = Description of Artificial Sequence: Synthetic oligonucleotide
  misc_feature 1..20: note = Target: SCN10A; (+) strand; PAM type: NRG; PAM sequence: CAG
  source 1..20: mol_type = other DNA
tgcctacggctgggctccca

SEQ ID NO: 27659 - DNA, 20 bp, synthetic construct
  misc_feature 1..20: note = Description of Artificial Sequence: Synthetic oligonucleotide
  misc_feature 1..20: note = Target: SCN10A; (+) strand; PAM type: NRG; PAM sequence: TGG
  source 1..20: mol_type = other DNA
tgggctcccacagtcccctc

SEQ ID NO: 27660 - DNA, 20 bp, synthetic construct
  misc_feature 1..20: note = Description of Artificial Sequence: Synthetic oligonucleotide
  misc_feature 1..20: note = Target: SCN10A; (+) strand; PAM type: NRG; PAM sequence: TGG
  source 1..20: mol_type = other DNA
ccctctggtgccattgctgt

SEQ ID NO: 27661 - DNA, 20 bp, synthetic construct
  misc_feature 1..20: note = Description of Artificial Sequence: Synthetic oligonucleotide
  misc_feature 1..20: note = Target: SCN10A; (+) strand; PAM type: NRG; PAM sequence: GGG
  source 1..20: mol_type = other DNA
cctctggtgccattgctgtt

SEQ ID NO: 27662 - DNA, 20 bp, synthetic construct
  misc_feature 1..20: note = Description of Artificial Sequence: Synthetic oligonucleotide
  misc_feature 1..20: note = Target: SCN10A; (+) strand; PAM type: NRG; PAM sequence: CAG
  source 1..20: mol_type = other DNA
ctggtgccattgctgttggg

SEQ ID NO: 27663 - DNA, 20 bp, synthetic construct
  misc_feature 1..20: note = Description of Artificial Sequence: Synthetic oligonucleotide
  misc_feature 1..20: note = Target: SCN10A; (+) strand; PAM type: NRG; PAM sequence: TGG
  source 1..20: mol_type = other DNA
gccattgctgttgggcagat

SEQ ID NO: 27664 - DNA, 20 bp, synthetic construct
  misc_feature 1..20: note = Description of Artificial Sequence: Synthetic oligonucleotide
  misc_feature 1..20: note = Target: SCN10A; (+) strand; PAM type: NRG; PAM sequence: GGG
  source 1..20: mol_type = other DNA
ccattgctgttgggcagatt

SEQ ID NO: 27665 - DNA, 20 bp, synthetic construct
  misc_feature 1..20: note = Description of Artificial Sequence: Synthetic oligonucleotide
  misc_feature 1..20: note = Target: SCN10A; (+) strand; PAM type: NRG; PAM sequence: GGG
  source 1..20: mol_type = other DNA
cattgctgttgggcagattg

SEQ ID NO: 27666 - DNA, 20 bp, synthetic construct
  misc_feature 1..20: note = Description of Artificial Sequence: Synthetic oligonucleotide
  misc_feature 1..20: note = Target: SCN10A; (+) strand; PAM type: NRG; PAM sequence: CAG
  source 1..20: mol_type = other DNA
tgttgggcagattggggtca

SEQ ID NO: 27667 - DNA, 20 bp, synthetic construct
  misc_feature 1..20: note = Description of Artificial Sequence: Synthetic oligonucleotide
  misc_feature 1..20: note = Target: SCN10A; (+) strand; PAM type: NRG; PAM sequence: TAG
  source 1..20: mol_type = other DNA
tgggcagattggggtcacag

SEQ ID NO: 27668 - DNA, 20 bp, synthetic construct
  misc_feature 1..20: note = Description of Artificial Sequence: Synthetic oligonucleotide
  misc_feature 1..20: note = Target: SCN10A; (+) strand; PAM type: NRG; PAM sequence: AGG
  source 1..20: mol_type = other DNA
gggcagattggggtcacagt

SEQ ID NO: 27669 - DNA, 20 bp, synthetic construct
  misc_feature 1..20: note = Description of Artificial Sequence: Synthetic oligonucleotide
  misc_feature 1..20: note = Target: SCN10A; (+) strand; PAM type: NRG; PAM sequence: GGG
  source 1..20: mol_type = other DNA
ggcagattggggtcacagta

SEQ ID NO: 27670 - DNA, 20 bp, synthetic construct
  misc_feature 1..20: note = Description of Artificial Sequence: Synthetic oligonucleotide
  misc_feature 1..20: note = Target: SCN10A; (+) strand; PAM type: NRG; PAM sequence: GGG
  source 1..20: mol_type = other DNA
gcagattggggtcacagtag

SEQ ID NO: 27671 - DNA, 20 bp, synthetic construct
  misc_feature 1..20: note = Description of Artificial Sequence: Synthetic oligonucleotide
  misc_feature 1..20: note = Target: SCN10A; (+) strand; PAM type: NRG; PAM sequence: GGG
  source 1..20: mol_type = other DNA
cagattggggtcacagtagg

SEQ ID NO: 27672 - DNA, 20 bp, synthetic construct
  misc_feature 1..20: note = Description of Artificial Sequence: Synthetic oligonucleotide
  misc_feature 1..20: note = Target: SCN10A; (+) strand; PAM type: NRG; PAM sequence: GGG
  source 1..20: mol_type = other DNA
agattggggtcacagtaggg

SEQ ID NO: 27673 - DNA, 20 bp, synthetic construct
  misc_feature 1..20: note = Description of Artificial Sequence: Synthetic oligonucleotide
  misc_feature 1..20: note = Target: SCN10A; (+) strand; PAM type: NRG; PAM sequence: GAG
  source 1..20: mol_type = other DNA
cagtaggggggccctgtgtt

SEQ ID NO: 27674 - DNA, 20 bp, synthetic construct
  misc_feature 1..20: note = Description of Artificial Sequence: Synthetic oligonucleotide
  misc_feature 1..20: note = Target: SCN10A; (+) strand; PAM type: NRG; PAM sequence: AGG
  source 1..20: mol_type = other DNA
agtaggggggccctgtgttg

SEQ ID NO: 27675 - DNA, 20 bp, synthetic construct
  misc_feature 1..20: note = Description of Artificial Sequence: Synthetic oligonucleotide
  misc_feature 1..20: note = Target: SCN10A; (+) strand; PAM type: NRG; PAM sequence: TGG
  source 1..20: mol_type = other DNA
ggggggccctgtgttgagga

SEQ ID NO: 27676 - DNA, 20 bp, synthetic construct
  misc_feature 1..20: note = Description of Artificial Sequence: Synthetic oligonucleotide
  misc_feature 1..20: note = Target: SCN10A; (+) strand; PAM type: NRG; PAM sequence: GGG
  source 1..20: mol_type = other DNA
gggggccctgtgttgaggat

SEQ ID NO: 27677 - DNA, 20 bp, synthetic construct
  misc_feature 1..20: note = Description of Artificial Sequence: Synthetic oligonucleotide
  misc_feature 1..20: note = Target: SCN10A; (+) strand; PAM type: NRG; PAM sequence: GGG
  source 1..20: mol_type = other DNA
ggggccctgtgttgaggatg

SEQ ID NO: 27678 - DNA, 20 bp, synthetic construct
  misc_feature 1..20: note = Description of Artificial Sequence: Synthetic oligonucleotide
  misc_feature 1..20: note = Target: SCN10A; (+) strand; PAM type: NRG; PAM sequence: GAG
  source 1..20: mol_type = other DNA
cctgtgttgaggatggggct

SEQ ID NO: 27679 - DNA, 20 bp, synthetic construct
  misc_feature 1..20: note = Description of Artificial Sequence: Synthetic oligonucleotide
  misc_feature 1..20: note = Target: SCN10A; (+) strand; PAM type: NRG; PAM sequence: AGG
  source 1..20: mol_type = other DNA
ctgtgttgaggatggggctg

SEQ ID NO: 27680 - DNA, 20 bp, synthetic construct
  misc_feature 1..20: note = Description of Artificial Sequence: Synthetic oligonucleotide
  misc_feature 1..20: note = Target: SCN10A; (+) strand; PAM type: NRG; PAM sequence: GAG
  source 1..20: mol_type = other DNA
gtgttgaggatggggctgag

SEQ ID NO: 27681 - DNA, 20 bp, synthetic construct
  misc_feature 1..20: note = Description of Artificial Sequence: Synthetic oligonucleotide
  misc_feature 1..20: note = Target: SCN10A; (+) strand; PAM type: NRG; PAM sequence: AGG
  source 1..20: mol_type = other DNA
tgttgaggatggggctgagg

SEQ ID NO: 27682 - DNA, 20 bp, synthetic construct
  misc_feature 1..20: note = Description of Artificial Sequence: Synthetic oligonucleotide
  misc_feature 1..20: note = Target: SCN10A; (+) strand; PAM type: NRG; PAM sequence: CAG
  source 1..20: mol_type = other DNA
tggggctgaggaggccatcc

SEQ ID NO: 27683 - DNA, 20 bp, synthetic construct
  misc_feature 1..20: note = Description of Artificial Sequence: Synthetic oligonucleotide
  misc_feature 1..20: note = Target: SCN10A; (+) strand; PAM type: NRG; PAM sequence: CGG
  source 1..20: mol_type = other DNA
gctgaggaggccatcccagc

SEQ ID NO: 27684 - DNA, 20 bp, synthetic construct
  misc_feature 1..20: note = Description of Artificial Sequence: Synthetic oligonucleotide
  misc_feature 1..20: note = Target: SCN10A; (+) strand; PAM type: NRG; PAM sequence: TGG
  source 1..20: mol_type = other DNA
gccatcccagccggccgacg

SEQ ID NO: 27685 - DNA, 20 bp, synthetic construct
  misc_feature 1..20: note = Description of Artificial Sequence: Synthetic oligonucleotide
  misc_feature 1..20: note = Target: SCN10A; (+) strand; PAM type: NRG; PAM sequence: TGG
  source 1..20: mol_type = other DNA
agccggccgacgtggtaatc

SEQ ID NO: 27686 - DNA, 20 bp, synthetic construct
  misc_feature 1..20: note = Description of Artificial Sequence: Synthetic oligonucleotide
  misc_feature 1..20: note = Target: SCN10A; (+) strand; PAM type: NRG; PAM sequence: AAG
  source 1..20: mol_type = other DNA
cggccgacgtggtaatctgg

SEQ ID NO: 27687 - DNA, 20 bp, synthetic construct
  misc_feature 1..20: note = Description of Artificial Sequence: Synthetic oligonucleotide
  misc_feature 1..20: note = Target: SCN10A; (+) strand; PAM type: NRG; PAM sequence: GAG
  source 1..20: mol_type = other DNA
gccgacgtggtaatctggaa

SEQ ID NO: 27688 - DNA, 20 bp, synthetic construct
  misc_feature 1..20: note = Description of Artificial Sequence: Synthetic oligonucleotide
  misc_feature 1..20: note = Target: SCN10A; (+) strand; PAM type: NRG; PAM sequence: AGG
  source 1..20: mol_type = other DNA
ccgacgtggtaatctggaag

SEQ ID NO: 27689 - DNA, 20 bp, synthetic construct
  misc_feature 1..20: note = Description of Artificial Sequence: Synthetic oligonucleotide
  misc_feature 1..20: note = Target: SCN10A; (+) strand; PAM type: NRG; PAM sequence: CAG
  source 1..20: mol_type = other DNA
gtggtaatctggaagaggca

SEQ ID NO: 27690 - DNA, 20 bp, synthetic construct
  misc_feature 1..20: note = Description of Artificial Sequence: Synthetic oligonucleotide
  misc_feature 1..20: note = Target: SCN10A; (+) strand; PAM type: NRG; PAM sequence: TGG
  source 1..20: mol_type = other DNA
gaagaggcacagcatgctgt

SEQ ID NO: 27691 - DNA, 20 bp, synthetic construct
  misc_feature 1..20: note = Description of Artificial Sequence: Synthetic oligonucleotide
  misc_feature 1..20: note = Target: SCN10A; (+) strand; PAM type: NRG; PAM sequence: AAG
  source 1..20: mol_type = other DNA
ggcacagcatgctgttggcg

SEQ ID NO: 27692 - DNA, 20 bp, synthetic construct
  misc_feature 1..20: note = Description of Artificial Sequence: Synthetic oligonucleotide
  misc_feature 1..20: note = Target: SCN10A; (+) strand; PAM type: NRG; PAM sequence: AGG
  source 1..20: mol_type = other DNA
gcacagcatgctgttggcga

SEQ ID NO: 27693 - DNA, 20 bp, synthetic construct
  misc_feature 1..20: note = Description of Artificial Sequence: Synthetic oligonucleotide
  misc_feature 1..20: note = Target: SCN10A; (+) strand; PAM type: NRG; PAM sequence: TGG
  source 1..20: mol_type = other DNA
gcatgctgttggcgaaggtc

SEQ ID NO: 27694 - DNA, 20 bp, synthetic construct
  misc_feature 1..20: note = Description of Artificial Sequence: Synthetic oligonucleotide
  misc_feature 1..20: note = Target: SCN10A; (+) strand; PAM type: NRG; PAM sequence: AAG
  source 1..20: mol_type = other DNA
tgctgttggcgaaggtctgg

SEQ ID NO: 27695 - DNA, 20 bp, synthetic construct
  misc_feature 1..20: note = Description of Artificial Sequence: Synthetic oligonucleotide
  misc_feature 1..20: note = Target: SCN10A; (+) strand; PAM type: NRG; PAM sequence: CAG
  source 1..20: mol_type = other DNA
gttgaacatgtcgtcgatgc

SEQ ID NO: 27696 - DNA, 20 bp, synthetic construct
  misc_feature 1..20: note = Description of Artificial Sequence: Synthetic oligonucleotide
  misc_feature 1..20: note = Target: SCN10A; (+) strand; PAM type: NRG; PAM sequence: TGG
  source 1..20: mol_type = other DNA
tgccagcctcccacctcaca

SEQ ID NO: 27697 - DNA, 20 bp, synthetic construct
  misc_feature 1..20: note = Description of Artificial Sequence: Synthetic oligonucleotide
  misc_feature 1..20: note = Target: SCN10A; (+) strand; PAM type: NRG; PAM sequence: GGG
  source 1..20: mol_type = other DNA
gccagcctcccacctcacat

SEQ ID NO: 27698 - DNA, 20 bp, synthetic construct
  misc_feature 1..20: note = Description of Artificial Sequence: Synthetic oligonucleotide
  misc_feature 1..20: note = Target: SCN10A; (+) strand; PAM type: NRG; PAM sequence: GGG
  source 1..20: mol_type = other DNA
ccagcctcccacctcacatg

SEQ ID NO: 27699 - DNA, 20 bp, synthetic construct
  misc_feature 1..20: note = Description of Artificial Sequence: Synthetic oligonucleotide
  misc_feature 1..20: note = Target: SCN10A; (+) strand; PAM type: NRG; PAM sequence: AAG
  source 1..20: mol_type = other DNA
cctcccacctcacatgggga

SEQ ID NO: 27700 - DNA, 20 bp, synthetic construct
  misc_feature 1..20: note = Description of Artificial Sequence: Synthetic oligonucleotide
  misc_feature 1..20: note = Target: SCN10A; (+) strand; PAM type: NRG; PAM sequence: TGG
  source 1..20: mol_type = other DNA
ccacctcacatggggaaagc

SEQ ID NO: 27701 - DNA, 20 bp, synthetic construct
  misc_feature 1..20: note = Description of Artificial Sequence: Synthetic oligonucleotide
  misc_feature 1..20: note = Target: SCN10A; (+) strand; PAM type: NRG; PAM sequence: AAG
  source 1..20: mol_type = other DNA
ggggaaagctggacataccg

SEQ ID NO: 27702 - DNA, 20 bp, synthetic construct
  misc_feature 1..20: note = Description of Artificial Sequence: Synthetic oligonucleotide
  misc_feature 1..20: note = Target: SCN10A; (+) strand; PAM type: NRG; PAM sequence: TAG
  source 1..20: mol_type = other DNA
aaagctggacataccgaaga

SEQ ID NO: 27703 - DNA, 20 bp, synthetic construct
  misc_feature 1..20: note = Description of Artificial Sequence: Synthetic oligonucleotide
  misc_feature 1..20: note = Target: SCN10A; (+) strand; PAM type: NRG; PAM sequence: GAG
  source 1..20: mol_type = other DNA
agctggacataccgaagata

SEQ ID NO: 27704 - DNA, 20 bp, synthetic construct
  misc_feature 1..20: note = Description of Artificial Sequence: Synthetic oligonucleotide
  misc_feature 1..20: note = Target: SCN10A; (+) strand; PAM type: NRG; PAM sequence: TAG
  source 1..20: mol_type = other DNA
tggacataccgaagatagag

SEQ ID NO: 27705 - DNA, 20 bp, synthetic construct
  misc_feature 1..20: note = Description of Artificial Sequence: Synthetic oligonucleotide
  misc_feature 1..20: note = Target: SCN10A; (+) strand; PAM type: NRG; PAM sequence: AAG
  source 1..20: mol_type = other DNA
atagagtagatgaacatgac

SEQ ID NO: 27706 - DNA, 20 bp, synthetic construct
  misc_feature 1..20: note = Description of Artificial Sequence: Synthetic oligonucleotide
  misc_feature 1..20: note = Target: SCN10A; (+) strand; PAM type: NRG; PAM sequence: AGG
  source 1..20: mol_type = other DNA
tagagtagatgaacatgaca

SEQ ID NO: 27707 - DNA, 20 bp, synthetic construct
  misc_feature 1..20: note = Description of Artificial Sequence: Synthetic oligonucleotide
  misc_feature 1..20: note = Target: SCN10A; (+) strand; PAM type: NRG; PAM sequence: TAG
  source 1..20: mol_type = other DNA
tagatgaacatgacaaggaa

SEQ ID NO: 27708 - DNA, 20 bp, synthetic construct
  misc_feature 1..20: note = Description of Artificial Sequence: Synthetic oligonucleotide
  misc_feature 1..20: note = Target: SCN10A; (+) strand; PAM type: NRG; PAM sequence: CAG
  source 1..20: mol_type = other DNA
aacatgacaaggaatagcaa

SEQ ID NO: 27709 - DNA, 20 bp, synthetic construct
  misc_feature 1..20: note = Description of Artificial Sequence: Synthetic oligonucleotide
  misc_feature 1..20: note = Target: SCN10A; (+) strand; PAM type: NRG; PAM sequence: AAG
  source 1..20: mol_type = other DNA
atagcaacagcccgatgttg

SEQ ID NO: 27710 - DNA, 20 bp, synthetic construct
  misc_feature 1..20: note = Description of Artificial Sequence: Synthetic oligonucleotide
  misc_feature 1..20: note = Target: SCN10A; (+) strand; PAM type: NRG; PAM sequence: GAG
  source 1..20: mol_type = other DNA
agcaacagcccgatgttgaa

SEQ ID NO: 27711 - DNA, 20 bp, synthetic construct
  misc_feature 1..20: note = Description of Artificial Sequence: Synthetic oligonucleotide
  misc_feature 1..20: note = Target: SCN10A; (+) strand; PAM type: NRG; PAM sequence: AGG
  source 1..20: mol_type = other DNA
gcaacagcccgatgttgaag

SEQ ID NO: 27712 - DNA, 20 bp, synthetic construct
  misc_feature 1..20: note = Description of Artificial Sequence: Synthetic oligonucleotide
  misc_feature 1..20: note = Target: SCN10A; (+) strand; PAM type: NRG; PAM sequence: GGG
  source 1..20: mol_type = other DNA
caacagcccgatgttgaaga

SEQ ID NO: 27713 - DNA, 20 bp, synthetic construct
  misc_feature 1..20: note = Description of Artificial Sequence: Synthetic oligonucleotide
  misc_feature 1..20: note = Target: SCN10A; (+) strand; PAM type: NRG; PAM sequence: CAG
  source 1..20: mol_type = other DNA
cagcccgatgttgaagaggg

SEQ ID NO: 27714 - DNA, 20 bp, synthetic construct
  misc_feature 1..20: note = Description of Artificial Sequence: Synthetic oligonucleotide
  misc_feature 1..20: note = Target: SCN10A; (+) strand; PAM type: NRG; PAM sequence: AGG
  source 1..20: mol_type = other DNA
agcccgatgttgaagagggc

SEQ ID NO: 27715 - DNA, 20 bp, synthetic construct
  misc_feature 1..20: note = Description of Artificial Sequence: Synthetic oligonucleotide
  misc_feature 1..20: note = Target: SCN10A; (+) strand; PAM type: NRG; PAM sequence: CAG
  source 1..20: mol_type = other DNA
ccgatgttgaagagggcagg

SEQ ID NO: 27716 - DNA, 20 bp, synthetic construct
  misc_feature 1..20: note = Description of Artificial Sequence: Synthetic oligonucleotide
  misc_feature 1..20: note = Target: SCN10A; (+) strand; PAM type: NRG; PAM sequence: AGG
  source 1..20: mol_type = other DNA
cgatgttgaagagggcaggc

SEQ ID NO: 27717 - DNA, 20 bp, synthetic construct
  misc_feature 1..20: note = Description of Artificial Sequence: Synthetic oligonucleotide
  misc_feature 1..20: note = Target: SCN10A; (+) strand; PAM type: NRG; PAM sequence: GGG
  source 1..20: mol_type = other DNA
gatgttgaagagggcaggca

SEQ ID NO: 27718 - DNA, 20 bp, synthetic construct
  misc_feature 1..20: note = Description of Artificial Sequence: Synthetic oligonucleotide
  misc_feature 1..20: note = Target: SCN10A; (+) strand; PAM type: NRG; PAM sequence: GAG
  source 1..20: mol_type = other DNA
agggcaggcagggacatcat

SEQ ID NO: 27719 - DNA, 20 bp, synthetic construct
  misc_feature 1..20: note = Description of Artificial Sequence: Synthetic oligonucleotide
  misc_feature 1..20: note = Target: SCN10A; (+) strand; PAM type: NRG; PAM sequence: AGG
  source 1..20: mol_type = other DNA
gggcaggcagggacatcatg

SEQ ID NO: 27720 - DNA, 20 bp, synthetic construct
  misc_feature 1..20: note = Description of Artificial Sequence: Synthetic oligonucleotide
  misc_feature 1..20: note = Target: SCN10A; (+) strand; PAM type: NRG; PAM sequence: GGG
  source 1..20: mol_type = other DNA
ggcaggcagggacatcatga

SEQ ID NO: 27721 - DNA, 20 bp, synthetic construct
  misc_feature 1..20: note = Description of Artificial Sequence: Synthetic oligonucleotide
  misc_feature 1..20: note = Target: SCN10A; (+) strand; PAM type: NRG; PAM sequence: AAG
  source 1..20: mol_type = other DNA
gcagggacatcatgagggca

SEQ ID NO: 27722 - DNA, 20 bp, synthetic construct
  misc_feature 1..20: note = Description of Artificial Sequence: Synthetic oligonucleotide
  misc_feature 1..20: note = Target: SCN10A; (+) strand; PAM type: NRG; PAM sequence: GAG
  source 1..20: mol_type = other DNA
agggacatcatgagggcaaa

SEQ ID NO: 27723 - DNA, 20 bp, synthetic construct
  misc_feature 1..20: note = Description of Artificial Sequence: Synthetic oligonucleotide
  misc_feature 1..20: note = Target: SCN10A; (+) strand; PAM type: NRG; PAM sequence: CAG
  source 1..20: mol_type = other DNA
gacatcatgagggcaaagag

SEQ ID NO: 27724 - DNA, 20 bp, synthetic construct
  misc_feature 1..20: note = Description of Artificial Sequence: Synthetic oligonucleotide
  misc_feature 1..20: note = Target: SCN10A; (+) strand; PAM type: NRG; PAM sequence: CGG
  source 1..20: mol_type = other DNA
tgagggcaaagagcagtgtg

SEQ ID NO: 27725 - DNA, 20 bp, synthetic construct
  misc_feature 1..20: note = Description of Artificial Sequence: Synthetic oligonucleotide
  misc_feature 1..20: note = Target: SCN10A; (+) strand; PAM type: NRG; PAM sequence: TGG
  source 1..20: mol_type = other DNA
gagcagtgtgcggatcccct

SEQ ID NO: 27726 - DNA, 20 bp, synthetic construct
  misc_feature 1..20: note = Description of Artificial Sequence: Synthetic oligonucleotide
  misc_feature 1..20: note = Target: SCN10A; (+) strand; PAM type: NRG; PAM sequence: CGG
  source 1..20: mol_type = other DNA
tgcggatccccttggccgct

SEQ ID NO: 27727 - DNA, 20 bp, synthetic construct
  misc_feature 1..20: note = Description of Artificial Sequence: Synthetic oligonucleotide
  misc_feature 1..20: note = Target: SCN10A; (+) strand; PAM type: NRG; PAM sequence: CAG
  source 1..20: mol_type = other DNA
atccccttggccgctcggat

SEQ ID NO: 27728 - DNA, 20 bp, synthetic construct
  misc_feature 1..20: note = Description of Artificial Sequence: Synthetic oligonucleotide
  misc_feature 1..20: note = Target: SCN10A; (+) strand; PAM type: NRG; PAM sequence: GAG
  source 1..20: mol_type = other DNA
ttggccgctcggatcagtct

SEQ ID NO: 27729 - DNA, 20 bp, synthetic construct
  misc_feature 1..20: note = Description of Artificial Sequence: Synthetic oligonucleotide
  misc_feature 1..20: note = Target: SCN10A; (+) strand; PAM type: NRG; PAM sequence: AGG
  source 1..20: mol_type = other DNA
tggccgctcggatcagtctg

SEQ ID NO: 27730 - DNA, 20 bp, synthetic construct
  misc_feature 1..20: note = Description of Artificial Sequence: Synthetic oligonucleotide
  misc_feature 1..20: note = Target: SCN10A; (+) strand; PAM type: NRG; PAM sequence: CGG
  source 1..20: mol_type = other DNA
ctcggatcagtctgaggatg

SEQ ID NO: 27731 - DNA, 20 bp, synthetic construct
  misc_feature 1..20: note = Description of Artificial Sequence: Synthetic oligonucleotide
  misc_feature 1..20: note = Target: SCN10A; (+) strand; PAM type: NRG; PAM sequence: CGG
  source 1..20: mol_type = other DNA
gtctgaggatgcggccaatt

SEQ ID NO: 27732 - DNA, 20 bp, synthetic construct
  misc_feature 1..20: note = Description of Artificial Sequence: Synthetic oligonucleotide
  misc_feature 1..20: note = Target: SCN10A; (+) strand; PAM type: NRG; PAM sequence: GGG
  source 1..20: mol_type = other DNA
tctgaggatgcggccaattc

SEQ ID NO: 27733 - DNA, 20 bp, synthetic construct
  misc_feature 1..20: note = Description of Artificial Sequence: Synthetic oligonucleotide
  misc_feature 1..20: note = Target: SCN10A; (+) strand; PAM type: NRG; PAM sequence: CAG
  source 1..20: mol_type = other DNA
aggatgcggccaattcgggc

SEQ ID NO: 27734 - DNA, 20 bp, synthetic construct
  misc_feature 1..20: note = Description of Artificial Sequence: Synthetic oligonucleotide
  misc_feature 1..20: note = Target: SCN10A; (+) strand; PAM type: NRG; PAM sequence: AGG
  source 1..20: mol_type = other DNA
ggatgcggccaattcgggcc

SEQ ID NO: 27735 - DNA, 20 bp, synthetic construct
  misc_feature 1..20: note = Description of Artificial Sequence: Synthetic oligonucleotide
  misc_feature 1..20: note = Target: SCN10A; (+) strand; PAM type: NRG; PAM sequence: CGG
  source 1..20: mol_type = other DNA
tgcggccaattcgggccagg

SEQ ID NO: 27736 - DNA, 20 bp, synthetic construct
  misc_feature 1..20: note = Description of Artificial Sequence: Synthetic oligonucleotide
  misc_feature 1..20: note = Target: SCN10A; (+) strand; PAM type: NRG; PAM sequence: AAG
  source 1..20: mol_type = other DNA
gggccaggcggatgactctg

SEQ ID NO: 27737 - DNA, 20 bp, synthetic construct
  misc_feature 1..20: note = Description of Artificial Sequence: Synthetic oligonucleotide
  misc_feature 1..20: note = Target: SCN10A; (+) strand; PAM type: NRG; PAM sequence: GAG
  source 1..20: mol_type = other DNA
gccaggcggatgactctgaa

SEQ ID NO: 27738 - DNA, 20 bp, synthetic construct
  misc_feature 1..20: note = Description of Artificial Sequence: Synthetic oligonucleotide
  misc_feature 1..20: note = Target: SCN10A; (+) strand; PAM type: NRG; PAM sequence: TGG
  source 1..20: mol_type = other DNA
cggatgactctgaagagcgt

SEQ ID NO: 27739 - DNA, 20 bp, synthetic construct
  misc_feature 1..20: note = Description of Artificial Sequence: Synthetic oligonucleotide
  misc_feature 1..20: note = Target: SCN10A; (+) strand; PAM type: NRG; PAM sequence: GGG
  source 1..20: mol_type = other DNA
ggatgactctgaagagcgtt

SEQ ID NO: 27740 - DNA, 20 bp, synthetic construct
  misc_feature 1..20: note = Description of Artificial Sequence: Synthetic oligonucleotide
  misc_feature 1..20: note = Target: SCN10A; (+) strand; PAM type: NRG; PAM sequence: GGG
  source 1..20: mol_type = other DNA
gatgactctgaagagcgttg

SEQ ID NO: 27741 - DNA, 20 bp, synthetic construct
  misc_feature 1..20: note = Description of Artificial Sequence: Synthetic oligonucleotide
  misc_feature 1..20: note = Target: SCN10A; (+) strand; PAM type: NRG; PAM sequence: GAG
  source 1..20: mol_type = other DNA
tgactctgaagagcgttggg

SEQ ID NO: 27742 - DNA, 20 bp, synthetic construct
  misc_feature 1..20: note = Description of Artificial Sequence: Synthetic oligonucleotide
  misc_feature 1..20: note = Target: SCN10A; (+) strand; PAM type: NRG; PAM sequence: AAG
  source 1..20: mol_type = other DNA
ctctgaagagcgttggggag

SEQ ID NO: 27743 - DNA, 20 bp, synthetic construct
  misc_feature 1..20: note = Description of Artificial Sequence: Synthetic oligonucleotide
  misc_feature 1..20: note = Target: SCN10A; (+) strand; PAM type: NRG; PAM sequence: AAG
  source 1..20: mol_type = other DNA
gttggggagaagtaactttg

SEQ ID NO: 27744 - DNA, 20 bp, synthetic construct
  misc_feature 1..20: note = Description of Artificial Sequence: Synthetic oligonucleotide
  misc_feature 1..20: note = Target: SCN10A; (+) strand; PAM type: NRG; PAM sequence: AAG
  source 1..20: mol_type = other DNA
aagtaactttgaagtgactt

SEQ ID NO: 27745 - DNA, 20 bp, synthetic construct
  misc_feature 1..20: note = Description of Artificial Sequence: Synthetic oligonucleotide
  misc_feature 1..20: note = Target: SCN10A; (+) strand; PAM type: NRG; PAM sequence: CAG
  source 1..20: mol_type = other DNA
ttgaagtgacttaagaattg

SEQ ID NO: 27746 - DNA, 20 bp, synthetic construct
  misc_feature 1..20: note = Description of Artificial Sequence: Synthetic oligonucleotide
  misc_feature 1..20: note = Target: SCN10A; (+) strand; PAM type: NRG; PAM sequence: CAG
  source 1..20: mol_type = other DNA
ttaagaattgcagaaaaaat

SEQ ID NO: 27747 - DNA, 20 bp, synthetic construct
  misc_feature 1..20: note = Description of Artificial Sequence: Synthetic oligonucleotide
  misc_feature 1..20: note = Target: SCN10A; (+) strand; PAM type: NRG; PAM sequence: AGG
  source 1..20: mol_type = other DNA
taagaattgcagaaaaaatc

SEQ ID NO: 27748 - DNA, 20 bp, synthetic construct
  misc_feature 1..20: note = Description of Artificial Sequence: Synthetic oligonucleotide
  misc_feature 1..20: note = Target: SCN10A; (+) strand; PAM type: NRG; PAM sequence: AAG
  source 1..20: mol_type = other DNA
agaaaaaatcaggcctttaa

SEQ ID NO: 27749 - DNA, 20 bp, synthetic construct
  misc_feature 1..20: note = Description of Artificial Sequence: Synthetic oligonucleotide
  misc_feature 1..20: note = Target: SCN10A; (+) strand; PAM type: NRG; PAM sequence: AAG
  source 1..20: mol_type = other DNA
aaaaatcaggcctttaaaag

SEQ ID NO: 27750 - DNA, 20 bp, synthetic construct
  misc_feature 1..20: note = Description of Artificial Sequence: Synthetic oligonucleotide
  misc_feature 1..20: note = Target: SCN10A; (+) strand; PAM type: NRG; PAM sequence: AGG
  source 1..20: mol_type = other DNA
aaaatcaggcctttaaaaga

SEQ ID NO: 27751 - DNA, 20 bp, synthetic construct
  misc_feature 1..20: note = Description of Artificial Sequence: Synthetic oligonucleotide
  misc_feature 1..20: note = Target: SCN10A; (+) strand; PAM type: NRG; PAM sequence: AAG
  source 1..20: mol_type = other DNA
atcaggcctttaaaagaagg

SEQ ID NO: 27752 - DNA, 20 bp, synthetic construct
  misc_feature 1..20: note = Description of Artificial Sequence: Synthetic oligonucleotide
  misc_feature 1..20: note = Target: SCN10A; (+) strand; PAM type: NRG; PAM sequence: TAG
  source 1..20: mol_type = other DNA
gaaggaagaaattatctaat

SEQ ID NO: 27753 - DNA, 20 bp, synthetic construct
  misc_feature 1..20: note = Description of Artificial Sequence: Synthetic oligonucleotide
  misc_feature 1..20: note = Target: SCN10A; (+) strand; PAM type: NRG; PAM sequence: CAG
  source 1..20: mol_type = other DNA
aattatctaattagtatctc

SEQ ID NO: 27754 - DNA, 20 bp, synthetic construct
  misc_feature 1..20: note = Description of Artificial Sequence: Synthetic oligonucleotide
  misc_feature 1..20: note = Target: SCN10A; (+) strand; PAM type: NRG; PAM sequence: GAG
  source 1..20: mol_type = other DNA
taattagtatctccagccat

SEQ ID NO: 27755 - DNA, 20 bp, synthetic construct
  misc_feature 1..20: note = Description of Artificial Sequence: Synthetic oligonucleotide
  misc_feature 1..20: note = Target: SCN10A; (+) strand; PAM type: NRG; PAM sequence: AAG
  source 1..20: mol_type = other DNA
tccagccatgagacgtgaca

SEQ ID NO: 27756 - DNA, 20 bp, synthetic construct
  misc_feature 1..20: note = Description of Artificial Sequence: Synthetic oligonucleotide
  misc_feature 1..20: note = Target: SCN10A; (+) strand; PAM type: NRG; PAM sequence: TGG
  source 1..20: mol_type = other DNA
gccatgagacgtgacaaagt

SEQ ID NO: 27757 - DNA, 20 bp, synthetic construct
  misc_feature 1..20: note = Description of Artificial Sequence: Synthetic oligonucleotide
  misc_feature 1..20: note = Target: SCN10A; (+) strand; PAM type: NRG; PAM sequence: TGG
  source 1..20: mol_type = other DNA
tgatgacactctgctttgct

SEQ ID NO: 27758 - DNA, 20 bp, synthetic construct
  misc_feature 1..20: note = Description of Artificial Sequence: Synthetic oligonucleotide
  misc_feature 1..20: note = Target: SCN10A; (+) strand; PAM type: NRG; PAM sequence: TAG
  source 1..20: mol_type = other DNA
acactctgctttgcttggta

SEQ ID NO: 27759 - DNA, 20 bp, synthetic construct
  misc_feature 1..20: note = Description of Artificial Sequence: Synthetic oligonucleotide
  misc_feature 1..20: note = Target: SCN10A; (+) strand; PAM type: NRG; PAM sequence: TGG
  source 1..20: mol_type = other DNA
gcttggtatagactgccact

SEQ ID NO: 27760 - DNA, 20 bp, synthetic construct
  misc_feature 1..20: note = Description of Artificial Sequence: Synthetic oligonucleotide
  misc_feature 1..20: note = Target: SCN10A; (+) strand; PAM type: NRG; PAM sequence: GGG
  source 1..20: mol_type = other DNA
cttggtatagactgccactt

SEQ ID NO: 27761 - DNA, 20 bp, synthetic construct
  misc_feature 1..20: note = Description of Artificial Sequence: Synthetic oligonucleotide
  misc_feature 1..20: note = Target: SCN10A; (+) strand; PAM type: NRG; PAM sequence: GAG
  source 1..20: mol_type = other DNA
ccacttgggcatccacattt

SEQ ID NO: 27762 - DNA, 20 bp, synthetic construct
  misc_feature 1..20: note = Description of Artificial Sequence: Synthetic oligonucleotide
  misc_feature 1..20: note = Target: SCN10A; (+) strand; PAM type: NRG; PAM sequence: AGG
  source 1..20: mol_type = other DNA
cacttgggcatccacatttg

SEQ ID NO: 27763 - DNA, 20 bp, synthetic construct
  misc_feature 1..20: note = Description of Artificial Sequence: Synthetic oligonucleotide
  misc_feature 1..20: note = Target: SCN10A; (+) strand; PAM type: NRG; PAM sequence: TGG
  source 1..20: mol_type = other DNA
gcatccacatttgaggactc

SEQ ID NO: 27764 - DNA, 20 bp, synthetic construct
  misc_feature 1..20: note = Description of Artificial Sequence: Synthetic oligonucleotide
  misc_feature 1..20: note = Target: SCN10A; (+) strand; PAM type: NRG; PAM sequence: GGG
  source 1..20: mol_type = other DNA
catccacatttgaggactct

SEQ ID NO: 27765 - DNA, 20 bp, synthetic construct
  misc_feature 1..20: note = Description of Artificial Sequence: Synthetic oligonucleotide
  misc_feature 1..20: note = Target: SCN10A; (+) strand; PAM type: NRG; PAM sequence: CAG
  source 1..20: mol_type = other DNA
atttgaggactctgggccct

SEQ ID NO: 27766 - DNA, 20 bp, synthetic construct
  misc_feature 1..20: note = Description of Artificial Sequence: Synthetic oligonucleotide
  misc_feature 1..20: note = Target: SCN10A; (+) strand; PAM type: NRG; PAM sequence: GAG
  source 1..20: mol_type = other DNA
ttgaggactctgggccctca

SEQ ID NO: 27767 - DNA, 20 bp, synthetic construct
  misc_feature 1..20: note = Description of Artificial Sequence: Synthetic oligonucleotide
  misc_feature 1..20: note = Target: SCN10A; (+) strand; PAM type: NRG; PAM sequence: TGG
  source 1..20: mol_type = other DNA
gactctgggccctcagagcc

SEQ ID NO: 27768 - DNA, 20 bp, synthetic construct
  misc_feature 1..20: note = Description of Artificial Sequence: Synthetic oligonucleotide
  misc_feature 1..20: note = Target: SCN10A; (+) strand; PAM type: NRG; PAM sequence: TGG
  source 1..20: mol_type = other DNA
tgggccctcagagcctggca

SEQ ID NO: 27769 - DNA, 20 bp, synthetic construct
  misc_feature 1..20: note = Description of Artificial Sequence: Synthetic oligonucleotide
  misc_feature 1..20: note = Target: SCN10A; (+) strand; PAM type: NRG; PAM sequence: TAG
  source 1..20: mol_type = other DNA
gccctcagagcctggcatgg

SEQ ID NO: 27770 - DNA, 20 bp, synthetic construct
  misc_feature 1..20: note = Description of Artificial Sequence: Synthetic oligonucleotide
  misc_feature 1..20: note = Target: SCN10A; (+) strand; PAM type: NRG; PAM sequence: AGG
  source 1..20: mol_type = other DNA
ccctcagagcctggcatggt

SEQ ID NO: 27771 - DNA, 20 bp, synthetic construct
  misc_feature 1..20: note = Description of Artificial Sequence: Synthetic oligonucleotide
  misc_feature 1..20: note = Target: SCN10A; (+) strand; PAM type: NRG; PAM sequence: TAG
  source 1..20: mol_type = other DNA
tcagagcctggcatggtagg

SEQ ID NO: 27772 - DNA, 20 bp, synthetic construct
  misc_feature 1..20: note = Description of Artificial Sequence: Synthetic oligonucleotide
  misc_feature 1..20: note = Target: SCN10A; (+) strand; PAM type: NRG; PAM sequence: AAG
  source 1..20: mol_type = other DNA
ctggcatggtaggtagcaca

SEQ ID NO: 27773 - DNA, 20 bp, synthetic construct
  misc_feature 1..20: note = Description of Artificial Sequence: Synthetic oligonucleotide
  misc_feature 1..20: note = Target: SCN10A; (+) strand; PAM type: NRG; PAM sequence: TAG
  source 1..20: mol_type = other DNA
gcatggtaggtagcacaaag

SEQ ID NO: 27774 - DNA, 20 bp, synthetic construct
  misc_feature 1..20: note = Description of Artificial Sequence: Synthetic oligonucleotide
  misc_feature 1..20: note = Target: SCN10A; (+) strand; PAM type: NRG; PAM sequence: AGG
  source 1..20: mol_type = other DNA
catggtaggtagcacaaagt

SEQ ID NO: 27775 - DNA, 20 bp, synthetic construct
  misc_feature 1..20: note = Description of Artificial Sequence: Synthetic oligonucleotide
  misc_feature 1..20: note = Target: SCN10A; (+) strand; PAM type: NRG; PAM sequence: GGG
  source 1..20: mol_type = other DNA
atggtaggtagcacaaagta

SEQ ID NO: 27776 - DNA, 20 bp, synthetic construct
  misc_feature 1..20: note = Description of Artificial Sequence: Synthetic oligonucleotide
  misc_feature 1..20: note = Target: SCN10A; (+) strand; PAM type: NRG; PAM sequence: GGG
  source 1..20: mol_type = other DNA
tggtaggtagcacaaagtag

SEQ ID NO: 27777 - DNA, 20 bp, synthetic construct
  misc_feature 1..20: note = Description of Artificial Sequence: Synthetic oligonucleotide
  misc_feature 1..20: note = Target: SCN10A; (+) strand; PAM type: NRG; PAM sequence: CAG
  source 1..20: mol_type = other DNA
ggtagcacaaagtaggggct

SEQ ID NO: 27778 - DNA, 20 bp, synthetic construct
  misc_feature 1..20: note = Description of Artificial Sequence: Synthetic oligonucleotide
  misc_feature 1..20: note = Target: SCN10A; (+) strand; PAM type: NRG; PAM sequence: AAG
  source 1..20: mol_type = other DNA
tcagtaaatgcccattgcat

SEQ ID NO: 27779 - DNA, 20 bp, synthetic construct
  misc_feature 1..20: note = Description of Artificial Sequence: Synthetic oligonucleotide
  misc_feature 1..20: note = Target: SCN10A; (+) strand; PAM type: NRG; PAM sequence: TAG
  source 1..20: mol_type = other DNA
atgttatctttgcctccgcc

SEQ ID NO: 27780 - DNA, 20 bp, synthetic construct
  misc_feature 1..20: note = Description of Artificial Sequence: Synthetic oligonucleotide
  misc_feature 1..20: note = Target: SCN10A; (+) strand; PAM type: NRG; PAM sequence: TGG
  source 1..20: mol_type = other DNA
ctccgcctagaatatcctct

SEQ ID NO: 27781 - DNA, 20 bp, synthetic construct
  misc_feature 1..20: note = Description of Artificial Sequence: Synthetic oligonucleotide
  misc_feature 1..20: note = Target: SCN10A; (+) strand; PAM type: NRG; PAM sequence: CAG
  source 1..20: mol_type = other DNA
atcctcttggtcaacctcca

SEQ ID NO: 27782 - DNA, 20 bp, synthetic construct
  misc_feature 1..20: note = Description of Artificial Sequence: Synthetic oligonucleotide
  misc_feature 1..20: note = Target: SCN10A; (+) strand; PAM type: NRG; PAM sequence: CAG
  source 1..20: mol_type = other DNA
agtcaaaaacttatcttctg

SEQ ID NO: 27783 - DNA, 20 bp, synthetic construct
  misc_feature 1..20: note = Description of Artificial Sequence: Synthetic oligonucleotide
  misc_feature 1..20: note = Target: SCN10A; (+) strand; PAM type: NRG; PAM sequence: AAG
  source 1..20: mol_type = other DNA
aaaacttatcttctgcagcc

SEQ ID NO: 27784 - DNA, 20 bp, synthetic construct
  misc_feature 1..20: note = Description of Artificial Sequence: Synthetic oligonucleotide
  misc_feature 1..20: note = Target: SCN10A; (+) strand; PAM type: NRG; PAM sequence: CAG
  source 1..20: mol_type = other DNA
ttatcttctgcagccaagtt

SEQ ID NO: 27785 - DNA, 20 bp, synthetic construct
  misc_feature 1..20: note = Description of Artificial Sequence: Synthetic oligonucleotide
  misc_feature 1..20: note = Target: SCN10A; (+) strand; PAM type: NRG; PAM sequence: TGG
  source 1..20: mol_type = other DNA
cttctgcagccaagttcagc

SEQ ID NO: 27786 - DNA, 20 bp, synthetic construct
  misc_feature 1..20: note = Description of Artificial Sequence: Synthetic oligonucleotide
  misc_feature 1..20: note = Target: SCN10A; (+) strand; PAM type: NRG; PAM sequence: AAG
  source 1..20: mol_type = other DNA
ctgcagccaagttcagctgg

SEQ ID NO: 27787 - DNA, 20 bp, synthetic construct
  misc_feature 1..20: note = Description of Artificial Sequence: Synthetic oligonucleotide
  misc_feature 1..20: note = Target: SCN10A; (+) strand; PAM type: NRG; PAM sequence: CAG
  source 1..20: mol_type = other DNA
agttcagctggaagtgactg

SEQ ID NO: 27788 - DNA, 20 bp, synthetic construct
  misc_feature 1..20: note = Description of Artificial Sequence: Synthetic oligonucleotide
  misc_feature 1..20: note = Target: SCN10A; (+) strand; PAM type: NRG; PAM sequence: CAG
  source 1..20: mol_type = other DNA
agtgactgcagtttattcca

SEQ ID NO: 27789 - DNA, 20 bp, synthetic construct
  misc_feature 1..20: note = Description of Artificial Sequence: Synthetic oligonucleotide
  misc_feature 1..20: note = Target: SCN10A; (+) strand; PAM type: NRG; PAM sequence: AGG
  source 1..20: mol_type = other DNA
gtgactgcagtttattccac

SEQ ID NO: 27790 - DNA, 20 bp, synthetic construct
  misc_feature 1..20: note = Description of Artificial Sequence: Synthetic oligonucleotide
  misc_feature 1..20: note = Target: SCN10A; (+) strand; PAM type: NRG; PAM sequence: CAG
  source 1..20: mol_type = other DNA
cagtttattccacaggctca

SEQ ID NO: 27791 - DNA, 20 bp, synthetic construct
  misc_feature 1..20: note = Description of Artificial Sequence: Synthetic oligonucleotide
  misc_feature 1..20: note = Target: SCN10A; (+) strand; PAM type: NRG; PAM sequence: TGG
  source 1..20: mol_type = other DNA
ttccacaggctcacagtctt

SEQ ID NO: 27792 - DNA, 20 bp, synthetic construct
  misc_feature 1..20: note = Description of Artificial Sequence: Synthetic oligonucleotide
  misc_feature 1..20: note = Target: SCN10A; (+) strand; PAM type: NRG; PAM sequence: CAG
  source 1..20: mol_type = other DNA
gcctgttttttcctatgaca

SEQ ID NO: 27793 - DNA, 20 bp, synthetic construct
  misc_feature 1..20: note = Description of Artificial Sequence: Synthetic oligonucleotide
  misc_feature 1..20: note = Target: SCN10A; (+) strand; PAM type: NRG; PAM sequence: CAG
  source 1..20: mol_type = other DNA
cctgctcctccctgatactg

SEQ ID NO: 27794 - DNA, 20 bp, synthetic construct
  misc_feature 1..20: note = Description of Artificial Sequence: Synthetic oligonucleotide
  misc_feature 1..20: note = Target: SCN10A; (+) strand; PAM type: NRG; PAM sequence: TGG
  source 1..20: mol_type = other DNA
ctccctgatactgcagcctt

SEQ ID NO: 27795 - DNA, 20 bp, synthetic construct
  misc_feature 1..20: note = Description of Artificial Sequence: Synthetic oligonucleotide
  misc_feature 1..20: note = Target: SCN10A; (+) strand; PAM type: NRG; PAM sequence: GGG
  source 1..20: mol_type = other DNA
tccctgatactgcagccttt

SEQ ID NO: 27796 - DNA, 20 bp, synthetic construct
  misc_feature 1..20: note = Description of Artificial Sequence: Synthetic oligonucleotide
  misc_feature 1..20: note = Target: SCN10A; (+) strand; PAM type: NRG; PAM sequence: TGG
  source 1..20: mol_type = other DNA
tcatgccctttcctccaccc

SEQ ID NO: 27797 - DNA, 20 bp, synthetic construct
  misc_feature 1..20: note = Description of Artificial Sequence: Synthetic oligonucleotide
  misc_feature 1..20: note = Target: SCN10A; (+) strand; PAM type: NRG; PAM sequence: AAG
  source 1..20: mol_type = other DNA
ccctggtcctgtgctctgtg

SEQ ID NO: 27798 - DNA, 20 bp, synthetic construct
  misc_feature 1..20: note = Description of Artificial Sequence: Synthetic oligonucleotide
  misc_feature 1..20: note = Target: SCN10A; (+) strand; PAM type: NRG; PAM sequence: AGG
  source 1..20: mol_type = other DNA
cctggtcctgtgctctgtga

SEQ ID NO: 27799 - DNA, 20 bp, synthetic construct
  misc_feature 1..20: note = Description of Artificial Sequence: Synthetic oligonucleotide
  misc_feature 1..20: note = Target: SCN10A; (+) strand; PAM type: NRG; PAM sequence: CAG
  source 1..20: mol_type = other DNA
gtcctgtgctctgtgaaggc

SEQ ID NO: 27800 - DNA, 20 bp, synthetic construct
  misc_feature 1..20: note = Description of Artificial Sequence: Synthetic oligonucleotide
  misc_feature 1..20: note = Target: SCN10A; (+) strand; PAM type: NRG; PAM sequence: AGG
  source 1..20: mol_type = other DNA
tcctgtgctctgtgaaggcc

SEQ ID NO: 27801 - DNA, 20 bp, synthetic construct
  misc_feature 1..20: note = Description of Artificial Sequence: Synthetic oligonucleotide
  misc_feature 1..20: note = Target: SCN10A; (+) strand; PAM type: NRG; PAM sequence: AAG
  source 1..20: mol_type = other DNA
tctccctacctcctactgtg

SEQ ID NO: 27802 - DNA, 20 bp, synthetic construct
  misc_feature 1..20: note = Description of Artificial Sequence: Synthetic oligonucleotide
  misc_feature 1..20: note = Target: SCN10A; (+) strand; PAM type: NRG; PAM sequence: TGG
  source 1..20: mol_type = other DNA
gtgaagattgactctgtttc

SEQ ID NO: 27803 - DNA, 20 bp, synthetic construct
  misc_feature 1..20: note = Description of Artificial Sequence: Synthetic oligonucleotide
  misc_feature 1..20: note = Target: SCN10A; (+) strand; PAM type: NRG; PAM sequence: CGG
  source 1..20: mol_type = other DNA
ttgactctgtttctggcacc

SEQ ID NO: 27804 - DNA, 20 bp, synthetic construct
  misc_feature 1..20: note = Description of Artificial Sequence: Synthetic oligonucleotide
  misc_feature 1..20: note = Target: SCN10A; (+) strand; PAM type: NRG; PAM sequence: TGG
  source 1..20: mol_type = other DNA
gtttctggcacccggtcctg

SEQ ID NO: 27805 - DNA, 20 bp, synthetic construct
  misc_feature 1..20: note = Description of Artificial Sequence: Synthetic oligonucleotide
  misc_feature 1..20: note = Target: SCN10A; (+) strand; PAM type: NRG; PAM sequence: CGG
  source 1..20: mol_type = other DNA
cggtcctgtggctaattgta

SEQ ID NO: 27806 - DNA, 20 bp, synthetic construct
  misc_feature 1..20: note = Description of Artificial Sequence: Synthetic oligonucleotide
  misc_feature 1..20: note = Target: SCN10A; (+) strand; PAM type: NRG; PAM sequence: GAG
  source 1..20: mol_type = other DNA
gtcctgtggctaattgtacg

SEQ ID NO: 27807 - DNA, 20 bp, synthetic construct
  misc_feature 1..20: note = Description of Artificial Sequence: Synthetic oligonucleotide
  misc_feature 1..20: note = Target: SCN10A; (+) strand; PAM type: NRG; PAM sequence: TGG
  source 1..20: mol_type = other DNA
gtggctaattgtacggagcc

SEQ ID NO: 27808 - DNA, 20 bp, synthetic construct
  misc_feature 1..20: note = Description of Artificial Sequence: Synthetic oligonucleotide
  misc_feature 1..20: note = Target: SCN10A; (+) strand; PAM type: NRG; PAM sequence: AAG
  source 1..20: mol_type = other DNA
cggagcctggtgttaattac

SEQ ID NO: 27809 - DNA, 20 bp, synthetic construct
  misc_feature 1..20: note = Description of Artificial Sequence: Synthetic oligonucleotide
  misc_feature 1..20: note = Target: SCN10A; (+) strand; PAM type: NRG; PAM sequence: AGG
  source 1..20: mol_type = other DNA
ggagcctggtgttaattaca

SEQ ID NO: 27810 - DNA, 20 bp, synthetic construct
  misc_feature 1..20: note = Description of Artificial Sequence: Synthetic oligonucleotide
  misc_feature 1..20: note = Target: SCN10A; (+) strand; PAM type: NRG; PAM sequence: GGG
  source 1..20: mol_type = other DNA
gagcctggtgttaattacaa

SEQ ID NO: 27811 - DNA, 20 bp, synthetic construct
  misc_feature 1..20: note = Description of Artificial Sequence: Synthetic oligonucleotide
  misc_feature 1..20: note = Target: SCN10A; (+) strand; PAM type: NRG; PAM sequence: GGG
  source 1..20: mol_type = other DNA
agcctggtgttaattacaag

SEQ ID NO: 27812 - DNA, 20 bp, synthetic construct
  misc_feature 1..20: note = Description of Artificial Sequence: Synthetic oligonucleotide
  misc_feature 1..20: note = Target: SCN10A; (+) strand; PAM type: NRG; PAM sequence: GGG
  source 1..20: mol_type = other DNA
gcctggtgttaattacaagg

SEQ ID NO: 27813 - DNA, 20 bp, synthetic construct
  misc_feature 1..20: note = Description of Artificial Sequence: Synthetic oligonucleotide
  misc_feature 1..20: note = Target: SCN10A; (+) strand; PAM type: NRG; PAM sequence: GAG
  source 1..20: mol_type = other DNA
tgttaattacaagggggcct

SEQ ID NO: 27814 - DNA, 20 bp, synthetic construct
  misc_feature 1..20: note = Description of Artificial Sequence: Synthetic oligonucleotide
  misc_feature 1..20: note = Target: SCN10A; (+) strand; PAM type: NRG; PAM sequence: AGG
  source 1..20: mol_type = other DNA
gttaattacaagggggcctg

SEQ ID NO: 27815 - DNA, 20 bp, synthetic construct
  misc_feature 1..20: note = Description of Artificial Sequence: Synthetic oligonucleotide
  misc_feature 1..20: note = Target: SCN10A; (+) strand; PAM type: NRG; PAM sequence: CGG
  source 1..20: mol_type = other DNA
tacaagggggcctgaggatt

SEQ ID NO: 27816 - DNA, 20 bp, synthetic construct
  misc_feature 1..20: note = Description of Artificial Sequence: Synthetic oligonucleotide
  misc_feature 1..20: note = Target: SCN10A; (+) strand; PAM type: NRG; PAM sequence: GGG
  source 1..20: mol_type = other DNA
acaagggggcctgaggattc

SEQ ID NO: 27817 - DNA, 20 bp, synthetic construct
  misc_feature 1..20: note = Description of Artificial Sequence: Synthetic oligonucleotide
  misc_feature 1..20: note = Target: SCN10A; (+) strand; PAM type: NRG; PAM sequence: TGG
  source 1..20: mol_type = other DNA
ggcctgaggattcgggcaac

SEQ ID NO: 27818 - DNA, 20 bp, synthetic construct
  misc_feature 1..20: note = Description of Artificial Sequence: Synthetic oligonucleotide
  misc_feature 1..20: note = Target: SCN10A; (+) strand; PAM type: NRG; PAM sequence: CAG
  source 1..20: mol_type = other DNA
ggattcgggcaactggctga

SEQ ID NO: 27819 - DNA, 20 bp, synthetic construct
  misc_feature 1..20: note = Description of Artificial Sequence: Synthetic oligonucleotide
  misc_feature 1..20: note = Target: SCN10A; (+) strand; PAM type: NRG; PAM sequence: AAG
  source 1..20: mol_type = other DNA
gggcaactggctgacagcta

SEQ ID NO: 27820 - DNA, 20 bp, synthetic construct
  misc_feature 1..20: note = Description of Artificial Sequence: Synthetic oligonucleotide
  misc_feature 1..20: note = Target: SCN10A; (+) strand; PAM type: NRG; PAM sequence: AAG
  source 1..20: mol_type = other DNA
ctggctgacagctaaagcat

SEQ ID NO: 27821 - DNA, 20 bp, synthetic construct
  misc_feature 1..20: note = Description of Artificial Sequence: Synthetic oligonucleotide
  misc_feature 1..20: note = Target: SCN10A; (+) strand; PAM type: NRG; PAM sequence: AGG
  source 1..20: mol_type = other DNA
tggctgacagctaaagcata

SEQ ID NO: 27822 - DNA, 20 bp, synthetic construct
  misc_feature 1..20: note = Description of Artificial Sequence: Synthetic oligonucleotide
  misc_feature 1..20: note = Target: SCN10A; (+) strand; PAM type: NRG; PAM sequence: GGG
  source 1..20: mol_type = other DNA
ggctgacagctaaagcataa

SEQ ID NO: 27823 - DNA, 20 bp, synthetic construct
  misc_feature 1..20: note = Description of Artificial Sequence: Synthetic oligonucleotide
  misc_feature 1..20: note = Target: SCN10A; (+) strand; PAM type: NRG; PAM sequence: CAG
  source 1..20: mol_type = other DNA
gcataagggatttgaatgac

SEQ ID NO: 27824 - DNA, 20 bp, synthetic construct
  misc_feature 1..20: note = Description of Artificial Sequence: Synthetic oligonucleotide
  misc_feature 1..20: note = Target: SCN10A; (+) strand; PAM type: NRG; PAM sequence: CGG
  source 1..20: mol_type = other DNA
tgtttttttttttttttttt

SEQ ID NO: 27825 - DNA, 20 bp, synthetic construct
  misc_feature 1..20: note = Description of Artificial Sequence: Synthetic oligonucleotide
  misc_feature 1..20: note = Target: SCN10A; (+) strand; PAM type: NRG; PAM sequence: CAG
  source 1..20: mol_type = other DNA
ttttttttttttttcggttc

SEQ ID NO: 27826 - DNA, 20 bp, synthetic construct
  misc_feature 1..20: note = Description of Artificial Sequence: Synthetic oligonucleotide
  misc_feature 1..20: note = Target: SCN10A; (+) strand; PAM type: NRG; PAM sequence: TAG
  source 1..20: mol_type = other DNA
gctgtttttgaactttatgt

SEQ ID NO: 27827 - DNA, 20 bp, synthetic construct
  misc_feature 1..20: note = Description of Artificial Sequence: Synthetic oligonucleotide
  misc_feature 1..20: note = Target: SCN10A; (+) strand; PAM type: NRG; PAM sequence: AGG
  source 1..20: mol_type = other DNA
ctgtttttgaactttatgtt

SEQ ID NO: 27828 - DNA, 20 bp, synthetic construct
  misc_feature 1..20: note = Description of Artificial Sequence: Synthetic oligonucleotide
  misc_feature 1..20: note = Target: SCN10A; (+) strand; PAM type: NRG; PAM sequence: GGG
  source 1..20: mol_type = other DNA
tgtttttgaactttatgtta

SEQ ID NO: 27829 - DNA, 20 bp, synthetic construct
  misc_feature 1..20: note = Description of Artificial Sequence: Synthetic oligonucleotide
  misc_feature 1..20: note = Target: SCN10A; (+) strand; PAM type: NRG; PAM sequence: TGG
  source 1..20: mol_type = other DNA
ttgaactttatgttagggcc

SEQ ID NO: 27830 - DNA, 20 bp, synthetic construct
  misc_feature 1..20: note = Description of Artificial Sequence: Synthetic oligonucleotide
  misc_feature 1..20: note = Target: SCN10A; (+) strand; PAM type: NRG; PAM sequence: GAG
  source 1..20: mol_type = other DNA
gaactttatgttagggcctg

SEQ ID NO: 27831 - DNA, 20 bp, synthetic construct
  misc_feature 1..20: note = Description of Artificial Sequence: Synthetic oligonucleotide
  misc_feature 1..20: note = Target: SCN10A; (+) strand; PAM type: NRG; PAM sequence: TAG
  source 1..20: mol_type = other DNA
tttatgttagggcctggaga

SEQ ID NO: 27832 - DNA, 20 bp, synthetic construct
  misc_feature 1..20: note = Description of Artificial Sequence: Synthetic oligonucleotide
  misc_feature 1..20: note = Target: SCN10A; (+) strand; PAM type: NRG; PAM sequence: AGG
  source 1..20: mol_type = other DNA
ttatgttagggcctggagat

SEQ ID NO: 27833 - DNA, 20 bp, synthetic construct
  misc_feature 1..20: note = Description of Artificial Sequence: Synthetic oligonucleotide
  misc_feature 1..20: note = Target: SCN10A; (+) strand; PAM type: NRG; PAM sequence: TGG
  source 1..20: mol_type = other DNA
ggcctggagataggtttttt

SEQ ID NO: 27834 - DNA, 20 bp, synthetic construct
  misc_feature 1..20: note = Description of Artificial Sequence: Synthetic oligonucleotide
  misc_feature 1..20: note = Target: SCN10A; (+) strand; PAM type: NRG; PAM sequence: GGG
  source 1..20: mol_type = other DNA
gcctggagataggttttttt

SEQ ID NO: 27835 - DNA, 20 bp, synthetic construct
  misc_feature 1..20: note = Description of Artificial Sequence: Synthetic oligonucleotide
  misc_feature 1..20: note = Target: SCN10A; (+) strand; PAM type: NRG; PAM sequence: GGG
  source 1..20: mol_type = other DNA
cctggagataggtttttttg

SEQ ID NO: 27836 - DNA, 20 bp, synthetic construct
  misc_feature 1..20: note = Description of Artificial Sequence: Synthetic oligonucleotide
  misc_feature 1..20: note = Target: SCN10A; (+) strand; PAM type: NRG; PAM sequence: GGG
  source 1..20: mol_type = other DNA
ctggagataggtttttttgg

SEQ ID NO: 27837 - DNA, 20 bp, synthetic construct
  misc_feature 1..20: note = Description of Artificial Sequence: Synthetic oligonucleotide
  misc_feature 1..20: note = Target: SCN10A; (+) strand; PAM type: NRG; PAM sequence: GAG
  source 1..20: mol_type = other DNA
ggagataggtttttttgggg

SEQ ID NO: 27838 - DNA, 20 bp, synthetic construct
  misc_feature 1..20: note = Description of Artificial Sequence: Synthetic oligonucleotide
  misc_feature 1..20: note = Target: SCN10A; (+) strand; PAM type: NRG; PAM sequence: CAG
  source 1..20: mol_type = other DNA
ataggtttttttgggggagt

SEQ ID NO: 27839 - DNA, 20 bp, synthetic construct
  misc_feature 1..20: note = Description of Artificial Sequence: Synthetic oligonucleotide
  misc_feature 1..20: note = Target: SCN10A; (+) strand; PAM type: NRG; PAM sequence: AAG
  source 1..20: mol_type = other DNA
cccaactccaactatgaaca

SEQ ID NO: 27840 - DNA, 20 bp, synthetic construct
  misc_feature 1..20: note = Description of Artificial Sequence: Synthetic oligonucleotide
  misc_feature 1..20: note = Target: SCN10A; (+) strand; PAM type: NRG; PAM sequence: TGG
  source 1..20: mol_type = other DNA
actccaactatgaacaaagt

SEQ ID NO: 27841 - DNA, 20 bp, synthetic construct
  misc_feature 1..20: note = Description of Artificial Sequence: Synthetic oligonucleotide
  misc_feature 1..20: note = Target: SCN10A; (+) strand; PAM type: NRG; PAM sequence: AAG
  source 1..20: mol_type = other DNA
tgaacaaagttggaaatata

SEQ ID NO: 27842 - DNA, 20 bp, synthetic construct
  misc_feature 1..20: note = Description of Artificial Sequence: Synthetic oligonucleotide
  misc_feature 1..20: note = Target: SCN10A; (+) strand; PAM type: NRG; PAM sequence: AAG
  source 1..20: mol_type = other DNA
tctatatgatgtctaacttg

SEQ ID NO: 27843 - DNA, 20 bp, synthetic construct
  misc_feature 1..20: note = Description of Artificial Sequence: Synthetic oligonucleotide
  misc_feature 1..20: note = Target: SCN10A; (+) strand; PAM type: NRG; PAM sequence: TGG
  source 1..20: mol_type = other DNA
acttgaagatgtttgatttt

SEQ ID NO: 27844 - DNA, 20 bp, synthetic construct
  misc_feature 1..20: note = Description of Artificial Sequence: Synthetic oligonucleotide
  misc_feature 1..20: note = Target: SCN10A; (+) strand; PAM type: NRG; PAM sequence: TGG
  source 1..20: mol_type = other DNA
agatgtttgatttttggtct

SEQ ID NO: 27845 - DNA, 20 bp, synthetic construct
  misc_feature 1..20: note = Description of Artificial Sequence: Synthetic oligonucleotide
  misc_feature 1..20: note = Target: SCN10A; (+) strand; PAM type: NRG; PAM sequence: GGG
  source 1..20: mol_type = other DNA
gatgtttgatttttggtctt

SEQ ID NO: 27846 - DNA, 20 bp, synthetic construct
  misc_feature 1..20: note = Description of Artificial Sequence: Synthetic oligonucleotide
  misc_feature 1..20: note = Target: SCN10A; (+) strand; PAM type: NRG; PAM sequence: GGG
  source 1..20: mol_type = other DNA
atgtttgatttttggtcttg

SEQ ID NO: 27847 - DNA, 20 bp, synthetic construct
  misc_feature 1..20: note = Description of Artificial Sequence: Synthetic oligonucleotide
  misc_feature 1..20: note = Target: SCN10A; (+) strand; PAM type: NRG; PAM sequence: TGG
  source 1..20: mol_type = other DNA
gatttttggtcttggggacc

SEQ ID NO: 27848 - DNA, 20 bp, synthetic construct
  misc_feature 1..20: note = Description of Artificial Sequence: Synthetic oligonucleotide
  misc_feature 1..20: note = Target: SCN10A; (+) strand; PAM type: NRG; PAM sequence: GGG
  source 1..20: mol_type = other DNA
atttttggtcttggggacct

SEQ ID NO: 27849 - DNA, 20 bp, synthetic construct
  misc_feature 1..20: note = Description of Artificial Sequence: Synthetic oligonucleotide
  misc_feature 1..20: note = Target: SCN10A; (+) strand; PAM type: NRG; PAM sequence: GGG
  source 1..20: mol_type = other DNA
tttttggtcttggggacctg

SEQ ID NO: 27850 - DNA, 20 bp, synthetic construct
  misc_feature 1..20: note = Description of Artificial Sequence: Synthetic oligonucleotide
  misc_feature 1..20: note = Target: SCN10A; (+) strand; PAM type: NRG; PAM sequence: GAG
  source 1..20: mol_type = other DNA
tttggtcttggggacctggg

SEQ ID NO: 27851 - DNA, 20 bp, synthetic construct
  misc_feature 1..20: note = Description of Artificial Sequence: Synthetic oligonucleotide
  misc_feature 1..20: note = Target: SCN10A; (+) strand; PAM type: NRG; PAM sequence: AAG
  source 1..20: mol_type = other DNA
ggggagccttatttgtacca

SEQ ID NO: 27852 - DNA, 20 bp, synthetic construct
  misc_feature 1..20: note = Description of Artificial Sequence: Synthetic oligonucleotide
  misc_feature 1..20: note = Target: SCN10A; (+) strand; PAM type: NRG; PAM sequence: AGG
  source 1..20: mol_type = other DNA
gggagccttatttgtaccaa

SEQ ID NO: 27853 - DNA, 20 bp, synthetic construct
  misc_feature 1..20: note = Description of Artificial Sequence: Synthetic oligonucleotide
  misc_feature 1..20: note = Target: SCN10A; (+) strand; PAM type: NRG; PAM sequence: AAG
  source 1..20: mol_type = other DNA
tgtaccaaaggcctccacca

SEQ ID NO: 27854 - DNA, 20 bp, synthetic construct
  misc_feature 1..20: note = Description of Artificial Sequence: Synthetic oligonucleotide
  misc_feature 1..20: note = Target: SCN10A; (+) strand; PAM type: NRG; PAM sequence: GAG
  source 1..20: mol_type = other DNA
caaaggcctccaccaaagat

SEQ ID NO: 27855 - DNA, 20 bp, synthetic construct
  misc_feature 1..20: note = Description of Artificial Sequence: Synthetic oligonucleotide
  misc_feature 1..20: note = Target: SCN10A; (+) strand; PAM type: NRG; PAM sequence: AGG
  source 1..20: mol_type = other DNA
aaaggcctccaccaaagatg

SEQ ID NO: 27856 - DNA, 20 bp, synthetic construct
  misc_feature 1..20: note = Description of Artificial Sequence: Synthetic oligonucleotide
  misc_feature 1..20: note = Target: SCN10A; (+) strand; PAM type: NRG; PAM sequence: AAG
  source 1..20: mol_type = other DNA
gcctccaccaaagatgaggc

SEQ ID NO: 27857 - DNA, 20 bp, synthetic construct
  misc_feature 1..20: note = Description of Artificial Sequence: Synthetic oligonucleotide
  misc_feature 1..20: note = Target: SCN10A; (+) strand; PAM type: NRG; PAM sequence: AGG
  source 1..20: mol_type = other DNA
cctccaccaaagatgaggca

SEQ ID NO: 27858 - DNA, 20 bp, synthetic construct
  misc_feature 1..20: note = Description of Artificial Sequence: Synthetic oligonucleotide
  misc_feature 1..20: note = Target: SCN10A; (+) strand; PAM type: NRG; PAM sequence: TAG
  source 1..20: mol_type = other DNA
caaagatgaggcaaggcctt

SEQ ID NO: 27859 - DNA, 20 bp, synthetic construct
  misc_feature 1..20: note = Description of Artificial Sequence: Synthetic oligonucleotide
  misc_feature 1..20: note = Target: SCN10A; (+) strand; PAM type: NRG; PAM sequence: AGG
  source 1..20: mol_type = other DNA
aaagatgaggcaaggccttt

SEQ ID NO: 27860 - DNA, 20 bp, synthetic construct
  misc_feature 1..20: note = Description of Artificial Sequence: Synthetic oligonucleotide
  misc_feature 1..20: note = Target: SCN10A; (+) strand; PAM type: NRG; PAM sequence: AAG
  source 1..20: mol_type = other DNA
atgaggcaaggcctttaggt

SEQ ID NO: 27861 - DNA, 20 bp, synthetic construct
  misc_feature 1..20: note = Description of Artificial Sequence: Synthetic oligonucleotide
  misc_feature 1..20: note = Target: SCN10A; (+) strand; PAM type: NRG; PAM sequence: GAG
  source 1..20: mol_type = other DNA
gaggcaaggcctttaggtaa

SEQ ID NO: 27862 - DNA, 20 bp, synthetic construct
  misc_feature 1..20: note = Description of Artificial Sequence: Synthetic oligonucleotide
  misc_feature 1..20: note = Target: SCN10A; (+) strand; PAM type: NRG; PAM sequence: GAG
  source 1..20: mol_type = other DNA
ggcaaggcctttaggtaaga

SEQ ID NO: 27863 - DNA, 20 bp, synthetic construct
  misc_feature 1..20: note = Description of Artificial Sequence: Synthetic oligonucleotide
  misc_feature 1..20: note = Target: SCN10A; (+) strand; PAM type: NRG; PAM sequence: AGG
  source 1..20: mol_type = other DNA
gcaaggcctttaggtaagag

SEQ ID NO: 27864 - DNA, 20 bp, synthetic construct
  misc_feature 1..20: note = Description of Artificial Sequence: Synthetic oligonucleotide
  misc_feature 1..20: note = Target: SCN10A; (+) strand; PAM type: NRG; PAM sequence: GGG
  source 1..20: mol_type = other DNA
caaggcctttaggtaagaga

SEQ ID NO: 27865 - DNA, 20 bp, synthetic construct
  misc_feature 1..20: note = Description of Artificial Sequence: Synthetic oligonucleotide
  misc_feature 1..20: note = Target: SCN10A; (+) strand; PAM type: NRG; PAM sequence: CAG
  source 1..20: mol_type = other DNA
agagagggttcaacatctca

SEQ ID NO: 27866 - DNA, 20 bp, synthetic construct
  misc_feature 1..20: note = Description of Artificial Sequence: Synthetic oligonucleotide
  misc_feature 1..20: note = Target: SCN10A; (+) strand; PAM type: NRG; PAM sequence: AGG
  source 1..20: mol_type = other DNA
gagagggttcaacatctcac

SEQ ID NO: 27867 - DNA, 20 bp, synthetic construct
  misc_feature 1..20: note = Description of Artificial Sequence: Synthetic oligonucleotide
  misc_feature 1..20: note = Target: SCN10A; (+) strand; PAM type: NRG; PAM sequence: TGG
  source 1..20: mol_type = other DNA
tcaacatctcacaggaaaaa

SEQ ID NO: 27868 - DNA, 20 bp, synthetic construct
  misc_feature 1..20: note = Description of Artificial Sequence: Synthetic oligonucleotide
  misc_feature 1..20: note = Target: SCN10A; (+) strand; PAM type: NRG; PAM sequence: GAG
  source 1..20: mol_type = other DNA
catctcacaggaaaaatggt

SEQ ID NO: 27869 - DNA, 20 bp, synthetic construct
  misc_feature 1..20: note = Description of Artificial Sequence: Synthetic oligonucleotide
  misc_feature 1..20: note = Target: SCN10A; (+) strand; PAM type: NRG; PAM sequence: AGG
  source 1..20: mol_type = other DNA
atctcacaggaaaaatggtg

SEQ ID NO: 27870 - DNA, 20 bp, synthetic construct
  misc_feature 1..20: note = Description of Artificial Sequence: Synthetic oligonucleotide
  misc_feature 1..20: note = Target: SCN10A; (+) strand; PAM type: NRG; PAM sequence: GGG
  source 1..20: mol_type = other DNA
tctcacaggaaaaatggtga

SEQ ID NO: 27871 - DNA, 20 bp, synthetic construct
  misc_feature 1..20: note = Description of Artificial Sequence: Synthetic oligonucleotide
  misc_feature 1..20: note = Target: SCN10A; (+) strand; PAM type: NRG; PAM sequence: TAG
  source 1..20: mol_type = other DNA
aggaaaaatggtgagggatg

SEQ ID NO: 27872 - DNA, 20 bp, synthetic construct
  misc_feature 1..20: note = Description of Artificial Sequence: Synthetic oligonucleotide
  misc_feature 1..20: note = Target: SCN10A; (+) strand; PAM type: NRG; PAM sequence: CAG
  source 1..20: mol_type = other DNA
aaaaatggtgagggatgtag

SEQ ID NO: 27873 - DNA, 20 bp, synthetic construct
  misc_feature 1..20: note = Description of Artificial Sequence: Synthetic oligonucleotide
  misc_feature 1..20: note = Target: SCN10A; (+) strand; PAM type: NRG; PAM sequence: AAG
  source 1..20: mol_type = other DNA
atggtgagggatgtagcagc

SEQ ID NO: 27874 - DNA, 20 bp, synthetic construct
  misc_feature 1..20: note = Description of Artificial Sequence: Synthetic oligonucleotide
  misc_feature 1..20: note = Target: SCN10A; (+) strand; PAM type: NRG; PAM sequence: CAG
  source 1..20: mol_type = other DNA
agcaagctctcgctccttgc

SEQ ID NO: 27875 - DNA, 20 bp, synthetic construct
  misc_feature 1..20: note = Description of Artificial Sequence: Synthetic oligonucleotide
  misc_feature 1..20: note = Target: SCN10A; (+) strand; PAM type: NRG; PAM sequence: AGG
  source 1..20: mol_type = other DNA
gcaagctctcgctccttgcc

SEQ ID NO: 27876 - DNA, 20 bp, synthetic construct
  misc_feature 1..20: note = Description of Artificial Sequence: Synthetic oligonucleotide
  misc_feature 1..20: note = Target: SCN10A; (+) strand; PAM type: NRG; PAM sequence: TGG
  source 1..20: mol_type = other DNA
tcgctccttgccaggttccc

SEQ ID NO: 27877 - DNA, 20 bp, synthetic construct
  misc_feature 1..20: note = Description of Artificial Sequence: Synthetic oligonucleotide
  misc_feature 1..20: note = Target: SCN10A; (+) strand; PAM type: NRG; PAM sequence: GGG
  source 1..20: mol_type = other DNA
cgctccttgccaggttccct

SEQ ID NO: 27878 - DNA, 20 bp, synthetic construct
  misc_feature 1..20: note = Description of Artificial Sequence: Synthetic oligonucleotide
  misc_feature 1..20: note = Target: SCN10A; (+) strand; PAM type: NRG; PAM sequence: TGG
  source 1..20: mol_type = other DNA
gctctttgttgttatgcaca

SEQ ID NO: 27879 - DNA, 20 bp, synthetic construct
  misc_feature 1..20: note = Description of Artificial Sequence: Synthetic oligonucleotide
  misc_feature 1..20: note = Target: SCN10A; (+) strand; PAM type: NRG; PAM sequence: GGG
  source 1..20: mol_type = other DNA
ctctttgttgttatgcacat

SEQ ID NO: 27880 - DNA, 20 bp, synthetic construct
  misc_feature 1..20: note = Description of Artificial Sequence: Synthetic oligonucleotide
  misc_feature 1..20: note = Target: SCN10A; (+) strand; PAM type: NRG; PAM sequence: TGG
  source 1..20: mol_type = other DNA
catgggtcacaatattgtgt

SEQ ID NO: 27881 - DNA, 20 bp, synthetic construct
  misc_feature 1..20: note = Description of Artificial Sequence: Synthetic oligonucleotide
  misc_feature 1..20: note = Target: SCN10A; (+) strand; PAM type: NRG; PAM sequence: AAG
  source 1..20: mol_type = other DNA
ggtcacaatattgtgttgga

SEQ ID NO: 27882 - DNA, 20 bp, synthetic construct
  misc_feature 1..20: note = Description of Artificial Sequence: Synthetic oligonucleotide
  misc_feature 1..20: note = Target: SCN10A; (+) strand; PAM type: NRG; PAM sequence: GAG
  source 1..20: mol_type = other DNA
tcacaatattgtgttggaaa

SEQ ID NO: 27883 - DNA, 20 bp, synthetic construct
  misc_feature 1..20: note = Description of Artificial Sequence: Synthetic oligonucleotide
  misc_feature 1..20: note = Target: SCN10A; (+) strand; PAM type: NRG; PAM sequence: AGG
  source 1..20: mol_type = other DNA
cacaatattgtgttggaaag

SEQ ID NO: 27884 - DNA, 20 bp, synthetic construct
  misc_feature 1..20: note = Description of Artificial Sequence: Synthetic oligonucleotide
  misc_feature 1..20: note = Target: SCN10A; (+) strand; PAM type: NRG; PAM sequence: AAG
  source 1..20: mol_type = other DNA
aatattgtgttggaaagagg

SEQ ID NO: 27885 - DNA, 20 bp, synthetic construct
  misc_feature 1..20: note = Description of Artificial Sequence: Synthetic oligonucleotide
  misc_feature 1..20: note = Target: SCN10A; (+) strand; PAM type: NRG; PAM sequence: AAG
  source 1..20: mol_type = other DNA
ttgtgttggaaagaggaaga

SEQ ID NO: 27886 - DNA, 20 bp, synthetic construct
  misc_feature 1..20: note = Description of Artificial Sequence: Synthetic oligonucleotide
  misc_feature 1..20: note = Target: SCN10A; (+) strand; PAM type: NRG; PAM sequence: TAG
  source 1..20: mol_type = other DNA
tgttggaaagaggaagaaag

SEQ ID NO: 27887 - DNA, 20 bp, synthetic construct
  misc_feature 1..20: note = Description of Artificial Sequence: Synthetic oligonucleotide
  misc_feature 1..20: note = Target: SCN10A; (+) strand; PAM type: NRG; PAM sequence: AAG
  source 1..20: mol_type = other DNA
tggaaagaggaagaaagtag

SEQ ID NO: 27888 - DNA, 20 bp, synthetic construct
  misc_feature 1..20: note = Description of Artificial Sequence: Synthetic oligonucleotide
  misc_feature 1..20: note = Target: SCN10A; (+) strand; PAM type: NRG; PAM sequence: AGG
  source 1..20: mol_type = other DNA
ggaaagaggaagaaagtaga

SEQ ID NO: 27889 - DNA, 20 bp, synthetic construct
  misc_feature 1..20: note = Description of Artificial Sequence: Synthetic oligonucleotide
  misc_feature 1..20: note = Target: SCN10A; (+) strand; PAM type: NRG; PAM sequence: GGG
  source 1..20: mol_type = other DNA
gaaagaggaagaaagtagaa

SEQ ID NO: 27890 - DNA, 20 bp, synthetic construct
  misc_feature 1..20: note = Description of Artificial Sequence: Synthetic oligonucleotide
  misc_feature 1..20: note = Target: SCN10A; (+) strand; PAM type: NRG; PAM sequence: GGG
  source 1..20: mol_type = other DNA
aaagaggaagaaagtagaag

SEQ ID NO: 27891 - DNA, 20 bp, synthetic construct
  misc_feature 1..20: note = Description of Artificial Sequence: Synthetic oligonucleotide
  misc_feature 1..20: note = Target: SCN10A; (+) strand; PAM type: NRG; PAM sequence: TGG
  source 1..20: mol_type = other DNA
gaagaaagtagaaggggact

SEQ ID NO: 27892 - DNA, 20 bp, synthetic construct
  misc_feature 1..20: note = Description of Artificial Sequence: Synthetic oligonucleotide
  misc_feature 1..20: note = Target: SCN10A; (+) strand; PAM type: NRG; PAM sequence: GGG
  source 1..20: mol_type = other DNA
aagaaagtagaaggggactt

SEQ ID NO: 27893 - DNA, 20 bp, synthetic construct
  misc_feature 1..20: note = Description of Artificial Sequence: Synthetic oligonucleotide
  misc_feature 1..20: note = Target: SCN10A; (+) strand; PAM type: NRG; PAM sequence: TGG
  source 1..20: mol_type = other DNA
ttgggaaataattataattt

SEQ ID NO: 27894 - DNA, 20 bp, synthetic construct
  misc_feature 1..20: note = Description of Artificial Sequence: Synthetic oligonucleotide
  misc_feature 1..20: note = Target: SCN10A; (+) strand; PAM type: NRG; PAM sequence: TGG
  source 1..20: mol_type = other DNA
tttggattataaaatctttg

SEQ ID NO: 27895 - DNA, 20 bp, synthetic construct
  misc_feature 1..20: note = Description of Artificial Sequence: Synthetic oligonucleotide
  misc_feature 1..20: note = Target: SCN10A; (+) strand; PAM type: NRG; PAM sequence: AAG
  source 1..20: mol_type = other DNA
ggattataaaatctttgtgg

SEQ ID NO: 27896 - DNA, 20 bp, synthetic construct
  misc_feature 1..20: note = Description of Artificial Sequence: Synthetic oligonucleotide
  misc_feature 1..20: note = Target: SCN10A; (+) strand; PAM type: NRG; PAM sequence: CAG
  source 1..20: mol_type = other DNA
gaagaccttctgtgaatttc

SEQ ID NO: 27897 - DNA, 20 bp, synthetic construct
  misc_feature 1..20: note = Description of Artificial Sequence: Synthetic oligonucleotide
  misc_feature 1..20: note = Target: SCN10A; (+) strand; PAM type: NRG; PAM sequence: TAG
  source 1..20: mol_type = other DNA
ctgtgaatttccagtttaac

SEQ ID NO: 27898 - DNA, 20 bp, synthetic construct
  misc_feature 1..20: note = Description of Artificial Sequence: Synthetic oligonucleotide
  misc_feature 1..20: note = Target: SCN10A; (+) strand; PAM type: NRG; PAM sequence: AGG
  source 1..20: mol_type = other DNA
tgtgaatttccagtttaact

SEQ ID NO: 27899 - DNA, 20 bp, synthetic construct
  misc_feature 1..20: note = Description of Artificial Sequence: Synthetic oligonucleotide
  misc_feature 1..20: note = Target: SCN10A; (+) strand; PAM type: NRG; PAM sequence: TAG
  source 1..20: mol_type = other DNA
taggacatgttcccatcgtg

SEQ ID NO: 27900 - DNA, 20 bp, synthetic construct
  misc_feature 1..20: note = Description of Artificial Sequence: Synthetic oligonucleotide
  misc_feature 1..20: note = Target: SCN10A; (+) strand; PAM type: NRG; PAM sequence: AGG
  source 1..20: mol_type = other DNA
aggacatgttcccatcgtgt

SEQ ID NO: 27901 - DNA, 20 bp, synthetic construct
  misc_feature 1..20: note = Description of Artificial Sequence: Synthetic oligonucleotide
  misc_feature 1..20: note = Target: SCN10A; (+) strand; PAM type: NRG; PAM sequence: GGG
  source 1..20: mol_type = other DNA
ggacatgttcccatcgtgta

SEQ ID NO: 27902 - DNA, 20 bp, synthetic construct
  misc_feature 1..20: note = Description of Artificial Sequence: Synthetic oligonucleotide
  misc_feature 1..20: note = Target: SCN10A; (+) strand; PAM type: NRG; PAM sequence: TGG
  source 1..20: mol_type = other DNA
cattatttgtctacatactc

SEQ ID NO: 27903 - DNA, 20 bp, synthetic construct
  misc_feature 1..20: note = Description of Artificial Sequence: Synthetic oligonucleotide
  misc_feature 1..20: note = Target: SCN10A; (+) strand; PAM type: NRG; PAM sequence: CAG
  source 1..20: mol_type = other DNA
actctggtaaaattttctgc

SEQ ID NO: 27904 - DNA, 20 bp, synthetic construct
  misc_feature 1..20: note = Description of Artificial Sequence: Synthetic oligonucleotide
  misc_feature 1..20: note = Target: SCN10A; (+) strand; PAM type: NRG; PAM sequence: TGG
  source 1..20: mol_type = other DNA
aaaattttctgccagacaac

SEQ ID NO: 27905 - DNA, 20 bp, synthetic construct
  misc_feature 1..20: note = Description of Artificial Sequence: Synthetic oligonucleotide
  misc_feature 1..20: note = Target: SCN10A; (+) strand; PAM type: NRG; PAM sequence: CAG
  source 1..20: mol_type = other DNA
tctgccagacaactggtcta

SEQ ID NO: 27906 - DNA, 20 bp, synthetic construct
  misc_feature 1..20: note = Description of Artificial Sequence: Synthetic oligonucleotide
  misc_feature 1..20: note = Target: SCN10A; (+) strand; PAM type: NRG; PAM sequence: CAG
  source 1..20: mol_type = other DNA
cagcacattttaatttgctc

SEQ ID NO: 27907 - DNA, 20 bp, synthetic construct
  misc_feature 1..20: note = Description of Artificial Sequence: Synthetic oligonucleotide
  misc_feature 1..20: note = Target: SCN10A; (+) strand; PAM type: NRG; PAM sequence: AGG
  source 1..20: mol_type = other DNA
agcacattttaatttgctcc

SEQ ID NO: 27908 - DNA, 20 bp, synthetic construct
  misc_feature 1..20: note = Description of Artificial Sequence: Synthetic oligonucleotide
  misc_feature 1..20: note = Target: SCN10A; (+) strand; PAM type: NRG; PAM sequence: AAG
  source 1..20: mol_type = other DNA
ttgctccaggatcttatttt

SEQ ID NO: 27909 - DNA, 20 bp, synthetic construct
  misc_feature 1..20: note = Description of Artificial Sequence: Synthetic oligonucleotide
  misc_feature 1..20: note = Target: SCN10A; (+) strand; PAM type: NRG; PAM sequence: AGG
  source 1..20: mol_type = other DNA
tgctccaggatcttatttta

SEQ ID NO: 27910 - DNA, 20 bp, synthetic construct
  misc_feature 1..20: note = Description of Artificial Sequence: Synthetic oligonucleotide
  misc_feature 1..20: note = Target: SCN10A; (+) strand; PAM type: NRG; PAM sequence: GGG
  source 1..20: mol_type = other DNA
gctccaggatcttattttaa

SEQ ID NO: 27911 - DNA, 20 bp, synthetic construct
  misc_feature 1..20: note = Description of Artificial Sequence: Synthetic oligonucleotide
  misc_feature 1..20: note = Target: SCN10A; (+) strand; PAM type: NRG; PAM sequence: GAG
  source 1..20: mol_type = other DNA
tccaggatcttattttaagg

SEQ ID NO: 27912 - DNA, 20 bp, synthetic construct
  misc_feature 1..20: note = Description of Artificial Sequence: Synthetic oligonucleotide
  misc_feature 1..20: note = Target: SCN10A; (+) strand; PAM type: NRG; PAM sequence: TGG
  source 1..20: mol_type = other DNA
gatcttattttaagggagaa

SEQ ID NO: 27913 - DNA, 20 bp, synthetic construct
  misc_feature 1..20: note = Description of Artificial Sequence: Synthetic oligonucleotide
  misc_feature 1..20: note = Target: SCN10A; (+) strand; PAM type: NRG; PAM sequence: TAG
  source 1..20: mol_type = other DNA
ttcctcgtacttgtaacaat

SEQ ID NO: 27914 - DNA, 20 bp, synthetic construct
  misc_feature 1..20: note = Description of Artificial Sequence: Synthetic oligonucleotide
  misc_feature 1..20: note = Target: SCN10A; (+) strand; PAM type: NRG; PAM sequence: TGG
  source 1..20: mol_type = other DNA
gatactcaatcacctcttgt

SEQ ID NO: 27915 - DNA, 20 bp, synthetic construct
  misc_feature 1..20: note = Description of Artificial Sequence: Synthetic oligonucleotide
  misc_feature 1..20: note = Target: SCN10A; (+) strand; PAM type: NRG; PAM sequence: TGG
  source 1..20: mol_type = other DNA
actcaatcacctcttgttgg

SEQ ID NO: 27916 - DNA, 20 bp, synthetic construct
  misc_feature 1..20: note = Description of Artificial Sequence: Synthetic oligonucleotide
  misc_feature 1..20: note = Target: SCN10A; (+) strand; PAM type: NRG; PAM sequence: GGG
  source 1..20: mol_type = other DNA
ctcaatcacctcttgttggt

SEQ ID NO: 27917 - DNA, 20 bp, synthetic construct
  misc_feature 1..20: note = Description of Artificial Sequence: Synthetic oligonucleotide
  misc_feature 1..20: note = Target: SCN10A; (+) strand; PAM type: NRG; PAM sequence: AAG
  source 1..20: mol_type = other DNA
atcacctcttgttggtggga

SEQ ID NO: 27918 - DNA, 20 bp, synthetic construct
  misc_feature 1..20: note = Description of Artificial Sequence: Synthetic oligonucleotide
  misc_feature 1..20: note = Target: SCN10A; (+) strand; PAM type: NRG; PAM sequence: AAG
  source 1..20: mol_type = other DNA
acctcttgttggtgggaaag

SEQ ID NO: 27919 - DNA, 20 bp, synthetic construct
  misc_feature 1..20: note = Description of Artificial Sequence: Synthetic oligonucleotide
  misc_feature 1..20: note = Target: SCN10A; (+) strand; PAM type: NRG; PAM sequence: AAG
  source 1..20: mol_type = other DNA
cttgttggtgggaaagaaga

SEQ ID NO: 27920 - DNA, 20 bp, synthetic construct
  misc_feature 1..20: note = Description of Artificial Sequence: Synthetic oligonucleotide
  misc_feature 1..20: note = Target: SCN10A; (+) strand; PAM type: NRG; PAM sequence: AGG
  source 1..20: mol_type = other DNA
ttgttggtgggaaagaagaa

SEQ ID NO: 27921 - DNA, 20 bp, synthetic construct
  misc_feature 1..20: note = Description of Artificial Sequence: Synthetic oligonucleotide
  misc_feature 1..20: note = Target: SCN10A; (+) strand; PAM type: NRG; PAM sequence: GGG
  source 1..20: mol_type = other DNA
tgttggtgggaaagaagaaa

SEQ ID NO: 27922 - DNA, 20 bp, synthetic construct
  misc_feature 1..20: note = Description of Artificial Sequence: Synthetic oligonucleotide
  misc_feature 1..20: note = Target: SCN10A; (+) strand; PAM type: NRG; PAM sequence: GAG
  source 1..20: mol_type = other DNA
ttggtgggaaagaagaaagg

SEQ ID NO: 27923 - DNA, 20 bp, synthetic construct
  misc_feature 1..20: note = Description of Artificial Sequence: Synthetic oligonucleotide
  misc_feature 1..20: note = Target: SCN10A; (+) strand; PAM type: NRG; PAM sequence: AGG
  source 1..20: mol_type = other DNA
tggtgggaaagaagaaaggg

SEQ ID NO: 27924 - DNA, 20 bp, synthetic construct
  misc_feature 1..20: note = Description of Artificial Sequence: Synthetic oligonucleotide
  misc_feature 1..20: note = Target: SCN10A; (+) strand; PAM type: NRG; PAM sequence: AAG
  source 1..20: mol_type = other DNA
gggaaagaagaaagggaggt

SEQ ID NO: 27925 - DNA, 20 bp, synthetic construct
  misc_feature 1..20: note = Description of Artificial Sequence: Synthetic oligonucleotide
  misc_feature 1..20: note = Target: SCN10A; (+) strand; PAM type: NRG; PAM sequence: AGG
  source 1..20: mol_type = other DNA
ggaaagaagaaagggaggta

SEQ ID NO: 27926 - DNA, 20 bp, synthetic construct
  misc_feature 1..20: note = Description of Artificial Sequence: Synthetic oligonucleotide
  misc_feature 1..20: note = Target: SCN10A; (+) strand; PAM type: NRG; PAM sequence: GAG
  source 1..20: mol_type = other DNA
aaagaagaaagggaggtaag

SEQ ID NO: 27927 - DNA, 20 bp, synthetic construct
  misc_feature 1..20: note = Description of Artificial Sequence: Synthetic oligonucleotide
  misc_feature 1..20: note = Target: SCN10A; (+) strand; PAM type: NRG; PAM sequence: GAG
  source 1..20: mol_type = other DNA
agaagaaagggaggtaagga

SEQ ID NO: 27928 - DNA, 20 bp, synthetic construct
  misc_feature 1..20: note = Description of Artificial Sequence: Synthetic oligonucleotide
  misc_feature 1..20: note = Target: SCN10A; (+) strand; PAM type: NRG; PAM sequence: GAG
  source 1..20: mol_type = other DNA
aagaaagggaggtaaggaga

SEQ ID NO: 27929 - DNA, 20 bp, synthetic construct
  misc_feature 1..20: note = Description of Artificial Sequence: Synthetic oligonucleotide
  misc_feature 1..20: note = Target: SCN10A; (+) strand; PAM type: NRG; PAM sequence: AGG
  source 1..20: mol_type = other DNA
agaaagggaggtaaggagag

SEQ ID NO: 27930 - DNA, 20 bp, synthetic construct
  misc_feature 1..20: note = Description of Artificial Sequence: Synthetic oligonucleotide
  misc_feature 1..20: note = Target: SCN10A; (+) strand; PAM type: NRG; PAM sequence: GGG
  source 1..20: mol_type = other DNA
gaaagggaggtaaggagaga

SEQ ID NO: 27931 - DNA, 20 bp, synthetic construct
  misc_feature 1..20: note = Description of Artificial Sequence: Synthetic oligonucleotide
  misc_feature 1..20: note = Target: SCN10A; (+) strand; PAM type: NRG; PAM sequence: TAG
  source 1..20: mol_type = other DNA
agggaggtaaggagagaggg

SEQ ID NO: 27932 - DNA, 20 bp, synthetic construct
  misc_feature 1..20: note = Description of Artificial Sequence: Synthetic oligonucleotide
  misc_feature 1..20: note = Target: SCN10A; (+) strand; PAM type: NRG; PAM sequence: AAG
  source 1..20: mol_type = other DNA
aggtaaggagagagggtaga

SEQ ID NO: 27933 - DNA, 20 bp, synthetic construct
  misc_feature 1..20: note = Description of Artificial Sequence: Synthetic oligonucleotide
  misc_feature 1..20: note = Target: SCN10A; (+) strand; PAM type: NRG; PAM sequence: TGG
  source 1..20: mol_type = other DNA
agggtagaaagattgatatg

SEQ ID NO: 27934 - DNA, 20 bp, synthetic construct
  misc_feature 1..20: note = Description of Artificial Sequence: Synthetic oligonucleotide
  misc_feature 1..20: note = Target: SCN10A; (+) strand; PAM type: NRG; PAM sequence: GGG
  source 1..20: mol_type = other DNA
gggtagaaagattgatatgt

SEQ ID NO: 27935 - DNA, 20 bp, synthetic construct
  misc_feature 1..20: note = Description of Artificial Sequence: Synthetic oligonucleotide
  misc_feature 1..20: note = Target: SCN10A; (+) strand; PAM type: NRG; PAM sequence: CAG
  source 1..20: mol_type = other DNA
ggttttttctgcttattttc

SEQ ID NO: 27936 - DNA, 20 bp, synthetic construct
  misc_feature 1..20: note = Description of Artificial Sequence: Synthetic oligonucleotide
  misc_feature 1..20: note = Target: SCN10A; (+) strand; PAM type: NRG; PAM sequence: AAG
  source 1..20: mol_type = other DNA
tgcttattttccagctctat

SEQ ID NO: 27937 - DNA, 20 bp, synthetic construct
  misc_feature 1..20: note = Description of Artificial Sequence: Synthetic oligonucleotide
  misc_feature 1..20: note = Target: SCN10A; (+) strand; PAM type: NRG; PAM sequence: AGG
  source 1..20: mol_type = other DNA
gcttattttccagctctata

SEQ ID NO: 27938 - DNA, 20 bp, synthetic construct
  misc_feature 1..20: note = Description of Artificial Sequence: Synthetic oligonucleotide
  misc_feature 1..20: note = Target: SCN10A; (+) strand; PAM type: NRG; PAM sequence: GGG
  source 1..20: mol_type = other DNA
cttattttccagctctataa

SEQ ID NO: 27939 - DNA, 20 bp, synthetic construct
  misc_feature 1..20: note = Description of Artificial Sequence: Synthetic oligonucleotide
  misc_feature 1..20: note = Target: SCN10A; (+) strand; PAM type: NRG; PAM sequence: CAG
  source 1..20: mol_type = other DNA
tctataagggattcctgccc

SEQ ID NO: 27940 - DNA, 20 bp, synthetic construct
  misc_feature 1..20: note = Description of Artificial Sequence: Synthetic oligonucleotide
  misc_feature 1..20: note = Target: SCN10A; (+) strand; PAM type: NRG; PAM sequence: CGG
  source 1..20: mol_type = other DNA
ataagggattcctgccccag

SEQ ID NO: 27941 - DNA, 20 bp, synthetic construct
  misc_feature 1..20: note = Description of Artificial Sequence: Synthetic oligonucleotide
  misc_feature 1..20: note = Target: SCN10A; (+) strand; PAM type: NRG; PAM sequence: TGG
  source 1..20: mol_type = other DNA
gggattcctgccccagcgga

SEQ ID NO: 27942 - DNA, 20 bp, synthetic construct
  misc_feature 1..20: note = Description of Artificial Sequence: Synthetic oligonucleotide
  misc_feature 1..20: note = Target: SCN10A; (+) strand; PAM type: NRG; PAM sequence: AAG
  source 1..20: mol_type = other DNA
agcggatggtgctaccctgt

SEQ ID NO: 27943 - DNA, 20 bp, synthetic construct
  misc_feature 1..20: note = Description of Artificial Sequence: Synthetic oligonucleotide
  misc_feature 1..20: note = Target: SCN10A; (+) strand; PAM type: NRG; PAM sequence: CAG
  source 1..20: mol_type = other DNA
tggtgctaccctgtaagcca

SEQ ID NO: 27944 - DNA, 20 bp, synthetic construct
  misc_feature 1..20: note = Description of Artificial Sequence: Synthetic oligonucleotide
  misc_feature 1..20: note = Target: SCN10A; (+) strand; PAM type: NRG; PAM sequence: AGG
  source 1..20: mol_type = other DNA
ggtgctaccctgtaagccac

SEQ ID NO: 27945 - DNA, 20 bp, synthetic construct
  misc_feature 1..20: note = Description of Artificial Sequence: Synthetic oligonucleotide
  misc_feature 1..20: note = Target: SCN10A; (+) strand; PAM type: NRG; PAM sequence: TGG
  source 1..20: mol_type = other DNA
accctgtaagccacaggaac

SEQ ID NO: 27946 - DNA, 20 bp, synthetic construct
  misc_feature 1..20: note = Description of Artificial Sequence: Synthetic oligonucleotide
  misc_feature 1..20: note = Target: SCN10A; (+) strand; PAM type: NRG; PAM sequence: TAG
  source 1..20: mol_type = other DNA
ctgtaagccacaggaactgg

SEQ ID NO: 27947 - DNA, 20 bp, synthetic construct
  misc_feature 1..20: note = Description of Artificial Sequence: Synthetic oligonucleotide
  misc_feature 1..20: note = Target: SCN10A; (+) strand; PAM type: NRG; PAM sequence: AAG
  source 1..20: mol_type = other DNA
agccacaggaactggtagtt

SEQ ID NO: 27948 - DNA, 20 bp, synthetic construct
  misc_feature 1..20: note = Description of Artificial Sequence: Synthetic oligonucleotide
  misc_feature 1..20: note = Target: SCN10A; (+) strand; PAM type: NRG; PAM sequence: TAG
  source 1..20: mol_type = other DNA
tagttaagatatccccatca

SEQ ID NO: 27949 - DNA, 20 bp, synthetic construct
  misc_feature 1..20: note = Description of Artificial Sequence: Synthetic oligonucleotide
  misc_feature 1..20: note = Target: SCN10A; (+) strand; PAM type: NRG; PAM sequence: AAG
  source 1..20: mol_type = other DNA
gatatccccatcatagaact

SEQ ID NO: 27950 - DNA, 20 bp, synthetic construct
  misc_feature 1..20: note = Description of Artificial Sequence: Synthetic oligonucleotide
  misc_feature 1..20: note = Target: SCN10A; (+) strand; PAM type: NRG; PAM sequence: TGG
  source 1..20: mol_type = other DNA
ccatcatagaactaagtact

SEQ ID NO: 27951 - DNA, 20 bp, synthetic construct
  misc_feature 1..20: note = Description of Artificial Sequence: Synthetic oligonucleotide
  misc_feature 1..20: note = Target: SCN10A; (+) strand; PAM type: NRG; PAM sequence: AAG
  source 1..20: mol_type = other DNA
tatattactgatacacaaac

SEQ ID NO: 27952 - DNA, 20 bp, synthetic construct
  misc_feature 1..20: note = Description of Artificial Sequence: Synthetic oligonucleotide
  misc_feature 1..20: note = Target: SCN10A; (+) strand; PAM type: NRG; PAM sequence: TAG
  source 1..20: mol_type = other DNA
tctttaatataaaatcaaaa

SEQ ID NO: 27953 - DNA, 20 bp, synthetic construct
  misc_feature 1..20: note = Description of Artificial Sequence: Synthetic oligonucleotide
  misc_feature 1..20: note = Target: SCN10A; (+) strand; PAM type: NRG; PAM sequence: TGG
  source 1..20: mol_type = other DNA
tataaaatcaaaatagcctt

SEQ ID NO: 27954 - DNA, 20 bp, synthetic construct
  misc_feature 1..20: note = Description of Artificial Sequence: Synthetic oligonucleotide
  misc_feature 1..20: note = Target: SCN10A; (+) strand; PAM type: NRG; PAM sequence: TGG
  source 1..20: mol_type = other DNA
gcctttggaatctttcattt

SEQ ID NO: 27955 - DNA, 20 bp, synthetic construct
  misc_feature 1..20: note = Description of Artificial Sequence: Synthetic oligonucleotide
  misc_feature 1..20: note = Target: SCN10A; (+) strand; PAM type: NRG; PAM sequence: AAG
  source 1..20: mol_type = other DNA
tttggaatctttcattttgg

SEQ ID NO: 27956 - DNA, 20 bp, synthetic construct
  misc_feature 1..20: note = Description of Artificial Sequence: Synthetic oligonucleotide
  misc_feature 1..20: note = Target: SCN10A; (+) strand; PAM type: NRG; PAM sequence: AAG
  source 1..20: mol_type = other DNA
acaaaaactcctattatgct

SEQ ID NO: 27957 - DNA, 20 bp, synthetic construct
  misc_feature 1..20: note = Description of Artificial Sequence: Synthetic oligonucleotide
  misc_feature 1..20: note = Target: SCN10A; (+) strand; PAM type: NRG; PAM sequence: GAG
  source 1..20: mol_type = other DNA
aaactcctattatgctaagt

SEQ ID NO: 27958 - DNA, 20 bp, synthetic construct
  misc_feature 1..20: note = Description of Artificial Sequence: Synthetic oligonucleotide
  misc_feature 1..20: note = Target: SCN10A; (+) strand; PAM type: NRG; PAM sequence: AAG
  source 1..20: mol_type = other DNA
cctattatgctaagtgagat

SEQ ID NO: 27959 - DNA, 20 bp, synthetic construct
  misc_feature 1..20: note = Description of Artificial Sequence: Synthetic oligonucleotide
  misc_feature 1..20: note = Target: SCN10A; (+) strand; PAM type: NRG; PAM sequence: CAG
  source 1..20: mol_type = other DNA
ttatgctaagtgagataagc

SEQ ID NO: 27960 - DNA, 20 bp, synthetic construct
  misc_feature 1..20: note = Description of Artificial Sequence: Synthetic oligonucleotide
  misc_feature 1..20: note = Target: SCN10A; (+) strand; PAM type: NRG; PAM sequence: CAG
  source 1..20: mol_type = other DNA
taagtgagataagccagaca

SEQ ID NO: 27961 - DNA, 20 bp, synthetic construct
  misc_feature 1..20: note = Description of Artificial Sequence: Synthetic oligonucleotide
  misc_feature 1..20: note = Target: SCN10A; (+) strand; PAM type: NRG; PAM sequence: AAG
  source 1..20: mol_type = other DNA
gtgagataagccagacacag

SEQ ID NO: 27962 - DNA, 20 bp, synthetic construct
  misc_feature 1..20: note = Description of Artificial Sequence: Synthetic oligonucleotide
  misc_feature 1..20: note = Target: SCN10A; (+) strand; PAM type: NRG; PAM sequence: AGG
  source 1..20: mol_type = other DNA
tgagataagccagacacaga

SEQ ID NO: 27963 - DNA, 20 bp, synthetic construct
  misc_feature 1..20: note = Description of Artificial Sequence: Synthetic oligonucleotide
  misc_feature 1..20: note = Target: SCN10A; (+) strand; PAM type: NRG; PAM sequence: AAG
  source 1..20: mol_type = other DNA
cgacatgattgcatttatat

SEQ ID NO: 27964 - DNA, 20 bp, synthetic construct
  misc_feature 1..20: note = Description of Artificial Sequence: Synthetic oligonucleotide
  misc_feature 1..20: note = Target: SCN10A; (+) strand; PAM type: NRG; PAM sequence: AGG
  source 1..20: mol_type = other DNA
gacatgattgcatttatata

SEQ ID NO: 27965 - DNA, 20 bp, synthetic construct
  misc_feature 1..20: note = Description of Artificial Sequence: Synthetic oligonucleotide
  misc_feature 1..20: note = Target: SCN10A; (+) strand; PAM type: NRG; PAM sequence: TAG
  source 1..20: mol_type = other DNA
tttatataaggaatctaaaa

SEQ ID NO: 27966 - DNA, 20 bp, synthetic construct
  misc_feature 1..20: note = Description of Artificial Sequence: Synthetic oligonucleotide
  misc_feature 1..20: note = Target: SCN10A; (+) strand; PAM type: NRG; PAM sequence: TGG
  source 1..20: mol_type = other DNA
atctaaaatagtcaaactca

SEQ ID NO: 27967 - DNA, 20 bp, synthetic construct
  misc_feature 1..20: note = Description of Artificial Sequence: Synthetic oligonucleotide
  misc_feature 1..20: note = Target: SCN10A; (+) strand; PAM type: NRG; PAM sequence: GGG
  source 1..20: mol_type = other DNA
tctaaaatagtcaaactcat

SEQ ID NO: 27968 - DNA, 20 bp, synthetic construct
  misc_feature 1..20: note = Description of Artificial Sequence: Synthetic oligonucleotide
  misc_feature 1..20: note = Target: SCN10A; (+) strand; PAM type: NRG; PAM sequence: GAG
  source 1..20: mol_type = other DNA
taaaatagtcaaactcatgg

SEQ ID NO: 27969 - DNA, 20 bp, synthetic construct
  misc_feature 1..20: note = Description of Artificial Sequence: Synthetic oligonucleotide
  misc_feature 1..20: note = Target: SCN10A; (+) strand; PAM type: NRG; PAM sequence: CAG
  source 1..20: mol_type = other DNA
aatagtcaaactcatgggag

SEQ ID NO: 27970 - DNA, 20 bp, synthetic construct
  misc_feature 1..20: note = Description of Artificial Sequence: Synthetic oligonucleotide
  misc_feature 1..20: note = Target: SCN10A; (+) strand; PAM type: NRG; PAM sequence: GAG
  source 1..20: mol_type = other DNA
tagtcaaactcatgggagca

SEQ ID NO: 27971 - DNA, 20 bp, synthetic construct
  misc_feature 1..20: note = Description of Artificial Sequence: Synthetic oligonucleotide
  misc_feature 1..20: note = Target: SCN10A; (+) strand; PAM type: NRG; PAM sequence: TAG
  source 1..20: mol_type = other DNA
aaactcatgggagcagagaa

SEQ ID NO: 27972 - DNA, 20 bp, synthetic construct
  misc_feature 1..20: note = Description of Artificial Sequence: Synthetic oligonucleotide
  misc_feature 1..20: note = Target: SCN10A; (+) strand; PAM type: NRG; PAM sequence: TGG
  source 1..20: mol_type = other DNA
catgggagcagagaatagaa

SEQ ID NO: 27973 - DNA, 20 bp, synthetic construct
  misc_feature 1..20: note = Description of Artificial Sequence: Synthetic oligonucleotide
  misc_feature 1..20: note = Target: SCN10A; (+) strand; PAM type: NRG; PAM sequence: TGG
  source 1..20: mol_type = other DNA
gggagcagagaatagaatgg

SEQ ID NO: 27974 - DNA, 20 bp, synthetic construct
  misc_feature 1..20: note = Description of Artificial Sequence: Synthetic oligonucleotide
  misc_feature 1..20: note = Target: SCN10A; (+) strand; PAM type: NRG; PAM sequence: CAG
  source 1..20: mol_type = other DNA
gagaatagaatggtggtttc

SEQ ID NO: 27975 - DNA, 20 bp, synthetic construct
  misc_feature 1..20: note = Description of Artificial Sequence: Synthetic oligonucleotide
  misc_feature 1..20: note = Target: SCN10A; (+) strand; PAM type: NRG; PAM sequence: AGG
  source 1..20: mol_type = other DNA
agaatagaatggtggtttcc

SEQ ID NO: 27976 - DNA, 20 bp, synthetic construct
  misc_feature 1..20: note = Description of Artificial Sequence: Synthetic oligonucleotide
  misc_feature 1..20: note = Target: SCN10A; (+) strand; PAM type: NRG; PAM sequence: GAG
  source 1..20: mol_type = other DNA
aatagaatggtggtttccag

SEQ ID NO: 27977 - DNA, 20 bp, synthetic construct
  misc_feature 1..20: note = Description of Artificial Sequence: Synthetic oligonucleotide
  misc_feature 1..20: note = Target: SCN10A; (+) strand; PAM type: NRG; PAM sequence: TGG
  source 1..20: mol_type = other DNA
gaatggtggtttccaggagc

SEQ ID NO: 27978 - DNA, 20 bp, synthetic construct
  misc_feature 1..20: note = Description of Artificial Sequence: Synthetic oligonucleotide
  misc_feature 1..20: note = Target: SCN10A; (+) strand; PAM type: NRG; PAM sequence: GGG
  source 1..20: mol_type = other DNA
aatggtggtttccaggagct

SEQ ID NO: 27979 - DNA, 20 bp, synthetic construct
  misc_feature 1..20: note = Description of Artificial Sequence: Synthetic oligonucleotide
  misc_feature 1..20: note = Target: SCN10A; (+) strand; PAM type: NRG; PAM sequence: GAG
  source 1..20: mol_type = other DNA
tggtggtttccaggagctgg

SEQ ID NO: 27980 - DNA, 20 bp, synthetic construct
  misc_feature 1..20: note = Description of Artificial Sequence: Synthetic oligonucleotide
  misc_feature 1..20: note = Target: SCN10A; (+) strand; PAM type: NRG; PAM sequence: AGG
  source 1..20: mol_type = other DNA
ggtggtttccaggagctggg

SEQ ID NO: 27981 - DNA, 20 bp, synthetic construct
  misc_feature 1..20: note = Description of Artificial Sequence: Synthetic oligonucleotide
  misc_feature 1..20: note = Target: SCN10A; (+) strand; PAM type: NRG; PAM sequence: GAG
  source 1..20: mol_type = other DNA
tggtttccaggagctgggag

SEQ ID NO: 27982 - DNA, 20 bp, synthetic construct
  misc_feature 1..20: note = Description of Artificial Sequence: Synthetic oligonucleotide
  misc_feature 1..20: note = Target: SCN10A; (+) strand; PAM type: NRG; PAM sequence: AGG
  source 1..20: mol_type = other DNA
ggtttccaggagctgggagg

SEQ ID NO: 27983 - DNA, 20 bp, synthetic construct
  misc_feature 1..20: note = Description of Artificial Sequence: Synthetic oligonucleotide
  misc_feature 1..20: note = Target: SCN10A; (+) strand; PAM type: NRG; PAM sequence: GGG
  source 1..20: mol_type = other DNA
gtttccaggagctgggagga

SEQ ID NO: 27984 - DNA, 20 bp, synthetic construct
  misc_feature 1..20: note = Description of Artificial Sequence: Synthetic oligonucleotide
  misc_feature 1..20: note = Target: SCN10A; (+) strand; PAM type: NRG; PAM sequence: GGG
  source 1..20: mol_type = other DNA
tttccaggagctgggaggag

SEQ ID NO: 27985 - DNA, 20 bp, synthetic construct
  misc_feature 1..20: note = Description of Artificial Sequence: Synthetic oligonucleotide
  misc_feature 1..20: note = Target: SCN10A; (+) strand; PAM type: NRG; PAM sequence: TGG
  source 1..20: mol_type = other DNA
gagctgggaggaggggaaat

SEQ ID NO: 27986 - DNA, 20 bp, synthetic construct
  misc_feature 1..20: note = Description of Artificial Sequence: Synthetic oligonucleotide
  misc_feature 1..20: note = Target: SCN10A; (+) strand; PAM type: NRG; PAM sequence: GGG
  source 1..20: mol_type = other DNA
agctgggaggaggggaaatt

SEQ ID NO: 27987 - DNA, 20 bp, synthetic construct
  misc_feature 1..20: note = Description of Artificial Sequence: Synthetic oligonucleotide
  misc_feature 1..20: note = Target: SCN10A; (+) strand; PAM type: NRG; PAM sequence: GGG
  source 1..20: mol_type = other DNA
gctgggaggaggggaaattg

SEQ ID NO: 27988 - DNA, 20 bp, synthetic construct
  misc_feature 1..20: note = Description of Artificial Sequence: Synthetic oligonucleotide
  misc_feature 1..20: note = Target: SCN10A; (+) strand; PAM type: NRG; PAM sequence: GAG
  source 1..20: mol_type = other DNA
tgggaggaggggaaattggg

SEQ ID NO: 27989 - DNA, 20 bp, synthetic construct
  misc_feature 1..20: note = Description of Artificial Sequence: Synthetic oligonucleotide
  misc_feature 1..20: note = Target: SCN10A; (+) strand; PAM type: NRG; PAM sequence: AGG
  source 1..20: mol_type = other DNA
gggaggaggggaaattgggg

SEQ ID NO: 27990 - DNA, 20 bp, synthetic construct
  misc_feature 1..20: note = Description of Artificial Sequence: Synthetic oligonucleotide
  misc_feature 1..20: note = Target: SCN10A; (+) strand; PAM type: NRG; PAM sequence: AAG
  source 1..20: mol_type = other DNA
aattggggaggtacttgtca

SEQ ID NO: 27991 - DNA, 20 bp, synthetic construct
  misc_feature 1..20: note = Description of Artificial Sequence: Synthetic oligonucleotide
  misc_feature 1..20: note = Target: SCN10A; (+) strand; PAM type: NRG; PAM sequence: CAG
  source 1..20: mol_type = other DNA
tgtcaaagtgtacaaacttc

SEQ ID NO: 27992 - DNA, 20 bp, synthetic construct
  misc_feature 1..20: note = Description of Artificial Sequence: Synthetic oligonucleotide
  misc_feature 1..20: note = Target: SCN10A; (+) strand; PAM type: NRG; PAM sequence: TAG
  source 1..20: mol_type = other DNA
tatgtgacatgaataaatcc

SEQ ID NO: 27993 - DNA, 20 bp, synthetic construct
  misc_feature 1..20: note = Description of Artificial Sequence: Synthetic oligonucleotide
  misc_feature 1..20: note = Target: SCN10A; (+) strand; PAM type: NRG; PAM sequence: GAG
  source 1..20: mol_type = other DNA
tgtgacatgaataaatccta

SEQ ID NO: 27994 - DNA, 20 bp, synthetic construct
  misc_feature 1..20: note = Description of Artificial Sequence: Synthetic oligonucleotide
  misc_feature 1..20: note = Target: SCN10A; (+) strand; PAM type: NRG; PAM sequence: TAG
  source 1..20: mol_type = other DNA
aaatcctagagctctactta

SEQ ID NO: 27995 - DNA, 20 bp, synthetic construct
  misc_feature 1..20: note = Description of Artificial Sequence: Synthetic oligonucleotide
  misc_feature 1..20: note = Target: SCN10A; (+) strand; PAM type: NRG; PAM sequence: TAG
  source 1..20: mol_type = other DNA
ctagagctctacttatagca

SEQ ID NO: 27996 - DNA, 20 bp, synthetic construct
  misc_feature 1..20: note = Description of Artificial Sequence: Synthetic oligonucleotide
  misc_feature 1..20: note = Target: SCN10A; (+) strand; PAM type: NRG; PAM sequence: TAG
  source 1..20: mol_type = other DNA
tacttatagcatagtcccta

SEQ ID NO: 27997 - DNA, 20 bp, synthetic construct
  misc_feature 1..20: note = Description of Artificial Sequence: Synthetic oligonucleotide
  misc_feature 1..20: note = Target: SCN10A; (+) strand; PAM type: NRG; PAM sequence: TAG
  source 1..20: mol_type = other DNA
tatagcatagtccctatagt

SEQ ID NO: 27998 - DNA, 20 bp, synthetic construct
  misc_feature 1..20: note = Description of Artificial Sequence: Synthetic oligonucleotide
  misc_feature 1..20: note = Target: SCN10A; (+) strand; PAM type: NRG; PAM sequence: AAG
  source 1..20: mol_type = other DNA
tgtctacctaaaaatttgcc

SEQ ID NO: 27999 - DNA, 20 bp, synthetic construct
  misc_feature 1..20: note = Description of Artificial Sequence: Synthetic oligonucleotide
  misc_feature 1..20: note = Target: SCN10A; (+) strand; PAM type: NRG; PAM sequence: GAG
  source 1..20: mol_type = other DNA
tctacctaaaaatttgccaa

SEQ ID NO: 28000 - DNA, 20 bp, synthetic construct
  misc_feature 1..20: note = Description of Artificial Sequence: Synthetic oligonucleotide
  misc_feature 1..20: note = Target: SCN10A; (+) strand; PAM type: NRG; PAM sequence: AAG
  source 1..20: mol_type = other DNA
ttgccaagagaataaatctt

SEQ ID NO: 28001 - DNA, 20 bp, synthetic construct
  misc_feature 1..20: note = Description of Artificial Sequence: Synthetic oligonucleotide
  misc_feature 1..20: note = Target: SCN10A; (+) strand; PAM type: NRG; PAM sequence: TAG
  source 1..20: mol_type = other DNA
gaataaatcttaagtgttcc

SEQ ID NO: 28002 - DNA, 20 bp, synthetic construct
  misc_feature 1..20: note = Description of Artificial Sequence: Synthetic oligonucleotide
  misc_feature 1..20: note = Target: SCN10A; (+) strand; PAM type: NRG; PAM sequence: TAG
  source 1..20: mol_type = other DNA
gcacccaataaataaataaa

SEQ ID NO: 28003 - DNA, 20 bp, synthetic construct
  misc_feature 1..20: note = Description of Artificial Sequence: Synthetic oligonucleotide
  misc_feature 1..20: note = Target: SCN10A; (+) strand; PAM type: NRG; PAM sequence: AGG
  source 1..20: mol_type = other DNA
cacccaataaataaataaat

SEQ ID NO: 28004 - DNA, 20 bp, synthetic construct
  misc_feature 1..20: note = Description of Artificial Sequence: Synthetic oligonucleotide
  misc_feature 1..20: note = Target: SCN10A; (+) strand; PAM type: NRG; PAM sequence: CAG
  source 1..20: mol_type = other DNA
ccaataaataaataaatagg

SEQ ID NO: 28005 - DNA, 20 bp, synthetic construct
  misc_feature 1..20: note = Description of Artificial Sequence: Synthetic oligonucleotide
  misc_feature 1..20: note = Target: SCN10A; (+) strand; PAM type: NRG; PAM sequence: AGG
  source 1..20: mol_type = other DNA
caataaataaataaataggc

SEQ ID NO: 28006 - DNA, 20 bp, synthetic construct
  misc_feature 1..20: note = Description of Artificial Sequence: Synthetic oligonucleotide
  misc_feature 1..20: note = Target: SCN10A; (+) strand; PAM type: NRG; PAM sequence: GAG
  source 1..20: mol_type = other DNA
ataaataaataaataggcag

SEQ ID NO: 28007 - DNA, 20 bp, synthetic construct
  misc_feature 1..20: note = Description of Artificial Sequence: Synthetic oligonucleotide
  misc_feature 1..20: note = Target: SCN10A; (+) strand; PAM type: NRG; PAM sequence: AGG
  source 1..20: mol_type = other DNA
taaataaataaataggcagg

SEQ ID NO: 28008 - DNA, 20 bp, synthetic construct
  misc_feature 1..20: note = Description of Artificial Sequence: Synthetic oligonucleotide
  misc_feature 1..20: note = Target: SCN10A; (+) strand; PAM type: NRG; PAM sequence: TGG
  source 1..20: mol_type = other DNA
aataggcaggaggaaatatt

SEQ ID NO: 28009 - DNA, 20 bp, synthetic construct
  misc_feature 1..20: note = Description of Artificial Sequence: Synthetic oligonucleotide
  misc_feature 1..20: note = Target: SCN10A; (+) strand; PAM type: NRG; PAM sequence: GAG
  source 1..20: mol_type = other DNA
taggcaggaggaaatatttg

SEQ ID NO: 28010 - DNA, 20 bp, synthetic construct
  misc_feature 1..20: note = Description of Artificial Sequence: Synthetic oligonucleotide
  misc_feature 1..20: note = Target: SCN10A; (+) strand; PAM type: NRG; PAM sequence: AGG
  source 1..20: mol_type = other DNA
aggcaggaggaaatatttgg

SEQ ID NO: 28011 - DNA, 20 bp, synthetic construct
  misc_feature 1..20: note = Description of Artificial Sequence: Synthetic oligonucleotide
  misc_feature 1..20: note = Target: SCN10A; (+) strand; PAM type: NRG; PAM sequence: TGG
  source 1..20: mol_type = other DNA
gaggaaatatttggaggtta

SEQ ID NO: 28012 - DNA, 20 bp, synthetic construct
  misc_feature 1..20: note = Description of Artificial Sequence: Synthetic oligonucleotide
  misc_feature 1..20: note = Target: SCN10A; (+) strand; PAM type: NRG; PAM sequence: TGG
  source 1..20: mol_type = other DNA
ggaggttatggacatgtttc

SEQ ID NO: 28013 - DNA, 20 bp, synthetic construct
  misc_feature 1..20: note = Description of Artificial Sequence: Synthetic oligonucleotide
  misc_feature 1..20: note = Target: SCN10A; (+) strand; PAM type: NRG; PAM sequence: TGG
  source 1..20: mol_type = other DNA
ggacatgtttctggcattga

SEQ ID NO: 28014 - DNA, 20 bp, synthetic construct
  misc_feature 1..20: note = Description of Artificial Sequence: Synthetic oligonucleotide
  misc_feature 1..20: note = Target: SCN10A; (+) strand; PAM type: NRG; PAM sequence: TGG
  source 1..20: mol_type = other DNA
catgtttctggcattgatgg

SEQ ID NO: 28015 - DNA, 20 bp, synthetic construct
  misc_feature 1..20: note = Description of Artificial Sequence: Synthetic oligonucleotide
  misc_feature 1..20: note = Target: SCN10A; (+) strand; PAM type: NRG; PAM sequence: TGG
  source 1..20: mol_type = other DNA
tctggcattgatggtggtga

SEQ ID NO: 28016 - DNA, 20 bp, synthetic construct
  misc_feature 1..20: note = Description of Artificial Sequence: Synthetic oligonucleotide
  misc_feature 1..20: note = Target: SCN10A; (+) strand; PAM type: NRG; PAM sequence: TGG
  source 1..20: mol_type = other DNA
tgatggtggtgatggtttca

SEQ ID NO: 28017 - DNA, 20 bp, synthetic construct
  misc_feature 1..20: note = Description of Artificial Sequence: Synthetic oligonucleotide
  misc_feature 1..20: note = Target: SCN10A; (+) strand; PAM type: NRG; PAM sequence: GGG
  source 1..20: mol_type = other DNA
gatggtggtgatggtttcat

SEQ ID NO: 28018 - DNA, 20 bp, synthetic construct
  misc_feature 1..20: note = Description of Artificial Sequence: Synthetic oligonucleotide
  misc_feature 1..20: note = Target: SCN10A; (+) strand; PAM type: NRG; PAM sequence: AAG
  source 1..20: mol_type = other DNA
tacttatctccaaactcata

SEQ ID NO: 28019 - DNA, 20 bp, synthetic construct
  misc_feature 1..20: note = Description of Artificial Sequence: Synthetic oligonucleotide
  misc_feature 1..20: note = Target: SCN10A; (+) strand; PAM type: NRG; PAM sequence: TAG
  source 1..20: mol_type = other DNA
ttgtgtacattaaacatgta

SEQ ID NO: 28020 - DNA, 20 bp, synthetic construct
  misc_feature 1..20: note = Description of Artificial Sequence: Synthetic oligonucleotide
  misc_feature 1..20: note = Target: SCN10A; (+) strand; PAM type: NRG; PAM sequence: TGG
  source 1..20: mol_type = other DNA
catgtatagctttttacatg

SEQ ID NO: 28021 - DNA, 20 bp, synthetic construct
  misc_feature 1..20: note = Description of Artificial Sequence: Synthetic oligonucleotide
  misc_feature 1..20: note = Target: SCN10A; (+) strand; PAM type: NRG; PAM sequence: AAG
  source 1..20: mol_type = other DNA
atgtggatcatacctcaata

SEQ ID NO: 28022 - DNA, 20 bp, synthetic construct
  misc_feature 1..20: note = Description of Artificial Sequence: Synthetic oligonucleotide
  misc_feature 1..20: note = Target: SCN10A; (+) strand; PAM type: NRG; PAM sequence: CAG
  source 1..20: mol_type = other DNA
ctcaataaagtgttaaaaaa

SEQ ID NO: 28023 - DNA, 20 bp, synthetic construct
  misc_feature 1..20: note = Description of Artificial Sequence: Synthetic oligonucleotide
  misc_feature 1..20: note = Target: SCN10A; (+) strand; PAM type: NRG; PAM sequence: GAG
  source 1..20: mol_type = other DNA
caataaagtgttaaaaaaca

SEQ ID NO: 28024 - DNA, 20 bp, synthetic construct
  misc_feature 1..20: note = Description of Artificial Sequence: Synthetic oligonucleotide
  misc_feature 1..20: note = Target: SCN10A; (+) strand; PAM type: NRG; PAM sequence: CAG
  source 1..20: mol_type = other DNA
taaagtgttaaaaaacagag

SEQ ID NO: 28025 - DNA, 20 bp, synthetic construct
  misc_feature 1..20: note = Description of Artificial Sequence: Synthetic oligonucleotide
  misc_feature 1..20: note = Target: SCN10A; (+) strand; PAM type: NRG; PAM sequence: AAG
  source 1..20: mol_type = other DNA
cagcaatatcaaaataaaac

SEQ ID NO: 28026 - DNA, 20 bp, synthetic construct
  misc_feature 1..20: note = Description of Artificial Sequence: Synthetic oligonucleotide
  misc_feature 1..20: note = Target: SCN10A; (+) strand; PAM type: NRG; PAM sequence: CGG
  source 1..20: mol_type = other DNA
caaaaacaaactgaaatccc

SEQ ID NO: 28027 - DNA, 20 bp, synthetic construct
  misc_feature 1..20: note = Description of Artificial Sequence: Synthetic oligonucleotide
  misc_feature 1..20: note = Target: SCN10A; (+) strand; PAM type: NRG; PAM sequence: AAG
  source 1..20: mol_type = other DNA
cccggaaatacacgcaaccc

SEQ ID NO: 28028 - DNA, 20 bp, synthetic construct
  misc_feature 1..20: note = Description of Artificial Sequence: Synthetic oligonucleotide
  misc_feature 1..20: note = Target: SCN10A; (+) strand; PAM type: NRG; PAM sequence: AGG
  source 1..20: mol_type = other DNA
ccggaaatacacgcaaccca

SEQ ID NO: 28029 - DNA, 20 bp, synthetic construct
  misc_feature 1..20: note = Description of Artificial Sequence: Synthetic oligonucleotide
  misc_feature 1..20: note = Target: SCN10A; (+) strand; PAM type: NRG; PAM sequence: CAG
  source 1..20: mol_type = other DNA
cgcaacccaaggctgtgttt

SEQ ID NO: 28030 - DNA, 20 bp, synthetic construct
  misc_feature 1..20: note = Description of Artificial Sequence: Synthetic oligonucleotide
  misc_feature 1..20: note = Target: SCN10A; (+) strand; PAM type: NRG; PAM sequence: AAG
  source 1..20: mol_type = other DNA
caaggctgtgtttcagcacc

SEQ ID NO: 28031 - DNA, 20 bp, synthetic construct
  misc_feature 1..20: note = Description of Artificial Sequence: Synthetic oligonucleotide
  misc_feature 1..20: note = Target: SCN10A; (+) strand; PAM type: NRG; PAM sequence: AGG
  source 1..20: mol_type = other DNA
aaggctgtgtttcagcacca

SEQ ID NO: 28032 - DNA, 20 bp, synthetic construct
  misc_feature 1..20: note = Description of Artificial Sequence: Synthetic oligonucleotide
  misc_feature 1..20: note = Target: SCN10A; (+) strand; PAM type: NRG; PAM sequence: TGG
  source 1..20: mol_type = other DNA
gctgtgtttcagcaccaagg

SEQ ID NO: 28033 - DNA, 20 bp, synthetic construct
  misc_feature 1..20: note = Description of Artificial Sequence: Synthetic oligonucleotide
  misc_feature 1..20: note = Target: SCN10A; (+) strand; PAM type: NRG; PAM sequence: GGG
  source 1..20: mol_type = other DNA
ctgtgtttcagcaccaaggt

SEQ ID NO: 28034 - DNA, 20 bp, synthetic construct
  misc_feature 1..20: note = Description of Artificial Sequence: Synthetic oligonucleotide
  misc_feature 1..20: note = Target: SCN10A; (+) strand; PAM type: NRG; PAM sequence: GGG
  source 1..20: mol_type = other DNA
tgtgtttcagcaccaaggtg

SEQ ID NO: 28035 - DNA, 20 bp, synthetic construct
  misc_feature 1..20: note = Description of Artificial Sequence: Synthetic oligonucleotide
  misc_feature 1..20: note = Target: SCN10A; (+) strand; PAM type: NRG; PAM sequence: GAG
  source 1..20: mol_type = other DNA
tgtttcagcaccaaggtggg

SEQ ID NO: 28036 - DNA, 20 bp, synthetic construct
  misc_feature 1..20: note = Description of Artificial Sequence: Synthetic oligonucleotide
  misc_feature 1..20: note = Target: SCN10A; (+) strand; PAM type: NRG; PAM sequence: AGG
  source 1..20: mol_type = other DNA
gtttcagcaccaaggtgggg

SEQ ID NO: 28037 - DNA, 20 bp, synthetic construct
  misc_feature 1..20: note = Description of Artificial Sequence: Synthetic oligonucleotide
  misc_feature 1..20: note = Target: SCN10A; (+) strand; PAM type: NRG; PAM sequence: AAG
  source 1..20: mol_type = other DNA
gaggttgatgaaatgctgtt

SEQ ID NO: 28038 - DNA, 20 bp, synthetic construct
  misc_feature 1..20: note = Description of Artificial Sequence: Synthetic oligonucleotide
  misc_feature 1..20: note = Target: SCN10A; (+) strand; PAM type: NRG; PAM sequence: TAG
  source 1..20: mol_type = other DNA
aaatgctgttaagttgtatt

SEQ ID NO: 28039 - DNA, 20 bp, synthetic construct
  misc_feature 1..20: note = Description of Artificial Sequence: Synthetic oligonucleotide
  misc_feature 1..20: note = Target: SCN10A; (+) strand; PAM type: NRG; PAM sequence: CAG
  source 1..20: mol_type = other DNA
aagttgtatttagatactct

SEQ ID NO: 28040 - DNA, 20 bp, synthetic construct
  misc_feature 1..20: note = Description of Artificial Sequence: Synthetic oligonucleotide
  misc_feature 1..20: note = Target: SCN10A; (+) strand; PAM type: NRG; PAM sequence: CAG
  source 1..20: mol_type = other DNA
ctcagctcttgttactaaat

SEQ ID NO: 28041 - DNA, 20 bp, synthetic construct
  misc_feature 1..20: note = Description of Artificial Sequence: Synthetic oligonucleotide
  misc_feature 1..20: note = Target: SCN10A; (+) strand; PAM type: NRG; PAM sequence: TGG
  source 1..20: mol_type = other DNA
agctcttgttactaaatcag

SEQ ID NO: 28042 - DNA, 20 bp, synthetic construct
  misc_feature 1..20: note = Description of Artificial Sequence: Synthetic oligonucleotide
  misc_feature 1..20: note = Target: SCN10A; (+) strand; PAM type: NRG; PAM sequence: CAG
  source 1..20: mol_type = other DNA
tcagtggcaaattaaatcta

SEQ ID NO: 28043 - DNA, 20 bp, synthetic construct
  misc_feature 1..20: note = Description of Artificial Sequence: Synthetic oligonucleotide
  misc_feature 1..20: note = Target: SCN10A; (+) strand; PAM type: NRG; PAM sequence: AAG
  source 1..20: mol_type = other DNA
cagctacaccccgacatgaa

SEQ ID NO: 28044 - DNA, 20 bp, synthetic construct
  misc_feature 1..20: note = Description of Artificial Sequence: Synthetic oligonucleotide
  misc_feature 1..20: note = Target: SCN10A; (+) strand; PAM type: NRG; PAM sequence: AAG
  source 1..20: mol_type = other DNA
tacaccccgacatgaaaagt

SEQ ID NO: 28045 - DNA, 20 bp, synthetic construct
  misc_feature 1..20: note = Description of Artificial Sequence: Synthetic oligonucleotide
  misc_feature 1..20: note = Target: SCN10A; (+) strand; PAM type: NRG; PAM sequence: CAG
  source 1..20: mol_type = other DNA
accccgacatgaaaagtaag

SEQ ID NO: 28046 - DNA, 20 bp, synthetic construct
  misc_feature 1..20: note = Description of Artificial Sequence: Synthetic oligonucleotide
  misc_feature 1..20: note = Target: SCN10A; (+) strand; PAM type: NRG; PAM sequence: AGG
  source 1..20: mol_type = other DNA
ccccgacatgaaaagtaagc

SEQ ID NO: 28047 - DNA, 20 bp, synthetic construct
  misc_feature 1..20: note = Description of Artificial Sequence: Synthetic oligonucleotide
  misc_feature 1..20: note = Target: SCN10A; (+) strand; PAM type: NRG; PAM sequence: CAG
  source 1..20: mol_type = other DNA
gacatgaaaagtaagcaggt

SEQ ID NO: 28048 - DNA, 20 bp, synthetic construct
  misc_feature 1..20: note = Description of Artificial Sequence: Synthetic oligonucleotide
  misc_feature 1..20: note = Target: SCN10A; (+) strand; PAM type: NRG; PAM sequence: AGG
  source 1..20: mol_type = other DNA
acatgaaaagtaagcaggtc

SEQ ID NO: 28049 - DNA, 20 bp, synthetic construct
  misc_feature 1..20: note = Description of Artificial Sequence: Synthetic oligonucleotide
  misc_feature 1..20: note = Target: SCN10A; (+) strand; PAM type: NRG; PAM sequence: AAG
  source 1..20: mol_type = other DNA
aggtcaggatataaccaatc

SEQ ID NO: 28050 - DNA, 20 bp, synthetic construct
  misc_feature 1..20: note = Description of Artificial Sequence: Synthetic oligonucleotide
  misc_feature 1..20: note = Target: SCN10A; (+) strand; PAM type: NRG; PAM sequence: CAG
  source 1..20: mol_type = other DNA
tcaagatacatttataatgc

SEQ ID NO: 28051 - DNA, 20 bp, synthetic construct
  misc_feature 1..20: note = Description of Artificial Sequence: Synthetic oligonucleotide
  misc_feature 1..20: note = Target: SCN10A; (+) strand; PAM type: NRG; PAM sequence: AGG
  source 1..20: mol_type = other DNA
caagatacatttataatgcc

SEQ ID NO: 28052 - DNA, 20 bp, synthetic construct
  misc_feature 1..20: note = Description of Artificial Sequence: Synthetic oligonucleotide
  misc_feature 1..20: note = Target: SCN10A; (+) strand; PAM type: NRG; PAM sequence: AAG
  source 1..20: mol_type = other DNA
tacatttataatgccaggtg

SEQ ID NO: 28053 - DNA, 20 bp, synthetic construct
  misc_feature 1..20: note = Description of Artificial Sequence: Synthetic oligonucleotide
  misc_feature 1..20: note = Target: SCN10A; (+) strand; PAM type: NRG; PAM sequence: TGG
  source 1..20: mol_type = other DNA
tttataatgccaggtgaagc

SEQ ID NO: 28054 - DNA, 20 bp, synthetic construct
  misc_feature 1..20: note = Description of Artificial Sequence: Synthetic oligonucleotide
  misc_feature 1..20: note = Target: SCN10A; (+) strand; PAM type: NRG; PAM sequence: GAG
  source 1..20: mol_type = other DNA
taatgccaggtgaagctggt

SEQ ID NO: 28055 - DNA, 20 bp, synthetic construct
  misc_feature 1..20: note = Description of Artificial Sequence: Synthetic oligonucleotide
  misc_feature 1..20: note = Target: SCN10A; (+) strand; PAM type: NRG; PAM sequence: TGG
  source 1..20: mol_type = other DNA
tgaagctggtgagcatgatt

SEQ ID NO: 28056 - DNA, 20 bp, synthetic construct
  misc_feature 1..20: note = Description of Artificial Sequence: Synthetic oligonucleotide
  misc_feature 1..20: note = Target: SCN10A; (+) strand; PAM type: NRG; PAM sequence: TAG
  source 1..20: mol_type = other DNA
tgagcatgatttggccttta

SEQ ID NO: 28057 - DNA, 20 bp, synthetic construct
  misc_feature 1..20: note = Description of Artificial Sequence: Synthetic oligonucleotide
  misc_feature 1..20: note = Target: SCN10A; (+) strand; PAM type: NRG; PAM sequence: AGG
  source 1..20: mol_type = other DNA
gagcatgatttggcctttat

SEQ ID NO: 28058 - DNA, 20 bp, synthetic construct
  misc_feature 1..20: note = Description of Artificial Sequence: Synthetic oligonucleotide
  misc_feature 1..20: note = Target: SCN10A; (+) strand; PAM type: NRG; PAM sequence: GGG
  source 1..20: mol_type = other DNA
agcatgatttggcctttata

SEQ ID NO: 28059 - DNA, 20 bp, synthetic construct
  misc_feature 1..20: note = Description of Artificial Sequence: Synthetic oligonucleotide
  misc_feature 1..20: note = Target: SCN10A; (+) strand; PAM type: NRG; PAM sequence: CAG
  source 1..20: mol_type = other DNA
gcctttatagggtcaaactt

SEQ ID NO: 28060 - DNA, 20 bp, synthetic construct
  misc_feature 1..20: note = Description of Artificial Sequence: Synthetic oligonucleotide
  misc_feature 1..20: note = Target: SCN10A; (+) strand; PAM type: NRG; PAM sequence: AAG
  source 1..20: mol_type = other DNA
tcaaacttcagctaacccat

SEQ ID NO: 28061 - DNA, 20 bp, synthetic construct
  misc_feature 1..20: note = Description of Artificial Sequence: Synthetic oligonucleotide
  misc_feature 1..20: note = Target: SCN10A; (+) strand; PAM type: NRG; PAM sequence: CAG
  source 1..20: mol_type = other DNA
cttcagctaacccataagcc

SEQ ID NO: 28062 - DNA, 20 bp, synthetic construct
  misc_feature 1..20: note = Description of Artificial Sequence: Synthetic oligonucleotide
  misc_feature 1..20: note = Target: SCN10A; (+) strand; PAM type: NRG; PAM sequence: AGG
  source 1..20: mol_type = other DNA
ttcagctaacccataagccc

SEQ ID NO: 28063 - DNA, 20 bp, synthetic construct
  misc_feature 1..20: note = Description of Artificial Sequence: Synthetic oligonucleotide
  misc_feature 1..20: note = Target: SCN10A; (+) strand; PAM type: NRG; PAM sequence: GGG
  source 1..20: mol_type = other DNA
tcagctaacccataagccca

SEQ ID NO: 28064 - DNA, 20 bp, synthetic construct
  misc_feature 1..20: note = Description of Artificial Sequence: Synthetic oligonucleotide
  misc_feature 1..20: note = Target: SCN10A; (+) strand; PAM type: NRG; PAM sequence: CAG
  source 1..20: mol_type = other DNA
ctaacccataagcccaggga

SEQ ID NO: 28065 - DNA, 20 bp, synthetic construct
  misc_feature 1..20: note = Description of Artificial Sequence: Synthetic oligonucleotide
  misc_feature 1..20: note = Target: SCN10A; (+) strand; PAM type: NRG; PAM sequence: TGG
  source 1..20: mol_type = other DNA
taagcccagggacagtctct

SEQ ID NO: 28066 - DNA, 20 bp, synthetic construct
  misc_feature 1..20: note = Description of Artificial Sequence: Synthetic oligonucleotide
  misc_feature 1..20: note = Target: SCN10A; (+) strand; PAM type: NRG; PAM sequence: TGG
  source 1..20: mol_type = other DNA
agggacagtctcttggctgt

SEQ ID NO: 28067 - DNA, 20 bp, synthetic construct
  misc_feature 1..20: note = Description of Artificial Sequence: Synthetic oligonucleotide
  misc_feature 1..20: note = Target: SCN10A; (+) strand; PAM type: NRG; PAM sequence: CAG
  source 1..20: mol_type = other DNA
agtctcttggctgttggtga

SEQ ID NO: 28068 - DNA, 20 bp, synthetic construct
  misc_feature 1..20: note = Description of Artificial Sequence: Synthetic oligonucleotide
  misc_feature 1..20: note = Target: SCN10A; (+) strand; PAM type: NRG; PAM sequence: AGG
  source 1..20: mol_type = other DNA
gtctcttggctgttggtgac

SEQ ID NO: 28069 - DNA, 20 bp, synthetic construct
  misc_feature 1..20: note = Description of Artificial Sequence: Synthetic oligonucleotide
  misc_feature 1..20: note = Target: SCN10A; (+) strand; PAM type: NRG; PAM sequence: CAG
  source 1..20: mol_type = other DNA
tcttggctgttggtgacagg

SEQ ID NO: 28070 - DNA, 20 bp, synthetic construct
  misc_feature 1..20: note = Description of Artificial Sequence: Synthetic oligonucleotide
  misc_feature 1..20: note = Target: SCN10A; (+) strand; PAM type: NRG; PAM sequence: AAG
  source 1..20: mol_type = other DNA
ggctgttggtgacaggcagc

SEQ ID NO: 28071 - DNA, 20 bp, synthetic construct
  misc_feature 1..20: note = Description of Artificial Sequence: Synthetic oligonucleotide
  misc_feature 1..20: note = Target: SCN10A; (+) strand; PAM type: NRG; PAM sequence: TAG
  source 1..20: mol_type = other DNA
gtgacaggcagcaagttcat

SEQ ID NO: 28072 - DNA, 20 bp, synthetic construct
  misc_feature 1..20: note = Description of Artificial Sequence: Synthetic oligonucleotide
  misc_feature 1..20: note = Target: SCN10A; (+) strand; PAM type: NRG; PAM sequence: AAG
  source 1..20: mol_type = other DNA
acaggcagcaagttcattag

SEQ ID NO: 28073 - DNA, 20 bp, synthetic construct
  misc_feature 1..20: note = Description of Artificial Sequence: Synthetic oligonucleotide
  misc_feature 1..20: note = Target: SCN10A; (+) strand; PAM type: NRG; PAM sequence: TGG
  source 1..20: mol_type = other DNA
cagcaagttcattagaagat

SEQ ID NO: 28074 - DNA, 20 bp, synthetic construct
  misc_feature 1..20: note = Description of Artificial Sequence: Synthetic oligonucleotide
  misc_feature 1..20: note = Target: SCN10A; (+) strand; PAM type: NRG; PAM sequence: GAG
  source 1..20: mol_type = other DNA
gcaagttcattagaagattg

SEQ ID NO: 28075 - DNA, 20 bp, synthetic construct
  misc_feature 1..20: note = Description of Artificial Sequence: Synthetic oligonucleotide
  misc_feature 1..20: note = Target: SCN10A; (+) strand; PAM type: NRG; PAM sequence: CAG
  source 1..20: mol_type = other DNA
attggagcctgttctaaact

SEQ ID NO: 28076 - DNA, 20 bp, synthetic construct
  misc_feature 1..20: note = Description of Artificial Sequence: Synthetic oligonucleotide
  misc_feature 1..20: note = Target: SCN10A; (+) strand; PAM type: NRG; PAM sequence: TGG
  source 1..20: mol_type = other DNA
ctaaactcagcttcaaccct

SEQ ID NO: 28077 - DNA, 20 bp, synthetic construct
  misc_feature 1..20: note = Description of Artificial Sequence: Synthetic oligonucleotide
  misc_feature 1..20: note = Target: SCN10A; (+) strand; PAM type: NRG; PAM sequence: GAG
  source 1..20: mol_type = other DNA
gcataatattcttgatctct

SEQ ID NO: 28078 - DNA, 20 bp, synthetic construct
  misc_feature 1..20: note = Description of Artificial Sequence: Synthetic oligonucleotide
  misc_feature 1..20: note = Target: SCN10A; (+) strand; PAM type: NRG; PAM sequence: AAG
  source 1..20: mol_type = other DNA
caattttaaatgtataaaat

SEQ ID NO: 28079 - DNA, 20 bp, synthetic construct
  misc_feature 1..20: note = Description of Artificial Sequence: Synthetic oligonucleotide
  misc_feature 1..20: note = Target: SCN10A; (+) strand; PAM type: NRG; PAM sequence: AGG
  source 1..20: mol_type = other DNA
aattttaaatgtataaaata

SEQ ID NO: 28080 - DNA, 20 bp, synthetic construct
  misc_feature 1..20: note = Description of Artificial Sequence: Synthetic oligonucleotide
  misc_feature 1..20: note = Target: SCN10A; (+) strand; PAM type: NRG; PAM sequence: CAG
  source 1..20: mol_type = other DNA
ggataataacacctgcttga

SEQ ID NO: 28081 - DNA, 20 bp, synthetic construct
  misc_feature 1..20: note = Description of Artificial Sequence: Synthetic oligonucleotide
  misc_feature 1..20: note = Target: SCN10A; (+) strand; PAM type: NRG; PAM sequence: AGG
  source 1..20: mol_type = other DNA
gataataacacctgcttgac

SEQ ID NO: 28082 - DNA, 20 bp, synthetic construct
  misc_feature 1..20: note = Description of Artificial Sequence: Synthetic oligonucleotide
  misc_feature 1..20: note = Target: SCN10A; (+) strand; PAM type: NRG; PAM sequence: GGG
  source 1..20: mol_type = other DNA
ataataacacctgcttgaca

SEQ ID NO: 28083 - DNA, 20 bp, synthetic construct
  misc_feature 1..20: note = Description of Artificial Sequence: Synthetic oligonucleotide
  misc_feature 1..20: note = Target: SCN10A; (+) strand; PAM type: NRG; PAM sequence: TGG
  source 1..20: mol_type = other DNA
agggctgctgtgaacattca

SEQ ID NO: 28084 - DNA, 20 bp, synthetic construct
  misc_feature 1..20: note = Description of Artificial Sequence: Synthetic oligonucleotide
  misc_feature 1..20: note = Target: SCN10A; (+) strand; PAM type: NRG; PAM sequence: GAG
  source 1..20: mol_type = other DNA
ggctgctgtgaacattcatg

SEQ ID NO: 28085 - DNA, 20 bp, synthetic construct
  misc_feature 1..20: note = Description of Artificial Sequence: Synthetic oligonucleotide
  misc_feature 1..20: note = Target: SCN10A; (+) strand; PAM type: NRG; PAM sequence: CAG
  source 1..20: mol_type = other DNA
ctgtgaacattcatggagcc

SEQ ID NO: 28086 - DNA, 20 bp, synthetic construct
  misc_feature 1..20: note = Description of Artificial Sequence: Synthetic oligonucleotide
  misc_feature 1..20: note = Target: SCN10A; (+) strand; PAM type: NRG; PAM sequence: CAG
  source 1..20: mol_type = other DNA
aacattcatggagcccagct

SEQ ID NO: 28087 - DNA, 20 bp, synthetic construct
  misc_feature 1..20: note = Description of Artificial Sequence: Synthetic oligonucleotide
  misc_feature 1..20: note = Target: SCN10A; (+) strand; PAM type: NRG; PAM sequence: CAG
  source 1..20: mol_type = other DNA
atggagcccagctcagtgct

SEQ ID NO: 28088 - DNA, 20 bp, synthetic construct
  misc_feature 1..20: note = Description of Artificial Sequence: Synthetic oligonucleotide
  misc_feature 1..20: note = Target: SCN10A; (+) strand; PAM type: NRG; PAM sequence: TAG
  source 1..20: mol_type = other DNA
ccagctcagtgctcagaact

SEQ ID NO: 28089 - DNA, 20 bp, synthetic construct
  misc_feature 1..20: note = Description of Artificial Sequence: Synthetic oligonucleotide
  misc_feature 1..20: note = Target: SCN10A; (+) strand; PAM type: NRG; PAM sequence: AGG
  source 1..20: mol_type = other DNA
cagctcagtgctcagaactt

SEQ ID NO: 28090 - DNA, 20 bp, synthetic construct
  misc_feature 1..20: note = Description of Artificial Sequence: Synthetic oligonucleotide
  misc_feature 1..20: note = Target: SCN10A; (+) strand; PAM type: NRG; PAM sequence: AAG
  source 1..20: mol_type = other DNA
ctcagtgctcagaacttagg

SEQ ID NO: 28091 - DNA, 20 bp, synthetic construct
  misc_feature 1..20: note = Description of Artificial Sequence: Synthetic oligonucleotide
  misc_feature 1..20: note = Target: SCN10A; (+) strand; PAM type: NRG; PAM sequence: CAG
  source 1..20: mol_type = other DNA
ctcagaacttaggaagtatt

SEQ ID NO: 28092 - DNA, 20 bp, synthetic construct
  misc_feature 1..20: note = Description of Artificial Sequence: Synthetic oligonucleotide
  misc_feature 1..20: note = Target: SCN10A; (+) strand; PAM type: NRG; PAM sequence: AAG
  source 1..20: mol_type = other DNA
aacttaggaagtattcagtc

SEQ ID NO: 28093 - DNA, 20 bp, synthetic construct
  misc_feature 1..20: note = Description of Artificial Sequence: Synthetic oligonucleotide
  misc_feature 1..20: note = Target: SCN10A; (+) strand; PAM type: NRG; PAM sequence: AGG
  source 1..20: mol_type = other DNA
acttaggaagtattcagtca

SEQ ID NO: 28094 - DNA, 20 bp, synthetic construct
  misc_feature 1..20: note = Description of Artificial Sequence: Synthetic oligonucleotide
  misc_feature 1..20: note = Target: SCN10A; (+) strand; PAM type: NRG; PAM sequence: CAG
  source 1..20: mol_type = other DNA
taggaagtattcagtcaagg

SEQ ID NO: 28095 - DNA, 20 bp, synthetic construct
  misc_feature 1..20: note = Description of Artificial Sequence: Synthetic oligonucleotide
  misc_feature 1..20: note = Target: SCN10A; (+) strand; PAM type: NRG; PAM sequence: TAG
  source 1..20: mol_type = other DNA
gcagctccatttccccatgt

SEQ ID NO: 28096 - DNA, 20 bp, synthetic construct
  misc_feature 1..20: note = Description of Artificial Sequence: Synthetic oligonucleotide
  misc_feature 1..20: note = Target: SCN10A; (+) strand; PAM type: NRG; PAM sequence: TAG
  source 1..20: mol_type = other DNA
cccatgttagcctctaactc

SEQ ID NO: 28097 - DNA, 20 bp, synthetic construct
  misc_feature 1..20: note = Description of Artificial Sequence: Synthetic oligonucleotide
  misc_feature 1..20: note = Target: SCN10A; (+) strand; PAM type: NRG; PAM sequence: TGG
  source 1..20: mol_type = other DNA
taattttctctgaacaccac

SEQ ID NO: 28098 - DNA, 20 bp, synthetic construct
  misc_feature 1..20: note = Description of Artificial Sequence: Synthetic oligonucleotide
  misc_feature 1..20: note = Target: SCN10A; (+) strand; PAM type: NRG; PAM sequence: TGG
  source 1..20: mol_type = other DNA
caccactggacccaaaatac

SEQ ID NO: 28099 - DNA, 20 bp, synthetic construct
  misc_feature 1..20: note = Description of Artificial Sequence: Synthetic oligonucleotide
  misc_feature 1..20: note = Target: SCN10A; (+) strand; PAM type: NRG; PAM sequence: GGG
  source 1..20: mol_type = other DNA
accactggacccaaaatact

SEQ ID NO: 28100 - DNA, 20 bp, synthetic construct
  misc_feature 1..20: note = Description of Artificial Sequence: Synthetic oligonucleotide
  misc_feature 1..20: note = Target: SCN10A; (+) strand; PAM type: NRG; PAM sequence: CAG
  source 1..20: mol_type = other DNA
gcctgtcattcaacaacacc

SEQ ID NO: 28101 - DNA, 20 bp, synthetic construct
  misc_feature 1..20: note = Description of Artificial Sequence: Synthetic oligonucleotide
  misc_feature 1..20: note = Target: SCN10A; (+) strand; PAM type: NRG; PAM sequence: TGG
  source 1..20: mol_type = other DNA
tcattcaacaacacccagac

SEQ ID NO: 28102 - DNA, 20 bp, synthetic construct
  misc_feature 1..20: note = Description of Artificial Sequence: Synthetic oligonucleotide
  misc_feature 1..20: note = Target: SCN10A; (+) strand; PAM type: NRG; PAM sequence: GGG
  source 1..20: mol_type = other DNA
cattcaacaacacccagact

SEQ ID NO: 28103 - DNA, 20 bp, synthetic construct
  misc_feature 1..20: note = Description of Artificial Sequence: Synthetic oligonucleotide
  misc_feature 1..20: note = Target: SCN10A; (+) strand; PAM type: NRG; PAM sequence: CAG
  source 1..20: mol_type = other DNA
acacccagactgggccttaa

SEQ ID NO: 28104 - DNA, 20 bp, synthetic construct
  misc_feature 1..20: note = Description of Artificial Sequence: Synthetic oligonucleotide
  misc_feature 1..20: note = Target: SCN10A; (+) strand; PAM type: NRG; PAM sequence: TGG
  source 1..20: mol_type = other DNA
ccttaacagtattaatttct

SEQ ID NO: 28105 - DNA, 20 bp, synthetic construct
  misc_feature 1..20: note = Description of Artificial Sequence: Synthetic oligonucleotide
  misc_feature 1..20: note = Target: SCN10A; (+) strand; PAM type: NRG; PAM sequence: TAG
  source 1..20: mol_type = other DNA
ctatcactcatgttccctaa

SEQ ID NO: 28106 - DNA, 20 bp, synthetic construct
  misc_feature 1..20: note = Description of Artificial Sequence: Synthetic oligonucleotide
  misc_feature 1..20: note = Target: SCN10A; (+) strand; PAM type: NRG; PAM sequence: CAG
  source 1..20: mol_type = other DNA
actcatgttccctaatagaa

SEQ ID NO: 28107 - DNA, 20 bp, synthetic construct
  misc_feature 1..20: note = Description of Artificial Sequence: Synthetic oligonucleotide
  misc_feature 1..20: note = Target: SCN10A; (+) strand; PAM type: NRG; PAM sequence: TAG
  source 1..20: mol_type = other DNA
tccctaatagaacagttgtg

SEQ ID NO: 28108 - DNA, 20 bp, synthetic construct
  misc_feature 1..20: note = Description of Artificial Sequence: Synthetic oligonucleotide
  misc_feature 1..20: note = Target: SCN10A; (+) strand; PAM type: NRG; PAM sequence: GAG
  source 1..20: mol_type = other DNA
cctaatagaacagttgtgta

SEQ ID NO: 28109 - DNA, 20 bp, synthetic construct
  misc_feature 1..20: note = Description of Artificial Sequence: Synthetic oligonucleotide
  misc_feature 1..20: note = Target: SCN10A; (+) strand; PAM type: NRG; PAM sequence: CAG
  source 1..20: mol_type = other DNA
gttgtgtagagatttaattc

SEQ ID NO: 28110 - DNA, 20 bp, synthetic construct
  misc_feature 1..20: note = Description of Artificial Sequence: Synthetic oligonucleotide
  misc_feature 1..20: note = Target: SCN10A; (+) strand; PAM type: NRG; PAM sequence: TAG
  source 1..20: mol_type = other DNA
agagatttaattccagaccc

SEQ ID NO: 28111 - DNA, 20 bp, synthetic construct
  misc_feature 1..20: note = Description of Artificial Sequence: Synthetic oligonucleotide
  misc_feature 1..20: note = Target: SCN10A; (+) strand; PAM type: NRG; PAM sequence: GAG
  source 1..20: mol_type = other DNA
taattccagaccctagactt

SEQ ID NO: 28112 - DNA, 20 bp, synthetic construct
  misc_feature 1..20: note = Description of Artificial Sequence: Synthetic oligonucleotide
  misc_feature 1..20: note = Target: SCN10A; (+) strand; PAM type: NRG; PAM sequence: CAG
  source 1..20: mol_type = other DNA
tcctttgaacaatctcctcc

SEQ ID NO: 28113 - DNA, 20 bp, synthetic construct
  misc_feature 1..20: note = Description of Artificial Sequence: Synthetic oligonucleotide
  misc_feature 1..20: note = Target: SCN10A; (+) strand; PAM type: NRG; PAM sequence: TGG
  source 1..20: mol_type = other DNA
ccagtctttcctcactttga

SEQ ID NO: 28114 - DNA, 20 bp, synthetic construct
  misc_feature 1..20: note = Description of Artificial Sequence: Synthetic oligonucleotide
  misc_feature 1..20: note = Target: SCN10A; (+) strand; PAM type: NRG; PAM sequence: CAG
  source 1..20: mol_type = other DNA
tggcaatccatctccttttc

SEQ ID NO: 28115 - DNA, 20 bp, synthetic construct
  misc_feature 1..20: note = Description of Artificial Sequence: Synthetic oligonucleotide
  misc_feature 1..20: note = Target: SCN10A; (+) strand; PAM type: NRG; PAM sequence: CAG
  source 1..20: mol_type = other DNA
atccatctccttttccagaa

SEQ ID NO: 28116 - DNA, 20 bp, synthetic construct
  misc_feature 1..20: note = Description of Artificial Sequence: Synthetic oligonucleotide
  misc_feature 1..20: note = Target: SCN10A; (+) strand; PAM type: NRG; PAM sequence: AAG
  source 1..20: mol_type = other DNA
ccttttccagaacagatttt

SEQ ID NO: 28117 - DNA, 20 bp, synthetic construct
  misc_feature 1..20: note = Description of Artificial Sequence: Synthetic oligonucleotide
  misc_feature 1..20: note = Target: SCN10A; (+) strand; PAM type: NRG; PAM sequence: AAG
  source 1..20: mol_type = other DNA
accacctgccccctgctttc

SEQ ID NO: 28118 - DNA, 20 bp, synthetic construct
  misc_feature 1..20: note = Description of Artificial Sequence: Synthetic oligonucleotide
  misc_feature 1..20: note = Target: SCN10A; (+) strand; PAM type: NRG; PAM sequence: AAG
  source 1..20: mol_type = other DNA
ccctgctttcaagaccataa

SEQ ID NO: 28119 - DNA, 20 bp, synthetic construct
  misc_feature 1..20: note = Description of Artificial Sequence: Synthetic oligonucleotide
  misc_feature 1..20: note = Target: SCN10A; (+) strand; PAM type: NRG; PAM sequence: AAG
  source 1..20: mol_type = other DNA
gctttcaagaccataaaagt

SEQ ID NO: 28120 - DNA, 20 bp, synthetic construct
  misc_feature 1..20: note = Description of Artificial Sequence: Synthetic oligonucleotide
  misc_feature 1..20: note = Target: SCN10A; (+) strand; PAM type: NRG; PAM sequence: AGG
  source 1..20: mol_type = other DNA
ctttcaagaccataaaagta

SEQ ID NO: 28121 - DNA, 20 bp, synthetic construct
  misc_feature 1..20: note = Description of Artificial Sequence: Synthetic oligonucleotide
  misc_feature 1..20: note = Target: SCN10A; (+) strand; PAM type: NRG; PAM sequence: TGG
  source 1..20: mol_type = other DNA
accataaaagtaaggtctgc

SEQ ID NO: 28122 - DNA, 20 bp, synthetic construct
  misc_feature 1..20: note = Description of Artificial Sequence: Synthetic oligonucleotide
  misc_feature 1..20: note = Target: SCN10A; (+) strand; PAM type: NRG; PAM sequence: GAG
  source 1..20: mol_type = other DNA
cataaaagtaaggtctgctg

SEQ ID NO: 28123 - DNA, 20 bp, synthetic construct
  misc_feature 1..20: note = Description of Artificial Sequence: Synthetic oligonucleotide
  misc_feature 1..20: note = Target: SCN10A; (+) strand; PAM type: NRG; PAM sequence: CGG
  source 1..20: mol_type = other DNA
ctggagactccatcatctta

SEQ ID NO: 28124 - DNA, 20 bp, synthetic construct
  misc_feature 1..20: note = Description of Artificial Sequence: Synthetic oligonucleotide
  misc_feature 1..20: note = Target: SCN10A; (+) strand; PAM type: NRG; PAM sequence: GAG
  source 1..20: mol_type = other DNA
actccatcatcttacggtct

SEQ ID NO: 28125 - DNA, 20 bp, synthetic construct
  misc_feature 1..20: note = Description of Artificial Sequence: Synthetic oligonucleotide
  misc_feature 1..20: note = Target: SCN10A; (+) strand; PAM type: NRG; PAM sequence: AGG
  source 1..20: mol_type = other DNA
ctccatcatcttacggtctg

SEQ ID NO: 28126 - DNA, 20 bp, synthetic construct
  misc_feature 1..20: note = Description of Artificial Sequence: Synthetic oligonucleotide
  misc_feature 1..20: note = Target: SCN10A; (+) strand; PAM type: NRG; PAM sequence: CAG
  source 1..20: mol_type = other DNA
atcttacggtctgaggttct

SEQ ID NO: 28127 - DNA, 20 bp, synthetic construct
  misc_feature 1..20: note = Description of Artificial Sequence: Synthetic oligonucleotide
  misc_feature 1..20: note = Target: SCN10A; (+) strand; PAM type: NRG; PAM sequence: AGG
  source 1..20: mol_type = other DNA
tcttacggtctgaggttctc

SEQ ID NO: 28128 - DNA, 20 bp, synthetic construct
  misc_feature 1..20: note = Description of Artificial Sequence: Synthetic oligonucleotide
  misc_feature 1..20: note = Target: SCN10A; (+) strand; PAM type: NRG; PAM sequence: GAG
  source 1..20: mol_type = other DNA
ttacggtctgaggttctcag

SEQ ID NO: 28129 - DNA, 20 bp, synthetic construct
  misc_feature 1..20: note = Description of Artificial Sequence: Synthetic oligonucleotide
  misc_feature 1..20: note = Target: SCN10A; (+) strand; PAM type: NRG; PAM sequence: AGG
  source 1..20: mol_type = other DNA
tacggtctgaggttctcagg

SEQ ID NO: 28130 - DNA, 20 bp, synthetic construct
  misc_feature 1..20: note = Description of Artificial Sequence: Synthetic oligonucleotide
  misc_feature 1..20: note = Target: SCN10A; (+) strand; PAM type: NRG; PAM sequence: GAG
  source 1..20: mol_type = other DNA
cggtctgaggttctcaggag

SEQ ID NO: 28131 - DNA, 20 bp, synthetic construct
  misc_feature 1..20: note = Description of Artificial Sequence: Synthetic oligonucleotide
  misc_feature 1..20: note = Target: SCN10A; (+) strand; PAM type: NRG; PAM sequence: CAG
  source 1..20: mol_type = other DNA
gaggagtgattattccctgt

SEQ ID NO: 28132 - DNA, 20 bp, synthetic construct
  misc_feature 1..20: note = Description of Artificial Sequence: Synthetic oligonucleotide
  misc_feature 1..20: note = Target: SCN10A; (+) strand; PAM type: NRG; PAM sequence: GAG
  source 1..20: mol_type = other DNA
attattccctgtcagcccct

SEQ ID NO: 28133 - DNA, 20 bp, synthetic construct
  misc_feature 1..20: note = Description of Artificial Sequence: Synthetic oligonucleotide
  misc_feature 1..20: note = Target: SCN10A; (+) strand; PAM type: NRG; PAM sequence: AGG
  source 1..20: mol_type = other DNA
ttattccctgtcagcccctg

SEQ ID NO: 28134 - DNA, 20 bp, synthetic construct
  misc_feature 1..20: note = Description of Artificial Sequence: Synthetic oligonucleotide
  misc_feature 1..20: note = Target: SCN10A; (+) strand; PAM type: NRG; PAM sequence: TAG
  source 1..20: mol_type = other DNA
cctgtcagcccctgaggttc

SEQ ID NO: 28135 - DNA, 20 bp, synthetic construct
  misc_feature 1..20: note = Description of Artificial Sequence: Synthetic oligonucleotide
  misc_feature 1..20: note = Target: SCN10A; (+) strand; PAM type: NRG; PAM sequence: TGG
  source 1..20: mol_type = other DNA
agcccctgaggttctagcca

SEQ ID NO: 28136 - DNA, 20 bp, synthetic construct
  misc_feature 1..20: note = Description of Artificial Sequence: Synthetic oligonucleotide
  misc_feature 1..20: note = Target: SCN10A; (+) strand; PAM type: NRG; PAM sequence: GGG
  source 1..20: mol_type = other DNA
gcccctgaggttctagccat

SEQ ID NO: 28137 - DNA, 20 bp, synthetic construct
  misc_feature 1..20: note = Description of Artificial Sequence: Synthetic oligonucleotide
  misc_feature 1..20: note = Target: SCN10A; (+) strand; PAM type: NRG; PAM sequence: CAG
  source 1..20: mol_type = other DNA
ctagccatgggctgtgcaca

SEQ ID NO: 28138 - DNA, 20 bp, synthetic construct
  misc_feature 1..20: note = Description of Artificial Sequence: Synthetic oligonucleotide
  misc_feature 1..20: note = Target: SCN10A; (+) strand; PAM type: NRG; PAM sequence: TAG
  source 1..20: mol_type = other DNA
gccatgggctgtgcacacag

SEQ ID NO: 28139 - DNA, 20 bp, synthetic construct
  misc_feature 1..20: note = Description of Artificial Sequence: Synthetic oligonucleotide
  misc_feature 1..20: note = Target: SCN10A; (+) strand; PAM type: NRG; PAM sequence: AGG
  source 1..20: mol_type = other DNA
ccatgggctgtgcacacagt

SEQ ID NO: 28140 - DNA, 20 bp, synthetic construct
  misc_feature 1..20: note = Description of Artificial Sequence: Synthetic oligonucleotide
  misc_feature 1..20: note = Target: SCN10A; (+) strand; PAM type: NRG; PAM sequence: GAG
  source 1..20: mol_type = other DNA
tgcctgaaaacacttcgtgt

SEQ ID NO: 28141 - DNA, 20 bp, synthetic construct
  misc_feature 1..20: note = Description of Artificial Sequence: Synthetic oligonucleotide
  misc_feature 1..20: note = Target: SCN10A; (+) strand; PAM type: NRG; PAM sequence: TGG
  source 1..20: mol_type = other DNA
gaaaacacttcgtgtgagca

SEQ ID NO: 28142 - DNA, 20 bp, synthetic construct
  misc_feature 1..20: note = Description of Artificial Sequence: Synthetic oligonucleotide
  misc_feature 1..20: note = Target: SCN10A; (+) strand; PAM type: NRG; PAM sequence: GAG
  source 1..20: mol_type = other DNA
aaacacttcgtgtgagcatg

SEQ ID NO: 28143 - DNA, 20 bp, synthetic construct
  misc_feature 1..20: note = Description of Artificial Sequence: Synthetic oligonucleotide
  misc_feature 1..20: note = Target: SCN10A; (+) strand; PAM type: NRG; PAM sequence: AAG
  source 1..20: mol_type = other DNA
cacttcgtgtgagcatggag

SEQ ID NO: 28144 - DNA, 20 bp, synthetic construct
  misc_feature 1..20: note = Description of Artificial Sequence: Synthetic oligonucleotide
  misc_feature 1..20: note = Target: SCN10A; (+) strand; PAM type: NRG; PAM sequence: AGG
  source 1..20: mol_type = other DNA
acttcgtgtgagcatggaga

SEQ ID NO: 28145 - DNA, 20 bp, synthetic construct
  misc_feature 1..20: note = Description of Artificial Sequence: Synthetic oligonucleotide
  misc_feature 1..20: note = Target: SCN10A; (+) strand; PAM type: NRG; PAM sequence: AAG
  source 1..20: mol_type = other DNA
gtgtgagcatggagaaggcc

SEQ ID NO: 28146 - DNA, 20 bp, synthetic construct
  misc_feature 1..20: note = Description of Artificial Sequence: Synthetic oligonucleotide
  misc_feature 1..20: note = Target: SCN10A; (+) strand; PAM type: NRG; PAM sequence: GAG
  source 1..20: mol_type = other DNA
gtgagcatggagaaggccaa

SEQ ID NO: 28147 - DNA, 20 bp, synthetic construct
  misc_feature 1..20: note = Description of Artificial Sequence: Synthetic oligonucleotide
  misc_feature 1..20: note = Target: SCN10A; (+) strand; PAM type: NRG; PAM sequence: GAG
  source 1..20: mol_type = other DNA
gagaacctcttcatttcact

SEQ ID NO: 28148 - DNA, 20 bp, synthetic construct
  misc_feature 1..20: note = Description of Artificial Sequence: Synthetic oligonucleotide
  misc_feature 1..20: note = Target: SCN10A; (+) strand; PAM type: NRG; PAM sequence: GAG
  source 1..20: mol_type = other DNA
gaacctcttcatttcactga

SEQ ID NO: 28149 - DNA, 20 bp, synthetic construct
  misc_feature 1..20: note = Description of Artificial Sequence: Synthetic oligonucleotide
  misc_feature 1..20: note = Target: SCN10A; (+) strand; PAM type: NRG; PAM sequence: GAG
  source 1..20: mol_type = other DNA
acctcttcatttcactgaga

SEQ ID NO: 28150 - DNA, 20 bp, synthetic construct
  misc_feature 1..20: note = Description of Artificial Sequence: Synthetic oligonucleotide
  misc_feature 1..20: note = Target: SCN10A; (+) strand; PAM type: NRG; PAM sequence: CAG
  source 1..20: mol_type = other DNA
tcttcatttcactgagagag

SEQ ID NO: 28151 - DNA, 20 bp, synthetic construct
  misc_feature 1..20: note = Description of Artificial Sequence: Synthetic oligonucleotide
  misc_feature 1..20: note = Target: SCN10A; (+) strand; PAM type: NRG; PAM sequence: AAG
  source 1..20: mol_type = other DNA
tttcactgagagagcagccc

SEQ ID NO: 28152 - DNA, 20 bp, synthetic construct
  misc_feature 1..20: note = Description of Artificial Sequence: Synthetic oligonucleotide
  misc_feature 1..20: note = Target: SCN10A; (+) strand; PAM type: NRG; PAM sequence: AGG
  source 1..20: mol_type = other DNA
ttcactgagagagcagccca

SEQ ID NO: 28153 - DNA, 20 bp, synthetic construct
  misc_feature 1..20: note = Description of Artificial Sequence: Synthetic oligonucleotide
  misc_feature 1..20: note = Target: SCN10A; (+) strand; PAM type: NRG; PAM sequence: TGG
  source 1..20: mol_type = other DNA
catttaaaacttgctactct

SEQ ID NO: 28154 - DNA, 20 bp, synthetic construct
  misc_feature 1..20: note = Description of Artificial Sequence: Synthetic oligonucleotide
  misc_feature 1..20: note = Target: SCN10A; (+) strand; PAM type: NRG; PAM sequence: AAG
  source 1..20: mol_type = other DNA
taaaacttgctactcttgga

SEQ ID NO: 28155 - DNA, 20 bp, synthetic construct
  misc_feature 1..20: note = Description of Artificial Sequence: Synthetic oligonucleotide
  misc_feature 1..20: note = Target: SCN10A; (+) strand; PAM type: NRG; PAM sequence: CAG
  source 1..20: mol_type = other DNA
ctcttggaaagctgcaaata

SEQ ID NO: 28156 - DNA, 20 bp, synthetic construct
  misc_feature 1..20: note = Description of Artificial Sequence: Synthetic oligonucleotide
  misc_feature 1..20: note = Target: SCN10A; (+) strand; PAM type: NRG; PAM sequence: AGG
  source 1..20: mol_type = other DNA
tcttggaaagctgcaaatac

SEQ ID NO: 28157 - DNA, 20 bp, synthetic construct
  misc_feature 1..20: note = Description of Artificial Sequence: Synthetic oligonucleotide
  misc_feature 1..20: note = Target: SCN10A; (+) strand; PAM type: NRG; PAM sequence: GGG
  source 1..20: mol_type = other DNA
cttggaaagctgcaaataca

SEQ ID NO: 28158 - DNA, 20 bp, synthetic construct
  misc_feature 1..20: note = Description of Artificial Sequence: Synthetic oligonucleotide
  misc_feature 1..20: note = Target: SCN10A; (+) strand; PAM type: NRG; PAM sequence: AAG
  source 1..20: mol_type = other DNA
acataaacacgtatttcaaa

SEQ ID NO: 28159 - DNA, 20 bp, synthetic construct
  misc_feature 1..20: note = Description of Artificial Sequence: Synthetic oligonucleotide
  misc_feature 1..20: note = Target: SCN10A; (+) strand; PAM type: NRG; PAM sequence: TGG
  source 1..20: mol_type = other DNA
aaacacgtatttcaaaaagt

SEQ ID NO: 28160 - DNA, 20 bp, synthetic construct
  misc_feature 1..20: note = Description of Artificial Sequence: Synthetic oligonucleotide
  misc_feature 1..20: note = Target: SCN10A; (+) strand; PAM type: NRG; PAM sequence: TGG
  source 1..20: mol_type = other DNA
acgtatttcaaaaagttggt

SEQ ID NO: 28161 - DNA, 20 bp, synthetic construct
  misc_feature 1..20: note = Description of Artificial Sequence: Synthetic oligonucleotide
  misc_feature 1..20: note = Target: SCN10A; (+) strand; PAM type: NRG; PAM sequence: TGG
  source 1..20: mol_type = other DNA
aagttggttggttatttcct

SEQ ID NO: 28162 - DNA, 20 bp, synthetic construct
  misc_feature 1..20: note = Description of Artificial Sequence: Synthetic oligonucleotide
  misc_feature 1..20: note = Target: SCN10A; (+) strand; PAM type: NRG; PAM sequence: TAG
  source 1..20: mol_type = other DNA
gttggttatttccttggttt

SEQ ID NO: 28163 - DNA, 20 bp, synthetic construct
  misc_feature 1..20: note = Description of Artificial Sequence: Synthetic oligonucleotide
  misc_feature 1..20: note = Target: SCN10A; (+) strand; PAM type: NRG; PAM sequence: AAG
  source 1..20: mol_type = other DNA
ggttatttccttggttttag

SEQ ID NO: 28164 - DNA, 20 bp, synthetic construct
  misc_feature 1..20: note = Description of Artificial Sequence: Synthetic oligonucleotide
  misc_feature 1..20: note = Target: SCN10A; (+) strand; PAM type: NRG; PAM sequence: GAG
  source 1..20: mol_type = other DNA
ttatttccttggttttagaa

SEQ ID NO: 28165 - DNA, 20 bp, synthetic construct
  misc_feature 1..20: note = Description of Artificial Sequence: Synthetic oligonucleotide
  misc_feature 1..20: note = Target: SCN10A; (+) strand; PAM type: NRG; PAM sequence: AAG
  source 1..20: mol_type = other DNA
ggttttagaagagcatccca

SEQ ID NO: 28166 - DNA, 20 bp, synthetic construct
  misc_feature 1..20: note = Description of Artificial Sequence: Synthetic oligonucleotide
  misc_feature 1..20: note = Target: SCN10A; (+) strand; PAM type: NRG; PAM sequence: CAG
  source 1..20: mol_type = other DNA
gcatcccaaagacccccaaa

SEQ ID NO: 28167 - DNA, 20 bp, synthetic construct
  misc_feature 1..20: note = Description of Artificial Sequence: Synthetic oligonucleotide
  misc_feature 1..20: note = Target: SCN10A; (+) strand; PAM type: NRG; PAM sequence: GAG
  source 1..20: mol_type = other DNA
atcccaaagacccccaaaca

SEQ ID NO: 28168 - DNA, 20 bp, synthetic construct
  misc_feature 1..20: note = Description of Artificial Sequence: Synthetic oligonucleotide
  misc_feature 1..20: note = Target: SCN10A; (+) strand; PAM type: NRG; PAM sequence: AGG
  source 1..20: mol_type = other DNA
tcccaaagacccccaaacag

SEQ ID NO: 28169 - DNA, 20 bp, synthetic construct
  misc_feature 1..20: note = Description of Artificial Sequence: Synthetic oligonucleotide
  misc_feature 1..20: note = Target: SCN10A; (+) strand; PAM type: NRG; PAM sequence: TGG
  source 1..20: mol_type = other DNA
caaagacccccaaacagagg

SEQ ID NO: 28170 - DNA, 20 bp, synthetic construct
  misc_feature 1..20: note = Description of Artificial Sequence: Synthetic oligonucleotide
  misc_feature 1..20: note = Target: SCN10A; (+) strand; PAM type: NRG; PAM sequence: GGG
  source 1..20: mol_type = other DNA
aaagacccccaaacagaggt

SEQ ID NO: 28171 - DNA, 20 bp, synthetic construct
  misc_feature 1..20: note = Description of Artificial Sequence: Synthetic oligonucleotide
  misc_feature 1..20: note = Target: SCN10A; (+) strand; PAM type: NRG; PAM sequence: GGG
  source 1..20: mol_type = other DNA
aagacccccaaacagaggtg

SEQ ID NO: 28172 - DNA, 20 bp, synthetic construct
  misc_feature 1..20: note = Description of Artificial Sequence: Synthetic oligonucleotide
  misc_feature 1..20: note = Target: SCN10A; (+) strand; PAM type: NRG; PAM sequence: TGG
  source 1..20: mol_type = other DNA
ggtggggcttccccaccacg

SEQ ID NO: 28173 - DNA, 20 bp, synthetic construct
  misc_feature 1..20: note = Description of Artificial Sequence: Synthetic oligonucleotide
  misc_feature 1..20: note = Target: SCN10A; (+) strand; PAM type: NRG; PAM sequence: TGG
  source 1..20: mol_type = other DNA
ggctgcccacttactcgcaa

SEQ ID NO: 28174 - DNA, 20 bp, synthetic construct
  misc_feature 1..20: note = Description of Artificial Sequence: Synthetic oligonucleotide
  misc_feature 1..20: note = Target: SCN10A; (+) strand; PAM type: NRG; PAM sequence: GAG
  source 1..20: mol_type = other DNA
ctgcccacttactcgcaatg

SEQ ID NO: 28175 - DNA, 20 bp, synthetic construct
  misc_feature 1..20: note = Description of Artificial Sequence: Synthetic oligonucleotide
  misc_feature 1..20: note = Target: SCN10A; (+) strand; PAM type: NRG; PAM sequence: GAG
  source 1..20: mol_type = other DNA
gcccacttactcgcaatgga

SEQ ID NO: 28176 - DNA, 20 bp, synthetic construct
  misc_feature 1..20: note = Description of Artificial Sequence: Synthetic oligonucleotide
  misc_feature 1..20: note = Target: SCN10A; (+) strand; PAM type: NRG; PAM sequence: AAG
  source 1..20: mol_type = other DNA
tggagagaaccaccacaatg

SEQ ID NO: 28177 - DNA, 20 bp, synthetic construct
  misc_feature 1..20: note = Description of Artificial Sequence: Synthetic oligonucleotide
  misc_feature 1..20: note = Target: SCN10A; (+) strand; PAM type: NRG; PAM sequence: CAG
  source 1..20: mol_type = other DNA
caatgaagtcaaacacattc

SEQ ID NO: 28178 - DNA, 20 bp, synthetic construct
  misc_feature 1..20: note = Description of Artificial Sequence: Synthetic oligonucleotide
  misc_feature 1..20: note = Target: SCN10A; (+) strand; PAM type: NRG; PAM sequence: AAG
  source 1..20: mol_type = other DNA
acacattccagccatttgtg

SEQ ID NO: 28179 - DNA, 20 bp, synthetic construct
  misc_feature 1..20: note = Description of Artificial Sequence: Synthetic oligonucleotide
  misc_feature 1..20: note = Target: SCN10A; (+) strand; PAM type: NRG; PAM sequence: TAG
  source 1..20: mol_type = other DNA
cattccagccatttgtgaag

SEQ ID NO: 28180 - DNA, 20 bp, synthetic construct
  misc_feature 1..20: note = Description of Artificial Sequence: Synthetic oligonucleotide
  misc_feature 1..20: note = Target: SCN10A; (+) strand; PAM type: NRG; PAM sequence: AAG
  source 1..20: mol_type = other DNA
tgtgaagtagtactgcctca

SEQ ID NO: 28181 - DNA, 20 bp, synthetic construct
  misc_feature 1..20: note = Description of Artificial Sequence: Synthetic oligonucleotide
  misc_feature 1..20: note = Target: SCN10A; (+) strand; PAM type: NRG; PAM sequence: AAG
  source 1..20: mol_type = other DNA
tcatgacacattcgcctgtg

SEQ ID NO: 28182 - DNA, 20 bp, synthetic construct
  misc_feature 1..20: note = Description of Artificial Sequence: Synthetic oligonucleotide
  misc_feature 1..20: note = Target: SCN10A; (+) strand; PAM type: NRG; PAM sequence: CGG
  source 1..20: mol_type = other DNA
gacacattcgcctgtgaaga

SEQ ID NO: 28183 - DNA, 20 bp, synthetic construct
  misc_feature 1..20: note = Description of Artificial Sequence: Synthetic oligonucleotide
  misc_feature 1..20: note = Target: SCN10A; (+) strand; PAM type: NRG; PAM sequence: AAG
  source 1..20: mol_type = other DNA
cgcctgtgaagacggccaca

SEQ ID NO: 28184 - DNA, 20 bp, synthetic construct
  misc_feature 1..20: note = Description of Artificial Sequence: Synthetic oligonucleotide
  misc_feature 1..20: note = Target: SCN10A; (+) strand; PAM type: NRG; PAM sequence: TGG
  source 1..20: mol_type = other DNA
tgaagacggccacaaagaac

SEQ ID NO: 28185 - DNA, 20 bp, synthetic construct
  misc_feature 1..20: note = Description of Artificial Sequence: Synthetic oligonucleotide
  misc_feature 1..20: note = Target: SCN10A; (+) strand; PAM type: NRG; PAM sequence: CAG
  source 1..20: mol_type = other DNA
aagaactggttgattttgcc

SEQ ID NO: 28186 - DNA, 20 bp, synthetic construct
  misc_feature 1..20: note = Description of Artificial Sequence: Synthetic oligonucleotide
  misc_feature 1..20: note = Target: SCN10A; (+) strand; PAM type: NRG; PAM sequence: TGG
  source 1..20: mol_type = other DNA
ttttcgtcttttcttcactt

SEQ ID NO: 28187 - DNA, 20 bp, synthetic construct
  misc_feature 1..20: note = Description of Artificial Sequence: Synthetic oligonucleotide
  misc_feature 1..20: note = Target: SCN10A; (+) strand; PAM type: NRG; PAM sequence: CAG
  source 1..20: mol_type = other DNA
cttttcttcactttggtcat

SEQ ID NO: 28188 - DNA, 20 bp, synthetic construct
  misc_feature 1..20: note = Description of Artificial Sequence: Synthetic oligonucleotide
  misc_feature 1..20: note = Target: SCN10A; (+) strand; PAM type: NRG; PAM sequence: TGG
  source 1..20: mol_type = other DNA
gtcatcagtctccaccatca

SEQ ID NO: 28189 - DNA, 20 bp, synthetic construct
  misc_feature 1..20: note = Description of Artificial Sequence: Synthetic oligonucleotide
  misc_feature 1..20: note = Target: SCN10A; (+) strand; PAM type: NRG; PAM sequence: GAG
  source 1..20: mol_type = other DNA
accatcatggtgatcatgtt

SEQ ID NO: 28190 - DNA, 20 bp, synthetic construct
  misc_feature 1..20: note = Description of Artificial Sequence: Synthetic oligonucleotide
  misc_feature 1..20: note = Target: SCN10A; (+) strand; PAM type: NRG; PAM sequence: AGG
  source 1..20: mol_type = other DNA
ccatcatggtgatcatgttg

SEQ ID NO: 28191 - DNA, 20 bp, synthetic construct
  misc_feature 1..20: note = Description of Artificial Sequence: Synthetic oligonucleotide
  misc_feature 1..20: note = Target: SCN10A; (+) strand; PAM type: NRG; PAM sequence: CAG
  source 1..20: mol_type = other DNA
tcatggtgatcatgttgagg

SEQ ID NO: 28192 - DNA, 20 bp, synthetic construct
  misc_feature 1..20: note = Description of Artificial Sequence: Synthetic oligonucleotide
  misc_feature 1..20: note = Target: SCN10A; (+) strand; PAM type: NRG; PAM sequence: GAG
  source 1..20: mol_type = other DNA
gtgatcatgttgaggcagat

SEQ ID NO: 28193 - DNA, 20 bp, synthetic construct
  misc_feature 1..20: note = Description of Artificial Sequence: Synthetic oligonucleotide
  misc_feature 1..20: note = Target: SCN10A; (+) strand; PAM type: NRG; PAM sequence: AGG
  source 1..20: mol_type = other DNA
tgatcatgttgaggcagatg

SEQ ID NO: 28194 - DNA, 20 bp, synthetic construct
  misc_feature 1..20: note = Description of Artificial Sequence: Synthetic oligonucleotide
  misc_feature 1..20: note = Target: SCN10A; (+) strand; PAM type: NRG; PAM sequence: TGG
  source 1..20: mol_type = other DNA
gaggcagatgaggaccatga

SEQ ID NO: 28195 - DNA, 20 bp, synthetic construct
  misc_feature 1..20: note = Description of Artificial Sequence: Synthetic oligonucleotide
  misc_feature 1..20: note = Target: SCN10A; (+) strand; PAM type: NRG; PAM sequence: AAG
  source 1..20: mol_type = other DNA
gaccatgatggtgatgtcaa

SEQ ID NO: 28196 - DNA, 20 bp, synthetic construct
  misc_feature 1..20: note = Description of Artificial Sequence: Synthetic oligonucleotide
  misc_feature 1..20: note = Target: SCN10A; (+) strand; PAM type: NRG; PAM sequence: TGG
  source 1..20: mol_type = other DNA
ggtgatgtcaaaagcttgtc

SEQ ID NO: 28197 - DNA, 20 bp, synthetic construct
  misc_feature 1..20: note = Description of Artificial Sequence: Synthetic oligonucleotide
  misc_feature 1..20: note = Target: SCN10A; (+) strand; PAM type: NRG; PAM sequence: AAG
  source 1..20: mol_type = other DNA
cttgtctggtcacgatgtca

SEQ ID NO: 28198 - DNA, 20 bp, synthetic construct
  misc_feature 1..20: note = Description of Artificial Sequence: Synthetic oligonucleotide
  misc_feature 1..20: note = Target: SCN10A; (+) strand; PAM type: NRG; PAM sequence: TGG
  source 1..20: mol_type = other DNA
cgatgtcaaagacaaaaccc

SEQ ID NO: 28199 - DNA, 20 bp, synthetic construct
  misc_feature 1..20: note = Description of Artificial Sequence: Synthetic oligonucleotide
  misc_feature 1..20: note = Target: SCN10A; (+) strand; PAM type: NRG; PAM sequence: GAG
  source 1..20: mol_type = other DNA
aaaaccctggaacttgttct

SEQ ID NO: 28200 - DNA, 20 bp, synthetic construct
  misc_feature 1..20: note = Description of Artificial Sequence: Synthetic oligonucleotide
  misc_feature 1..20: note = Target: SCN10A; (+) strand; PAM type: NRG; PAM sequence: AAG
  source 1..20: mol_type = other DNA
ggaacttgttctgagaaaac

SEQ ID NO: 28201 - DNA, 20 bp, synthetic construct
  misc_feature 1..20: note = Description of Artificial Sequence: Synthetic oligonucleotide
  misc_feature 1..20: note = Target: SCN10A; (+) strand; PAM type: NRG; PAM sequence: GAG
  source 1..20: mol_type = other DNA
aacttgttctgagaaaacaa

SEQ ID NO: 28202 - DNA, 20 bp, synthetic construct
  misc_feature 1..20: note = Description of Artificial Sequence: Synthetic oligonucleotide
  misc_feature 1..20: note = Target: SCN10A; (+) strand; PAM type: NRG; PAM sequence: TAG
  source 1..20: mol_type = other DNA
tgttctgagaaaacaagaga

SEQ ID NO: 28203 - DNA, 20 bp, synthetic construct
  misc_feature 1..20: note = Description of Artificial Sequence: Synthetic oligonucleotide
  misc_feature 1..20: note = Target: SCN10A; (+) strand; PAM type: NRG; PAM sequence: TGG
  source 1..20: mol_type = other DNA
tctgagaaaacaagagatag

SEQ ID NO: 28204 - DNA, 20 bp, synthetic construct
  misc_feature 1..20: note = Description of Artificial Sequence: Synthetic oligonucleotide
  misc_feature 1..20: note = Target: SCN10A; (+) strand; PAM type: NRG; PAM sequence: CAG
  source 1..20: mol_type = other DNA
aaaacaagagatagtggcat

SEQ ID NO: 28205 - DNA, 20 bp, synthetic construct
  misc_feature 1..20: note = Description of Artificial Sequence: Synthetic oligonucleotide
  misc_feature 1..20: note = Target: SCN10A; (+) strand; PAM type: NRG; PAM sequence: AGG
  source 1..20: mol_type = other DNA
aaacaagagatagtggcatc

SEQ ID NO: 28206 - DNA, 20 bp, synthetic construct
  misc_feature 1..20: note = Description of Artificial Sequence: Synthetic oligonucleotide
  misc_feature 1..20: note = Target: SCN10A; (+) strand; PAM type: NRG; PAM sequence: GGG
  source 1..20: mol_type = other DNA
aacaagagatagtggcatca

SEQ ID NO: 28207 - DNA, 20 bp, synthetic construct
  misc_feature 1..20: note = Description of Artificial Sequence: Synthetic oligonucleotide
  misc_feature 1..20: note = Target: SCN10A; (+) strand; PAM type: NRG; PAM sequence: TGG
  source 1..20: mol_type = other DNA
gatagtggcatcagggcctt

SEQ ID NO: 28208 - DNA, 20 bp, synthetic construct
  misc_feature 1..20: note = Description of Artificial Sequence: Synthetic oligonucleotide
  misc_feature 1..20: note = Target: SCN10A; (+) strand; PAM type: NRG; PAM sequence: GGG
  source 1..20: mol_type = other DNA
atagtggcatcagggccttt

SEQ ID NO: 28209 - DNA, 20 bp, synthetic construct
  misc_feature 1..20: note = Description of Artificial Sequence: Synthetic oligonucleotide
  misc_feature 1..20: note = Target: SCN10A; (+) strand; PAM type: NRG; PAM sequence: CAG
  source 1..20: mol_type = other DNA
tggcatcagggcctttgggc

SEQ ID NO: 28210 - DNA, 20 bp, synthetic construct
  misc_feature 1..20: note = Description of Artificial Sequence: Synthetic oligonucleotide
  misc_feature 1..20: note = Target: SCN10A; (+) strand; PAM type: NRG; PAM sequence: CAG
  source 1..20: mol_type = other DNA
gcctttgggccagcacaaac

SEQ ID NO: 28211 - DNA, 20 bp, synthetic construct
  misc_feature 1..20: note = Description of Artificial Sequence: Synthetic oligonucleotide
  misc_feature 1..20: note = Target: SCN10A; (+) strand; PAM type: NRG; PAM sequence: AGG
  source 1..20: mol_type = other DNA
cctttgggccagcacaaacc

SEQ ID NO: 28212 - DNA, 20 bp, synthetic construct
  misc_feature 1..20: note = Description of Artificial Sequence: Synthetic oligonucleotide
  misc_feature 1..20: note = Target: SCN10A; (+) strand; PAM type: NRG; PAM sequence: TAG
  source 1..20: mol_type = other DNA
ccaggcatctgtgttatctg

SEQ ID NO: 28213 - DNA, 20 bp, synthetic construct
  misc_feature 1..20: note = Description of Artificial Sequence: Synthetic oligonucleotide
  misc_feature 1..20: note = Target: SCN10A; (+) strand; PAM type: NRG; PAM sequence: GAG
  source 1..20: mol_type = other DNA
catctgtgttatctgtagat

SEQ ID NO: 28214 - DNA, 20 bp, synthetic construct
  misc_feature 1..20: note = Description of Artificial Sequence: Synthetic oligonucleotide
  misc_feature 1..20: note = Target: SCN10A; (+) strand; PAM type: NRG; PAM sequence: CAG
  source 1..20: mol_type = other DNA
catcacactccacatcttaa

SEQ ID NO: 28215 - DNA, 20 bp, synthetic construct
  misc_feature 1..20: note = Description of Artificial Sequence: Synthetic oligonucleotide
  misc_feature 1..20: note = Target: SCN10A; (+) strand; PAM type: NRG; PAM sequence: AAG
  source 1..20: mol_type = other DNA
cacactccacatcttaacag

SEQ ID NO: 28216 - DNA, 20 bp, synthetic construct
  misc_feature 1..20: note = Description of Artificial Sequence: Synthetic oligonucleotide
  misc_feature 1..20: note = Target: SCN10A; (+) strand; PAM type: NRG; PAM sequence: TAG
  source 1..20: mol_type = other DNA
ctcttccaaaatttcacttt

SEQ ID NO: 28217 - DNA, 20 bp, synthetic construct
  misc_feature 1..20: note = Description of Artificial Sequence: Synthetic oligonucleotide
  misc_feature 1..20: note = Target: SCN10A; (+) strand; PAM type: NRG; PAM sequence: CAG
  source 1..20: mol_type = other DNA
ttgactctacctcattgccc

SEQ ID NO: 28218 - DNA, 20 bp, synthetic construct
  misc_feature 1..20: note = Description of Artificial Sequence: Synthetic oligonucleotide
  misc_feature 1..20: note = Target: SCN10A; (+) strand; PAM type: NRG; PAM sequence: AAG
  source 1..20: mol_type = other DNA
ctacctcattgccccagttc

SEQ ID NO: 28219 - DNA, 20 bp, synthetic construct
  misc_feature 1..20: note = Description of Artificial Sequence: Synthetic oligonucleotide
  misc_feature 1..20: note = Target: SCN10A; (+) strand; PAM type: NRG; PAM sequence: TGG
  source 1..20: mol_type = other DNA
caagtccttaatacctctcc

SEQ ID NO: 28220 - DNA, 20 bp, synthetic construct
  misc_feature 1..20: note = Description of Artificial Sequence: Synthetic oligonucleotide
  misc_feature 1..20: note = Target: SCN10A; (+) strand; PAM type: NRG; PAM sequence: CAG
  source 1..20: mol_type = other DNA
tcctggccctttgatgccac

SEQ ID NO: 28221 - DNA, 20 bp, synthetic construct
  misc_feature 1..20: note = Description of Artificial Sequence: Synthetic oligonucleotide
  misc_feature 1..20: note = Target: SCN10A; (+) strand; PAM type: NRG; PAM sequence: AGG
  source 1..20: mol_type = other DNA
cctggccctttgatgccacc

SEQ ID NO: 28222 - DNA, 20 bp, synthetic construct
  misc_feature 1..20: note = Description of Artificial Sequence: Synthetic oligonucleotide
  misc_feature 1..20: note = Target: SCN10A; (+) strand; PAM type: NRG; PAM sequence: TGG
  source 1..20: mol_type = other DNA
accaggcccttcttttgtcc

SEQ ID NO: 28223 - DNA, 20 bp, synthetic construct
  misc_feature 1..20: note = Description of Artificial Sequence: Synthetic oligonucleotide
  misc_feature 1..20: note = Target: SCN10A; (+) strand; PAM type: NRG; PAM sequence: TGG
  source 1..20: mol_type = other DNA
tgccctcctatctcctctct

SEQ ID NO: 28224 - DNA, 20 bp, synthetic construct
  misc_feature 1..20: note = Description of Artificial Sequence: Synthetic oligonucleotide
  misc_feature 1..20: note = Target: SCN10A; (+) strand; PAM type: NRG; PAM sequence: CAG
  source 1..20: mol_type = other DNA
cttggctgtctaaattccaa

SEQ ID NO: 28225 - DNA, 20 bp, synthetic construct
  misc_feature 1..20: note = Description of Artificial Sequence: Synthetic oligonucleotide
  misc_feature 1..20: note = Target: SCN10A; (+) strand; PAM type: NRG; PAM sequence: GAG
  source 1..20: mol_type = other DNA
gtctaaattccaacagtctt

SEQ ID NO: 28226 - DNA, 20 bp, synthetic construct
  misc_feature 1..20: note = Description of Artificial Sequence: Synthetic oligonucleotide
  misc_feature 1..20: note = Target: SCN10A; (+) strand; PAM type: NRG; PAM sequence: AAG
  source 1..20: mol_type = other DNA
ttgagtaatccatctctttt

SEQ ID NO: 28227 - DNA, 20 bp, synthetic construct
  misc_feature 1..20: note = Description of Artificial Sequence: Synthetic oligonucleotide
  misc_feature 1..20: note = Target: SCN10A; (+) strand; PAM type: NRG; PAM sequence: TGG
  source 1..20: mol_type = other DNA
tttaagctccacttactgca

SEQ ID NO: 28228 - DNA, 20 bp, synthetic construct
  misc_feature 1..20: note = Description of Artificial Sequence: Synthetic oligonucleotide
  misc_feature 1..20: note = Target: SCN10A; (+) strand; PAM type: NRG; PAM sequence: GAG
  source 1..20: mol_type = other DNA
taagctccacttactgcatg

SEQ ID NO: 28229 - DNA, 20 bp, synthetic construct
  misc_feature 1..20: note = Description of Artificial Sequence: Synthetic oligonucleotide
  misc_feature 1..20: note = Target: SCN10A; (+) strand; PAM type: NRG; PAM sequence: TAG
  source 1..20: mol_type = other DNA
ttactgcatggagtgtccct

SEQ ID NO: 28230 - DNA, 20 bp, synthetic construct
  misc_feature 1..20: note = Description of Artificial Sequence: Synthetic oligonucleotide
  misc_feature 1..20: note = Target: SCN10A; (+) strand; PAM type: NRG; PAM sequence: TGG
  source 1..20: mol_type = other DNA
aacacactaccctgtccctt

SEQ ID NO: 28231 - DNA, 20 bp, synthetic construct
  misc_feature 1..20: note = Description of Artificial Sequence: Synthetic oligonucleotide
  misc_feature 1..20: note = Target: SCN10A; (+) strand; PAM type: NRG; PAM sequence: GGG
  source 1..20: mol_type = other DNA
acacactaccctgtcccttt

SEQ ID NO: 28232 - DNA, 20 bp, synthetic construct
  misc_feature 1..20: note = Description of Artificial Sequence: Synthetic oligonucleotide
  misc_feature 1..20: note = Target: SCN10A; (+) strand; PAM type: NRG; PAM sequence: GGG
  source 1..20: mol_type = other DNA
cacactaccctgtccctttg

SEQ ID NO: 28233 - DNA, 20 bp, synthetic construct
  misc_feature 1..20: note = Description of Artificial Sequence: Synthetic oligonucleotide
  misc_feature 1..20: note = Target: SCN10A; (+) strand; PAM type: NRG; PAM sequence: CAG
  source 1..20: mol_type = other DNA
cctttggggatcccactttt

SEQ ID NO: 28234 - DNA, 20 bp, synthetic construct
  misc_feature 1..20: note = Description of Artificial Sequence: Synthetic oligonucleotide
  misc_feature 1..20: note = Target: SCN10A; (+) strand; PAM type: NRG; PAM sequence: CAG
  source 1..20: mol_type = other DNA
tggggatcccacttttcagt

SEQ ID NO: 28235 - DNA, 20 bp, synthetic construct
  misc_feature 1..20: note = Description of Artificial Sequence: Synthetic oligonucleotide
  misc_feature 1..20: note = Target: SCN10A; (+) strand; PAM type: NRG; PAM sequence: GAG
  source 1..20: mol_type = other DNA
cccacttttcagtcagcctc

SEQ ID NO: 28236 - DNA, 20 bp, synthetic construct
  misc_feature 1..20: note = Description of Artificial Sequence: Synthetic oligonucleotide
  misc_feature 1..20: note = Target: SCN10A; (+) strand; PAM type: NRG; PAM sequence: TAG
  source 1..20: mol_type = other DNA
tttcagtcagcctcgagttc

SEQ ID NO: 28237 - DNA, 20 bp, synthetic construct
  misc_feature 1..20: note = Description of Artificial Sequence: Synthetic oligonucleotide
  misc_feature 1..20: note = Target: SCN10A; (+) strand; PAM type: NRG; PAM sequence: TAG
  source 1..20: mol_type = other DNA
tgtatatgcgtcttctctac

SEQ ID NO: 28238 - DNA, 20 bp, synthetic construct
  misc_feature 1..20: note = Description of Artificial Sequence: Synthetic oligonucleotide
  misc_feature 1..20: note = Target: SCN10A; (+) strand; PAM type: NRG; PAM sequence: GAG
  source 1..20: mol_type = other DNA
cgtcttctctactagacaat

SEQ ID NO: 28239 - DNA, 20 bp, synthetic construct
  misc_feature 1..20: note = Description of Artificial Sequence: Synthetic oligonucleotide
  misc_feature 1..20: note = Target: SCN10A; (+) strand; PAM type: NRG; PAM sequence: GAG
  source 1..20: mol_type = other DNA
tactagacaatgagctgttt

SEQ ID NO: 28240 - DNA, 20 bp, synthetic construct
  misc_feature 1..20: note = Description of Artificial Sequence: Synthetic oligonucleotide
  misc_feature 1..20: note = Target: SCN10A; (+) strand; PAM type: NRG; PAM sequence: AGG
  source 1..20: mol_type = other DNA
actagacaatgagctgtttg

SEQ ID NO: 28241 - DNA, 20 bp, synthetic construct
  misc_feature 1..20: note = Description of Artificial Sequence: Synthetic oligonucleotide
  misc_feature 1..20: note = Target: SCN10A; (+) strand; PAM type: NRG; PAM sequence: AAG
  source 1..20: mol_type = other DNA
acaatgagctgtttgaggac

SEQ ID NO: 28242 - DNA, 20 bp, synthetic construct
  misc_feature 1..20: note = Description of Artificial Sequence: Synthetic oligonucleotide
  misc_feature 1..20: note = Target: SCN10A; (+) strand; PAM type: NRG; PAM sequence: AGG
  source 1..20: mol_type = other DNA
caatgagctgtttgaggaca

SEQ ID NO: 28243 - DNA, 20 bp, synthetic construct
  misc_feature 1..20: note = Description of Artificial Sequence: Synthetic oligonucleotide
  misc_feature 1..20: note = Target: SCN10A; (+) strand; PAM type: NRG; PAM sequence: GGG
  source 1..20: mol_type = other DNA
aatgagctgtttgaggacaa

SEQ ID NO: 28244 - DNA, 20 bp, synthetic construct
  misc_feature 1..20: note = Description of Artificial Sequence: Synthetic oligonucleotide
  misc_feature 1..20: note = Target: SCN10A; (+) strand; PAM type: NRG; PAM sequence: CAG
  source 1..20: mol_type = other DNA
tccttaactttgtttccctg

SEQ ID NO: 28245 - DNA, 20 bp, synthetic construct
  misc_feature 1..20: note = Description of Artificial Sequence: Synthetic oligonucleotide
  misc_feature 1..20: note = Target: SCN10A; (+) strand; PAM type: NRG; PAM sequence: AAG
  source 1..20: mol_type = other DNA
tgcagtgccctgcacattgc

SEQ ID NO: 28246 - DNA, 20 bp, synthetic construct
  misc_feature 1..20: note = Description of Artificial Sequence: Synthetic oligonucleotide
  misc_feature 1..20: note = Target: SCN10A; (+) strand; PAM type: NRG; PAM sequence: GAG
  source 1..20: mol_type = other DNA
cagtgccctgcacattgcaa

SEQ ID NO: 28247 - DNA, 20 bp, synthetic construct
  misc_feature 1..20: note = Description of Artificial Sequence: Synthetic oligonucleotide
  misc_feature 1..20: note = Target: SCN10A; (+) strand; PAM type: NRG; PAM sequence: AAG
  source 1..20: mol_type = other DNA
cctgcacattgcaagagttc

SEQ ID NO: 28248 - DNA, 20 bp, synthetic construct
  misc_feature 1..20: note = Description of Artificial Sequence: Synthetic oligonucleotide
  misc_feature 1..20: note = Target: SCN10A; (+) strand; PAM type: NRG; PAM sequence: GAG
  source 1..20: mol_type = other DNA
tgcacattgcaagagttcaa

SEQ ID NO: 28249 - DNA, 20 bp, synthetic construct
  misc_feature 1..20: note = Description of Artificial Sequence: Synthetic oligonucleotide
  misc_feature 1..20: note = Target: SCN10A; (+) strand; PAM type: NRG; PAM sequence: GAG
  source 1..20: mol_type = other DNA
gctgcttgaaatattaattt

SEQ ID NO: 28250 - DNA, 20 bp, synthetic construct
  misc_feature 1..20: note = Description of Artificial Sequence: Synthetic oligonucleotide
  misc_feature 1..20: note = Target: SCN10A; (+) strand; PAM type: NRG; PAM sequence: GAG
  source 1..20: mol_type = other DNA
ttaatttgagctactttgct

SEQ ID NO: 28251 - DNA, 20 bp, synthetic construct
  misc_feature 1..20: note = Description of Artificial Sequence: Synthetic oligonucleotide
  misc_feature 1..20: note = Target: SCN10A; (+) strand; PAM type: NRG; PAM sequence: GAG
  source 1..20: mol_type = other DNA
aatttgagctactttgctga

SEQ ID NO: 28252 - DNA, 20 bp, synthetic construct
  misc_feature 1..20: note = Description of Artificial Sequence: Synthetic oligonucleotide
  misc_feature 1..20: note = Target: SCN10A; (+) strand; PAM type: NRG; PAM sequence: AAG
  source 1..20: mol_type = other DNA
gagctactttgctgagagta

SEQ ID NO: 28253 - DNA, 20 bp, synthetic construct
  misc_feature 1..20: note = Description of Artificial Sequence: Synthetic oligonucleotide
  misc_feature 1..20: note = Target: SCN10A; (+) strand; PAM type: NRG; PAM sequence: AAG
  source 1..20: mol_type = other DNA
actttgctgagagtaaagtc

SEQ ID NO: 28254 - DNA, 20 bp, synthetic construct
  misc_feature 1..20: note = Description of Artificial Sequence: Synthetic oligonucleotide
  misc_feature 1..20: note = Target: SCN10A; (+) strand; PAM type: NRG; PAM sequence: AAG
  source 1..20: mol_type = other DNA
tgagagtaaagtcaagtgca

SEQ ID NO: 28255 - DNA, 20 bp, synthetic construct
  misc_feature 1..20: note = Description of Artificial Sequence: Synthetic oligonucleotide
  misc_feature 1..20: note = Target: SCN10A; (+) strand; PAM type: NRG; PAM sequence: AGG
  source 1..20: mol_type = other DNA
gagagtaaagtcaagtgcaa

SEQ ID NO: 28256 - DNA, 20 bp, synthetic construct
  misc_feature 1..20: note = Description of Artificial Sequence: Synthetic oligonucleotide
  misc_feature 1..20: note = Target: SCN10A; (+) strand; PAM type: NRG; PAM sequence: GGG
  source 1..20: mol_type = other DNA
agagtaaagtcaagtgcaaa

SEQ ID NO: 28257 - DNA, 20 bp, synthetic construct
  misc_feature 1..20: note = Description of Artificial Sequence: Synthetic oligonucleotide
  misc_feature 1..20: note = Target: SCN10A; (+) strand; PAM type: NRG; PAM sequence: GGG
  source 1..20: mol_type = other DNA
gagtaaagtcaagtgcaaag

SEQ ID NO: 28258 - DNA, 20 bp, synthetic construct
  misc_feature 1..20: note = Description of Artificial Sequence: Synthetic oligonucleotide
  misc_feature 1..20: note = Target: SCN10A; (+) strand; PAM type: NRG; PAM sequence: TGG
  source 1..20: mol_type = other DNA
gcaaaggggaaacttattct

SEQ ID NO: 28259 - DNA, 20 bp, synthetic construct
  misc_feature 1..20: note = Description of Artificial Sequence: Synthetic oligonucleotide
  misc_feature 1..20: note = Target: SCN10A; (+) strand; PAM type: NRG; PAM sequence: TGG
  source 1..20: mol_type = other DNA
ggaaatgttccctctgttcc

SEQ ID NO: 28260 - DNA, 20 bp, synthetic construct
  misc_feature 1..20: note = Description of Artificial Sequence: Synthetic oligonucleotide
  misc_feature 1..20: note = Target: SCN10A; (+) strand; PAM type: NRG; PAM sequence: AAG
  source 1..20: mol_type = other DNA
ctggtgctgtgcaaatgcct

SEQ ID NO: 28261 - DNA, 20 bp, synthetic construct
  misc_feature 1..20: note = Description of Artificial Sequence: Synthetic oligonucleotide
  misc_feature 1..20: note = Target: SCN10A; (+) strand; PAM type: NRG; PAM sequence: CAG
  source 1..20: mol_type = other DNA
tgcaaatgcctaagcaaatg

SEQ ID NO: 28262 - DNA, 20 bp, synthetic construct
  misc_feature 1..20: note = Description of Artificial Sequence: Synthetic oligonucleotide
  misc_feature 1..20: note = Target: SCN10A; (+) strand; PAM type: NRG; PAM sequence: AGG
  source 1..20: mol_type = other DNA
gcaaatgcctaagcaaatgc

SEQ ID NO: 28263 - DNA, 20 bp, synthetic construct
  misc_feature 1..20: note = Description of Artificial Sequence: Synthetic oligonucleotide
  misc_feature 1..20: note = Target: SCN10A; (+) strand; PAM type: NRG; PAM sequence: TAG
  source 1..20: mol_type = other DNA
tgcctaagcaaatgcaggta

SEQ ID NO: 28264 - DNA, 20 bp, synthetic construct
  misc_feature 1..20: note = Description of Artificial Sequence: Synthetic oligonucleotide
  misc_feature 1..20: note = Target: SCN10A; (+) strand; PAM type: NRG; PAM sequence: AGG
  source 1..20: mol_type = other DNA
gcctaagcaaatgcaggtat

SEQ ID NO: 28265 - DNA, 20 bp, synthetic construct
  misc_feature 1..20: note = Description of Artificial Sequence: Synthetic oligonucleotide
  misc_feature 1..20: note = Target: SCN10A; (+) strand; PAM type: NRG; PAM sequence: GGG
  source 1..20: mol_type = other DNA
cctaagcaaatgcaggtata

SEQ ID NO: 28266 - DNA, 20 bp, synthetic construct
  misc_feature 1..20: note = Description of Artificial Sequence: Synthetic oligonucleotide
  misc_feature 1..20: note = Target: SCN10A; (+) strand; PAM type: NRG; PAM sequence: TAG
  source 1..20: mol_type = other DNA
gcaaatgcaggtatagggcg

SEQ ID NO: 28267 - DNA, 20 bp, synthetic construct
  misc_feature 1..20: note = Description of Artificial Sequence: Synthetic oligonucleotide
  misc_feature 1..20: note = Target: SCN10A; (+) strand; PAM type: NRG; PAM sequence: AGG
  source 1..20: mol_type = other DNA
caaatgcaggtatagggcgt

SEQ ID NO: 28268 - DNA, 20 bp, synthetic construct
  misc_feature 1..20: note = Description of Artificial Sequence: Synthetic oligonucleotide
  misc_feature 1..20: note = Target: SCN10A; (+) strand; PAM type: NRG; PAM sequence: GGG
  source 1..20: mol_type = other DNA
aaatgcaggtatagggcgta

SEQ ID NO: 28269 - DNA, 20 bp, synthetic construct
  misc_feature 1..20: note = Description of Artificial Sequence: Synthetic oligonucleotide
  misc_feature 1..20: note = Target: SCN10A; (+) strand; PAM type: NRG; PAM sequence: AAG
  source 1..20: mol_type = other DNA
caggtatagggcgtagggtc

SEQ ID NO: 28270 - DNA, 20 bp, synthetic construct
  misc_feature 1..20: note = Description of Artificial Sequence: Synthetic oligonucleotide
  misc_feature 1..20: note = Target: SCN10A; (+) strand; PAM type: NRG; PAM sequence: TGG
  source 1..20: mol_type = other DNA
tagggcgtagggtcaagtct

SEQ ID NO: 28271 - DNA, 20 bp, synthetic construct
  misc_feature 1..20: note = Description of Artificial Sequence: Synthetic oligonucleotide
  misc_feature 1..20: note = Target: SCN10A; (+) strand; PAM type: NRG; PAM sequence: TGG
  source 1..20: mol_type = other DNA
agtcttggttgtttgcatct

SEQ ID NO: 28272 - DNA, 20 bp, synthetic construct
  misc_feature 1..20: note = Description of Artificial Sequence: Synthetic oligonucleotide
  misc_feature 1..20: note = Target: SCN10A; (+) strand; PAM type: NRG; PAM sequence: AAG
  source 1..20: mol_type = other DNA
cttggttgtttgcatcttgg

SEQ ID NO: 28273 - DNA, 20 bp, synthetic construct
  misc_feature 1..20: note = Description of Artificial Sequence: Synthetic oligonucleotide
  misc_feature 1..20: note = Target: SCN10A; (+) strand; PAM type: NRG; PAM sequence: AGG
  source 1..20: mol_type = other DNA
ttggttgtttgcatcttgga

SEQ ID NO: 28274 - DNA, 20 bp, synthetic construct
  misc_feature 1..20: note = Description of Artificial Sequence: Synthetic oligonucleotide
  misc_feature 1..20: note = Target: SCN10A; (+) strand; PAM type: NRG; PAM sequence: GAG
  source 1..20: mol_type = other DNA
ggttgtttgcatcttggaag

SEQ ID NO: 28275 - DNA, 20 bp, synthetic construct
  misc_feature 1..20: note = Description of Artificial Sequence: Synthetic oligonucleotide
  misc_feature 1..20: note = Target: SCN10A; (+) strand; PAM type: NRG; PAM sequence: AGG
  source 1..20: mol_type = other DNA
gttgtttgcatcttggaagg

SEQ ID NO: 28276 - DNA, 20 bp, synthetic construct
  misc_feature 1..20: note = Description of Artificial Sequence: Synthetic oligonucleotide
  misc_feature 1..20: note = Target: SCN10A; (+) strand; PAM type: NRG; PAM sequence: CAG
  source 1..20: mol_type = other DNA
gtttgcatcttggaaggagg

SEQ ID NO: 28277 - DNA, 20 bp, synthetic construct
  misc_feature 1..20: note = Description of Artificial Sequence: Synthetic oligonucleotide
  misc_feature 1..20: note = Target: SCN10A; (+) strand; PAM type: NRG; PAM sequence: GAG
  source 1..20: mol_type = other DNA
ttgcatcttggaaggaggca

SEQ ID NO: 28278 - DNA, 20 bp, synthetic construct
  misc_feature 1..20: note = Description of Artificial Sequence: Synthetic oligonucleotide
  misc_feature 1..20: note = Target: SCN10A; (+) strand; PAM type: NRG; PAM sequence: TGG
  source 1..20: mol_type = other DNA
catcttggaaggaggcagag

SEQ ID NO: 28279 - DNA, 20 bp, synthetic construct
  misc_feature 1..20: note = Description of Artificial Sequence: Synthetic oligonucleotide
  misc_feature 1..20: note = Target: SCN10A; (+) strand; PAM type: NRG; PAM sequence: TGG
  source 1..20: mol_type = other DNA
tggaaggaggcagagtggcc

SEQ ID NO: 28280 - DNA, 20 bp, synthetic construct
  misc_feature 1..20: note = Description of Artificial Sequence: Synthetic oligonucleotide
  misc_feature 1..20: note = Target: SCN10A; (+) strand; PAM type: NRG; PAM sequence: AAG
  source 1..20: mol_type = other DNA
gcagagtggcctggataacc

SEQ ID NO: 28281 - DNA, 20 bp, synthetic construct
  misc_feature 1..20: note = Description of Artificial Sequence: Synthetic oligonucleotide
  misc_feature 1..20: note = Target: SCN10A; (+) strand; PAM type: NRG; PAM sequence: GAG
  source 1..20: mol_type = other DNA
agagtggcctggataaccaa

SEQ ID NO: 28282 - DNA, 20 bp, synthetic construct
  misc_feature 1..20: note = Description of Artificial Sequence: Synthetic oligonucleotide
  misc_feature 1..20: note = Target: SCN10A; (+) strand; PAM type: NRG; PAM sequence: TGG
  source 1..20: mol_type = other DNA
accaagagatcatttatatc

SEQ ID NO: 28283 - DNA, 20 bp, synthetic construct
  misc_feature 1..20: note = Description of Artificial Sequence: Synthetic oligonucleotide
  misc_feature 1..20: note = Target: SCN10A; (+) strand; PAM type: NRG; PAM sequence: TGG
  source 1..20: mol_type = other DNA
tttatatctggttattttta

SEQ ID NO: 28284 - DNA, 20 bp, synthetic construct
  misc_feature 1..20: note = Description of Artificial Sequence: Synthetic oligonucleotide
  misc_feature 1..20: note = Target: SCN10A; (+) strand; PAM type: NRG; PAM sequence: AAG
  source 1..20: mol_type = other DNA
atttttatggtgtctttaaa

SEQ ID NO: 28285 - DNA, 20 bp, synthetic construct
  misc_feature 1..20: note = Description of Artificial Sequence: Synthetic oligonucleotide
  misc_feature 1..20: note = Target: SCN10A; (+) strand; PAM type: NRG; PAM sequence: TAG
  source 1..20: mol_type = other DNA
actgtgatcttctcttcttt

SEQ ID NO: 28286 - DNA, 20 bp, synthetic construct
  misc_feature 1..20: note = Description of Artificial Sequence: Synthetic oligonucleotide
  misc_feature 1..20: note = Target: SCN10A; (+) strand; PAM type: NRG; PAM sequence: GAG
  source 1..20: mol_type = other DNA
tgaacatcttactgctctgt

SEQ ID NO: 28287 - DNA, 20 bp, synthetic construct
  misc_feature 1..20: note = Description of Artificial Sequence: Synthetic oligonucleotide
  misc_feature 1..20: note = Target: SCN10A; (+) strand; PAM type: NRG; PAM sequence: TGG
  source 1..20: mol_type = other DNA
aaaacttctcctgacctcta

SEQ ID NO: 28288 - DNA, 20 bp, synthetic construct
  misc_feature 1..20: note = Description of Artificial Sequence: Synthetic oligonucleotide
  misc_feature 1..20: note = Target: SCN10A; (+) strand; PAM type: NRG; PAM sequence: GAG
  source 1..20: mol_type = other DNA
aacttctcctgacctctatg

SEQ ID NO: 28289 - DNA, 20 bp, synthetic construct
  misc_feature 1..20: note = Description of Artificial Sequence: Synthetic oligonucleotide
  misc_feature 1..20: note = Target: SCN10A; (+) strand; PAM type: NRG; PAM sequence: AAG
  source 1..20: mol_type = other DNA
cacatatctccccctattca

SEQ ID NO: 28290 - DNA, 20 bp, synthetic construct
  misc_feature 1..20: note = Description of Artificial Sequence: Synthetic oligonucleotide
  misc_feature 1..20: note = Target: SCN10A; (+) strand; PAM type: NRG; PAM sequence: AGG
  source 1..20: mol_type = other DNA
acatatctccccctattcaa

SEQ ID NO: 28291 - DNA, 20 bp, synthetic construct
  misc_feature 1..20: note = Description of Artificial Sequence: Synthetic oligonucleotide
  misc_feature 1..20: note = Target: SCN10A; (+) strand; PAM type: NRG; PAM sequence: CAG
  source 1..20: mol_type = other DNA
ctcccctaccccatgtacct

SEQ ID NO: 28292 - DNA, 20 bp, synthetic construct
  misc_feature 1..20: note = Description of Artificial Sequence: Synthetic oligonucleotide
  misc_feature 1..20: note = Target: SCN10A; (+) strand; PAM type: NRG; PAM sequence: AGG
  source 1..20: mol_type = other DNA
tcccctaccccatgtacctc

SEQ ID NO: 28293 - DNA, 20 bp, synthetic construct
  misc_feature 1..20: note = Description of Artificial Sequence: Synthetic oligonucleotide
  misc_feature 1..20: note = Target: SCN10A; (+) strand; PAM type: NRG; PAM sequence: GGG
  source 1..20: mol_type = other DNA
cccctaccccatgtacctca

SEQ ID NO: 28294 - DNA, 20 bp, synthetic construct
  misc_feature 1..20: note = Description of Artificial Sequence: Synthetic oligonucleotide
  misc_feature 1..20: note = Target: SCN10A; (+) strand; PAM type: NRG; PAM sequence: GGG
  source 1..20: mol_type = other DNA
ccctaccccatgtacctcag

SEQ ID NO: 28295 - DNA, 20 bp, synthetic construct
  misc_feature 1..20: note = Description of Artificial Sequence: Synthetic oligonucleotide
  misc_feature 1..20: note = Target: SCN10A; (+) strand; PAM type: NRG; PAM sequence: TAG
  source 1..20: mol_type = other DNA
accccatgtacctcaggggt

SEQ ID NO: 28296 - DNA, 20 bp, synthetic construct
  misc_feature 1..20: note = Description of Artificial Sequence: Synthetic oligonucleotide
  misc_feature 1..20: note = Target: SCN10A; (+) strand; PAM type: NRG; PAM sequence: AGG
  source 1..20: mol_type = other DNA
ccccatgtacctcaggggtt

SEQ ID NO: 28297 - DNA, 20 bp, synthetic construct
  misc_feature 1..20: note = Description of Artificial Sequence: Synthetic oligonucleotide
  misc_feature 1..20: note = Target: SCN10A; (+) strand; PAM type: NRG; PAM sequence: TGG
  source 1..20: mol_type = other DNA
tgtacctcaggggttaggcc

SEQ ID NO: 28298 - DNA, 20 bp, synthetic construct
  misc_feature 1..20: note = Description of Artificial Sequence: Synthetic oligonucleotide
  misc_feature 1..20: note = Target: SCN10A; (+) strand; PAM type: NRG; PAM sequence: AAG
  source 1..20: mol_type = other DNA
taaaaccccttcttgctttg

SEQ ID NO: 28299 - DNA, 20 bp, synthetic construct
  misc_feature 1..20: note = Description of Artificial Sequence: Synthetic oligonucleotide
  misc_feature 1..20: note = Target: SCN10A; (+) strand; PAM type: NRG; PAM sequence: TAG
  source 1..20: mol_type = other DNA
tgctttgaagctttgccacc

SEQ ID NO: 28300 - DNA, 20 bp, synthetic construct
  misc_feature 1..20: note = Description of Artificial Sequence: Synthetic oligonucleotide
  misc_feature 1..20: note = Target: SCN10A; (+) strand; PAM type: NRG; PAM sequence: TGG
  source 1..20: mol_type = other DNA
actgccgcttgccaaactct

SEQ ID NO: 28301 - DNA, 20 bp, synthetic construct
  misc_feature 1..20: note = Description of Artificial Sequence: Synthetic oligonucleotide
  misc_feature 1..20: note = Target: SCN10A; (+) strand; PAM type: NRG; PAM sequence: CAG
  source 1..20: mol_type = other DNA
aactcttggtccctctgcct

SEQ ID NO: 28302 - DNA, 20 bp, synthetic construct
  misc_feature 1..20: note = Description of Artificial Sequence: Synthetic oligonucleotide
  misc_feature 1..20: note = Target: SCN10A; (+) strand; PAM type: NRG; PAM sequence: TGG
  source 1..20: mol_type = other DNA
tccctctgcctcagtaatga

SEQ ID NO: 28303 - DNA, 20 bp, synthetic construct
  misc_feature 1..20: note = Description of Artificial Sequence: Synthetic oligonucleotide
  misc_feature 1..20: note = Target: SCN10A; (+) strand; PAM type: NRG; PAM sequence: GGG
  source 1..20: mol_type = other DNA
ccctctgcctcagtaatgat

SEQ ID NO: 28304 - DNA, 20 bp, synthetic construct
  misc_feature 1..20: note = Description of Artificial Sequence: Synthetic oligonucleotide
  misc_feature 1..20: note = Target: SCN10A; (+) strand; PAM type: NRG; PAM sequence: GAG
  source 1..20: mol_type = other DNA
ctgcctcagtaatgatgggt

SEQ ID NO: 28305 - DNA, 20 bp, synthetic construct
  misc_feature 1..20: note = Description of Artificial Sequence: Synthetic oligonucleotide
  misc_feature 1..20: note = Target: SCN10A; (+) strand; PAM type: NRG; PAM sequence: AGG
  source 1..20: mol_type = other DNA
tgcctcagtaatgatgggtg

SEQ ID NO: 28306 - DNA, 20 bp, synthetic construct
  misc_feature 1..20: note = Description of Artificial Sequence: Synthetic oligonucleotide
  misc_feature 1..20: note = Target: SCN10A; (+) strand; PAM type: NRG; PAM sequence: TGG
  source 1..20: mol_type = other DNA
gtaatgatgggtgaggctct

SEQ ID NO: 28307 - DNA, 20 bp, synthetic construct
  misc_feature 1..20: note = Description of Artificial Sequence: Synthetic oligonucleotide
  misc_feature 1..20: note = Target: SCN10A; (+) strand; PAM type: NRG; PAM sequence: TGG
  source 1..20: mol_type = other DNA
tggccatatttgcccactct

SEQ ID NO: 28308 - DNA, 20 bp, synthetic construct
  misc_feature 1..20: note = Description of Artificial Sequence: Synthetic oligonucleotide
  misc_feature 1..20: note = Target: SCN10A; (+) strand; PAM type: NRG; PAM sequence: TAG
  source 1..20: mol_type = other DNA
cccactcttggctattatcc

SEQ ID NO: 28309 - DNA, 20 bp, synthetic construct
  misc_feature 1..20: note = Description of Artificial Sequence: Synthetic oligonucleotide
  misc_feature 1..20: note = Target: SCN10A; (+) strand; PAM type: NRG; PAM sequence: AGG
  source 1..20: mol_type = other DNA
ccactcttggctattatcct

SEQ ID NO: 28310 - DNA, 20 bp, synthetic construct
  misc_feature 1..20: note = Description of Artificial Sequence: Synthetic oligonucleotide
  misc_feature 1..20: note = Target: SCN10A; (+) strand; PAM type: NRG; PAM sequence: TGG
  source 1..20: mol_type = other DNA
gtgcattactctttgtctct

SEQ ID NO: 28311 - DNA, 20 bp, synthetic construct
  misc_feature 1..20: note = Description of Artificial Sequence: Synthetic oligonucleotide
  misc_feature 1..20: note = Target: SCN10A; (+) strand; PAM type: NRG; PAM sequence: TAG
  source 1..20: mol_type = other DNA
tgcacaaatctctaatgacc

SEQ ID NO: 28312 - DNA, 20 bp, synthetic construct
  misc_feature 1..20: note = Description of Artificial Sequence: Synthetic oligonucleotide
  misc_feature 1..20: note = Target: SCN10A; (+) strand; PAM type: NRG; PAM sequence: AAG
  source 1..20: mol_type = other DNA
acctagtttctcctaactta

SEQ ID NO: 28313 - DNA, 20 bp, synthetic construct
  misc_feature 1..20: note = Description of Artificial Sequence: Synthetic oligonucleotide
  misc_feature 1..20: note = Target: SCN10A; (+) strand; PAM type: NRG; PAM sequence: CAG
  source 1..20: mol_type = other DNA
tagtttctcctaacttaaag

SEQ ID NO: 28314 - DNA, 20 bp, synthetic construct
  misc_feature 1..20: note = Description of Artificial Sequence: Synthetic oligonucleotide
  misc_feature 1..20: note = Target: SCN10A; (+) strand; PAM type: NRG; PAM sequence: CAG
  source 1..20: mol_type = other DNA
taacttaaagcagaatattt

SEQ ID NO: 28315 - DNA, 20 bp, synthetic construct
  misc_feature 1..20: note = Description of Artificial Sequence: Synthetic oligonucleotide
  misc_feature 1..20: note = Target: SCN10A; (+) strand; PAM type: NRG; PAM sequence: CAG
  source 1..20: mol_type = other DNA
cagaaacttacatctccctc

SEQ ID NO: 28316 - DNA, 20 bp, synthetic construct
  misc_feature 1..20: note = Description of Artificial Sequence: Synthetic oligonucleotide
  misc_feature 1..20: note = Target: SCN10A; (+) strand; PAM type: NRG; PAM sequence: TAG
  source 1..20: mol_type = other DNA
tctccctccagctaccatct

SEQ ID NO: 28317 - DNA, 20 bp, synthetic construct
  misc_feature 1..20: note = Description of Artificial Sequence: Synthetic oligonucleotide
  misc_feature 1..20: note = Target: SCN10A; (+) strand; PAM type: NRG; PAM sequence: AAG
  source 1..20: mol_type = other DNA
tagatctcttcccaccttca

SEQ ID NO: 28318 - DNA, 20 bp, synthetic construct
  misc_feature 1..20: note = Description of Artificial Sequence: Synthetic oligonucleotide
  misc_feature 1..20: note = Target: SCN10A; (+) strand; PAM type: NRG; PAM sequence: AAG
  source 1..20: mol_type = other DNA
ttcaaagcaaaatttcttga

SEQ ID NO: 28319 - DNA, 20 bp, synthetic construct
  misc_feature 1..20: note = Description of Artificial Sequence: Synthetic oligonucleotide
  misc_feature 1..20: note = Target: SCN10A; (+) strand; PAM type: NRG; PAM sequence: GAG
  source 1..20: mol_type = other DNA
caaagcaaaatttcttgaaa

SEQ ID NO: 28320 - DNA, 20 bp, synthetic construct
  misc_feature 1..20: note = Description of Artificial Sequence: Synthetic oligonucleotide
  misc_feature 1..20: note = Target: SCN10A; (+) strand; PAM type: NRG; PAM sequence: CAG
  source 1..20: mol_type = other DNA
ttgaaagagttgtgtacaat

SEQ ID NO: 28321 - DNA, 20 bp, synthetic construct
  misc_feature 1..20: note = Description of Artificial Sequence: Synthetic oligonucleotide
  misc_feature 1..20: note = Target: SCN10A; (+) strand; PAM type: NRG; PAM sequence: CAG
  source 1..20: mol_type = other DNA
agtgtccctcattcactcct

SEQ ID NO: 28322 - DNA, 20 bp, synthetic construct
  misc_feature 1..20: note = Description of Artificial Sequence: Synthetic oligonucleotide
  misc_feature 1..20: note = Target: SCN10A; (+) strand; PAM type: NRG; PAM sequence: CAG
  source 1..20: mol_type = other DNA
cactcctcagcccacatcaa

SEQ ID NO: 28323 - DNA, 20 bp, synthetic construct
  misc_feature 1..20: note = Description of Artificial Sequence: Synthetic oligonucleotide
  misc_feature 1..20: note = Target: SCN10A; (+) strand; PAM type: NRG; PAM sequence: GAG
  source 1..20: mol_type = other DNA
ctcctcagcccacatcaaca

SEQ ID NO: 28324 - DNA, 20 bp, synthetic construct
  misc_feature 1..20: note = Description of Artificial Sequence: Synthetic oligonucleotide
  misc_feature 1..20: note = Target: SCN10A; (+) strand; PAM type: NRG; PAM sequence: CAG
  source 1..20: mol_type = other DNA
agcttttgcctctatcctga

SEQ ID NO: 28325 - DNA, 20 bp, synthetic construct
  misc_feature 1..20: note = Description of Artificial Sequence: Synthetic oligonucleotide
  misc_feature 1..20: note = Target: SCN10A; (+) strand; PAM type: NRG; PAM sequence: GAG
  source 1..20: mol_type = other DNA
cttttgcctctatcctgaca

SEQ ID NO: 28326 - DNA, 20 bp, synthetic construct
  misc_feature 1..20: note = Description of Artificial Sequence: Synthetic oligonucleotide
  misc_feature 1..20: note = Target: SCN10A; (+) strand; PAM type: NRG; PAM sequence: AAG
  source 1..20: mol_type = other DNA
tgacagagattgttctcact

SEQ ID NO: 28327 - DNA, 20 bp, synthetic construct
  misc_feature 1..20: note = Description of Artificial Sequence: Synthetic oligonucleotide
  misc_feature 1..20: note = Target: SCN10A; (+) strand; PAM type: NRG; PAM sequence: TAG
  source 1..20: mol_type = other DNA
tgaatgacttcccataatat

SEQ ID NO: 28328 - DNA, 20 bp, synthetic construct
  misc_feature 1..20: note = Description of Artificial Sequence: Synthetic oligonucleotide
  misc_feature 1..20: note = Target: SCN10A; (+) strand; PAM type: NRG; PAM sequence: AAG
  source 1..20: mol_type = other DNA
cttcccataatattagatcc

SEQ ID NO: 28329 - DNA, 20 bp, synthetic construct
  misc_feature 1..20: note = Description of Artificial Sequence: Synthetic oligonucleotide
  misc_feature 1..20: note = Target: SCN10A; (+) strand; PAM type: NRG; PAM sequence: AGG
  source 1..20: mol_type = other DNA
ttcccataatattagatcca

SEQ ID NO: 28330 - DNA, 20 bp, synthetic construct
  misc_feature 1..20: note = Description of Artificial Sequence: Synthetic oligonucleotide
  misc_feature 1..20: note = Target: SCN10A; (+) strand; PAM type: NRG; PAM sequence: TAG
  source 1..20: mol_type = other DNA
gacgcttgtctgatattgcc

SEQ ID NO: 28331 - DNA, 20 bp, synthetic construct
  misc_feature 1..20: note = Description of Artificial Sequence: Synthetic oligonucleotide
  misc_feature 1..20: note = Target: SCN10A; (+) strand; PAM type: NRG; PAM sequence: TGG
  source 1..20: mol_type = other DNA
accttgaaatgttgctttct

SEQ ID NO: 28332 - DNA, 20 bp, synthetic construct
  misc_feature 1..20: note = Description of Artificial Sequence: Synthetic oligonucleotide
  misc_feature 1..20: note = Target: SCN10A; (+) strand; PAM type: NRG; PAM sequence: TAG
  source 1..20: mol_type = other DNA
ccatttgtgatgctctttta

SEQ ID NO: 28333 - DNA, 20 bp, synthetic construct
  misc_feature 1..20: note = Description of Artificial Sequence: Synthetic oligonucleotide
  misc_feature 1..20: note = Target: SCN10A; (+) strand; PAM type: NRG; PAM sequence: TAG
  source 1..20: mol_type = other DNA
agtctcctttacccaacttt

SEQ ID NO: 28334 - DNA, 20 bp, synthetic construct
  misc_feature 1..20: note = Description of Artificial Sequence: Synthetic oligonucleotide
  misc_feature 1..20: note = Target: SCN10A; (+) strand; PAM type: NRG; PAM sequence: CAG
  source 1..20: mol_type = other DNA
tttacccaacttttagacat

SEQ ID NO: 28335 - DNA, 20 bp, synthetic construct
  misc_feature 1..20: note = Description of Artificial Sequence: Synthetic oligonucleotide
  misc_feature 1..20: note = Target: SCN10A; (+) strand; PAM type: NRG; PAM sequence: GAG
  source 1..20: mol_type = other DNA
tacccaacttttagacatca

SEQ ID NO: 28336 - DNA, 20 bp, synthetic construct
  misc_feature 1..20: note = Description of Artificial Sequence: Synthetic oligonucleotide
  misc_feature 1..20: note = Target: SCN10A; (+) strand; PAM type: NRG; PAM sequence: GAG
  source 1..20: mol_type = other DNA
tttagacatcagagttcttc

SEQ ID NO: 28337 - DNA, 20 bp, synthetic construct
  misc_feature 1..20: note = Description of Artificial Sequence: Synthetic oligonucleotide
  misc_feature 1..20: note = Target: SCN10A; (+) strand; PAM type: NRG; PAM sequence: AGG
  source 1..20: mol_type = other DNA
ttagacatcagagttcttcg

SEQ ID NO: 28338 - DNA, 20 bp, synthetic construct
  misc_feature 1..20: note = Description of Artificial Sequence: Synthetic oligonucleotide
  misc_feature 1..20: note = Target: SCN10A; (+) strand; PAM type: NRG; PAM sequence: CAG
  source 1..20: mol_type = other DNA
catcagagttcttcgaggct

SEQ ID NO: 28339 - DNA, 20 bp, synthetic construct
  misc_feature 1..20: note = Description of Artificial Sequence: Synthetic oligonucleotide
  misc_feature 1..20: note = Target: SCN10A; (+) strand; PAM type: NRG; PAM sequence: GAG
  source 1..20: mol_type = other DNA
gttcttcgaggctcagtctt

SEQ ID NO: 28340 - DNA, 20 bp, synthetic construct
  misc_feature 1..20: note = Description of Artificial Sequence: Synthetic oligonucleotide
  misc_feature 1..20: note = Target: SCN10A; (+) strand; PAM type: NRG; PAM sequence: CAG
  source 1..20: mol_type = other DNA
ttctcccttgacaatttatc

SEQ ID NO: 28341 - DNA, 20 bp, synthetic construct
  misc_feature 1..20: note = Description of Artificial Sequence: Synthetic oligonucleotide
  misc_feature 1..20: note = Target: SCN10A; (+) strand; PAM type: NRG; PAM sequence: CAG
  source 1..20: mol_type = other DNA
cccttgacaatttatccagc

SEQ ID NO: 28342 - DNA, 20 bp, synthetic construct
  misc_feature 1..20: note = Description of Artificial Sequence: Synthetic oligonucleotide
  misc_feature 1..20: note = Target: SCN10A; (+) strand; PAM type: NRG; PAM sequence: AGG
  source 1..20: mol_type = other DNA
ccttgacaatttatccagcc

SEQ ID NO: 28343 - DNA, 20 bp, synthetic construct
  misc_feature 1..20: note = Description of Artificial Sequence: Synthetic oligonucleotide
  misc_feature 1..20: note = Target: SCN10A; (+) strand; PAM type: NRG; PAM sequence: TGG
  source 1..20: mol_type = other DNA
taacatatatgtgcaacttt

SEQ ID NO: 28344 - DNA, 20 bp, synthetic construct
  misc_feature 1..20: note = Description of Artificial Sequence: Synthetic oligonucleotide
  misc_feature 1..20: note = Target: SCN10A; (+) strand; PAM type: NRG; PAM sequence: TGG
  source 1..20: mol_type = other DNA
caactgtttgcctctgtcac

SEQ ID NO: 28345 - DNA, 20 bp, synthetic construct
  misc_feature 1..20: note = Description of Artificial Sequence: Synthetic oligonucleotide
  misc_feature 1..20: note = Target: SCN10A; (+) strand; PAM type: NRG; PAM sequence: AAG
  source 1..20: mol_type = other DNA
gtcactggactgtaaactgt

SEQ ID NO: 28346 - DNA, 20 bp, synthetic construct
  misc_feature 1..20: note = Description of Artificial Sequence: Synthetic oligonucleotide
  misc_feature 1..20: note = Target: SCN10A; (+) strand; PAM type: NRG; PAM sequence: GAG
  source 1..20: mol_type = other DNA
cactggactgtaaactgtaa

SEQ ID NO: 28347 - DNA, 20 bp, synthetic construct
  misc_feature 1..20: note = Description of Artificial Sequence: Synthetic oligonucleotide
  misc_feature 1..20: note = Target: SCN10A; (+) strand; PAM type: NRG; PAM sequence: TAG
  source 1..20: mol_type = other DNA
tggactgtaaactgtaagag

SEQ ID NO: 28348 - DNA, 20 bp, synthetic construct
  misc_feature 1..20: note = Description of Artificial Sequence: Synthetic oligonucleotide
  misc_feature 1..20: note = Target: SCN10A; (+) strand; PAM type: NRG; PAM sequence: AGG
  source 1..20: mol_type = other DNA
ggactgtaaactgtaagagt

SEQ ID NO: 28349 - DNA, 20 bp, synthetic construct
  misc_feature 1..20: note = Description of Artificial Sequence: Synthetic oligonucleotide
  misc_feature 1..20: note = Target: SCN10A; (+) strand; PAM type: NRG; PAM sequence: TGG
  source 1..20: mol_type = other DNA
cttgctcactgctctaaccc

SEQ ID NO: 28350 - DNA, 20 bp, synthetic construct
  misc_feature 1..20: note = Description of Artificial Sequence: Synthetic oligonucleotide
  misc_feature 1..20: note = Target: SCN10A; (+) strand; PAM type: NRG; PAM sequence: TAG
  source 1..20: mol_type = other DNA
ctctaaccctggtgtctgca

SEQ ID NO: 28351 - DNA, 20 bp, synthetic construct
  misc_feature 1..20: note = Description of Artificial Sequence: Synthetic oligonucleotide
  misc_feature 1..20: note = Target: SCN10A; (+) strand; PAM type: NRG; PAM sequence: TGG
  source 1..20: mol_type = other DNA
cctggtgtctgcatagtgcc

SEQ ID NO: 28352 - DNA, 20 bp, synthetic construct
  misc_feature 1..20: note = Description of Artificial Sequence: Synthetic oligonucleotide
  misc_feature 1..20: note = Target: SCN10A; (+) strand; PAM type: NRG; PAM sequence: CAG
  source 1..20: mol_type = other DNA
tgcatagtgcctggctgcaa

SEQ ID NO: 28353 - DNA, 20 bp, synthetic construct
  misc_feature 1..20: note = Description of Artificial Sequence: Synthetic oligonucleotide
  misc_feature 1..20: note = Target: SCN10A; (+) strand; PAM type: NRG; PAM sequence: TGG
  source 1..20: mol_type = other DNA
tctgcaaatttgtaaatgaa

SEQ ID NO: 28354 - DNA, 20 bp, synthetic construct
  misc_feature 1..20: note = Description of Artificial Sequence: Synthetic oligonucleotide
  misc_feature 1..20: note = Target: SCN10A; (+) strand; PAM type: NRG; PAM sequence: AAG
  source 1..20: mol_type = other DNA
gcaaatttgtaaatgaatgg

SEQ ID NO: 28355 - DNA, 20 bp, synthetic construct
  misc_feature 1..20: note = Description of Artificial Sequence: Synthetic oligonucleotide
  misc_feature 1..20: note = Target: SCN10A; (+) strand; PAM type: NRG; PAM sequence: CAG
  source 1..20: mol_type = other DNA
atttgtaaatgaatggaaga

SEQ ID NO: 28356 - DNA, 20 bp, synthetic construct
  misc_feature 1..20: note = Description of Artificial Sequence: Synthetic oligonucleotide
  misc_feature 1..20: note = Target: SCN10A; (+) strand; PAM type: NRG; PAM sequence: TGG
  source 1..20: mol_type = other DNA
taaatgaatggaagacagaa

SEQ ID NO: 28357 - DNA, 20 bp, synthetic construct
  misc_feature 1..20: note = Description of Artificial Sequence: Synthetic oligonucleotide
  misc_feature 1..20: note = Target: SCN10A; (+) strand; PAM type: NRG; PAM sequence: GGG
  source 1..20: mol_type = other DNA
aaatgaatggaagacagaat

SEQ ID NO: 28358 - DNA, 20 bp, synthetic construct
  misc_feature 1..20: note = Description of Artificial Sequence: Synthetic oligonucleotide
  misc_feature 1..20: note = Target: SCN10A; (+) strand; PAM type: NRG; PAM sequence: CAG
  source 1..20: mol_type = other DNA
tgaatggaagacagaatggg

SEQ ID NO: 28359 - DNA, 20 bp, synthetic construct
  misc_feature 1..20: note = Description of Artificial Sequence: Synthetic oligonucleotide
  misc_feature 1..20: note = Target: SCN10A; (+) strand; PAM type: NRG; PAM sequence: GAG
  source 1..20: mol_type = other DNA
aagacagaatgggcagctct

SEQ ID NO: 28360 - DNA, 20 bp, synthetic construct
  misc_feature 1..20: note = Description of Artificial Sequence: Synthetic oligonucleotide
  misc_feature 1..20: note = Target: SCN10A; (+) strand; PAM type: NRG; PAM sequence: TAG
  source 1..20: mol_type = other DNA
gggcagctctgagttaacca

SEQ ID NO: 28361 - DNA, 20 bp, synthetic construct
  misc_feature 1..20: note = Description of Artificial Sequence: Synthetic oligonucleotide
  misc_feature 1..20: note = Target: SCN10A; (+) strand; PAM type: NRG; PAM sequence: AAG
  source 1..20: mol_type = other DNA
atagctcaaatgaaaattta

SEQ ID NO: 28362 - DNA, 20 bp, synthetic construct
  misc_feature 1..20: note = Description of Artificial Sequence: Synthetic oligonucleotide
  misc_feature 1..20: note = Target: SCN10A; (+) strand; PAM type: NRG; PAM sequence: AAG
  source 1..20: mol_type = other DNA
actaaattcaattctgtacc

SEQ ID NO: 28363 - DNA, 20 bp, synthetic construct
  misc_feature 1..20: note = Description of Artificial Sequence: Synthetic oligonucleotide
  misc_feature 1..20: note = Target: SCN10A; (+) strand; PAM type: NRG; PAM sequence: AGG
  source 1..20: mol_type = other DNA
ctaaattcaattctgtacca

SEQ ID NO: 28364 - DNA, 20 bp, synthetic construct
  misc_feature 1..20: note = Description of Artificial Sequence: Synthetic oligonucleotide
  misc_feature 1..20: note = Target: SCN10A; (+) strand; PAM type: NRG; PAM sequence: GGG
  source 1..20: mol_type = other DNA
taaattcaattctgtaccaa

SEQ ID NO: 28365 - DNA, 20 bp, synthetic construct
  misc_feature 1..20: note = Description of Artificial Sequence: Synthetic oligonucleotide
  misc_feature 1..20: note = Target: SCN10A; (+) strand; PAM type: NRG; PAM sequence: TGG
  source 1..20: mol_type = other DNA
aagggtacatactgaatgta

SEQ ID NO: 28366 - DNA, 20 bp, synthetic construct
  misc_feature 1..20: note = Description of Artificial Sequence: Synthetic oligonucleotide
  misc_feature 1..20: note = Target: SCN10A; (+) strand; PAM type: NRG; PAM sequence: GGG
  source 1..20: mol_type = other DNA
agggtacatactgaatgtat

SEQ ID NO: 28367 - DNA, 20 bp, synthetic construct
  misc_feature 1..20: note = Description of Artificial Sequence: Synthetic oligonucleotide
  misc_feature 1..20: note = Target: SCN10A; (+) strand; PAM type: NRG; PAM sequence: AAG
  source 1..20: mol_type = other DNA
actgaatgtatgggatgtgc

SEQ ID NO: 28368 - DNA, 20 bp, synthetic construct
  misc_feature 1..20: note = Description of Artificial Sequence: Synthetic oligonucleotide
  misc_feature 1..20: note = Target: SCN10A; (+) strand; PAM type: NRG; PAM sequence: GAG
  source 1..20: mol_type = other DNA
ggatgtgcaagcctctgcat

SEQ ID NO: 28369 - DNA, 20 bp, synthetic construct
  misc_feature 1..20: note = Description of Artificial Sequence: Synthetic oligonucleotide
  misc_feature 1..20: note = Target: SCN10A; (+) strand; PAM type: NRG; PAM sequence: TGG
  source 1..20: mol_type = other DNA
tgtgcaagcctctgcatgag

SEQ ID NO: 28370 - DNA, 20 bp, synthetic construct
  misc_feature 1..20: note = Description of Artificial Sequence: Synthetic oligonucleotide
  misc_feature 1..20: note = Target: SCN10A; (+) strand; PAM type: NRG; PAM sequence: GAG
  source 1..20: mol_type = other DNA
gcctctgcatgagtggctat

SEQ ID NO: 28371 - DNA, 20 bp, synthetic construct
  misc_feature 1..20: note = Description of Artificial Sequence: Synthetic oligonucleotide
  misc_feature 1..20: note = Target: SCN10A; (+) strand; PAM type: NRG; PAM sequence: AGG
  source 1..20: mol_type = other DNA
cctctgcatgagtggctatg

SEQ ID NO: 28372 - DNA, 20 bp, synthetic construct
  misc_feature 1..20: note = Description of Artificial Sequence: Synthetic oligonucleotide
  misc_feature 1..20: note = Target: SCN10A; (+) strand; PAM type: NRG; PAM sequence: GGG
  source 1..20: mol_type = other DNA
ctctgcatgagtggctatga

SEQ ID NO: 28373 - DNA, 20 bp, synthetic construct
  misc_feature 1..20: note = Description of Artificial Sequence: Synthetic oligonucleotide
  misc_feature 1..20: note = Target: SCN10A; (+) strand; PAM type: NRG; PAM sequence: GAG
  source 1..20: mol_type = other DNA
ctgcatgagtggctatgagg

SEQ ID NO: 28374 - DNA, 20 bp, synthetic construct
  misc_feature 1..20: note = Description of Artificial Sequence: Synthetic oligonucleotide
  misc_feature 1..20: note = Target: SCN10A; (+) strand; PAM type: NRG; PAM sequence: AGG
  source 1..20: mol_type = other DNA
tgcatgagtggctatgaggg

SEQ ID NO: 28375 - DNA, 20 bp, synthetic construct
  misc_feature 1..20: note = Description of Artificial Sequence: Synthetic oligonucleotide
  misc_feature 1..20: note = Target: SCN10A; (+) strand; PAM type: NRG; PAM sequence: AAG
  source 1..20: mol_type = other DNA
atgagtggctatgagggagg

SEQ ID NO: 28376 - DNA, 20 bp, synthetic construct
  misc_feature 1..20: note = Description of Artificial Sequence: Synthetic oligonucleotide
  misc_feature 1..20: note = Target: SCN10A; (+) strand; PAM type: NRG; PAM sequence: GAG
  source 1..20: mol_type = other DNA
gagtggctatgagggaggaa

SEQ ID NO: 28377 - DNA, 20 bp, synthetic construct
  misc_feature 1..20: note = Description of Artificial Sequence: Synthetic oligonucleotide
  misc_feature 1..20: note = Target: SCN10A; (+) strand; PAM type: NRG; PAM sequence: AAG
  source 1..20: mol_type = other DNA
tggctatgagggaggaagag

SEQ ID NO: 28378 - DNA, 20 bp, synthetic construct
  misc_feature 1..20: note = Description of Artificial Sequence: Synthetic oligonucleotide
  misc_feature 1..20: note = Target: SCN10A; (+) strand; PAM type: NRG; PAM sequence: CAG
  source 1..20: mol_type = other DNA
agaacctgtctgatcccttc

SEQ ID NO: 28379 - DNA, 20 bp, synthetic construct
  misc_feature 1..20: note = Description of Artificial Sequence: Synthetic oligonucleotide
  misc_feature 1..20: note = Target: SCN10A; (+) strand; PAM type: NRG; PAM sequence: AGG
  source 1..20: mol_type = other DNA
gaacctgtctgatcccttcc

SEQ ID NO: 28380 - DNA, 20 bp, synthetic construct
  misc_feature 1..20: note = Description of Artificial Sequence: Synthetic oligonucleotide
  misc_feature 1..20: note = Target: SCN10A; (+) strand; PAM type: NRG; PAM sequence: GGG
  source 1..20: mol_type = other DNA
aacctgtctgatcccttcca

SEQ ID NO: 28381 - DNA, 20 bp, synthetic construct
  misc_feature 1..20: note = Description of Artificial Sequence: Synthetic oligonucleotide
  misc_feature 1..20: note = Target: SCN10A; (+) strand; PAM type: NRG; PAM sequence: GAG
  source 1..20: mol_type = other DNA
cctgtctgatcccttccagg

SEQ ID NO: 28382 - DNA, 20 bp, synthetic construct
  misc_feature 1..20: note = Description of Artificial Sequence: Synthetic oligonucleotide
  misc_feature 1..20: note = Target: SCN10A; (+) strand; PAM type: NRG; PAM sequence: CGG
  source 1..20: mol_type = other DNA
gatcccttccagggagccca

SEQ ID NO: 28383 - DNA, 20 bp, synthetic construct
  misc_feature 1..20: note = Description of Artificial Sequence: Synthetic oligonucleotide
  misc_feature 1..20: note = Target: SCN10A; (+) strand; PAM type: NRG; PAM sequence: GGG
  source 1..20: mol_type = other DNA
atcccttccagggagcccac

SEQ ID NO: 28384 - DNA, 20 bp, synthetic construct
  misc_feature 1..20: note = Description of Artificial Sequence: Synthetic oligonucleotide
  misc_feature 1..20: note = Target: SCN10A; (+) strand; PAM type: NRG; PAM sequence: GAG
  source 1..20: mol_type = other DNA
cccttccagggagcccacgg

SEQ ID NO: 28385 - DNA, 20 bp, synthetic construct
  misc_feature 1..20: note = Description of Artificial Sequence: Synthetic oligonucleotide
  misc_feature 1..20: note = Target: SCN10A; (+) strand; PAM type: NRG; PAM sequence: CAG
  source 1..20: mol_type = other DNA
gggagcccacgggagctgca

SEQ ID NO: 28386 - DNA, 20 bp, synthetic construct
  misc_feature 1..20: note = Description of Artificial Sequence: Synthetic oligonucleotide
  misc_feature 1..20: note = Target: SCN10A; (+) strand; PAM type: NRG; PAM sequence: AAG
  source 1..20: mol_type = other DNA
gcccacgggagctgcacagc

SEQ ID NO: 28387 - DNA, 20 bp, synthetic construct
  misc_feature 1..20: note = Description of Artificial Sequence: Synthetic oligonucleotide
  misc_feature 1..20: note = Target: SCN10A; (+) strand; PAM type: NRG; PAM sequence: CAG
  source 1..20: mol_type = other DNA
cacgggagctgcacagcaag

SEQ ID NO: 28388 - DNA, 20 bp, synthetic construct
  misc_feature 1..20: note = Description of Artificial Sequence: Synthetic oligonucleotide
  misc_feature 1..20: note = Target: SCN10A; (+) strand; PAM type: NRG; PAM sequence: GAG
  source 1..20: mol_type = other DNA
cgggagctgcacagcaagca

SEQ ID NO: 28389 - DNA, 20 bp, synthetic construct
  misc_feature 1..20: note = Description of Artificial Sequence: Synthetic oligonucleotide
  misc_feature 1..20: note = Target: SCN10A; (+) strand; PAM type: NRG; PAM sequence: AGG
  source 1..20: mol_type = other DNA
gggagctgcacagcaagcag

SEQ ID NO: 28390 - DNA, 20 bp, synthetic construct
  misc_feature 1..20: note = Description of Artificial Sequence: Synthetic oligonucleotide
  misc_feature 1..20: note = Target: SCN10A; (+) strand; PAM type: NRG; PAM sequence: GGG
  source 1..20: mol_type = other DNA
ggagctgcacagcaagcaga

SEQ ID NO: 28391 - DNA, 20 bp, synthetic construct
  misc_feature 1..20: note = Description of Artificial Sequence: Synthetic oligonucleotide
  misc_feature 1..20: note = Target: SCN10A; (+) strand; PAM type: NRG; PAM sequence: GGG
  source 1..20: mol_type = other DNA
gagctgcacagcaagcagag

SEQ ID NO: 28392 - DNA, 20 bp, synthetic construct
  misc_feature 1..20: note = Description of Artificial Sequence: Synthetic oligonucleotide
  misc_feature 1..20: note = Target: SCN10A; (+) strand; PAM type: NRG; PAM sequence: GGG
  source 1..20: mol_type = other DNA
agctgcacagcaagcagagg

SEQ ID NO: 28393 - DNA, 20 bp, synthetic construct
  misc_feature 1..20: note = Description of Artificial Sequence: Synthetic oligonucleotide
  misc_feature 1..20: note = Target: SCN10A; (+) strand; PAM type: NRG; PAM sequence: AAG
  source 1..20: mol_type = other DNA
tgcacagcaagcagaggggg

SEQ ID NO: 28394 - DNA, 20 bp, synthetic construct
  misc_feature 1..20: note = Description of Artificial Sequence: Synthetic oligonucleotide
  misc_feature 1..20: note = Target: SCN10A; (+) strand; PAM type: NRG; PAM sequence: GAG
  source 1..20: mol_type = other DNA
agagggggaagtgctgtgat

SEQ ID NO: 28395 - DNA, 20 bp, synthetic construct
  misc_feature 1..20: note = Description of Artificial Sequence: Synthetic oligonucleotide
  misc_feature 1..20: note = Target: SCN10A; (+) strand; PAM type: NRG; PAM sequence: AGG
  source 1..20: mol_type = other DNA
gagggggaagtgctgtgatg

SEQ ID NO: 28396 - DNA, 20 bp, synthetic construct
  misc_feature 1..20: note = Description of Artificial Sequence: Synthetic oligonucleotide
  misc_feature 1..20: note = Target: SCN10A; (+) strand; PAM type: NRG; PAM sequence: TGG
  source 1..20: mol_type = other DNA
gatccttgccttctgcttca

SEQ ID NO: 28397 - DNA, 20 bp, synthetic construct
  misc_feature 1..20: note = Description of Artificial Sequence: Synthetic oligonucleotide
  misc_feature 1..20: note = Target: SCN10A; (+) strand; PAM type: NRG; PAM sequence: TGG
  source 1..20: mol_type = other DNA
ccttgccttctgcttcatgg

SEQ ID NO: 28398 - DNA, 20 bp, synthetic construct
  misc_feature 1..20: note = Description of Artificial Sequence: Synthetic oligonucleotide
  misc_feature 1..20: note = Target: SCN10A; (+) strand; PAM type: NRG; PAM sequence: GGG
  source 1..20: mol_type = other DNA
cttgccttctgcttcatggt

SEQ ID NO: 28399 - DNA, 20 bp, synthetic construct
  misc_feature 1..20: note = Description of Artificial Sequence: Synthetic oligonucleotide
  misc_feature 1..20: note = Target: SCN10A; (+) strand; PAM type: NRG; PAM sequence: GGG
  source 1..20: mol_type = other DNA
ttgccttctgcttcatggtg

SEQ ID NO: 28400 - DNA, 20 bp, synthetic construct
  misc_feature 1..20: note = Description of Artificial Sequence: Synthetic oligonucleotide
  misc_feature 1..20: note = Target: SCN10A; (+) strand; PAM type: NRG; PAM sequence: TGG
  source 1..20: mol_type = other DNA
cttctgcttcatggtgggga

SEQ ID NO: 28401 - DNA, 20 bp, synthetic construct
  misc_feature 1..20: note = Description of Artificial Sequence: Synthetic oligonucleotide
  misc_feature 1..20: note = Target: SCN10A; (+) strand; PAM type: NRG; PAM sequence: GGG
  source 1..20: mol_type = other DNA
ttctgcttcatggtggggat

SEQ ID NO: 28402 - DNA, 20 bp, synthetic construct
  misc_feature 1..20: note = Description of Artificial Sequence: Synthetic oligonucleotide
  misc_feature 1..20: note = Target: SCN10A; (+) strand; PAM type: NRG; PAM sequence: TGG
  source 1..20: mol_type = other DNA
gggatgggttgctatcctgt

SEQ ID NO: 28403 - DNA, 20 bp, synthetic construct
  misc_feature 1..20: note = Description of Artificial Sequence: Synthetic oligonucleotide
  misc_feature 1..20: note = Target: SCN10A; (+) strand; PAM type: NRG; PAM sequence: GGG
  source 1..20: mol_type = other DNA
ggatgggttgctatcctgtt

SEQ ID NO: 28404 - DNA, 20 bp, synthetic construct
  misc_feature 1..20: note = Description of Artificial Sequence: Synthetic oligonucleotide
  misc_feature 1..20: note = Target: SCN10A; (+) strand; PAM type: NRG; PAM sequence: TAG
  source 1..20: mol_type = other DNA
gggttgctatcctgttgggt

SEQ ID NO: 28405 - DNA, 20 bp, synthetic construct
  misc_feature 1..20: note = Description of Artificial Sequence: Synthetic oligonucleotide
  misc_feature 1..20: note = Target: SCN10A; (+) strand; PAM type: NRG; PAM sequence: GAG
  source 1..20: mol_type = other DNA
gttgctatcctgttgggtta

SEQ ID NO: 28406 - DNA, 20 bp, synthetic construct
  misc_feature 1..20: note = Description of Artificial Sequence: Synthetic oligonucleotide
  misc_feature 1..20: note = Target: SCN10A; (+) strand; PAM type: NRG; PAM sequence: AAG
  source 1..20: mol_type = other DNA
tatcctgttgggttagagca

SEQ ID NO: 28407 - DNA, 20 bp, synthetic construct
  misc_feature 1..20: note = Description of Artificial Sequence: Synthetic oligonucleotide
  misc_feature 1..20: note = Target: SCN10A; (+) strand; PAM type: NRG; PAM sequence: CAG
  source 1..20: mol_type = other DNA
gttgggttagagcaaagaat

SEQ ID NO: 28408 - DNA, 20 bp, synthetic construct
  misc_feature 1..20: note = Description of Artificial Sequence: Synthetic oligonucleotide
  misc_feature 1..20: note = Target: SCN10A; (+) strand; PAM type: NRG; PAM sequence: AAG
  source 1..20: mol_type = other DNA
tagagcaaagaatcagacca

SEQ ID NO: 28409 - DNA, 20 bp, synthetic construct
  misc_feature 1..20: note = Description of Artificial Sequence: Synthetic oligonucleotide
  misc_feature 1..20: note = Target: SCN10A; (+) strand; PAM type: NRG; PAM sequence: TGG
  source 1..20: mol_type = other DNA
agcaaagaatcagaccaaag

SEQ ID NO: 28410 - DNA, 20 bp, synthetic construct
  misc_feature 1..20: note = Description of Artificial Sequence: Synthetic oligonucleotide
  misc_feature 1..20: note = Target: SCN10A; (+) strand; PAM type: NRG; PAM sequence: TGG
  source 1..20: mol_type = other DNA
accaaagtggcctttgctca

SEQ ID NO: 28411 - DNA, 20 bp, synthetic construct
  misc_feature 1..20: note = Description of Artificial Sequence: Synthetic oligonucleotide
  misc_feature 1..20: note = Target: SCN10A; (+) strand; PAM type: NRG; PAM sequence: CAG
  source 1..20: mol_type = other DNA
aaagtggcctttgctcatgg

SEQ ID NO: 28412 - DNA, 20 bp, synthetic construct
  misc_feature 1..20: note = Description of Artificial Sequence: Synthetic oligonucleotide
  misc_feature 1..20: note = Target: SCN10A; (+) strand; PAM type: NRG; PAM sequence: TGG
  source 1..20: mol_type = other DNA
tttgctcatggcagaactgc

SEQ ID NO: 28413 - DNA, 20 bp, synthetic construct
  misc_feature 1..20: note = Description of Artificial Sequence: Synthetic oligonucleotide
  misc_feature 1..20: note = Target: SCN10A; (+) strand; PAM type: NRG; PAM sequence: TGG
  source 1..20: mol_type = other DNA
ctgctggctcacatctttcc

SEQ ID NO: 28414 - DNA, 20 bp, synthetic construct
  misc_feature 1..20: note = Description of Artificial Sequence: Synthetic oligonucleotide
  misc_feature 1..20: note = Target: SCN10A; (+) strand; PAM type: NRG; PAM sequence: GGG
  source 1..20: mol_type = other DNA
tgctggctcacatctttcct

SEQ ID NO: 28415 - DNA, 20 bp, synthetic construct
  misc_feature 1..20: note = Description of Artificial Sequence: Synthetic oligonucleotide
  misc_feature 1..20: note = Target: SCN10A; (+) strand; PAM type: NRG; PAM sequence: GGG
  source 1..20: mol_type = other DNA
gctggctcacatctttcctg

SEQ ID NO: 28416 - DNA, 20 bp, synthetic construct
  misc_feature 1..20: note = Description of Artificial Sequence: Synthetic oligonucleotide
  misc_feature 1..20: note = Target: SCN10A; (+) strand; PAM type: NRG; PAM sequence: CAG
  source 1..20: mol_type = other DNA
ggctcacatctttcctgggg

SEQ ID NO: 28417 - DNA, 20 bp, synthetic construct
  misc_feature 1..20: note = Description of Artificial Sequence: Synthetic oligonucleotide
  misc_feature 1..20: note = Target: SCN10A; (+) strand; PAM type: NRG; PAM sequence: AGG
  source 1..20: mol_type = other DNA
gctcacatctttcctggggc

SEQ ID NO: 28418 - DNA, 20 bp, synthetic construct
  misc_feature 1..20: note = Description of Artificial Sequence: Synthetic oligonucleotide
  misc_feature 1..20: note = Target: SCN10A; (+) strand; PAM type: NRG; PAM sequence: GAG
  source 1..20: mol_type = other DNA
tcacatctttcctggggcag

SEQ ID NO: 28419 - DNA, 20 bp, synthetic construct
  misc_feature 1..20: note = Description of Artificial Sequence: Synthetic oligonucleotide
  misc_feature 1..20: note = Target: SCN10A; (+) strand; PAM type: NRG; PAM sequence: AGG
  source 1..20: mol_type = other DNA
cacatctttcctggggcagg

SEQ ID NO: 28420 - DNA, 20 bp, synthetic construct
  misc_feature 1..20: note = Description of Artificial Sequence: Synthetic oligonucleotide
  misc_feature 1..20: note = Target: SCN10A; (+) strand; PAM type: NRG; PAM sequence: GGG
  source 1..20: mol_type = other DNA
acatctttcctggggcagga

SEQ ID NO: 28421 - DNA, 20 bp, synthetic construct
  misc_feature 1..20: note = Description of Artificial Sequence: Synthetic oligonucleotide
  misc_feature 1..20: note = Target: SCN10A; (+) strand; PAM type: NRG; PAM sequence: GGG
  source 1..20: mol_type = other DNA
catctttcctggggcaggag

SEQ ID NO: 28422 - DNA, 20 bp, synthetic construct
  misc_feature 1..20: note = Description of Artificial Sequence: Synthetic oligonucleotide
  misc_feature 1..20: note = Target: SCN10A; (+) strand; PAM type: NRG; PAM sequence: GGG
  source 1..20: mol_type = other DNA
atctttcctggggcaggagg

SEQ ID NO: 28423 - DNA, 20 bp, synthetic construct
  misc_feature 1..20: note = Description of Artificial Sequence: Synthetic oligonucleotide
  misc_feature 1..20: note = Target: SCN10A; (+) strand; PAM type: NRG; PAM sequence: GAG
  source 1..20: mol_type = other DNA
ggggcaggagggggattgct

SEQ ID NO: 28424 - DNA, 20 bp, synthetic construct
  misc_feature 1..20: note = Description of Artificial Sequence: Synthetic oligonucleotide
  misc_feature 1..20: note = Target: SCN10A; (+) strand; PAM type: NRG; PAM sequence: TGG
  source 1..20: mol_type = other DNA
ttccatttcatcactgaaaa

SEQ ID NO: 28425 - DNA, 20 bp, synthetic construct
  misc_feature 1..20: note = Description of Artificial Sequence: Synthetic oligonucleotide
  misc_feature 1..20: note = Target: SCN10A; (+) strand; PAM type: NRG; PAM sequence: CAG
  source 1..20: mol_type = other DNA
ctgaaaatggtgaaaaaata

SEQ ID NO: 28426 - DNA, 20 bp, synthetic construct
  misc_feature 1..20: note = Description of Artificial Sequence: Synthetic oligonucleotide
  misc_feature 1..20: note = Target: SCN10A; (+) strand; PAM type: NRG; PAM sequence: AGG
  source 1..20: mol_type = other DNA
tgaaaatggtgaaaaaatac

SEQ ID NO: 28427 - DNA, 20 bp, synthetic construct
  misc_feature 1..20: note = Description of Artificial Sequence: Synthetic oligonucleotide
  misc_feature 1..20: note = Target: SCN10A; (+) strand; PAM type: NRG; PAM sequence: TGG
  source 1..20: mol_type = other DNA
aaaaaatacaggcccattca

SEQ ID NO: 28428 - DNA, 20 bp, synthetic construct
  misc_feature 1..20: note = Description of Artificial Sequence: Synthetic oligonucleotide
  misc_feature 1..20: note = Target: SCN10A; (+) strand; PAM type: NRG; PAM sequence: CAG
  source 1..20: mol_type = other DNA
tcacatgacttctaattaaa

SEQ ID NO: 28429 - DNA, 20 bp, synthetic construct
  misc_feature 1..20: note = Description of Artificial Sequence: Synthetic oligonucleotide
  misc_feature 1..20: note = Target: SCN10A; (+) strand; PAM type: NRG; PAM sequence: GAG
  source 1..20: mol_type = other DNA
acatgacttctaattaaaca

SEQ ID NO: 28430 - DNA, 20 bp, synthetic construct
  misc_feature 1..20: note = Description of Artificial Sequence: Synthetic oligonucleotide
  misc_feature 1..20: note = Target: SCN10A; (+) strand; PAM type: NRG; PAM sequence: CAG
  source 1..20: mol_type = other DNA
tgacttctaattaaacagag

SEQ ID NO: 28431 - DNA, 20 bp, synthetic construct
  misc_feature 1..20: note = Description of Artificial Sequence: Synthetic oligonucleotide
  misc_feature 1..20: note = Target: SCN10A; (+) strand; PAM type: NRG; PAM sequence: AGG
  source 1..20: mol_type = other DNA
gacttctaattaaacagagc

SEQ ID NO: 28432 - DNA, 20 bp, synthetic construct
  misc_feature 1..20: note = Description of Artificial Sequence: Synthetic oligonucleotide
  misc_feature 1..20: note = Target: SCN10A; (+) strand; PAM type: NRG; PAM sequence: CGG
  source 1..20: mol_type = other DNA
taattaaacagagcaggcaa

SEQ ID NO: 28433 - DNA, 20 bp, synthetic construct
  misc_feature 1..20: note = Description of Artificial Sequence: Synthetic oligonucleotide
  misc_feature 1..20: note = Target: SCN10A; (+) strand; PAM type: NRG; PAM sequence: AAG
  source 1..20: mol_type = other DNA
gagcaggcaacggcatcgtt

SEQ ID NO: 28434 - DNA, 20 bp, synthetic construct
  misc_feature 1..20: note = Description of Artificial Sequence: Synthetic oligonucleotide
  misc_feature 1..20: note = Target: SCN10A; (+) strand; PAM type: NRG; PAM sequence: TGG
  source 1..20: mol_type = other DNA
caggcaacggcatcgttaag

SEQ ID NO: 28435 - DNA, 20 bp, synthetic construct
  misc_feature 1..20: note = Description of Artificial Sequence: Synthetic oligonucleotide
  misc_feature 1..20: note = Target: SCN10A; (+) strand; PAM type: NRG; PAM sequence: TGG
  source 1..20: mol_type = other DNA
caacggcatcgttaagtggc

SEQ ID NO: 28436 - DNA, 20 bp, synthetic construct
  misc_feature 1..20: note = Description of Artificial Sequence: Synthetic oligonucleotide
  misc_feature 1..20: note = Target: SCN10A; (+) strand; PAM type: NRG; PAM sequence: GGG
  source 1..20: mol_type = other DNA
aacggcatcgttaagtggct

SEQ ID NO: 28437 - DNA, 20 bp, synthetic construct
  misc_feature 1..20: note = Description of Artificial Sequence: Synthetic oligonucleotide
  misc_feature 1..20: note = Target: SCN10A; (+) strand; PAM type: NRG; PAM sequence: AAG
  source 1..20: mol_type = other DNA
tcgttaagtggctgggtgtg

SEQ ID NO: 28438 - DNA, 20 bp, synthetic construct
  misc_feature 1..20: note = Description of Artificial Sequence: Synthetic oligonucleotide
  misc_feature 1..20: note = Target: SCN10A; (+) strand; PAM type: NRG; PAM sequence: TGG
  source 1..20: mol_type = other DNA
gctgggtgtgaagtttgccc

SEQ ID NO: 28439 - DNA, 20 bp, synthetic construct
  misc_feature 1..20: note = Description of Artificial Sequence: Synthetic oligonucleotide
  misc_feature 1..20: note = Target: SCN10A; (+) strand; PAM type: NRG; PAM sequence: TAG
  source 1..20: mol_type = other DNA
tgccctggatattctgactt

SEQ ID NO: 28440 - DNA, 20 bp, synthetic construct
  misc_feature 1..20: note = Description of Artificial Sequence: Synthetic oligonucleotide
  misc_feature 1..20: note = Target: SCN10A; (+) strand; PAM type: NRG; PAM sequence: AGG
  source 1..20: mol_type = other DNA
gccctggatattctgacttt

SEQ ID NO: 28441 - DNA, 20 bp, synthetic construct
  misc_feature 1..20: note = Description of Artificial Sequence: Synthetic oligonucleotide
  misc_feature 1..20: note = Target: SCN10A; (+) strand; PAM type: NRG; PAM sequence: GGG
  source 1..20: mol_type = other DNA
ccctggatattctgacttta

SEQ ID NO: 28442 - DNA, 20 bp, synthetic construct
  misc_feature 1..20: note = Description of Artificial Sequence: Synthetic oligonucleotide
  misc_feature 1..20: note = Target: SCN10A; (+) strand; PAM type: NRG; PAM sequence: TGG
  source 1..20: mol_type = other DNA
gatattctgactttagggaa

SEQ ID NO: 28443 - DNA, 20 bp, synthetic construct
  misc_feature 1..20: note = Description of Artificial Sequence: Synthetic oligonucleotide
  misc_feature 1..20: note = Target: SCN10A; (+) strand; PAM type: NRG; PAM sequence: GAG
  source 1..20: mol_type = other DNA
tattctgactttagggaatg

SEQ ID NO: 28444 - DNA, 20 bp, synthetic construct
  misc_feature 1..20: note = Description of Artificial Sequence: Synthetic oligonucleotide
  misc_feature 1..20: note = Target: SCN10A; (+) strand; PAM type: NRG; PAM sequence: TAG
  source 1..20: mol_type = other DNA
tctgactttagggaatggag

SEQ ID NO: 28445 - DNA, 20 bp, synthetic construct
  misc_feature 1..20: note = Description of Artificial Sequence: Synthetic oligonucleotide
  misc_feature 1..20: note = Target: SCN10A; (+) strand; PAM type: NRG; PAM sequence: TAG
  source 1..20: mol_type = other DNA
tagggaatggagtagcttgc

SEQ ID NO: 28446 - DNA, 20 bp, synthetic construct
  misc_feature 1..20: note = Description of Artificial Sequence: Synthetic oligonucleotide
  misc_feature 1..20: note = Target: SCN10A; (+) strand; PAM type: NRG; PAM sequence: TGG
  source 1..20: mol_type = other DNA
agtagcttgctagctgctct

SEQ ID NO: 28447 - DNA, 20 bp, synthetic construct
  misc_feature 1..20: note = Description of Artificial Sequence: Synthetic oligonucleotide
  misc_feature 1..20: note = Target: SCN10A; (+) strand; PAM type: NRG; PAM sequence: TAG
  source 1..20: mol_type = other DNA
cttgctagctgctcttggat

SEQ ID NO: 28448 - DNA, 20 bp, synthetic construct
  misc_feature 1..20: note = Description of Artificial Sequence: Synthetic oligonucleotide
  misc_feature 1..20: note = Target: SCN10A; (+) strand; PAM type: NRG; PAM sequence: CGG
  source 1..20: mol_type = other DNA
gctgctcttggattagccca

SEQ ID NO: 28449 - DNA, 20 bp, synthetic construct
  misc_feature 1..20: note = Description of Artificial Sequence: Synthetic oligonucleotide
  misc_feature 1..20: note = Target: SCN10A; (+) strand; PAM type: NRG; PAM sequence: CAG
  source 1..20: mol_type = other DNA
ctcttggattagcccacggt

SEQ ID NO: 28450 - DNA, 20 bp, synthetic construct
  misc_feature 1..20: note = Description of Artificial Sequence: Synthetic oligonucleotide
  misc_feature 1..20: note = Target: SCN10A; (+) strand; PAM type: NRG; PAM sequence: AGG
  source 1..20: mol_type = other DNA
tcttggattagcccacggtc

SEQ ID NO: 28451 - DNA, 20 bp, synthetic construct
  misc_feature 1..20: note = Description of Artificial Sequence: Synthetic oligonucleotide
  misc_feature 1..20: note = Target: SCN10A; (+) strand; PAM type: NRG; PAM sequence: GGG
  source 1..20: mol_type = other DNA
cttggattagcccacggtca

SEQ ID NO: 28452 - DNA, 20 bp, synthetic construct
  misc_feature 1..20: note = Description of Artificial Sequence: Synthetic oligonucleotide
  misc_feature 1..20: note = Target: SCN10A; (+) strand; PAM type: NRG; PAM sequence: TGG
  source 1..20: mol_type = other DNA
gatcatacctttgcaaccct

SEQ ID NO: 28453 - DNA, 20 bp, synthetic construct
  misc_feature 1..20: note = Description of Artificial Sequence: Synthetic oligonucleotide
  misc_feature 1..20: note = Target: SCN10A; (+) strand; PAM type: NRG; PAM sequence: CAG
  source 1..20: mol_type = other DNA
tttgcaacccttggtgctct

SEQ ID NO: 28454 - DNA, 20 bp, synthetic construct
  misc_feature 1..20: note = Description of Artificial Sequence: Synthetic oligonucleotide
  misc_feature 1..20: note = Target: SCN10A; (+) strand; PAM type: NRG; PAM sequence: GAG
  source 1..20: mol_type = other DNA
tgcaacccttggtgctctca

SEQ ID NO: 28455 - DNA, 20 bp, synthetic construct
  misc_feature 1..20: note = Description of Artificial Sequence: Synthetic oligonucleotide
  misc_feature 1..20: note = Target: SCN10A; (+) strand; PAM type: NRG; PAM sequence: AAG
  source 1..20: mol_type = other DNA
tggtgctctcagagacgatg

SEQ ID NO: 28456 - DNA, 20 bp, synthetic construct
  misc_feature 1..20: note = Description of Artificial Sequence: Synthetic oligonucleotide
  misc_feature 1..20: note = Target: SCN10A; (+) strand; PAM type: NRG; PAM sequence: TGG
  source 1..20: mol_type = other DNA
tgctctcagagacgatgaag

SEQ ID NO: 28457 - DNA, 20 bp, synthetic construct
  misc_feature 1..20: note = Description of Artificial Sequence: Synthetic oligonucleotide
  misc_feature 1..20: note = Target: SCN10A; (+) strand; PAM type: NRG; PAM sequence: GGG
  source 1..20: mol_type = other DNA
gctctcagagacgatgaagt

SEQ ID NO: 28458 - DNA, 20 bp, synthetic construct
  misc_feature 1..20: note = Description of Artificial Sequence: Synthetic oligonucleotide
  misc_feature 1..20: note = Target: SCN10A; (+) strand; PAM type: NRG; PAM sequence: TAG
  source 1..20: mol_type = other DNA
attgattatgtgatattctc

SEQ ID NO: 28459 - DNA, 20 bp, synthetic construct
  misc_feature 1..20: note = Description of Artificial Sequence: Synthetic oligonucleotide
  misc_feature 1..20: note = Target: SCN10A; (+) strand; PAM type: NRG; PAM sequence: GAG
  source 1..20: mol_type = other DNA
tgattatgtgatattctcta

SEQ ID NO: 28460 - DNA, 20 bp, synthetic construct
  misc_feature 1..20: note = Description of Artificial Sequence: Synthetic oligonucleotide
  misc_feature 1..20: note = Target: SCN10A; (+) strand; PAM type: NRG; PAM sequence: AAG
  source 1..20: mol_type = other DNA
gagcctattatatttctata

SEQ ID NO: 28461 - DNA, 20 bp, synthetic construct
  misc_feature 1..20: note = Description of Artificial Sequence: Synthetic oligonucleotide
  misc_feature 1..20: note = Target: SCN10A; (+) strand; PAM type: NRG; PAM sequence: TGG
  source 1..20: mol_type = other DNA
cctattatatttctataaag

SEQ ID NO: 28462 - DNA, 20 bp, synthetic construct
  misc_feature 1..20: note = Description of Artificial Sequence: Synthetic oligonucleotide
  misc_feature 1..20: note = Target: SCN10A; (+) strand; PAM type: NRG; PAM sequence: GAG
  source 1..20: mol_type = other DNA
tattatatttctataaagtg

SEQ ID NO: 28463 - DNA, 20 bp, synthetic construct
  misc_feature 1..20: note = Description of Artificial Sequence: Synthetic oligonucleotide
  misc_feature 1..20: note = Target: SCN10A; (+) strand; PAM type: NRG; PAM sequence: GAG
  source 1..20: mol_type = other DNA
ttctataaagtggagtatgt

SEQ ID NO: 28464 - DNA, 20 bp, synthetic construct
  misc_feature 1..20: note = Description of Artificial Sequence: Synthetic oligonucleotide
  misc_feature 1..20: note = Target: SCN10A; (+) strand; PAM type: NRG; PAM sequence: GAG
  source 1..20: mol_type = other DNA
ctataaagtggagtatgtga

SEQ ID NO: 28465 - DNA, 20 bp, synthetic construct
  misc_feature 1..20: note = Description of Artificial Sequence: Synthetic oligonucleotide
  misc_feature 1..20: note = Target: SCN10A; (+) strand; PAM type: NRG; PAM sequence: TAG
  source 1..20: mol_type = other DNA
gctgcttttattgatttctg

SEQ ID NO: 28466 - DNA, 20 bp, synthetic construct
  misc_feature 1..20: note = Description of Artificial Sequence: Synthetic oligonucleotide
  misc_feature 1..20: note = Target: SCN10A; (+) strand; PAM type: NRG; PAM sequence: CAG
  source 1..20: mol_type = other DNA
gcttttattgatttctgtag

SEQ ID NO: 28467 - DNA, 20 bp, synthetic construct
  misc_feature 1..20: note = Description of Artificial Sequence: Synthetic oligonucleotide
  misc_feature 1..20: note = Target: SCN10A; (+) strand; PAM type: NRG; PAM sequence: AGG
  source 1..20: mol_type = other DNA
cttttattgatttctgtagc

SEQ ID NO: 28468 - DNA, 20 bp, synthetic construct
  misc_feature 1..20: note = Description of Artificial Sequence: Synthetic oligonucleotide
  misc_feature 1..20: note = Target: SCN10A; (+) strand; PAM type: NRG; PAM sequence: GGG
  source 1..20: mol_type = other DNA
ttttattgatttctgtagca

SEQ ID NO: 28469 - DNA, 20 bp, synthetic construct
  misc_feature 1..20: note = Description of Artificial Sequence: Synthetic oligonucleotide
  misc_feature 1..20: note = Target: SCN10A; (+) strand; PAM type: NRG; PAM sequence: AAG
  source 1..20: mol_type = other DNA
ttctgtagcagggaatgtta

SEQ ID NO: 28470 - DNA, 20 bp, synthetic construct
  misc_feature 1..20: note = Description of Artificial Sequence: Synthetic oligonucleotide
  misc_feature 1..20: note = Target: SCN10A; (+) strand; PAM type: NRG; PAM sequence: CAG
  source 1..20: mol_type = other DNA
tgttaaagaataaaatttcc

SEQ ID NO: 28471 - DNA, 20 bp, synthetic construct
  misc_feature 1..20: note = Description of Artificial Sequence: Synthetic oligonucleotide
  misc_feature 1..20: note = Target: SCN10A; (+) strand; PAM type: NRG; PAM sequence: TGG
  source 1..20: mol_type = other DNA
aataaaatttcccagtcttg

SEQ ID NO: 28472 - DNA, 20 bp, synthetic construct
  misc_feature 1..20: note = Description of Artificial Sequence: Synthetic oligonucleotide
  misc_feature 1..20: note = Target: SCN10A; (+) strand; PAM type: NRG; PAM sequence: TGG
  source 1..20: mol_type = other DNA
ggaatccttaacttttccta

SEQ ID NO: 28473 - DNA, 20 bp, synthetic construct
  misc_feature 1..20: note = Description of Artificial Sequence: Synthetic oligonucleotide
  misc_feature 1..20: note = Target: SCN10A; (+) strand; PAM type: NRG; PAM sequence: AAG
  source 1..20: mol_type = other DNA
atccttaacttttcctatgg

SEQ ID NO: 28474 - DNA, 20 bp, synthetic construct
  misc_feature 1..20: note = Description of Artificial Sequence: Synthetic oligonucleotide
  misc_feature 1..20: note = Target: SCN10A; (+) strand; PAM type: NRG; PAM sequence: AAG
  source 1..20: mol_type = other DNA
acttttcctatggaagaaac

SEQ ID NO: 28475 - DNA, 20 bp, synthetic construct
  misc_feature 1..20: note = Description of Artificial Sequence: Synthetic oligonucleotide
  misc_feature 1..20: note = Target: SCN10A; (+) strand; PAM type: NRG; PAM sequence: TAG
  source 1..20: mol_type = other DNA
cctatggaagaaacaagatt

SEQ ID NO: 28476 - DNA, 20 bp, synthetic construct
  misc_feature 1..20: note = Description of Artificial Sequence: Synthetic oligonucleotide
  misc_feature 1..20: note = Target: SCN10A; (+) strand; PAM type: NRG; PAM sequence: GAG
  source 1..20: mol_type = other DNA
tatggaagaaacaagattta

SEQ ID NO: 28477 - DNA, 20 bp, synthetic construct
  misc_feature 1..20: note = Description of Artificial Sequence: Synthetic oligonucleotide
  misc_feature 1..20: note = Target: SCN10A; (+) strand; PAM type: NRG; PAM sequence: GAG
  source 1..20: mol_type = other DNA
agaaacaagatttagagcct

SEQ ID NO: 28478 - DNA, 20 bp, synthetic construct
  misc_feature 1..20: note = Description of Artificial Sequence: Synthetic oligonucleotide
  misc_feature 1..20: note = Target: SCN10A; (+) strand; PAM type: NRG; PAM sequence: CAG
  source 1..20: mol_type = other DNA
atttagagcctgagcatcat

SEQ ID NO: 28479 - DNA, 20 bp, synthetic construct
  misc_feature 1..20: note = Description of Artificial Sequence: Synthetic oligonucleotide
  misc_feature 1..20: note = Target: SCN10A; (+) strand; PAM type: NRG; PAM sequence: GAG
  source 1..20: mol_type = other DNA
ttagagcctgagcatcatca

SEQ ID NO: 28480 - DNA, 20 bp, synthetic construct
  misc_feature 1..20: note = Description of Artificial Sequence: Synthetic oligonucleotide
  misc_feature 1..20: note = Target: SCN10A; (+) strand; PAM type: NRG; PAM sequence: AGG
  source 1..20: mol_type = other DNA
tagagcctgagcatcatcag

SEQ ID NO: 28481 - DNA, 20 bp, synthetic construct
  misc_feature 1..20: note = Description of Artificial Sequence: Synthetic oligonucleotide
  misc_feature 1..20: note = Target: SCN10A; (+) strand; PAM type: NRG; PAM sequence: GAG
  source 1..20: mol_type = other DNA
gcctgagcatcatcagaggt

SEQ ID NO: 28482 - DNA, 20 bp, synthetic construct
  misc_feature 1..20: note = Description of Artificial Sequence: Synthetic oligonucleotide
  misc_feature 1..20: note = Target: SCN10A; (+) strand; PAM type: NRG; PAM sequence: GAG
  source 1..20: mol_type = other DNA
ctgagcatcatcagaggtga

SEQ ID NO: 28483 - DNA, 20 bp, synthetic construct
  misc_feature 1..20: note = Description of Artificial Sequence: Synthetic oligonucleotide
  misc_feature 1..20: note = Target: SCN10A; (+) strand; PAM type: NRG; PAM sequence: AGG
  source 1..20: mol_type = other DNA
tgagcatcatcagaggtgag

SEQ ID NO: 28484 - DNA, 20 bp, synthetic construct
  misc_feature 1..20: note = Description of Artificial Sequence: Synthetic oligonucleotide
  misc_feature 1..20: note = Target: SCN10A; (+) strand; PAM type: NRG; PAM sequence: GAG
  source 1..20: mol_type = other DNA
agcatcatcagaggtgagag

SEQ ID NO: 28485 - DNA, 20 bp, synthetic construct
  misc_feature 1..20: note = Description of Artificial Sequence: Synthetic oligonucleotide
  misc_feature 1..20: note = Target: SCN10A; (+) strand; PAM type: NRG; PAM sequence: AGG
  source 1..20: mol_type = other DNA
gcatcatcagaggtgagagg

SEQ ID NO: 28486 - DNA, 20 bp, synthetic construct
  misc_feature 1..20: note = Description of Artificial Sequence: Synthetic oligonucleotide
  misc_feature 1..20: note = Target: SCN10A; (+) strand; PAM type: NRG; PAM sequence: GAG
  source 1..20: mol_type = other DNA
agaggtgagaggaggtgtgt

SEQ ID NO: 28487 - DNA, 20 bp, synthetic construct
  misc_feature 1..20: note = Description of Artificial Sequence: Synthetic oligonucleotide
  misc_feature 1..20: note = Target: SCN10A; (+) strand; PAM type: NRG; PAM sequence: AGG
  source 1..20: mol_type = other DNA
gaggtgagaggaggtgtgtg

SEQ ID NO: 28488 - DNA, 20 bp, synthetic construct
  misc_feature 1..20: note = Description of Artificial Sequence: Synthetic oligonucleotide
  misc_feature 1..20: note = Target: SCN10A; (+) strand; PAM type: NRG; PAM sequence: TGG
  source 1..20: mol_type = other DNA
aggtgtgtgaggctcctatg

SEQ ID NO: 28489 - DNA, 20 bp, synthetic construct
  misc_feature 1..20: note = Description of Artificial Sequence: Synthetic oligonucleotide
  misc_feature 1..20: note = Target: SCN10A; (+) strand; PAM type: NRG; PAM sequence: CAG
  source 1..20: mol_type = other DNA
gtgaggctcctatgtggtcc

SEQ ID NO: 28490 - DNA, 20 bp, synthetic construct
  misc_feature 1..20: note = Description of Artificial Sequence: Synthetic oligonucleotide
  misc_feature 1..20: note = Target: SCN10A; (+) strand; PAM type: NRG; PAM sequence: AGG
  source 1..20: mol_type = other DNA
tgaggctcctatgtggtccc

SEQ ID NO: 28491 - DNA, 20 bp, synthetic construct
  misc_feature 1..20: note = Description of Artificial Sequence: Synthetic oligonucleotide
  misc_feature 1..20: note = Target: SCN10A; (+) strand; PAM type: NRG; PAM sequence: AAG
  source 1..20: mol_type = other DNA
gctcctatgtggtcccaggt

SEQ ID NO: 28492 - DNA, 20 bp, synthetic construct
  misc_feature 1..20: note = Description of Artificial Sequence: Synthetic oligonucleotide
  misc_feature 1..20: note = Target: SCN10A; (+) strand; PAM type: NRG; PAM sequence: TGG
  source 1..20: mol_type = other DNA
aggtaagctctgtcatgaaa

SEQ ID NO: 28493 - DNA, 20 bp, synthetic construct
  misc_feature 1..20: note = Description of Artificial Sequence: Synthetic oligonucleotide
  misc_feature 1..20: note = Target: SCN10A; (+) strand; PAM type: NRG; PAM sequence: TGG
  source 1..20: mol_type = other DNA
aaatggcacccatgcactga

SEQ ID NO: 28494 - DNA, 20 bp, synthetic construct
  misc_feature 1..20: note = Description of Artificial Sequence: Synthetic oligonucleotide
  misc_feature 1..20: note = Target: SCN10A; (+) strand; PAM type: NRG; PAM sequence: GGG
  source 1..20: mol_type = other DNA
aatggcacccatgcactgat

SEQ ID NO: 28495 - DNA, 20 bp, synthetic construct
  misc_feature 1..20: note = Description of Artificial Sequence: Synthetic oligonucleotide
  misc_feature 1..20: note = Target: SCN10A; (+) strand; PAM type: NRG; PAM sequence: GGG
  source 1..20: mol_type = other DNA
atggcacccatgcactgatg

SEQ ID NO: 28496 - DNA, 20 bp, synthetic construct
  misc_feature 1..20: note = Description of Artificial Sequence: Synthetic oligonucleotide
  misc_feature 1..20: note = Target: SCN10A; (+) strand; PAM type: NRG; PAM sequence: CAG
  source 1..20: mol_type = other DNA
gcacccatgcactgatgggg

SEQ ID NO: 28497 - DNA, 20 bp, synthetic construct
  misc_feature 1..20: note = Description of Artificial Sequence: Synthetic oligonucleotide
  misc_feature 1..20: note = Target: SCN10A; (+) strand; PAM type: NRG; PAM sequence: CAG
  source 1..20: mol_type = other DNA
atggggcagaaatcctgtgt

SEQ ID NO: 28498 - DNA, 20 bp, synthetic construct
  misc_feature 1..20: note = Description of Artificial Sequence: Synthetic oligonucleotide
  misc_feature 1..20: note = Target: SCN10A; (+) strand; PAM type: NRG; PAM sequence: TGG
  source 1..20: mol_type = other DNA
atcctgtgtcagtgctttgc

SEQ ID NO: 28499 - DNA, 20 bp, synthetic construct
  misc_feature 1..20: note = Description of Artificial Sequence: Synthetic oligonucleotide
  misc_feature 1..20: note = Target: SCN10A; (+) strand; PAM type: NRG; PAM sequence: CAG
  source 1..20: mol_type = other DNA
cagtgctttgctggtatgac

SEQ ID NO: 28500 - DNA, 20 bp, synthetic construct
  misc_feature 1..20: note = Description of Artificial Sequence: Synthetic oligonucleotide
  misc_feature 1..20: note = Target: SCN10A; (+) strand; PAM type: NRG; PAM sequence: TGG
  source 1..20: mol_type = other DNA
ggtatgaccagcttgacctt

SEQ ID NO: 28501 - DNA, 20 bp, synthetic construct
  misc_feature 1..20: note = Description of Artificial Sequence: Synthetic oligonucleotide
  misc_feature 1..20: note = Target: SCN10A; (+) strand; PAM type: NRG; PAM sequence: GGG
  source 1..20: mol_type = other DNA
gtatgaccagcttgaccttt

SEQ ID NO: 28502 - DNA, 20 bp, synthetic construct
  misc_feature 1..20: note = Description of Artificial Sequence: Synthetic oligonucleotide
  misc_feature 1..20: note = Target: SCN10A; (+) strand; PAM type: NRG; PAM sequence: GGG
  source 1..20: mol_type = other DNA
tatgaccagcttgacctttg

SEQ ID NO: 28503 - DNA, 20 bp, synthetic construct
  misc_feature 1..20: note = Description of Artificial Sequence: Synthetic oligonucleotide
  misc_feature 1..20: note = Target: SCN10A; (+) strand; PAM type: NRG; PAM sequence: AAG
  source 1..20: mol_type = other DNA
gcttgacctttggggctcct

SEQ ID NO: 28504 - DNA, 20 bp, synthetic construct
  misc_feature 1..20: note = Description of Artificial Sequence: Synthetic oligonucleotide
  misc_feature 1..20: note = Target: SCN10A; (+) strand; PAM type: NRG; PAM sequence: AGG
  source 1..20: mol_type = other DNA
cttgacctttggggctccta

SEQ ID NO: 28505 - DNA, 20 bp, synthetic construct
  misc_feature 1..20: note = Description of Artificial Sequence: Synthetic oligonucleotide
  misc_feature 1..20: note = Target: SCN10A; (+) strand; PAM type: NRG; PAM sequence: GGG
  source 1..20: mol_type = other DNA
ttgacctttggggctcctaa

SEQ ID NO: 28506 - DNA, 20 bp, synthetic construct
  misc_feature 1..20: note = Description of Artificial Sequence: Synthetic oligonucleotide
  misc_feature 1..20: note = Target: SCN10A; (+) strand; PAM type: NRG; PAM sequence: GGG
  source 1..20: mol_type = other DNA
tgacctttggggctcctaag

SEQ ID NO: 28507 - DNA, 20 bp, synthetic construct
  misc_feature 1..20: note = Description of Artificial Sequence: Synthetic oligonucleotide
  misc_feature 1..20: note = Target: SCN10A; (+) strand; PAM type: NRG; PAM sequence: GAG
  source 1..20: mol_type = other DNA
acctttggggctcctaaggg

SEQ ID NO: 28508 - DNA, 20 bp, synthetic construct
  misc_feature 1..20: note = Description of Artificial Sequence: Synthetic oligonucleotide
  misc_feature 1..20: note = Target: SCN10A; (+) strand; PAM type: NRG; PAM sequence: AAG
  source 1..20: mol_type = other DNA
tttggggctcctaaggggag

SEQ ID NO: 28509 - DNA, 20 bp, synthetic construct
  misc_feature 1..20: note = Description of Artificial Sequence: Synthetic oligonucleotide
  misc_feature 1..20: note = Target: SCN10A; (+) strand; PAM type: NRG; PAM sequence: AGG
  source 1..20: mol_type = other DNA
ttggggctcctaaggggaga

SEQ ID NO: 28510 - DNA, 20 bp, synthetic construct
  misc_feature 1..20: note = Description of Artificial Sequence: Synthetic oligonucleotide
  misc_feature 1..20: note = Target: SCN10A; (+) strand; PAM type: NRG; PAM sequence: TGG
  source 1..20: mol_type = other DNA
gggctcctaaggggagaagg

SEQ ID NO: 28511 - DNA, 20 bp, synthetic construct
  misc_feature 1..20: note = Description of Artificial Sequence: Synthetic oligonucleotide
  misc_feature 1..20: note = Target: SCN10A; (+) strand; PAM type: NRG; PAM sequence: CAG
  source 1..20: mol_type = other DNA
aggggagaaggtggacattc

SEQ ID NO: 28512 - DNA, 20 bp, synthetic construct
  misc_feature 1..20: note = Description of Artificial Sequence: Synthetic oligonucleotide
  misc_feature 1..20: note = Target: SCN10A; (+) strand; PAM type: NRG; PAM sequence: AGG
  source 1..20: mol_type = other DNA
ggggagaaggtggacattcc

SEQ ID NO: 28513 - DNA, 20 bp, synthetic construct
  misc_feature 1..20: note = Description of Artificial Sequence: Synthetic oligonucleotide
  misc_feature 1..20: note = Target: SCN10A; (+) strand; PAM type: NRG; PAM sequence: GGG
  source 1..20: mol_type = other DNA
gggagaaggtggacattcca

SEQ ID NO: 28514 - DNA, 20 bp, synthetic construct
  misc_feature 1..20: note = Description of Artificial Sequence: Synthetic oligonucleotide
  misc_feature 1..20: note = Target: SCN10A; (+) strand; PAM type: NRG; PAM sequence: TGG
  source 1..20: mol_type = other DNA
acattccagggccaataatc

SEQ ID NO: 28515 - DNA, 20 bp, synthetic construct
  misc_feature 1..20: note = Description of Artificial Sequence: Synthetic oligonucleotide
  misc_feature 1..20: note = Target: SCN10A; (+) strand; PAM type: NRG; PAM sequence: AAG
  source 1..20: mol_type = other DNA
agggccaataatctggccaa

SEQ ID NO: 28516 - DNA, 20 bp, synthetic construct
  misc_feature 1..20: note = Description of Artificial Sequence: Synthetic oligonucleotide
  misc_feature 1..20: note = Target: SCN10A; (+) strand; PAM type: NRG; PAM sequence: AAG
  source 1..20: mol_type = other DNA
ccaataatctggccaaaagc

SEQ ID NO: 28517 - DNA, 20 bp, synthetic construct
  misc_feature 1..20: note = Description of Artificial Sequence: Synthetic oligonucleotide
  misc_feature 1..20: note = Target: SCN10A; (+) strand; PAM type: NRG; PAM sequence: TGG
  source 1..20: mol_type = other DNA
taatctggccaaaagcaagc

SEQ ID NO: 28518 - DNA, 20 bp, synthetic construct
  misc_feature 1..20: note = Description of Artificial Sequence: Synthetic oligonucleotide
  misc_feature 1..20: note = Target: SCN10A; (+) strand; PAM type: NRG; PAM sequence: GGG
  source 1..20: mol_type = other DNA
aatctggccaaaagcaagct

SEQ ID NO: 28519 - DNA, 20 bp, synthetic construct
  misc_feature 1..20: note = Description of Artificial Sequence: Synthetic oligonucleotide
  misc_feature 1..20: note = Target: SCN10A; (+) strand; PAM type: NRG; PAM sequence: TGG
  source 1..20: mol_type = other DNA
ggccaaaagcaagctgggcc

SEQ ID NO: 28520 - DNA, 20 bp, synthetic construct
  misc_feature 1..20: note = Description of Artificial Sequence: Synthetic oligonucleotide
  misc_feature 1..20: note = Target: SCN10A; (+) strand; PAM type: NRG; PAM sequence: GGG
  source 1..20: mol_type = other DNA
gccaaaagcaagctgggcct

SEQ ID NO: 28521 - DNA, 20 bp, synthetic construct
  misc_feature 1..20: note = Description of Artificial Sequence: Synthetic oligonucleotide
  misc_feature 1..20: note = Target: SCN10A; (+) strand; PAM type: NRG; PAM sequence: AAG
  source 1..20: mol_type = other DNA
aaaagcaagctgggcctggg

SEQ ID NO: 28522 - DNA, 20 bp, synthetic construct
  misc_feature 1..20: note = Description of Artificial Sequence: Synthetic oligonucleotide
  misc_feature 1..20: note = Target: SCN10A; (+) strand; PAM type: NRG; PAM sequence: AAG
  source 1..20: mol_type = other DNA
agcaagctgggcctgggaag

SEQ ID NO: 28523 - DNA, 20 bp, synthetic construct
  misc_feature 1..20: note = Description of Artificial Sequence: Synthetic oligonucleotide
  misc_feature 1..20: note = Target: SCN10A; (+) strand; PAM type: NRG; PAM sequence: AGG
  source 1..20: mol_type = other DNA
gcaagctgggcctgggaaga

SEQ ID NO: 28524 - DNA, 20 bp, synthetic construct
  misc_feature 1..20: note = Description of Artificial Sequence: Synthetic oligonucleotide
  misc_feature 1..20: note = Target: SCN10A; (+) strand; PAM type: NRG; PAM sequence: GGG
  source 1..20: mol_type = other DNA
caagctgggcctgggaagaa

SEQ ID NO: 28525 - DNA, 20 bp, synthetic construct
  misc_feature 1..20: note = Description of Artificial Sequence: Synthetic oligonucleotide
  misc_feature 1..20: note = Target: SCN10A; (+) strand; PAM type: NRG; PAM sequence: TAG
  source 1..20: mol_type = other DNA
gggcctgggaagaagggtct

SEQ ID NO: 28526 - DNA, 20 bp, synthetic construct
  misc_feature 1..20: note = Description of Artificial Sequence: Synthetic oligonucleotide
  misc_feature 1..20: note = Target: SCN10A; (+) strand; PAM type: NRG; PAM sequence: TGG
  source 1..20: mol_type = other DNA
ctgggaagaagggtcttagt

SEQ ID NO: 28527 - DNA, 20 bp, synthetic construct
  misc_feature 1..20: note = Description of Artificial Sequence: Synthetic oligonucleotide
  misc_feature 1..20: note = Target: SCN10A; (+) strand; PAM type: NRG; PAM sequence: GGG
  source 1..20: mol_type = other DNA
tgggaagaagggtcttagtt

SEQ ID NO: 28528 - DNA, 20 bp, synthetic construct
  misc_feature 1..20: note = Description of Artificial Sequence: Synthetic oligonucleotide
  misc_feature 1..20: note = Target: SCN10A; (+) strand; PAM type: NRG; PAM sequence: GAG
  source 1..20: mol_type = other DNA
ggaagaagggtcttagttgg

SEQ ID NO: 28529 - DNA, 20 bp, synthetic construct
  misc_feature 1..20: note = Description of Artificial Sequence: Synthetic oligonucleotide
  misc_feature 1..20: note = Target: SCN10A; (+) strand; PAM type: NRG; PAM sequence: TGG
  source 1..20: mol_type = other DNA
agaagggtcttagttgggag

SEQ ID NO: 28530 - DNA, 20 bp, synthetic construct
  misc_feature 1..20: note = Description of Artificial Sequence: Synthetic oligonucleotide
  misc_feature 1..20: note = Target: SCN10A; (+) strand; PAM type: NRG; PAM sequence: GGG
  source 1..20: mol_type = other DNA
gaagggtcttagttgggagt

SEQ ID NO: 28531 - DNA, 20 bp, synthetic construct
  misc_feature 1..20: note = Description of Artificial Sequence: Synthetic oligonucleotide
  misc_feature 1..20: note = Target: SCN10A; (+) strand; PAM type: NRG; PAM sequence: TGG
  source 1..20: mol_type = other DNA
gtgggaatttccttttgcct

SEQ ID NO: 28532 - DNA, 20 bp, synthetic construct
  misc_feature 1..20: note = Description of Artificial Sequence: Synthetic oligonucleotide
  misc_feature 1..20: note = Target: SCN10A; (+) strand; PAM type: NRG; PAM sequence: TGG
  source 1..20: mol_type = other DNA
tttgccttggatttctttct

SEQ ID NO: 28533 - DNA, 20 bp, synthetic construct
  misc_feature 1..20: note = Description of Artificial Sequence: Synthetic oligonucleotide
  misc_feature 1..20: note = Target: SCN10A; (+) strand; PAM type: NRG; PAM sequence: TAG
  source 1..20: mol_type = other DNA
ttggatttctttcttggttc

SEQ ID NO: 28534 - DNA, 20 bp, synthetic construct
  misc_feature 1..20: note = Description of Artificial Sequence: Synthetic oligonucleotide
  misc_feature 1..20: note = Target: SCN10A; (+) strand; PAM type: NRG; PAM sequence: AAG
  source 1..20: mol_type = other DNA
tttcttggttctagactttg

SEQ ID NO: 28535 - DNA, 20 bp, synthetic construct
  misc_feature 1..20: note = Description of Artificial Sequence: Synthetic oligonucleotide
  misc_feature 1..20: note = Target: SCN10A; (+) strand; PAM type: NRG; PAM sequence: GAG
  source 1..20: mol_type = other DNA
tcttggttctagactttgaa

SEQ ID NO: 28536 - DNA, 20 bp, synthetic construct
  misc_feature 1..20: note = Description of Artificial Sequence: Synthetic oligonucleotide
  misc_feature 1..20: note = Target: SCN10A; (+) strand; PAM type: NRG; PAM sequence: AGG
  source 1..20: mol_type = other DNA
cttggttctagactttgaag

SEQ ID NO: 28537 - DNA, 20 bp, synthetic construct
  misc_feature 1..20: note = Description of Artificial Sequence: Synthetic oligonucleotide
  misc_feature 1..20: note = Target: SCN10A; (+) strand; PAM type: NRG; PAM sequence: GGG
  source 1..20: mol_type = other DNA
ttggttctagactttgaaga

SEQ ID NO: 28538 - DNA, 20 bp, synthetic construct
  misc_feature 1..20: note = Description of Artificial Sequence: Synthetic oligonucleotide
  misc_feature 1..20: note = Target: SCN10A; (+) strand; PAM type: NRG; PAM sequence: AAG
  source 1..20: mol_type = other DNA
gttctagactttgaagaggg

SEQ ID NO: 28539 - DNA, 20 bp, synthetic construct
  misc_feature 1..20: note = Description of Artificial Sequence: Synthetic oligonucleotide
  misc_feature 1..20: note = Target: SCN10A; (+) strand; PAM type: NRG; PAM sequence: CGG
  source 1..20: mol_type = other DNA
tttgaagagggaagatgatc

SEQ ID NO: 28540 - DNA, 20 bp, synthetic construct
  misc_feature 1..20: note = Description of Artificial Sequence: Synthetic oligonucleotide
  misc_feature 1..20: note = Target: SCN10A; (+) strand; PAM type: NRG; PAM sequence: TGG
  source 1..20: mol_type = other DNA
gatgatccggcttgtgccac

SEQ ID NO: 28541 - DNA, 20 bp, synthetic construct
  misc_feature 1..20: note = Description of Artificial Sequence: Synthetic oligonucleotide
  misc_feature 1..20: note = Target: SCN10A; (+) strand; PAM type: NRG; PAM sequence: GGG
  source 1..20: mol_type = other DNA
atgatccggcttgtgccact

SEQ ID NO: 28542 - DNA, 20 bp, synthetic construct
  misc_feature 1..20: note = Description of Artificial Sequence: Synthetic oligonucleotide
  misc_feature 1..20: note = Target: SCN10A; (+) strand; PAM type: NRG; PAM sequence: TGG
  source 1..20: mol_type = other DNA
ggcttgtgccactgggcatg

SEQ ID NO: 28543 - DNA, 20 bp, synthetic construct
  misc_feature 1..20: note = Description of Artificial Sequence: Synthetic oligonucleotide
  misc_feature 1..20: note = Target: SCN10A; (+) strand; PAM type: NRG; PAM sequence: GGG
  source 1..20: mol_type = other DNA
gcttgtgccactgggcatgt

SEQ ID NO: 28544 - DNA, 20 bp, synthetic construct
  misc_feature 1..20: note = Description of Artificial Sequence: Synthetic oligonucleotide
  misc_feature 1..20: note = Target: SCN10A; (+) strand; PAM type: NRG; PAM sequence: AAG
  source 1..20: mol_type = other DNA
cactgggcatgtgggtgtca

SEQ ID NO: 28545 - DNA, 20 bp, synthetic construct
  misc_feature 1..20: note = Description of Artificial Sequence: Synthetic oligonucleotide
  misc_feature 1..20: note = Target: SCN10A; (+) strand; PAM type: NRG; PAM sequence: TGG
  source 1..20: mol_type = other DNA
caaagatgttgcctgccatt

SEQ ID NO: 28546 - DNA, 20 bp, synthetic construct
  misc_feature 1..20: note = Description of Artificial Sequence: Synthetic oligonucleotide
  misc_feature 1..20: note = Target: SCN10A; (+) strand; PAM type: NRG; PAM sequence: TGG
  source 1..20: mol_type = other DNA
gttgcctgccatttggatgc

SEQ ID NO: 28547 - DNA, 20 bp, synthetic construct
  misc_feature 1..20: note = Description of Artificial Sequence: Synthetic oligonucleotide
  misc_feature 1..20: note = Target: SCN10A; (+) strand; PAM type: NRG; PAM sequence: CAG
  source 1..20: mol_type = other DNA
cctgccatttggatgctggt

SEQ ID NO: 28548 - DNA, 20 bp, synthetic construct
  misc_feature 1..20: note = Description of Artificial Sequence: Synthetic oligonucleotide
  misc_feature 1..20: note = Target: SCN10A; (+) strand; PAM type: NRG; PAM sequence: AGG
  source 1..20: mol_type = other DNA
ctgccatttggatgctggtc

SEQ ID NO: 28549 - DNA, 20 bp, synthetic construct
  misc_feature 1..20: note = Description of Artificial Sequence: Synthetic oligonucleotide
  misc_feature 1..20: note = Target: SCN10A; (+) strand; PAM type: NRG; PAM sequence: GAG
  source 1..20: mol_type = other DNA
gccatttggatgctggtcag

SEQ ID NO: 28550 - DNA, 20 bp, synthetic construct
  misc_feature 1..20: note = Description of Artificial Sequence: Synthetic oligonucleotide
  misc_feature 1..20: note = Target: SCN10A; (+) strand; PAM type: NRG; PAM sequence: TAG
  source 1..20: mol_type = other DNA
tttggatgctggtcaggagc

SEQ ID NO: 28551 - DNA, 20 bp, synthetic construct
  misc_feature 1..20: note = Description of Artificial Sequence: Synthetic oligonucleotide
  misc_feature 1..20: note = Target: SCN10A; (+) strand; PAM type: NRG; PAM sequence: AGG
  source 1..20: mol_type = other DNA
ttggatgctggtcaggagct

SEQ ID NO: 28552 - DNA, 20 bp, synthetic construct
  misc_feature 1..20: note = Description of Artificial Sequence: Synthetic oligonucleotide
  misc_feature 1..20: note = Target: SCN10A; (+) strand; PAM type: NRG; PAM sequence: TGG
  source 1..20: mol_type = other DNA
atgctggtcaggagctagga

SEQ ID NO: 28553 - DNA, 20 bp, synthetic construct
  misc_feature 1..20: note = Description of Artificial Sequence: Synthetic oligonucleotide
  misc_feature 1..20: note = Target: SCN10A; (+) strand; PAM type: NRG; PAM sequence: AAG
  source 1..20: mol_type = other DNA
gtcaggagctaggatggtcc

SEQ ID NO: 28554 - DNA, 20 bp, synthetic construct
  misc_feature 1..20: note = Description of Artificial Sequence: Synthetic oligonucleotide
  misc_feature 1..20: note = Target: SCN10A; (+) strand; PAM type: NRG; PAM sequence: TGG
  source 1..20: mol_type = other DNA
ctaggatggtccaagaccta

SEQ ID NO: 28555 - DNA, 20 bp, synthetic construct
  misc_feature 1..20: note = Description of Artificial Sequence: Synthetic oligonucleotide
  misc_feature 1..20: note = Target: SCN10A; (+) strand; PAM type: NRG; PAM sequence: GGG
  source 1..20: mol_type = other DNA
taggatggtccaagacctat

SEQ ID NO: 28556 - DNA, 20 bp, synthetic construct
  misc_feature 1..20: note = Description of Artificial Sequence: Synthetic oligonucleotide
  misc_feature 1..20: note = Target: SCN10A; (+) strand; PAM type: NRG; PAM sequence: TGG
  source 1..20: mol_type = other DNA
ggtccaagacctatgggtcc

SEQ ID NO: 28557 - DNA, 20 bp, synthetic construct
  misc_feature 1..20: note = Description of Artificial Sequence: Synthetic oligonucleotide
  misc_feature 1..20: note = Target: SCN10A; (+) strand; PAM type: NRG; PAM sequence: GAG
  source 1..20: mol_type = other DNA
tccaagacctatgggtcctg

SEQ ID NO: 28558 - DNA, 20 bp, synthetic construct
  misc_feature 1..20: note = Description of Artificial Sequence: Synthetic oligonucleotide
  misc_feature 1..20: note = Target: SCN10A; (+) strand; PAM type: NRG; PAM sequence: CAG
  source 1..20: mol_type = other DNA
gacctatgggtcctggagtg

SEQ ID NO: 28559 - DNA, 20 bp, synthetic construct
  misc_feature 1..20: note = Description of Artificial Sequence: Synthetic oligonucleotide
  misc_feature 1..20: note = Target: SCN10A; (+) strand; PAM type: NRG; PAM sequence: CAG
  source 1..20: mol_type = other DNA
tcctggagtgcagccatctg

SEQ ID NO: 28560 - DNA, 20 bp, synthetic construct
  misc_feature 1..20: note = Description of Artificial Sequence: Synthetic oligonucleotide
  misc_feature 1..20: note = Target: SCN10A; (+) strand; PAM type: NRG; PAM sequence: AGG
  source 1..20: mol_type = other DNA
cctggagtgcagccatctgc

SEQ ID NO: 28561 - DNA, 20 bp, synthetic construct
  misc_feature 1..20: note = Description of Artificial Sequence: Synthetic oligonucleotide
  misc_feature 1..20: note = Target: SCN10A; (+) strand; PAM type: NRG; PAM sequence: TGG
  source 1..20: mol_type = other DNA
agccatctgcaggtgctgct

SEQ ID NO: 28562 - DNA, 20 bp, synthetic construct
  misc_feature 1..20: note = Description of Artificial Sequence: Synthetic oligonucleotide
  misc_feature 1..20: note = Target: SCN10A; (+) strand; PAM type: NRG; PAM sequence: TGG
  source 1..20: mol_type = other DNA
ctttgtgctgatttctctgt

SEQ ID NO: 28563 - DNA, 20 bp, synthetic construct
  misc_feature 1..20: note = Description of Artificial Sequence: Synthetic oligonucleotide
  misc_feature 1..20: note = Target: SCN10A; (+) strand; PAM type: NRG; PAM sequence: AAG
  source 1..20: mol_type = other DNA
ttggcatccctgccacttca

SEQ ID NO: 28564 - DNA, 20 bp, synthetic construct
  misc_feature 1..20: note = Description of Artificial Sequence: Synthetic oligonucleotide
  misc_feature 1..20: note = Target: SCN10A; (+) strand; PAM type: NRG; PAM sequence: TAG
  source 1..20: mol_type = other DNA
aaagttttgtttaaatgttc

SEQ ID NO: 28565 - DNA, 20 bp, synthetic construct
  misc_feature 1..20: note = Description of Artificial Sequence: Synthetic oligonucleotide
  misc_feature 1..20: note = Target: SCN10A; (+) strand; PAM type: NRG; PAM sequence: CAG
  source 1..20: mol_type = other DNA
taaatgttctagccttgcct

SEQ ID NO: 28566 - DNA, 20 bp, synthetic construct
  misc_feature 1..20: note = Description of Artificial Sequence: Synthetic oligonucleotide
  misc_feature 1..20: note = Target: SCN10A; (+) strand; PAM type: NRG; PAM sequence: TAG
  source 1..20: mol_type = other DNA
ttgcctcagctatgcgaaat

SEQ ID NO: 28567 - DNA, 20 bp, synthetic construct
  misc_feature 1..20: note = Description of Artificial Sequence: Synthetic oligonucleotide
  misc_feature 1..20: note = Target: SCN10A; (+) strand; PAM type: NRG; PAM sequence: AGG
  source 1..20: mol_type = other DNA
tgcctcagctatgcgaaatt

SEQ ID NO: 28568 - DNA, 20 bp, synthetic construct
  misc_feature 1..20: note = Description of Artificial Sequence: Synthetic oligonucleotide
  misc_feature 1..20: note = Target: SCN10A; (+) strand; PAM type: NRG; PAM sequence: GGG
  source 1..20: mol_type = other DNA
gcctcagctatgcgaaatta

SEQ ID NO: 28569 - DNA, 20 bp, synthetic construct
  misc_feature 1..20: note = Description of Artificial Sequence: Synthetic oligonucleotide
  misc_feature 1..20: note = Target: SCN10A; (+) strand; PAM type: NRG; PAM sequence: AAG
  source 1..20: mol_type = other DNA
ctatgcgaaattagggaaca

SEQ ID NO: 28570 - DNA, 20 bp, synthetic construct
  misc_feature 1..20: note = Description of Artificial Sequence: Synthetic oligonucleotide
  misc_feature 1..20: note = Target: SCN10A; (+) strand; PAM type: NRG; PAM sequence: AGG
  source 1..20: mol_type = other DNA
tatgcgaaattagggaacaa

SEQ ID NO: 28571 - DNA, 20 bp, synthetic construct
  misc_feature 1..20: note = Description of Artificial Sequence: Synthetic oligonucleotide
  misc_feature 1..20: note = Target: SCN10A; (+) strand; PAM type: NRG; PAM sequence: AAG
  source 1..20: mol_type = other DNA
cgaaattagggaacaaagga

SEQ ID NO: 28572 - DNA, 20 bp, synthetic construct
  misc_feature 1..20: note = Description of Artificial Sequence: Synthetic oligonucleotide
  misc_feature 1..20: note = Target: SCN10A; (+) strand; PAM type: NRG; PAM sequence: GAG
  source 1..20: mol_type = other DNA
aaattagggaacaaaggaaa

SEQ ID NO: 28573 - DNA, 20 bp, synthetic construct
  misc_feature 1..20: note = Description of Artificial Sequence: Synthetic oligonucleotide
  misc_feature 1..20: note = Target: SCN10A; (+) strand; PAM type: NRG; PAM sequence: TGG
  source 1..20: mol_type = other DNA
gaaagagtgtttaccttgct

SEQ ID NO: 28574 - DNA, 20 bp, synthetic construct
  misc_feature 1..20: note = Description of Artificial Sequence: Synthetic oligonucleotide
  misc_feature 1..20: note = Target: SCN10A; (+) strand; PAM type: NRG; PAM sequence: GGG
  source 1..20: mol_type = other DNA
aaagagtgtttaccttgctt

SEQ ID NO: 28575 - DNA, 20 bp, synthetic construct
  misc_feature 1..20: note = Description of Artificial Sequence: Synthetic oligonucleotide
  misc_feature 1..20: note = Target: SCN10A; (+) strand; PAM type: NRG; PAM sequence: CAG
  source 1..20: mol_type = other DNA
agtgtttaccttgcttgggc

SEQ ID NO: 28576 - DNA, 20 bp, synthetic construct
  misc_feature 1..20: note = Description of Artificial Sequence: Synthetic oligonucleotide
  misc_feature 1..20: note = Target: SCN10A; (+) strand; PAM type: NRG; PAM sequence: AAG
  source 1..20: mol_type = other DNA
cttgcttgggccagaatatt

SEQ ID NO: 28577 - DNA, 20 bp, synthetic construct
  misc_feature 1..20: note = Description of Artificial Sequence: Synthetic oligonucleotide
  misc_feature 1..20: note = Target: SCN10A; (+) strand; PAM type: NRG; PAM sequence: AGG
  source 1..20: mol_type = other DNA
ttgcttgggccagaatatta

SEQ ID NO: 28578 - DNA, 20 bp, synthetic construct
  misc_feature 1..20: note = Description of Artificial Sequence: Synthetic oligonucleotide
  misc_feature 1..20: note = Target: SCN10A; (+) strand; PAM type: NRG; PAM sequence: GGG
  source 1..20: mol_type = other DNA
tgcttgggccagaatattaa

SEQ ID NO: 28579 - DNA, 20 bp, synthetic construct
  misc_feature 1..20: note = Description of Artificial Sequence: Synthetic oligonucleotide
  misc_feature 1..20: note = Target: SCN10A; (+) strand; PAM type: NRG; PAM sequence: GGG
  source 1..20: mol_type = other DNA
gcttgggccagaatattaag

SEQ ID NO: 28580 - DNA, 20 bp, synthetic construct
  misc_feature 1..20: note = Description of Artificial Sequence: Synthetic oligonucleotide
  misc_feature 1..20: note = Target: SCN10A; (+) strand; PAM type: NRG; PAM sequence: GAG
  source 1..20: mol_type = other DNA
ttgggccagaatattaaggg

SEQ ID NO: 28581 - DNA, 20 bp, synthetic construct
  misc_feature 1..20: note = Description of Artificial Sequence: Synthetic oligonucleotide
  misc_feature 1..20: note = Target: SCN10A; (+) strand; PAM type: NRG; PAM sequence: GAG
  source 1..20: mol_type = other DNA
gggccagaatattaagggga

SEQ ID NO: 28582 - DNA, 20 bp, synthetic construct
  misc_feature 1..20: note = Description of Artificial Sequence: Synthetic oligonucleotide
  misc_feature 1..20: note = Target: SCN10A; (+) strand; PAM type: NRG; PAM sequence: AAG
  source 1..20: mol_type = other DNA
gagagccacgttcctccact

SEQ ID NO: 28583 - DNA, 20 bp, synthetic construct
  misc_feature 1..20: note = Description of Artificial Sequence: Synthetic oligonucleotide
  misc_feature 1..20: note = Target: SCN10A; (+) strand; PAM type: NRG; PAM sequence: AGG
  source 1..20: mol_type = other DNA
agagccacgttcctccacta

SEQ ID NO: 28584 - DNA, 20 bp, synthetic construct
  misc_feature 1..20: note = Description of Artificial Sequence: Synthetic oligonucleotide
  misc_feature 1..20: note = Target: SCN10A; (+) strand; PAM type: NRG; PAM sequence: TAG
  source 1..20: mol_type = other DNA
ccacgttcctccactaaggc

SEQ ID NO: 28585 - DNA, 20 bp, synthetic construct
  misc_feature 1..20: note = Description of Artificial Sequence: Synthetic oligonucleotide
  misc_feature 1..20: note = Target: SCN10A; (+) strand; PAM type: NRG; PAM sequence: AAG
  source 1..20: mol_type = other DNA
tcctccactaaggctagcaa

SEQ ID NO: 28586 - DNA, 20 bp, synthetic construct
  misc_feature 1..20: note = Description of Artificial Sequence: Synthetic oligonucleotide
  misc_feature 1..20: note = Target: SCN10A; (+) strand; PAM type: NRG; PAM sequence: AGG
  source 1..20: mol_type = other DNA
cctccactaaggctagcaaa

SEQ ID NO: 28587 - DNA, 20 bp, synthetic construct
  misc_feature 1..20: note = Description of Artificial Sequence: Synthetic oligonucleotide
  misc_feature 1..20: note = Target: SCN10A; (+) strand; PAM type: NRG; PAM sequence: GAG
  source 1..20: mol_type = other DNA
actaaggctagcaaaaggtt

SEQ ID NO: 28588 - DNA, 20 bp, synthetic construct
  misc_feature 1..20: note = Description of Artificial Sequence: Synthetic oligonucleotide
  misc_feature 1..20: note = Target: SCN10A; (+) strand; PAM type: NRG; PAM sequence: GAG
  source 1..20: mol_type = other DNA
taaggctagcaaaaggttga

SEQ ID NO: 28589 - DNA, 20 bp, synthetic construct
  misc_feature 1..20: note = Description of Artificial Sequence: Synthetic oligonucleotide
  misc_feature 1..20: note = Target: SCN10A; (+) strand; PAM type: NRG; PAM sequence: AAG
  source 1..20: mol_type = other DNA
atccactcttcttccattca

SEQ ID NO: 28590 - DNA, 20 bp, synthetic construct
  misc_feature 1..20: note = Description of Artificial Sequence: Synthetic oligonucleotide
  misc_feature 1..20: note = Target: SCN10A; (+) strand; PAM type: NRG; PAM sequence: AGG
  source 1..20: mol_type = other DNA
tccactcttcttccattcaa

SEQ ID NO: 28591 - DNA, 20 bp, synthetic construct
  misc_feature 1..20: note = Description of Artificial Sequence: Synthetic oligonucleotide
  misc_feature 1..20: note = Target: SCN10A; (+) strand; PAM type: NRG; PAM sequence: TGG
  source 1..20: mol_type = other DNA
ctcttcttccattcaaagga

SEQ ID NO: 28592 - DNA, 20 bp, synthetic construct
  misc_feature 1..20: note = Description of Artificial Sequence: Synthetic oligonucleotide
  misc_feature 1..20: note = Target: SCN10A; (+) strand; PAM type: NRG; PAM sequence: GAG
  source 1..20: mol_type = other DNA
cttcttccattcaaaggatg

SEQ ID NO: 28593 - DNA, 20 bp, synthetic construct
  misc_feature 1..20: note = Description of Artificial Sequence: Synthetic oligonucleotide
  misc_feature 1..20: note = Target: SCN10A; (+) strand; PAM type: NRG; PAM sequence: CAG
  source 1..20: mol_type = other DNA
attcaaaggatggagaatct

SEQ ID NO: 28594 - DNA, 20 bp, synthetic construct
  misc_feature 1..20: note = Description of Artificial Sequence: Synthetic oligonucleotide
  misc_feature 1..20: note = Target: SCN10A; (+) strand; PAM type: NRG; PAM sequence: AGG
  source 1..20: mol_type = other DNA
ttcaaaggatggagaatctc

SEQ ID NO: 28595 - DNA, 20 bp, synthetic construct
  misc_feature 1..20: note = Description of Artificial Sequence: Synthetic oligonucleotide
  misc_feature 1..20: note = Target: SCN10A; (+) strand; PAM type: NRG; PAM sequence: CAG
  source 1..20: mol_type = other DNA
aggatggagaatctcaggaa

SEQ ID NO: 28596 - DNA, 20 bp, synthetic construct
  misc_feature 1..20: note = Description of Artificial Sequence: Synthetic oligonucleotide
  misc_feature 1..20: note = Target: SCN10A; (+) strand; PAM type: NRG; PAM sequence: TGG
  source 1..20: mol_type = other DNA
gagaatctcaggaacagaat

SEQ ID NO: 28597 - DNA, 20 bp, synthetic construct
  misc_feature 1..20: note = Description of Artificial Sequence: Synthetic oligonucleotide
  misc_feature 1..20: note = Target: SCN10A; (+) strand; PAM type: NRG; PAM sequence: GAG
  source 1..20: mol_type = other DNA
tcaggaacagaattggttat

SEQ ID NO: 28598 - DNA, 20 bp, synthetic construct
  misc_feature 1..20: note = Description of Artificial Sequence: Synthetic oligonucleotide
  misc_feature 1..20: note = Target: SCN10A; (+) strand; PAM type: NRG; PAM sequence: AGG
  source 1..20: mol_type = other DNA
caggaacagaattggttatg

SEQ ID NO: 28599 - DNA, 20 bp, synthetic construct
  misc_feature 1..20: note = Description of Artificial Sequence: Synthetic oligonucleotide
  misc_feature 1..20: note = Target: SCN10A; (+) strand; PAM type: NRG; PAM sequence: TGG
  source 1..20: mol_type = other DNA
tttcacttcccctccacatg

SEQ ID NO: 28600 - DNA, 20 bp, synthetic construct
  misc_feature 1..20: note = Description of Artificial Sequence: Synthetic oligonucleotide
  misc_feature 1..20: note = Target: SCN10A; (+) strand; PAM type: NRG; PAM sequence: GAG
  source 1..20: mol_type = other DNA
tcacttcccctccacatgtg

SEQ ID NO: 28601 - DNA, 20 bp, synthetic construct
  misc_feature 1..20: note = Description of Artificial Sequence: Synthetic oligonucleotide
  misc_feature 1..20: note = Target: SCN10A; (+) strand; PAM type: NRG; PAM sequence: AGG
  source 1..20: mol_type = other DNA
cacttcccctccacatgtgg

SEQ ID NO: 28602 - DNA, 20 bp, synthetic construct
  misc_feature 1..20: note = Description of Artificial Sequence: Synthetic oligonucleotide
  misc_feature 1..20: note = Target: SCN10A; (+) strand; PAM type: NRG; PAM sequence: CGG
  source 1..20: mol_type = other DNA
gtctccccctgtgccatcct

SEQ ID NO: 28603 - DNA, 20 bp, synthetic construct
  misc_feature 1..20: note = Description of Artificial Sequence: Synthetic oligonucleotide
  misc_feature 1..20: note = Target: SCN10A; (+) strand; PAM type: NRG; PAM sequence: GAG
  source 1..20: mol_type = other DNA
ctccccctgtgccatcctcg

SEQ ID NO: 28604 - DNA, 20 bp, synthetic construct
  misc_feature 1..20: note = Description of Artificial Sequence: Synthetic oligonucleotide
  misc_feature 1..20: note = Target: SCN10A; (+) strand; PAM type: NRG; PAM sequence: AGG
  source 1..20: mol_type = other DNA
tccccctgtgccatcctcgg

SEQ ID NO: 28605 - DNA, 20 bp, synthetic construct
  misc_feature 1..20: note = Description of Artificial Sequence: Synthetic oligonucleotide
  misc_feature 1..20: note = Target: SCN10A; (+) strand; PAM type: NRG; PAM sequence: TAG
  source 1..20: mol_type = other DNA
gtgccatcctcggaggatct

SEQ ID NO: 28606 - DNA, 20 bp, synthetic construct
  misc_feature 1..20: note = Description of Artificial Sequence: Synthetic oligonucleotide
  misc_feature 1..20: note = Target: SCN10A; (+) strand; PAM type: NRG; PAM sequence: CAG
  source 1..20: mol_type = other DNA
tcctcggaggatcttagttg

SEQ ID NO: 28607 - DNA, 20 bp, synthetic construct
  misc_feature 1..20: note = Description of Artificial Sequence: Synthetic oligonucleotide
  misc_feature 1..20: note = Target: SCN10A; (+) strand; PAM type: NRG; PAM sequence: TAG
  source 1..20: mol_type = other DNA
gatcttagttgcagcttaat

SEQ ID NO: 28608 - DNA, 20 bp, synthetic construct
  misc_feature 1..20: note = Description of Artificial Sequence: Synthetic oligonucleotide
  misc_feature 1..20: note = Target: SCN10A; (+) strand; PAM type: NRG; PAM sequence: AGG
  source 1..20: mol_type = other DNA
atcttagttgcagcttaatt

SEQ ID NO: 28609 - DNA, 20 bp, synthetic construct
  misc_feature 1..20: note = Description of Artificial Sequence: Synthetic oligonucleotide
  misc_feature 1..20: note = Target: SCN10A; (+) strand; PAM type: NRG; PAM sequence: GAG
  source 1..20: mol_type = other DNA
cttagttgcagcttaattag

SEQ ID NO: 28610 - DNA, 20 bp, synthetic construct
  misc_feature 1..20: note = Description of Artificial Sequence: Synthetic oligonucleotide
  misc_feature 1..20: note = Target: SCN10A; (+) strand; PAM type: NRG; PAM sequence: TGG
  source 1..20: mol_type = other DNA
tgcagcttaattaggagaaa

SEQ ID NO: 28611 - DNA, 20 bp, synthetic construct
  misc_feature 1..20: note = Description of Artificial Sequence: Synthetic oligonucleotide
  misc_feature 1..20: note = Target: SCN10A; (+) strand; PAM type: NRG; PAM sequence: CAG
  source 1..20: mol_type = other DNA
gagaaatggtgattttgttg

SEQ ID NO: 28612 - DNA, 20 bp, synthetic construct
  misc_feature 1..20: note = Description of Artificial Sequence: Synthetic oligonucleotide
  misc_feature 1..20: note = Target: SCN10A; (+) strand; PAM type: NRG; PAM sequence: AGG
  source 1..20: mol_type = other DNA
agaaatggtgattttgttgc

SEQ ID NO: 28613 - DNA, 20 bp, synthetic construct
  misc_feature 1..20: note = Description of Artificial Sequence: Synthetic oligonucleotide
  misc_feature 1..20: note = Target: SCN10A; (+) strand; PAM type: NRG; PAM sequence: TGG
  source 1..20: mol_type = other DNA
tcccactcctatttactgcc

SEQ ID NO: 28614 - DNA, 20 bp, synthetic construct
  misc_feature 1..20: note = Description of Artificial Sequence: Synthetic oligonucleotide
  misc_feature 1..20: note = Target: SCN10A; (+) strand; PAM type: NRG; PAM sequence: TAG
  source 1..20: mol_type = other DNA
actgcctggaatttcaacat

SEQ ID NO: 28615 - DNA, 20 bp, synthetic construct
  misc_feature 1..20: note = Description of Artificial Sequence: Synthetic oligonucleotide
  misc_feature 1..20: note = Target: SCN10A; (+) strand; PAM type: NRG; PAM sequence: AGG
  source 1..20: mol_type = other DNA
ctgcctggaatttcaacatt

SEQ ID NO: 28616 - DNA, 20 bp, synthetic construct
  misc_feature 1..20: note = Description of Artificial Sequence: Synthetic oligonucleotide
  misc_feature 1..20: note = Target: SCN10A; (+) strand; PAM type: NRG; PAM sequence: GGG
  source 1..20: mol_type = other DNA
tgcctggaatttcaacatta

SEQ ID NO: 28617 - DNA, 20 bp, synthetic construct
  misc_feature 1..20: note = Description of Artificial Sequence: Synthetic oligonucleotide
  misc_feature 1..20: note = Target: SCN10A; (+) strand; PAM type: NRG; PAM sequence: TAG
  source 1..20: mol_type = other DNA
acattagggtcatgcctttg

SEQ ID NO: 28618 - DNA, 20 bp, synthetic construct
  misc_feature 1..20: note = Description of Artificial Sequence: Synthetic oligonucleotide
  misc_feature 1..20: note = Target: SCN10A; (+) strand; PAM type: NRG; PAM sequence: AGG
  source 1..20: mol_type = other DNA
cattagggtcatgcctttgt

SEQ ID NO: 28619 - DNA, 20 bp, synthetic construct
  misc_feature 1..20: note = Description of Artificial Sequence: Synthetic oligonucleotide
  misc_feature 1..20: note = Target: SCN10A; (+) strand; PAM type: NRG; PAM sequence: TAG
  source 1..20: mol_type = other DNA
tagggtcatgcctttgtagg

SEQ ID NO: 28620 - DNA, 20 bp, synthetic construct
  misc_feature 1..20: note = Description of Artificial Sequence: Synthetic oligonucleotide
  misc_feature 1..20: note = Target: SCN10A; (+) strand; PAM type: NRG; PAM sequence: CAG
  source 1..20: mol_type = other DNA
ttgtaggtagatgccctctc

SEQ ID NO: 28621 - DNA, 20 bp, synthetic construct
  misc_feature 1..20: note = Description of Artificial Sequence: Synthetic oligonucleotide
  misc_feature 1..20: note = Target: SCN10A; (+) strand; PAM type: NRG; PAM sequence: AGG
  source 1..20: mol_type = other DNA
tgtaggtagatgccctctcc

SEQ ID NO: 28622 - DNA, 20 bp, synthetic construct
  misc_feature 1..20: note = Description of Artificial Sequence: Synthetic oligonucleotide
  misc_feature 1..20: note = Target: SCN10A; (+) strand; PAM type: NRG; PAM sequence: GGG
  source 1..20: mol_type = other DNA
gtaggtagatgccctctcca

SEQ ID NO: 28623 - DNA, 20 bp, synthetic construct
  misc_feature 1..20: note = Description of Artificial Sequence: Synthetic oligonucleotide
  misc_feature 1..20: note = Target: SCN10A; (+) strand; PAM type: NRG; PAM sequence: AAG
  source 1..20: mol_type = other DNA
aatatgatttatcttgtcct

SEQ ID NO: 28624 - DNA, 20 bp, synthetic construct
  misc_feature 1..20: note = Description of Artificial Sequence: Synthetic oligonucleotide
  misc_feature 1..20: note = Target: SCN10A; (+) strand; PAM type: NRG; PAM sequence: GAG
  source 1..20: mol_type = other DNA
ctaagaatgttgtcttcctt

SEQ ID NO: 28625 - DNA, 20 bp, synthetic construct
  misc_feature 1..20: note = Description of Artificial Sequence: Synthetic oligonucleotide
  misc_feature 1..20: note = Target: SCN10A; (+) strand; PAM type: NRG; PAM sequence: AGG
  source 1..20: mol_type = other DNA
taagaatgttgtcttccttg

SEQ ID NO: 28626 - DNA, 20 bp, synthetic construct
  misc_feature 1..20: note = Description of Artificial Sequence: Synthetic oligonucleotide
  misc_feature 1..20: note = Target: SCN10A; (+) strand; PAM type: NRG; PAM sequence: GGG
  source 1..20: mol_type = other DNA
aagaatgttgtcttccttga

SEQ ID NO: 28627 - DNA, 20 bp, synthetic construct
  misc_feature 1..20: note = Description of Artificial Sequence: Synthetic oligonucleotide
  misc_feature 1..20: note = Target: SCN10A; (+) strand; PAM type: NRG; PAM sequence: GGG
  source 1..20: mol_type = other DNA
agaatgttgtcttccttgag

SEQ ID NO: 28628 - DNA, 20 bp, synthetic construct
  misc_feature 1..20: note = Description of Artificial Sequence: Synthetic oligonucleotide
  misc_feature 1..20: note = Target: SCN10A; (+) strand; PAM type: NRG; PAM sequence: GAG
  source 1..20: mol_type = other DNA
aatgttgtcttccttgaggg

SEQ ID NO: 28629 - DNA, 20 bp, synthetic construct
  misc_feature 1..20: note = Description of Artificial Sequence: Synthetic oligonucleotide
  misc_feature 1..20: note = Target: SCN10A; (+) strand; PAM type: NRG; PAM sequence: AGG
  source 1..20: mol_type = other DNA
atgttgtcttccttgagggg

SEQ ID NO: 28630 - DNA, 20 bp, synthetic construct
  misc_feature 1..20: note = Description of Artificial Sequence: Synthetic oligonucleotide
  misc_feature 1..20: note = Target: SCN10A; (+) strand; PAM type: NRG; PAM sequence: AAG
  source 1..20: mol_type = other DNA
ttgtcttccttgaggggagg

SEQ ID NO: 28631 - DNA, 20 bp, synthetic construct
  misc_feature 1..20: note = Description of Artificial Sequence: Synthetic oligonucleotide
  misc_feature 1..20: note = Target: SCN10A; (+) strand; PAM type: NRG; PAM sequence: TGG
  source 1..20: mol_type = other DNA
tgaggggaggaagctttctt

SEQ ID NO: 28632 - DNA, 20 bp, synthetic construct
  misc_feature 1..20: note = Description of Artificial Sequence: Synthetic oligonucleotide
  misc_feature 1..20: note = Target: SCN10A; (+) strand; PAM type: NRG; PAM sequence: CAG
  source 1..20: mol_type = other DNA
ggggaggaagctttctttgg

SEQ ID NO: 28633 - DNA, 20 bp, synthetic construct
  misc_feature 1..20: note = Description of Artificial Sequence: Synthetic oligonucleotide
  misc_feature 1..20: note = Target: SCN10A; (+) strand; PAM type: NRG; PAM sequence: TGG
  source 1..20: mol_type = other DNA
aagctttctttggcagccta

SEQ ID NO: 28634 - DNA, 20 bp, synthetic construct
  misc_feature 1..20: note = Description of Artificial Sequence: Synthetic oligonucleotide
  misc_feature 1..20: note = Target: SCN10A; (+) strand; PAM type: NRG; PAM sequence: GGG
  source 1..20: mol_type = other DNA
agctttctttggcagcctat

SEQ ID NO: 28635 - DNA, 20 bp, synthetic construct
  misc_feature 1..20: note = Description of Artificial Sequence: Synthetic oligonucleotide
  misc_feature 1..20: note = Target: SCN10A; (+) strand; PAM type: NRG; PAM sequence: GGG
  source 1..20: mol_type = other DNA
gctttctttggcagcctatg

SEQ ID NO: 28636 - DNA, 20 bp, synthetic construct
  misc_feature 1..20: note = Description of Artificial Sequence: Synthetic oligonucleotide
  misc_feature 1..20: note = Target: SCN10A; (+) strand; PAM type: NRG; PAM sequence: TGG
  source 1..20: mol_type = other DNA
tctttggcagcctatggggt

SEQ ID NO: 28637 - DNA, 20 bp, synthetic construct
  misc_feature 1..20: note = Description of Artificial Sequence: Synthetic oligonucleotide
  misc_feature 1..20: note = Target: SCN10A; (+) strand; PAM type: NRG; PAM sequence: GGG
  source 1..20: mol_type = other DNA
ctttggcagcctatggggtt

SEQ ID NO: 28638 - DNA, 20 bp, synthetic construct
  misc_feature 1..20: note = Description of Artificial Sequence: Synthetic oligonucleotide
  misc_feature 1..20: note = Target: SCN10A; (+) strand; PAM type: NRG; PAM sequence: CAG
  source 1..20: mol_type = other DNA
cctatggggttgggtgatga

SEQ ID NO: 28639 - DNA, 20 bp, synthetic construct
  misc_feature 1..20: note = Description of Artificial Sequence: Synthetic oligonucleotide
  misc_feature 1..20: note = Target: SCN10A; (+) strand; PAM type: NRG; PAM sequence: AGG
  source 1..20: mol_type = other DNA
ctatggggttgggtgatgac

SEQ ID NO: 28640 - DNA, 20 bp, synthetic construct
  misc_feature 1..20: note = Description of Artificial Sequence: Synthetic oligonucleotide
  misc_feature 1..20: note = Target: SCN10A; (+) strand; PAM type: NRG; PAM sequence: GGG
  source 1..20: mol_type = other DNA
tatggggttgggtgatgaca

SEQ ID NO: 28641 - DNA, 20 bp, synthetic construct
  misc_feature 1..20: note = Description of Artificial Sequence: Synthetic oligonucleotide
  misc_feature 1..20: note = Target: SCN10A; (+) strand; PAM type: NRG; PAM sequence: AAG
  source 1..20: mol_type = other DNA
ggggttgggtgatgacaggg

SEQ ID NO: 28642 - DNA, 20 bp, synthetic construct
  misc_feature 1..20: note = Description of Artificial Sequence: Synthetic oligonucleotide
  misc_feature 1..20: note = Target: SCN10A; (+) strand; PAM type: NRG; PAM sequence: AAG
  source 1..20: mol_type = other DNA
gttgggtgatgacagggaag

SEQ ID NO: 28643 - DNA, 20 bp, synthetic construct
  misc_feature 1..20: note = Description of Artificial Sequence: Synthetic oligonucleotide
  misc_feature 1..20: note = Target: SCN10A; (+) strand; PAM type: NRG; PAM sequence: TGG
  source 1..20: mol_type = other DNA
ggtgatgacagggaagaagc

SEQ ID NO: 28644 - DNA, 20 bp, synthetic construct
  misc_feature 1..20: note = Description of Artificial Sequence: Synthetic oligonucleotide
  misc_feature 1..20: note = Target: SCN10A; (+) strand; PAM type: NRG; PAM sequence: GGG
  source 1..20: mol_type = other DNA
gtgatgacagggaagaagct

SEQ ID NO: 28645 - DNA, 20 bp, synthetic construct
  misc_feature 1..20: note = Description of Artificial Sequence: Synthetic oligonucleotide
  misc_feature 1..20: note = Target: SCN10A; (+) strand; PAM type: NRG; PAM sequence: AAG
  source 1..20: mol_type = other DNA
gggaagaagctgggatgtca

SEQ ID NO: 28646 - DNA, 20 bp, synthetic construct
  misc_feature 1..20: note = Description of Artificial Sequence: Synthetic oligonucleotide
  misc_feature 1..20: note = Target: SCN10A; (+) strand; PAM type: NRG; PAM sequence: GAG
  source 1..20: mol_type = other DNA
gaagaagctgggatgtcaaa

SEQ ID NO: 28647 - DNA, 20 bp, synthetic construct
  misc_feature 1..20: note = Description of Artificial Sequence: Synthetic oligonucleotide
  misc_feature 1..20: note = Target: SCN10A; (+) strand; PAM type: NRG; PAM sequence: GAG
  source 1..20: mol_type = other DNA
agaagctgggatgtcaaaga

SEQ ID NO: 28648 - DNA, 20 bp, synthetic construct
  misc_feature 1..20: note = Description of Artificial Sequence: Synthetic oligonucleotide
  misc_feature 1..20: note = Target: SCN10A; (+) strand; PAM type: NRG; PAM sequence: GAG
  source 1..20: mol_type = other DNA
tgggatgtcaaagagagatt

SEQ ID NO: 28649 - DNA, 20 bp, synthetic construct
  misc_feature 1..20: note = Description of Artificial Sequence: Synthetic oligonucleotide
  misc_feature 1..20: note = Target: SCN10A; (+) strand; PAM type: NRG; PAM sequence: TAG
  source 1..20: mol_type = other DNA
gatgtcaaagagagattgag

SEQ ID NO: 28650 - DNA, 20 bp, synthetic construct
  misc_feature 1..20: note = Description of Artificial Sequence: Synthetic oligonucleotide
  misc_feature 1..20: note = Target: SCN10A; (+) strand; PAM type: NRG; PAM sequence: TGG
  source 1..20: mol_type = other DNA
aagagagattgagtagtatg

SEQ ID NO: 28651 - DNA, 20 bp, synthetic construct
  misc_feature 1..20: note = Description of Artificial Sequence: Synthetic oligonucleotide
  misc_feature 1..20: note = Target: SCN10A; (+) strand; PAM type: NRG; PAM sequence: GGG
  source 1..20: mol_type = other DNA
agagagattgagtagtatgt

SEQ ID NO: 28652 - DNA, 20 bp, synthetic construct
  misc_feature 1..20: note = Description of Artificial Sequence: Synthetic oligonucleotide
  misc_feature 1..20: note = Target: SCN10A; (+) strand; PAM type: NRG; PAM sequence: GGG
  source 1..20: mol_type = other DNA
gagagattgagtagtatgtg

SEQ ID NO: 28653 - DNA, 20 bp, synthetic construct
  misc_feature 1..20: note = Description of Artificial Sequence: Synthetic oligonucleotide
  misc_feature 1..20: note = Target: SCN10A; (+) strand; PAM type: NRG; PAM sequence: GGG
  source 1..20: mol_type = other DNA
agagattgagtagtatgtgg

SEQ ID NO: 28654 - DNA, 20 bp, synthetic construct
  misc_feature 1..20: note = Description of Artificial Sequence: Synthetic oligonucleotide
  misc_feature 1..20: note = Target: SCN10A; (+) strand; PAM type: NRG; PAM sequence: AAG
  source 1..20: mol_type = other DNA
gattgagtagtatgtggggg

SEQ ID NO: 28655 - DNA, 20 bp, synthetic construct
  misc_feature 1..20: note = Description of Artificial Sequence: Synthetic oligonucleotide
  misc_feature 1..20: note = Target: SCN10A; (+) strand; PAM type: NRG; PAM sequence: AGG
  source 1..20: mol_type = other DNA
attgagtagtatgtggggga

SEQ ID NO: 28656 - DNA, 20 bp, synthetic construct
  misc_feature 1..20: note = Description of Artificial Sequence: Synthetic oligonucleotide
  misc_feature 1..20: note = Target: SCN10A; (+) strand; PAM type: NRG; PAM sequence: AAG
  source 1..20: mol_type = other DNA
aaaactttcatgtttttgcc

SEQ ID NO: 28657 - DNA, 20 bp, synthetic construct
  misc_feature 1..20: note = Description of Artificial Sequence: Synthetic oligonucleotide
  misc_feature 1..20: note = Target: SCN10A; (+) strand; PAM type: NRG; PAM sequence: AGG
  source 1..20: mol_type = other DNA
aaactttcatgtttttgcca

SEQ ID NO: 28658 - DNA, 20 bp, synthetic construct
  misc_feature 1..20: note = Description of Artificial Sequence: Synthetic oligonucleotide
  misc_feature 1..20: note = Target: SCN10A; (+) strand; PAM type: NRG; PAM sequence: GGG
  source 1..20: mol_type = other DNA
aactttcatgtttttgccaa

SEQ ID NO: 28659 - DNA, 20 bp, synthetic construct
  misc_feature 1..20: note = Description of Artificial Sequence: Synthetic oligonucleotide
  misc_feature 1..20: note = Target: SCN10A; (+) strand; PAM type: NRG; PAM sequence: TAG
  source 1..20: mol_type = other DNA
tttttgccaagggttgtccc

SEQ ID NO: 28660 - DNA, 20 bp, synthetic construct
  misc_feature 1..20: note = Description of Artificial Sequence: Synthetic oligonucleotide
  misc_feature 1..20: note = Target: SCN10A; (+) strand; PAM type: NRG; PAM sequence: TGG
  source 1..20: mol_type = other DNA
gtccctagcacacacctcct

SEQ ID NO: 28661 - DNA, 20 bp, synthetic construct
  misc_feature 1..20: note = Description of Artificial Sequence: Synthetic oligonucleotide
  misc_feature 1..20: note = Target: SCN10A; (+) strand; PAM type: NRG; PAM sequence: TGG
  source 1..20: mol_type = other DNA
gcacacacctccttggcatc

SEQ ID NO: 28662 - DNA, 20 bp, synthetic construct
  misc_feature 1..20: note = Description of Artificial Sequence: Synthetic oligonucleotide
  misc_feature 1..20: note = Target: SCN10A; (+) strand; PAM type: NRG; PAM sequence: TGG
  source 1..20: mol_type = other DNA
cttggcatctggctcaaatg

SEQ ID NO: 28663 - DNA, 20 bp, synthetic construct
  misc_feature 1..20: note = Description of Artificial Sequence: Synthetic oligonucleotide
  misc_feature 1..20: note = Target: SCN10A; (+) strand; PAM type: NRG; PAM sequence: CAG
  source 1..20: mol_type = other DNA
atgtggattcaatcttactc

SEQ ID NO: 28664 - DNA, 20 bp, synthetic construct
  misc_feature 1..20: note = Description of Artificial Sequence: Synthetic oligonucleotide
  misc_feature 1..20: note = Target: SCN10A; (+) strand; PAM type: NRG; PAM sequence: AAG
  source 1..20: mol_type = other DNA
ttcaatcttactccagccac

SEQ ID NO: 28665 - DNA, 20 bp, synthetic construct
  misc_feature 1..20: note = Description of Artificial Sequence: Synthetic oligonucleotide
  misc_feature 1..20: note = Target: SCN10A; (+) strand; PAM type: NRG; PAM sequence: AAG
  source 1..20: mol_type = other DNA
tcttactccagccacaagta

SEQ ID NO: 28666 - DNA, 20 bp, synthetic construct
  misc_feature 1..20: note = Description of Artificial Sequence: Synthetic oligonucleotide
  misc_feature 1..20: note = Target: SCN10A; (+) strand; PAM type: NRG; PAM sequence: AGG
  source 1..20: mol_type = other DNA
cttactccagccacaagtaa

SEQ ID NO: 28667 - DNA, 20 bp, synthetic construct
  misc_feature 1..20: note = Description of Artificial Sequence: Synthetic oligonucleotide
  misc_feature 1..20: note = Target: SCN10A; (+) strand; PAM type: NRG; PAM sequence: CAG
  source 1..20: mol_type = other DNA
ctccagccacaagtaaaggc

SEQ ID NO: 28668 - DNA, 20 bp, synthetic construct
  misc_feature 1..20: note = Description of Artificial Sequence: Synthetic oligonucleotide
  misc_feature 1..20: note = Target: SCN10A; (+) strand; PAM type: NRG; PAM sequence: TGG
  source 1..20: mol_type = other DNA
gccacaagtaaaggccagtg

SEQ ID NO: 28669 - DNA, 20 bp, synthetic construct
  misc_feature 1..20: note = Description of Artificial Sequence: Synthetic oligonucleotide
  misc_feature 1..20: note = Target: SCN10A; (+) strand; PAM type: NRG; PAM sequence: CAG
  source 1..20: mol_type = other DNA
agtaaaggccagtgtggact

SEQ ID NO: 28670 - DNA, 20 bp, synthetic construct
  misc_feature 1..20: note = Description of Artificial Sequence: Synthetic oligonucleotide
  misc_feature 1..20: note = Target: SCN10A; (+) strand; PAM type: NRG; PAM sequence: CAG
  source 1..20: mol_type = other DNA
ggactcagctgcttgcttct

SEQ ID NO: 28671 - DNA, 20 bp, synthetic construct
  misc_feature 1..20: note = Description of Artificial Sequence: Synthetic oligonucleotide
  misc_feature 1..20: note = Target: SCN10A; (+) strand; PAM type: NRG; PAM sequence: AAG
  source 1..20: mol_type = other DNA
tcagctgcttgcttctcagt

SEQ ID NO: 28672 - DNA, 20 bp, synthetic construct
  misc_feature 1..20: note = Description of Artificial Sequence: Synthetic oligonucleotide
  misc_feature 1..20: note = Target: SCN10A; (+) strand; PAM type: NRG; PAM sequence: TAG
  source 1..20: mol_type = other DNA
gcttgcttctcagtaagtct

SEQ ID NO: 28673 - DNA, 20 bp, synthetic construct
  misc_feature 1..20: note = Description of Artificial Sequence: Synthetic oligonucleotide
  misc_feature 1..20: note = Target: SCN10A; (+) strand; PAM type: NRG; PAM sequence: AGG
  source 1..20: mol_type = other DNA
cttgcttctcagtaagtctt

SEQ ID NO: 28674 - DNA, 20 bp, synthetic construct
  misc_feature 1..20: note = Description of Artificial Sequence: Synthetic oligonucleotide
  misc_feature 1..20: note = Target: SCN10A; (+) strand; PAM type: NRG; PAM sequence: GGG
  source 1..20: mol_type = other DNA
ttgcttctcagtaagtctta

SEQ ID NO: 28675 - DNA, 20 bp, synthetic construct
  misc_feature 1..20: note = Description of Artificial Sequence: Synthetic oligonucleotide
  misc_feature 1..20: note = Target: SCN10A; (+) strand; PAM type: NRG; PAM sequence: TGG
  source 1..20: mol_type = other DNA
cattacccatgacttgaatg

SEQ ID NO: 28676 - DNA, 20 bp, synthetic construct
  misc_feature 1..20: note = Description of Artificial Sequence: Synthetic oligonucleotide
  misc_feature 1..20: note = Target: SCN10A; (+) strand; PAM type: NRG; PAM sequence: TGG
  source 1..20: mol_type = other DNA
acccatgacttgaatgtggt

SEQ ID NO: 28677 - DNA, 20 bp, synthetic construct
  misc_feature 1..20: note = Description of Artificial Sequence: Synthetic oligonucleotide
  misc_feature 1..20: note = Target: SCN10A; (+) strand; PAM type: NRG; PAM sequence: GGG
  source 1..20: mol_type = other DNA
cccatgacttgaatgtggtt

SEQ ID NO: 28678 - DNA, 20 bp, synthetic construct
  misc_feature 1..20: note = Description of Artificial Sequence: Synthetic oligonucleotide
  misc_feature 1..20: note = Target: SCN10A; (+) strand; PAM type: NRG; PAM sequence: CAG
  source 1..20: mol_type = other DNA
acttgaatgtggttgggact

SEQ ID NO: 28679 - DNA, 20 bp, synthetic construct
  misc_feature 1..20: note = Description of Artificial Sequence: Synthetic oligonucleotide
  misc_feature 1..20: note = Target: SCN10A; (+) strand; PAM type: NRG; PAM sequence: GAG
  source 1..20: mol_type = other DNA
tttcacctaattttaatttt

SEQ ID NO: 28680 - DNA, 20 bp, synthetic construct
  misc_feature 1..20: note = Description of Artificial Sequence: Synthetic oligonucleotide
  misc_feature 1..20: note = Target: SCN10A; (+) strand; PAM type: NRG; PAM sequence: TGG
  source 1..20: mol_type = other DNA
ctctccactgaacttgttga

SEQ ID NO: 28681 - DNA, 20 bp, synthetic construct
  misc_feature 1..20: note = Description of Artificial Sequence: Synthetic oligonucleotide
  misc_feature 1..20: note = Target: SCN10A; (+) strand; PAM type: NRG; PAM sequence: GAG
  source 1..20: mol_type = other DNA
ctccactgaacttgttgatg

SEQ ID NO: 28682 - DNA, 20 bp, synthetic construct
  misc_feature 1..20: note = Description of Artificial Sequence: Synthetic oligonucleotide
  misc_feature 1..20: note = Target: SCN10A; (+) strand; PAM type: NRG; PAM sequence: AGG
  source 1..20: mol_type = other DNA
tccactgaacttgttgatgg

SEQ ID NO: 28683 - DNA, 20 bp, synthetic construct
  misc_feature 1..20: note = Description of Artificial Sequence: Synthetic oligonucleotide
  misc_feature 1..20: note = Target: SCN10A; (+) strand; PAM type: NRG; PAM sequence: GGG
  source 1..20: mol_type = other DNA
ccactgaacttgttgatgga

SEQ ID NO: 28684 - DNA, 20 bp, synthetic construct
  misc_feature 1..20: note = Description of Artificial Sequence: Synthetic oligonucleotide
  misc_feature 1..20: note = Target: SCN10A; (+) strand; PAM type: NRG; PAM sequence: GAG
  source 1..20: mol_type = other DNA
ttgatggagggatactcaat

SEQ ID NO: 28685 - DNA, 20 bp, synthetic construct
  misc_feature 1..20: note = Description of Artificial Sequence: Synthetic oligonucleotide
  misc_feature 1..20: note = Target: SCN10A; (+) strand; PAM type: NRG; PAM sequence: AAG
  source 1..20: mol_type = other DNA
gagggatactcaatgagcct

SEQ ID NO: 28686 - DNA, 20 bp, synthetic construct
  misc_feature 1..20: note = Description of Artificial Sequence: Synthetic oligonucleotide
  misc_feature 1..20: note = Target: SCN10A; (+) strand; PAM type: NRG; PAM sequence: AGG
  source 1..20: mol_type = other DNA
agggatactcaatgagccta

SEQ ID NO: 28687 - DNA, 20 bp, synthetic construct
  misc_feature 1..20: note = Description of Artificial Sequence: Synthetic oligonucleotide
  misc_feature 1..20: note = Target: SCN10A; (+) strand; PAM type: NRG; PAM sequence: CAG
  source 1..20: mol_type = other DNA
tgagcctaaggacttttgct

SEQ ID NO: 28688 - DNA, 20 bp, synthetic construct
  misc_feature 1..20: note = Description of Artificial Sequence: Synthetic oligonucleotide
  misc_feature 1..20: note = Target: SCN10A; (+) strand; PAM type: NRG; PAM sequence: AGG
  source 1..20: mol_type = other DNA
gagcctaaggacttttgctc

SEQ ID NO: 28689 - DNA, 20 bp, synthetic construct
  misc_feature 1..20: note = Description of Artificial Sequence: Synthetic oligonucleotide
  misc_feature 1..20: note = Target: SCN10A; (+) strand; PAM type: NRG; PAM sequence: CAG
  source 1..20: mol_type = other DNA
tgctcaggttcactcaaatc

SEQ ID NO: 28690 - DNA, 20 bp, synthetic construct
  misc_feature 1..20: note = Description of Artificial Sequence: Synthetic oligonucleotide
  misc_feature 1..20: note = Target: SCN10A; (+) strand; PAM type: NRG; PAM sequence: TGG
  source 1..20: mol_type = other DNA
atccagttatcttgattgta

SEQ ID NO: 28691 - DNA, 20 bp, synthetic construct
  misc_feature 1..20: note = Description of Artificial Sequence: Synthetic oligonucleotide
  misc_feature 1..20: note = Target: SCN10A; (+) strand; PAM type: NRG; PAM sequence: GGG
  source 1..20: mol_type = other DNA
tccagttatcttgattgtat

SEQ ID NO: 28692 - DNA, 20 bp, synthetic construct
  misc_feature 1..20: note = Description of Artificial Sequence: Synthetic oligonucleotide
  misc_feature 1..20: note = Target: SCN10A; (+) strand; PAM type: NRG; PAM sequence: TAG
  source 1..20: mol_type = other DNA
tcttgattgtatgggtgatt

SEQ ID NO: 28693 - DNA, 20 bp, synthetic construct
  misc_feature 1..20: note = Description of Artificial Sequence: Synthetic oligonucleotide
  misc_feature 1..20: note = Target: SCN10A; (+) strand; PAM type: NRG; PAM sequence: AGG
  source 1..20: mol_type = other DNA
cttgattgtatgggtgattt

SEQ ID NO: 28694 - DNA, 20 bp, synthetic construct
  misc_feature 1..20: note = Description of Artificial Sequence: Synthetic oligonucleotide
  misc_feature 1..20: note = Target: SCN10A; (+) strand; PAM type: NRG; PAM sequence: AAG
  source 1..20: mol_type = other DNA
gattgtatgggtgatttagg

SEQ ID NO: 28695 - DNA, 20 bp, synthetic construct
  misc_feature 1..20: note = Description of Artificial Sequence: Synthetic oligonucleotide
  misc_feature 1..20: note = Target: SCN10A; (+) strand; PAM type: NRG; PAM sequence: AAG
  source 1..20: mol_type = other DNA
gtatgggtgatttaggaaga

SEQ ID NO: 28696 - DNA, 20 bp, synthetic construct
  misc_feature 1..20: note = Description of Artificial Sequence: Synthetic oligonucleotide
  misc_feature 1..20: note = Target: SCN10A; (+) strand; PAM type: NRG; PAM sequence: CAG
  source 1..20: mol_type = other DNA
ggaagaaagctgtgccccta

SEQ ID NO: 28697 - DNA, 20 bp, synthetic construct
  misc_feature 1..20: note = Description of Artificial Sequence: Synthetic oligonucleotide
  misc_feature 1..20: note = Target: SCN10A; (+) strand; PAM type: NRG; PAM sequence: GAG
  source 1..20: mol_type = other DNA
aagaaagctgtgcccctaca

SEQ ID NO: 28698 - DNA, 20 bp, synthetic construct
  misc_feature 1..20: note = Description of Artificial Sequence: Synthetic oligonucleotide
  misc_feature 1..20: note = Target: SCN10A; (+) strand; PAM type: NRG; PAM sequence: AGG
  source 1..20: mol_type = other DNA
agaaagctgtgcccctacag

SEQ ID NO: 28699 - DNA, 20 bp, synthetic construct
  misc_feature 1..20: note = Description of Artificial Sequence: Synthetic oligonucleotide
  misc_feature 1..20: note = Target: SCN10A; (+) strand; PAM type: NRG; PAM sequence: CAG
  source 1..20: mol_type = other DNA
cccattgtaatacttcttat

SEQ ID NO: 28700 - DNA, 20 bp, synthetic construct
  misc_feature 1..20: note = Description of Artificial Sequence: Synthetic oligonucleotide
  misc_feature 1..20: note = Target: SCN10A; (+) strand; PAM type: NRG; PAM sequence: TAG
  source 1..20: mol_type = other DNA
taatacttcttatcagaatc

SEQ ID NO: 28701 - DNA, 20 bp, synthetic construct
  misc_feature 1..20: note = Description of Artificial Sequence: Synthetic oligonucleotide
  misc_feature 1..20: note = Target: SCN10A; (+) strand; PAM type: NRG; PAM sequence: TAG
  source 1..20: mol_type = other DNA
cttcttatcagaatctagac

SEQ ID NO: 28702 - DNA, 20 bp, synthetic construct
  misc_feature 1..20: note = Description of Artificial Sequence: Synthetic oligonucleotide
  misc_feature 1..20: note = Target: SCN10A; (+) strand; PAM type: NRG; PAM sequence: CAG
  source 1..20: mol_type = other DNA
atgaccactatttcaaaata

SEQ ID NO: 28703 - DNA, 20 bp, synthetic construct
  misc_feature 1..20: note = Description of Artificial Sequence: Synthetic oligonucleotide
  misc_feature 1..20: note = Target: SCN10A; (+) strand; PAM type: NRG; PAM sequence: AAG
  source 1..20: mol_type = other DNA
atttcaaaatacagtgtcaa

SEQ ID NO: 28704 - DNA, 20 bp, synthetic construct
  misc_feature 1..20: note = Description of Artificial Sequence: Synthetic oligonucleotide
  misc_feature 1..20: note = Target: SCN10A; (+) strand; PAM type: NRG; PAM sequence: AAG
  source 1..20: mol_type = other DNA
tttttcactttgttctgaca

SEQ ID NO: 28705 - DNA, 20 bp, synthetic construct
  misc_feature 1..20: note = Description of Artificial Sequence: Synthetic oligonucleotide
  misc_feature 1..20: note = Target: SCN10A; (+) strand; PAM type: NRG; PAM sequence: AAG
  source 1..20: mol_type = other DNA
ctttgttctgacaaagtttg

SEQ ID NO: 28706 - DNA, 20 bp, synthetic construct
  misc_feature 1..20: note = Description of Artificial Sequence: Synthetic oligonucleotide
  misc_feature 1..20: note = Target: SCN10A; (+) strand; PAM type: NRG; PAM sequence: TAG
  source 1..20: mol_type = other DNA
cttgatttaaaaaaatctaa

SEQ ID NO: 28707 - DNA, 20 bp, synthetic construct
  misc_feature 1..20: note = Description of Artificial Sequence: Synthetic oligonucleotide
  misc_feature 1..20: note = Target: SCN10A; (+) strand; PAM type: NRG; PAM sequence: TGG
  source 1..20: mol_type = other DNA
tttaaaaaaatctaatagct

SEQ ID NO: 28708 - DNA, 20 bp, synthetic construct
  misc_feature 1..20: note = Description of Artificial Sequence: Synthetic oligonucleotide
  misc_feature 1..20: note = Target: SCN10A; (+) strand; PAM type: NRG; PAM sequence: CAG
  source 1..20: mol_type = other DNA
aaatctaatagcttggctaa

SEQ ID NO: 28709 - DNA, 20 bp, synthetic construct
  misc_feature 1..20: note = Description of Artificial Sequence: Synthetic oligonucleotide
  misc_feature 1..20: note = Target: SCN10A; (+) strand; PAM type: NRG; PAM sequence: TAG
  source 1..20: mol_type = other DNA
gcatgtctccataattcatt

SEQ ID NO: 28710 - DNA, 20 bp, synthetic construct
  misc_feature 1..20: note = Description of Artificial Sequence: Synthetic oligonucleotide
  misc_feature 1..20: note = Target: SCN10A; (+) strand; PAM type: NRG; PAM sequence: AGG
  source 1..20: mol_type = other DNA
catgtctccataattcattt

SEQ ID NO: 28711 - DNA, 20 bp, synthetic construct
  misc_feature 1..20: note = Description of Artificial Sequence: Synthetic oligonucleotide
  misc_feature 1..20: note = Target: SCN10A; (+) strand; PAM type: NRG; PAM sequence: GGG
  source 1..20: mol_type = other DNA
atgtctccataattcattta

SEQ ID NO: 28712 - DNA, 20 bp, synthetic construct
  misc_feature 1..20: note = Description of Artificial Sequence: Synthetic oligonucleotide
  misc_feature 1..20: note = Target: SCN10A; (+) strand; PAM type: NRG; PAM sequence: AAG
  source 1..20: mol_type = other DNA
ctccataattcatttaggga

SEQ ID NO: 28713 - DNA, 20 bp, synthetic construct
  misc_feature 1..20: note = Description of Artificial Sequence: Synthetic oligonucleotide
  misc_feature 1..20: note = Target: SCN10A; (+) strand; PAM type: NRG; PAM sequence: AGG
  source 1..20: mol_type = other DNA
tccataattcatttagggaa

SEQ ID NO: 28714 - DNA, 20 bp, synthetic construct
  misc_feature 1..20: note = Description of Artificial Sequence: Synthetic oligonucleotide
  misc_feature 1..20: note = Target: SCN10A; (+) strand; PAM type: NRG; PAM sequence: TGG
  source 1..20: mol_type = other DNA
ttcctttgttaaatgtcctt

SEQ ID NO: 28715 - DNA, 20 bp, synthetic construct
  misc_feature 1..20: note = Description of Artificial Sequence: Synthetic oligonucleotide
  misc_feature 1..20: note = Target: SCN10A; (+) strand; PAM type: NRG; PAM sequence: TGG
  source 1..20: mol_type = other DNA
ctttggacttttcccttgtg

SEQ ID NO: 28716 - DNA, 20 bp, synthetic construct
  misc_feature 1..20: note = Description of Artificial Sequence: Synthetic oligonucleotide
  misc_feature 1..20: note = Target: SCN10A; (+) strand; PAM type: NRG; PAM sequence: GGG
  source 1..20: mol_type = other DNA
tttggacttttcccttgtgt

SEQ ID NO: 28717 - DNA, 20 bp, synthetic construct
  misc_feature 1..20: note = Description of Artificial Sequence: Synthetic oligonucleotide
  misc_feature 1..20: note = Target: SCN10A; (+) strand; PAM type: NRG; PAM sequence: GGG
  source 1..20: mol_type = other DNA
ttggacttttcccttgtgtg

SEQ ID NO: 28718 - DNA, 20 bp, synthetic construct
  misc_feature 1..20: note = Description of Artificial Sequence: Synthetic oligonucleotide
  misc_feature 1..20: note = Target: SCN10A; (+) strand; PAM type: NRG; PAM sequence: AAG
  source 1..20: mol_type = other DNA
gacttttcccttgtgtgggg

SEQ ID NO: 28719 - DNA, 20 bp, synthetic construct
  misc_feature 1..20: note = Description of Artificial Sequence: Synthetic oligonucleotide
  misc_feature 1..20: note = Target: SCN10A; (+) strand; PAM type: NRG; PAM sequence: AGG
  source 1..20: mol_type = other DNA
acttttcccttgtgtgggga

SEQ ID NO: 28720 - DNA, 20 bp, synthetic construct
  misc_feature 1..20: note = Description of Artificial Sequence: Synthetic oligonucleotide
  misc_feature 1..20: note = Target: SCN10A; (+) strand; PAM type: NRG; PAM sequence: GGG
  source 1..20: mol_type = other DNA
cttttcccttgtgtggggaa

SEQ ID NO: 28721 - DNA, 20 bp, synthetic construct
  misc_feature 1..20: note = Description of Artificial Sequence: Synthetic oligonucleotide
  misc_feature 1..20: note = Target: SCN10A; (+) strand; PAM type: NRG; PAM sequence: CAG
  source 1..20: mol_type = other DNA
ggctaatgaaattgtgtcat

SEQ ID NO: 28722 - DNA, 20 bp, synthetic construct
  misc_feature 1..20: note = Description of Artificial Sequence: Synthetic oligonucleotide
  misc_feature 1..20: note = Target: SCN10A; (+) strand; PAM type: NRG; PAM sequence: TAG
  source 1..20: mol_type = other DNA
tcttcactaatgctgcatct

SEQ ID NO: 28723 - DNA, 20 bp, synthetic construct
  misc_feature 1..20: note = Description of Artificial Sequence: Synthetic oligonucleotide
  misc_feature 1..20: note = Target: SCN10A; (+) strand; PAM type: NRG; PAM sequence: CAG
  source 1..20: mol_type = other DNA
ctaatgctgcatcttagcca

SEQ ID NO: 28724 - DNA, 20 bp, synthetic construct
  misc_feature 1..20: note = Description of Artificial Sequence: Synthetic oligonucleotide
  misc_feature 1..20: note = Target: SCN10A; (+) strand; PAM type: NRG; PAM sequence: AAG
  source 1..20: mol_type = other DNA
tgctgcatcttagccacaga

SEQ ID NO: 28725 - DNA, 20 bp, synthetic construct
  misc_feature 1..20: note = Description of Artificial Sequence: Synthetic oligonucleotide
  misc_feature 1..20: note = Target: SCN10A; (+) strand; PAM type: NRG; PAM sequence: TAG
  source 1..20: mol_type = other DNA
ttagccacagaaagtttatg

SEQ ID NO: 28726 - DNA, 20 bp, synthetic construct
  misc_feature 1..20: note = Description of Artificial Sequence: Synthetic oligonucleotide
  misc_feature 1..20: note = Target: SCN10A; (+) strand; PAM type: NRG; PAM sequence: AAG
  source 1..20: mol_type = other DNA
gccacagaaagtttatgtag

SEQ ID NO: 28727 - DNA, 20 bp, synthetic construct
  misc_feature 1..20: note = Description of Artificial Sequence: Synthetic oligonucleotide
  misc_feature 1..20: note = Target: SCN10A; (+) strand; PAM type: NRG; PAM sequence: AGG
  source 1..20: mol_type = other DNA
ccacagaaagtttatgtaga

SEQ ID NO: 28728 - DNA, 20 bp, synthetic construct
  misc_feature 1..20: note = Description of Artificial Sequence: Synthetic oligonucleotide
  misc_feature 1..20: note = Target: SCN10A; (+) strand; PAM type: NRG; PAM sequence: CAG
  source 1..20: mol_type = other DNA
aaagtttatgtagaaggaca

SEQ ID NO: 28729 - DNA, 20 bp, synthetic construct
  misc_feature 1..20: note = Description of Artificial Sequence: Synthetic oligonucleotide
  misc_feature 1..20: note = Target: SCN10A; (+) strand; PAM type: NRG; PAM sequence: AGG
  source 1..20: mol_type = other DNA
aagtttatgtagaaggacac

SEQ ID NO: 28730 - DNA, 20 bp, synthetic construct
  misc_feature 1..20: note = Description of Artificial Sequence: Synthetic oligonucleotide
  misc_feature 1..20: note = Target: SCN10A; (+) strand; PAM type: NRG; PAM sequence: GGG
  source 1..20: mol_type = other DNA
agtttatgtagaaggacaca

SEQ ID NO: 28731 - DNA, 20 bp, synthetic construct
  misc_feature 1..20: note = Description of Artificial Sequence: Synthetic oligonucleotide
  misc_feature 1..20: note = Target: SCN10A; (+) strand; PAM type: NRG; PAM sequence: TGG
  source 1..20: mol_type = other DNA
acagggccaattccattcac

SEQ ID NO: 28732 - DNA, 20 bp, synthetic construct
  misc_feature 1..20: note = Description of Artificial Sequence: Synthetic oligonucleotide
  misc_feature 1..20: note = Target: SCN10A; (+) strand; PAM type: NRG; PAM sequence: GAG
  source 1..20: mol_type = other DNA
agggccaattccattcactg

SEQ ID NO: 28733 - DNA, 20 bp, synthetic construct
  misc_feature 1..20: note = Description of Artificial Sequence: Synthetic oligonucleotide
  misc_feature 1..20: note = Target: SCN10A; (+) strand; PAM type: NRG; PAM sequence: TGG
  source 1..20: mol_type = other DNA
gccaattccattcactggag

SEQ ID NO: 28734 - DNA, 20 bp, synthetic construct
  misc_feature 1..20: note = Description of Artificial Sequence: Synthetic oligonucleotide
  misc_feature 1..20: note = Target: SCN10A; (+) strand; PAM type: NRG; PAM sequence: TGG
  source 1..20: mol_type = other DNA
attccattcactggagtgga

SEQ ID NO: 28735 - DNA, 20 bp, synthetic construct
  misc_feature 1..20: note = Description of Artificial Sequence: Synthetic oligonucleotide
  misc_feature 1..20: note = Target: SCN10A; (+) strand; PAM type: NRG; PAM sequence: CAG
  source 1..20: mol_type = other DNA
attcactggagtggatggct

SEQ ID NO: 28736 - DNA, 20 bp, synthetic construct
  misc_feature 1..20: note = Description of Artificial Sequence: Synthetic oligonucleotide
  misc_feature 1..20: note = Target: SCN10A; (+) strand; PAM type: NRG; PAM sequence: AAG
  source 1..20: mol_type = other DNA
gatggctcagaaattctttg

SEQ ID NO: 28737 - DNA, 20 bp, synthetic construct
  misc_feature 1..20: note = Description of Artificial Sequence: Synthetic oligonucleotide
  misc_feature 1..20: note = Target: SCN10A; (+) strand; PAM type: NRG; PAM sequence: AAG
  source 1..20: mol_type = other DNA
ctgttcatccattcccaaaa

SEQ ID NO: 28738 - DNA, 20 bp, synthetic construct
  misc_feature 1..20: note = Description of Artificial Sequence: Synthetic oligonucleotide
  misc_feature 1..20: note = Target: SCN10A; (+) strand; PAM type: NRG; PAM sequence: TAG
  source 1..20: mol_type = other DNA
ttcccaaaaaagtgctatct

SEQ ID NO: 28739 - DNA, 20 bp, synthetic construct
  misc_feature 1..20: note = Description of Artificial Sequence: Synthetic oligonucleotide
  misc_feature 1..20: note = Target: SCN10A; (+) strand; PAM type: NRG; PAM sequence: AGG
  source 1..20: mol_type = other DNA
tcccaaaaaagtgctatctt

SEQ ID NO: 28740 - DNA, 20 bp, synthetic construct
  misc_feature 1..20: note = Description of Artificial Sequence: Synthetic oligonucleotide
  misc_feature 1..20: note = Target: SCN10A; (+) strand; PAM type: NRG; PAM sequence: GGG
  source 1..20: mol_type = other DNA
cccaaaaaagtgctatctta

SEQ ID NO: 28741 - DNA, 20 bp, synthetic construct
  misc_feature 1..20: note = Description of Artificial Sequence: Synthetic oligonucleotide
  misc_feature 1..20: note = Target: SCN10A; (+) strand; PAM type: NRG; PAM sequence: CAG
  source 1..20: mol_type = other DNA
agtgctatcttagggcctct

SEQ ID NO: 28742 - DNA, 20 bp, synthetic construct
  misc_feature 1..20: note = Description of Artificial Sequence: Synthetic oligonucleotide
  misc_feature 1..20: note = Target: SCN10A; (+) strand; PAM type: NRG; PAM sequence: GAG
  source 1..20: mol_type = other DNA
tgctatcttagggcctctca

SEQ ID NO: 28743 - DNA, 20 bp, synthetic construct
  misc_feature 1..20: note = Description of Artificial Sequence: Synthetic oligonucleotide
  misc_feature 1..20: note = Target: SCN10A; (+) strand; PAM type: NRG; PAM sequence: AGG
  source 1..20: mol_type = other DNA
gctatcttagggcctctcag

SEQ ID NO: 28744 - DNA, 20 bp, synthetic construct
  misc_feature 1..20: note = Description of Artificial Sequence: Synthetic oligonucleotide
  misc_feature 1..20: note = Target: SCN10A; (+) strand; PAM type: NRG; PAM sequence: TGG
  source 1..20: mol_type = other DNA
gcttgatgttttctatcttc

SEQ ID NO: 28745 - DNA, 20 bp, synthetic construct
  misc_feature 1..20: note = Description of Artificial Sequence: Synthetic oligonucleotide
  misc_feature 1..20: note = Target: SCN10A; (+) strand; PAM type: NRG; PAM sequence: CAG
  source 1..20: mol_type = other DNA
tgatgttttctatcttctgg

SEQ ID NO: 28746 - DNA, 20 bp, synthetic construct
  misc_feature 1..20: note = Description of Artificial Sequence: Synthetic oligonucleotide
  misc_feature 1..20: note = Target: SCN10A; (+) strand; PAM type: NRG; PAM sequence: AAG
  source 1..20: mol_type = other DNA
tgttttctatcttctggcag

SEQ ID NO: 28747 - DNA, 20 bp, synthetic construct
  misc_feature 1..20: note = Description of Artificial Sequence: Synthetic oligonucleotide
  misc_feature 1..20: note = Target: SCN10A; (+) strand; PAM type: NRG; PAM sequence: GAG
  source 1..20: mol_type = other DNA
ctatcttctggcagaagact

SEQ ID NO: 28748 - DNA, 20 bp, synthetic construct
  misc_feature 1..20: note = Description of Artificial Sequence: Synthetic oligonucleotide
  misc_feature 1..20: note = Target: SCN10A; (+) strand; PAM type: NRG; PAM sequence: AAG
  source 1..20: mol_type = other DNA
tcttctggcagaagactgag

SEQ ID NO: 28749 - DNA, 20 bp, synthetic construct
  misc_feature 1..20: note = Description of Artificial Sequence: Synthetic oligonucleotide
  misc_feature 1..20: note = Target: SCN10A; (+) strand; PAM type: NRG; PAM sequence: TAG
  source 1..20: mol_type = other DNA
gcagaagactgagaagaact

SEQ ID NO: 28750 - DNA, 20 bp, synthetic construct
  misc_feature 1..20: note = Description of Artificial Sequence: Synthetic oligonucleotide
  misc_feature 1..20: note = Target: SCN10A; (+) strand; PAM type: NRG; PAM sequence: AGG
  source 1..20: mol_type = other DNA
cagaagactgagaagaactt

SEQ ID NO: 28751 - DNA, 20 bp, synthetic construct
  misc_feature 1..20: note = Description of Artificial Sequence: Synthetic oligonucleotide
  misc_feature 1..20: note = Target: SCN10A; (+) strand; PAM type: NRG; PAM sequence: TGG
  source 1..20: mol_type = other DNA
aacttaggtgatatcatgtg

SEQ ID NO: 28752 - DNA, 20 bp, synthetic construct
  misc_feature 1..20: note = Description of Artificial Sequence: Synthetic oligonucleotide
  misc_feature 1..20: note = Target: SCN10A; (+) strand; PAM type: NRG; PAM sequence: TGG
  source 1..20: mol_type = other DNA
aggtgatatcatgtgtggta

SEQ ID NO: 28753 - DNA, 20 bp, synthetic construct
  misc_feature 1..20: note = Description of Artificial Sequence: Synthetic oligonucleotide
  misc_feature 1..20: note = Target: SCN10A; (+) strand; PAM type: NRG; PAM sequence: GGG
  source 1..20: mol_type = other DNA
ggtgatatcatgtgtggtat

SEQ ID NO: 28754 - DNA, 20 bp, synthetic construct
  misc_feature 1..20: note = Description of Artificial Sequence: Synthetic oligonucleotide
  misc_feature 1..20: note = Target: SCN10A; (+) strand; PAM type: NRG; PAM sequence: TAG
  source 1..20: mol_type = other DNA
gatatcatgtgtggtatggg

SEQ ID NO: 28755 - DNA, 20 bp, synthetic construct
  misc_feature 1..20: note = Description of Artificial Sequence: Synthetic oligonucleotide
  misc_feature 1..20: note = Target: SCN10A; (+) strand; PAM type: NRG; PAM sequence: TGG
  source 1..20: mol_type = other DNA
ggtatgggtagtacatttaa

SEQ ID NO: 28756 - DNA, 20 bp, synthetic construct
  misc_feature 1..20: note = Description of Artificial Sequence: Synthetic oligonucleotide
  misc_feature 1..20: note = Target: SCN10A; (+) strand; PAM type: NRG; PAM sequence: GAG
  source 1..20: mol_type = other DNA
tatgggtagtacatttaatg

SEQ ID NO: 28757 - DNA, 20 bp, synthetic construct
  misc_feature 1..20: note = Description of Artificial Sequence: Synthetic oligonucleotide
  misc_feature 1..20: note = Target: SCN10A; (+) strand; PAM type: NRG; PAM sequence: AGG
  source 1..20: mol_type = other DNA
atgggtagtacatttaatgg

SEQ ID NO: 28758 - DNA, 20 bp, synthetic construct
  misc_feature 1..20: note = Description of Artificial Sequence: Synthetic oligonucleotide
  misc_feature 1..20: note = Target: SCN10A; (+) strand; PAM type: NRG; PAM sequence: AAG
  source 1..20: mol_type = other DNA
acatttaatggaggaacgca

SEQ ID NO: 28759 - DNA, 20 bp, synthetic construct
  misc_feature 1..20: note = Description of Artificial Sequence: Synthetic oligonucleotide
  misc_feature 1..20: note = Target: SCN10A; (+) strand; PAM type: NRG; PAM sequence: GAG
  source 1..20: mol_type = other DNA
aacgcaaagccatgtctctt

SEQ ID NO: 28760 - DNA, 20 bp, synthetic construct
  misc_feature 1..20: note = Description of Artificial Sequence: Synthetic oligonucleotide
  misc_feature 1..20: note = Target: SCN10A; (+) strand; PAM type: NRG; PAM sequence: AAG
  source 1..20: mol_type = other DNA
tcttgagatctttatgaaaa

SEQ ID NO: 28761 - DNA, 20 bp, synthetic construct
  misc_feature 1..20: note = Description of Artificial Sequence: Synthetic oligonucleotide
  misc_feature 1..20: note = Target: SCN10A; (+) strand; PAM type: NRG; PAM sequence: AGG
  source 1..20: mol_type = other DNA
cttgagatctttatgaaaaa

SEQ ID NO: 28762 - DNA, 20 bp, synthetic construct
  misc_feature 1..20: note = Description of Artificial Sequence: Synthetic oligonucleotide
  misc_feature 1..20: note = Target: SCN10A; (+) strand; PAM type: NRG; PAM sequence: GAG
  source 1..20: mol_type = other DNA
tgagatctttatgaaaaaag

SEQ ID NO: 28763 - DNA, 20 bp, synthetic construct
  misc_feature 1..20: note = Description of Artificial Sequence: Synthetic oligonucleotide
  misc_feature 1..20: note = Target: SCN10A; (+) strand; PAM type: NRG; PAM sequence: TAG
  source 1..20: mol_type = other DNA
tatgaaaaaaggagtgaaac

SEQ ID NO: 28764 - DNA, 20 bp, synthetic construct
  misc_feature 1..20: note = Description of Artificial Sequence: Synthetic oligonucleotide
  misc_feature 1..20: note = Target: SCN10A; (+) strand; PAM type: NRG; PAM sequence: GAG
  source 1..20: mol_type = other DNA
tgaaaaaaggagtgaaacta

SEQ ID NO: 28765 - DNA, 20 bp, synthetic construct
  misc_feature 1..20: note = Description of Artificial Sequence: Synthetic oligonucleotide
  misc_feature 1..20: note = Target: SCN10A; (+) strand; PAM type: NRG; PAM sequence: TGG
  source 1..20: mol_type = other DNA
aaaggagtgaaactagagtc

SEQ ID NO: 28766 - DNA, 20 bp, synthetic construct
  misc_feature 1..20: note = Description of Artificial Sequence: Synthetic oligonucleotide
  misc_feature 1..20: note = Target: SCN10A; (+) strand; PAM type: NRG; PAM sequence: GAG
  source 1..20: mol_type = other DNA
tttgcccaatctttaaactc

SEQ ID NO: 28767 - DNA, 20 bp, synthetic construct
  misc_feature 1..20: note = Description of Artificial Sequence: Synthetic oligonucleotide
  misc_feature 1..20: note = Target: SCN10A; (+) strand; PAM type: NRG; PAM sequence: TGG
  source 1..20: mol_type = other DNA
gcccaatctttaaactcgag

SEQ ID NO: 28768 - DNA, 20 bp, synthetic construct
  misc_feature 1..20: note = Description of Artificial Sequence: Synthetic oligonucleotide
  misc_feature 1..20: note = Target: SCN10A; (+) strand; PAM type: NRG; PAM sequence: GGG
  source 1..20: mol_type = other DNA
cccaatctttaaactcgagt

SEQ ID NO: 28769 - DNA, 20 bp, synthetic construct
  misc_feature 1..20: note = Description of Artificial Sequence: Synthetic oligonucleotide
  misc_feature 1..20: note = Target: SCN10A; (+) strand; PAM type: NRG; PAM sequence: TGG
  source 1..20: mol_type = other DNA
aactcgagtgggataacttt

SEQ ID NO: 28770 - DNA, 20 bp, synthetic construct
  misc_feature 1..20: note = Description of Artificial Sequence: Synthetic oligonucleotide
  misc_feature 1..20: note = Target: SCN10A; (+) strand; PAM type: NRG; PAM sequence: TGG
  source 1..20: mol_type = other DNA
ggataacttttggttcctac

SEQ ID NO: 28771 - DNA, 20 bp, synthetic construct
  misc_feature 1..20: note = Description of Artificial Sequence: Synthetic oligonucleotide
  misc_feature 1..20: note = Target: SCN10A; (+) strand; PAM type: NRG; PAM sequence: GGG
  source 1..20: mol_type = other DNA
gataacttttggttcctact

SEQ ID NO: 28772 - DNA, 20 bp, synthetic construct
  misc_feature 1..20: note = Description of Artificial Sequence: Synthetic oligonucleotide
  misc_feature 1..20: note = Target: SCN10A; (+) strand; PAM type: NRG; PAM sequence: TGG
  source 1..20: mol_type = other DNA
ccactaccatgactgcatct

SEQ ID NO: 28773 - DNA, 20 bp, synthetic construct
  misc_feature 1..20: note = Description of Artificial Sequence: Synthetic oligonucleotide
  misc_feature 1..20: note = Target: SCN10A; (+) strand; PAM type: NRG; PAM sequence: CAG
  source 1..20: mol_type = other DNA
gactgcatcttggatcctga

SEQ ID NO: 28774 - DNA, 20 bp, synthetic construct
  misc_feature 1..20: note = Description of Artificial Sequence: Synthetic oligonucleotide
  misc_feature 1..20: note = Target: SCN10A; (+) strand; PAM type: NRG; PAM sequence: AGG
  source 1..20: mol_type = other DNA
actgcatcttggatcctgac

SEQ ID NO: 28775 - DNA, 20 bp, synthetic construct
  misc_feature 1..20: note = Description of Artificial Sequence: Synthetic oligonucleotide
  misc_feature 1..20: note = Target: SCN10A; (+) strand; PAM type: NRG; PAM sequence: GGG
  source 1..20: mol_type = other DNA
ctgcatcttggatcctgaca

SEQ ID NO: 28776 - DNA, 20 bp, synthetic construct
  misc_feature 1..20: note = Description of Artificial Sequence: Synthetic oligonucleotide
  misc_feature 1..20: note = Target: SCN10A; (+) strand; PAM type: NRG; PAM sequence: GGG
  source 1..20: mol_type = other DNA
tgcatcttggatcctgacag

SEQ ID NO: 28777 - DNA, 20 bp, synthetic construct
  misc_feature 1..20: note = Description of Artificial Sequence: Synthetic oligonucleotide
  misc_feature 1..20: note = Target: SCN10A; (+) strand; PAM type: NRG; PAM sequence: GAG
  source 1..20: mol_type = other DNA
catcttggatcctgacaggg

SEQ ID NO: 28778 - DNA, 20 bp, synthetic construct
  misc_feature 1..20: note = Description of Artificial Sequence: Synthetic oligonucleotide
  misc_feature 1..20: note = Target: SCN10A; (+) strand; PAM type: NRG; PAM sequence: TGG
  source 1..20: mol_type = other DNA
ttggatcctgacaggggagt

SEQ ID NO: 28779 - DNA, 20 bp, synthetic construct
  misc_feature 1..20: note = Description of Artificial Sequence: Synthetic oligonucleotide
  misc_feature 1..20: note = Target: SCN10A; (+) strand; PAM type: NRG; PAM sequence: GGG
  source 1..20: mol_type = other DNA
tggatcctgacaggggagtt

SEQ ID NO: 28780 - DNA, 20 bp, synthetic construct
  misc_feature 1..20: note = Description of Artificial Sequence: Synthetic oligonucleotide
  misc_feature 1..20: note = Target: SCN10A; (+) strand; PAM type: NRG; PAM sequence: TAG
  source 1..20: mol_type = other DNA
tcatttcctctctatacctg

SEQ ID NO: 28781 - DNA, 20 bp, synthetic construct
  misc_feature 1..20: note = Description of Artificial Sequence: Synthetic oligonucleotide
  misc_feature 1..20: note = Target: SCN10A; (+) strand; PAM type: NRG; PAM sequence: AGG
  source 1..20: mol_type = other DNA
catttcctctctatacctgt

SEQ ID NO: 28782 - DNA, 20 bp, synthetic construct
  misc_feature 1..20: note = Description of Artificial Sequence: Synthetic oligonucleotide
  misc_feature 1..20: note = Target: SCN10A; (+) strand; PAM type: NRG; PAM sequence: TGG
  source 1..20: mol_type = other DNA
cctctctatacctgtaggcg

SEQ ID NO: 28783 - DNA, 20 bp, synthetic construct
  misc_feature 1..20: note = Description of Artificial Sequence: Synthetic oligonucleotide
  misc_feature 1..20: note = Target: SCN10A; (+) strand; PAM type: NRG; PAM sequence: GGG
  source 1..20: mol_type = other DNA
ctctctatacctgtaggcgt

SEQ ID NO: 28784 - DNA, 20 bp, synthetic construct
  misc_feature 1..20: note = Description of Artificial Sequence: Synthetic oligonucleotide
  misc_feature 1..20: note = Target: SCN10A; (+) strand; PAM type: NRG; PAM sequence: GGG
  source 1..20: mol_type = other DNA
tctctatacctgtaggcgtg

SEQ ID NO: 28785 - DNA, 20 bp, synthetic construct
  misc_feature 1..20: note = Description of Artificial Sequence: Synthetic oligonucleotide
  misc_feature 1..20: note = Target: SCN10A; (+) strand; PAM type: NRG; PAM sequence: TAG
  source 1..20: mol_type = other DNA
ctatacctgtaggcgtgggg

SEQ ID NO: 28786 - DNA, 20 bp, synthetic construct
  misc_feature 1..20: note = Description of Artificial Sequence: Synthetic oligonucleotide
  misc_feature 1..20: note = Target: SCN10A; (+) strand; PAM type: NRG; PAM sequence: TAG
  source 1..20: mol_type = other DNA
tgtaggcgtggggtagaata

SEQ ID NO: 28787 - DNA, 20 bp, synthetic construct
  misc_feature 1..20: note = Description of Artificial Sequence: Synthetic oligonucleotide
  misc_feature 1..20: note = Target: SCN10A; (+) strand; PAM type: NRG; PAM sequence: AGG
  source 1..20: mol_type = other DNA
gtaggcgtggggtagaatat

SEQ ID NO: 28788 - DNA, 20 bp, synthetic construct
  misc_feature 1..20: note = Description of Artificial Sequence: Synthetic oligonucleotide
  misc_feature 1..20: note = Target: SCN10A; (+) strand; PAM type: NRG; PAM sequence: GGG
  source 1..20: mol_type = other DNA
taggcgtggggtagaatata

SEQ ID NO: 28789 - DNA, 20 bp, synthetic construct
  misc_feature 1..20: note = Description of Artificial Sequence: Synthetic oligonucleotide
  misc_feature 1..20: note = Target: SCN10A; (+) strand; PAM type: NRG; PAM sequence: TGG
  source 1..20: mol_type = other DNA
ggtagaatatagggtgatac

SEQ ID NO: 28790 - DNA, 20 bp, synthetic construct
  misc_feature 1..20: note = Description of Artificial Sequence: Synthetic oligonucleotide
  misc_feature 1..20: note = Target: SCN10A; (+) strand; PAM type: NRG; PAM sequence: GAG
  source 1..20: mol_type = other DNA
tagaatatagggtgatactg

SEQ ID NO: 28791 - DNA, 20 bp, synthetic construct
  misc_feature 1..20: note = Description of Artificial Sequence: Synthetic oligonucleotide
  misc_feature 1..20: note = Target: SCN10A; (+) strand; PAM type: NRG; PAM sequence: TAG
  source 1..20: mol_type = other DNA
actggagatctactgcgacc

SEQ ID NO: 28792 - DNA, 20 bp, synthetic construct
  misc_feature 1..20: note = Description of Artificial Sequence: Synthetic oligonucleotide
  misc_feature 1..20: note = Target: SCN10A; (+) strand; PAM type: NRG; PAM sequence: AAG
  source 1..20: mol_type = other DNA
accatgatacataaccacac

SEQ ID NO: 28793 - DNA, 20 bp, synthetic construct
  misc_feature 1..20: note = Description of Artificial Sequence: Synthetic oligonucleotide
  misc_feature 1..20: note = Target: SCN10A; (+) strand; PAM type: NRG; PAM sequence: TGG
  source 1..20: mol_type = other DNA
aaccacacaagtttaatccc

SEQ ID NO: 28794 - DNA, 20 bp, synthetic construct
  misc_feature 1..20: note = Description of Artificial Sequence: Synthetic oligonucleotide
  misc_feature 1..20: note = Target: SCN10A; (+) strand; PAM type: NRG; PAM sequence: GGG
  source 1..20: mol_type = other DNA
accacacaagtttaatccct

SEQ ID NO: 28795 - DNA, 20 bp, synthetic construct
  misc_feature 1..20: note = Description of Artificial Sequence: Synthetic oligonucleotide
  misc_feature 1..20: note = Target: SCN10A; (+) strand; PAM type: NRG; PAM sequence: TAG
  source 1..20: mol_type = other DNA
taactacccttactgtcact

SEQ ID NO: 28796 - DNA, 20 bp, synthetic construct
  misc_feature 1..20: note = Description of Artificial Sequence: Synthetic oligonucleotide
  misc_feature 1..20: note = Target: SCN10A; (+) strand; PAM type: NRG; PAM sequence: TGG
  source 1..20: mol_type = other DNA
tacttgaactctaaaactgt

SEQ ID NO: 28797 - DNA, 20 bp, synthetic construct
  misc_feature 1..20: note = Description of Artificial Sequence: Synthetic oligonucleotide
  misc_feature 1..20: note = Target: SCN10A; (+) strand; PAM type: NRG; PAM sequence: GAG
  source 1..20: mol_type = other DNA
cttgaactctaaaactgttg

SEQ ID NO: 28798 - DNA, 20 bp, synthetic construct
  misc_feature 1..20: note = Description of Artificial Sequence: Synthetic oligonucleotide
  misc_feature 1..20: note = Target: SCN10A; (+) strand; PAM type: NRG; PAM sequence: CAG
  source 1..20: mol_type = other DNA
ctaaaactgttggagaaact

SEQ ID NO: 28799 - DNA, 20 bp, synthetic construct
  misc_feature 1..20: note = Description of Artificial Sequence: Synthetic oligonucleotide
  misc_feature 1..20: note = Target: SCN10A; (+) strand; PAM type: NRG; PAM sequence: CAG
  source 1..20: mol_type = other DNA
aaactcagtgcttcccccaa

SEQ ID NO: 28800 - DNA, 20 bp, synthetic construct
  misc_feature 1..20: note = Description of Artificial Sequence: Synthetic oligonucleotide
  misc_feature 1..20: note = Target: SCN10A; (+) strand; PAM type: NRG; PAM sequence: TAG
  source 1..20: mol_type = other DNA
cccaacagattcatttcaaa

SEQ ID NO: 28801 - DNA, 20 bp, synthetic construct
  misc_feature 1..20: note = Description of Artificial Sequence: Synthetic oligonucleotide
  misc_feature 1..20: note = Target: SCN10A; (+) strand; PAM type: NRG; PAM sequence: AAG
  source 1..20: mol_type = other DNA
ttcatttcaaatagctgtaa

SEQ ID NO: 28802 - DNA, 20 bp, synthetic construct
  misc_feature 1..20: note = Description of Artificial Sequence: Synthetic oligonucleotide
  misc_feature 1..20: note = Target: SCN10A; (+) strand; PAM type: NRG; PAM sequence: AGG
  source 1..20: mol_type = other DNA
tcatttcaaatagctgtaaa

SEQ ID NO: 28803 - DNA, 20 bp, synthetic construct
  misc_feature 1..20: note = Description of Artificial Sequence: Synthetic oligonucleotide
  misc_feature 1..20: note = Target: SCN10A; (+) strand; PAM type: NRG; PAM sequence: CAG
  source 1..20: mol_type = other DNA
tgtaaaaggtatgtttactc

SEQ ID NO: 28804 - DNA, 20 bp, synthetic construct
  misc_feature 1..20: note = Description of Artificial Sequence: Synthetic oligonucleotide
  misc_feature 1..20: note = Target: SCN10A; (+) strand; PAM type: NRG; PAM sequence: AAG
  source 1..20: mol_type = other DNA
aaaaggtatgtttactccag

SEQ ID NO: 28805 - DNA, 20 bp, synthetic construct
  misc_feature 1..20: note = Description of Artificial Sequence: Synthetic oligonucleotide
  misc_feature 1..20: note = Target: SCN10A; (+) strand; PAM type: NRG; PAM sequence: CAG
  source 1..20: mol_type = other DNA
gtatgtttactccagaagac

SEQ ID NO: 28806 - DNA, 20 bp, synthetic construct
  misc_feature 1..20: note = Description of Artificial Sequence: Synthetic oligonucleotide
  misc_feature 1..20: note = Target: SCN10A; (+) strand; PAM type: NRG; PAM sequence: GAG
  source 1..20: mol_type = other DNA
atgtttactccagaagacca

SEQ ID NO: 28807 - DNA, 20 bp, synthetic construct
  misc_feature 1..20: note = Description of Artificial Sequence: Synthetic oligonucleotide
  misc_feature 1..20: note = Target: SCN10A; (+) strand; PAM type: NRG; PAM sequence: TGG
  source 1..20: mol_type = other DNA
cttttgaacttctcattcct

SEQ ID NO: 28808 - DNA, 20 bp, synthetic construct
  misc_feature 1..20: note = Description of Artificial Sequence: Synthetic oligonucleotide
  misc_feature 1..20: note = Target: SCN10A; (+) strand; PAM type: NRG; PAM sequence: GGG
  source 1..20: mol_type = other DNA
ttttgaacttctcattcctt

SEQ ID NO: 28809 - DNA, 20 bp, synthetic construct
  misc_feature 1..20: note = Description of Artificial Sequence: Synthetic oligonucleotide
  misc_feature 1..20: note = Target: SCN10A; (+) strand; PAM type: NRG; PAM sequence: TAG
  source 1..20: mol_type = other DNA
aacttctcattccttgggcc

SEQ ID NO: 28810 - DNA, 20 bp, synthetic construct
  misc_feature 1..20: note = Description of Artificial Sequence: Synthetic oligonucleotide
  misc_feature 1..20: note = Target: SCN10A; (+) strand; PAM type: NRG; PAM sequence: AGG
  source 1..20: mol_type = other DNA
acttctcattccttgggcct

SEQ ID NO: 28811 - DNA, 20 bp, synthetic construct
  misc_feature 1..20: note = Description of Artificial Sequence: Synthetic oligonucleotide
  misc_feature 1..20: note = Target: SCN10A; (+) strand; PAM type: NRG; PAM sequence: CAG
  source 1..20: mol_type = other DNA
ccctcatcccaacgtcaacc

SEQ ID NO: 28812 - DNA, 20 bp, synthetic construct
  misc_feature 1..20: note = Description of Artificial Sequence: Synthetic oligonucleotide
  misc_feature 1..20: note = Target: SCN10A; (+) strand; PAM type: NRG; PAM sequence: CAG
  source 1..20: mol_type = other DNA
cagatcttctcttccataaa

SEQ ID NO: 28813 - DNA, 20 bp, synthetic construct
  misc_feature 1..20: note = Description of Artificial Sequence: Synthetic oligonucleotide
  misc_feature 1..20: note = Target: SCN10A; (+) strand; PAM type: NRG; PAM sequence: CAG
  source 1..20: mol_type = other DNA
ttccataaacagcactccct

SEQ ID NO: 28814 - DNA, 20 bp, synthetic construct
  misc_feature 1..20: note = Description of Artificial Sequence: Synthetic oligonucleotide
  misc_feature 1..20: note = Target: SCN10A; (+) strand; PAM type: NRG; PAM sequence: AGG
  source 1..20: mol_type = other DNA
tccataaacagcactccctc

SEQ ID NO: 28815 - DNA, 20 bp, synthetic construct
  misc_feature 1..20: note = Description of Artificial Sequence: Synthetic oligonucleotide
  misc_feature 1..20: note = Target: SCN10A; (+) strand; PAM type: NRG; PAM sequence: CAG
  source 1..20: mol_type = other DNA
cctcaggcccctgcctgaca

SEQ ID NO: 28816 - DNA, 20 bp, synthetic construct
  misc_feature 1..20: note = Description of Artificial Sequence: Synthetic oligonucleotide
  misc_feature 1..20: note = Target: SCN10A; (+) strand; PAM type: NRG; PAM sequence: AGG
  source 1..20: mol_type = other DNA
ctcaggcccctgcctgacac

SEQ ID NO: 28817 - DNA, 20 bp, synthetic construct
  misc_feature 1..20: note = Description of Artificial Sequence: Synthetic oligonucleotide
  misc_feature 1..20: note = Target: SCN10A; (+) strand; PAM type: NRG; PAM sequence: TAG
  source 1..20: mol_type = other DNA
gcccctgcctgacacaggca

SEQ ID NO: 28818 - DNA, 20 bp, synthetic construct
  misc_feature 1..20: note = Description of Artificial Sequence: Synthetic oligonucleotide
  misc_feature 1..20: note = Target: SCN10A; (+) strand; PAM type: NRG; PAM sequence: TGG
  source 1..20: mol_type = other DNA
acaggcatagactgtcatgt

SEQ ID NO: 28819 - DNA, 20 bp, synthetic construct
  misc_feature 1..20: note = Description of Artificial Sequence: Synthetic oligonucleotide
  misc_feature 1..20: note = Target: SCN10A; (+) strand; PAM type: NRG; PAM sequence: CAG
  source 1..20: mol_type = other DNA
agactgtcatgttggattca

SEQ ID NO: 28820 - DNA, 20 bp, synthetic construct
  misc_feature 1..20: note = Description of Artificial Sequence: Synthetic oligonucleotide
  misc_feature 1..20: note = Target: SCN10A; (+) strand; PAM type: NRG; PAM sequence: CAG
  source 1..20: mol_type = other DNA
tgtcatgttggattcacaga

SEQ ID NO: 28821 - DNA, 20 bp, synthetic construct
  misc_feature 1..20: note = Description of Artificial Sequence: Synthetic oligonucleotide
  misc_feature 1..20: note = Target: SCN10A; (+) strand; PAM type: NRG; PAM sequence: AGG
  source 1..20: mol_type = other DNA
gtcatgttggattcacagac

SEQ ID NO: 28822 - DNA, 20 bp, synthetic construct
  misc_feature 1..20: note = Description of Artificial Sequence: Synthetic oligonucleotide
  misc_feature 1..20: note = Target: SCN10A; (+) strand; PAM type: NRG; PAM sequence: TAG
  source 1..20: mol_type = other DNA
gattcacagacaggctgtgc

SEQ ID NO: 28823 - DNA, 20 bp, synthetic construct
  misc_feature 1..20: note = Description of Artificial Sequence: Synthetic oligonucleotide
  misc_feature 1..20: note = Target: SCN10A; (+) strand; PAM type: NRG; PAM sequence: GAG
  source 1..20: mol_type = other DNA
ttcacagacaggctgtgcta

SEQ ID NO: 28824 - DNA, 20 bp, synthetic construct
  misc_feature 1..20: note = Description of Artificial Sequence: Synthetic oligonucleotide
  misc_feature 1..20: note = Target: SCN10A; (+) strand; PAM type: NRG; PAM sequence: AGG
  source 1..20: mol_type = other DNA
tcacagacaggctgtgctag

SEQ ID NO: 28825 - DNA, 20 bp, synthetic construct
  misc_feature 1..20: note = Description of Artificial Sequence: Synthetic oligonucleotide
  misc_feature 1..20: note = Target: SCN10A; (+) strand; PAM type: NRG; PAM sequence: TGG
  source 1..20: mol_type = other DNA
gctgtgctagaggaaacctc

SEQ ID NO: 28826 - DNA, 20 bp, synthetic construct
  misc_feature 1..20: note = Description of Artificial Sequence: Synthetic oligonucleotide
  misc_feature 1..20: note = Target: SCN10A; (+) strand; PAM type: NRG; PAM sequence: GGG
  source 1..20: mol_type = other DNA
ctgtgctagaggaaacctct

SEQ ID NO: 28827 - DNA, 20 bp, synthetic construct
  misc_feature 1..20: note = Description of Artificial Sequence: Synthetic oligonucleotide
  misc_feature 1..20: note = Target: SCN10A; (+) strand; PAM type: NRG; PAM sequence: GGG
  source 1..20: mol_type = other DNA
tgtgctagaggaaacctctg

SEQ ID NO: 28828 - DNA, 20 bp, synthetic construct
  misc_feature 1..20: note = Description of Artificial Sequence: Synthetic oligonucleotide
  misc_feature 1..20: note = Target: SCN10A; (+) strand; PAM type: NRG; PAM sequence: CAG
  source 1..20: mol_type = other DNA
aggaaacctctggggctcac

SEQ ID NO: 28829 - DNA, 20 bp, synthetic construct
  misc_feature 1..20: note = Description of Artificial Sequence: Synthetic oligonucleotide
  misc_feature 1..20: note = Target: SCN10A; (+) strand; PAM type: NRG; PAM sequence: AGG
  source 1..20: mol_type = other DNA
ggaaacctctggggctcacc

SEQ ID NO: 28830 - DNA, 20 bp, synthetic construct
  misc_feature 1..20: note = Description of Artificial Sequence: Synthetic oligonucleotide
  misc_feature 1..20: note = Target: SCN10A; (+) strand; PAM type: NRG; PAM sequence: GGG
  source 1..20: mol_type = other DNA
gaaacctctggggctcacca

SEQ ID NO: 28831 - DNA, 20 bp, synthetic construct
  misc_feature 1..20: note = Description of Artificial Sequence: Synthetic oligonucleotide
  misc_feature 1..20: note = Target: SCN10A; (+) strand; PAM type: NRG; PAM sequence: GGG
  source 1..20: mol_type = other DNA
aaacctctggggctcaccag

SEQ ID NO: 28832 - DNA, 20 bp, synthetic construct
  misc_feature 1..20: note = Description of Artificial Sequence: Synthetic oligonucleotide
  misc_feature 1..20: note = Target: SCN10A; (+) strand; PAM type: NRG; PAM sequence: TGG
  source 1..20: mol_type = other DNA
ctggggctcaccaggggccg

SEQ ID NO: 28833 - DNA, 20 bp, synthetic construct
  misc_feature 1..20: note = Description of Artificial Sequence: Synthetic oligonucleotide
  misc_feature 1..20: note = Target: SCN10A; (+) strand; PAM type: NRG; PAM sequence: GGG
  source 1..20: mol_type = other DNA
tggggctcaccaggggccgt

SEQ ID NO: 28834 - DNA, 20 bp, synthetic construct
  misc_feature 1..20: note = Description of Artificial Sequence: Synthetic oligonucleotide
  misc_feature 1..20: note = Target: SCN10A; (+) strand; PAM type: NRG; PAM sequence: TGG
  source 1..20: mol_type = other DNA
gctcaccaggggccgtggga

SEQ ID NO: 28835 - DNA, 20 bp, synthetic construct
  misc_feature 1..20: note = Description of Artificial Sequence: Synthetic oligonucleotide
  misc_feature 1..20: note = Target: SCN10A; (+) strand; PAM type: NRG; PAM sequence: GGG
  source 1..20: mol_type = other DNA
ctcaccaggggccgtgggat

SEQ ID NO: 28836 - DNA, 20 bp, synthetic construct
  misc_feature 1..20: note = Description of Artificial Sequence: Synthetic oligonucleotide
  misc_feature 1..20: note = Target: SCN10A; (+) strand; PAM type: NRG; PAM sequence: TGG
  source 1..20: mol_type = other DNA
ggggccgtgggatgggcttc

SEQ ID NO: 28837 - DNA, 20 bp, synthetic construct
  misc_feature 1..20: note = Description of Artificial Sequence: Synthetic oligonucleotide
  misc_feature 1..20: note = Target: SCN10A; (+) strand; PAM type: NRG; PAM sequence: GGG
  source 1..20: mol_type = other DNA
gggccgtgggatgggcttct

SEQ ID NO: 28838 - DNA, 20 bp, synthetic construct
  misc_feature 1..20: note = Description of Artificial Sequence: Synthetic oligonucleotide
  misc_feature 1..20: note = Target: SCN10A; (+) strand; PAM type: NRG; PAM sequence: GGG
  source 1..20: mol_type = other DNA
ggccgtgggatgggcttctg

SEQ ID NO: 28839 - DNA, 20 bp, synthetic construct
  misc_feature 1..20: note = Description of Artificial Sequence: Synthetic oligonucleotide
  misc_feature 1..20: note = Target: SCN10A; (+) strand; PAM type: NRG; PAM sequence: TGG
  source 1..20: mol_type = other DNA
gatgggcttctggggcttct

SEQ ID NO: 28840 - DNA, 20 bp, synthetic construct
  misc_feature 1..20: note = Description of Artificial Sequence: Synthetic oligonucleotide
  misc_feature 1..20: note = Target: SCN10A; (+) strand; PAM type: NRG; PAM sequence: GAG
  source 1..20: mol_type = other DNA
tgggcttctggggcttcttg

SEQ ID NO: 28841 - DNA, 20 bp, synthetic construct
  misc_feature 1..20: note = Description of Artificial Sequence: Synthetic oligonucleotide
  misc_feature 1..20: note = Target: SCN10A; (+) strand; PAM type: NRG; PAM sequence: TGG
  source 1..20: mol_type = other DNA
cttggagcccaacttcttca

SEQ ID NO: 28842 - DNA, 20 bp, synthetic construct
  misc_feature 1..20: note = Description of Artificial Sequence: Synthetic oligonucleotide
  misc_feature 1..20: note = Target: SCN10A; (+) strand; PAM type: NRG; PAM sequence: TAG
  source 1..20: mol_type = other DNA
ccaacttcttcatggcattg

SEQ ID NO: 28843 - DNA, 20 bp, synthetic construct
  misc_feature 1..20: note = Description of Artificial Sequence: Synthetic oligonucleotide
  misc_feature 1..20: note = Target: SCN10A; (+) strand; PAM type: NRG; PAM sequence: AAG
  source 1..20: mol_type = other DNA
tcttctgctcctctgtcatg

SEQ ID NO: 28844 - DNA, 20 bp, synthetic construct
  misc_feature 1..20: note = Description of Artificial Sequence: Synthetic oligonucleotide
  misc_feature 1..20: note = Target: SCN10A; (+) strand; PAM type: NRG; PAM sequence: TGG
  source 1..20: mol_type = other DNA
cctctgtcatgaagatgtcc

SEQ ID NO: 28845 - DNA, 20 bp, synthetic construct
  misc_feature 1..20: note = Description of Artificial Sequence: Synthetic oligonucleotide
  misc_feature 1..20: note = Target: SCN10A; (+) strand; PAM type: NRG; PAM sequence: AAG
  source 1..20: mol_type = other DNA
tgaagatgtcctggccccct

SEQ ID NO: 28846 - DNA, 20 bp, synthetic construct
  misc_feature 1..20: note = Description of Artificial Sequence: Synthetic oligonucleotide
  misc_feature 1..20: note = Target: SCN10A; (+) strand; PAM type: NRG; PAM sequence: CAG
  source 1..20: mol_type = other DNA
atgtcctggccccctaagtg

SEQ ID NO: 28847 - DNA, 20 bp, synthetic construct
  misc_feature 1..20: note = Description of Artificial Sequence: Synthetic oligonucleotide
  misc_feature 1..20: note = Target: SCN10A; (+) strand; PAM type: NRG; PAM sequence: GAG
  source 1..20: mol_type = other DNA
gtcctggccccctaagtgca

SEQ ID NO: 28848 - DNA, 20 bp, synthetic construct
  misc_feature 1..20: note = Description of Artificial Sequence: Synthetic oligonucleotide
  misc_feature 1..20: note = Target: SCN10A; (+) strand; PAM type: NRG; PAM sequence: GAG
  source 1..20: mol_type = other DNA
cctggccccctaagtgcaga

SEQ ID NO: 28849 - DNA, 20 bp, synthetic construct
  misc_feature 1..20: note = Description of Artificial Sequence: Synthetic oligonucleotide
  misc_feature 1..20: note = Target: SCN10A; (+) strand; PAM type: NRG; PAM sequence: AGG
  source 1..20: mol_type = other DNA
ctggccccctaagtgcagag

SEQ ID NO: 28850 - DNA, 20 bp, synthetic construct
  misc_feature 1..20: note = Description of Artificial Sequence: Synthetic oligonucleotide
  misc_feature 1..20: note = Target: SCN10A; (+) strand; PAM type: NRG; PAM sequence: GGG
  source 1..20: mol_type = other DNA
tggccccctaagtgcagaga

SEQ ID NO: 28851 - DNA, 20 bp, synthetic construct
  misc_feature 1..20: note = Description of Artificial Sequence: Synthetic oligonucleotide
  misc_feature 1..20: note = Target: SCN10A; (+) strand; PAM type: NRG; PAM sequence: AAG
  source 1..20: mol_type = other DNA
agagggccacactgttacta

SEQ ID NO: 28852 - DNA, 20 bp, synthetic construct
  misc_feature 1..20: note = Description of Artificial Sequence: Synthetic oligonucleotide
  misc_feature 1..20: note = Target: SCN10A; (+) strand; PAM type: NRG; PAM sequence: AAG
  source 1..20: mol_type = other DNA
ggccacactgttactaaagc

SEQ ID NO: 28853 - DNA, 20 bp, synthetic construct
  misc_feature 1..20: note = Description of Artificial Sequence: Synthetic oligonucleotide
  misc_feature 1..20: note = Target: SCN10A; (+) strand; PAM type: NRG; PAM sequence: GAG
  source 1..20: mol_type = other DNA
ccacactgttactaaagcaa

SEQ ID NO: 28854 - DNA, 20 bp, synthetic construct
  misc_feature 1..20: note = Description of Artificial Sequence: Synthetic oligonucleotide
  misc_feature 1..20: note = Target: SCN10A; (+) strand; PAM type: NRG; PAM sequence: AGG
  source 1..20: mol_type = other DNA
cacactgttactaaagcaag

SEQ ID NO: 28855 - DNA, 20 bp, synthetic construct
  misc_feature 1..20: note = Description of Artificial Sequence: Synthetic oligonucleotide
  misc_feature 1..20: note = Target: SCN10A; (+) strand; PAM type: NRG; PAM sequence: CGG
  source 1..20: mol_type = other DNA
aaagcaagaggaacccccta

SEQ ID NO: 28856 - DNA, 20 bp, synthetic construct
  misc_feature 1..20: note = Description of Artificial Sequence: Synthetic oligonucleotide
  misc_feature 1..20: note = Target: SCN10A; (+) strand; PAM type: NRG; PAM sequence: CAG
  source 1..20: mol_type = other DNA
ccccctacggataccaaaat

SEQ ID NO: 28857 - DNA, 20 bp, synthetic construct
  misc_feature 1..20: note = Description of Artificial Sequence: Synthetic oligonucleotide
  misc_feature 1..20: note = Target: SCN10A; (+) strand; PAM type: NRG; PAM sequence: CAG
  source 1..20: mol_type = other DNA
tacggataccaaaatcagaa

SEQ ID NO: 28858 - DNA, 20 bp, synthetic construct
  misc_feature 1..20: note = Description of Artificial Sequence: Synthetic oligonucleotide
  misc_feature 1..20: note = Target: SCN10A; (+) strand; PAM type: NRG; PAM sequence: AGG
  source 1..20: mol_type = other DNA
acggataccaaaatcagaac

SEQ ID NO: 28859 - DNA, 20 bp, synthetic construct
  misc_feature 1..20: note = Description of Artificial Sequence: Synthetic oligonucleotide
  misc_feature 1..20: note = Target: SCN10A; (+) strand; PAM type: NRG; PAM sequence: CAG
  source 1..20: mol_type = other DNA
gataccaaaatcagaacagg

SEQ ID NO: 28860 - DNA, 20 bp, synthetic construct
  misc_feature 1..20: note = Description of Artificial Sequence: Synthetic oligonucleotide
  misc_feature 1..20: note = Target: SCN10A; (+) strand; PAM type: NRG; PAM sequence: AGG
  source 1..20: mol_type = other DNA
ataccaaaatcagaacaggc

SEQ ID NO: 28861 - DNA, 20 bp, synthetic construct
  misc_feature 1..20: note = Description of Artificial Sequence: Synthetic oligonucleotide
  misc_feature 1..20: note = Target: SCN10A; (+) strand; PAM type: NRG; PAM sequence: GAG
  source 1..20: mol_type = other DNA
accaaaatcagaacaggcag

SEQ ID NO: 28862 - DNA, 20 bp, synthetic construct
  misc_feature 1..20: note = Description of Artificial Sequence: Synthetic oligonucleotide
  misc_feature 1..20: note = Target: SCN10A; (+) strand; PAM type: NRG; PAM sequence: GAG
  source 1..20: mol_type = other DNA
caaaatcagaacaggcagga

SEQ ID NO: 28863 - DNA, 20 bp, synthetic construct
  misc_feature 1..20: note = Description of Artificial Sequence: Synthetic oligonucleotide
  misc_feature 1..20: note = Target: SCN10A; (+) strand; PAM type: NRG; PAM sequence: AAG
  source 1..20: mol_type = other DNA
atcagaacaggcaggagaga

SEQ ID NO: 28864 - DNA, 20 bp, synthetic construct
  misc_feature 1..20: note = Description of Artificial Sequence: Synthetic oligonucleotide
  misc_feature 1..20: note = Target: SCN10A; (+) strand; PAM type: NRG; PAM sequence: AGG
  source 1..20: mol_type = other DNA
tcagaacaggcaggagagaa

SEQ ID NO: 28865 - DNA, 20 bp, synthetic construct
  misc_feature 1..20: note = Description of Artificial Sequence: Synthetic oligonucleotide
  misc_feature 1..20: note = Target: SCN10A; (+) strand; PAM type: NRG; PAM sequence: CAG
  source 1..20: mol_type = other DNA
caaccttctcccctcctctg

SEQ ID NO: 28866 - DNA, 20 bp, synthetic construct
  misc_feature 1..20: note = Description of Artificial Sequence: Synthetic oligonucleotide
  misc_feature 1..20: note = Target: SCN10A; (+) strand; PAM type: NRG; PAM sequence: TAG
  source 1..20: mol_type = other DNA
cttctcccctcctctgcaga

SEQ ID NO: 28867 - DNA, 20 bp, synthetic construct
  misc_feature 1..20: note = Description of Artificial Sequence: Synthetic oligonucleotide
  misc_feature 1..20: note = Target: SCN10A; (+) strand; PAM type: NRG; PAM sequence: AAG
  source 1..20: mol_type = other DNA
cctctgcagatagacaaacc

SEQ ID NO: 28868 - DNA, 20 bp, synthetic construct
  misc_feature 1..20: note = Description of Artificial Sequence: Synthetic oligonucleotide
  misc_feature 1..20: note = Target: SCN10A; (+) strand; PAM type: NRG; PAM sequence: CAG
  source 1..20: mol_type = other DNA
gcagatagacaaaccaagcc

SEQ ID NO: 28869 - DNA, 20 bp, synthetic construct
  misc_feature 1..20: note = Description of Artificial Sequence: Synthetic oligonucleotide
  misc_feature 1..20: note = Target: SCN10A; (+) strand; PAM type: NRG; PAM sequence: AAG
  source 1..20: mol_type = other DNA
gacaaaccaagcccagcatc

SEQ ID NO: 28870 - DNA, 20 bp, synthetic construct
  misc_feature 1..20: note = Description of Artificial Sequence: Synthetic oligonucleotide
  misc_feature 1..20: note = Target: SCN10A; (+) strand; PAM type: NRG; PAM sequence: AGG
  source 1..20: mol_type = other DNA
acaaaccaagcccagcatca

SEQ ID NO: 28871 - DNA, 20 bp, synthetic construct
  misc_feature 1..20: note = Description of Artificial Sequence: Synthetic oligonucleotide
  misc_feature 1..20: note = Target: SCN10A; (+) strand; PAM type: NRG; PAM sequence: GAG
  source 1..20: mol_type = other DNA
aaaccaagcccagcatcaag

SEQ ID NO: 28872 - DNA, 20 bp, synthetic construct
  misc_feature 1..20: note = Description of Artificial Sequence: Synthetic oligonucleotide
  misc_feature 1..20: note = Target: SCN10A; (+) strand; PAM type: NRG; PAM sequence: CAG
  source 1..20: mol_type = other DNA
aaggagtgtcttgccacatc

SEQ ID NO: 28873 - DNA, 20 bp, synthetic construct
  misc_feature 1..20: note = Description of Artificial Sequence: Synthetic oligonucleotide
  misc_feature 1..20: note = Target: SCN10A; (+) strand; PAM type: NRG; PAM sequence: CGG
  source 1..20: mol_type = other DNA
tgtcttgccacatccagtgt

SEQ ID NO: 28874 - DNA, 20 bp, synthetic construct
  misc_feature 1..20: note = Description of Artificial Sequence: Synthetic oligonucleotide
  misc_feature 1..20: note = Target: SCN10A; (+) strand; PAM type: NRG; PAM sequence: CGG
  source 1..20: mol_type = other DNA
tgccacatccagtgtcggaa

SEQ ID NO: 28875 - DNA, 20 bp, synthetic construct
  misc_feature 1..20: note = Description of Artificial Sequence: Synthetic oligonucleotide
  misc_feature 1..20: note = Target: SCN10A; (+) strand; PAM type: NRG; PAM sequence: TGG
  source 1..20: mol_type = other DNA
cacatccagtgtcggaacgg

SEQ ID NO: 28876 - DNA, 20 bp, synthetic construct
  misc_feature 1..20: note = Description of Artificial Sequence: Synthetic oligonucleotide
  misc_feature 1..20: note = Target: SCN10A; (+) strand; PAM type: NRG; PAM sequence: GGG
  source 1..20: mol_type = other DNA
acatccagtgtcggaacggt

SEQ ID NO: 28877 - DNA, 20 bp, synthetic construct
  misc_feature 1..20: note = Description of Artificial Sequence: Synthetic oligonucleotide
  misc_feature 1..20: note = Target: SCN10A; (+) strand; PAM type: NRG; PAM sequence: GAG
  source 1..20: mol_type = other DNA
agtgtcggaacggtgggact

SEQ ID NO: 28878 - DNA, 20 bp, synthetic construct
  misc_feature 1..20: note = Description of Artificial Sequence: Synthetic oligonucleotide
  misc_feature 1..20: note = Target: SCN10A; (+) strand; PAM type: NRG; PAM sequence: TGG
  source 1..20: mol_type = other DNA
tccattgctgactccctgcc

SEQ ID NO: 28879 - DNA, 20 bp, synthetic construct
  misc_feature 1..20: note = Description of Artificial Sequence: Synthetic oligonucleotide
  misc_feature 1..20: note = Target: SCN10A; (+) strand; PAM type: NRG; PAM sequence: GGG
  source 1..20: mol_type = other DNA
ccattgctgactccctgcct

SEQ ID NO: 28880 - DNA, 20 bp, synthetic construct
  misc_feature 1..20: note = Description of Artificial Sequence: Synthetic oligonucleotide
  misc_feature 1..20: note = Target: SCN10A; (+) strand; PAM type: NRG; PAM sequence: AAG
  source 1..20: mol_type = other DNA
actccctgcctgggtctcta

SEQ ID NO: 28881 - DNA, 20 bp, synthetic construct
  misc_feature 1..20: note = Description of Artificial Sequence: Synthetic oligonucleotide
  misc_feature 1..20: note = Target: SCN10A; (+) strand; PAM type: NRG; PAM sequence: AAG
  source 1..20: mol_type = other DNA
ctgcctgggtctctaaagca

SEQ ID NO: 28882 - DNA, 20 bp, synthetic construct
  misc_feature 1..20: note = Description of Artificial Sequence: Synthetic oligonucleotide
  misc_feature 1..20: note = Target: SCN10A; (+) strand; PAM type: NRG; PAM sequence: CAG
  source 1..20: mol_type = other DNA
ctgggtctctaaagcaaagc

SEQ ID NO: 28883 - DNA, 20 bp, synthetic construct
  misc_feature 1..20: note = Description of Artificial Sequence: Synthetic oligonucleotide
  misc_feature 1..20: note = Target: SCN10A; (+) strand; PAM type: NRG; PAM sequence: CAG
  source 1..20: mol_type = other DNA
caaagccagtttctgttctc

SEQ ID NO: 28884 - DNA, 20 bp, synthetic construct
  misc_feature 1..20: note = Description of Artificial Sequence: Synthetic oligonucleotide
  misc_feature 1..20: note = Target: SCN10A; (+) strand; PAM type: NRG; PAM sequence: AGG
  source 1..20: mol_type = other DNA
aaagccagtttctgttctcc

SEQ ID NO: 28885 - DNA, 20 bp, synthetic construct
  misc_feature 1..20: note = Description of Artificial Sequence: Synthetic oligonucleotide
  misc_feature 1..20: note = Target: SCN10A; (+) strand; PAM type: NRG; PAM sequence: GGG
  source 1..20: mol_type = other DNA
aagccagtttctgttctcca

SEQ ID NO: 28886 - DNA, 20 bp, synthetic construct
  misc_feature 1..20: note = Description of Artificial Sequence: Synthetic oligonucleotide
  misc_feature 1..20: note = Target: SCN10A; (+) strand; PAM type: NRG; PAM sequence: CAG
  source 1..20: mol_type = other DNA
gtttctgttctccagggatc

SEQ ID NO: 28887 - DNA, 20 bp, synthetic construct
  misc_feature 1..20: note = Description of Artificial Sequence: Synthetic oligonucleotide
  misc_feature 1..20: note = Target: SCN10A; (+) strand; PAM type: NRG; PAM sequence: GAG
  source 1..20: mol_type = other DNA
ttctgttctccagggatcca

SEQ ID NO: 28888 - DNA, 20 bp, synthetic construct
  misc_feature 1..20: note = Description of Artificial Sequence: Synthetic oligonucleotide
  misc_feature 1..20: note = Target: SCN10A; (+) strand; PAM type: NRG; PAM sequence: TGG
  source 1..20: mol_type = other DNA
ctccagggatccagagatgc

SEQ ID NO: 28889 - DNA, 20 bp, synthetic construct
  misc_feature 1..20: note = Description of Artificial Sequence: Synthetic oligonucleotide
  misc_feature 1..20: note = Target: SCN10A; (+) strand; PAM type: NRG; PAM sequence: AAG
  source 1..20: mol_type = other DNA
ggatccagagatgctggata

SEQ ID NO: 28890 - DNA, 20 bp, synthetic construct
  misc_feature 1..20: note = Description of Artificial Sequence: Synthetic oligonucleotide
  misc_feature 1..20: note = Target: SCN10A; (+) strand; PAM type: NRG; PAM sequence: AGG
  source 1..20: mol_type = other DNA
gatccagagatgctggataa

SEQ ID NO: 28891 - DNA, 20 bp, synthetic construct
  misc_feature 1..20: note = Description of Artificial Sequence: Synthetic oligonucleotide
  misc_feature 1..20: note = Target: SCN10A; (+) strand; PAM type: NRG; PAM sequence: GGG
  source 1..20: mol_type = other DNA
atccagagatgctggataaa

SEQ ID NO: 28892 - DNA, 20 bp, synthetic construct
  misc_feature 1..20: note = Description of Artificial Sequence: Synthetic oligonucleotide
  misc_feature 1..20: note = Target: SCN10A; (+) strand; PAM type: NRG; PAM sequence: TGG
  source 1..20: mol_type = other DNA
cagagatgctggataaaggg

SEQ ID NO: 28893 - DNA, 20 bp, synthetic construct
  misc_feature 1..20: note = Description of Artificial Sequence: Synthetic oligonucleotide
  misc_feature 1..20: note = Target: SCN10A; (+) strand; PAM type: NRG; PAM sequence: GGG
  source 1..20: mol_type = other DNA
agagatgctggataaagggt

SEQ ID NO: 28894 - DNA, 20 bp, synthetic construct
  misc_feature 1..20: note = Description of Artificial Sequence: Synthetic oligonucleotide
  misc_feature 1..20: note = Target: SCN10A; (+) strand; PAM type: NRG; PAM sequence: GGG
  source 1..20: mol_type = other DNA
gagatgctggataaagggtg

SEQ ID NO: 28895 - DNA, 20 bp, synthetic construct
  misc_feature 1..20: note = Description of Artificial Sequence: Synthetic oligonucleotide
  misc_feature 1..20: note = Target: SCN10A; (+) strand; PAM type: NRG; PAM sequence: GAG
  source 1..20: mol_type = other DNA
gatgctggataaagggtggg

SEQ ID NO: 28896 - DNA, 20 bp, synthetic construct
  misc_feature 1..20: note = Description of Artificial Sequence: Synthetic oligonucleotide
  misc_feature 1..20: note = Target: SCN10A; (+) strand; PAM type: NRG; PAM sequence: AGG
  source 1..20: mol_type = other DNA
atgctggataaagggtgggg

SEQ ID NO: 28897 - DNA, 20 bp, synthetic construct
  misc_feature 1..20: note = Description of Artificial Sequence: Synthetic oligonucleotide
  misc_feature 1..20: note = Target: SCN10A; (+) strand; PAM type: NRG; PAM sequence: GGG
  source 1..20: mol_type = other DNA
tgctggataaagggtgggga

SEQ ID NO: 28898 - DNA, 20 bp, synthetic construct
  misc_feature 1..20: note = Description of Artificial Sequence: Synthetic oligonucleotide
  misc_feature 1..20: note = Target: SCN10A; (+) strand; PAM type: NRG; PAM sequence: TGG
  source 1..20: mol_type = other DNA
ggataaagggtggggagggt

SEQ ID NO: 28899 - DNA, 20 bp, synthetic construct
  misc_feature 1..20: note = Description of Artificial Sequence: Synthetic oligonucleotide
  misc_feature 1..20: note = Target: SCN10A; (+) strand; PAM type: NRG; PAM sequence: CAG
  source 1..20: mol_type = other DNA
gggtggggagggttggtaaa

SEQ ID NO: 28900 - DNA, 20 bp, synthetic construct
  misc_feature 1..20: note = Description of Artificial Sequence: Synthetic oligonucleotide
  misc_feature 1..20: note = Target: SCN10A; (+) strand; PAM type: NRG; PAM sequence: AGG
  source 1..20: mol_type = other DNA
ggtggggagggttggtaaac

SEQ ID NO: 28901 - DNA, 20 bp, synthetic construct
  misc_feature 1..20: note = Description of Artificial Sequence: Synthetic oligonucleotide
  misc_feature 1..20: note = Target: SCN10A; (+) strand; PAM type: NRG; PAM sequence: AAG
  source 1..20: mol_type = other DNA
agggttggtaaacaggactc

SEQ ID NO: 28902 - DNA, 20 bp, synthetic construct
  misc_feature 1..20: note = Description of Artificial Sequence: Synthetic oligonucleotide
  misc_feature 1..20: note = Target: SCN10A; (+) strand; PAM type: NRG; PAM sequence: AGG
  source 1..20: mol_type = other DNA
gggttggtaaacaggactca

SEQ ID NO: 28903 - DNA, 20 bp, synthetic construct
  misc_feature 1..20: note = Description of Artificial Sequence: Synthetic oligonucleotide
  misc_feature 1..20: note = Target: SCN10A; (+) strand; PAM type: NRG; PAM sequence: GAG
  source 1..20: mol_type = other DNA
gttggtaaacaggactcaag

SEQ ID NO: 28904 - DNA, 20 bp, synthetic construct
  misc_feature 1..20: note = Description of Artificial Sequence: Synthetic oligonucleotide
  misc_feature 1..20: note = Target: SCN10A; (+) strand; PAM type: NRG; PAM sequence: AAG
  source 1..20: mol_type = other DNA
ggtaaacaggactcaaggag

SEQ ID NO: 28905 - DNA, 20 bp, synthetic construct
  misc_feature 1..20: note = Description of Artificial Sequence: Synthetic oligonucleotide
  misc_feature 1..20: note = Target: SCN10A; (+) strand; PAM type: NRG; PAM sequence: AGG
  source 1..20: mol_type = other DNA
gtaaacaggactcaaggaga

SEQ ID NO: 28906 - DNA, 20 bp, synthetic construct
  misc_feature 1..20: note = Description of Artificial Sequence: Synthetic oligonucleotide
  misc_feature 1..20: note = Target: SCN10A; (+) strand; PAM type: NRG; PAM sequence: TGG
  source 1..20: mol_type = other DNA
ctcaaggagaaggtacatgt

SEQ ID NO: 28907 - DNA, 20 bp, synthetic construct
  misc_feature 1..20: note = Description of Artificial Sequence: Synthetic oligonucleotide
  misc_feature 1..20: note = Target: SCN10A; (+) strand; PAM type: NRG; PAM sequence: GAG
  source 1..20: mol_type = other DNA
gtacatgttggttcaaatct

SEQ ID NO: 28908 - DNA, 20 bp, synthetic construct
  misc_feature 1..20: note = Description of Artificial Sequence: Synthetic oligonucleotide
  misc_feature 1..20: note = Target: SCN10A; (+) strand; PAM type: NRG; PAM sequence: TGG
  source 1..20: mol_type = other DNA
gttggttcaaatctgagcct

SEQ ID NO: 28909 - DNA, 20 bp, synthetic construct
  misc_feature 1..20: note = Description of Artificial Sequence: Synthetic oligonucleotide
  misc_feature 1..20: note = Target: SCN10A; (+) strand; PAM type: NRG; PAM sequence: TAG
  source 1..20: mol_type = other DNA
tcaaatctgagccttggatc

SEQ ID NO: 28910 - DNA, 20 bp, synthetic construct
  misc_feature 1..20: note = Description of Artificial Sequence: Synthetic oligonucleotide
  misc_feature 1..20: note = Target: SCN10A; (+) strand; PAM type: NRG; PAM sequence: CAG
  source 1..20: mol_type = other DNA
tggatctagcctgttcattc

SEQ ID NO: 28911 - DNA, 20 bp, synthetic construct
  misc_feature 1..20: note = Description of Artificial Sequence: Synthetic oligonucleotide
  misc_feature 1..20: note = Target: SCN10A; (+) strand; PAM type: NRG; PAM sequence: TGG
  source 1..20: mol_type = other DNA
ttcattccagtaaaattctt

SEQ ID NO: 28912 - DNA, 20 bp, synthetic construct
  misc_feature 1..20: note = Description of Artificial Sequence: Synthetic oligonucleotide
  misc_feature 1..20: note = Target: SCN10A; (+) strand; PAM type: NRG; PAM sequence: GGG
  source 1..20: mol_type = other DNA
tcattccagtaaaattcttt

SEQ ID NO: 28913 - DNA, 20 bp, synthetic construct
  misc_feature 1..20: note = Description of Artificial Sequence: Synthetic oligonucleotide
  misc_feature 1..20: note = Target: SCN10A; (+) strand; PAM type: NRG; PAM sequence: TAG
  source 1..20: mol_type = other DNA
agtaaaattctttgggcttc

SEQ ID NO: 28914 - DNA, 20 bp, synthetic construct
  misc_feature 1..20: note = Description of Artificial Sequence: Synthetic oligonucleotide
  misc_feature 1..20: note = Target: SCN10A; (+) strand; PAM type: NRG; PAM sequence: GAG
  source 1..20: mol_type = other DNA
taaaattctttgggcttcta

SEQ ID NO: 28915 - DNA, 20 bp, synthetic construct
  misc_feature 1..20: note = Description of Artificial Sequence: Synthetic oligonucleotide
  misc_feature 1..20: note = Target: SCN10A; (+) strand; PAM type: NRG; PAM sequence: CAG
  source 1..20: mol_type = other DNA
tctttgggcttctagagtca

SEQ ID NO: 28916 - DNA, 20 bp, synthetic construct
  misc_feature 1..20: note = Description of Artificial Sequence: Synthetic oligonucleotide
  misc_feature 1..20: note = Target: SCN10A; (+) strand; PAM type: NRG; PAM sequence: CAG
  source 1..20: mol_type = other DNA
tctagagtcacagtccctcc

SEQ ID NO: 28917 - DNA, 20 bp, synthetic construct
  misc_feature 1..20: note = Description of Artificial Sequence: Synthetic oligonucleotide
  misc_feature 1..20: note = Target: SCN10A; (+) strand; PAM type: NRG; PAM sequence: AGG
  source 1..20: mol_type = other DNA
ctagagtcacagtccctccc

SEQ ID NO: 28918 - DNA, 20 bp, synthetic construct
  misc_feature 1..20: note = Description of Artificial Sequence: Synthetic oligonucleotide
  misc_feature 1..20: note = Target: SCN10A; (+) strand; PAM type: NRG; PAM sequence: GGG
  source 1..20: mol_type = other DNA
tagagtcacagtccctccca

SEQ ID NO: 28919 - DNA, 20 bp, synthetic construct
  misc_feature 1..20: note = Description of Artificial Sequence: Synthetic oligonucleotide
  misc_feature 1..20: note = Target: SCN10A; (+) strand; PAM type: NRG; PAM sequence: GGG
  source 1..20: mol_type = other DNA
agagtcacagtccctcccag

SEQ ID NO: 28920 - DNA, 20 bp, synthetic construct
  misc_feature 1..20: note = Description of Artificial Sequence: Synthetic oligonucleotide
  misc_feature 1..20: note = Target: SCN10A; (+) strand; PAM type: NRG; PAM sequence: GGG
  source 1..20: mol_type = other DNA
gagtcacagtccctcccagg

SEQ ID NO: 28921 - DNA, 20 bp, synthetic construct
  misc_feature 1..20: note = Description of Artificial Sequence: Synthetic oligonucleotide
  misc_feature 1..20: note = Target: SCN10A; (+) strand; PAM type: NRG; PAM sequence: AAG
  source 1..20: mol_type = other DNA
cacagtccctcccagggggc

SEQ ID NO: 28922 - DNA, 20 bp, synthetic construct
  misc_feature 1..20: note = Description of Artificial Sequence: Synthetic oligonucleotide
  misc_feature 1..20: note = Target: SCN10A; (+) strand; PAM type: NRG; PAM sequence: GAG
  source 1..20: mol_type = other DNA
cagtccctcccagggggcaa

SEQ ID NO: 28923 - DNA, 20 bp, synthetic construct
  misc_feature 1..20: note = Description of Artificial Sequence: Synthetic oligonucleotide
  misc_feature 1..20: note = Target: SCN10A; (+) strand; PAM type: NRG; PAM sequence: GAG
  source 1..20: mol_type = other DNA
cagggggcaagagatttcct

SEQ ID NO: 28924 - DNA, 20 bp, synthetic construct
  misc_feature 1..20: note = Description of Artificial Sequence: Synthetic oligonucleotide
  misc_feature 1..20: note = Target: SCN10A; (+) strand; PAM type: NRG; PAM sequence: AGG
  source 1..20: mol_type = other DNA
agggggcaagagatttcctg

SEQ ID NO: 28925 - DNA, 20 bp, synthetic construct
  misc_feature 1..20: note = Description of Artificial Sequence: Synthetic oligonucleotide
  misc_feature 1..20: note = Target: SCN10A; (+) strand; PAM type: NRG; PAM sequence: AAG
  source 1..20: mol_type = other DNA
gagatttcctgaggaccttg

SEQ ID NO: 28926 - DNA, 20 bp, synthetic construct
  misc_feature 1..20: note = Description of Artificial Sequence: Synthetic oligonucleotide
  misc_feature 1..20: note = Target: SCN10A; (+) strand; PAM type: NRG; PAM sequence: AAG
  source 1..20: mol_type = other DNA
ttcctgaggaccttgaagca

SEQ ID NO: 28927 - DNA, 20 bp, synthetic construct
  misc_feature 1..20: note = Description of Artificial Sequence: Synthetic oligonucleotide
  misc_feature 1..20: note = Target: SCN10A; (+) strand; PAM type: NRG; PAM sequence: TGG
  source 1..20: mol_type = other DNA
ggaccttgaagcaaagactc

SEQ ID NO: 28928 - DNA, 20 bp, synthetic construct
  misc_feature 1..20: note = Description of Artificial Sequence: Synthetic oligonucleotide
  misc_feature 1..20: note = Target: SCN10A; (+) strand; PAM type: NRG; PAM sequence: GGG
  source 1..20: mol_type = other DNA
gaccttgaagcaaagactct

SEQ ID NO: 28929 - DNA, 20 bp, synthetic construct
  misc_feature 1..20: note = Description of Artificial Sequence: Synthetic oligonucleotide
  misc_feature 1..20: note = Target: SCN10A; (+) strand; PAM type: NRG; PAM sequence: GAG
  source 1..20: mol_type = other DNA
ccttgaagcaaagactctgg

SEQ ID NO: 28930 - DNA, 20 bp, synthetic construct
  misc_feature 1..20: note = Description of Artificial Sequence: Synthetic oligonucleotide
  misc_feature 1..20: note = Target: SCN10A; (+) strand; PAM type: NRG; PAM sequence: AGG
  source 1..20: mol_type = other DNA
cttgaagcaaagactctggg

SEQ ID NO: 28931 - DNA, 20 bp, synthetic construct
  misc_feature 1..20: note = Description of Artificial Sequence: Synthetic oligonucleotide
  misc_feature 1..20: note = Target: SCN10A; (+) strand; PAM type: NRG; PAM sequence: GGG
  source 1..20: mol_type = other DNA
ttgaagcaaagactctggga

SEQ ID NO: 28932 - DNA, 20 bp, synthetic construct
  misc_feature 1..20: note = Description of Artificial Sequence: Synthetic oligonucleotide
  misc_feature 1..20: note = Target: SCN10A; (+) strand; PAM type: NRG; PAM sequence: CAG
  source 1..20: mol_type = other DNA
agcaaagactctgggaggga

SEQ ID NO: 28933 - DNA, 20 bp, synthetic construct
  misc_feature 1..20: note = Description of Artificial Sequence: Synthetic oligonucleotide
  misc_feature 1..20: note = Target: SCN10A; (+) strand; PAM type: NRG; PAM sequence: AAG
  source 1..20: mol_type = other DNA
aaagactctgggagggacag

SEQ ID NO: 28934 - DNA, 20 bp, synthetic construct
  misc_feature 1..20: note = Description of Artificial Sequence: Synthetic oligonucleotide
  misc_feature 1..20: note = Target: SCN10A; (+) strand; PAM type: NRG; PAM sequence: TGG
  source 1..20: mol_type = other DNA
agaagccctcaaatcttttc

SEQ ID NO: 28935 - DNA, 20 bp, synthetic construct
  misc_feature 1..20: note = Description of Artificial Sequence: Synthetic oligonucleotide
  misc_feature 1..20: note = Target: SCN10A; (+) strand; PAM type: NRG; PAM sequence: GAG
  source 1..20: mol_type = other DNA
aagccctcaaatcttttctg

SEQ ID NO: 28936 - DNA, 20 bp, synthetic construct
  misc_feature 1..20: note = Description of Artificial Sequence: Synthetic oligonucleotide
  misc_feature 1..20: note = Target: SCN10A; (+) strand; PAM type: NRG; PAM sequence: GAG
  source 1..20: mol_type = other DNA
gccctcaaatcttttctgga

SEQ ID NO: 28937 - DNA, 20 bp, synthetic construct
  misc_feature 1..20: note = Description of Artificial Sequence: Synthetic oligonucleotide
  misc_feature 1..20: note = Target: SCN10A; (+) strand; PAM type: NRG; PAM sequence: AGG
  source 1..20: mol_type = other DNA
ccctcaaatcttttctggag

SEQ ID NO: 28938 - DNA, 20 bp, synthetic construct
  misc_feature 1..20: note = Description of Artificial Sequence: Synthetic oligonucleotide
  misc_feature 1..20: note = Target: SCN10A; (+) strand; PAM type: NRG; PAM sequence: GAG
  source 1..20: mol_type = other DNA
ctcaaatcttttctggagag

SEQ ID NO: 28939 - DNA, 20 bp, synthetic construct
  misc_feature 1..20: note = Description of Artificial Sequence: Synthetic oligonucleotide
  misc_feature 1..20: note = Target: SCN10A; (+) strand; PAM type: NRG; PAM sequence: AGG
  source 1..20: mol_type = other DNA
tcaaatcttttctggagagg

SEQ ID NO: 28940 - DNA, 20 bp, synthetic construct
  misc_feature 1..20: note = Description of Artificial Sequence: Synthetic oligonucleotide
  misc_feature 1..20: note = Target: SCN10A; (+) strand; PAM type: NRG; PAM sequence: GAG
  source 1..20: mol_type = other DNA
aaatcttttctggagaggag

SEQ ID NO: 28941 - DNA, 20 bp, synthetic construct
  misc_feature 1..20: note = Description of Artificial Sequence: Synthetic oligonucleotide
  misc_feature 1..20: note = Target: SCN10A; (+) strand; PAM type: NRG; PAM sequence: GAG
  source 1..20: mol_type = other DNA
ttttctggagaggaggagat

SEQ ID NO: 28942 - DNA, 20 bp, synthetic construct
  misc_feature 1..20: note = Description of Artificial Sequence: Synthetic oligonucleotide
  misc_feature 1..20: note = Target: SCN10A; (+) strand; PAM type: NRG; PAM sequence: AGG
  source 1..20: mol_type = other DNA
tttctggagaggaggagatg

SEQ ID NO: 28943 - DNA, 20 bp, synthetic construct
  misc_feature 1..20: note = Description of Artificial Sequence: Synthetic oligonucleotide
  misc_feature 1..20: note = Target: SCN10A; (+) strand; PAM type: NRG; PAM sequence: TGG
  source 1..20: mol_type = other DNA
gacaattactgccttatcct

SEQ ID NO: 28944 - DNA, 20 bp, synthetic construct
  misc_feature 1..20: note = Description of Artificial Sequence: Synthetic oligonucleotide
  misc_feature 1..20: note = Target: SCN10A; (+) strand; PAM type: NRG; PAM sequence: GGG
  source 1..20: mol_type = other DNA
acaattactgccttatcctt

SEQ ID NO: 28945 - DNA, 20 bp, synthetic construct
  misc_feature 1..20: note = Description of Artificial Sequence: Synthetic oligonucleotide
  misc_feature 1..20: note = Target: SCN10A; (+) strand; PAM type: NRG; PAM sequence: TGG
  source 1..20: mol_type = other DNA
ctgccttatccttgggtcct

SEQ ID NO: 28946 - DNA, 20 bp, synthetic construct
  misc_feature 1..20: note = Description of Artificial Sequence: Synthetic oligonucleotide
  misc_feature 1..20: note = Target: SCN10A; (+) strand; PAM type: NRG; PAM sequence: CAG
  source 1..20: mol_type = other DNA
tatccttgggtccttggtct

SEQ ID NO: 28947 - DNA, 20 bp, synthetic construct
  misc_feature 1..20: note = Description of Artificial Sequence: Synthetic oligonucleotide
  misc_feature 1..20: note = Target: SCN10A; (+) strand; PAM type: NRG; PAM sequence: GAG
  source 1..20: mol_type = other DNA
tccttgggtccttggtctca

SEQ ID NO: 28948 - DNA, 20 bp, synthetic construct
  misc_feature 1..20: note = Description of Artificial Sequence: Synthetic oligonucleotide
  misc_feature 1..20: note = Target: SCN10A; (+) strand; PAM type: NRG; PAM sequence: AGG
  source 1..20: mol_type = other DNA
ccttgggtccttggtctcag

SEQ ID NO: 28949 - DNA, 20 bp, synthetic construct
  misc_feature 1..20: note = Description of Artificial Sequence: Synthetic oligonucleotide
  misc_feature 1..20: note = Target: SCN10A; (+) strand; PAM type: NRG; PAM sequence: GGG
  source 1..20: mol_type = other DNA
cttgggtccttggtctcaga

SEQ ID NO: 28950 - DNA, 20 bp, synthetic construct
  misc_feature 1..20: note = Description of Artificial Sequence: Synthetic oligonucleotide
  misc_feature 1..20: note = Target: SCN10A; (+) strand; PAM type: NRG; PAM sequence: TGG
  source 1..20: mol_type = other DNA
cttggtctcagagggacctc

SEQ ID NO: 28951 - DNA, 20 bp, synthetic construct
  misc_feature 1..20: note = Description of Artificial Sequence: Synthetic oligonucleotide
  misc_feature 1..20: note = Target: SCN10A; (+) strand; PAM type: NRG; PAM sequence: GAG
  source 1..20: mol_type = other DNA
gagggacctctggttctctt

SEQ ID NO: 28952 - DNA, 20 bp, synthetic construct
  misc_feature 1..20: note = Description of Artificial Sequence: Synthetic oligonucleotide
  misc_feature 1..20: note = Target: SCN10A; (+) strand; PAM type: NRG; PAM sequence: AGG
  source 1..20: mol_type = other DNA
agggacctctggttctcttg

SEQ ID NO: 28953 - DNA, 20 bp, synthetic construct
  misc_feature 1..20: note = Description of Artificial Sequence: Synthetic oligonucleotide
  misc_feature 1..20: note = Target: SCN10A; (+) strand; PAM type: NRG; PAM sequence: CAG
  source 1..20: mol_type = other DNA
tggttctcttgaggccctgc

SEQ ID NO: 28954 - DNA, 20 bp, synthetic construct
  misc_feature 1..20: note = Description of Artificial Sequence: Synthetic oligonucleotide
  misc_feature 1..20: note = Target: SCN10A; (+) strand; PAM type: NRG; PAM sequence: CAG
  source 1..20: mol_type = other DNA
cacactgccctctgctgtta

SEQ ID NO: 28955 - DNA, 20 bp, synthetic construct
  misc_feature 1..20: note = Description of Artificial Sequence: Synthetic oligonucleotide
  misc_feature 1..20: note = Target: SCN10A; (+) strand; PAM type: NRG; PAM sequence: CAG
  source 1..20: mol_type = other DNA
gccctctgctgttacagtgc

SEQ ID NO: 28956 - DNA, 20 bp, synthetic construct
  misc_feature 1..20: note = Description of Artificial Sequence: Synthetic oligonucleotide
  misc_feature 1..20: note = Target: SCN10A; (+) strand; PAM type: NRG; PAM sequence: AAG
  source 1..20: mol_type = other DNA
tgccagaaactgcaccaacg

SEQ ID NO: 28957 - DNA, 20 bp, synthetic construct
  misc_feature 1..20: note = Description of Artificial Sequence: Synthetic oligonucleotide
  misc_feature 1..20: note = Target: SCN10A; (+) strand; PAM type: NRG; PAM sequence: TAG
  source 1..20: mol_type = other DNA
acgaagatgttttcctccct

SEQ ID NO: 28958 - DNA, 20 bp, synthetic construct
  misc_feature 1..20: note = Description of Artificial Sequence: Synthetic oligonucleotide
  misc_feature 1..20: note = Target: SCN10A; (+) strand; PAM type: NRG; PAM sequence: AGG
  source 1..20: mol_type = other DNA
cgaagatgttttcctccctt

SEQ ID NO: 28959 - DNA, 20 bp, synthetic construct
  misc_feature 1..20: note = Description of Artificial Sequence: Synthetic oligonucleotide
  misc_feature 1..20: note = Target: SCN10A; (+) strand; PAM type: NRG; PAM sequence: TGG
  source 1..20: mol_type = other DNA
atgttttcctcccttaggat

SEQ ID NO: 28960 - DNA, 20 bp, synthetic construct
  misc_feature 1..20: note = Description of Artificial Sequence: Synthetic oligonucleotide
  misc_feature 1..20: note = Target: SCN10A; (+) strand; PAM type: NRG; PAM sequence: GGG
  source 1..20: mol_type = other DNA
tgttttcctcccttaggatt

SEQ ID NO: 28961 - DNA, 20 bp, synthetic construct
  misc_feature 1..20: note = Description of Artificial Sequence: Synthetic oligonucleotide
  misc_feature 1..20: note = Target: SCN10A; (+) strand; PAM type: NRG; PAM sequence: TAG
  source 1..20: mol_type = other DNA
cctcccttaggattgggtat

SEQ ID NO: 28962 - DNA, 20 bp, synthetic construct
  misc_feature 1..20: note = Description of Artificial Sequence: Synthetic oligonucleotide
  misc_feature 1..20: note = Target: SCN10A; (+) strand; PAM type: NRG; PAM sequence: TAG
  source 1..20: mol_type = other DNA
attgggtattagtttttctt

SEQ ID NO: 28963 - DNA, 20 bp, synthetic construct
  misc_feature 1..20: note = Description of Artificial Sequence: Synthetic oligonucleotide
  misc_feature 1..20: note = Target: SCN10A; (+) strand; PAM type: NRG; PAM sequence: AGG
  source 1..20: mol_type = other DNA
ttgggtattagtttttcttt

SEQ ID NO: 28964 - DNA, 20 bp, synthetic construct
  misc_feature 1..20: note = Description of Artificial Sequence: Synthetic oligonucleotide
  misc_feature 1..20: note = Target: SCN10A; (+) strand; PAM type: NRG; PAM sequence: GGG
  source 1..20: mol_type = other DNA
tgggtattagtttttcttta

SEQ ID NO: 28965 - DNA, 20 bp, synthetic construct
  misc_feature 1..20: note = Description of Artificial Sequence: Synthetic oligonucleotide
  misc_feature 1..20: note = Target: SCN10A; (+) strand; PAM type: NRG; PAM sequence: GGG
  source 1..20: mol_type = other DNA
gggtattagtttttctttag

SEQ ID NO: 28966 - DNA, 20 bp, synthetic construct
  misc_feature 1..20: note = Description of Artificial Sequence: Synthetic oligonucleotide
  misc_feature 1..20: note = Target: SCN10A; (+) strand; PAM type: NRG; PAM sequence: TGG
  source 1..20: mol_type = other DNA
gtttttctttaggggccctt

SEQ ID NO: 28967 - DNA, 20 bp, synthetic construct
  misc_feature 1..20: note = Description of Artificial Sequence: Synthetic oligonucleotide
  misc_feature 1..20: note = Target: SCN10A; (+) strand; PAM type: NRG; PAM sequence: TAG
  source 1..20: mol_type = other DNA
ttcattcaaactctcacctt

SEQ ID NO: 28968 - DNA, 20 bp, synthetic construct
  misc_feature 1..20: note = Description of Artificial Sequence: Synthetic oligonucleotide
  misc_feature 1..20: note = Target: SCN10A; (+) strand; PAM type: NRG; PAM sequence: AAG
  source 1..20: mol_type = other DNA
agcttcctgacataatttga

SEQ ID NO: 28969 - DNA, 20 bp, synthetic construct
  misc_feature 1..20: note = Description of Artificial Sequence: Synthetic oligonucleotide
  misc_feature 1..20: note = Target: SCN10A; (+) strand; PAM type: NRG; PAM sequence: AAG
  source 1..20: mol_type = other DNA
ttttaataacatgtttatgt

SEQ ID NO: 28970 - DNA, 20 bp, synthetic construct
  misc_feature 1..20: note = Description of Artificial Sequence: Synthetic oligonucleotide
  misc_feature 1..20: note = Target: SCN10A; (+) strand; PAM type: NRG; PAM sequence: TAG
  source 1..20: mol_type = other DNA
aataacatgtttatgtaagt

SEQ ID NO: 28971 - DNA, 20 bp, synthetic construct
  misc_feature 1..20: note = Description of Artificial Sequence: Synthetic oligonucleotide
  misc_feature 1..20: note = Target: SCN10A; (+) strand; PAM type: NRG; PAM sequence: TGG
  source 1..20: mol_type = other DNA
aagttagtccctgcaaatgc

SEQ ID NO: 28972 - DNA, 20 bp, synthetic construct
  misc_feature 1..20: note = Description of Artificial Sequence: Synthetic oligonucleotide
  misc_feature 1..20: note = Target: SCN10A; (+) strand; PAM type: NRG; PAM sequence: GGG
  source 1..20: mol_type = other DNA
agttagtccctgcaaatgct

SEQ ID NO: 28973 - DNA, 20 bp, synthetic construct
  misc_feature 1..20: note = Description of Artificial Sequence: Synthetic oligonucleotide
  misc_feature 1..20: note = Target: SCN10A; (+) strand; PAM type: NRG; PAM sequence: TGG
  source 1..20: mol_type = other DNA
ccctgcaaatgctgggaaac

SEQ ID NO: 28974 - DNA, 20 bp, synthetic construct
  misc_feature 1..20: note = Description of Artificial Sequence: Synthetic oligonucleotide
  misc_feature 1..20: note = Target: SCN10A; (+) strand; PAM type: NRG; PAM sequence: GGG
  source 1..20: mol_type = other DNA
cctgcaaatgctgggaaact

SEQ ID NO: 28975 - DNA, 20 bp, synthetic construct
  misc_feature 1..20: note = Description of Artificial Sequence: Synthetic oligonucleotide
  misc_feature 1..20: note = Target: SCN10A; (+) strand; PAM type: NRG; PAM sequence: GAG
  source 1..20: mol_type = other DNA
aaatgctgggaaactgggct

SEQ ID NO: 28976 - DNA, 20 bp, synthetic construct
  misc_feature 1..20: note = Description of Artificial Sequence: Synthetic oligonucleotide
  misc_feature 1..20: note = Target: SCN10A; (+) strand; PAM type: NRG; PAM sequence: TGG
  source 1..20: mol_type = other DNA
ggaaactgggctgagatctg

SEQ ID NO: 28977 - DNA, 20 bp, synthetic construct
  misc_feature 1..20: note = Description of Artificial Sequence: Synthetic oligonucleotide
  misc_feature 1..20: note = Target: SCN10A; (+) strand; PAM type: NRG; PAM sequence: AAG
  source 1..20: mol_type = other DNA
ctgagatctgtggaatttga

SEQ ID NO: 28978 - DNA, 20 bp, synthetic construct
  misc_feature 1..20: note = Description of Artificial Sequence: Synthetic oligonucleotide
  misc_feature 1..20: note = Target: SCN10A; (+) strand; PAM type: NRG; PAM sequence: AGG
  source 1..20: mol_type = other DNA
tgagatctgtggaatttgaa

SEQ ID NO: 28979 - DNA, 20 bp, synthetic construct
  misc_feature 1..20: note = Description of Artificial Sequence: Synthetic oligonucleotide
  misc_feature 1..20: note = Target: SCN10A; (+) strand; PAM type: NRG; PAM sequence: GAG
  source 1..20: mol_type = other DNA
agatctgtggaatttgaaag

SEQ ID NO: 28980 - DNA, 20 bp, synthetic construct
  misc_feature 1..20: note = Description of Artificial Sequence: Synthetic oligonucleotide
  misc_feature 1..20: note = Target: SCN10A; (+) strand; PAM type: NRG; PAM sequence: GAG
  source 1..20: mol_type = other DNA
tggaatttgaaaggagatct

SEQ ID NO: 28981 - DNA, 20 bp, synthetic construct
  misc_feature 1..20: note = Description of Artificial Sequence: Synthetic oligonucleotide
  misc_feature 1..20: note = Target: SCN10A; (+) strand; PAM type: NRG; PAM sequence: AAG
  source 1..20: mol_type = other DNA
aatttgaaaggagatctgag

SEQ ID NO: 28982 - DNA, 20 bp, synthetic construct
  misc_feature 1..20: note = Description of Artificial Sequence: Synthetic oligonucleotide
  misc_feature 1..20: note = Target: SCN10A; (+) strand; PAM type: NRG; PAM sequence: TGG
  source 1..20: mol_type = other DNA
aggagatctgagaagatctg

SEQ ID NO: 28983 - DNA, 20 bp, synthetic construct
  misc_feature 1..20: note = Description of Artificial Sequence: Synthetic oligonucleotide
  misc_feature 1..20: note = Target: SCN10A; (+) strand; PAM type: NRG; PAM sequence: AAG
  source 1..20: mol_type = other DNA
tgagaagatctgtggacaca

SEQ ID NO: 28984 - DNA, 20 bp, synthetic construct
  misc_feature 1..20: note = Description of Artificial Sequence: Synthetic oligonucleotide
  misc_feature 1..20: note = Target: SCN10A; (+) strand; PAM type: NRG; PAM sequence: AGG
  source 1..20: mol_type = other DNA
gagaagatctgtggacacaa

SEQ ID NO: 28985 - DNA, 20 bp, synthetic construct
  misc_feature 1..20: note = Description of Artificial Sequence: Synthetic oligonucleotide
  misc_feature 1..20: note = Target: SCN10A; (+) strand; PAM type: NRG; PAM sequence: GGG
  source 1..20: mol_type = other DNA
agaagatctgtggacacaaa

SEQ ID NO: 28986 - DNA, 20 bp, synthetic construct
  misc_feature 1..20: note = Description of Artificial Sequence: Synthetic oligonucleotide
  misc_feature 1..20: note = Target: SCN10A; (+) strand; PAM type: NRG; PAM sequence: TGG
  source 1..20: mol_type = other DNA
tgtggacacaaagggcttcc

SEQ ID NO: 28987 - DNA, 20 bp, synthetic construct
  misc_feature 1..20: note = Description of Artificial Sequence: Synthetic oligonucleotide
  misc_feature 1..20: note = Target: SCN10A; (+) strand; PAM type: NRG; PAM sequence: GGG
  source 1..20: mol_type = other DNA
gtggacacaaagggcttcct

SEQ ID NO: 28988 - DNA, 20 bp, synthetic construct
  misc_feature 1..20: note = Description of Artificial Sequence: Synthetic oligonucleotide
  misc_feature 1..20: note = Target: SCN10A; (+) strand; PAM type: NRG; PAM sequence: GAG
  source 1..20: mol_type = other DNA
ggacacaaagggcttcctgg

SEQ ID NO: 28989 - DNA, 20 bp, synthetic construct
  misc_feature 1..20: note = Description of Artificial Sequence: Synthetic oligonucleotide
  misc_feature 1..20: note = Target: SCN10A; (+) strand; PAM type: NRG; PAM sequence: AGG
  source 1..20: mol_type = other DNA
gacacaaagggcttcctggg

SEQ ID NO: 28990 - DNA, 20 bp, synthetic construct
  misc_feature 1..20: note = Description of Artificial Sequence: Synthetic oligonucleotide
  misc_feature 1..20: note = Target: SCN10A; (+) strand; PAM type: NRG; PAM sequence: TGG
  source 1..20: mol_type = other DNA
tcctgggaggaccatcttta

SEQ ID NO: 28991 - DNA, 20 bp, synthetic construct
  misc_feature 1..20: note = Description of Artificial Sequence: Synthetic oligonucleotide
  misc_feature 1..20: note = Target: SCN10A; (+) strand; PAM type: NRG; PAM sequence: GGG
  source 1..20: mol_type = other DNA
cctgggaggaccatctttat

SEQ ID NO: 28992 - DNA, 20 bp, synthetic construct
  misc_feature 1..20: note = Description of Artificial Sequence: Synthetic oligonucleotide
  misc_feature 1..20: note = Target: SCN10A; (+) strand; PAM type: NRG; PAM sequence: GGG
  source 1..20: mol_type = other DNA
ctgggaggaccatctttatg

SEQ ID NO: 28993 - DNA, 20 bp, synthetic construct
  misc_feature 1..20: note = Description of Artificial Sequence: Synthetic oligonucleotide
  misc_feature 1..20: note = Target: SCN10A; (+) strand; PAM type: NRG; PAM sequence: GGG
  source 1..20: mol_type = other DNA
tgggaggaccatctttatgg

SEQ ID NO: 28994 - DNA, 20 bp, synthetic construct
  misc_feature 1..20: note = Description of Artificial Sequence: Synthetic oligonucleotide
  misc_feature 1..20: note = Target: SCN10A; (+) strand; PAM type: NRG; PAM sequence: GGG
  source 1..20: mol_type = other DNA
gggaggaccatctttatggg

SEQ ID NO: 28995 - DNA, 20 bp, synthetic construct
  misc_feature 1..20: note = Description of Artificial Sequence: Synthetic oligonucleotide
  misc_feature 1..20: note = Target: SCN10A; (+) strand; PAM type: NRG; PAM sequence: GAG
  source 1..20: mol_type = other DNA
gaggaccatctttatggggg

SEQ ID NO: 28996 - DNA, 20 bp, synthetic construct
  misc_feature 1..20: note = Description of Artificial Sequence: Synthetic oligonucleotide
  misc_feature 1..20: note = Target: SCN10A; (+) strand; PAM type: NRG; PAM sequence: GAG
  source 1..20: mol_type = other DNA
ggaccatctttatgggggga

SEQ ID NO: 28997 - DNA, 20 bp, synthetic construct
  misc_feature 1..20: note = Description of Artificial Sequence: Synthetic oligonucleotide
  misc_feature 1..20: note = Target: SCN10A; (+) strand; PAM type: NRG; PAM sequence: AAG
  source 1..20: mol_type = other DNA
ccatctttatggggggagag

SEQ ID NO: 28998 - DNA, 20 bp, synthetic construct
  misc_feature 1..20: note = Description of Artificial Sequence: Synthetic oligonucleotide
  misc_feature 1..20: note = Target: SCN10A; (+) strand; PAM type: NRG; PAM sequence: AGG
  source 1..20: mol_type = other DNA
catctttatggggggagaga

SEQ ID NO: 28999 - DNA, 20 bp, synthetic construct
  misc_feature 1..20: note = Description of Artificial Sequence: Synthetic oligonucleotide
  misc_feature 1..20: note = Target: SCN10A; (+) strand; PAM type: NRG; PAM sequence: AAG
  source 1..20: mol_type = other DNA
tttatggggggagagaagga

SEQ ID NO: 29000 - DNA, 20 bp, synthetic construct
  misc_feature 1..20: note = Description of Artificial Sequence: Synthetic oligonucleotide
  misc_feature 1..20: note = Target: SCN10A; (+) strand; PAM type: NRG; PAM sequence: AGG
  source 1..20: mol_type = other DNA
ttatggggggagagaaggaa

SEQ ID NO: 29001 - DNA, 20 bp, synthetic construct
  misc_feature 1..20: note = Description of Artificial Sequence: Synthetic oligonucleotide
  misc_feature 1..20: note = Target: SCN10A; (+) strand; PAM type: NRG; PAM sequence: GGG
  source 1..20: mol_type = other DNA
tatggggggagagaaggaaa

SEQ ID NO: 29002 - DNA, 20 bp, synthetic construct
  misc_feature 1..20: note = Description of Artificial Sequence: Synthetic oligonucleotide
  misc_feature 1..20: note = Target: SCN10A; (+) strand; PAM type: NRG; PAM sequence: AAG
  source 1..20: mol_type = other DNA
gggggagagaaggaaagggc

SEQ ID NO: 29003 - DNA, 20 bp, synthetic construct
  misc_feature 1..20: note = Description of Artificial Sequence: Synthetic oligonucleotide
  misc_feature 1..20: note = Target: SCN10A; (+) strand; PAM type: NRG; PAM sequence: AGG
  source 1..20: mol_type = other DNA
ggggagagaaggaaagggca

SEQ ID NO: 29004 - DNA, 20 bp, synthetic construct
  misc_feature 1..20: note = Description of Artificial Sequence: Synthetic oligonucleotide
  misc_feature 1..20: note = Target: SCN10A; (+) strand; PAM type: NRG; PAM sequence: GGG
  source 1..20: mol_type = other DNA
gggagagaaggaaagggcaa

SEQ ID NO: 29005 - DNA, 20 bp, synthetic construct
  misc_feature 1..20: note = Description of Artificial Sequence: Synthetic oligonucleotide
  misc_feature 1..20: note = Target: SCN10A; (+) strand; PAM type: NRG; PAM sequence: CAG
  source 1..20: mol_type = other DNA
agagaaggaaagggcaaggg

SEQ ID NO: 29006 - DNA, 20 bp, synthetic construct
  misc_feature 1..20: note = Description of Artificial Sequence: Synthetic oligonucleotide
  misc_feature 1..20: note = Target: SCN10A; (+) strand; PAM type: NRG; PAM sequence: TGG
  source 1..20: mol_type = other DNA
gaaggaaagggcaagggcag

SEQ ID NO: 29007 - DNA, 20 bp, synthetic construct
  misc_feature 1..20: note = Description of Artificial Sequence: Synthetic oligonucleotide
  misc_feature 1..20: note = Target: SCN10A; (+) strand; PAM type: NRG; PAM sequence: GGG
  source 1..20: mol_type = other DNA
aaggaaagggcaagggcagt

SEQ ID NO: 29008 - DNA, 20 bp, synthetic construct
  misc_feature 1..20: note = Description of Artificial Sequence: Synthetic oligonucleotide
  misc_feature 1..20: note = Target: SCN10A; (+) strand; PAM type: NRG; PAM sequence: TAG
  source 1..20: mol_type = other DNA
gaaagggcaagggcagtggg

SEQ ID NO: 29009 - DNA, 20 bp, synthetic construct
  misc_feature 1..20: note = Description of Artificial Sequence: Synthetic oligonucleotide
  misc_feature 1..20: note = Target: SCN10A; (+) strand; PAM type: NRG; PAM sequence: AGG
  source 1..20: mol_type = other DNA
aaagggcaagggcagtgggt

SEQ ID NO: 29010 - DNA, 20 bp, synthetic construct
  misc_feature 1..20: note = Description of Artificial Sequence: Synthetic oligonucleotide
  misc_feature 1..20: note = Target: SCN10A; (+) strand; PAM type: NRG; PAM sequence: GAG
  source 1..20: mol_type = other DNA
ggcaagggcagtgggtaggt

SEQ ID NO: 29011 - DNA, 20 bp, synthetic construct
  misc_feature 1..20: note = Description of Artificial Sequence: Synthetic oligonucleotide
  misc_feature 1..20: note = Target: SCN10A; (+) strand; PAM type: NRG; PAM sequence: CAG
  source 1..20: mol_type = other DNA
ggcagtgggtaggtgagctc

SEQ ID NO: 29012 - DNA, 20 bp, synthetic construct
  misc_feature 1..20: note = Description of Artificial Sequence: Synthetic oligonucleotide
  misc_feature 1..20: note = Target: SCN10A; (+) strand; PAM type: NRG; PAM sequence: AGG
  source 1..20: mol_type = other DNA
gcagtgggtaggtgagctcc

SEQ ID NO: 29013 - DNA, 20 bp, synthetic construct
  misc_feature 1..20: note = Description of Artificial Sequence: Synthetic oligonucleotide
  misc_feature 1..20: note = Target: SCN10A; (+) strand; PAM type: NRG; PAM sequence: GAG
  source 1..20: mol_type = other DNA
tgggtaggtgagctccaggt

SEQ ID NO: 29014 - DNA, 20 bp, synthetic construct
  misc_feature 1..20: note = Description of Artificial Sequence: Synthetic oligonucleotide
  misc_feature 1..20: note = Target: SCN10A; (+) strand; PAM type: NRG; PAM sequence: AGG
  source 1..20: mol_type = other DNA
gggtaggtgagctccaggtg

SEQ ID NO: 29015 - DNA, 20 bp, synthetic construct
  misc_feature 1..20: note = Description of Artificial Sequence: Synthetic oligonucleotide
  misc_feature 1..20: note = Target: SCN10A; (+) strand; PAM type: NRG; PAM sequence: GAG
  source 1..20: mol_type = other DNA
gctccaggtgaggtcatgct

SEQ ID NO: 29016 - DNA, 20 bp, synthetic construct
  misc_feature 1..20: note = Description of Artificial Sequence: Synthetic oligonucleotide
  misc_feature 1..20: note = Target: SCN10A; (+) strand; PAM type: NRG; PAM sequence: AAG
  source 1..20: mol_type = other DNA
tcatgctgagaactctgacc

SEQ ID NO: 29017 - DNA, 20 bp, synthetic construct
  misc_feature 1..20: note = Description of Artificial Sequence: Synthetic oligonucleotide
  misc_feature 1..20: note = Target: SCN10A; (+) strand; PAM type: NRG; PAM sequence: AGG
  source 1..20: mol_type = other DNA
catgctgagaactctgacca

SEQ ID NO: 29018 - DNA, 20 bp, synthetic construct
  misc_feature 1..20: note = Description of Artificial Sequence: Synthetic oligonucleotide
  misc_feature 1..20: note = Target: SCN10A; (+) strand; PAM type: NRG; PAM sequence: CAG
  source 1..20: mol_type = other DNA
gagaactctgaccaaggatt

SEQ ID NO: 29019 - DNA, 20 bp, synthetic construct
  misc_feature 1..20: note = Description of Artificial Sequence: Synthetic oligonucleotide
  misc_feature 1..20: note = Target: SCN10A; (+) strand; PAM type: NRG; PAM sequence: TAG
  source 1..20: mol_type = other DNA
aactctgaccaaggattcag

SEQ ID NO: 29020 - DNA, 20 bp, synthetic construct
  misc_feature 1..20: note = Description of Artificial Sequence: Synthetic oligonucleotide
  misc_feature 1..20: note = Target: SCN10A; (+) strand; PAM type: NRG; PAM sequence: CAG
  source 1..20: mol_type = other DNA
gaccaaggattcagtagatg

SEQ ID NO: 29021 - DNA, 20 bp, synthetic construct
  misc_feature 1..20: note = Description of Artificial Sequence: Synthetic oligonucleotide
  misc_feature 1..20: note = Target: SCN10A; (+) strand; PAM type: NRG; PAM sequence: CAG
  source 1..20: mol_type = other DNA
attcagtagatgcagtttct

SEQ ID NO: 29022 - DNA, 20 bp, synthetic construct
  misc_feature 1..20: note = Description of Artificial Sequence: Synthetic oligonucleotide
  misc_feature 1..20: note = Target: SCN10A; (+) strand; PAM type: NRG; PAM sequence: CAG
  source 1..20: mol_type = other DNA
atgcagtttctcagtgaccc

SEQ ID NO: 29023 - DNA, 20 bp, synthetic construct
  misc_feature 1..20: note = Description of Artificial Sequence: Synthetic oligonucleotide
  misc_feature 1..20: note = Target: SCN10A; (+) strand; PAM type: NRG; PAM sequence: TGG
  source 1..20: mol_type = other DNA
gtttctcagtgaccccagcc

SEQ ID NO: 29024 - DNA, 20 bp, synthetic construct
  misc_feature 1..20: note = Description of Artificial Sequence: Synthetic oligonucleotide
  misc_feature 1..20: note = Target: SCN10A; (+) strand; PAM type: NRG; PAM sequence: TAG
  source 1..20: mol_type = other DNA
agtgaccccagcctggtcac

SEQ ID NO: 29025 - DNA, 20 bp, synthetic construct
  misc_feature 1..20: note = Description of Artificial Sequence: Synthetic oligonucleotide
  misc_feature 1..20: note = Target: SCN10A; (+) strand; PAM type: NRG; PAM sequence: CAG
  source 1..20: mol_type = other DNA
tgtaatctgtttcttgacct

SEQ ID NO: 29026 - DNA, 20 bp, synthetic construct
  misc_feature 1..20: note = Description of Artificial Sequence: Synthetic oligonucleotide
  misc_feature 1..20: note = Target: SCN10A; (+) strand; PAM type: NRG; PAM sequence: GAG
  source 1..20: mol_type = other DNA
agttttctcatctgtaaaat

SEQ ID NO: 29027 - DNA, 20 bp, synthetic construct
  misc_feature 1..20: note = Description of Artificial Sequence: Synthetic oligonucleotide
  misc_feature 1..20: note = Target: SCN10A; (+) strand; PAM type: NRG; PAM sequence: GAG
  source 1..20: mol_type = other DNA
ttttctcatctgtaaaatga

SEQ ID NO: 29028 - DNA, 20 bp, synthetic construct
  misc_feature 1..20: note = Description of Artificial Sequence: Synthetic oligonucleotide
  misc_feature 1..20: note = Target: SCN10A; (+) strand; PAM type: NRG; PAM sequence: CAG
  source 1..20: mol_type = other DNA
tcaataatctcaaacctccc

SEQ ID NO: 29029 - DNA, 20 bp, synthetic construct
  misc_feature 1..20: note = Description of Artificial Sequence: Synthetic oligonucleotide
  misc_feature 1..20: note = Target: SCN10A; (+) strand; PAM type: NRG; PAM sequence: AGG
  source 1..20: mol_type = other DNA
caataatctcaaacctcccc

SEQ ID NO: 29030 - DNA, 20 bp, synthetic construct
  misc_feature 1..20: note = Description of Artificial Sequence: Synthetic oligonucleotide
  misc_feature 1..20: note = Target: SCN10A; (+) strand; PAM type: NRG; PAM sequence: GGG
  source 1..20: mol_type = other DNA
aataatctcaaacctcccca

SEQ ID NO: 29031 - DNA, 20 bp, synthetic construct
  misc_feature 1..20: note = Description of Artificial Sequence: Synthetic oligonucleotide
  misc_feature 1..20: note = Target: SCN10A; (+) strand; PAM type: NRG; PAM sequence: TAG
  source 1..20: mol_type = other DNA
aacctccccagggtactaaa

SEQ ID NO: 29032 - DNA, 20 bp, synthetic construct
  misc_feature 1..20: note = Description of Artificial Sequence: Synthetic oligonucleotide
  misc_feature 1..20: note = Target: SCN10A; (+) strand; PAM type: NRG; PAM sequence: CAG
  source 1..20: mol_type = other DNA
taaatagcactgtcttgtcc

SEQ ID NO: 29033 - DNA, 20 bp, synthetic construct
  misc_feature 1..20: note = Description of Artificial Sequence: Synthetic oligonucleotide
  misc_feature 1..20: note = Target: SCN10A; (+) strand; PAM type: NRG; PAM sequence: CAG
  source 1..20: mol_type = other DNA
tcctgtcctcttcttatgct

SEQ ID NO: 29034 - DNA, 20 bp, synthetic construct
  misc_feature 1..20: note = Description of Artificial Sequence: Synthetic oligonucleotide
  misc_feature 1..20: note = Target: SCN10A; (+) strand; PAM type: NRG; PAM sequence: TGG
  source 1..20: mol_type = other DNA
tcttcttatgctcagaaccc

SEQ ID NO: 29035 - DNA, 20 bp, synthetic construct
  misc_feature 1..20: note = Description of Artificial Sequence: Synthetic oligonucleotide
  misc_feature 1..20: note = Target: SCN10A; (+) strand; PAM type: NRG; PAM sequence: GGG
  source 1..20: mol_type = other DNA
cttcttatgctcagaaccct

SEQ ID NO: 29036 - DNA, 20 bp, synthetic construct
  misc_feature 1..20: note = Description of Artificial Sequence: Synthetic oligonucleotide
  misc_feature 1..20: note = Target: SCN10A; (+) strand; PAM type: NRG; PAM sequence: AAG
  source 1..20: mol_type = other DNA
ttatgctcagaaccctgggc

SEQ ID NO: 29037 - DNA, 20 bp, synthetic construct
  misc_feature 1..20: note = Description of Artificial Sequence: Synthetic oligonucleotide
  misc_feature 1..20: note = Target: SCN10A; (+) strand; PAM type: NRG; PAM sequence: AGG
  source 1..20: mol_type = other DNA
tatgctcagaaccctgggca

SEQ ID NO: 29038 - DNA, 20 bp, synthetic construct
  misc_feature 1..20: note = Description of Artificial Sequence: Synthetic oligonucleotide
  misc_feature 1..20: note = Target: SCN10A; (+) strand; PAM type: NRG; PAM sequence: AAG
  source 1..20: mol_type = other DNA
cctgggcaaggatttcctgt

SEQ ID NO: 29039 - DNA, 20 bp, synthetic construct
  misc_feature 1..20: note = Description of Artificial Sequence: Synthetic oligonucleotide
  misc_feature 1..20: note = Target: SCN10A; (+) strand; PAM type: NRG; PAM sequence: TGG
  source 1..20: mol_type = other DNA
gggcaaggatttcctgtaag

SEQ ID NO: 29040 - DNA, 20 bp, synthetic construct
  misc_feature 1..20: note = Description of Artificial Sequence: Synthetic oligonucleotide
  misc_feature 1..20: note = Target: SCN10A; (+) strand; PAM type: NRG; PAM sequence: TAG
  source 1..20: mol_type = other DNA
tgtaagtggaatgcctgccc

SEQ ID NO: 29041 - DNA, 20 bp, synthetic construct
  misc_feature 1..20: note = Description of Artificial Sequence: Synthetic oligonucleotide
  misc_feature 1..20: note = Target: SCN10A; (+) strand; PAM type: NRG; PAM sequence: TAG
  source 1..20: mol_type = other DNA
aagtggaatgcctgccctag

SEQ ID NO: 29042 - DNA, 20 bp, synthetic construct
  misc_feature 1..20: note = Description of Artificial Sequence: Synthetic oligonucleotide
  misc_feature 1..20: note = Target: SCN10A; (+) strand; PAM type: NRG; PAM sequence: AGG
  source 1..20: mol_type = other DNA
agtggaatgcctgccctagt

SEQ ID NO: 29043 - DNA, 20 bp, synthetic construct
  misc_feature 1..20: note = Description of Artificial Sequence: Synthetic oligonucleotide
  misc_feature 1..20: note = Target: SCN10A; (+) strand; PAM type: NRG; PAM sequence: TAG
  source 1..20: mol_type = other DNA
tatatattttaaattgttaa

SEQ ID NO: 29044 - DNA, 20 bp, synthetic construct
  misc_feature 1..20: note = Description of Artificial Sequence: Synthetic oligonucleotide
  misc_feature 1..20: note = Target: SCN10A; (+) strand; PAM type: NRG; PAM sequence: CAG
  source 1..20: mol_type = other DNA
ttttaaattgttaatagcaa

SEQ ID NO: 29045 - DNA, 20 bp, synthetic construct
  misc_feature 1..20: note = Description of Artificial Sequence: Synthetic oligonucleotide
  misc_feature 1..20: note = Target: SCN10A; (+) strand; PAM type: NRG; PAM sequence: TGG
  source 1..20: mol_type = other DNA
ttgttaatagcaacagcatc

SEQ ID NO: 29046 - DNA, 20 bp, synthetic construct
  misc_feature 1..20: note = Description of Artificial Sequence: Synthetic oligonucleotide
  misc_feature 1..20: note = Target: SCN10A; (+) strand; PAM type: NRG; PAM sequence: GAG
  source 1..20: mol_type = other DNA
caacagcatctggtgctctt

SEQ ID NO: 29047 - DNA, 20 bp, synthetic construct
  misc_feature 1..20: note = Description of Artificial Sequence: Synthetic oligonucleotide
  misc_feature 1..20: note = Target: SCN10A; (+) strand; PAM type: NRG; PAM sequence: AGG
  source 1..20: mol_type = other DNA
aacagcatctggtgctcttg

SEQ ID NO: 29048 - DNA, 20 bp, synthetic construct
  misc_feature 1..20: note = Description of Artificial Sequence: Synthetic oligonucleotide
  misc_feature 1..20: note = Target: SCN10A; (+) strand; PAM type: NRG; PAM sequence: CAG
  source 1..20: mol_type = other DNA
tggtgctcttgaggcgctgc

SEQ ID NO: 29049 - DNA, 20 bp, synthetic construct
  misc_feature 1..20: note = Description of Artificial Sequence: Synthetic oligonucleotide
  misc_feature 1..20: note = Target: SCN10A; (+) strand; PAM type: NRG; PAM sequence: CAG
  source 1..20: mol_type = other DNA
cacactcccctctgctgtta

SEQ ID NO: 29050 - DNA, 20 bp, synthetic construct
  misc_feature 1..20: note = Description of Artificial Sequence: Synthetic oligonucleotide
  misc_feature 1..20: note = Target: SCN10A; (+) strand; PAM type: NRG; PAM sequence: CAG
  source 1..20: mol_type = other DNA
cccctctgctgttacagtgc

SEQ ID NO: 29051 - DNA, 20 bp, synthetic construct
  misc_feature 1..20: note = Description of Artificial Sequence: Synthetic oligonucleotide
  misc_feature 1..20: note = Target: SCN10A; (+) strand; PAM type: NRG; PAM sequence: AAG
  source 1..20: mol_type = other DNA
tgccagaaactgcaccacca

SEQ ID NO: 29052 - DNA, 20 bp, synthetic construct
  misc_feature 1..20: note = Description of Artificial Sequence: Synthetic oligonucleotide
  misc_feature 1..20: note = Target: SCN10A; (+) strand; PAM type: NRG; PAM sequence: CAG
  source 1..20: mol_type = other DNA
caccaaagttgtcttatgct

SEQ ID NO: 29053 - DNA, 20 bp, synthetic construct
  misc_feature 1..20: note = Description of Artificial Sequence: Synthetic oligonucleotide
  misc_feature 1..20: note = Target: SCN10A; (+) strand; PAM type: NRG; PAM sequence: CAG
  source 1..20: mol_type = other DNA
tatgctcagtgatctttgtt

SEQ ID NO: 29054 - DNA, 20 bp, synthetic construct
  misc_feature 1..20: note = Description of Artificial Sequence: Synthetic oligonucleotide
  misc_feature 1..20: note = Target: SCN10A; (+) strand; PAM type: NRG; PAM sequence: AGG
  source 1..20: mol_type = other DNA
atgctcagtgatctttgttc

SEQ ID NO: 29055 - DNA, 20 bp, synthetic construct
  misc_feature 1..20: note = Description of Artificial Sequence: Synthetic oligonucleotide
  misc_feature 1..20: note = Target: SCN10A; (+) strand; PAM type: NRG; PAM sequence: CAG
  source 1..20: mol_type = other DNA
gtttacccctcaccacaatc

SEQ ID NO: 29056 - DNA, 20 bp, synthetic construct
  misc_feature 1..20: note = Description of Artificial Sequence: Synthetic oligonucleotide
  misc_feature 1..20: note = Target: SCN10A; (+) strand; PAM type: NRG; PAM sequence: GAG
  source 1..20: mol_type = other DNA
ttacccctcaccacaatcca

SEQ ID NO: 29057 - DNA, 20 bp, synthetic construct
  misc_feature 1..20: note = Description of Artificial Sequence: Synthetic oligonucleotide
  misc_feature 1..20: note = Target: SCN10A; (+) strand; PAM type: NRG; PAM sequence: GAG
  source 1..20: mol_type = other DNA
acccctcaccacaatccaga

SEQ ID NO: 29058 - DNA, 20 bp, synthetic construct
  misc_feature 1..20: note = Description of Artificial Sequence: Synthetic oligonucleotide
  misc_feature 1..20: note = Target: SCN10A; (+) strand; PAM type: NRG; PAM sequence: TAG
  source 1..20: mol_type = other DNA
cctcaccacaatccagagag

SEQ ID NO: 29059 - DNA, 20 bp, synthetic construct
  misc_feature 1..20: note = Description of Artificial Sequence: Synthetic oligonucleotide
  misc_feature 1..20: note = Target: SCN10A; (+) strand; PAM type: NRG; PAM sequence: AGG
  source 1..20: mol_type = other DNA
ctcaccacaatccagagagt

SEQ ID NO: 29060 - DNA, 20 bp, synthetic construct
  misc_feature 1..20: note = Description of Artificial Sequence: Synthetic oligonucleotide
  misc_feature 1..20: note = Target: SCN10A; (+) strand; PAM type: NRG; PAM sequence: TAG
  source 1..20: mol_type = other DNA
atccagagagtaggtattat

SEQ ID NO: 29061 - DNA, 20 bp, synthetic construct
  misc_feature 1..20: note = Description of Artificial Sequence: Synthetic oligonucleotide
  misc_feature 1..20: note = Target: SCN10A; (+) strand; PAM type: NRG; PAM sequence: GAG
  source 1..20: mol_type = other DNA
attagccccattgaatgaat

SEQ ID NO: 29062 - DNA, 20 bp, synthetic construct
  misc_feature 1..20: note = Description of Artificial Sequence: Synthetic oligonucleotide
  misc_feature 1..20: note = Target: SCN10A; (+) strand; PAM type: NRG; PAM sequence: GAG
  source 1..20: mol_type = other DNA
attgaatgaatgagaaaact

SEQ ID NO: 29063 - DNA, 20 bp, synthetic construct
  misc_feature 1..20: note = Description of Artificial Sequence: Synthetic oligonucleotide
  misc_feature 1..20: note = Target: SCN10A; (+) strand; PAM type: NRG; PAM sequence: CAG
  source 1..20: mol_type = other DNA
tgaatgagaaaactgagact

SEQ ID NO: 29064 - DNA, 20 bp, synthetic construct
  misc_feature 1..20: note = Description of Artificial Sequence: Synthetic oligonucleotide
  misc_feature 1..20: note = Target: SCN10A; (+) strand; PAM type: NRG; PAM sequence: GAG
  source 1..20: mol_type = other DNA
aatgagaaaactgagactca

SEQ ID NO: 29065 - DNA, 20 bp, synthetic construct
  misc_feature 1..20: note = Description of Artificial Sequence: Synthetic oligonucleotide
  misc_feature 1..20: note = Target: SCN10A; (+) strand; PAM type: NRG; PAM sequence: AGG
  source 1..20: mol_type = other DNA
atgagaaaactgagactcag

SEQ ID NO: 29066 - DNA, 20 bp, synthetic construct
  misc_feature 1..20: note = Description of Artificial Sequence: Synthetic oligonucleotide
  misc_feature 1..20: note = Target: SCN10A; (+) strand; PAM type: NRG; PAM sequence: GGG
  source 1..20: mol_type = other DNA
tgagaaaactgagactcaga

SEQ ID NO: 29067 - DNA, 20 bp, synthetic construct
  misc_feature 1..20: note = Description of Artificial Sequence: Synthetic oligonucleotide
  misc_feature 1..20: note = Target: SCN10A; (+) strand; PAM type: NRG; PAM sequence: GGG
  source 1..20: mol_type = other DNA
gagaaaactgagactcagag

SEQ ID NO: 29068 - DNA, 20 bp, synthetic construct
  misc_feature 1..20: note = Description of Artificial Sequence: Synthetic oligonucleotide
  misc_feature 1..20: note = Target: SCN10A; (+) strand; PAM type: NRG; PAM sequence: CAG
  source 1..20: mol_type = other DNA
agaggggtttaaaatattgc

SEQ ID NO: 29069 - DNA, 20 bp, synthetic construct
  misc_feature 1..20: note = Description of Artificial Sequence: Synthetic oligonucleotide
  misc_feature 1..20: note = Target: SCN10A; (+) strand; PAM type: NRG; PAM sequence: GAG
  source 1..20: mol_type = other DNA
gtttaaaatattgccagcat

SEQ ID NO: 29070 - DNA, 20 bp, synthetic construct
  misc_feature 1..20: note = Description of Artificial Sequence: Synthetic oligonucleotide
  misc_feature 1..20: note = Target: SCN10A; (+) strand; PAM type: NRG; PAM sequence: AAG
  source 1..20: mol_type = other DNA
tgccagcatgagccatccac

SEQ ID NO: 29071 - DNA, 20 bp, synthetic construct
  misc_feature 1..20: note = Description of Artificial Sequence: Synthetic oligonucleotide
  misc_feature 1..20: note = Target: SCN10A; (+) strand; PAM type: NRG; PAM sequence: TAG
  source 1..20: mol_type = other DNA
cagcatgagccatccacaag

SEQ ID NO: 29072 - DNA, 20 bp, synthetic construct
  misc_feature 1..20: note = Description of Artificial Sequence: Synthetic oligonucleotide
  misc_feature 1..20: note = Target: SCN10A; (+) strand; PAM type: NRG; PAM sequence: GAG
  source 1..20: mol_type = other DNA
tgagccatccacaagtagtt

SEQ ID NO: 29073 - DNA, 20 bp, synthetic construct
  misc_feature 1..20: note = Description of Artificial Sequence: Synthetic oligonucleotide
  misc_feature 1..20: note = Target: SCN10A; (+) strand; PAM type: NRG; PAM sequence: CAG
  source 1..20: mol_type = other DNA
ccatccacaagtagttgagt

SEQ ID NO: 29074 - DNA, 20 bp, synthetic construct
  misc_feature 1..20: note = Description of Artificial Sequence: Synthetic oligonucleotide
  misc_feature 1..20: note = Target: SCN10A; (+) strand; PAM type: NRG; PAM sequence: AGG
  source 1..20: mol_type = other DNA
catccacaagtagttgagtc

SEQ ID NO: 29075 - DNA, 20 bp, synthetic construct
  misc_feature 1..20: note = Description of Artificial Sequence: Synthetic oligonucleotide
  misc_feature 1..20: note = Target: SCN10A; (+) strand; PAM type: NRG; PAM sequence: CAG
  source 1..20: mol_type = other DNA
ttgagtcaggaatgcaaacc

SEQ ID NO: 29076 - DNA, 20 bp, synthetic construct
  misc_feature 1..20: note = Description of Artificial Sequence: Synthetic oligonucleotide
  misc_feature 1..20: note = Target: SCN10A; (+) strand; PAM type: NRG; PAM sequence: AGG
  source 1..20: mol_type = other DNA
tgagtcaggaatgcaaaccc

SEQ ID NO: 29077 - DNA, 20 bp, synthetic construct
  misc_feature 1..20: note = Description of Artificial Sequence: Synthetic oligonucleotide
  misc_feature 1..20: note = Target: SCN10A; (+) strand; PAM type: NRG; PAM sequence: TAG
  source 1..20: mol_type = other DNA
tactctgtgacttatccatg

SEQ ID NO: 29078 - DNA, 20 bp, synthetic construct
  misc_feature 1..20: note = Description of Artificial Sequence: Synthetic oligonucleotide
  misc_feature 1..20: note = Target: SCN10A; (+) strand; PAM type: NRG; PAM sequence: CGG
  source 1..20: mol_type = other DNA
ccatgtagccccttttctct

SEQ ID NO: 29079 - DNA, 20 bp, synthetic construct
  misc_feature 1..20: note = Description of Artificial Sequence: Synthetic oligonucleotide
  misc_feature 1..20: note = Target: SCN10A; (+) strand; PAM type: NRG; PAM sequence: GGG
  source 1..20: mol_type = other DNA
catgtagccccttttctctc

SEQ ID NO: 29080 - DNA, 20 bp, synthetic construct
  misc_feature 1..20: note = Description of Artificial Sequence: Synthetic oligonucleotide
  misc_feature 1..20: note = Target: SCN10A; (+) strand; PAM type: NRG; PAM sequence: CAG
  source 1..20: mol_type = other DNA
ccccttttctctcgggatct

SEQ ID NO: 29081 - DNA, 20 bp, synthetic construct
  misc_feature 1..20: note = Description of Artificial Sequence: Synthetic oligonucleotide
  misc_feature 1..20: note = Target: SCN10A; (+) strand; PAM type: NRG; PAM sequence: TAG
  source 1..20: mol_type = other DNA
ggatctcagttacgcaaatc

SEQ ID NO: 29082 - DNA, 20 bp, synthetic construct
  misc_feature 1..20: note = Description of Artificial Sequence: Synthetic oligonucleotide
  misc_feature 1..20: note = Target: SCN10A; (+) strand; PAM type: NRG; PAM sequence: CAG
  source 1..20: mol_type = other DNA
tcagttacgcaaatctagaa

SEQ ID NO: 29083 - DNA, 20 bp, synthetic construct
  misc_feature 1..20: note = Description of Artificial Sequence: Synthetic oligonucleotide
  misc_feature 1..20: note = Target: SCN10A; (+) strand; PAM type: NRG; PAM sequence: CAG
  source 1..20: mol_type = other DNA
agaacagcgcctatctacct

SEQ ID NO: 29084 - DNA, 20 bp, synthetic construct
  misc_feature 1..20: note = Description of Artificial Sequence: Synthetic oligonucleotide
  misc_feature 1..20: note = Target: SCN10A; (+) strand; PAM type: NRG; PAM sequence: AGG
  source 1..20: mol_type = other DNA
gaacagcgcctatctacctc

SEQ ID NO: 29085 - DNA, 20 bp, synthetic construct
  misc_feature 1..20: note = Description of Artificial Sequence: Synthetic oligonucleotide
  misc_feature 1..20: note = Target: SCN10A; (+) strand; PAM type: NRG; PAM sequence: GGG
  source 1..20: mol_type = other DNA
aacagcgcctatctacctca

SEQ ID NO: 29086 - DNA, 20 bp, synthetic construct
  misc_feature 1..20: note = Description of Artificial Sequence: Synthetic oligonucleotide
  misc_feature 1..20: note = Target: SCN10A; (+) strand; PAM type: NRG; PAM sequence: GGG
  source 1..20: mol_type = other DNA
acagcgcctatctacctcag

SEQ ID NO: 29087 - DNA, 20 bp, synthetic construct
  misc_feature 1..20: note = Description of Artificial Sequence: Synthetic oligonucleotide
  misc_feature 1..20: note = Target: SCN10A; (+) strand; PAM type: NRG; PAM sequence: TGG
  source 1..20: mol_type = other DNA
gcctatctacctcaggggta

SEQ ID NO: 29088 - DNA, 20 bp, synthetic construct
  misc_feature 1..20: note = Description of Artificial Sequence: Synthetic oligonucleotide
  misc_feature 1..20: note = Target: SCN10A; (+) strand; PAM type: NRG; PAM sequence: AAG
  source 1..20: mol_type = other DNA
tatctacctcaggggtatgg

SEQ ID NO: 29089 - DNA, 20 bp, synthetic construct
  misc_feature 1..20: note = Description of Artificial Sequence: Synthetic oligonucleotide
  misc_feature 1..20: note = Target: SCN10A; (+) strand; PAM type: NRG; PAM sequence: AGG
  source 1..20: mol_type = other DNA
atctacctcaggggtatgga

SEQ ID NO: 29090 - DNA, 20 bp, synthetic construct
  misc_feature 1..20: note = Description of Artificial Sequence: Synthetic oligonucleotide
  misc_feature 1..20: note = Target: SCN10A; (+) strand; PAM type: NRG; PAM sequence: AAG
  source 1..20: mol_type = other DNA
gtatggaaggcattaaatga

SEQ ID NO: 29091 - DNA, 20 bp, synthetic construct
  misc_feature 1..20: note = Description of Artificial Sequence: Synthetic oligonucleotide
  misc_feature 1..20: note = Target: SCN10A; (+) strand; PAM type: NRG; PAM sequence: AGG
  source 1..20: mol_type = other DNA
tatggaaggcattaaatgaa

SEQ ID NO: 29092 - DNA, 20 bp, synthetic construct
  misc_feature 1..20: note = Description of Artificial Sequence: Synthetic oligonucleotide
  misc_feature 1..20: note = Target: SCN10A; (+) strand; PAM type: NRG; PAM sequence: TAG
  source 1..20: mol_type = other DNA
ggcattaaatgaaaggataa

SEQ ID NO: 29093 - DNA, 20 bp, synthetic construct
  misc_feature 1..20: note = Description of Artificial Sequence: Synthetic oligonucleotide
  misc_feature 1..20: note = Target: SCN10A; (+) strand; PAM type: NRG; PAM sequence: AGG
  source 1..20: mol_type = other DNA
gcattaaatgaaaggataat

SEQ ID NO: 29094 - DNA, 20 bp, synthetic construct
  misc_feature 1..20: note = Description of Artificial Sequence: Synthetic oligonucleotide
  misc_feature 1..20: note = Target: SCN10A; (+) strand; PAM type: NRG; PAM sequence: GAG
  source 1..20: mol_type = other DNA
tgacattttcttataaacat

SEQ ID NO: 29095 - DNA, 20 bp, synthetic construct
  misc_feature 1..20: note = Description of Artificial Sequence: Synthetic oligonucleotide
  misc_feature 1..20: note = Target: SCN10A; (+) strand; PAM type: NRG; PAM sequence: GAG
  source 1..20: mol_type = other DNA
acattttcttataaacatga

SEQ ID NO: 29096 - DNA, 20 bp, synthetic construct
  misc_feature 1..20: note = Description of Artificial Sequence: Synthetic oligonucleotide
  misc_feature 1..20: note = Target: SCN10A; (+) strand; PAM type: NRG; PAM sequence: AGG
  source 1..20: mol_type = other DNA
cattttcttataaacatgag

SEQ ID NO: 29097 - DNA, 20 bp, synthetic construct
  misc_feature 1..20: note = Description of Artificial Sequence: Synthetic oligonucleotide
  misc_feature 1..20: note = Target: SCN10A; (+) strand; PAM type: NRG; PAM sequence: TGG
  source 1..20: mol_type = other DNA
tataaacatgagaggttatc

SEQ ID NO: 29098 - DNA, 20 bp, synthetic construct
  misc_feature 1..20: note = Description of Artificial Sequence: Synthetic oligonucleotide
  misc_feature 1..20: note = Target: SCN10A; (+) strand; PAM type: NRG; PAM sequence: GGG
  source 1..20: mol_type = other DNA
ataaacatgagaggttatct

SEQ ID NO: 29099 - DNA, 20 bp, synthetic construct
  misc_feature 1..20: note = Description of Artificial Sequence: Synthetic oligonucleotide
  misc_feature 1..20: note = Target: SCN10A; (+) strand; PAM type: NRG; PAM sequence: CAG
  source 1..20: mol_type = other DNA
gggattcgattcctattaat

SEQ ID NO: 29100 - DNA, 20 bp, synthetic construct
  misc_feature 1..20: note = Description of Artificial Sequence: Synthetic oligonucleotide
  misc_feature 1..20: note = Target: SCN10A; (+) strand; PAM type: NRG; PAM sequence: GAG
  source 1..20: mol_type = other DNA
gattcgattcctattaatca

SEQ ID NO: 29101 - DNA, 20 bp, synthetic construct
  misc_feature 1..20: note = Description of Artificial Sequence: Synthetic oligonucleotide
  misc_feature 1..20: note = Target: SCN10A; (+) strand; PAM type: NRG; PAM sequence: CGG
  source 1..20: mol_type = other DNA
cgattcctattaatcagagt

SEQ ID NO: 29102 - DNA, 20 bp, synthetic construct
  misc_feature 1..20: note = Description of Artificial Sequence: Synthetic oligonucleotide
  misc_feature 1..20: note = Target: SCN10A; (+) strand; PAM type: NRG; PAM sequence: TGG
  source 1..20: mol_type = other DNA
ttaatcagagtcggcaccct

SEQ ID NO: 29103 - DNA, 20 bp, synthetic construct
  misc_feature 1..20: note = Description of Artificial Sequence: Synthetic oligonucleotide
  misc_feature 1..20: note = Target: SCN10A; (+) strand; PAM type: NRG; PAM sequence: GAG
  source 1..20: mol_type = other DNA
aatcagagtcggcacccttg

SEQ ID NO: 29104 - DNA, 20 bp, synthetic construct
  misc_feature 1..20: note = Description of Artificial Sequence: Synthetic oligonucleotide
  misc_feature 1..20: note = Target: SCN10A; (+) strand; PAM type: NRG; PAM sequence: AGG
  source 1..20: mol_type = other DNA
atcagagtcggcacccttgg

SEQ ID NO: 29105 - DNA, 20 bp, synthetic construct
  misc_feature 1..20: note = Description of Artificial Sequence: Synthetic oligonucleotide
  misc_feature 1..20: note = Target: SCN10A; (+) strand; PAM type: NRG; PAM sequence: AAG
  source 1..20: mol_type = other DNA
gtcggcacccttggaggcac

SEQ ID NO: 29106 - DNA, 20 bp, synthetic construct
  misc_feature 1..20: note = Description of Artificial Sequence: Synthetic oligonucleotide
  misc_feature 1..20: note = Target: SCN10A; (+) strand; PAM type: NRG; PAM sequence: AAG
  source 1..20: mol_type = other DNA
caagccttcctccccatccc

SEQ ID NO: 29107 - DNA, 20 bp, synthetic construct
  misc_feature 1..20: note = Description of Artificial Sequence: Synthetic oligonucleotide
  misc_feature 1..20: note = Target: SCN10A; (+) strand; PAM type: NRG; PAM sequence: AGG
  source 1..20: mol_type = other DNA
aagccttcctccccatccca

SEQ ID NO: 29108 - DNA, 20 bp, synthetic construct
  misc_feature 1..20: note = Description of Artificial Sequence: Synthetic oligonucleotide
  misc_feature 1..20: note = Target: SCN10A; (+) strand; PAM type: NRG; PAM sequence: GAG
  source 1..20: mol_type = other DNA
gccttcctccccatcccaag

SEQ ID NO: 29109 - DNA, 20 bp, synthetic construct
  misc_feature 1..20: note = Description of Artificial Sequence: Synthetic oligonucleotide
  misc_feature 1..20: note = Target: SCN10A; (+) strand; PAM type: NRG; PAM sequence: AGG
  source 1..20: mol_type = other DNA
ccttcctccccatcccaagg

SEQ ID NO: 29110 - DNA, 20 bp, synthetic construct
  misc_feature 1..20: note = Description of Artificial Sequence: Synthetic oligonucleotide
  misc_feature 1..20: note = Target: SCN10A; (+) strand; PAM type: NRG; PAM sequence: GGG
  source 1..20: mol_type = other DNA
cttcctccccatcccaagga

SEQ ID NO: 29111 - DNA, 20 bp, synthetic construct
  misc_feature 1..20: note = Description of Artificial Sequence: Synthetic oligonucleotide
  misc_feature 1..20: note = Target: SCN10A; (+) strand; PAM type: NRG; PAM sequence: TGG
  source 1..20: mol_type = other DNA
ctccccatcccaaggagggt

SEQ ID NO: 29112 - DNA, 20 bp, synthetic construct
  misc_feature 1..20: note = Description of Artificial Sequence: Synthetic oligonucleotide
  misc_feature 1..20: note = Target: SCN10A; (+) strand; PAM type: NRG; PAM sequence: GGG
  source 1..20: mol_type = other DNA
tccccatcccaaggagggtt

SEQ ID NO: 29113 - DNA, 20 bp, synthetic construct
  misc_feature 1..20: note = Description of Artificial Sequence: Synthetic oligonucleotide
  misc_feature 1..20: note = Target: SCN10A; (+) strand; PAM type: NRG; PAM sequence: CAG
  source 1..20: mol_type = other DNA
aaggagggttgggattctgc

SEQ ID NO: 29114 - DNA, 20 bp, synthetic construct
  misc_feature 1..20: note = Description of Artificial Sequence: Synthetic oligonucleotide
  misc_feature 1..20: note = Target: SCN10A; (+) strand; PAM type: NRG; PAM sequence: TGG
  source 1..20: mol_type = other DNA
ggttgggattctgccagtgc

SEQ ID NO: 29115 - DNA, 20 bp, synthetic construct
  misc_feature 1..20: note = Description of Artificial Sequence: Synthetic oligonucleotide
  misc_feature 1..20: note = Target: SCN10A; (+) strand; PAM type: NRG; PAM sequence: GGG
  source 1..20: mol_type = other DNA
gttgggattctgccagtgct

SEQ ID NO: 29116 - DNA, 20 bp, synthetic construct
  misc_feature 1..20: note = Description of Artificial Sequence: Synthetic oligonucleotide
  misc_feature 1..20: note = Target: SCN10A; (+) strand; PAM type: NRG; PAM sequence: TGG
  source 1..20: mol_type = other DNA
attctgccagtgctgggcca

SEQ ID NO: 29117 - DNA, 20 bp, synthetic construct
  misc_feature 1..20: note = Description of Artificial Sequence: Synthetic oligonucleotide
  misc_feature 1..20: note = Target: SCN10A; (+) strand; PAM type: NRG; PAM sequence: GAG
  source 1..20: mol_type = other DNA
gctgggccatggcctttcct

SEQ ID NO: 29118 - DNA, 20 bp, synthetic construct
  misc_feature 1..20: note = Description of Artificial Sequence: Synthetic oligonucleotide
  misc_feature 1..20: note = Target: SCN10A; (+) strand; PAM type: NRG; PAM sequence: AGG
  source 1..20: mol_type = other DNA
ctgggccatggcctttcctg

SEQ ID NO: 29119 - DNA, 20 bp, synthetic construct
  misc_feature 1..20: note = Description of Artificial Sequence: Synthetic oligonucleotide
  misc_feature 1..20: note = Target: SCN10A; (+) strand; PAM type: NRG; PAM sequence: CAG
  source 1..20: mol_type = other DNA
tttcctgaggtgccctgact

SEQ ID NO: 29120 - DNA, 20 bp, synthetic construct
  misc_feature 1..20: note = Description of Artificial Sequence: Synthetic oligonucleotide
  misc_feature 1..20: note = Target: SCN10A; (+) strand; PAM type: NRG; PAM sequence: TGG
  source 1..20: mol_type = other DNA
tgccctgactcagtcctttg

SEQ ID NO: 29121 - DNA, 20 bp, synthetic construct
  misc_feature 1..20: note = Description of Artificial Sequence: Synthetic oligonucleotide
  misc_feature 1..20: note = Target: SCN10A; (+) strand; PAM type: NRG; PAM sequence: GGG
  source 1..20: mol_type = other DNA
gccctgactcagtcctttgt

SEQ ID NO: 29122 - DNA, 20 bp, synthetic construct
  misc_feature 1..20: note = Description of Artificial Sequence: Synthetic oligonucleotide
  misc_feature 1..20: note = Target: SCN10A; (+) strand; PAM type: NRG; PAM sequence: GGG
  source 1..20: mol_type = other DNA
ccctgactcagtcctttgtg

SEQ ID NO: 29123 - DNA, 20 bp, synthetic construct
  misc_feature 1..20: note = Description of Artificial Sequence: Synthetic oligonucleotide
  misc_feature 1..20: note = Target: SCN10A; (+) strand; PAM type: NRG; PAM sequence: CAG
  source 1..20: mol_type = other DNA
gtggggatcatatcccccaa

SEQ ID NO: 29124 - DNA, 20 bp, synthetic construct
  misc_feature 1..20: note = Description of Artificial Sequence: Synthetic oligonucleotide
  misc_feature 1..20: note = Target: SCN10A; (+) strand; PAM type: NRG; PAM sequence: AGG
  source 1..20: mol_type = other DNA
tggggatcatatcccccaac

SEQ ID NO: 29125 - DNA, 20 bp, synthetic construct
  misc_feature 1..20: note = Description of Artificial Sequence: Synthetic oligonucleotide
  misc_feature 1..20: note = Target: SCN10A; (+) strand; PAM type: NRG; PAM sequence: CAG
  source 1..20: mol_type = other DNA
gatcatatcccccaacaggt

SEQ ID NO: 29126 - DNA, 20 bp, synthetic construct
  misc_feature 1..20: note = Description of Artificial Sequence: Synthetic oligonucleotide
  misc_feature 1..20: note = Target: SCN10A; (+) strand; PAM type: NRG; PAM sequence: AAG
  source 1..20: mol_type = other DNA
atatcccccaacaggtcagc

SEQ ID NO: 29127 - DNA, 20 bp, synthetic construct
  misc_feature 1..20: note = Description of Artificial Sequence: Synthetic oligonucleotide
  misc_feature 1..20: note = Target: SCN10A; (+) strand; PAM type: NRG; PAM sequence: TAG
  source 1..20: mol_type = other DNA
cccaacaggtcagcaagttc

SEQ ID NO: 29128 - DNA, 20 bp, synthetic construct
  misc_feature 1..20: note = Description of Artificial Sequence: Synthetic oligonucleotide
  misc_feature 1..20: note = Target: SCN10A; (+) strand; PAM type: NRG; PAM sequence: CAG
  source 1..20: mol_type = other DNA
tttccctgcttgtattctcc

SEQ ID NO: 29129 - DNA, 20 bp, synthetic construct
  misc_feature 1..20: note = Description of Artificial Sequence: Synthetic oligonucleotide
  misc_feature 1..20: note = Target: SCN10A; (+) strand; PAM type: NRG; PAM sequence: AGG
  source 1..20: mol_type = other DNA
ttccctgcttgtattctccc

SEQ ID NO: 29130 - DNA, 20 bp, synthetic construct
  misc_feature 1..20: note = Description of Artificial Sequence: Synthetic oligonucleotide
  misc_feature 1..20: note = Target: SCN10A; (+) strand; PAM type: NRG; PAM sequence: GGG
  source 1..20: mol_type = other DNA
tccctgcttgtattctccca

SEQ ID NO: 29131 - DNA, 20 bp, synthetic construct
  misc_feature 1..20: note = Description of Artificial Sequence: Synthetic oligonucleotide
  misc_feature 1..20: note = Target: SCN10A; (+) strand; PAM type: NRG; PAM sequence: TGG
  source 1..20: mol_type = other DNA
gtattctcccagggctcact

SEQ ID NO: 29132 - DNA, 20 bp, synthetic construct
  misc_feature 1..20: note = Description of Artificial Sequence: Synthetic oligonucleotide
  misc_feature 1..20: note = Target: SCN10A; (+) strand; PAM type: NRG; PAM sequence: TGG
  source 1..20: mol_type = other DNA
tggaacacatctaacacacc

SEQ ID NO: 29133 - DNA, 20 bp, synthetic construct
  misc_feature 1..20: note = Description of Artificial Sequence: Synthetic oligonucleotide
  misc_feature 1..20: note = Target: SCN10A; (+) strand; PAM type: NRG; PAM sequence: CAG
  source 1..20: mol_type = other DNA
acatctaacacacctggttc

SEQ ID NO: 29134 - DNA, 20 bp, synthetic construct
  misc_feature 1..20: note = Description of Artificial Sequence: Synthetic oligonucleotide
  misc_feature 1..20: note = Target: SCN10A; (+) strand; PAM type: NRG; PAM sequence: TGG
  source 1..20: mol_type = other DNA
ctaacacacctggttccagt

SEQ ID NO: 29135 - DNA, 20 bp, synthetic construct
  misc_feature 1..20: note = Description of Artificial Sequence: Synthetic oligonucleotide
  misc_feature 1..20: note = Target: SCN10A; (+) strand; PAM type: NRG; PAM sequence: GGG
  source 1..20: mol_type = other DNA
taacacacctggttccagtt

SEQ ID NO: 29136 - DNA, 20 bp, synthetic construct
  misc_feature 1..20: note = Description of Artificial Sequence: Synthetic oligonucleotide
  misc_feature 1..20: note = Target: SCN10A; (+) strand; PAM type: NRG; PAM sequence: AAG
  source 1..20: mol_type = other DNA
cacacctggttccagttggg

SEQ ID NO: 29137 - DNA, 20 bp, synthetic construct
  misc_feature 1..20: note = Description of Artificial Sequence: Synthetic oligonucleotide
  misc_feature 1..20: note = Target: SCN10A; (+) strand; PAM type: NRG; PAM sequence: AAG
  source 1..20: mol_type = other DNA
tggttccagttgggaagacc

SEQ ID NO: 29138 - DNA, 20 bp, synthetic construct
  misc_feature 1..20: note = Description of Artificial Sequence: Synthetic oligonucleotide
  misc_feature 1..20: note = Target: SCN10A; (+) strand; PAM type: NRG; PAM sequence: GAG
  source 1..20: mol_type = other DNA
gggaagaccaagatcccttt

SEQ ID NO: 29139 - DNA, 20 bp, synthetic construct
  misc_feature 1..20: note = Description of Artificial Sequence: Synthetic oligonucleotide
  misc_feature 1..20: note = Target: SCN10A; (+) strand; PAM type: NRG; PAM sequence: GAG
  source 1..20: mol_type = other DNA
ccctttgagatgtgaatcct

SEQ ID NO: 29140 - DNA, 20 bp, synthetic construct
  misc_feature 1..20: note = Description of Artificial Sequence: Synthetic oligonucleotide
  misc_feature 1..20: note = Target: SCN10A; (+) strand; PAM type: NRG; PAM sequence: GAG
  source 1..20: mol_type = other DNA
ttgagatgtgaatcctgagt

SEQ ID NO: 29141 - DNA, 20 bp, synthetic construct
  misc_feature 1..20: note = Description of Artificial Sequence: Synthetic oligonucleotide
  misc_feature 1..20: note = Target: SCN10A; (+) strand; PAM type: NRG; PAM sequence: AGG
  source 1..20: mol_type = other DNA
tgagatgtgaatcctgagtg

SEQ ID NO: 29142 - DNA, 20 bp, synthetic construct
  misc_feature 1..20: note = Description of Artificial Sequence: Synthetic oligonucleotide
  misc_feature 1..20: note = Target: SCN10A; (+) strand; PAM type: NRG; PAM sequence: TAG
  source 1..20: mol_type = other DNA
tgaatcctgagtgaggatgt

SEQ ID NO: 29143 - DNA, 20 bp, synthetic construct
  misc_feature 1..20: note = Description of Artificial Sequence: Synthetic oligonucleotide
  misc_feature 1..20: note = Target: SCN10A; (+) strand; PAM type: NRG; PAM sequence: TGG
  source 1..20: mol_type = other DNA
atcctgagtgaggatgttag

SEQ ID NO: 29144 - DNA, 20 bp, synthetic construct
  misc_feature 1..20: note = Description of Artificial Sequence: Synthetic oligonucleotide
  misc_feature 1..20: note = Target: SCN10A; (+) strand; PAM type: NRG; PAM sequence: GGG
  source 1..20: mol_type = other DNA
tcctgagtgaggatgttagt

SEQ ID NO: 29145 - DNA, 20 bp, synthetic construct
  misc_feature 1..20: note = Description of Artificial Sequence: Synthetic oligonucleotide
  misc_feature 1..20: note = Target: SCN10A; (+) strand; PAM type: NRG; PAM sequence: GGG
  source 1..20: mol_type = other DNA
cctgagtgaggatgttagtg

SEQ ID NO: 29146 - DNA, 20 bp, synthetic construct
  misc_feature 1..20: note = Description of Artificial Sequence: Synthetic oligonucleotide
  misc_feature 1..20: note = Target: SCN10A; (+) strand; PAM type: NRG; PAM sequence: CAG
  source 1..20: mol_type = other DNA
tgttagtggggcattgctga

SEQ ID NO: 29147 - DNA, 20 bp, synthetic construct
  misc_feature 1..20: note = Description of Artificial Sequence: Synthetic oligonucleotide
  misc_feature 1..20: note = Target: SCN10A; (+) strand; PAM type: NRG; PAM sequence: GAG
  source 1..20: mol_type = other DNA
ttagtggggcattgctgaca

SEQ ID NO: 29148 - DNA, 20 bp, synthetic construct
  misc_feature 1..20: note = Description of Artificial Sequence: Synthetic oligonucleotide
  misc_feature 1..20: note = Target: SCN10A; (+) strand; PAM type: NRG; PAM sequence: GAG
  source 1..20: mol_type = other DNA
agtggggcattgctgacaga

SEQ ID NO: 29149 - DNA, 20 bp, synthetic construct
  misc_feature 1..20: note = Description of Artificial Sequence: Synthetic oligonucleotide
  misc_feature 1..20: note = Target: SCN10A; (+) strand; PAM type: NRG; PAM sequence: CAG
  source 1..20: mol_type = other DNA
aaatgcaactcttcctgcaa

SEQ ID NO: 29150 - DNA, 20 bp, synthetic construct
  misc_feature 1..20: note = Description of Artificial Sequence: Synthetic oligonucleotide
  misc_feature 1..20: note = Target: SCN10A; (+) strand; PAM type: NRG; PAM sequence: CAG
  source 1..20: mol_type = other DNA
tcttcctgcaacagcaatca

SEQ ID NO: 29151 - DNA, 20 bp, synthetic construct
  misc_feature 1..20: note = Description of Artificial Sequence: Synthetic oligonucleotide
  misc_feature 1..20: note = Target: SCN10A; (+) strand; PAM type: NRG; PAM sequence: AGG
  source 1..20: mol_type = other DNA
cttcctgcaacagcaatcac

SEQ ID NO: 29152 - DNA, 20 bp, synthetic construct
  misc_feature 1..20: note = Description of Artificial Sequence: Synthetic oligonucleotide
  misc_feature 1..20: note = Target: SCN10A; (+) strand; PAM type: NRG; PAM sequence: GGG
  source 1..20: mol_type = other DNA
ttcctgcaacagcaatcaca

SEQ ID NO: 29153 - DNA, 20 bp, synthetic construct
  misc_feature 1..20: note = Description of Artificial Sequence: Synthetic oligonucleotide
  misc_feature 1..20: note = Target: SCN10A; (+) strand; PAM type: NRG; PAM sequence: AAG
  source 1..20: mol_type = other DNA
tgcaacagcaatcacagggc

SEQ ID NO: 29154 - DNA, 20 bp, synthetic construct
  misc_feature 1..20: note = Description of Artificial Sequence: Synthetic oligonucleotide
  misc_feature 1..20: note = Target: SCN10A; (+) strand; PAM type: NRG; PAM sequence: AGG
  source 1..20: mol_type = other DNA
gcaacagcaatcacagggca

SEQ ID NO: 29155 - DNA, 20 bp, synthetic construct
  misc_feature 1..20: note = Description of Artificial Sequence: Synthetic oligonucleotide
  misc_feature 1..20: note = Target: SCN10A; (+) strand; PAM type: NRG; PAM sequence: GGG
  source 1..20: mol_type = other DNA
caacagcaatcacagggcaa

SEQ ID NO: 29156 - DNA, 20 bp, synthetic construct
  misc_feature 1..20: note = Description of Artificial Sequence: Synthetic oligonucleotide
  misc_feature 1..20: note = Target: SCN10A; (+) strand; PAM type: NRG; PAM sequence: TAG
  source 1..20: mol_type = other DNA
agcaatcacagggcaagggt

SEQ ID NO: 29157 - DNA, 20 bp, synthetic construct
  misc_feature 1..20: note = Description of Artificial Sequence: Synthetic oligonucleotide
  misc_feature 1..20: note = Target: SCN10A; (+) strand; PAM type: NRG; PAM sequence: AAG
  source 1..20: mol_type = other DNA
aagggttagcactgatatta

SEQ ID NO: 29158 - DNA, 20 bp, synthetic construct
  misc_feature 1..20: note = Description of Artificial Sequence: Synthetic oligonucleotide
  misc_feature 1..20: note = Target: SCN10A; (+) strand; PAM type: NRG; PAM sequence: TGG
  source 1..20: mol_type = other DNA
tagcactgatattaaagtga

SEQ ID NO: 29159 - DNA, 20 bp, synthetic construct
  misc_feature 1..20: note = Description of Artificial Sequence: Synthetic oligonucleotide
  misc_feature 1..20: note = Target: SCN10A; (+) strand; PAM type: NRG; PAM sequence: GGG
  source 1..20: mol_type = other DNA
agcactgatattaaagtgat

SEQ ID NO: 29160 - DNA, 20 bp, synthetic construct
  misc_feature 1..20: note = Description of Artificial Sequence: Synthetic oligonucleotide
  misc_feature 1..20: note = Target: SCN10A; (+) strand; PAM type: NRG; PAM sequence: GAG
  source 1..20: mol_type = other DNA
atattaaagtgatgggctgt

SEQ ID NO: 29161 - DNA, 20 bp, synthetic construct
  misc_feature 1..20: note = Description of Artificial Sequence: Synthetic oligonucleotide
  misc_feature 1..20: note = Target: SCN10A; (+) strand; PAM type: NRG; PAM sequence: TAG
  source 1..20: mol_type = other DNA
ttaaagtgatgggctgtgag

SEQ ID NO: 29162 - DNA, 20 bp, synthetic construct
  misc_feature 1..20: note = Description of Artificial Sequence: Synthetic oligonucleotide
  misc_feature 1..20: note = Target: SCN10A; (+) strand; PAM type: NRG; PAM sequence: TGG
  source 1..20: mol_type = other DNA
tgatgggctgtgagtagtgt

SEQ ID NO: 29163 - DNA, 20 bp, synthetic construct
  misc_feature 1..20: note = Description of Artificial Sequence: Synthetic oligonucleotide
  misc_feature 1..20: note = Target: SCN10A; (+) strand; PAM type: NRG; PAM sequence: CAG
  source 1..20: mol_type = other DNA
tgagtagtgttggcttttgt

SEQ ID NO: 29164 - DNA, 20 bp, synthetic construct
  misc_feature 1..20: note = Description of Artificial Sequence: Synthetic oligonucleotide
  misc_feature 1..20: note = Target: SCN10A; (+) strand; PAM type: NRG; PAM sequence: AGG
  source 1..20: mol_type = other DNA
gagtagtgttggcttttgtc

SEQ ID NO: 29165 - DNA, 20 bp, synthetic construct
  misc_feature 1..20: note = Description of Artificial Sequence: Synthetic oligonucleotide
  misc_feature 1..20: note = Target: SCN10A; (+) strand; PAM type: NRG; PAM sequence: GAG
  source 1..20: mol_type = other DNA
gtagtgttggcttttgtcag

SEQ ID NO: 29166 - DNA, 20 bp, synthetic construct
  misc_feature 1..20: note = Description of Artificial Sequence: Synthetic oligonucleotide
  misc_feature 1..20: note = Target: SCN10A; (+) strand; PAM type: NRG; PAM sequence: AGG
  source 1..20: mol_type = other DNA
tagtgttggcttttgtcagg

SEQ ID NO: 29167 - DNA, 20 bp, synthetic construct
  misc_feature 1..20: note = Description of Artificial Sequence: Synthetic oligonucleotide
  misc_feature 1..20: note = Target: SCN10A; (+) strand; PAM type: NRG; PAM sequence: CAG
  source 1..20: mol_type = other DNA
gttggcttttgtcaggaggc

SEQ ID NO: 29168 - DNA, 20 bp, synthetic construct
  misc_feature 1..20: note = Description of Artificial Sequence: Synthetic oligonucleotide
  misc_feature 1..20: note = Target: SCN10A; (+) strand; PAM type: NRG; PAM sequence: GAG
  source 1..20: mol_type = other DNA
tggcttttgtcaggaggcca

SEQ ID NO: 29169 - DNA, 20 bp, synthetic construct
  misc_feature 1..20: note = Description of Artificial Sequence: Synthetic oligonucleotide
  misc_feature 1..20: note = Target: SCN10A; (+) strand; PAM type: NRG; PAM sequence: TGG
  source 1..20: mol_type = other DNA
ttttgtcaggaggccagagc

SEQ ID NO: 29170 - DNA, 20 bp, synthetic construct
  misc_feature 1..20: note = Description of Artificial Sequence: Synthetic oligonucleotide
  misc_feature 1..20: note = Target: SCN10A; (+) strand; PAM type: NRG; PAM sequence: GGG
  source 1..20: mol_type = other DNA
tttgtcaggaggccagagct

SEQ ID NO: 29171 - DNA, 20 bp, synthetic construct
  misc_feature 1..20: note = Description of Artificial Sequence: Synthetic oligonucleotide
  misc_feature 1..20: note = Target: SCN10A; (+) strand; PAM type: NRG; PAM sequence: CAG
  source 1..20: mol_type = other DNA
gtcaggaggccagagctggg

SEQ ID NO: 29172 - DNA, 20 bp, synthetic construct
  misc_feature 1..20: note = Description of Artificial Sequence: Synthetic oligonucleotide
  misc_feature 1..20: note = Target: SCN10A; (+) strand; PAM type: NRG; PAM sequence: AGG
  source 1..20: mol_type = other DNA
tcaggaggccagagctgggc

SEQ ID NO: 29173 - DNA, 20 bp, synthetic construct
  misc_feature 1..20: note = Description of Artificial Sequence: Synthetic oligonucleotide
  misc_feature 1..20: note = Target: SCN10A; (+) strand; PAM type: NRG; PAM sequence: GGG
  source 1..20: mol_type = other DNA
caggaggccagagctgggca

SEQ ID NO: 29174 - DNA, 20 bp, synthetic construct
  misc_feature 1..20: note = Description of Artificial Sequence: Synthetic oligonucleotide
  misc_feature 1..20: note = Target: SCN10A; (+) strand; PAM type: NRG; PAM sequence: CAG
  source 1..20: mol_type = other DNA
ggccagagctgggcagggaa

SEQ ID NO: 29175 - DNA, 20 bp, synthetic construct
  misc_feature 1..20: note = Description of Artificial Sequence: Synthetic oligonucleotide
  misc_feature 1..20: note = Target: SCN10A; (+) strand; PAM type: NRG; PAM sequence: AGG
  source 1..20: mol_type = other DNA
gccagagctgggcagggaac

SEQ ID NO: 29176 - DNA, 20 bp, synthetic construct
  misc_feature 1..20: note = Description of Artificial Sequence: Synthetic oligonucleotide
  misc_feature 1..20: note = Target: SCN10A; (+) strand; PAM type: NRG; PAM sequence: AAG
  source 1..20: mol_type = other DNA
gggcagggaacaggaaatat

SEQ ID NO: 29177 - DNA, 20 bp, synthetic construct
  misc_feature 1..20: note = Description of Artificial Sequence: Synthetic oligonucleotide
  misc_feature 1..20: note = Target: SCN10A; (+) strand; PAM type: NRG; PAM sequence: AGG
  source 1..20: mol_type = other DNA
ggcagggaacaggaaatata

SEQ ID NO: 29178 - DNA, 20 bp, synthetic construct
  misc_feature 1..20: note = Description of Artificial Sequence: Synthetic oligonucleotide
  misc_feature 1..20: note = Target: SCN10A; (+) strand; PAM type: NRG; PAM sequence: CAG
  source 1..20: mol_type = other DNA
aaatataaggcttaccacta

SEQ ID NO: 29179 - DNA, 20 bp, synthetic construct
  misc_feature 1..20: note = Description of Artificial Sequence: Synthetic oligonucleotide
  misc_feature 1..20: note = Target: SCN10A; (+) strand; PAM type: NRG; PAM sequence: CAG
  source 1..20: mol_type = other DNA
tataaggcttaccactacag

SEQ ID NO: 29180 - DNA, 20 bp, synthetic construct
  misc_feature 1..20: note = Description of Artificial Sequence: Synthetic oligonucleotide
  misc_feature 1..20: note = Target: SCN10A; (+) strand; PAM type: NRG; PAM sequence: CAG
  source 1..20: mol_type = other DNA
cttaccactacagcagaaac

SEQ ID NO: 29181 - DNA, 20 bp, synthetic construct
  misc_feature 1..20: note = Description of Artificial Sequence: Synthetic oligonucleotide
  misc_feature 1..20: note = Target: SCN10A; (+) strand; PAM type: NRG; PAM sequence: GAG
  source 1..20: mol_type = other DNA
agcagaaaccagaaactcct

SEQ ID NO: 29182 - DNA, 20 bp, synthetic construct
  misc_feature 1..20: note = Description of Artificial Sequence: Synthetic oligonucleotide
  misc_feature 1..20: note = Target: SCN10A; (+) strand; PAM type: NRG; PAM sequence: AAG
  source 1..20: mol_type = other DNA
tcttttttttctgttgattg

SEQ ID NO: 29183 - DNA, 20 bp, synthetic construct
  misc_feature 1..20: note = Description of Artificial Sequence: Synthetic oligonucleotide
  misc_feature 1..20: note = Target: SCN10A; (+) strand; PAM type: NRG; PAM sequence: AAG
  source 1..20: mol_type = other DNA
tgtcaattatgaccccaaca

SEQ ID NO: 29184 - DNA, 20 bp, synthetic construct
  misc_feature 1..20: note = Description of Artificial Sequence: Synthetic oligonucleotide
  misc_feature 1..20: note = Target: SCN10A; (+) strand; PAM type: NRG; PAM sequence: GAG
  source 1..20: mol_type = other DNA
tcaattatgaccccaacaaa

SEQ ID NO: 29185 - DNA, 20 bp, synthetic construct
  misc_feature 1..20: note = Description of Artificial Sequence: Synthetic oligonucleotide
  misc_feature 1..20: note = Target: SCN10A; (+) strand; PAM type: NRG; PAM sequence: CAG
  source 1..20: mol_type = other DNA
atgaccccaacaaagagatt

SEQ ID NO: 29186 - DNA, 20 bp, synthetic construct
  misc_feature 1..20: note = Description of Artificial Sequence: Synthetic oligonucleotide
  misc_feature 1..20: note = Target: SCN10A; (+) strand; PAM type: NRG; PAM sequence: AAG
  source 1..20: mol_type = other DNA
caacaaagagattcagtgtg

SEQ ID NO: 29187 - DNA, 20 bp, synthetic construct
  misc_feature 1..20: note = Description of Artificial Sequence: Synthetic oligonucleotide
  misc_feature 1..20: note = Target: SCN10A; (+) strand; PAM type: NRG; PAM sequence: AAG
  source 1..20: mol_type = other DNA
caaagagattcagtgtgaag

SEQ ID NO: 29188 - DNA, 20 bp, synthetic construct
  misc_feature 1..20: note = Description of Artificial Sequence: Synthetic oligonucleotide
  misc_feature 1..20: note = Target: SCN10A; (+) strand; PAM type: NRG; PAM sequence: AAG
  source 1..20: mol_type = other DNA
agaagcctccaaaaatgatg

SEQ ID NO: 29189 - DNA, 20 bp, synthetic construct
  misc_feature 1..20: note = Description of Artificial Sequence: Synthetic oligonucleotide
  misc_feature 1..20: note = Target: SCN10A; (+) strand; PAM type: NRG; PAM sequence: AAG
  source 1..20: mol_type = other DNA
caaaaatgatgaagatgaca

SEQ ID NO: 29190 - DNA, 20 bp, synthetic construct
  misc_feature 1..20: note = Description of Artificial Sequence: Synthetic oligonucleotide
  misc_feature 1..20: note = Target: SCN10A; (+) strand; PAM type: NRG; PAM sequence: TGG
  source 1..20: mol_type = other DNA
gtacacgttgtcctcccact

SEQ ID NO: 29191 - DNA, 20 bp, synthetic construct
  misc_feature 1..20: note = Description of Artificial Sequence: Synthetic oligonucleotide
  misc_feature 1..20: note = Target: SCN10A; (+) strand; PAM type: NRG; PAM sequence: GGG
  source 1..20: mol_type = other DNA
tacacgttgtcctcccactt

SEQ ID NO: 29192 - DNA, 20 bp, synthetic construct
  misc_feature 1..20: note = Description of Artificial Sequence: Synthetic oligonucleotide
  misc_feature 1..20: note = Target: SCN10A; (+) strand; PAM type: NRG; PAM sequence: CAG
  source 1..20: mol_type = other DNA
gttgcatgttgacctgtgac

SEQ ID NO: 29193 - DNA, 20 bp, synthetic construct
  misc_feature 1..20: note = Description of Artificial Sequence: Synthetic oligonucleotide
  misc_feature 1..20: note = Target: SCN10A; (+) strand; PAM type: NRG; PAM sequence: AAG
  source 1..20: mol_type = other DNA
atgttgacctgtgaccagac

SEQ ID NO: 29194 - DNA, 20 bp, synthetic construct
  misc_feature 1..20: note = Description of Artificial Sequence: Synthetic oligonucleotide
  misc_feature 1..20: note = Target: SCN10A; (+) strand; PAM type: NRG; PAM sequence: AGG
  source 1..20: mol_type = other DNA
tgttgacctgtgaccagaca

SEQ ID NO: 29195 - DNA, 20 bp, synthetic construct
  misc_feature 1..20: note = Description of Artificial Sequence: Synthetic oligonucleotide
  misc_feature 1..20: note = Target: SCN10A; (+) strand; PAM type: NRG; PAM sequence: GGG
  source 1..20: mol_type = other DNA
gttgacctgtgaccagacaa

SEQ ID NO: 29196 - DNA, 20 bp, synthetic construct
  misc_feature 1..20: note = Description of Artificial Sequence: Synthetic oligonucleotide
  misc_feature 1..20: note = Target: SCN10A; (+) strand; PAM type: NRG; PAM sequence: GAG
  source 1..20: mol_type = other DNA
tgacctgtgaccagacaagg

SEQ ID NO: 29197 - DNA, 20 bp, synthetic construct
  misc_feature 1..20: note = Description of Artificial Sequence: Synthetic oligonucleotide
  misc_feature 1..20: note = Target: SCN10A; (+) strand; PAM type: NRG; PAM sequence: GAG
  source 1..20: mol_type = other DNA
acctgtgaccagacaaggga

SEQ ID NO: 29198 - DNA, 20 bp, synthetic construct
  misc_feature 1..20: note = Description of Artificial Sequence: Synthetic oligonucleotide
  misc_feature 1..20: note = Target: SCN10A; (+) strand; PAM type: NRG; PAM sequence: TGG
  source 1..20: mol_type = other DNA
tgtgaccagacaagggagag

SEQ ID NO: 29199 - DNA, 20 bp, synthetic construct
  misc_feature 1..20: note = Description of Artificial Sequence: Synthetic oligonucleotide
  misc_feature 1..20: note = Target: SCN10A; (+) strand; PAM type: NRG; PAM sequence: GGG
  source 1..20: mol_type = other DNA
gtgaccagacaagggagagt

SEQ ID NO: 29200 - DNA, 20 bp, synthetic construct
  misc_feature 1..20: note = Description of Artificial Sequence: Synthetic oligonucleotide
  misc_feature 1..20: note = Target: SCN10A; (+) strand; PAM type: NRG; PAM sequence: AAG
  source 1..20: mol_type = other DNA
accagacaagggagagtggg

SEQ ID NO: 29201 - DNA, 20 bp, synthetic construct
  misc_feature 1..20: note = Description of Artificial Sequence: Synthetic oligonucleotide
  misc_feature 1..20: note = Target: SCN10A; (+) strand; PAM type: NRG; PAM sequence: AGG
  source 1..20: mol_type = other DNA
ccagacaagggagagtggga

SEQ ID NO: 29202 - DNA, 20 bp, synthetic construct
  misc_feature 1..20: note = Description of Artificial Sequence: Synthetic oligonucleotide
  misc_feature 1..20: note = Target: SCN10A; (+) strand; PAM type: NRG; PAM sequence: GAG
  source 1..20: mol_type = other DNA
agacaagggagagtgggaag

SEQ ID NO: 29203 - DNA, 20 bp, synthetic construct
  misc_feature 1..20: note = Description of Artificial Sequence: Synthetic oligonucleotide
  misc_feature 1..20: note = Target: SCN10A; (+) strand; PAM type: NRG; PAM sequence: AGG
  source 1..20: mol_type = other DNA
gacaagggagagtgggaagg

SEQ ID NO: 29204 - DNA, 20 bp, synthetic construct
  misc_feature 1..20: note = Description of Artificial Sequence: Synthetic oligonucleotide
  misc_feature 1..20: note = Target: SCN10A; (+) strand; PAM type: NRG; PAM sequence: GGG
  source 1..20: mol_type = other DNA
acaagggagagtgggaagga

SEQ ID NO: 29205 - DNA, 20 bp, synthetic construct
  misc_feature 1..20: note = Description of Artificial Sequence: Synthetic oligonucleotide
  misc_feature 1..20: note = Target: SCN10A; (+) strand; PAM type: NRG; PAM sequence: TGG
  source 1..20: mol_type = other DNA
agggagagtgggaaggaggg

SEQ ID NO: 29206 - DNA, 20 bp, synthetic construct
  misc_feature 1..20: note = Description of Artificial Sequence: Synthetic oligonucleotide
  misc_feature 1..20: note = Target: SCN10A; (+) strand; PAM type: NRG; PAM sequence: GGG
  source 1..20: mol_type = other DNA
gggagagtgggaaggagggt

SEQ ID NO: 29207 - DNA, 20 bp, synthetic construct
  misc_feature 1..20: note = Description of Artificial Sequence: Synthetic oligonucleotide
  misc_feature 1..20: note = Target: SCN10A; (+) strand; PAM type: NRG; PAM sequence: TAG
  source 1..20: mol_type = other DNA
gggaaggagggtgggtgtct

SEQ ID NO: 29208 - DNA, 20 bp, synthetic construct
  misc_feature 1..20: note = Description of Artificial Sequence: Synthetic oligonucleotide
  misc_feature 1..20: note = Target: SCN10A; (+) strand; PAM type: NRG; PAM sequence: CAG
  source 1..20: mol_type = other DNA
ggagggtgggtgtcttagtt

SEQ ID NO: 29209 - DNA, 20 bp, synthetic construct
  misc_feature 1..20: note = Description of Artificial Sequence: Synthetic oligonucleotide
  misc_feature 1..20: note = Target: SCN10A; (+) strand; PAM type: NRG; PAM sequence: AGG
  source 1..20: mol_type = other DNA
gagggtgggtgtcttagttc

SEQ ID NO: 29210 - DNA, 20 bp, synthetic construct
  misc_feature 1..20: note = Description of Artificial Sequence: Synthetic oligonucleotide
  misc_feature 1..20: note = Target: SCN10A; (+) strand; PAM type: NRG; PAM sequence: AAG
  source 1..20: mol_type = other DNA
ttagttcaggttcactctga

SEQ ID NO: 29211 - DNA, 20 bp, synthetic construct
  misc_feature 1..20: note = Description of Artificial Sequence: Synthetic oligonucleotide
  misc_feature 1..20: note = Target: SCN10A; (+) strand; PAM type: NRG; PAM sequence: AAG
  source 1..20: mol_type = other DNA
tcaggttcactctgaaagcc

SEQ ID NO: 29212 - DNA, 20 bp, synthetic construct
  misc_feature 1..20: note = Description of Artificial Sequence: Synthetic oligonucleotide
  misc_feature 1..20: note = Target: SCN10A; (+) strand; PAM type: NRG; PAM sequence: AAG
  source 1..20: mol_type = other DNA
tcactctgaaagccaagcct

SEQ ID NO: 29213 - DNA, 20 bp, synthetic construct
  misc_feature 1..20: note = Description of Artificial Sequence: Synthetic oligonucleotide
  misc_feature 1..20: note = Target: SCN10A; (+) strand; PAM type: NRG; PAM sequence: TGG
  source 1..20: mol_type = other DNA
tgaaagccaagcctaagaca

SEQ ID NO: 29214 - DNA, 20 bp, synthetic construct
  misc_feature 1..20: note = Description of Artificial Sequence: Synthetic oligonucleotide
  misc_feature 1..20: note = Target: SCN10A; (+) strand; PAM type: NRG; PAM sequence: TGG
  source 1..20: mol_type = other DNA
ccaagcctaagacatggacc

SEQ ID NO: 29215 - DNA, 20 bp, synthetic construct
  misc_feature 1..20: note = Description of Artificial Sequence: Synthetic oligonucleotide
  misc_feature 1..20: note = Target: SCN10A; (+) strand; PAM type: NRG; PAM sequence: GGG
  source 1..20: mol_type = other DNA
caagcctaagacatggacct

SEQ ID NO: 29216 - DNA, 20 bp, synthetic construct
  misc_feature 1..20: note = Description of Artificial Sequence: Synthetic oligonucleotide
  misc_feature 1..20: note = Target: SCN10A; (+) strand; PAM type: NRG; PAM sequence: CAG
  source 1..20: mol_type = other DNA
ctaagacatggacctgggtg

SEQ ID NO: 29217 - DNA, 20 bp, synthetic construct
  misc_feature 1..20: note = Description of Artificial Sequence: Synthetic oligonucleotide
  misc_feature 1..20: note = Target: SCN10A; (+) strand; PAM type: NRG; PAM sequence: AGG
  source 1..20: mol_type = other DNA
taagacatggacctgggtgc

SEQ ID NO: 29218 - DNA, 20 bp, synthetic construct
  misc_feature 1..20: note = Description of Artificial Sequence: Synthetic oligonucleotide
  misc_feature 1..20: note = Target: SCN10A; (+) strand; PAM type: NRG; PAM sequence: TGG
  source 1..20: mol_type = other DNA
ctgggtgcaggtgatttatc

SEQ ID NO: 29219 - DNA, 20 bp, synthetic construct
  misc_feature 1..20: note = Description of Artificial Sequence: Synthetic oligonucleotide
  misc_feature 1..20: note = Target: SCN10A; (+) strand; PAM type: NRG; PAM sequence: GGG
  source 1..20: mol_type = other DNA
tgggtgcaggtgatttatct

SEQ ID NO: 29220 - DNA, 20 bp, synthetic construct
  misc_feature 1..20: note = Description of Artificial Sequence: Synthetic oligonucleotide
  misc_feature 1..20: note = Target: SCN10A; (+) strand; PAM type: NRG; PAM sequence: GAG
  source 1..20: mol_type = other DNA
ggtgcaggtgatttatctgg

SEQ ID NO: 29221 - DNA, 20 bp, synthetic construct
  misc_feature 1..20: note = Description of Artificial Sequence: Synthetic oligonucleotide
  misc_feature 1..20: note = Target: SCN10A; (+) strand; PAM type: NRG; PAM sequence: AGG
  source 1..20: mol_type = other DNA
gtgcaggtgatttatctggg

SEQ ID NO: 29222 - DNA, 20 bp, synthetic construct
  misc_feature 1..20: note = Description of Artificial Sequence: Synthetic oligonucleotide
  misc_feature 1..20: note = Target: SCN10A; (+) strand; PAM type: NRG; PAM sequence: AAG
  source 1..20: mol_type = other DNA
atttatctgggaggtgatcc

SEQ ID NO: 29223 - DNA, 20 bp, synthetic construct
  misc_feature 1..20: note = Description of Artificial Sequence: Synthetic oligonucleotide
  misc_feature 1..20: note = Target: SCN10A; (+) strand; PAM type: NRG; PAM sequence: AGG
  source 1..20: mol_type = other DNA
tttatctgggaggtgatcca

SEQ ID NO: 29224 - DNA, 20 bp, synthetic construct
  misc_feature 1..20: note = Description of Artificial Sequence: Synthetic oligonucleotide
  misc_feature 1..20: note = Target: SCN10A; (+) strand; PAM type: NRG; PAM sequence: AAG
  source 1..20: mol_type = other DNA
atctgggaggtgatccaagg

SEQ ID NO: 29225 - DNA, 20 bp, synthetic construct
  misc_feature 1..20: note = Description of Artificial Sequence: Synthetic oligonucleotide
  misc_feature 1..20: note = Target: SCN10A; (+) strand; PAM type: NRG; PAM sequence: CAG
  source 1..20: mol_type = other DNA
tgggaggtgatccaaggaag

SEQ ID NO: 29226 - DNA, 20 bp, synthetic construct
  misc_feature 1..20: note = Description of Artificial Sequence: Synthetic oligonucleotide
  misc_feature 1..20: note = Target: SCN10A; (+) strand; PAM type: NRG; PAM sequence: AGG
  source 1..20: mol_type = other DNA
gggaggtgatccaaggaagc

SEQ ID NO: 29227 - DNA, 20 bp, synthetic construct
  misc_feature 1..20: note = Description of Artificial Sequence: Synthetic oligonucleotide
  misc_feature 1..20: note = Target: SCN10A; (+) strand; PAM type: NRG; PAM sequence: GAG
  source 1..20: mol_type = other DNA
tgatccaaggaagcaggaat

SEQ ID NO: 29228 - DNA, 20 bp, synthetic construct
  misc_feature 1..20: note = Description of Artificial Sequence: Synthetic oligonucleotide
  misc_feature 1..20: note = Target: SCN10A; (+) strand; PAM type: NRG; PAM sequence: AGG
  source 1..20: mol_type = other DNA
gatccaaggaagcaggaatg

SEQ ID NO: 29229 - DNA, 20 bp, synthetic construct
  misc_feature 1..20: note = Description of Artificial Sequence: Synthetic oligonucleotide
  misc_feature 1..20: note = Target: SCN10A; (+) strand; PAM type: NRG; PAM sequence: GGG
  source 1..20: mol_type = other DNA
atccaaggaagcaggaatga

SEQ ID NO: 29230 - DNA, 20 bp, synthetic construct
  misc_feature 1..20: note = Description of Artificial Sequence: Synthetic oligonucleotide
  misc_feature 1..20: note = Target: SCN10A; (+) strand; PAM type: NRG; PAM sequence: GAG
  source 1..20: mol_type = other DNA
ccaaggaagcaggaatgagg

SEQ ID NO: 29231 - DNA, 20 bp, synthetic construct
  misc_feature 1..20: note = Description of Artificial Sequence: Synthetic oligonucleotide
  misc_feature 1..20: note = Target: SCN10A; (+) strand; PAM type: NRG; PAM sequence: TGG
  source 1..20: mol_type = other DNA
aggaagcaggaatgagggag

SEQ ID NO: 29232 - DNA, 20 bp, synthetic construct
  misc_feature 1..20: note = Description of Artificial Sequence: Synthetic oligonucleotide
  misc_feature 1..20: note = Target: SCN10A; (+) strand; PAM type: NRG; PAM sequence: GGG
  source 1..20: mol_type = other DNA
ggaagcaggaatgagggagt

SEQ ID NO: 29233 - DNA, 20 bp, synthetic construct
  misc_feature 1..20: note = Description of Artificial Sequence: Synthetic oligonucleotide
  misc_feature 1..20: note = Target: SCN10A; (+) strand; PAM type: NRG; PAM sequence: GGG
  source 1..20: mol_type = other DNA
gaagcaggaatgagggagtg

SEQ ID NO: 29234 - DNA, 20 bp, synthetic construct
  misc_feature 1..20: note = Description of Artificial Sequence: Synthetic oligonucleotide
  misc_feature 1..20: note = Target: SCN10A; (+) strand; PAM type: NRG; PAM sequence: AAG
  source 1..20: mol_type = other DNA
gcaggaatgagggagtgggg

SEQ ID NO: 29235 - DNA, 20 bp, synthetic construct
  misc_feature 1..20: note = Description of Artificial Sequence: Synthetic oligonucleotide
  misc_feature 1..20: note = Target: SCN10A; (+) strand; PAM type: NRG; PAM sequence: AAG
  source 1..20: mol_type = other DNA
atgagggagtggggaagaat

SEQ ID NO: 29236 - DNA, 20 bp, synthetic construct
  misc_feature 1..20: note = Description of Artificial Sequence: Synthetic oligonucleotide
  misc_feature 1..20: note = Target: SCN10A; (+) strand; PAM type: NRG; PAM sequence: CGG
  source 1..20: mol_type = other DNA
agggagtggggaagaataag

SEQ ID NO: 29237 - DNA, 20 bp, synthetic construct
  misc_feature 1..20: note = Description of Artificial Sequence: Synthetic oligonucleotide
  misc_feature 1..20: note = Target: SCN10A; (+) strand; PAM type: NRG; PAM sequence: GGG
  source 1..20: mol_type = other DNA
gggagtggggaagaataagc

SEQ ID NO: 29238 - DNA, 20 bp, synthetic construct
  misc_feature 1..20: note = Description of Artificial Sequence: Synthetic oligonucleotide
  misc_feature 1..20: note = Target: SCN10A; (+) strand; PAM type: NRG; PAM sequence: TGG
  source 1..20: mol_type = other DNA
tggggaagaataagcgggaa

SEQ ID NO: 29239 - DNA, 20 bp, synthetic construct
  misc_feature 1..20: note = Description of Artificial Sequence: Synthetic oligonucleotide
  misc_feature 1..20: note = Target: SCN10A; (+) strand; PAM type: NRG; PAM sequence: GGG
  source 1..20: mol_type = other DNA
ggggaagaataagcgggaat

SEQ ID NO: 29240 - DNA, 20 bp, synthetic construct
  misc_feature 1..20: note = Description of Artificial Sequence: Synthetic oligonucleotide
  misc_feature 1..20: note = Target: SCN10A; (+) strand; PAM type: NRG; PAM sequence: GAG
  source 1..20: mol_type = other DNA
ggaagaataagcgggaatgg

SEQ ID NO: 29241 - DNA, 20 bp, synthetic construct
  misc_feature 1..20: note = Description of Artificial Sequence: Synthetic oligonucleotide
  misc_feature 1..20: note = Target: SCN10A; (+) strand; PAM type: NRG; PAM sequence: AAG
  source 1..20: mol_type = other DNA
agaataagcgggaatgggag

SEQ ID NO: 29242 - DNA, 20 bp, synthetic construct
  misc_feature 1..20: note = Description of Artificial Sequence: Synthetic oligonucleotide
  misc_feature 1..20: note = Target: SCN10A; (+) strand; PAM type: NRG; PAM sequence: GAG
  source 1..20: mol_type = other DNA
aataagcgggaatgggagaa

SEQ ID NO: 29243 - DNA, 20 bp, synthetic construct
  misc_feature 1..20: note = Description of Artificial Sequence: Synthetic oligonucleotide
  misc_feature 1..20: note = Target: SCN10A; (+) strand; PAM type: NRG; PAM sequence: AAG
  source 1..20: mol_type = other DNA
gaatgggagaagagcctgtg

SEQ ID NO: 29244 - DNA, 20 bp, synthetic construct
  misc_feature 1..20: note = Description of Artificial Sequence: Synthetic oligonucleotide
  misc_feature 1..20: note = Target: SCN10A; (+) strand; PAM type: NRG; PAM sequence: GAG
  source 1..20: mol_type = other DNA
atgggagaagagcctgtgaa

SEQ ID NO: 29245 - DNA, 20 bp, synthetic construct
  misc_feature 1..20: note = Description of Artificial Sequence: Synthetic oligonucleotide
  misc_feature 1..20: note = Target: SCN10A; (+) strand; PAM type: NRG; PAM sequence: AGG
  source 1..20: mol_type = other DNA
tgggagaagagcctgtgaag

SEQ ID NO: 29246 - DNA, 20 bp, synthetic construct
  misc_feature 1..20: note = Description of Artificial Sequence: Synthetic oligonucleotide
  misc_feature 1..20: note = Target: SCN10A; (+) strand; PAM type: NRG; PAM sequence: AAG
  source 1..20: mol_type = other DNA
cctgtgaagaggatgttgtt

SEQ ID NO: 29247 - DNA, 20 bp, synthetic construct
  misc_feature 1..20: note = Description of Artificial Sequence: Synthetic oligonucleotide
  misc_feature 1..20: note = Target: SCN10A; (+) strand; PAM type: NRG; PAM sequence: CAG
  source 1..20: mol_type = other DNA
gtgaagaggatgttgttaag

SEQ ID NO: 29248 - DNA, 20 bp, synthetic construct
  misc_feature 1..20: note = Description of Artificial Sequence: Synthetic oligonucleotide
  misc_feature 1..20: note = Target: SCN10A; (+) strand; PAM type: NRG; PAM sequence: AGG
  source 1..20: mol_type = other DNA
tgaagaggatgttgttaagc

SEQ ID NO: 29249 - DNA, 20 bp, synthetic construct
  misc_feature 1..20: note = Description of Artificial Sequence: Synthetic oligonucleotide
  misc_feature 1..20: note = Target: SCN10A; (+) strand; PAM type: NRG; PAM sequence: GGG
  source 1..20: mol_type = other DNA
gaagaggatgttgttaagca

SEQ ID NO: 29250 - DNA, 20 bp, synthetic construct
  misc_feature 1..20: note = Description of Artificial Sequence: Synthetic oligonucleotide
  misc_feature 1..20: note = Target: SCN10A; (+) strand; PAM type: NRG; PAM sequence: TGG
  source 1..20: mol_type = other DNA
tgttaagcagggcatcattg

SEQ ID NO: 29251 - DNA, 20 bp, synthetic construct
  misc_feature 1..20: note = Description of Artificial Sequence: Synthetic oligonucleotide
  misc_feature 1..20: note = Target: SCN10A; (+) strand; PAM type: NRG; PAM sequence: GGG
  source 1..20: mol_type = other DNA
gttaagcagggcatcattgt

SEQ ID NO: 29252 - DNA, 20 bp, synthetic construct
  misc_feature 1..20: note = Description of Artificial Sequence: Synthetic oligonucleotide
  misc_feature 1..20: note = Target: SCN10A; (+) strand; PAM type: NRG; PAM sequence: AAG
  source 1..20: mol_type = other DNA
ggcatcattgtgggcaactg

SEQ ID NO: 29253 - DNA, 20 bp, synthetic construct
  misc_feature 1..20: note = Description of Artificial Sequence: Synthetic oligonucleotide
  misc_feature 1..20: note = Target: SCN10A; (+) strand; PAM type: NRG; PAM sequence: TGG
  source 1..20: mol_type = other DNA
caactgaagcgcaatcctac

SEQ ID NO: 29254 - DNA, 20 bp, synthetic construct
  misc_feature 1..20: note = Description of Artificial Sequence: Synthetic oligonucleotide
  misc_feature 1..20: note = Target: SCN10A; (+) strand; PAM type: NRG; PAM sequence: GGG
  source 1..20: mol_type = other DNA
aactgaagcgcaatcctact

SEQ ID NO: 29255 - DNA, 20 bp, synthetic construct
  misc_feature 1..20: note = Description of Artificial Sequence: Synthetic oligonucleotide
  misc_feature 1..20: note = Target: SCN10A; (+) strand; PAM type: NRG; PAM sequence: GGG
  source 1..20: mol_type = other DNA
actgaagcgcaatcctactg

SEQ ID NO: 29256 - DNA, 20 bp, synthetic construct
  misc_feature 1..20: note = Description of Artificial Sequence: Synthetic oligonucleotide
  misc_feature 1..20: note = Target: SCN10A; (+) strand; PAM type: NRG; PAM sequence: GAG
  source 1..20: mol_type = other DNA
caatcctactggggtcctct

SEQ ID NO: 29257 - DNA, 20 bp, synthetic construct
  misc_feature 1..20: note = Description of Artificial Sequence: Synthetic oligonucleotide
  misc_feature 1..20: note = Target: SCN10A; (+) strand; PAM type: NRG; PAM sequence: TAG
  source 1..20: mol_type = other DNA
gggtcctctgagtaactgtg

SEQ ID NO: 29258 - DNA, 20 bp, synthetic construct
  misc_feature 1..20: note = Description of Artificial Sequence: Synthetic oligonucleotide
  misc_feature 1..20: note = Target: SCN10A; (+) strand; PAM type: NRG; PAM sequence: GAG
  source 1..20: mol_type = other DNA
gtcctctgagtaactgtgta

SEQ ID NO: 29259 - DNA, 20 bp, synthetic construct
  misc_feature 1..20: note = Description of Artificial Sequence: Synthetic oligonucleotide
  misc_feature 1..20: note = Target: SCN10A; (+) strand; PAM type: NRG; PAM sequence: CAG
  source 1..20: mol_type = other DNA
gtaactgtgtagagcacatg

SEQ ID NO: 29260 - DNA, 20 bp, synthetic construct
  misc_feature 1..20: note = Description of Artificial Sequence: Synthetic oligonucleotide
  misc_feature 1..20: note = Target: SCN10A; (+) strand; PAM type: NRG; PAM sequence: AGG
  source 1..20: mol_type = other DNA
taactgtgtagagcacatgc

SEQ ID NO: 29261 - DNA, 20 bp, synthetic construct
  misc_feature 1..20: note = Description of Artificial Sequence: Synthetic oligonucleotide
  misc_feature 1..20: note = Target: SCN10A; (+) strand; PAM type: NRG; PAM sequence: AAG
  source 1..20: mol_type = other DNA
acatgcaggattatatcacc

SEQ ID NO: 29262 - DNA, 20 bp, synthetic construct
  misc_feature 1..20: note = Description of Artificial Sequence: Synthetic oligonucleotide
  misc_feature 1..20: note = Target: SCN10A; (+) strand; PAM type: NRG; PAM sequence: AGG
  source 1..20: mol_type = other DNA
catgcaggattatatcacca

SEQ ID NO: 29263 - DNA, 20 bp, synthetic construct
  misc_feature 1..20: note = Description of Artificial Sequence: Synthetic oligonucleotide
  misc_feature 1..20: note = Target: SCN10A; (+) strand; PAM type: NRG; PAM sequence: GGG
  source 1..20: mol_type = other DNA
atgcaggattatatcaccaa

SEQ ID NO: 29264 - DNA, 20 bp, synthetic construct
  misc_feature 1..20: note = Description of Artificial Sequence: Synthetic oligonucleotide
  misc_feature 1..20: note = Target: SCN10A; (+) strand; PAM type: NRG; PAM sequence: CAG
  source 1..20: mol_type = other DNA
aggattatatcaccaaggga

SEQ ID NO: 29265 - DNA, 20 bp, synthetic construct
  misc_feature 1..20: note = Description of Artificial Sequence: Synthetic oligonucleotide
  misc_feature 1..20: note = Target: SCN10A; (+) strand; PAM type: NRG; PAM sequence: AGG
  source 1..20: mol_type = other DNA
ggattatatcaccaagggac

SEQ ID NO: 29266 - DNA, 20 bp, synthetic construct
  misc_feature 1..20: note = Description of Artificial Sequence: Synthetic oligonucleotide
  misc_feature 1..20: note = Target: SCN10A; (+) strand; PAM type: NRG; PAM sequence: GGG
  source 1..20: mol_type = other DNA
gattatatcaccaagggaca

SEQ ID NO: 29267 - DNA, 20 bp, synthetic construct
  misc_feature 1..20: note = Description of Artificial Sequence: Synthetic oligonucleotide
  misc_feature 1..20: note = Target: SCN10A; (+) strand; PAM type: NRG; PAM sequence: TGG
  source 1..20: mol_type = other DNA
tcaccaagggacagggaaac

SEQ ID NO: 29268 - DNA, 20 bp, synthetic construct
  misc_feature 1..20: note = Description of Artificial Sequence: Synthetic oligonucleotide
  misc_feature 1..20: note = Target: SCN10A; (+) strand; PAM type: NRG; PAM sequence: GAG
  source 1..20: mol_type = other DNA
accaagggacagggaaactg

SEQ ID NO: 29269 - DNA, 20 bp, synthetic construct
  misc_feature 1..20: note = Description of Artificial Sequence: Synthetic oligonucleotide
  misc_feature 1..20: note = Target: SCN10A; (+) strand; PAM type: NRG; PAM sequence: CAG
  source 1..20: mol_type = other DNA
gaaactggagtatttatcct

SEQ ID NO: 29270 - DNA, 20 bp, synthetic construct
  misc_feature 1..20: note = Description of Artificial Sequence: Synthetic oligonucleotide
  misc_feature 1..20: note = Target: SCN10A; (+) strand; PAM type: NRG; PAM sequence: TGG
  source 1..20: mol_type = other DNA
ctcagactcccaaaacttat

SEQ ID NO: 29271 - DNA, 20 bp, synthetic construct
  misc_feature 1..20: note = Description of Artificial Sequence: Synthetic oligonucleotide
  misc_feature 1..20: note = Target: SCN10A; (+) strand; PAM type: NRG; PAM sequence: AAG
  source 1..20: mol_type = other DNA
gactcccaaaacttattggt

SEQ ID NO: 29272 - DNA, 20 bp, synthetic construct
  misc_feature 1..20: note = Description of Artificial Sequence: Synthetic oligonucleotide
  misc_feature 1..20: note = Target: SCN10A; (+) strand; PAM type: NRG; PAM sequence: AGG
  source 1..20: mol_type = other DNA
actcccaaaacttattggta

SEQ ID NO: 29273 - DNA, 20 bp, synthetic construct
  misc_feature 1..20: note = Description of Artificial Sequence: Synthetic oligonucleotide
  misc_feature 1..20: note = Target: SCN10A; (+) strand; PAM type: NRG; PAM sequence: GGG
  source 1..20: mol_type = other DNA
ctcccaaaacttattggtaa

SEQ ID NO: 29274 - DNA, 20 bp, synthetic construct
  misc_feature 1..20: note = Description of Artificial Sequence: Synthetic oligonucleotide
  misc_feature 1..20: note = Target: SCN10A; (+) strand; PAM type: NRG; PAM sequence: TAG
  source 1..20: mol_type = other DNA
ttattggtaagggttgcccc

SEQ ID NO: 29275 - DNA, 20 bp, synthetic construct
  misc_feature 1..20: note = Description of Artificial Sequence: Synthetic oligonucleotide
  misc_feature 1..20: note = Target: SCN10A; (+) strand; PAM type: NRG; PAM sequence: AGG
  source 1..20: mol_type = other DNA
tattggtaagggttgcccct

SEQ ID NO: 29276 - DNA, 20 bp, synthetic construct
  misc_feature 1..20: note = Description of Artificial Sequence: Synthetic oligonucleotide
  misc_feature 1..20: note = Target: SCN10A; (+) strand; PAM type: NRG; PAM sequence: GGG
  source 1..20: mol_type = other DNA
attggtaagggttgccccta

SEQ ID NO: 29277 - DNA, 20 bp, synthetic construct
  misc_feature 1..20: note = Description of Artificial Sequence: Synthetic oligonucleotide
  misc_feature 1..20: note = Target: SCN10A; (+) strand; PAM type: NRG; PAM sequence: TGG
  source 1..20: mol_type = other DNA
ccctagggacattaaatccc

SEQ ID NO: 29278 - DNA, 20 bp, synthetic construct
  misc_feature 1..20: note = Description of Artificial Sequence: Synthetic oligonucleotide
  misc_feature 1..20: note = Target: SCN10A; (+) strand; PAM type: NRG; PAM sequence: TGG
  source 1..20: mol_type = other DNA
gacattaaatccctggtact

SEQ ID NO: 29279 - DNA, 20 bp, synthetic construct
  misc_feature 1..20: note = Description of Artificial Sequence: Synthetic oligonucleotide
  misc_feature 1..20: note = Target: SCN10A; (+) strand; PAM type: NRG; PAM sequence: GGG
  source 1..20: mol_type = other DNA
acattaaatccctggtactt

SEQ ID NO: 29280 - DNA, 20 bp, synthetic construct
  misc_feature 1..20: note = Description of Artificial Sequence: Synthetic oligonucleotide
  misc_feature 1..20: note = Target: SCN10A; (+) strand; PAM type: NRG; PAM sequence: GGG
  source 1..20: mol_type = other DNA
cattaaatccctggtacttg

SEQ ID NO: 29281 - DNA, 20 bp, synthetic construct
  misc_feature 1..20: note = Description of Artificial Sequence: Synthetic oligonucleotide
  misc_feature 1..20: note = Target: SCN10A; (+) strand; PAM type: NRG; PAM sequence: GGG
  source 1..20: mol_type = other DNA
attaaatccctggtacttgg

SEQ ID NO: 29282 - DNA, 20 bp, synthetic construct
  misc_feature 1..20: note = Description of Artificial Sequence: Synthetic oligonucleotide
  misc_feature 1..20: note = Target: SCN10A; (+) strand; PAM type: NRG; PAM sequence: GAG
  source 1..20: mol_type = other DNA
taaatccctggtacttgggg

SEQ ID NO: 29283 - DNA, 20 bp, synthetic construct
  misc_feature 1..20: note = Description of Artificial Sequence: Synthetic oligonucleotide
  misc_feature 1..20: note = Target: SCN10A; (+) strand; PAM type: NRG; PAM sequence: AAG
  source 1..20: mol_type = other DNA
atccctggtacttgggggag

SEQ ID NO: 29284 - DNA, 20 bp, synthetic construct
  misc_feature 1..20: note = Description of Artificial Sequence: Synthetic oligonucleotide
  misc_feature 1..20: note = Target: SCN10A; (+) strand; PAM type: NRG; PAM sequence: AAG
  source 1..20: mol_type = other DNA
tgggggagaagttgctgcac

SEQ ID NO: 29285 - DNA, 20 bp, synthetic construct
  misc_feature 1..20: note = Description of Artificial Sequence: Synthetic oligonucleotide
  misc_feature 1..20: note = Target: SCN10A; (+) strand; PAM type: NRG; PAM sequence: AAG
  source 1..20: mol_type = other DNA
aagttgctgcacaagctcct

SEQ ID NO: 29286 - DNA, 20 bp, synthetic construct
  misc_feature 1..20: note = Description of Artificial Sequence: Synthetic oligonucleotide
  misc_feature 1..20: note = Target: SCN10A; (+) strand; PAM type: NRG; PAM sequence: TGG
  source 1..20: mol_type = other DNA
ctgcacaagctcctaagccc

SEQ ID NO: 29287 - DNA, 20 bp, synthetic construct
  misc_feature 1..20: note = Description of Artificial Sequence: Synthetic oligonucleotide
  misc_feature 1..20: note = Target: SCN10A; (+) strand; PAM type: NRG; PAM sequence: GAG
  source 1..20: mol_type = other DNA
gcacaagctcctaagccctg

SEQ ID NO: 29288 - DNA, 20 bp, synthetic construct
  misc_feature 1..20: note = Description of Artificial Sequence: Synthetic oligonucleotide
  misc_feature 1..20: note = Target: SCN10A; (+) strand; PAM type: NRG; PAM sequence: CAG
  source 1..20: mol_type = other DNA
taagccctggagtctttata

SEQ ID NO: 29289 - DNA, 20 bp, synthetic construct
  misc_feature 1..20: note = Description of Artificial Sequence: Synthetic oligonucleotide
  misc_feature 1..20: note = Target: SCN10A; (+) strand; PAM type: NRG; PAM sequence: GAG
  source 1..20: mol_type = other DNA
agccctggagtctttataca

SEQ ID NO: 29290 - DNA, 20 bp, synthetic construct
  misc_feature 1..20: note = Description of Artificial Sequence: Synthetic oligonucleotide
  misc_feature 1..20: note = Target: SCN10A; (+) strand; PAM type: NRG; PAM sequence: CAG
  source 1..20: mol_type = other DNA
ggagtctttatacagagaat

SEQ ID NO: 29291 - DNA, 20 bp, synthetic construct
  misc_feature 1..20: note = Description of Artificial Sequence: Synthetic oligonucleotide
  misc_feature 1..20: note = Target: SCN10A; (+) strand; PAM type: NRG; PAM sequence: AAG
  source 1..20: mol_type = other DNA
gtctttatacagagaatcag

SEQ ID NO: 29292 - DNA, 20 bp, synthetic construct
  misc_feature 1..20: note = Description of Artificial Sequence: Synthetic oligonucleotide
  misc_feature 1..20: note = Target: SCN10A; (+) strand; PAM type: NRG; PAM sequence: CAG
  source 1..20: mol_type = other DNA
tatacagagaatcagaagtg

SEQ ID NO: 29293 - DNA, 20 bp, synthetic construct
  misc_feature 1..20: note = Description of Artificial Sequence: Synthetic oligonucleotide
  misc_feature 1..20: note = Target: SCN10A; (+) strand; PAM type: NRG; PAM sequence: CAG
  source 1..20: mol_type = other DNA
agaatcagaagtgcagcctg

SEQ ID NO: 29294 - DNA, 20 bp, synthetic construct
  misc_feature 1..20: note = Description of Artificial Sequence: Synthetic oligonucleotide
  misc_feature 1..20: note = Target: SCN10A; (+) strand; PAM type: NRG; PAM sequence: AGG
  source 1..20: mol_type = other DNA
gaatcagaagtgcagcctgc

SEQ ID NO: 29295 - DNA, 20 bp, synthetic construct
  misc_feature 1..20: note = Description of Artificial Sequence: Synthetic oligonucleotide
  misc_feature 1..20: note = Target: SCN10A; (+) strand; PAM type: NRG; PAM sequence: CAG
  source 1..20: mol_type = other DNA
gtgcagcctgcaggtgaaat

SEQ ID NO: 29296 - DNA, 20 bp, synthetic construct
  misc_feature 1..20: note = Description of Artificial Sequence: Synthetic oligonucleotide
  misc_feature 1..20: note = Target: SCN10A; (+) strand; PAM type: NRG; PAM sequence: AAG
  source 1..20: mol_type = other DNA
cagcctgcaggtgaaatcag

SEQ ID NO: 29297 - DNA, 20 bp, synthetic construct
  misc_feature 1..20: note = Description of Artificial Sequence: Synthetic oligonucleotide
  misc_feature 1..20: note = Target: SCN10A; (+) strand; PAM type: NRG; PAM sequence: TGG
  source 1..20: mol_type = other DNA
cctgcaggtgaaatcagaag

SEQ ID NO: 29298 - DNA, 20 bp, synthetic construct
  misc_feature 1..20: note = Description of Artificial Sequence: Synthetic oligonucleotide
  misc_feature 1..20: note = Target: SCN10A; (+) strand; PAM type: NRG; PAM sequence: GGG
  source 1..20: mol_type = other DNA
ctgcaggtgaaatcagaagt

SEQ ID NO: 29299 - DNA, 20 bp, synthetic construct
  misc_feature 1..20: note = Description of Artificial Sequence: Synthetic oligonucleotide
  misc_feature 1..20: note = Target: SCN10A; (+) strand; PAM type: NRG; PAM sequence: AAG
  source 1..20: mol_type = other DNA
ggtgaaatcagaagtgggct

SEQ ID NO: 29300 - DNA, 20 bp, synthetic construct
  misc_feature 1..20: note = Description of Artificial Sequence: Synthetic oligonucleotide
  misc_feature 1..20: note = Target: SCN10A; (+) strand; PAM type: NRG; PAM sequence: AGG
  source 1..20: mol_type = other DNA
gtgaaatcagaagtgggcta

SEQ ID NO: 29301 - DNA, 20 bp, synthetic construct
  misc_feature 1..20: note = Description of Artificial Sequence: Synthetic oligonucleotide
  misc_feature 1..20: note = Target: SCN10A; (+) strand; PAM type: NRG; PAM sequence: GGG
  source 1..20: mol_type = other DNA
tgaaatcagaagtgggctaa

SEQ ID NO: 29302 - DNA, 20 bp, synthetic construct
  misc_feature 1..20: note = Description of Artificial Sequence: Synthetic oligonucleotide
  misc_feature 1..20: note = Target: SCN10A; (+) strand; PAM type: NRG; PAM sequence: AAG
  source 1..20: mol_type = other DNA
aatcagaagtgggctaaggg

SEQ ID NO: 29303 - DNA, 20 bp, synthetic construct
  misc_feature 1..20: note = Description of Artificial Sequence: Synthetic oligonucleotide
  misc_feature 1..20: note = Target: SCN10A; (+) strand; PAM type: NRG; PAM sequence: GAG
  source 1..20: mol_type = other DNA
tcagaagtgggctaagggaa

SEQ ID NO: 29304 - DNA, 20 bp, synthetic construct
  misc_feature 1..20: note = Description of Artificial Sequence: Synthetic oligonucleotide
  misc_feature 1..20: note = Target: SCN10A; (+) strand; PAM type: NRG; PAM sequence: AGG
  source 1..20: mol_type = other DNA
cagaagtgggctaagggaag

SEQ ID NO: 29305 - DNA, 20 bp, synthetic construct
  misc_feature 1..20: note = Description of Artificial Sequence: Synthetic oligonucleotide
  misc_feature 1..20: note = Target: SCN10A; (+) strand; PAM type: NRG; PAM sequence: TGG
  source 1..20: mol_type = other DNA
aagtgggctaagggaagagg

SEQ ID NO: 29306 - DNA, 20 bp, synthetic construct
  misc_feature 1..20: note = Description of Artificial Sequence: Synthetic oligonucleotide
  misc_feature 1..20: note = Target: SCN10A; (+) strand; PAM type: NRG; PAM sequence: CAG
  source 1..20: mol_type = other DNA
tgggctaagggaagaggtgg

SEQ ID NO: 29307 - DNA, 20 bp, synthetic construct
  misc_feature 1..20: note = Description of Artificial Sequence: Synthetic oligonucleotide
  misc_feature 1..20: note = Target: SCN10A; (+) strand; PAM type: NRG; PAM sequence: AGG
  source 1..20: mol_type = other DNA
gggctaagggaagaggtggc

SEQ ID NO: 29308 - DNA, 20 bp, synthetic construct
  misc_feature 1..20: note = Description of Artificial Sequence: Synthetic oligonucleotide
  misc_feature 1..20: note = Target: SCN10A; (+) strand; PAM type: NRG; PAM sequence: GGG
  source 1..20: mol_type = other DNA
ggctaagggaagaggtggca

SEQ ID NO: 29309 - DNA, 20 bp, synthetic construct
  misc_feature 1..20: note = Description of Artificial Sequence: Synthetic oligonucleotide
  misc_feature 1..20: note = Target: SCN10A; (+) strand; PAM type: NRG; PAM sequence: CAG
  source 1..20: mol_type = other DNA
aagaggtggcagggaattga

SEQ ID NO: 29310 - DNA, 20 bp, synthetic construct
  misc_feature 1..20: note = Description of Artificial Sequence: Synthetic oligonucleotide
  misc_feature 1..20: note = Target: SCN10A; (+) strand; PAM type: NRG; PAM sequence: CAG
  source 1..20: mol_type = other DNA
ggaattgacagtgcctgcca

SEQ ID NO: 29311 - DNA, 20 bp, synthetic construct
  misc_feature 1..20: note = Description of Artificial Sequence: Synthetic oligonucleotide
  misc_feature 1..20: note = Target: SCN10A; (+) strand; PAM type: NRG; PAM sequence: CAG
  source 1..20: mol_type = other DNA
attgacagtgcctgccacag

SEQ ID NO: 29312 - DNA, 20 bp, synthetic construct
  misc_feature 1..20: note = Description of Artificial Sequence: Synthetic oligonucleotide
  misc_feature 1..20: note = Target: SCN10A; (+) strand; PAM type: NRG; PAM sequence: AGG
  source 1..20: mol_type = other DNA
ttgacagtgcctgccacagc

SEQ ID NO: 29313 - DNA, 20 bp, synthetic construct
  misc_feature 1..20: note = Description of Artificial Sequence: Synthetic oligonucleotide
  misc_feature 1..20: note = Target: SCN10A; (+) strand; PAM type: NRG; PAM sequence: AAG
  source 1..20: mol_type = other DNA
acagtgcctgccacagcagg

SEQ ID NO: 29314 - DNA, 20 bp, synthetic construct
  misc_feature 1..20: note = Description of Artificial Sequence: Synthetic oligonucleotide
  misc_feature 1..20: note = Target: SCN10A; (+) strand; PAM type: NRG; PAM sequence: TGG
  source 1..20: mol_type = other DNA
gtgcctgccacagcaggaag

SEQ ID NO: 29315 - DNA, 20 bp, synthetic construct
  misc_feature 1..20: note = Description of Artificial Sequence: Synthetic oligonucleotide
  misc_feature 1..20: note = Target: SCN10A; (+) strand; PAM type: NRG; PAM sequence: TAG
  source 1..20: mol_type = other DNA
aggaagtggtcattccccaa

SEQ ID NO: 29316 - DNA, 20 bp, synthetic construct
  misc_feature 1..20: note = Description of Artificial Sequence: Synthetic oligonucleotide
  misc_feature 1..20: note = Target: SCN10A; (+) strand; PAM type: NRG; PAM sequence: CAG
  source 1..20: mol_type = other DNA
attccccaatagtgtctccc

SEQ ID NO: 29317 - DNA, 20 bp, synthetic construct
  misc_feature 1..20: note = Description of Artificial Sequence: Synthetic oligonucleotide
  misc_feature 1..20: note = Target: SCN10A; (+) strand; PAM type: NRG; PAM sequence: TGG
  source 1..20: mol_type = other DNA
ccaatagtgtctccccagcc

SEQ ID NO: 29318 - DNA, 20 bp, synthetic construct
  misc_feature 1..20: note = Description of Artificial Sequence: Synthetic oligonucleotide
  misc_feature 1..20: note = Target: SCN10A; (+) strand; PAM type: NRG; PAM sequence: GAG
  source 1..20: mol_type = other DNA
cttttcttttcttttttttt

SEQ ID NO: 29319 - DNA, 20 bp, synthetic construct
  misc_feature 1..20: note = Description of Artificial Sequence: Synthetic oligonucleotide
  misc_feature 1..20: note = Target: SCN10A; (+) strand; PAM type: NRG; PAM sequence: GAG
  source 1..20: mol_type = other DNA
ttttctttttttttgagatt

SEQ ID NO: 29320 - DNA, 20 bp, synthetic construct
  misc_feature 1..20: note = Description of Artificial Sequence: Synthetic oligonucleotide
  misc_feature 1..20: note = Target: SCN10A; (+) strand; PAM type: NRG; PAM sequence: AAG
  source 1..20: mol_type = other DNA
tgagtctcgctgtctcgccc

SEQ ID NO: 29321 - DNA, 20 bp, synthetic construct
  misc_feature 1..20: note = Description of Artificial Sequence: Synthetic oligonucleotide
  misc_feature 1..20: note = Target: SCN10A; (+) strand; PAM type: NRG; PAM sequence: TGG
  source 1..20: mol_type = other DNA
tctcgctgtctcgcccaagc

SEQ ID NO: 29322 - DNA, 20 bp, synthetic construct
  misc_feature 1..20: note = Description of Artificial Sequence: Synthetic oligonucleotide
  misc_feature 1..20: note = Target: SCN10A; (+) strand; PAM type: NRG; PAM sequence: GAG
  source 1..20: mol_type = other DNA
tcgctgtctcgcccaagctg

SEQ ID NO: 29323 - DNA, 20 bp, synthetic construct
  misc_feature 1..20: note = Description of Artificial Sequence: Synthetic oligonucleotide
  misc_feature 1..20: note = Target: SCN10A; (+) strand; PAM type: NRG; PAM sequence: CAG
  source 1..20: mol_type = other DNA
gtctcgcccaagctggagtg

SEQ ID NO: 29324 - DNA, 20 bp, synthetic construct
  misc_feature 1..20: note = Description of Artificial Sequence: Synthetic oligonucleotide
  misc_feature 1..20: note = Target: SCN10A; (+) strand; PAM type: NRG; PAM sequence: CAG
  source 1..20: mol_type = other DNA
ggagtgcagtgacgcaatct

SEQ ID NO: 29325 - DNA, 20 bp, synthetic construct
  misc_feature 1..20: note = Description of Artificial Sequence: Synthetic oligonucleotide
  misc_feature 1..20: note = Target: SCN10A; (+) strand; PAM type: NRG; PAM sequence: CGG
  source 1..20: mol_type = other DNA
tcactgcaacttctgcctcc

SEQ ID NO: 29326 - DNA, 20 bp, synthetic construct
  misc_feature 1..20: note = Description of Artificial Sequence: Synthetic oligonucleotide
  misc_feature 1..20: note = Target: SCN10A; (+) strand; PAM type: NRG; PAM sequence: GGG
  source 1..20: mol_type = other DNA
cactgcaacttctgcctccc

SEQ ID NO: 29327 - DNA, 20 bp, synthetic construct
  misc_feature 1..20: note = Description of Artificial Sequence: Synthetic oligonucleotide
  misc_feature 1..20: note = Target: SCN10A; (+) strand; PAM type: NRG; PAM sequence: AAG
  source 1..20: mol_type = other DNA
aacttctgcctcccgggttc

SEQ ID NO: 29328 - DNA, 20 bp, synthetic construct
  misc_feature 1..20: note = Description of Artificial Sequence: Synthetic oligonucleotide
  misc_feature 1..20: note = Target: SCN10A; (+) strand; PAM type: NRG; PAM sequence: GAG
  source 1..20: mol_type = other DNA
cttctgcctcccgggttcaa

SEQ ID NO: 29329 - DNA, 20 bp, synthetic construct
  misc_feature 1..20: note = Description of Artificial Sequence: Synthetic oligonucleotide
  misc_feature 1..20: note = Target: SCN10A; (+) strand; PAM type: NRG; PAM sequence: CAG
  source 1..20: mol_type = other DNA
ttcaagagattctcctgtct

SEQ ID NO: 29330 - DNA, 20 bp, synthetic construct
  misc_feature 1..20: note = Description of Artificial Sequence: Synthetic oligonucleotide
  misc_feature 1..20: note = Target: SCN10A; (+) strand; PAM type: NRG; PAM sequence: GAG
  source 1..20: mol_type = other DNA
ttctcctgtctcagtctccc

SEQ ID NO: 29331 - DNA, 20 bp, synthetic construct
  misc_feature 1..20: note = Description of Artificial Sequence: Synthetic oligonucleotide
  misc_feature 1..20: note = Target: SCN10A; (+) strand; PAM type: NRG; PAM sequence: CAG
  source 1..20: mol_type = other DNA
tcctgtctcagtctcccgag

SEQ ID NO: 29332 - DNA, 20 bp, synthetic construct
  misc_feature 1..20: note = Description of Artificial Sequence: Synthetic oligonucleotide
  misc_feature 1..20: note = Target: SCN10A; (+) strand; PAM type: NRG; PAM sequence: TGG
  source 1..20: mol_type = other DNA
gtctcagtctcccgagcagc

SEQ ID NO: 29333 - DNA, 20 bp, synthetic construct
  misc_feature 1..20: note = Description of Artificial Sequence: Synthetic oligonucleotide
  misc_feature 1..20: note = Target: SCN10A; (+) strand; PAM type: NRG; PAM sequence: GGG
  source 1..20: mol_type = other DNA
tctcagtctcccgagcagct

SEQ ID NO: 29334 - DNA, 20 bp, synthetic construct
  misc_feature 1..20: note = Description of Artificial Sequence: Synthetic oligonucleotide
  misc_feature 1..20: note = Target: SCN10A; (+) strand; PAM type: NRG; PAM sequence: CAG
  source 1..20: mol_type = other DNA
ctcccgagcagctgggacta

SEQ ID NO: 29335 - DNA, 20 bp, synthetic construct
  misc_feature 1..20: note = Description of Artificial Sequence: Synthetic oligonucleotide
  misc_feature 1..20: note = Target: SCN10A; (+) strand; PAM type: NRG; PAM sequence: AGG
  source 1..20: mol_type = other DNA
tcccgagcagctgggactac

SEQ ID NO: 29336 - DNA, 20 bp, synthetic construct
  misc_feature 1..20: note = Description of Artificial Sequence: Synthetic oligonucleotide
  misc_feature 1..20: note = Target: SCN10A; (+) strand; PAM type: NRG; PAM sequence: AAG
  source 1..20: mol_type = other DNA
gcagctgggactacaggcac

SEQ ID NO: 29337 - DNA, 20 bp, synthetic construct
  misc_feature 1..20: note = Description of Artificial Sequence: Synthetic oligonucleotide
  misc_feature 1..20: note = Target: SCN10A; (+) strand; PAM type: NRG; PAM sequence: TAG
  source 1..20: mol_type = other DNA
tgctaatttctttcatattt

SEQ ID NO: 29338 - DNA, 20 bp, synthetic construct
  misc_feature 1..20: note = Description of Artificial Sequence: Synthetic oligonucleotide
  misc_feature 1..20: note = Target: SCN10A; (+) strand; PAM type: NRG; PAM sequence: TAG
  source 1..20: mol_type = other DNA
taatttctttcatattttag

SEQ ID NO: 29339 - DNA, 20 bp, synthetic construct
  misc_feature 1..20: note = Description of Artificial Sequence: Synthetic oligonucleotide
  misc_feature 1..20: note = Target: SCN10A; (+) strand; PAM type: NRG; PAM sequence: GAG
  source 1..20: mol_type = other DNA
atttctttcatattttagta

SEQ ID NO: 29340 - DNA, 20 bp, synthetic construct
  misc_feature 1..20: note = Description of Artificial Sequence: Synthetic oligonucleotide
  misc_feature 1..20: note = Target: SCN10A; (+) strand; PAM type: NRG; PAM sequence: TGG
  source 1..20: mol_type = other DNA
ctttcatattttagtagaga

SEQ ID NO: 29341 - DNA, 20 bp, synthetic construct
  misc_feature 1..20: note = Description of Artificial Sequence: Synthetic oligonucleotide
  misc_feature 1..20: note = Target: SCN10A; (+) strand; PAM type: NRG; PAM sequence: GGG
  source 1..20: mol_type = other DNA
tttcatattttagtagagat

SEQ ID NO: 29342 - DNA, 20 bp, synthetic construct
  misc_feature 1..20: note = Description of Artificial Sequence: Synthetic oligonucleotide
  misc_feature 1..20: note = Target: SCN10A; (+) strand; PAM type: NRG; PAM sequence: GGG
  source 1..20: mol_type = other DNA
ttcatattttagtagagatg

SEQ ID NO: 29343 - DNA, 20 bp, synthetic construct
  misc_feature 1..20: note = Description of Artificial Sequence: Synthetic oligonucleotide
  misc_feature 1..20: note = Target: SCN10A; (+) strand; PAM type: NRG; PAM sequence: CAG
  source 1..20: mol_type = other DNA
tggggtttcaccgtattgcc

SEQ ID NO: 29344 - DNA, 20 bp, synthetic construct
  misc_feature 1..20: note = Description of Artificial Sequence: Synthetic oligonucleotide
  misc_feature 1..20: note = Target: SCN10A; (+) strand; PAM type: NRG; PAM sequence: AGG
  source 1..20: mol_type = other DNA
ggggtttcaccgtattgccc

SEQ ID NO: 29345 - DNA, 20 bp, synthetic construct
  misc_feature 1..20: note = Description of Artificial Sequence: Synthetic oligonucleotide
  misc_feature 1..20: note = Target: SCN10A; (+) strand; PAM type: NRG; PAM sequence: TGG
  source 1..20: mol_type = other DNA
tttcaccgtattgcccaggc

SEQ ID NO: 29346 - DNA, 20 bp, synthetic construct
  misc_feature 1..20: note = Description of Artificial Sequence: Synthetic oligonucleotide
  misc_feature 1..20: note = Target: SCN10A; (+) strand; PAM type: NRG; PAM sequence: GAG
  source 1..20: mol_type = other DNA
attgcccaggctggtctcct

SEQ ID NO: 29347 - DNA, 20 bp, synthetic construct
  misc_feature 1..20: note = Description of Artificial Sequence: Synthetic oligonucleotide
  misc_feature 1..20: note = Target: SCN10A; (+) strand; PAM type: NRG; PAM sequence: CAG
  source 1..20: mol_type = other DNA
ccaggctggtctcctgagct

SEQ ID NO: 29348 - DNA, 20 bp, synthetic construct
  misc_feature 1..20: note = Description of Artificial Sequence: Synthetic oligonucleotide
  misc_feature 1..20: note = Target: SCN10A; (+) strand; PAM type: NRG; PAM sequence: AGG
  source 1..20: mol_type = other DNA
caggctggtctcctgagctc

SEQ ID NO: 29349 - DNA, 20 bp, synthetic construct
  misc_feature 1..20: note = Description of Artificial Sequence: Synthetic oligonucleotide
  misc_feature 1..20: note = Target: SCN10A; (+) strand; PAM type: NRG; PAM sequence: CGG
  source 1..20: mol_type = other DNA
ctcaggcaatctgcccacct

SEQ ID NO: 29350 - DNA, 20 bp, synthetic construct
  misc_feature 1..20: note = Description of Artificial Sequence: Synthetic oligonucleotide
  misc_feature 1..20: note = Target: SCN10A; (+) strand; PAM type: NRG; PAM sequence: AAG
  source 1..20: mol_type = other DNA
ctgcccacctcggcctccca

SEQ ID NO: 29351 - DNA, 20 bp, synthetic construct
  misc_feature 1..20: note = Description of Artificial Sequence: Synthetic oligonucleotide
  misc_feature 1..20: note = Target: SCN10A; (+) strand; PAM type: NRG; PAM sequence: TAG
  source 1..20: mol_type = other DNA
acctcggcctcccaaagtgc

SEQ ID NO: 29352 - DNA, 20 bp, synthetic construct
  misc_feature 1..20: note = Description of Artificial Sequence: Synthetic oligonucleotide
  misc_feature 1..20: note = Target: SCN10A; (+) strand; PAM type: NRG; PAM sequence: AGG
  source 1..20: mol_type = other DNA
cctcggcctcccaaagtgct

SEQ ID NO: 29353 - DNA, 20 bp, synthetic construct
  misc_feature 1..20: note = Description of Artificial Sequence: Synthetic oligonucleotide
  misc_feature 1..20: note = Target: SCN10A; (+) strand; PAM type: NRG; PAM sequence: CAG
  source 1..20: mol_type = other DNA
ctcccaaagtgctaggatta

SEQ ID NO: 29354 - DNA, 20 bp, synthetic construct
  misc_feature 1..20: note = Description of Artificial Sequence: Synthetic oligonucleotide
  misc_feature 1..20: note = Target: SCN10A; (+) strand; PAM type: NRG; PAM sequence: AGG
  source 1..20: mol_type = other DNA
tcccaaagtgctaggattac

SEQ ID NO: 29355 - DNA, 20 bp, synthetic construct
  misc_feature 1..20: note = Description of Artificial Sequence: Synthetic oligonucleotide
  misc_feature 1..20: note = Target: SCN10A; (+) strand; PAM type: NRG; PAM sequence: TGG
  source 1..20: mol_type = other DNA
caggcatgaaccactgcgcc

SEQ ID NO: 29356 - DNA, 20 bp, synthetic construct
  misc_feature 1..20: note = Description of Artificial Sequence: Synthetic oligonucleotide
  misc_feature 1..20: note = Target: SCN10A; (+) strand; PAM type: NRG; PAM sequence: TGG
  source 1..20: mol_type = other DNA
ccactgcgcctggcccatcc

SEQ ID NO: 29357 - DNA, 20 bp, synthetic construct
  misc_feature 1..20: note = Description of Artificial Sequence: Synthetic oligonucleotide
  misc_feature 1..20: note = Target: SCN10A; (+) strand; PAM type: NRG; PAM sequence: GGG
  source 1..20: mol_type = other DNA
cactgcgcctggcccatcct

SEQ ID NO: 29358 - DNA, 20 bp, synthetic construct
  misc_feature 1..20: note = Description of Artificial Sequence: Synthetic oligonucleotide
  misc_feature 1..20: note = Target: SCN10A; (+) strand; PAM type: NRG; PAM sequence: TAG
  source 1..20: mol_type = other DNA
gcccatcctgggttttatga

SEQ ID NO: 29359 - DNA, 20 bp, synthetic construct
  misc_feature 1..20: note = Description of Artificial Sequence: Synthetic oligonucleotide
  misc_feature 1..20: note = Target: SCN10A; (+) strand; PAM type: NRG; PAM sequence: GAG
  source 1..20: mol_type = other DNA
tgggttttatgatagttcct

SEQ ID NO: 29360 - DNA, 20 bp, synthetic construct
  misc_feature 1..20: note = Description of Artificial Sequence: Synthetic oligonucleotide
  misc_feature 1..20: note = Target: SCN10A; (+) strand; PAM type: NRG; PAM sequence: TAG
  source 1..20: mol_type = other DNA
cctccctatgcaccttgatt

SEQ ID NO: 29361 - DNA, 20 bp, synthetic construct
  misc_feature 1..20: note = Description of Artificial Sequence: Synthetic oligonucleotide
  misc_feature 1..20: note = Target: SCN10A; (+) strand; PAM type: NRG; PAM sequence: CAG
  source 1..20: mol_type = other DNA
gctttgctcccacccttgtc

SEQ ID NO: 29362 - DNA, 20 bp, synthetic construct
  misc_feature 1..20: note = Description of Artificial Sequence: Synthetic oligonucleotide
  misc_feature 1..20: note = Target: SCN10A; (+) strand; PAM type: NRG; PAM sequence: AGG
  source 1..20: mol_type = other DNA
ctttgctcccacccttgtcc

SEQ ID NO: 29363 - DNA, 20 bp, synthetic construct
  misc_feature 1..20: note = Description of Artificial Sequence: Synthetic oligonucleotide
  misc_feature 1..20: note = Target: SCN10A; (+) strand; PAM type: NRG; PAM sequence: GGG
  source 1..20: mol_type = other DNA
tttgctcccacccttgtcca

SEQ ID NO: 29364 - DNA, 20 bp, synthetic construct
  misc_feature 1..20: note = Description of Artificial Sequence: Synthetic oligonucleotide
  misc_feature 1..20: note = Target: SCN10A; (+) strand; PAM type: NRG; PAM sequence: GAG
  source 1..20: mol_type = other DNA
tgctcccacccttgtccagg

SEQ ID NO: 29365 - DNA, 20 bp, synthetic construct
  misc_feature 1..20: note = Description of Artificial Sequence: Synthetic oligonucleotide
  misc_feature 1..20: note = Target: SCN10A; (+) strand; PAM type: NRG; PAM sequence: TGG
  source 1..20: mol_type = other DNA
tcccacccttgtccagggag

SEQ ID NO: 29366 - DNA, 20 bp, synthetic construct
  misc_feature 1..20: note = Description of Artificial Sequence: Synthetic oligonucleotide
  misc_feature 1..20: note = Target: SCN10A; (+) strand; PAM type: NRG; PAM sequence: TAG
  source 1..20: mol_type = other DNA
ggctcacatgaactgtctct

SEQ ID NO: 29367 - DNA, 20 bp, synthetic construct
  misc_feature 1..20: note = Description of Artificial Sequence: Synthetic oligonucleotide
  misc_feature 1..20: note = Target: SCN10A; (+) strand; PAM type: NRG; PAM sequence: GAG
  source 1..20: mol_type = other DNA
ctcacatgaactgtctctta

SEQ ID NO: 29368 - DNA, 20 bp, synthetic construct
  misc_feature 1..20: note = Description of Artificial Sequence: Synthetic oligonucleotide
  misc_feature 1..20: note = Target: SCN10A; (+) strand; PAM type: NRG; PAM sequence: AGG
  source 1..20: mol_type = other DNA
tcacatgaactgtctcttag

SEQ ID NO: 29369 - DNA, 20 bp, synthetic construct
  misc_feature 1..20: note = Description of Artificial Sequence: Synthetic oligonucleotide
  misc_feature 1..20: note = Target: SCN10A; (+) strand; PAM type: NRG; PAM sequence: CAG
  source 1..20: mol_type = other DNA
ttatctgatgctttcctcaa

SEQ ID NO: 29370 - DNA, 20 bp, synthetic construct
  misc_feature 1..20: note = Description of Artificial Sequence: Synthetic oligonucleotide
  misc_feature 1..20: note = Target: SCN10A; (+) strand; PAM type: NRG; PAM sequence: CAG
  source 1..20: mol_type = other DNA
atgctttcctcaacagtgaa

SEQ ID NO: 29371 - DNA, 20 bp, synthetic construct
  misc_feature 1..20: note = Description of Artificial Sequence: Synthetic oligonucleotide
  misc_feature 1..20: note = Target: SCN10A; (+) strand; PAM type: NRG; PAM sequence: GAG
  source 1..20: mol_type = other DNA
gctttcctcaacagtgaaca

SEQ ID NO: 29372 - DNA, 20 bp, synthetic construct
  misc_feature 1..20: note = Description of Artificial Sequence: Synthetic oligonucleotide
  misc_feature 1..20: note = Target: SCN10A; (+) strand; PAM type: NRG; PAM sequence: AGG
  source 1..20: mol_type = other DNA
ctttcctcaacagtgaacag

SEQ ID NO: 29373 - DNA, 20 bp, synthetic construct
  misc_feature 1..20: note = Description of Artificial Sequence: Synthetic oligonucleotide
  misc_feature 1..20: note = Target: SCN10A; (+) strand; PAM type: NRG; PAM sequence: GAG
  source 1..20: mol_type = other DNA
agtgaacagaggaaaacctc

SEQ ID NO: 29374 - DNA, 20 bp, synthetic construct
  misc_feature 1..20: note = Description of Artificial Sequence: Synthetic oligonucleotide
  misc_feature 1..20: note = Target: SCN10A; (+) strand; PAM type: NRG; PAM sequence: AAG
  source 1..20: mol_type = other DNA
gaacagaggaaaacctcgag

SEQ ID NO: 29375 - DNA, 20 bp, synthetic construct
  misc_feature 1..20: note = Description of Artificial Sequence: Synthetic oligonucleotide
  misc_feature 1..20: note = Target: SCN10A; (+) strand; PAM type: NRG; PAM sequence: TGG
  source 1..20: mol_type = other DNA
gaggaaaacctcgagaagcc

SEQ ID NO: 29376 - DNA, 20 bp, synthetic construct
  misc_feature 1..20: note = Description of Artificial Sequence: Synthetic oligonucleotide
  misc_feature 1..20: note = Target: SCN10A; (+) strand; PAM type: NRG; PAM sequence: GGG
  source 1..20: mol_type = other DNA
aggaaaacctcgagaagcct

SEQ ID NO: 29377 - DNA, 20 bp, synthetic construct
  misc_feature 1..20: note = Description of Artificial Sequence: Synthetic oligonucleotide
  misc_feature 1..20: note = Target: SCN10A; (+) strand; PAM type: NRG; PAM sequence: GGG
  source 1..20: mol_type = other DNA
ggaaaacctcgagaagcctg

SEQ ID NO: 29378 - DNA, 20 bp, synthetic construct
  misc_feature 1..20: note = Description of Artificial Sequence: Synthetic oligonucleotide
  misc_feature 1..20: note = Target: SCN10A; (+) strand; PAM type: NRG; PAM sequence: GAG
  source 1..20: mol_type = other DNA
aaaacctcgagaagcctggg

SEQ ID NO: 29379 - DNA, 20 bp, synthetic construct
  misc_feature 1..20: note = Description of Artificial Sequence: Synthetic oligonucleotide
  misc_feature 1..20: note = Target: SCN10A; (+) strand; PAM type: NRG; PAM sequence: TAG
  source 1..20: mol_type = other DNA
ctcgagaagcctggggagtg

SEQ ID NO: 29380 - DNA, 20 bp, synthetic construct
  misc_feature 1..20: note = Description of Artificial Sequence: Synthetic oligonucleotide
  misc_feature 1..20: note = Target: SCN10A; (+) strand; PAM type: NRG; PAM sequence: AAG
  source 1..20: mol_type = other DNA
agcctggggagtgtagatga

SEQ ID NO: 29381 - DNA, 20 bp, synthetic construct
  misc_feature 1..20: note = Description of Artificial Sequence: Synthetic oligonucleotide
  misc_feature 1..20: note = Target: SCN10A; (+) strand; PAM type: NRG; PAM sequence: AGG
  source 1..20: mol_type = other DNA
gcctggggagtgtagatgaa

SEQ ID NO: 29382 - DNA, 20 bp, synthetic construct
  misc_feature 1..20: note = Description of Artificial Sequence: Synthetic oligonucleotide
  misc_feature 1..20: note = Target: SCN10A; (+) strand; PAM type: NRG; PAM sequence: GGG
  source 1..20: mol_type = other DNA
cctggggagtgtagatgaaa

SEQ ID NO: 29383 - DNA, 20 bp, synthetic construct
  misc_feature 1..20: note = Description of Artificial Sequence: Synthetic oligonucleotide
  misc_feature 1..20: note = Target: SCN10A; (+) strand; PAM type: NRG; PAM sequence: GGG
  source 1..20: mol_type = other DNA
ctggggagtgtagatgaaag

SEQ ID NO: 29384 - DNA, 20 bp, synthetic construct
  misc_feature 1..20: note = Description of Artificial Sequence: Synthetic oligonucleotide
  misc_feature 1..20: note = Target: SCN10A; (+) strand; PAM type: NRG; PAM sequence: GGG
  source 1..20: mol_type = other DNA
tggggagtgtagatgaaagg

SEQ ID NO: 29385 - DNA, 20 bp, synthetic construct
  misc_feature 1..20: note = Description of Artificial Sequence: Synthetic oligonucleotide
  misc_feature 1..20: note = Target: SCN10A; (+) strand; PAM type: NRG; PAM sequence: AAG
  source 1..20: mol_type = other DNA
gagtgtagatgaaaggggga

SEQ ID NO: 29386 - DNA, 20 bp, synthetic construct
  misc_feature 1..20: note = Description of Artificial Sequence: Synthetic oligonucleotide
  misc_feature 1..20: note = Target: SCN10A; (+) strand; PAM type: NRG; PAM sequence: CGG
  source 1..20: mol_type = other DNA
agatgaaagggggaaagcct

SEQ ID NO: 29387 - DNA, 20 bp, synthetic construct
  misc_feature 1..20: note = Description of Artificial Sequence: Synthetic oligonucleotide
  misc_feature 1..20: note = Target: SCN10A; (+) strand; PAM type: NRG; PAM sequence: TGG
  source 1..20: mol_type = other DNA
tgaaagggggaaagcctcgg

SEQ ID NO: 29388 - DNA, 20 bp, synthetic construct
  misc_feature 1..20: note = Description of Artificial Sequence: Synthetic oligonucleotide
  misc_feature 1..20: note = Target: SCN10A; (+) strand; PAM type: NRG; PAM sequence: CAG
  source 1..20: mol_type = other DNA
tcggtggctgaaacactcaa

SEQ ID NO: 29389 - DNA, 20 bp, synthetic construct
  misc_feature 1..20: note = Description of Artificial Sequence: Synthetic oligonucleotide
  misc_feature 1..20: note = Target: SCN10A; (+) strand; PAM type: NRG; PAM sequence: GAG
  source 1..20: mol_type = other DNA
ggtggctgaaacactcaaca

SEQ ID NO: 29390 - DNA, 20 bp, synthetic construct
  misc_feature 1..20: note = Description of Artificial Sequence: Synthetic oligonucleotide
  misc_feature 1..20: note = Target: SCN10A; (+) strand; PAM type: NRG; PAM sequence: GAG
  source 1..20: mol_type = other DNA
tggctgaaacactcaacaga

SEQ ID NO: 29391 - DNA, 20 bp, synthetic construct
  misc_feature 1..20: note = Description of Artificial Sequence: Synthetic oligonucleotide
  misc_feature 1..20: note = Target: SCN10A; (+) strand; PAM type: NRG; PAM sequence: CAG
  source 1..20: mol_type = other DNA
tgaaacactcaacagagagc

SEQ ID NO: 29392 - DNA, 20 bp, synthetic construct
  misc_feature 1..20: note = Description of Artificial Sequence: Synthetic oligonucleotide
  misc_feature 1..20: note = Target: SCN10A; (+) strand; PAM type: NRG; PAM sequence: TGG
  source 1..20: mol_type = other DNA
acactcaacagagagccagc

SEQ ID NO: 29393 - DNA, 20 bp, synthetic construct
  misc_feature 1..20: note = Description of Artificial Sequence: Synthetic oligonucleotide
  misc_feature 1..20: note = Target: SCN10A; (+) strand; PAM type: NRG; PAM sequence: AAG
  source 1..20: mol_type = other DNA
agccagctggacactgctgc

SEQ ID NO: 29394 - DNA, 20 bp, synthetic construct
  misc_feature 1..20: note = Description of Artificial Sequence: Synthetic oligonucleotide
  misc_feature 1..20: note = Target: SCN10A; (+) strand; PAM type: NRG; PAM sequence: AGG
  source 1..20: mol_type = other DNA
gccagctggacactgctgca

SEQ ID NO: 29395 - DNA, 20 bp, synthetic construct
  misc_feature 1..20: note = Description of Artificial Sequence: Synthetic oligonucleotide
  misc_feature 1..20: note = Target: SCN10A; (+) strand; PAM type: NRG; PAM sequence: GAG
  source 1..20: mol_type = other DNA
cagctggacactgctgcaag

SEQ ID NO: 29396 - DNA, 20 bp, synthetic construct
  misc_feature 1..20: note = Description of Artificial Sequence: Synthetic oligonucleotide
  misc_feature 1..20: note = Target: SCN10A; (+) strand; PAM type: NRG; PAM sequence: AGG
  source 1..20: mol_type = other DNA
agctggacactgctgcaagg

SEQ ID NO: 29397 - DNA, 20 bp, synthetic construct
  misc_feature 1..20: note = Description of Artificial Sequence: Synthetic oligonucleotide
  misc_feature 1..20: note = Target: SCN10A; (+) strand; PAM type: NRG; PAM sequence: GGG
  source 1..20: mol_type = other DNA
gctggacactgctgcaagga

SEQ ID NO: 29398 - DNA, 20 bp, synthetic construct
  misc_feature 1..20: note = Description of Artificial Sequence: Synthetic oligonucleotide
  misc_feature 1..20: note = Target: SCN10A; (+) strand; PAM type: NRG; PAM sequence: CAG
  source 1..20: mol_type = other DNA
gacactgctgcaaggaggga

SEQ ID NO: 29399 - DNA, 20 bp, synthetic construct
  misc_feature 1..20: note = Description of Artificial Sequence: Synthetic oligonucleotide
  misc_feature 1..20: note = Target: SCN10A; (+) strand; PAM type: NRG; PAM sequence: GAG
  source 1..20: mol_type = other DNA
gctgcaaggagggacagtgt

SEQ ID NO: 29400 - DNA, 20 bp, synthetic construct
  misc_feature 1..20: note = Description of Artificial Sequence: Synthetic oligonucleotide
  misc_feature 1..20: note = Target: SCN10A; (+) strand; PAM type: NRG; PAM sequence: AGG
  source 1..20: mol_type = other DNA
ctgcaaggagggacagtgtg

SEQ ID NO: 29401 - DNA, 20 bp, synthetic construct
  misc_feature 1..20: note = Description of Artificial Sequence: Synthetic oligonucleotide
  misc_feature 1..20: note = Target: SCN10A; (+) strand; PAM type: NRG; PAM sequence: TGG
  source 1..20: mol_type = other DNA
gagggacagtgtgaggttgc

SEQ ID NO: 29402 - DNA, 20 bp, synthetic construct
  misc_feature 1..20: note = Description of Artificial Sequence: Synthetic oligonucleotide
  misc_feature 1..20: note = Target: SCN10A; (+) strand; PAM type: NRG; PAM sequence: GGG
  source 1..20: mol_type = other DNA
agggacagtgtgaggttgct

SEQ ID NO: 29403 - DNA, 20 bp, synthetic construct
  misc_feature 1..20: note = Description of Artificial Sequence: Synthetic oligonucleotide
  misc_feature 1..20: note = Target: SCN10A; (+) strand; PAM type: NRG; PAM sequence: CAG
  source 1..20: mol_type = other DNA
tgctgggtgatcgcctcttc

SEQ ID NO: 29404 - DNA, 20 bp, synthetic construct
  misc_feature 1..20: note = Description of Artificial Sequence: Synthetic oligonucleotide
  misc_feature 1..20: note = Target: SCN10A; (+) strand; PAM type: NRG; PAM sequence: CAG
  source 1..20: mol_type = other DNA
gtgatcgcctcttccagtac

SEQ ID NO: 29405 - DNA, 20 bp, synthetic construct
  misc_feature 1..20: note = Description of Artificial Sequence: Synthetic oligonucleotide
  misc_feature 1..20: note = Target: SCN10A; (+) strand; PAM type: NRG; PAM sequence: AGG
  source 1..20: mol_type = other DNA
tgatcgcctcttccagtacc

SEQ ID NO: 29406 - DNA, 20 bp, synthetic construct
  misc_feature 1..20: note = Description of Artificial Sequence: Synthetic oligonucleotide
  misc_feature 1..20: note = Target: SCN10A; (+) strand; PAM type: NRG; PAM sequence: GGG
  source 1..20: mol_type = other DNA
gatcgcctcttccagtacca

SEQ ID NO: 29407 - DNA, 20 bp, synthetic construct
  misc_feature 1..20: note = Description of Artificial Sequence: Synthetic oligonucleotide
  misc_feature 1..20: note = Target: SCN10A; (+) strand; PAM type: NRG; PAM sequence: CAG
  source 1..20: mol_type = other DNA
tcgtcacttcatttcaaatg

SEQ ID NO: 29408 - DNA, 20 bp, synthetic construct
  misc_feature 1..20: note = Description of Artificial Sequence: Synthetic oligonucleotide
  misc_feature 1..20: note = Target: SCN10A; (+) strand; PAM type: NRG; PAM sequence: TGG
  source 1..20: mol_type = other DNA
atttcaaatgcagactgata

SEQ ID NO: 29409 - DNA, 20 bp, synthetic construct
  misc_feature 1..20: note = Description of Artificial Sequence: Synthetic oligonucleotide
  misc_feature 1..20: note = Target: SCN10A; (+) strand; PAM type: NRG; PAM sequence: GGG
  source 1..20: mol_type = other DNA
tttcaaatgcagactgatat

SEQ ID NO: 29410 - DNA, 20 bp, synthetic construct
  misc_feature 1..20: note = Description of Artificial Sequence: Synthetic oligonucleotide
  misc_feature 1..20: note = Target: SCN10A; (+) strand; PAM type: NRG; PAM sequence: TAG
  source 1..20: mol_type = other DNA
caaatgcagactgatatggg

SEQ ID NO: 29411 - DNA, 20 bp, synthetic construct
  misc_feature 1..20: note = Description of Artificial Sequence: Synthetic oligonucleotide
  misc_feature 1..20: note = Target: SCN10A; (+) strand; PAM type: NRG; PAM sequence: CAG
  source 1..20: mol_type = other DNA
actgatatgggtagaatgca

SEQ ID NO: 29412 - DNA, 20 bp, synthetic construct
  misc_feature 1..20: note = Description of Artificial Sequence: Synthetic oligonucleotide
  misc_feature 1..20: note = Target: SCN10A; (+) strand; PAM type: NRG; PAM sequence: GAG
  source 1..20: mol_type = other DNA
tgatatgggtagaatgcaca

SEQ ID NO: 29413 - DNA, 20 bp, synthetic construct
  misc_feature 1..20: note = Description of Artificial Sequence: Synthetic oligonucleotide
  misc_feature 1..20: note = Target: SCN10A; (+) strand; PAM type: NRG; PAM sequence: AGG
  source 1..20: mol_type = other DNA
gatatgggtagaatgcacag

SEQ ID NO: 29414 - DNA, 20 bp, synthetic construct
  misc_feature 1..20: note = Description of Artificial Sequence: Synthetic oligonucleotide
  misc_feature 1..20: note = Target: SCN10A; (+) strand; PAM type: NRG; PAM sequence: GGG
  source 1..20: mol_type = other DNA
atatgggtagaatgcacaga

SEQ ID NO: 29415 - DNA, 20 bp, synthetic construct
  misc_feature 1..20: note = Description of Artificial Sequence: Synthetic oligonucleotide
  misc_feature 1..20: note = Target: SCN10A; (+) strand; PAM type: NRG; PAM sequence: GGG
  source 1..20: mol_type = other DNA
tatgggtagaatgcacagag

SEQ ID NO: 29416 - DNA, 20 bp, synthetic construct
  misc_feature 1..20: note = Description of Artificial Sequence: Synthetic oligonucleotide
  misc_feature 1..20: note = Target: SCN10A; (+) strand; PAM type: NRG; PAM sequence: AAG
  source 1..20: mol_type = other DNA
gggtagaatgcacagagggg

SEQ ID NO: 29417 - DNA, 20 bp, synthetic construct
  misc_feature 1..20: note = Description of Artificial Sequence: Synthetic oligonucleotide
  misc_feature 1..20: note = Target: SCN10A; (+) strand; PAM type: NRG; PAM sequence: AGG
  source 1..20: mol_type = other DNA
ggtagaatgcacagagggga

SEQ ID NO: 29418 - DNA, 20 bp, synthetic construct
  misc_feature 1..20: note = Description of Artificial Sequence: Synthetic oligonucleotide
  misc_feature 1..20: note = Target: SCN10A; (+) strand; PAM type: NRG; PAM sequence: TAG
  source 1..20: mol_type = other DNA
atgcacagaggggaaggctg

SEQ ID NO: 29419 - DNA, 20 bp, synthetic construct
  misc_feature 1..20: note = Description of Artificial Sequence: Synthetic oligonucleotide
  misc_feature 1..20: note = Target: SCN10A; (+) strand; PAM type: NRG; PAM sequence: AGG
  source 1..20: mol_type = other DNA
tgcacagaggggaaggctgt

SEQ ID NO: 29420 - DNA, 20 bp, synthetic construct
  misc_feature 1..20: note = Description of Artificial Sequence: Synthetic oligonucleotide
  misc_feature 1..20: note = Target: SCN10A; (+) strand; PAM type: NRG; PAM sequence: GGG
  source 1..20: mol_type = other DNA
gcacagaggggaaggctgta

SEQ ID NO: 29421 - DNA, 20 bp, synthetic construct
  misc_feature 1..20: note = Description of Artificial Sequence: Synthetic oligonucleotide
  misc_feature 1..20: note = Target: SCN10A; (+) strand; PAM type: NRG; PAM sequence: CAG
  source 1..20: mol_type = other DNA
agaggggaaggctgtaggga

SEQ ID NO: 29422 - DNA, 20 bp, synthetic construct
  misc_feature 1..20: note = Description of Artificial Sequence: Synthetic oligonucleotide
  misc_feature 1..20: note = Target: SCN10A; (+) strand; PAM type: NRG; PAM sequence: TGG
  source 1..20: mol_type = other DNA
ggggaaggctgtagggacag

SEQ ID NO: 29423 - DNA, 20 bp, synthetic construct
  misc_feature 1..20: note = Description of Artificial Sequence: Synthetic oligonucleotide
  misc_feature 1..20: note = Target: SCN10A; (+) strand; PAM type: NRG; PAM sequence: GGG
  source 1..20: mol_type = other DNA
gggaaggctgtagggacagt

SEQ ID NO: 29424 - DNA, 20 bp, synthetic construct
  misc_feature 1..20: note = Description of Artificial Sequence: Synthetic oligonucleotide
  misc_feature 1..20: note = Target: SCN10A; (+) strand; PAM type: NRG; PAM sequence: GAG
  source 1..20: mol_type = other DNA
ggctgtagggacagtgggct

SEQ ID NO: 29425 - DNA, 20 bp, synthetic construct
  misc_feature 1..20: note = Description of Artificial Sequence: Synthetic oligonucleotide
  misc_feature 1..20: note = Target: SCN10A; (+) strand; PAM type: NRG; PAM sequence: CGG
  source 1..20: mol_type = other DNA
gtgggctgagactcacctcc

SEQ ID NO: 29426 - DNA, 20 bp, synthetic construct
  misc_feature 1..20: note = Description of Artificial Sequence: Synthetic oligonucleotide
  misc_feature 1..20: note = Target: SCN10A; (+) strand; PAM type: NRG; PAM sequence: GGG
  source 1..20: mol_type = other DNA
tgggctgagactcacctccc

SEQ ID NO: 29427 - DNA, 20 bp, synthetic construct
  misc_feature 1..20: note = Description of Artificial Sequence: Synthetic oligonucleotide
  misc_feature 1..20: note = Target: SCN10A; (+) strand; PAM type: NRG; PAM sequence: CAG
  source 1..20: mol_type = other DNA
actcacctcccgggaatcaa

SEQ ID NO: 29428 - DNA, 20 bp, synthetic construct
  misc_feature 1..20: note = Description of Artificial Sequence: Synthetic oligonucleotide
  misc_feature 1..20: note = Target: SCN10A; (+) strand; PAM type: NRG; PAM sequence: CAG
  source 1..20: mol_type = other DNA
ctgcatacataatgtccatc

SEQ ID NO: 29429 - DNA, 20 bp, synthetic construct
  misc_feature 1..20: note = Description of Artificial Sequence: Synthetic oligonucleotide
  misc_feature 1..20: note = Target: SCN10A; (+) strand; PAM type: NRG; PAM sequence: AAG
  source 1..20: mol_type = other DNA
taatgtccatccagccttta

SEQ ID NO: 29430 - DNA, 20 bp, synthetic construct
  misc_feature 1..20: note = Description of Artificial Sequence: Synthetic oligonucleotide
  misc_feature 1..20: note = Target: SCN10A; (+) strand; PAM type: NRG; PAM sequence: AGG
  source 1..20: mol_type = other DNA
aatgtccatccagcctttaa

SEQ ID NO: 29431 - DNA, 20 bp, synthetic construct
  misc_feature 1..20: note = Description of Artificial Sequence: Synthetic oligonucleotide
  misc_feature 1..20: note = Target: SCN10A; (+) strand; PAM type: NRG; PAM sequence: TGG
  source 1..20: mol_type = other DNA
tccagcctttaaaggttgcc

SEQ ID NO: 29432 - DNA, 20 bp, synthetic construct
  misc_feature 1..20: note = Description of Artificial Sequence: Synthetic oligonucleotide
  misc_feature 1..20: note = Target: SCN10A; (+) strand; PAM type: NRG; PAM sequence: GAG
  source 1..20: mol_type = other DNA
cagcctttaaaggttgcctg

SEQ ID NO: 29433 - DNA, 20 bp, synthetic construct
  misc_feature 1..20: note = Description of Artificial Sequence: Synthetic oligonucleotide
  misc_feature 1..20: note = Target: SCN10A; (+) strand; PAM type: NRG; PAM sequence: AAG
  source 1..20: mol_type = other DNA
tttaaaggttgcctggagac

SEQ ID NO: 29434 - DNA, 20 bp, synthetic construct
  misc_feature 1..20: note = Description of Artificial Sequence: Synthetic oligonucleotide
  misc_feature 1..20: note = Target: SCN10A; (+) strand; PAM type: NRG; PAM sequence: AGG
  source 1..20: mol_type = other DNA
ttaaaggttgcctggagaca

SEQ ID NO: 29435 - DNA, 20 bp, synthetic construct
  misc_feature 1..20: note = Description of Artificial Sequence: Synthetic oligonucleotide
  misc_feature 1..20: note = Target: SCN10A; (+) strand; PAM type: NRG; PAM sequence: GAG
  source 1..20: mol_type = other DNA
aaaggttgcctggagacaag

SEQ ID NO: 29436 - DNA, 20 bp, synthetic construct
  misc_feature 1..20: note = Description of Artificial Sequence: Synthetic oligonucleotide
  misc_feature 1..20: note = Target: SCN10A; (+) strand; PAM type: NRG; PAM sequence: CAG
  source 1..20: mol_type = other DNA
ggttgcctggagacaaggag

SEQ ID NO: 29437 - DNA, 20 bp, synthetic construct
  misc_feature 1..20: note = Description of Artificial Sequence: Synthetic oligonucleotide
  misc_feature 1..20: note = Target: SCN10A; (+) strand; PAM type: NRG; PAM sequence: GAG
  source 1..20: mol_type = other DNA
ttgcctggagacaaggagca

SEQ ID NO: 29438 - DNA, 20 bp, synthetic construct
  misc_feature 1..20: note = Description of Artificial Sequence: Synthetic oligonucleotide
  misc_feature 1..20: note = Target: SCN10A; (+) strand; PAM type: NRG; PAM sequence: AGG
  source 1..20: mol_type = other DNA
tgcctggagacaaggagcag

SEQ ID NO: 29439 - DNA, 20 bp, synthetic construct
  misc_feature 1..20: note = Description of Artificial Sequence: Synthetic oligonucleotide
  misc_feature 1..20: note = Target: SCN10A; (+) strand; PAM type: NRG; PAM sequence: CAG
  source 1..20: mol_type = other DNA
gacaaggagcagaggccact

SEQ ID NO: 29440 - DNA, 20 bp, synthetic construct
  misc_feature 1..20: note = Description of Artificial Sequence: Synthetic oligonucleotide
  misc_feature 1..20: note = Target: SCN10A; (+) strand; PAM type: NRG; PAM sequence: TGG
  source 1..20: mol_type = other DNA
gtctgcccatccatctatac

SEQ ID NO: 29441 - DNA, 20 bp, synthetic construct
  misc_feature 1..20: note = Description of Artificial Sequence: Synthetic oligonucleotide
  misc_feature 1..20: note = Target: SCN10A; (+) strand; PAM type: NRG; PAM sequence: AAG
  source 1..20: mol_type = other DNA
atctatactggacccttccc

SEQ ID NO: 29442 - DNA, 20 bp, synthetic construct
  misc_feature 1..20: note = Description of Artificial Sequence: Synthetic oligonucleotide
  misc_feature 1..20: note = Target: SCN10A; (+) strand; PAM type: NRG; PAM sequence: TGG
  source 1..20: mol_type = other DNA
actggacccttcccaagcca

SEQ ID NO: 29443 - DNA, 20 bp, synthetic construct
  misc_feature 1..20: note = Description of Artificial Sequence: Synthetic oligonucleotide
  misc_feature 1..20: note = Target: SCN10A; (+) strand; PAM type: NRG; PAM sequence: TGG
  source 1..20: mol_type = other DNA
ggacccttcccaagccatgg

SEQ ID NO: 29444 - DNA, 20 bp, synthetic construct
  misc_feature 1..20: note = Description of Artificial Sequence: Synthetic oligonucleotide
  misc_feature 1..20: note = Target: SCN10A; (+) strand; PAM type: NRG; PAM sequence: CAG
  source 1..20: mol_type = other DNA
cttcccaagccatggtggcc

SEQ ID NO: 29445 - DNA, 20 bp, synthetic construct
  misc_feature 1..20: note = Description of Artificial Sequence: Synthetic oligonucleotide
  misc_feature 1..20: note = Target: SCN10A; (+) strand; PAM type: NRG; PAM sequence: GAG
  source 1..20: mol_type = other DNA
ccaagccatggtggcccagt

SEQ ID NO: 29446 - DNA, 20 bp, synthetic construct
  misc_feature 1..20: note = Description of Artificial Sequence: Synthetic oligonucleotide
  misc_feature 1..20: note = Target: SCN10A; (+) strand; PAM type: NRG; PAM sequence: GAG
  source 1..20: mol_type = other DNA
aagccatggtggcccagtga

SEQ ID NO: 29447 - DNA, 20 bp, synthetic construct
  misc_feature 1..20: note = Description of Artificial Sequence: Synthetic oligonucleotide
  misc_feature 1..20: note = Target: SCN10A; (+) strand; PAM type: NRG; PAM sequence: GAG
  source 1..20: mol_type = other DNA
gccatggtggcccagtgaga

SEQ ID NO: 29448 - DNA, 20 bp, synthetic construct
  misc_feature 1..20: note = Description of Artificial Sequence: Synthetic oligonucleotide
  misc_feature 1..20: note = Target: SCN10A; (+) strand; PAM type: NRG; PAM sequence: AGG
  source 1..20: mol_type = other DNA
ccatggtggcccagtgagag

SEQ ID NO: 29449 - DNA, 20 bp, synthetic construct
  misc_feature 1..20: note = Description of Artificial Sequence: Synthetic oligonucleotide
  misc_feature 1..20: note = Target: SCN10A; (+) strand; PAM type: NRG; PAM sequence: GAG
  source 1..20: mol_type = other DNA
atggtggcccagtgagagag

SEQ ID NO: 29450 - DNA, 20 bp, synthetic construct
  misc_feature 1..20: note = Description of Artificial Sequence: Synthetic oligonucleotide
  misc_feature 1..20: note = Target: SCN10A; (+) strand; PAM type: NRG; PAM sequence: GAG
  source 1..20: mol_type = other DNA
ggtggcccagtgagagagga

SEQ ID NO: 29451 - DNA, 20 bp, synthetic construct
  misc_feature 1..20: note = Description of Artificial Sequence: Synthetic oligonucleotide
  misc_feature 1..20: note = Target: SCN10A; (+) strand; PAM type: NRG; PAM sequence: GAG
  source 1..20: mol_type = other DNA
tggcccagtgagagaggaga

SEQ ID NO: 29452 - DNA, 20 bp, synthetic construct
  misc_feature 1..20: note = Description of Artificial Sequence: Synthetic oligonucleotide
  misc_feature 1..20: note = Target: SCN10A; (+) strand; PAM type: NRG; PAM sequence: TGG
  source 1..20: mol_type = other DNA
gagaggagagagtcctgtgt

SEQ ID NO: 29453 - DNA, 20 bp, synthetic construct
  misc_feature 1..20: note = Description of Artificial Sequence: Synthetic oligonucleotide
  misc_feature 1..20: note = Target: SCN10A; (+) strand; PAM type: NRG; PAM sequence: AAG
  source 1..20: mol_type = other DNA
ggagagagtcctgtgttgga

SEQ ID NO: 29454 - DNA, 20 bp, synthetic construct
  misc_feature 1..20: note = Description of Artificial Sequence: Synthetic oligonucleotide
  misc_feature 1..20: note = Target: SCN10A; (+) strand; PAM type: NRG; PAM sequence: AGG
  source 1..20: mol_type = other DNA
gagagagtcctgtgttggaa

SEQ ID NO: 29455 - DNA, 20 bp, synthetic construct
  misc_feature 1..20: note = Description of Artificial Sequence: Synthetic oligonucleotide
  misc_feature 1..20: note = Target: SCN10A; (+) strand; PAM type: NRG; PAM sequence: GGG
  source 1..20: mol_type = other DNA
agagagtcctgtgttggaaa

SEQ ID NO: 29456 - DNA, 20 bp, synthetic construct
  misc_feature 1..20: note = Description of Artificial Sequence: Synthetic oligonucleotide
  misc_feature 1..20: note = Target: SCN10A; (+) strand; PAM type: NRG; PAM sequence: CAG
  source 1..20: mol_type = other DNA
tgtgttggaaagggcttgtg

SEQ ID NO: 29457 - DNA, 20 bp, synthetic construct
  misc_feature 1..20: note = Description of Artificial Sequence: Synthetic oligonucleotide
  misc_feature 1..20: note = Target: SCN10A; (+) strand; PAM type: NRG; PAM sequence: AAG
  source 1..20: mol_type = other DNA
ttggaaagggcttgtgcaga

SEQ ID NO: 29458 - DNA, 20 bp, synthetic construct
  misc_feature 1..20: note = Description of Artificial Sequence: Synthetic oligonucleotide
  misc_feature 1..20: note = Target: SCN10A; (+) strand; PAM type: NRG; PAM sequence: AAG
  source 1..20: mol_type = other DNA
ggcttgtgcagaaagaatga

SEQ ID NO: 29459 - DNA, 20 bp, synthetic construct
  misc_feature 1..20: note = Description of Artificial Sequence: Synthetic oligonucleotide
  misc_feature 1..20: note = Target: SCN10A; (+) strand; PAM type: NRG; PAM sequence: AGG
  source 1..20: mol_type = other DNA
gcttgtgcagaaagaatgaa

SEQ ID NO: 29460 - DNA, 20 bp, synthetic construct
  misc_feature 1..20: note = Description of Artificial Sequence: Synthetic oligonucleotide
  misc_feature 1..20: note = Target: SCN10A; (+) strand; PAM type: NRG; PAM sequence: AAG
  source 1..20: mol_type = other DNA
tgcagaaagaatgaaaggaa

SEQ ID NO: 29461 - DNA, 20 bp, synthetic construct
  misc_feature 1..20: note = Description of Artificial Sequence: Synthetic oligonucleotide
  misc_feature 1..20: note = Target: SCN10A; (+) strand; PAM type: NRG; PAM sequence: TGG
  source 1..20: mol_type = other DNA
aatgaaaggaaaagttccct

SEQ ID NO: 29462 - DNA, 20 bp, synthetic construct
  misc_feature 1..20: note = Description of Artificial Sequence: Synthetic oligonucleotide
  misc_feature 1..20: note = Target: SCN10A; (+) strand; PAM type: NRG; PAM sequence: GGG
  source 1..20: mol_type = other DNA
atgaaaggaaaagttccctt

SEQ ID NO: 29463 - DNA, 20 bp, synthetic construct
  misc_feature 1..20: note = Description of Artificial Sequence: Synthetic oligonucleotide
  misc_feature 1..20: note = Target: SCN10A; (+) strand; PAM type: NRG; PAM sequence: AAG
  source 1..20: mol_type = other DNA
taatctcatatgatgattta

SEQ ID NO: 29464 - DNA, 20 bp, synthetic construct
  misc_feature 1..20: note = Description of Artificial Sequence: Synthetic oligonucleotide
  misc_feature 1..20: note = Target: SCN10A; (+) strand; PAM type: NRG; PAM sequence: TGG
  source 1..20: mol_type = other DNA
atttaaagtaatcccacatg

SEQ ID NO: 29465 - DNA, 20 bp, synthetic construct
  misc_feature 1..20: note = Description of Artificial Sequence: Synthetic oligonucleotide
  misc_feature 1..20: note = Target: SCN10A; (+) strand; PAM type: NRG; PAM sequence: AAG
  source 1..20: mol_type = other DNA
aatcccacatgtggctgttt

SEQ ID NO: 29466 - DNA, 20 bp, synthetic construct
  misc_feature 1..20: note = Description of Artificial Sequence: Synthetic oligonucleotide
  misc_feature 1..20: note = Target: SCN10A; (+) strand; PAM type: NRG; PAM sequence: TAG
  source 1..20: mol_type = other DNA
cacatgtggctgtttaagaa

SEQ ID NO: 29467 - DNA, 20 bp, synthetic construct
  misc_feature 1..20: note = Description of Artificial Sequence: Synthetic oligonucleotide
  misc_feature 1..20: note = Target: SCN10A; (+) strand; PAM type: NRG; PAM sequence: GAG
  source 1..20: mol_type = other DNA
catgtggctgtttaagaata

SEQ ID NO: 29468 - DNA, 20 bp, synthetic construct
  misc_feature 1..20: note = Description of Artificial Sequence: Synthetic oligonucleotide
  misc_feature 1..20: note = Target: SCN10A; (+) strand; PAM type: NRG; PAM sequence: TAG
  source 1..20: mol_type = other DNA
gtggctgtttaagaatagag

SEQ ID NO: 29469 - DNA, 20 bp, synthetic construct
  misc_feature 1..20: note = Description of Artificial Sequence: Synthetic oligonucleotide
  misc_feature 1..20: note = Target: SCN10A; (+) strand; PAM type: NRG; PAM sequence: AAG
  source 1..20: mol_type = other DNA
ttaagaatagagtagcatta

SEQ ID NO: 29470 - DNA, 20 bp, synthetic construct
  misc_feature 1..20: note = Description of Artificial Sequence: Synthetic oligonucleotide
  misc_feature 1..20: note = Target: SCN10A; (+) strand; PAM type: NRG; PAM sequence: CAG
  source 1..20: mol_type = other DNA
atagagtagcattaaagaca

SEQ ID NO: 29471 - DNA, 20 bp, synthetic construct
  misc_feature 1..20: note = Description of Artificial Sequence: Synthetic oligonucleotide
  misc_feature 1..20: note = Target: SCN10A; (+) strand; PAM type: NRG; PAM sequence: GAG
  source 1..20: mol_type = other DNA
agagtagcattaaagacaca

SEQ ID NO: 29472 - DNA, 20 bp, synthetic construct
  misc_feature 1..20: note = Description of Artificial Sequence: Synthetic oligonucleotide
  misc_feature 1..20: note = Target: SCN10A; (+) strand; PAM type: NRG; PAM sequence: CAG
  source 1..20: mol_type = other DNA
attaaagacacagagccttt

SEQ ID NO: 29473 - DNA, 20 bp, synthetic construct
  misc_feature 1..20: note = Description of Artificial Sequence: Synthetic oligonucleotide
  misc_feature 1..20: note = Target: SCN10A; (+) strand; PAM type: NRG; PAM sequence: TAG
  source 1..20: mol_type = other DNA
acacagagcctttcagaatg

SEQ ID NO: 29474 - DNA, 20 bp, synthetic construct
  misc_feature 1..20: note = Description of Artificial Sequence: Synthetic oligonucleotide
  misc_feature 1..20: note = Target: SCN10A; (+) strand; PAM type: NRG; PAM sequence: TGG
  source 1..20: mol_type = other DNA
gagcctttcagaatgtagta

SEQ ID NO: 29475 - DNA, 20 bp, synthetic construct
  misc_feature 1..20: note = Description of Artificial Sequence: Synthetic oligonucleotide
  misc_feature 1..20: note = Target: SCN10A; (+) strand; PAM type: NRG; PAM sequence: GAG
  source 1..20: mol_type = other DNA
ttcagaatgtagtatggact

SEQ ID NO: 29476 - DNA, 20 bp, synthetic construct
  misc_feature 1..20: note = Description of Artificial Sequence: Synthetic oligonucleotide
  misc_feature 1..20: note = Target: SCN10A; (+) strand; PAM type: NRG; PAM sequence: AGG
  source 1..20: mol_type = other DNA
tcagaatgtagtatggactg

SEQ ID NO: 29477 - DNA, 20 bp, synthetic construct
  misc_feature 1..20: note = Description of Artificial Sequence: Synthetic oligonucleotide
  misc_feature 1..20: note = Target: SCN10A; (+) strand; PAM type: NRG; PAM sequence: GAG
  source 1..20: mol_type = other DNA
tgtagtatggactgaggact

SEQ ID NO: 29478 - DNA, 20 bp, synthetic construct
  misc_feature 1..20: note = Description of Artificial Sequence: Synthetic oligonucleotide
  misc_feature 1..20: note = Target: SCN10A; (+) strand; PAM type: NRG; PAM sequence: TAG
  source 1..20: mol_type = other DNA
tggactgaggactgagtgtc

SEQ ID NO: 29479 - DNA, 20 bp, synthetic construct
  misc_feature 1..20: note = Description of Artificial Sequence: Synthetic oligonucleotide
  misc_feature 1..20: note = Target: SCN10A; (+) strand; PAM type: NRG; PAM sequence: AGG
  source 1..20: mol_type = other DNA
ggactgaggactgagtgtct

SEQ ID NO: 29480 - DNA, 20 bp, synthetic construct
  misc_feature 1..20: note = Description of Artificial Sequence: Synthetic oligonucleotide
  misc_feature 1..20: note = Target: SCN10A; (+) strand; PAM type: NRG; PAM sequence: TGG
  source 1..20: mol_type = other DNA
ggactgagtgtctaggtgtc

SEQ ID NO: 29481 - DNA, 20 bp, synthetic construct
  misc_feature 1..20: note = Description of Artificial Sequence: Synthetic oligonucleotide
  misc_feature 1..20: note = Target: SCN10A; (+) strand; PAM type: NRG; PAM sequence: TAG
  source 1..20: mol_type = other DNA
agtgtctaggtgtctggttc

SEQ ID NO: 29482 - DNA, 20 bp, synthetic construct
  misc_feature 1..20: note = Description of Artificial Sequence: Synthetic oligonucleotide
  misc_feature 1..20: note = Target: SCN10A; (+) strand; PAM type: NRG; PAM sequence: AAG
  source 1..20: mol_type = other DNA
gttctagtgccaattgctac

SEQ ID NO: 29483 - DNA, 20 bp, synthetic construct
  misc_feature 1..20: note = Description of Artificial Sequence: Synthetic oligonucleotide
  misc_feature 1..20: note = Target: SCN10A; (+) strand; PAM type: NRG; PAM sequence: AAG
  source 1..20: mol_type = other DNA
tctgctctgtgcacttgcct

SEQ ID NO: 29484 - DNA, 20 bp, synthetic construct
  misc_feature 1..20: note = Description of Artificial Sequence: Synthetic oligonucleotide
  misc_feature 1..20: note = Target: SCN10A; (+) strand; PAM type: NRG; PAM sequence: AGG
  source 1..20: mol_type = other DNA
ctgctctgtgcacttgccta

SEQ ID NO: 29485 - DNA, 20 bp, synthetic construct
  misc_feature 1..20: note = Description of Artificial Sequence: Synthetic oligonucleotide
  misc_feature 1..20: note = Target: SCN10A; (+) strand; PAM type: NRG; PAM sequence: CAG
  source 1..20: mol_type = other DNA
ttgcctaaggtttcccctct

SEQ ID NO: 29486 - DNA, 20 bp, synthetic construct
  misc_feature 1..20: note = Description of Artificial Sequence: Synthetic oligonucleotide
  misc_feature 1..20: note = Target: SCN10A; (+) strand; PAM type: NRG; PAM sequence: AGG
  source 1..20: mol_type = other DNA
tgcctaaggtttcccctctc

SEQ ID NO: 29487 - DNA, 20 bp, synthetic construct
  misc_feature 1..20: note = Description of Artificial Sequence: Synthetic oligonucleotide
  misc_feature 1..20: note = Target: SCN10A; (+) strand; PAM type: NRG; PAM sequence: GGG
  source 1..20: mol_type = other DNA
gcctaaggtttcccctctca

SEQ ID NO: 29488 - DNA, 20 bp, synthetic construct
  misc_feature 1..20: note = Description of Artificial Sequence: Synthetic oligonucleotide
  misc_feature 1..20: note = Target: SCN10A; (+) strand; PAM type: NRG; PAM sequence: CAG
  source 1..20: mol_type = other DNA
tctcagggctgccattttct

SEQ ID NO: 29489 - DNA, 20 bp, synthetic construct
  misc_feature 1..20: note = Description of Artificial Sequence: Synthetic oligonucleotide
  misc_feature 1..20: note = Target: SCN10A; (+) strand; PAM type: NRG; PAM sequence: AAG
  source 1..20: mol_type = other DNA
ccaccttatgcacatgatgt

SEQ ID NO: 29490 - DNA, 20 bp, synthetic construct
  misc_feature 1..20: note = Description of Artificial Sequence: Synthetic oligonucleotide
  misc_feature 1..20: note = Target: SCN10A; (+) strand; PAM type: NRG; PAM sequence: TGG
  source 1..20: mol_type = other DNA
ttatgcacatgatgtaagaa

SEQ ID NO: 29491 - DNA, 20 bp, synthetic construct
  misc_feature 1..20: note = Description of Artificial Sequence: Synthetic oligonucleotide
  misc_feature 1..20: note = Target: SCN10A; (+) strand; PAM type: NRG; PAM sequence: CAG
  source 1..20: mol_type = other DNA
tgtaagaatggtatatcttc

SEQ ID NO: 29492 - DNA, 20 bp, synthetic construct
  misc_feature 1..20: note = Description of Artificial Sequence: Synthetic oligonucleotide
  misc_feature 1..20: note = Target: SCN10A; (+) strand; PAM type: NRG; PAM sequence: TGG
  source 1..20: mol_type = other DNA
agaatggtatatcttccaga

SEQ ID NO: 29493 - DNA, 20 bp, synthetic construct
  misc_feature 1..20: note = Description of Artificial Sequence: Synthetic oligonucleotide
  misc_feature 1..20: note = Target: SCN10A; (+) strand; PAM type: NRG; PAM sequence: GAG
  source 1..20: mol_type = other DNA
aatggtatatcttccagatg

SEQ ID NO: 29494 - DNA, 20 bp, synthetic construct
  misc_feature 1..20: note = Description of Artificial Sequence: Synthetic oligonucleotide
  misc_feature 1..20: note = Target: SCN10A; (+) strand; PAM type: NRG; PAM sequence: AAG
  source 1..20: mol_type = other DNA
ggtatatcttccagatggag

SEQ ID NO: 29495 - DNA, 20 bp, synthetic construct
  misc_feature 1..20: note = Description of Artificial Sequence: Synthetic oligonucleotide
  misc_feature 1..20: note = Target: SCN10A; (+) strand; PAM type: NRG; PAM sequence: GAG
  source 1..20: mol_type = other DNA
atcttccagatggagaagtt

SEQ ID NO: 29496 - DNA, 20 bp, synthetic construct
  misc_feature 1..20: note = Description of Artificial Sequence: Synthetic oligonucleotide
  misc_feature 1..20: note = Target: SCN10A; (+) strand; PAM type: NRG; PAM sequence: TAG
  source 1..20: mol_type = other DNA
ccagatggagaagttgagaa

SEQ ID NO: 29497 - DNA, 20 bp, synthetic construct
  misc_feature 1..20: note = Description of Artificial Sequence: Synthetic oligonucleotide
  misc_feature 1..20: note = Target: SCN10A; (+) strand; PAM type: NRG; PAM sequence: AAG
  source 1..20: mol_type = other DNA
gatggagaagttgagaatag

SEQ ID NO: 29498 - DNA, 20 bp, synthetic construct
  misc_feature 1..20: note = Description of Artificial Sequence: Synthetic oligonucleotide
  misc_feature 1..20: note = Target: SCN10A; (+) strand; PAM type: NRG; PAM sequence: CAG
  source 1..20: mol_type = other DNA
gacctccatgttcctgcctt

SEQ ID NO: 29499 - DNA, 20 bp, synthetic construct
  misc_feature 1..20: note = Description of Artificial Sequence: Synthetic oligonucleotide
  misc_feature 1..20: note = Target: SCN10A; (+) strand; PAM type: NRG; PAM sequence: TAG
  source 1..20: mol_type = other DNA
catgttcctgccttcagctt

SEQ ID NO: 29500 - DNA, 20 bp, synthetic construct
  misc_feature 1..20: note = Description of Artificial Sequence: Synthetic oligonucleotide
  misc_feature 1..20: note = Target: SCN10A; (+) strand; PAM type: NRG; PAM sequence: GAG
  source 1..20: mol_type = other DNA
ccttcagctttagcattctt

SEQ ID NO: 29501 - DNA, 20 bp, synthetic construct
  misc_feature 1..20: note = Description of Artificial Sequence: Synthetic oligonucleotide
  misc_feature 1..20: note = Target: SCN10A; (+) strand; PAM type: NRG; PAM sequence: AGG
  source 1..20: mol_type = other DNA
cttcagctttagcattcttg

SEQ ID NO: 29502 - DNA, 20 bp, synthetic construct
  misc_feature 1..20: note = Description of Artificial Sequence: Synthetic oligonucleotide
  misc_feature 1..20: note = Target: SCN10A; (+) strand; PAM type: NRG; PAM sequence: TAG
  source 1..20: mol_type = other DNA
gctttagcattcttgaggtc

SEQ ID NO: 29503 - DNA, 20 bp, synthetic construct
  misc_feature 1..20: note = Description of Artificial Sequence: Synthetic oligonucleotide
  misc_feature 1..20: note = Target: SCN10A; (+) strand; PAM type: NRG; PAM sequence: TGG
  source 1..20: mol_type = other DNA
cattcttgaggtctagaaac

SEQ ID NO: 29504 - DNA, 20 bp, synthetic construct
  misc_feature 1..20: note = Description of Artificial Sequence: Synthetic oligonucleotide
  misc_feature 1..20: note = Target: SCN10A; (+) strand; PAM type: NRG; PAM sequence: GGG
  source 1..20: mol_type = other DNA
attcttgaggtctagaaact

SEQ ID NO: 29505 - DNA, 20 bp, synthetic construct
  misc_feature 1..20: note = Description of Artificial Sequence: Synthetic oligonucleotide
  misc_feature 1..20: note = Target: SCN10A; (+) strand; PAM type: NRG; PAM sequence: CAG
  source 1..20: mol_type = other DNA
tagaaactgggtgtgccttc

SEQ ID NO: 29506 - DNA, 20 bp, synthetic construct
  misc_feature 1..20: note = Description of Artificial Sequence: Synthetic oligonucleotide
  misc_feature 1..20: note = Target: SCN10A; (+) strand; PAM type: NRG; PAM sequence: CAG
  source 1..20: mol_type = other DNA
ggtgtgccttccagcatgtt

SEQ ID NO: 29507 - DNA, 20 bp, synthetic construct
  misc_feature 1..20: note = Description of Artificial Sequence: Synthetic oligonucleotide
  misc_feature 1..20: note = Target: SCN10A; (+) strand; PAM type: NRG; PAM sequence: GAG
  source 1..20: mol_type = other DNA
tgtgccttccagcatgttca

SEQ ID NO: 29508 - DNA, 20 bp, synthetic construct
  misc_feature 1..20: note = Description of Artificial Sequence: Synthetic oligonucleotide
  misc_feature 1..20: note = Target: SCN10A; (+) strand; PAM type: NRG; PAM sequence: AAG
  source 1..20: mol_type = other DNA
ccagcatgttcagagcatgc

SEQ ID NO: 29509 - DNA, 20 bp, synthetic construct
  misc_feature 1..20: note = Description of Artificial Sequence: Synthetic oligonucleotide
  misc_feature 1..20: note = Target: SCN10A; (+) strand; PAM type: NRG; PAM sequence: TAG
  source 1..20: mol_type = other DNA
tcagagcatgcaagacatct

SEQ ID NO: 29510 - DNA, 20 bp, synthetic construct
  misc_feature 1..20: note = Description of Artificial Sequence: Synthetic oligonucleotide
  misc_feature 1..20: note = Target: SCN10A; (+) strand; PAM type: NRG; PAM sequence: TAG
  source 1..20: mol_type = other DNA
catcttagttcttacactcc

SEQ ID NO: 29511 - DNA, 20 bp, synthetic construct
  misc_feature 1..20: note = Description of Artificial Sequence: Synthetic oligonucleotide
  misc_feature 1..20: note = Target: SCN10A; (+) strand; PAM type: NRG; PAM sequence: AGG
  source 1..20: mol_type = other DNA
atcttagttcttacactcct

SEQ ID NO: 29512 - DNA, 20 bp, synthetic construct
  misc_feature 1..20: note = Description of Artificial Sequence: Synthetic oligonucleotide
  misc_feature 1..20: note = Target: SCN10A; (+) strand; PAM type: NRG; PAM sequence: CAG
  source 1..20: mol_type = other DNA
ttacactcctaggcctgtta

SEQ ID NO: 29513 - DNA, 20 bp, synthetic construct
  misc_feature 1..20: note = Description of Artificial Sequence: Synthetic oligonucleotide
  misc_feature 1..20: note = Target: SCN10A; (+) strand; PAM type: NRG; PAM sequence: GAG
  source 1..20: mol_type = other DNA
ggcctgttacagcacttaat

SEQ ID NO: 29514 - DNA, 20 bp, synthetic construct
  misc_feature 1..20: note = Description of Artificial Sequence: Synthetic oligonucleotide
  misc_feature 1..20: note = Target: SCN10A; (+) strand; PAM type: NRG; PAM sequence: TAG
  source 1..20: mol_type = other DNA
agctgttttaattcacctat

SEQ ID NO: 29515 - DNA, 20 bp, synthetic construct
  misc_feature 1..20: note = Description of Artificial Sequence: Synthetic oligonucleotide
  misc_feature 1..20: note = Target: SCN10A; (+) strand; PAM type: NRG; PAM sequence: CAG
  source 1..20: mol_type = other DNA
ctattagtctgtttctcata

SEQ ID NO: 29516 - DNA, 20 bp, synthetic construct
  misc_feature 1..20: note = Description of Artificial Sequence: Synthetic oligonucleotide
  misc_feature 1..20: note = Target: SCN10A; (+) strand; PAM type: NRG; PAM sequence: CAG
  source 1..20: mol_type = other DNA
gtctgtttctcatacagcat

SEQ ID NO: 29517 - DNA, 20 bp, synthetic construct
  misc_feature 1..20: note = Description of Artificial Sequence: Synthetic oligonucleotide
  misc_feature 1..20: note = Target: SCN10A; (+) strand; PAM type: NRG; PAM sequence: AAG
  source 1..20: mol_type = other DNA
ctcatacagcatcagtgtcc

SEQ ID NO: 29518 - DNA, 20 bp, synthetic construct
  misc_feature 1..20: note = Description of Artificial Sequence: Synthetic oligonucleotide
  misc_feature 1..20: note = Target: SCN10A; (+) strand; PAM type: NRG; PAM sequence: CAG
  source 1..20: mol_type = other DNA
acagcatcagtgtccaagcc

SEQ ID NO: 29519 - DNA, 20 bp, synthetic construct
  misc_feature 1..20: note = Description of Artificial Sequence: Synthetic oligonucleotide
  misc_feature 1..20: note = Target: SCN10A; (+) strand; PAM type: NRG; PAM sequence: CAG
  source 1..20: mol_type = other DNA
ccagttctgactgtatctcc

SEQ ID NO: 29520 - DNA, 20 bp, synthetic construct
  misc_feature 1..20: note = Description of Artificial Sequence: Synthetic oligonucleotide
  misc_feature 1..20: note = Target: SCN10A; (+) strand; PAM type: NRG; PAM sequence: AGG
  source 1..20: mol_type = other DNA
cagttctgactgtatctccc

SEQ ID NO: 29521 - DNA, 20 bp, synthetic construct
  misc_feature 1..20: note = Description of Artificial Sequence: Synthetic oligonucleotide
  misc_feature 1..20: note = Target: SCN10A; (+) strand; PAM type: NRG; PAM sequence: GGG
  source 1..20: mol_type = other DNA
agttctgactgtatctccca

SEQ ID NO: 29522 - DNA, 20 bp, synthetic construct
  misc_feature 1..20: note = Description of Artificial Sequence: Synthetic oligonucleotide
  misc_feature 1..20: note = Target: SCN10A; (+) strand; PAM type: NRG; PAM sequence: GAG
  source 1..20: mol_type = other DNA
tgactgtatctcccagggct

SEQ ID NO: 29523 - DNA, 20 bp, synthetic construct
  misc_feature 1..20: note = Description of Artificial Sequence: Synthetic oligonucleotide
  misc_feature 1..20: note = Target: SCN10A; (+) strand; PAM type: NRG; PAM sequence: TAG
  source 1..20: mol_type = other DNA
ctgtatctcccagggctgag

SEQ ID NO: 29524 - DNA, 20 bp, synthetic construct
  misc_feature 1..20: note = Description of Artificial Sequence: Synthetic oligonucleotide
  misc_feature 1..20: note = Target: SCN10A; (+) strand; PAM type: NRG; PAM sequence: TGG
  source 1..20: mol_type = other DNA
gggctgagtagtaccatgcc

SEQ ID NO: 29525 - DNA, 20 bp, synthetic construct
  misc_feature 1..20: note = Description of Artificial Sequence: Synthetic oligonucleotide
  misc_feature 1..20: note = Target: SCN10A; (+) strand; PAM type: NRG; PAM sequence: CAG
  source 1..20: mol_type = other DNA
tagtaccatgcctggcatac

SEQ ID NO: 29526 - DNA, 20 bp, synthetic construct
  misc_feature 1..20: note = Description of Artificial Sequence: Synthetic oligonucleotide
  misc_feature 1..20: note = Target: SCN10A; (+) strand; PAM type: NRG; PAM sequence: GAG
  source 1..20: mol_type = other DNA
gtaccatgcctggcatacca

SEQ ID NO: 29527 - DNA, 20 bp, synthetic construct
  misc_feature 1..20: note = Description of Artificial Sequence: Synthetic oligonucleotide
  misc_feature 1..20: note = Target: SCN10A; (+) strand; PAM type: NRG; PAM sequence: CAG
  source 1..20: mol_type = other DNA
cctggcataccagagctact

SEQ ID NO: 29528 - DNA, 20 bp, synthetic construct
  misc_feature 1..20: note = Description of Artificial Sequence: Synthetic oligonucleotide
  misc_feature 1..20: note = Target: SCN10A; (+) strand; PAM type: NRG; PAM sequence: GAG
  source 1..20: mol_type = other DNA
tggcataccagagctactca

SEQ ID NO: 29529 - DNA, 20 bp, synthetic construct
  misc_feature 1..20: note = Description of Artificial Sequence: Synthetic oligonucleotide
  misc_feature 1..20: note = Target: SCN10A; (+) strand; PAM type: NRG; PAM sequence: AAG
  source 1..20: mol_type = other DNA
attatttgttgaataaatgc

SEQ ID NO: 29530 - DNA, 20 bp, synthetic construct
  misc_feature 1..20: note = Description of Artificial Sequence: Synthetic oligonucleotide
  misc_feature 1..20: note = Target: SCN10A; (+) strand; PAM type: NRG; PAM sequence: TGG
  source 1..20: mol_type = other DNA
tgaataaatgcaagaaccaa

SEQ ID NO: 29531 - DNA, 20 bp, synthetic construct
  misc_feature 1..20: note = Description of Artificial Sequence: Synthetic oligonucleotide
  misc_feature 1..20: note = Target: SCN10A; (+) strand; PAM type: NRG; PAM sequence: TGG
  source 1..20: mol_type = other DNA
ataaatgcaagaaccaatgg

SEQ ID NO: 29532 - DNA, 20 bp, synthetic construct
  misc_feature 1..20: note = Description of Artificial Sequence: Synthetic oligonucleotide
  misc_feature 1..20: note = Target: SCN10A; (+) strand; PAM type: NRG; PAM sequence: TAG
  source 1..20: mol_type = other DNA
caagaaccaatggtggaatg

SEQ ID NO: 29533 - DNA, 20 bp, synthetic construct
  misc_feature 1..20: note = Description of Artificial Sequence: Synthetic oligonucleotide
  misc_feature 1..20: note = Target: SCN10A; (+) strand; PAM type: NRG; PAM sequence: AAG
  source 1..20: mol_type = other DNA
atggtggaatgtagacactc

SEQ ID NO: 29534 - DNA, 20 bp, synthetic construct
  misc_feature 1..20: note = Description of Artificial Sequence: Synthetic oligonucleotide
  misc_feature 1..20: note = Target: SCN10A; (+) strand; PAM type: NRG; PAM sequence: GAG
  source 1..20: mol_type = other DNA
ggtggaatgtagacactcaa

SEQ ID NO: 29535 - DNA, 20 bp, synthetic construct
  misc_feature 1..20: note = Description of Artificial Sequence: Synthetic oligonucleotide
  misc_feature 1..20: note = Target: SCN10A; (+) strand; PAM type: NRG; PAM sequence: AAG
  source 1..20: mol_type = other DNA
taactgcatgacaaatgtat

SEQ ID NO: 29536 - DNA, 20 bp, synthetic construct
  misc_feature 1..20: note = Description of Artificial Sequence: Synthetic oligonucleotide
  misc_feature 1..20: note = Target: SCN10A; (+) strand; PAM type: NRG; PAM sequence: CAG
  source 1..20: mol_type = other DNA
tgtattaacacttgaatgaa

SEQ ID NO: 29537 - DNA, 20 bp, synthetic construct
  misc_feature 1..20: note = Description of Artificial Sequence: Synthetic oligonucleotide
  misc_feature 1..20: note = Target: SCN10A; (+) strand; PAM type: NRG; PAM sequence: GAG
  source 1..20: mol_type = other DNA
tattaacacttgaatgaaca

SEQ ID NO: 29538 - DNA, 20 bp, synthetic construct
  misc_feature 1..20: note = Description of Artificial Sequence: Synthetic oligonucleotide
  misc_feature 1..20: note = Target: SCN10A; (+) strand; PAM type: NRG; PAM sequence: AGG
  source 1..20: mol_type = other DNA
attaacacttgaatgaacag

SEQ ID NO: 29539 - DNA, 20 bp, synthetic construct
  misc_feature 1..20: note = Description of Artificial Sequence: Synthetic oligonucleotide
  misc_feature 1..20: note = Target: SCN10A; (+) strand; PAM type: NRG; PAM sequence: CAG
  source 1..20: mol_type = other DNA
tgaacagaggactgaatgaa

SEQ ID NO: 29540 - DNA, 20 bp, synthetic construct
  misc_feature 1..20: note = Description of Artificial Sequence: Synthetic oligonucleotide
  misc_feature 1..20: note = Target: SCN10A; (+) strand; PAM type: NRG; PAM sequence: AGG
  source 1..20: mol_type = other DNA
gaacagaggactgaatgaac

SEQ ID NO: 29541 - DNA, 20 bp, synthetic construct
  misc_feature 1..20: note = Description of Artificial Sequence: Synthetic oligonucleotide
  misc_feature 1..20: note = Target: SCN10A; (+) strand; PAM type: NRG; PAM sequence: TAG
  source 1..20: mol_type = other DNA
cagaggactgaatgaacagg

SEQ ID NO: 29542 - DNA, 20 bp, synthetic construct
  misc_feature 1..20: note = Description of Artificial Sequence: Synthetic oligonucleotide
  misc_feature 1..20: note = Target: SCN10A; (+) strand; PAM type: NRG; PAM sequence: AAG
  source 1..20: mol_type = other DNA
actgaatgaacaggtagatg

SEQ ID NO: 29543 - DNA, 20 bp, synthetic construct
  misc_feature 1..20: note = Description of Artificial Sequence: Synthetic oligonucleotide
  misc_feature 1..20: note = Target: SCN10A; (+) strand; PAM type: NRG; PAM sequence: AGG
  source 1..20: mol_type = other DNA
ctgaatgaacaggtagatga

SEQ ID NO: 29544 - DNA, 20 bp, synthetic construct
  misc_feature 1..20: note = Description of Artificial Sequence: Synthetic oligonucleotide
  misc_feature 1..20: note = Target: SCN10A; (+) strand; PAM type: NRG; PAM sequence: AAG
  source 1..20: mol_type = other DNA
atgaacaggtagatgaaggc

SEQ ID NO: 29545 - DNA, 20 bp, synthetic construct
  misc_feature 1..20: note = Description of Artificial Sequence: Synthetic oligonucleotide
  misc_feature 1..20: note = Target: SCN10A; (+) strand; PAM type: NRG; PAM sequence: GAG
  source 1..20: mol_type = other DNA
ggtagatgaaggcaagaaat

SEQ ID NO: 29546 - DNA, 20 bp, synthetic construct
  misc_feature 1..20: note = Description of Artificial Sequence: Synthetic oligonucleotide
  misc_feature 1..20: note = Target: SCN10A; (+) strand; PAM type: NRG; PAM sequence: TGG
  source 1..20: mol_type = other DNA
gcaagaaatgagtgattgac

SEQ ID NO: 29547 - DNA, 20 bp, synthetic construct
  misc_feature 1..20: note = Description of Artificial Sequence: Synthetic oligonucleotide
  misc_feature 1..20: note = Target: SCN10A; (+) strand; PAM type: NRG; PAM sequence: AAG
  source 1..20: mol_type = other DNA
agtgattgactggatgatga

SEQ ID NO: 29548 - DNA, 20 bp, synthetic construct
  misc_feature 1..20: note = Description of Artificial Sequence: Synthetic oligonucleotide
  misc_feature 1..20: note = Target: SCN10A; (+) strand; PAM type: NRG; PAM sequence: AAG
  source 1..20: mol_type = other DNA
attgactggatgatgaaaga

SEQ ID NO: 29549 - DNA, 20 bp, synthetic construct
  misc_feature 1..20: note = Description of Artificial Sequence: Synthetic oligonucleotide
  misc_feature 1..20: note = Target: SCN10A; (+) strand; PAM type: NRG; PAM sequence: AAG
  source 1..20: mol_type = other DNA
actggatgatgaaagaaaga

SEQ ID NO: 29550 - DNA, 20 bp, synthetic construct
  misc_feature 1..20: note = Description of Artificial Sequence: Synthetic oligonucleotide
  misc_feature 1..20: note = Target: SCN10A; (+) strand; PAM type: NRG; PAM sequence: CAG
  source 1..20: mol_type = other DNA
gatgatgaaagaaagaaaga

SEQ ID NO: 29551 - DNA, 20 bp, synthetic construct
  misc_feature 1..20: note = Description of Artificial Sequence: Synthetic oligonucleotide
  misc_feature 1..20: note = Target: SCN10A; (+) strand; PAM type: NRG; PAM sequence: AGG
  source 1..20: mol_type = other DNA
atgatgaaagaaagaaagac

SEQ ID NO: 29552 - DNA, 20 bp, synthetic construct
  misc_feature 1..20: note = Description of Artificial Sequence: Synthetic oligonucleotide
  misc_feature 1..20: note = Target: SCN10A; (+) strand; PAM type: NRG; PAM sequence: TAG
  source 1..20: mol_type = other DNA
aacattatatatcattacaa

SEQ ID NO: 29553 - DNA, 20 bp, synthetic construct
  misc_feature 1..20: note = Description of Artificial Sequence: Synthetic oligonucleotide
  misc_feature 1..20: note = Target: SCN10A; (+) strand; PAM type: NRG; PAM sequence: GAG
  source 1..20: mol_type = other DNA
atcattacaatagacctaat

SEQ ID NO: 29554 - DNA, 20 bp, synthetic construct
  misc_feature 1..20: note = Description of Artificial Sequence: Synthetic oligonucleotide
  misc_feature 1..20: note = Target: SCN10A; (+) strand; PAM type: NRG; PAM sequence: TAG
  source 1..20: mol_type = other DNA
agacataatttattaccatt

SEQ ID NO: 29555 - DNA, 20 bp, synthetic construct
  misc_feature 1..20: note = Description of Artificial Sequence: Synthetic oligonucleotide
  misc_feature 1..20: note = Target: SCN10A; (+) strand; PAM type: NRG; PAM sequence: AGG
  source 1..20: mol_type = other DNA
gacataatttattaccattt

SEQ ID NO: 29556 - DNA, 20 bp, synthetic construct
  misc_feature 1..20: note = Description of Artificial Sequence: Synthetic oligonucleotide
  misc_feature 1..20: note = Target: SCN10A; (+) strand; PAM type: NRG; PAM sequence: AAG
  source 1..20: mol_type = other DNA
accatttaggaaatgatgtg

SEQ ID NO: 29557 - DNA, 20 bp, synthetic construct
  misc_feature 1..20: note = Description of Artificial Sequence: Synthetic oligonucleotide
  misc_feature 1..20: note = Target: SCN10A; (+) strand; PAM type: NRG; PAM sequence: AAG
  source 1..20: mol_type = other DNA
taggaaatgatgtgaagttg

SEQ ID NO: 29558 - DNA, 20 bp, synthetic construct
  misc_feature 1..20: note = Description of Artificial Sequence: Synthetic oligonucleotide
  misc_feature 1..20: note = Target: SCN10A; (+) strand; PAM type: NRG; PAM sequence: TGG
  source 1..20: mol_type = other DNA
gaagttgaagactgaacatg

SEQ ID NO: 29559 - DNA, 20 bp, synthetic construct
  misc_feature 1..20: note = Description of Artificial Sequence: Synthetic oligonucleotide
  misc_feature 1..20: note = Target: SCN10A; (+) strand; PAM type: NRG; PAM sequence: CAG
  source 1..20: mol_type = other DNA
tatgccgtgtctattttgta

SEQ ID NO: 29560 - DNA, 20 bp, synthetic construct
  misc_feature 1..20: note = Description of Artificial Sequence: Synthetic oligonucleotide
  misc_feature 1..20: note = Target: SCN10A; (+) strand; PAM type: NRG; PAM sequence: AGG
  source 1..20: mol_type = other DNA
atgccgtgtctattttgtac

SEQ ID NO: 29561 - DNA, 20 bp, synthetic construct
  misc_feature 1..20: note = Description of Artificial Sequence: Synthetic oligonucleotide
  misc_feature 1..20: note = Target: SCN10A; (+) strand; PAM type: NRG; PAM sequence: TGG
  source 1..20: mol_type = other DNA
ctcaccacctgataatccca

SEQ ID NO: 29562 - DNA, 20 bp, synthetic construct
  misc_feature 1..20: note = Description of Artificial Sequence: Synthetic oligonucleotide
  misc_feature 1..20: note = Target: SCN10A; (+) strand; PAM type: NRG; PAM sequence: CAG
  source 1..20: mol_type = other DNA
accacctgataatcccatgg

SEQ ID NO: 29563 - DNA, 20 bp, synthetic construct
  misc_feature 1..20: note = Description of Artificial Sequence: Synthetic oligonucleotide
  misc_feature 1..20: note = Target: SCN10A; (+) strand; PAM type: NRG; PAM sequence: AGG
  source 1..20: mol_type = other DNA
ccacctgataatcccatggc

SEQ ID NO: 29564 - DNA, 20 bp, synthetic construct
  misc_feature 1..20: note = Description of Artificial Sequence: Synthetic oligonucleotide
  misc_feature 1..20: note = Target: SCN10A; (+) strand; PAM type: NRG; PAM sequence: TAG
  source 1..20: mol_type = other DNA
atccctttatgctattctac

SEQ ID NO: 29565 - DNA, 20 bp, synthetic construct
  misc_feature 1..20: note = Description of Artificial Sequence: Synthetic oligonucleotide
  misc_feature 1..20: note = Target: SCN10A; (+) strand; PAM type: NRG; PAM sequence: TAG
  source 1..20: mol_type = other DNA
cactgtgatatcatattcac

SEQ ID NO: 29566 - DNA, 20 bp, synthetic construct
  misc_feature 1..20: note = Description of Artificial Sequence: Synthetic oligonucleotide
  misc_feature 1..20: note = Target: SCN10A; (+) strand; PAM type: NRG; PAM sequence: AGG
  source 1..20: mol_type = other DNA
actgtgatatcatattcact

SEQ ID NO: 29567 - DNA, 20 bp, synthetic construct
  misc_feature 1..20: note = Description of Artificial Sequence: Synthetic oligonucleotide
  misc_feature 1..20: note = Target: SCN10A; (+) strand; PAM type: NRG; PAM sequence: AAG
  source 1..20: mol_type = other DNA
gtgatatcatattcactagg

SEQ ID NO: 29568 - DNA, 20 bp, synthetic construct
  misc_feature 1..20: note = Description of Artificial Sequence: Synthetic oligonucleotide
  misc_feature 1..20: note = Target: SCN10A; (+) strand; PAM type: NRG; PAM sequence: AGG
  source 1..20: mol_type = other DNA
tgatatcatattcactagga

SEQ ID NO: 29569 - DNA, 20 bp, synthetic construct
  misc_feature 1..20: note = Description of Artificial Sequence: Synthetic oligonucleotide
  misc_feature 1..20: note = Target: SCN10A; (+) strand; PAM type: NRG; PAM sequence: TAG
  source 1..20: mol_type = other DNA
tattcactaggaaggccctc

SEQ ID NO: 29570 - DNA, 20 bp, synthetic construct
  misc_feature 1..20: note = Description of Artificial Sequence: Synthetic oligonucleotide
  misc_feature 1..20: note = Target: SCN10A; (+) strand; PAM type: NRG; PAM sequence: TGG
  source 1..20: mol_type = other DNA
aggaaggccctctagcctca

SEQ ID NO: 29571 - DNA, 20 bp, synthetic construct
  misc_feature 1..20: note = Description of Artificial Sequence: Synthetic oligonucleotide
  misc_feature 1..20: note = Target: SCN10A; (+) strand; PAM type: NRG; PAM sequence: TAG
  source 1..20: mol_type = other DNA
ggccctctagcctcatggtg

SEQ ID NO: 29572 - DNA, 20 bp, synthetic construct
  misc_feature 1..20: note = Description of Artificial Sequence: Synthetic oligonucleotide
  misc_feature 1..20: note = Target: SCN10A; (+) strand; PAM type: NRG; PAM sequence: TAG
  source 1..20: mol_type = other DNA
tagcctcatggtgtagtctg

SEQ ID NO: 29573 - DNA, 20 bp, synthetic construct
  misc_feature 1..20: note = Description of Artificial Sequence: Synthetic oligonucleotide
  misc_feature 1..20: note = Target: SCN10A; (+) strand; PAM type: NRG; PAM sequence: AGG
  source 1..20: mol_type = other DNA
agcctcatggtgtagtctgt

SEQ ID NO: 29574 - DNA, 20 bp, synthetic construct
  misc_feature 1..20: note = Description of Artificial Sequence: Synthetic oligonucleotide
  misc_feature 1..20: note = Target: SCN10A; (+) strand; PAM type: NRG; PAM sequence: TAG
  source 1..20: mol_type = other DNA
catggtgtagtctgtaggaa

SEQ ID NO: 29575 - DNA, 20 bp, synthetic construct
  misc_feature 1..20: note = Description of Artificial Sequence: Synthetic oligonucleotide
  misc_feature 1..20: note = Target: SCN10A; (+) strand; PAM type: NRG; PAM sequence: GAG
  source 1..20: mol_type = other DNA
tggtgtagtctgtaggaata

SEQ ID NO: 29576 - DNA, 20 bp, synthetic construct
  misc_feature 1..20: note = Description of Artificial Sequence: Synthetic oligonucleotide
  misc_feature 1..20: note = Target: SCN10A; (+) strand; PAM type: NRG; PAM sequence: CAG
  source 1..20: mol_type = other DNA
gtaggaatagagaatgacct

SEQ ID NO: 29577 - DNA, 20 bp, synthetic construct
  misc_feature 1..20: note = Description of Artificial Sequence: Synthetic oligonucleotide
  misc_feature 1..20: note = Target: SCN10A; (+) strand; PAM type: NRG; PAM sequence: GAG
  source 1..20: mol_type = other DNA
gaatgacctcagttcacact

SEQ ID NO: 29578 - DNA, 20 bp, synthetic construct
  misc_feature 1..20: note = Description of Artificial Sequence: Synthetic oligonucleotide
  misc_feature 1..20: note = Target: SCN10A; (+) strand; PAM type: NRG; PAM sequence: AAG
  source 1..20: mol_type = other DNA
actgagtgctactccttgca

SEQ ID NO: 29579 - DNA, 20 bp, synthetic construct
  misc_feature 1..20: note = Description of Artificial Sequence: Synthetic oligonucleotide
  misc_feature 1..20: note = Target: SCN10A; (+) strand; PAM type: NRG; PAM sequence: TAG
  source 1..20: mol_type = other DNA
ctccttgcaaagtccccaca

SEQ ID NO: 29580 - DNA, 20 bp, synthetic construct
  misc_feature 1..20: note = Description of Artificial Sequence: Synthetic oligonucleotide
  misc_feature 1..20: note = Target: SCN10A; (+) strand; PAM type: NRG; PAM sequence: TGG
  source 1..20: mol_type = other DNA
agtccccacatagcatcttc

SEQ ID NO: 29581 - DNA, 20 bp, synthetic construct
  misc_feature 1..20: note = Description of Artificial Sequence: Synthetic oligonucleotide
  misc_feature 1..20: note = Target: SCN10A; (+) strand; PAM type: NRG; PAM sequence: GGG
  source 1..20: mol_type = other DNA
gtccccacatagcatcttct

SEQ ID NO: 29582 - DNA, 20 bp, synthetic construct
  misc_feature 1..20: note = Description of Artificial Sequence: Synthetic oligonucleotide
  misc_feature 1..20: note = Target: SCN10A; (+) strand; PAM type: NRG; PAM sequence: TAG
  source 1..20: mol_type = other DNA
catagcatcttctgggaacc

SEQ ID NO: 29583 - DNA, 20 bp, synthetic construct
  misc_feature 1..20: note = Description of Artificial Sequence: Synthetic oligonucleotide
  misc_feature 1..20: note = Target: SCN10A; (+) strand; PAM type: NRG; PAM sequence: GAG
  source 1..20: mol_type = other DNA
cctagactctccattttatt

SEQ ID NO: 29584 - DNA, 20 bp, synthetic construct
  misc_feature 1..20: note = Description of Artificial Sequence: Synthetic oligonucleotide
  misc_feature 1..20: note = Target: SCN10A; (+) strand; PAM type: NRG; PAM sequence: CGG
  source 1..20: mol_type = other DNA
agactctccattttattgag

SEQ ID NO: 29585 - DNA, 20 bp, synthetic construct
  misc_feature 1..20: note = Description of Artificial Sequence: Synthetic oligonucleotide
  misc_feature 1..20: note = Target: SCN10A; (+) strand; PAM type: NRG; PAM sequence: AAG
  source 1..20: mol_type = other DNA
tccattttattgagcggcca

SEQ ID NO: 29586 - DNA, 20 bp, synthetic construct
  misc_feature 1..20: note = Description of Artificial Sequence: Synthetic oligonucleotide
  misc_feature 1..20: note = Target: SCN10A; (+) strand; PAM type: NRG; PAM sequence: AAG
  source 1..20: mol_type = other DNA
ttttattgagcggccaaagc

SEQ ID NO: 29587 - DNA, 20 bp, synthetic construct
  misc_feature 1..20: note = Description of Artificial Sequence: Synthetic oligonucleotide
  misc_feature 1..20: note = Target: SCN10A; (+) strand; PAM type: NRG; PAM sequence: GAG
  source 1..20: mol_type = other DNA
ttattgagcggccaaagcaa

SEQ ID NO: 29588 - DNA, 20 bp, synthetic construct
  misc_feature 1..20: note = Description of Artificial Sequence: Synthetic oligonucleotide
  misc_feature 1..20: note = Target: SCN10A; (+) strand; PAM type: NRG; PAM sequence: TGG
  source 1..20: mol_type = other DNA
agcggccaaagcaagagata

SEQ ID NO: 29589 - DNA, 20 bp, synthetic construct
  misc_feature 1..20: note = Description of Artificial Sequence: Synthetic oligonucleotide
  misc_feature 1..20: note = Target: SCN10A; (+) strand; PAM type: NRG; PAM sequence: TGG
  source 1..20: mol_type = other DNA
aagagatatggttgatctca

SEQ ID NO: 29590 - DNA, 20 bp, synthetic construct
  misc_feature 1..20: note = Description of Artificial Sequence: Synthetic oligonucleotide
  misc_feature 1..20: note = Target: SCN10A; (+) strand; PAM type: NRG; PAM sequence: CAG
  source 1..20: mol_type = other DNA
catggttgactcaccacctg

SEQ ID NO: 29591 - DNA, 20 bp, synthetic construct
  misc_feature 1..20: note = Description of Artificial Sequence: Synthetic oligonucleotide
  misc_feature 1..20: note = Target: SCN10A; (+) strand; PAM type: NRG; PAM sequence: AAG
  source 1..20: mol_type = other DNA
ggttgactcaccacctgcag

SEQ ID NO: 29592 - DNA, 20 bp, synthetic construct
  misc_feature 1..20: note = Description of Artificial Sequence: Synthetic oligonucleotide
  misc_feature 1..20: note = Target: SCN10A; (+) strand; PAM type: NRG; PAM sequence: AAG
  source 1..20: mol_type = other DNA
ctcaccacctgcagaagtgc

SEQ ID NO: 29593 - DNA, 20 bp, synthetic construct
  misc_feature 1..20: note = Description of Artificial Sequence: Synthetic oligonucleotide
  misc_feature 1..20: note = Target: SCN10A; (+) strand; PAM type: NRG; PAM sequence: AGG
  source 1..20: mol_type = other DNA
tcaccacctgcagaagtgca

SEQ ID NO: 29594 - DNA, 20 bp, synthetic construct
  misc_feature 1..20: note = Description of Artificial Sequence: Synthetic oligonucleotide
  misc_feature 1..20: note = Target: SCN10A; (+) strand; PAM type: NRG; PAM sequence: AAG
  source 1..20: mol_type = other DNA
aacccattgcaacattatca

SEQ ID NO: 29595 - DNA, 20 bp, synthetic construct
  misc_feature 1..20: note = Description of Artificial Sequence: Synthetic oligonucleotide
  misc_feature 1..20: note = Target: SCN10A; (+) strand; PAM type: NRG; PAM sequence: CAG
  source 1..20: mol_type = other DNA
agttgactttcacattgacc

SEQ ID NO: 29596 - DNA, 20 bp, synthetic construct
  misc_feature 1..20: note = Description of Artificial Sequence: Synthetic oligonucleotide
  misc_feature 1..20: note = Target: SCN10A; (+) strand; PAM type: NRG; PAM sequence: AAG
  source 1..20: mol_type = other DNA
tgactttcacattgacccag

SEQ ID NO: 29597 - DNA, 20 bp, synthetic construct
  misc_feature 1..20: note = Description of Artificial Sequence: Synthetic oligonucleotide
  misc_feature 1..20: note = Target: SCN10A; (+) strand; PAM type: NRG; PAM sequence: AAG
  source 1..20: mol_type = other DNA
ctttcacattgacccagaag

SEQ ID NO: 29598 - DNA, 20 bp, synthetic construct
  misc_feature 1..20: note = Description of Artificial Sequence: Synthetic oligonucleotide
  misc_feature 1..20: note = Target: SCN10A; (+) strand; PAM type: NRG; PAM sequence: CAG
  source 1..20: mol_type = other DNA
attgacccagaagaagctgc

SEQ ID NO: 29599 - DNA, 20 bp, synthetic construct
  misc_feature 1..20: note = Description of Artificial Sequence: Synthetic oligonucleotide
  misc_feature 1..20: note = Target: SCN10A; (+) strand; PAM type: NRG; PAM sequence: TGG
  source 1..20: mol_type = other DNA
gacccagaagaagctgccag

SEQ ID NO: 29600 - DNA, 20 bp, synthetic construct
  misc_feature 1..20: note = Description of Artificial Sequence: Synthetic oligonucleotide
  misc_feature 1..20: note = Target: SCN10A; (+) strand; PAM type: NRG; PAM sequence: GAG
  source 1..20: mol_type = other DNA
cccagaagaagctgccagtg

SEQ ID NO: 29601 - DNA, 20 bp, synthetic construct
  misc_feature 1..20: note = Description of Artificial Sequence: Synthetic oligonucleotide
  misc_feature 1..20: note = Target: SCN10A; (+) strand; PAM type: NRG; PAM sequence: CAG
  source 1..20: mol_type = other DNA
cagtggagttttgaatcttg

SEQ ID NO: 29602 - DNA, 20 bp, synthetic construct
  misc_feature 1..20: note = Description of Artificial Sequence: Synthetic oligonucleotide
  misc_feature 1..20: note = Target: SCN10A; (+) strand; PAM type: NRG; PAM sequence: CAG
  source 1..20: mol_type = other DNA
ggagttttgaatcttgcagt

SEQ ID NO: 29603 - DNA, 20 bp, synthetic construct
  misc_feature 1..20: note = Description of Artificial Sequence: Synthetic oligonucleotide
  misc_feature 1..20: note = Target: SCN10A; (+) strand; PAM type: NRG; PAM sequence: AAG
  source 1..20: mol_type = other DNA
cttgttattcacaatcgaca

SEQ ID NO: 29604 - DNA, 20 bp, synthetic construct
  misc_feature 1..20: note = Description of Artificial Sequence: Synthetic oligonucleotide
  misc_feature 1..20: note = Target: SCN10A; (+) strand; PAM type: NRG; PAM sequence: AGG
  source 1..20: mol_type = other DNA
ttgttattcacaatcgacaa

SEQ ID NO: 29605 - DNA, 20 bp, synthetic construct
  misc_feature 1..20: note = Description of Artificial Sequence: Synthetic oligonucleotide
  misc_feature 1..20: note = Target: SCN10A; (+) strand; PAM type: NRG; PAM sequence: AAG
  source 1..20: mol_type = other DNA
ttcacaatcgacaaaggtac

SEQ ID NO: 29606 - DNA, 20 bp, synthetic construct
  misc_feature 1..20: note = Description of Artificial Sequence: Synthetic oligonucleotide
  misc_feature 1..20: note = Target: SCN10A; (+) strand; PAM type: NRG; PAM sequence: AGG
  source 1..20: mol_type = other DNA
tcacaatcgacaaaggtaca

SEQ ID NO: 29607 - DNA, 20 bp, synthetic construct
  misc_feature 1..20: note = Description of Artificial Sequence: Synthetic oligonucleotide
  misc_feature 1..20: note = Target: SCN10A; (+) strand; PAM type: NRG; PAM sequence: GGG
  source 1..20: mol_type = other DNA
cacaatcgacaaaggtacaa

SEQ ID NO: 29608 - DNA, 20 bp, synthetic construct
  misc_feature 1..20: note = Description of Artificial Sequence: Synthetic oligonucleotide
  misc_feature 1..20: note = Target: SCN10A; (+) strand; PAM type: NRG; PAM sequence: CGG
  source 1..20: mol_type = other DNA
tacaagggaaaactctccat

SEQ ID NO: 29609 - DNA, 20 bp, synthetic construct
  misc_feature 1..20: note = Description of Artificial Sequence: Synthetic oligonucleotide
  misc_feature 1..20: note = Target: SCN10A; (+) strand; PAM type: NRG; PAM sequence: TAG
  source 1..20: mol_type = other DNA
gggaaaactctccatcggta

SEQ ID NO: 29610 - DNA, 20 bp, synthetic construct
  misc_feature 1..20: note = Description of Artificial Sequence: Synthetic oligonucleotide
  misc_feature 1..20: note = Target: SCN10A; (+) strand; PAM type: NRG; PAM sequence: AAG
  source 1..20: mol_type = other DNA
acctccaaaacttccctgcg

SEQ ID NO: 29611 - DNA, 20 bp, synthetic construct
  misc_feature 1..20: note = Description of Artificial Sequence: Synthetic oligonucleotide
  misc_feature 1..20: note = Target: SCN10A; (+) strand; PAM type: NRG; PAM sequence: GAG
  source 1..20: mol_type = other DNA
ctccaaaacttccctgcgaa

SEQ ID NO: 29612 - DNA, 20 bp, synthetic construct
  misc_feature 1..20: note = Description of Artificial Sequence: Synthetic oligonucleotide
  misc_feature 1..20: note = Target: SCN10A; (+) strand; PAM type: NRG; PAM sequence: AGG
  source 1..20: mol_type = other DNA
tccaaaacttccctgcgaag

SEQ ID NO: 29613 - DNA, 20 bp, synthetic construct
  misc_feature 1..20: note = Description of Artificial Sequence: Synthetic oligonucleotide
  misc_feature 1..20: note = Target: SCN10A; (+) strand; PAM type: NRG; PAM sequence: AAG
  source 1..20: mol_type = other DNA
ggttcacacccatgatgctg

SEQ ID NO: 29614 - DNA, 20 bp, synthetic construct
  misc_feature 1..20: note = Description of Artificial Sequence: Synthetic oligonucleotide
  misc_feature 1..20: note = Target: SCN10A; (+) strand; PAM type: NRG; PAM sequence: GAG
  source 1..20: mol_type = other DNA
acacccatgatgctgaagat

SEQ ID NO: 29615 - DNA, 20 bp, synthetic construct
  misc_feature 1..20: note = Description of Artificial Sequence: Synthetic oligonucleotide
  misc_feature 1..20: note = Target: SCN10A; (+) strand; PAM type: NRG; PAM sequence: CAG
  source 1..20: mol_type = other DNA
ccatgatgctgaagatgagc

SEQ ID NO: 29616 - DNA, 20 bp, synthetic construct
  misc_feature 1..20: note = Description of Artificial Sequence: Synthetic oligonucleotide
  misc_feature 1..20: note = Target: SCN10A; (+) strand; PAM type: NRG; PAM sequence: AAG
  source 1..20: mol_type = other DNA
tgatgctgaagatgagccag

SEQ ID NO: 29617 - DNA, 20 bp, synthetic construct
  misc_feature 1..20: note = Description of Artificial Sequence: Synthetic oligonucleotide
  misc_feature 1..20: note = Target: SCN10A; (+) strand; PAM type: NRG; PAM sequence: GAG
  source 1..20: mol_type = other DNA
ctgaagatgagccagaagat

SEQ ID NO: 29618 - DNA, 20 bp, synthetic construct
  misc_feature 1..20: note = Description of Artificial Sequence: Synthetic oligonucleotide
  misc_feature 1..20: note = Target: SCN10A; (+) strand; PAM type: NRG; PAM sequence: AGG
  source 1..20: mol_type = other DNA
tgaagatgagccagaagatg

SEQ ID NO: 29619 - DNA, 20 bp, synthetic construct
  misc_feature 1..20: note = Description of Artificial Sequence: Synthetic oligonucleotide
  misc_feature 1..20: note = Target: SCN10A; (+) strand; PAM type: NRG; PAM sequence: CAG
  source 1..20: mol_type = other DNA
agatgagccagaagatgagg

SEQ ID NO: 29620 - DNA, 20 bp, synthetic construct
  misc_feature 1..20: note = Description of Artificial Sequence: Synthetic oligonucleotide
  misc_feature 1..20: note = Target: SCN10A; (+) strand; PAM type: NRG; PAM sequence: GAG
  source 1..20: mol_type = other DNA
agccagaagatgaggcagac

SEQ ID NO: 29621 - DNA, 20 bp, synthetic construct
  misc_feature 1..20: note = Description of Artificial Sequence: Synthetic oligonucleotide
  misc_feature 1..20: note = Target: SCN10A; (+) strand; PAM type: NRG; PAM sequence: AGG
  source 1..20: mol_type = other DNA
gccagaagatgaggcagacg

SEQ ID NO: 29622 - DNA, 20 bp, synthetic construct
  misc_feature 1..20: note = Description of Artificial Sequence: Synthetic oligonucleotide
  misc_feature 1..20: note = Target: SCN10A; (+) strand; PAM type: NRG; PAM sequence: GAG
  source 1..20: mol_type = other DNA
cagaagatgaggcagacgag

SEQ ID NO: 29623 - DNA, 20 bp, synthetic construct
  misc_feature 1..20: note = Description of Artificial Sequence: Synthetic oligonucleotide
  misc_feature 1..20: note = Target: SCN10A; (+) strand; PAM type: NRG; PAM sequence: AGG
  source 1..20: mol_type = other DNA
agaagatgaggcagacgagg

SEQ ID NO: 29624 - DNA, 20 bp, synthetic construct
  misc_feature 1..20: note = Description of Artificial Sequence: Synthetic oligonucleotide
  misc_feature 1..20: note = Target: SCN10A; (+) strand; PAM type: NRG; PAM sequence: TGG
  source 1..20: mol_type = other DNA
gacgaggaggacattcatga

SEQ ID NO: 29625 - DNA, 20 bp, synthetic construct
  misc_feature 1..20: note = Description of Artificial Sequence: Synthetic oligonucleotide
  misc_feature 1..20: note = Target: SCN10A; (+) strand; PAM type: NRG; PAM sequence: TGG
  source 1..20: mol_type = other DNA
aggaggacattcatgatgga

SEQ ID NO: 29626 - DNA, 20 bp, synthetic construct
  misc_feature 1..20: note = Description of Artificial Sequence: Synthetic oligonucleotide
  misc_feature 1..20: note = Target: SCN10A; (+) strand; PAM type: NRG; PAM sequence: GGG
  source 1..20: mol_type = other DNA
ggaggacattcatgatggat

SEQ ID NO: 29627 - DNA, 20 bp, synthetic construct
  misc_feature 1..20: note = Description of Artificial Sequence: Synthetic oligonucleotide
  misc_feature 1..20: note = Target: SCN10A; (+) strand; PAM type: NRG; PAM sequence: TGG
  source 1..20: mol_type = other DNA
gacattcatgatggatggga

SEQ ID NO: 29628 - DNA, 20 bp, synthetic construct
  misc_feature 1..20: note = Description of Artificial Sequence: Synthetic oligonucleotide
  misc_feature 1..20: note = Target: SCN10A; (+) strand; PAM type: NRG; PAM sequence: CAG
  source 1..20: mol_type = other DNA
atggatgggatggcgcccac

SEQ ID NO: 29629 - DNA, 20 bp, synthetic construct
  misc_feature 1..20: note = Description of Artificial Sequence: Synthetic oligonucleotide
  misc_feature 1..20: note = Target: SCN10A; (+) strand; PAM type: NRG; PAM sequence: AGG
  source 1..20: mol_type = other DNA
tggatgggatggcgcccacc

SEQ ID NO: 29630 - DNA, 20 bp, synthetic construct
  misc_feature 1..20: note = Description of Artificial Sequence: Synthetic oligonucleotide
  misc_feature 1..20: note = Target: SCN10A; (+) strand; PAM type: NRG; PAM sequence: GGG
  source 1..20: mol_type = other DNA
ggatgggatggcgcccacca

SEQ ID NO: 29631 - DNA, 20 bp, synthetic construct
  misc_feature 1..20: note = Description of Artificial Sequence: Synthetic oligonucleotide
  misc_feature 1..20: note = Target: SCN10A; (+) strand; PAM type: NRG; PAM sequence: TGG
  source 1..20: mol_type = other DNA
ccagggcatccaccaccacc

SEQ ID NO: 29632 - DNA, 20 bp, synthetic construct
  misc_feature 1..20: note = Description of Artificial Sequence: Synthetic oligonucleotide
  misc_feature 1..20: note = Target: SCN10A; (+) strand; PAM type: NRG; PAM sequence: TGG
  source 1..20: mol_type = other DNA
gggcatccaccaccacctgg

SEQ ID NO: 29633 - DNA, 20 bp, synthetic construct
  misc_feature 1..20: note = Description of Artificial Sequence: Synthetic oligonucleotide
  misc_feature 1..20: note = Target: SCN10A; (+) strand; PAM type: NRG; PAM sequence: GGG
  source 1..20: mol_type = other DNA
ggcatccaccaccacctggt

SEQ ID NO: 29634 - DNA, 20 bp, synthetic construct
  misc_feature 1..20: note = Description of Artificial Sequence: Synthetic oligonucleotide
  misc_feature 1..20: note = Target: SCN10A; (+) strand; PAM type: NRG; PAM sequence: GAG
  source 1..20: mol_type = other DNA
catccaccaccacctggtgg

SEQ ID NO: 29635 - DNA, 20 bp, synthetic construct
  misc_feature 1..20: note = Description of Artificial Sequence: Synthetic oligonucleotide
  misc_feature 1..20: note = Target: SCN10A; (+) strand; PAM type: NRG; PAM sequence: TAG
  source 1..20: mol_type = other DNA
caccaccacctggtgggaga

SEQ ID NO: 29636 - DNA, 20 bp, synthetic construct
  misc_feature 1..20: note = Description of Artificial Sequence: Synthetic oligonucleotide
  misc_feature 1..20: note = Target: SCN10A; (+) strand; PAM type: NRG; PAM sequence: GAG
  source 1..20: mol_type = other DNA
ccaccacctggtgggagata

SEQ ID NO: 29637 - DNA, 20 bp, synthetic construct
  misc_feature 1..20: note = Description of Artificial Sequence: Synthetic oligonucleotide
  misc_feature 1..20: note = Target: SCN10A; (+) strand; PAM type: NRG; PAM sequence: AAG
  source 1..20: mol_type = other DNA
cacctggtgggagatagaga

SEQ ID NO: 29638 - DNA, 20 bp, synthetic construct
  misc_feature 1..20: note = Description of Artificial Sequence: Synthetic oligonucleotide
  misc_feature 1..20: note = Target: SCN10A; (+) strand; PAM type: NRG; PAM sequence: TGG
  source 1..20: mol_type = other DNA
gtgggagatagagaaagacc

SEQ ID NO: 29639 - DNA, 20 bp, synthetic construct
  misc_feature 1..20: note = Description of Artificial Sequence: Synthetic oligonucleotide
  misc_feature 1..20: note = Target: SCN10A; (+) strand; PAM type: NRG; PAM sequence: TGG
  source 1..20: mol_type = other DNA
caatgccccaccccctctgc

SEQ ID NO: 29640 - DNA, 20 bp, synthetic construct
  misc_feature 1..20: note = Description of Artificial Sequence: Synthetic oligonucleotide
  misc_feature 1..20: note = Target: SCN10A; (+) strand; PAM type: NRG; PAM sequence: CAG
  source 1..20: mol_type = other DNA
tatctctttctatactcatt

SEQ ID NO: 29641 - DNA, 20 bp, synthetic construct
  misc_feature 1..20: note = Description of Artificial Sequence: Synthetic oligonucleotide
  misc_feature 1..20: note = Target: SCN10A; (+) strand; PAM type: NRG; PAM sequence: AGG
  source 1..20: mol_type = other DNA
atctctttctatactcattc

SEQ ID NO: 29642 - DNA, 20 bp, synthetic construct
  misc_feature 1..20: note = Description of Artificial Sequence: Synthetic oligonucleotide
  misc_feature 1..20: note = Target: SCN10A; (+) strand; PAM type: NRG; PAM sequence: GAG
  source 1..20: mol_type = other DNA
actcattcaggctgcttcat

SEQ ID NO: 29643 - DNA, 20 bp, synthetic construct
  misc_feature 1..20: note = Description of Artificial Sequence: Synthetic oligonucleotide
  misc_feature 1..20: note = Target: SCN10A; (+) strand; PAM type: NRG; PAM sequence: CAG
  source 1..20: mol_type = other DNA
attcaggctgcttcatgagc

SEQ ID NO: 29644 - DNA, 20 bp, synthetic construct
  misc_feature 1..20: note = Description of Artificial Sequence: Synthetic oligonucleotide
  misc_feature 1..20: note = Target: SCN10A; (+) strand; PAM type: NRG; PAM sequence: TGG
  source 1..20: mol_type = other DNA
caggctgcttcatgagccag

SEQ ID NO: 29645 - DNA, 20 bp, synthetic construct
  misc_feature 1..20: note = Description of Artificial Sequence: Synthetic oligonucleotide
  misc_feature 1..20: note = Target: SCN10A; (+) strand; PAM type: NRG; PAM sequence: TGG
  source 1..20: mol_type = other DNA
cttcatgagccagtggcctt

SEQ ID NO: 29646 - DNA, 20 bp, synthetic construct
  misc_feature 1..20: note = Description of Artificial Sequence: Synthetic oligonucleotide
  misc_feature 1..20: note = Target: SCN10A; (+) strand; PAM type: NRG; PAM sequence: AAG
  source 1..20: mol_type = other DNA
catgagccagtggcctttgg

SEQ ID NO: 29647 - DNA, 20 bp, synthetic construct
  misc_feature 1..20: note = Description of Artificial Sequence: Synthetic oligonucleotide
  misc_feature 1..20: note = Target: SCN10A; (+) strand; PAM type: NRG; PAM sequence: AAG
  source 1..20: mol_type = other DNA
gagccagtggcctttggaag

SEQ ID NO: 29648 - DNA, 20 bp, synthetic construct
  misc_feature 1..20: note = Description of Artificial Sequence: Synthetic oligonucleotide
  misc_feature 1..20: note = Target: SCN10A; (+) strand; PAM type: NRG; PAM sequence: AAG
  source 1..20: mol_type = other DNA
cagtggcctttggaagaagc

SEQ ID NO: 29649 - DNA, 20 bp, synthetic construct
  misc_feature 1..20: note = Description of Artificial Sequence: Synthetic oligonucleotide
  misc_feature 1..20: note = Target: SCN10A; (+) strand; PAM type: NRG; PAM sequence: GAG
  source 1..20: mol_type = other DNA
gtggcctttggaagaagcaa

SEQ ID NO: 29650 - DNA, 20 bp, synthetic construct
  misc_feature 1..20: note = Description of Artificial Sequence: Synthetic oligonucleotide
  misc_feature 1..20: note = Target: SCN10A; (+) strand; PAM type: NRG; PAM sequence: AAG
  source 1..20: mol_type = other DNA
gcctttggaagaagcaagag

SEQ ID NO: 29651 - DNA, 20 bp, synthetic construct
  misc_feature 1..20: note = Description of Artificial Sequence: Synthetic oligonucleotide
  misc_feature 1..20: note = Target: SCN10A; (+) strand; PAM type: NRG; PAM sequence: TGG
  source 1..20: mol_type = other DNA
tttggaagaagcaagagaag

SEQ ID NO: 29652 - DNA, 20 bp, synthetic construct
  misc_feature 1..20: note = Description of Artificial Sequence: Synthetic oligonucleotide
  misc_feature 1..20: note = Target: SCN10A; (+) strand; PAM type: NRG; PAM sequence: GGG
  source 1..20: mol_type = other DNA
ttggaagaagcaagagaagt

SEQ ID NO: 29653 - DNA, 20 bp, synthetic construct
  misc_feature 1..20: note = Description of Artificial Sequence: Synthetic oligonucleotide
  misc_feature 1..20: note = Target: SCN10A; (+) strand; PAM type: NRG; PAM sequence: TAG
  source 1..20: mol_type = other DNA
agcaagagaagtgggttaat

SEQ ID NO: 29654 - DNA, 20 bp, synthetic construct
  misc_feature 1..20: note = Description of Artificial Sequence: Synthetic oligonucleotide
  misc_feature 1..20: note = Target: SCN10A; (+) strand; PAM type: NRG; PAM sequence: CAG
  source 1..20: mol_type = other DNA
ggttaattagtgcaataatt

SEQ ID NO: 29655 - DNA, 20 bp, synthetic construct
  misc_feature 1..20: note = Description of Artificial Sequence: Synthetic oligonucleotide
  misc_feature 1..20: note = Target: SCN10A; (+) strand; PAM type: NRG; PAM sequence: CAG
  source 1..20: mol_type = other DNA
ttagtgcaataattcagact

SEQ ID NO: 29656 - DNA, 20 bp, synthetic construct
  misc_feature 1..20: note = Description of Artificial Sequence: Synthetic oligonucleotide
  misc_feature 1..20: note = Target: SCN10A; (+) strand; PAM type: NRG; PAM sequence: AAG
  source 1..20: mol_type = other DNA
gtgcaataattcagactcag

SEQ ID NO: 29657 - DNA, 20 bp, synthetic construct
  misc_feature 1..20: note = Description of Artificial Sequence: Synthetic oligonucleotide
  misc_feature 1..20: note = Target: SCN10A; (+) strand; PAM type: NRG; PAM sequence: GAG
  source 1..20: mol_type = other DNA
taattcagactcagaagact

SEQ ID NO: 29658 - DNA, 20 bp, synthetic construct
  misc_feature 1..20: note = Description of Artificial Sequence: Synthetic oligonucleotide
  misc_feature 1..20: note = Target: SCN10A; (+) strand; PAM type: NRG; PAM sequence: GAG
  source 1..20: mol_type = other DNA
attcagactcagaagactga

SEQ ID NO: 29659 - DNA, 20 bp, synthetic construct
  misc_feature 1..20: note = Description of Artificial Sequence: Synthetic oligonucleotide
  misc_feature 1..20: note = Target: SCN10A; (+) strand; PAM type: NRG; PAM sequence: TGG
  source 1..20: mol_type = other DNA
ctcagaagactgagagacat

SEQ ID NO: 29660 - DNA, 20 bp, synthetic construct
  misc_feature 1..20: note = Description of Artificial Sequence: Synthetic oligonucleotide
  misc_feature 1..20: note = Target: SCN10A; (+) strand; PAM type: NRG; PAM sequence: GGG
  source 1..20: mol_type = other DNA
tcagaagactgagagacatt

SEQ ID NO: 29661 - DNA, 20 bp, synthetic construct
  misc_feature 1..20: note = Description of Artificial Sequence: Synthetic oligonucleotide
  misc_feature 1..20: note = Target: SCN10A; (+) strand; PAM type: NRG; PAM sequence: CAG
  source 1..20: mol_type = other DNA
gaagactgagagacattggg

SEQ ID NO: 29662 - DNA, 20 bp, synthetic construct
  misc_feature 1..20: note = Description of Artificial Sequence: Synthetic oligonucleotide
  misc_feature 1..20: note = Target: SCN10A; (+) strand; PAM type: NRG; PAM sequence: AAG
  source 1..20: mol_type = other DNA
tgagagacattgggcagctg

SEQ ID NO: 29663 - DNA, 20 bp, synthetic construct
  misc_feature 1..20: note = Description of Artificial Sequence: Synthetic oligonucleotide
  misc_feature 1..20: note = Target: SCN10A; (+) strand; PAM type: NRG; PAM sequence: TGG
  source 1..20: mol_type = other DNA
agacattgggcagctgaaga

SEQ ID NO: 29664 - DNA, 20 bp, synthetic construct
  misc_feature 1..20: note = Description of Artificial Sequence: Synthetic oligonucleotide
  misc_feature 1..20: note = Target: SCN10A; (+) strand; PAM type: NRG; PAM sequence: TAG
  source 1..20: mol_type = other DNA
tgggcagctgaagatggatt

SEQ ID NO: 29665 - DNA, 20 bp, synthetic construct
  misc_feature 1..20: note = Description of Artificial Sequence: Synthetic oligonucleotide
  misc_feature 1..20: note = Target: SCN10A; (+) strand; PAM type: NRG; PAM sequence: CAG
  source 1..20: mol_type = other DNA
cttcttcccttaacctcatt

SEQ ID NO: 29666 - DNA, 20 bp, synthetic construct
  misc_feature 1..20: note = Description of Artificial Sequence: Synthetic oligonucleotide
  misc_feature 1..20: note = Target: SCN10A; (+) strand; PAM type: NRG; PAM sequence: AGG
  source 1..20: mol_type = other DNA
ttcttcccttaacctcattc

SEQ ID NO: 29667 - DNA, 20 bp, synthetic construct
  misc_feature 1..20: note = Description of Artificial Sequence: Synthetic oligonucleotide
  misc_feature 1..20: note = Target: SCN10A; (+) strand; PAM type: NRG; PAM sequence: GGG
  source 1..20: mol_type = other DNA
tcttcccttaacctcattca

SEQ ID NO: 29668 - DNA, 20 bp, synthetic construct
  misc_feature 1..20: note = Description of Artificial Sequence: Synthetic oligonucleotide
  misc_feature 1..20: note = Target: SCN10A; (+) strand; PAM type: NRG; PAM sequence: TGG
  source 1..20: mol_type = other DNA
tcccttaacctcattcaggg

SEQ ID NO: 29669 - DNA, 20 bp, synthetic construct
  misc_feature 1..20: note = Description of Artificial Sequence: Synthetic oligonucleotide
  misc_feature 1..20: note = Target: SCN10A; (+) strand; PAM type: NRG; PAM sequence: GGG
  source 1..20: mol_type = other DNA
cccttaacctcattcagggt

SEQ ID NO: 29670 - DNA, 20 bp, synthetic construct
  misc_feature 1..20: note = Description of Artificial Sequence: Synthetic oligonucleotide
  misc_feature 1..20: note = Target: SCN10A; (+) strand; PAM type: NRG; PAM sequence: CAG
  source 1..20: mol_type = other DNA
acctcattcagggtgggttg

SEQ ID NO: 29671 - DNA, 20 bp, synthetic construct
  misc_feature 1..20: note = Description of Artificial Sequence: Synthetic oligonucleotide
  misc_feature 1..20: note = Target: SCN10A; (+) strand; PAM type: NRG; PAM sequence: GAG
  source 1..20: mol_type = other DNA
cattcagggtgggttgcagt

SEQ ID NO: 29672 - DNA, 20 bp, synthetic construct
  misc_feature 1..20: note = Description of Artificial Sequence: Synthetic oligonucleotide
  misc_feature 1..20: note = Target: SCN10A; (+) strand; PAM type: NRG; PAM sequence: AAG
  source 1..20: mol_type = other DNA
tcagggtgggttgcagtgag

SEQ ID NO: 29673 - DNA, 20 bp, synthetic construct
  misc_feature 1..20: note = Description of Artificial Sequence: Synthetic oligonucleotide
  misc_feature 1..20: note = Target: SCN10A; (+) strand; PAM type: NRG; PAM sequence: TGG
  source 1..20: mol_type = other DNA
ggtgggttgcagtgagaaga

SEQ ID NO: 29674 - DNA, 20 bp, synthetic construct
  misc_feature 1..20: note = Description of Artificial Sequence: Synthetic oligonucleotide
  misc_feature 1..20: note = Target: SCN10A; (+) strand; PAM type: NRG; PAM sequence: GAG
  source 1..20: mol_type = other DNA
gttgcagtgagaagatggat

SEQ ID NO: 29675 - DNA, 20 bp, synthetic construct
  misc_feature 1..20: note = Description of Artificial Sequence: Synthetic oligonucleotide
  misc_feature 1..20: note = Target: SCN10A; (+) strand; PAM type: NRG; PAM sequence: AAG
  source 1..20: mol_type = other DNA
gagaagatggatgagtttac

SEQ ID NO: 29676 - DNA, 20 bp, synthetic construct
  misc_feature 1..20: note = Description of Artificial Sequence: Synthetic oligonucleotide
  misc_feature 1..20: note = Target: SCN10A; (+) strand; PAM type: NRG; PAM sequence: TAG
  source 1..20: mol_type = other DNA
acaagcatactgcactcatt

SEQ ID NO: 29677 - DNA, 20 bp, synthetic construct
  misc_feature 1..20: note = Description of Artificial Sequence: Synthetic oligonucleotide
  misc_feature 1..20: note = Target: SCN10A; (+) strand; PAM type: NRG; PAM sequence: AAG
  source 1..20: mol_type = other DNA
agcatactgcactcatttag

SEQ ID NO: 29678 - DNA, 20 bp, synthetic construct
  misc_feature 1..20: note = Description of Artificial Sequence: Synthetic oligonucleotide
  misc_feature 1..20: note = Target: SCN10A; (+) strand; PAM type: NRG; PAM sequence: GAG
  source 1..20: mol_type = other DNA
ctgcactcatttagaagtgt

SEQ ID NO: 29679 - DNA, 20 bp, synthetic construct
  misc_feature 1..20: note = Description of Artificial Sequence: Synthetic oligonucleotide
  misc_feature 1..20: note = Target: SCN10A; (+) strand; PAM type: NRG; PAM sequence: CAG
  source 1..20: mol_type = other DNA
gtgtattatacttgcacata

SEQ ID NO: 29680 - DNA, 20 bp, synthetic construct
  misc_feature 1..20: note = Description of Artificial Sequence: Synthetic oligonucleotide
  misc_feature 1..20: note = Target: SCN10A; (+) strand; PAM type: NRG; PAM sequence: TAG
  source 1..20: mol_type = other DNA
tacttgcacatacagacttc

SEQ ID NO: 29681 - DNA, 20 bp, synthetic construct
  misc_feature 1..20: note = Description of Artificial Sequence: Synthetic oligonucleotide
  misc_feature 1..20: note = Target: SCN10A; (+) strand; PAM type: NRG; PAM sequence: AAG
  source 1..20: mol_type = other DNA
cacaatttaaatacaattta

SEQ ID NO: 29682 - DNA, 20 bp, synthetic construct
  misc_feature 1..20: note = Description of Artificial Sequence: Synthetic oligonucleotide
  misc_feature 1..20: note = Target: SCN10A; (+) strand; PAM type: NRG; PAM sequence: TGG
  source 1..20: mol_type = other DNA
atacaatttaaagtatgccg

SEQ ID NO: 29683 - DNA, 20 bp, synthetic construct
  misc_feature 1..20: note = Description of Artificial Sequence: Synthetic oligonucleotide
  misc_feature 1..20: note = Target: SCN10A; (+) strand; PAM type: NRG; PAM sequence: AAG
  source 1..20: mol_type = other DNA
atttaaagtatgccgtggtc

SEQ ID NO: 29684 - DNA, 20 bp, synthetic construct
  misc_feature 1..20: note = Description of Artificial Sequence: Synthetic oligonucleotide
  misc_feature 1..20: note = Target: SCN10A; (+) strand; PAM type: NRG; PAM sequence: CAG
  source 1..20: mol_type = other DNA
agtatgccgtggtcaagaac

SEQ ID NO: 29685 - DNA, 20 bp, synthetic construct
  misc_feature 1..20: note = Description of Artificial Sequence: Synthetic oligonucleotide
  misc_feature 1..20: note = Target: SCN10A; (+) strand; PAM type: NRG; PAM sequence: TAG
  source 1..20: mol_type = other DNA
ctaaatccatattcacaaaa

SEQ ID NO: 29686 - DNA, 20 bp, synthetic construct
  misc_feature 1..20: note = Description of Artificial Sequence: Synthetic oligonucleotide
  misc_feature 1..20: note = Target: SCN10A; (+) strand; PAM type: NRG; PAM sequence: AAG
  source 1..20: mol_type = other DNA
aaaatagcttatttgtaaat

SEQ ID NO: 29687 - DNA, 20 bp, synthetic construct
  misc_feature 1..20: note = Description of Artificial Sequence: Synthetic oligonucleotide
  misc_feature 1..20: note = Target: SCN10A; (+) strand; PAM type: NRG; PAM sequence: GAG
  source 1..20: mol_type = other DNA
ttatttgtaaataagcaaat

SEQ ID NO: 29688 - DNA, 20 bp, synthetic construct
  misc_feature 1..20: note = Description of Artificial Sequence: Synthetic oligonucleotide
  misc_feature 1..20: note = Target: SCN10A; (+) strand; PAM type: NRG; PAM sequence: TAG
  source 1..20: mol_type = other DNA
ataagcaaatgagaatctat

SEQ ID NO: 29689 - DNA, 20 bp, synthetic construct
  misc_feature 1..20: note = Description of Artificial Sequence: Synthetic oligonucleotide
  misc_feature 1..20: note = Target: SCN10A; (+) strand; PAM type: NRG; PAM sequence: TAG
  source 1..20: mol_type = other DNA
agaatctattagatacaaaa

SEQ ID NO: 29690 - DNA, 20 bp, synthetic construct
  misc_feature 1..20: note = Description of Artificial Sequence: Synthetic oligonucleotide
  misc_feature 1..20: note = Target: SCN10A; (+) strand; PAM type: NRG; PAM sequence: CGG
  source 1..20: mol_type = other DNA
tttcaaactatttcaatctt

SEQ ID NO: 29691 - DNA, 20 bp, synthetic construct
  misc_feature 1..20: note = Description of Artificial Sequence: Synthetic oligonucleotide
  misc_feature 1..20: note = Target: SCN10A; (+) strand; PAM type: NRG; PAM sequence: GGG
  source 1..20: mol_type = other DNA
ttcaaactatttcaatcttc

SEQ ID NO: 29692 - DNA, 20 bp, synthetic construct
  misc_feature 1..20: note = Description of Artificial Sequence: Synthetic oligonucleotide
  misc_feature 1..20: note = Target: SCN10A; (+) strand; PAM type: NRG; PAM sequence: TAG
  source 1..20: mol_type = other DNA
ctatttcaatcttcgggtcc

SEQ ID NO: 29693 - DNA, 20 bp, synthetic construct
  misc_feature 1..20: note = Description of Artificial Sequence: Synthetic oligonucleotide
  misc_feature 1..20: note = Target: SCN10A; (+) strand; PAM type: NRG; PAM sequence: AAG
  source 1..20: mol_type = other DNA
ttcgggtcctagtgtttgta

SEQ ID NO: 29694 - DNA, 20 bp, synthetic construct
  misc_feature 1..20: note = Description of Artificial Sequence: Synthetic oligonucleotide
  misc_feature 1..20: note = Target: SCN10A; (+) strand; PAM type: NRG; PAM sequence: AGG
  source 1..20: mol_type = other DNA
tcgggtcctagtgtttgtaa

SEQ ID NO: 29695 - DNA, 20 bp, synthetic construct
  misc_feature 1..20: note = Description of Artificial Sequence: Synthetic oligonucleotide
  misc_feature 1..20: note = Target: SCN10A; (+) strand; PAM type: NRG; PAM sequence: AAG
  source 1..20: mol_type = other DNA
cctagtgtttgtaaaggtac

SEQ ID NO: 29696 - DNA, 20 bp, synthetic construct
  misc_feature 1..20: note = Description of Artificial Sequence: Synthetic oligonucleotide
  misc_feature 1..20: note = Target: SCN10A; (+) strand; PAM type: NRG; PAM sequence: AAG
  source 1..20: mol_type = other DNA
aaggtacaagttaatttcaa

SEQ ID NO: 29697 - DNA, 20 bp, synthetic construct
  misc_feature 1..20: note = Description of Artificial Sequence: Synthetic oligonucleotide
  misc_feature 1..20: note = Target: SCN10A; (+) strand; PAM type: NRG; PAM sequence: AAG
  source 1..20: mol_type = other DNA
aaagcccacttttgtttttg

SEQ ID NO: 29698 - DNA, 20 bp, synthetic construct
  misc_feature 1..20: note = Description of Artificial Sequence: Synthetic oligonucleotide
  misc_feature 1..20: note = Target: SCN10A; (+) strand; PAM type: NRG; PAM sequence: CAG
  source 1..20: mol_type = other DNA
gaagctatgatgactacttc

SEQ ID NO: 29699 - DNA, 20 bp, synthetic construct
  misc_feature 1..20: note = Description of Artificial Sequence: Synthetic oligonucleotide
  misc_feature 1..20: note = Target: SCN10A; (+) strand; PAM type: NRG; PAM sequence: TAG
  source 1..20: mol_type = other DNA
tgactacttccagccaatga

SEQ ID NO: 29700 - DNA, 20 bp, synthetic construct
  misc_feature 1..20: note = Description of Artificial Sequence: Synthetic oligonucleotide
  misc_feature 1..20: note = Target: SCN10A; (+) strand; PAM type: NRG; PAM sequence: TGG
  source 1..20: mol_type = other DNA
ctacttccagccaatgatag

SEQ ID NO: 29701 - DNA, 20 bp, synthetic construct
  misc_feature 1..20: note = Description of Artificial Sequence: Synthetic oligonucleotide
  misc_feature 1..20: note = Target: SCN10A; (+) strand; PAM type: NRG; PAM sequence: GAG
  source 1..20: mol_type = other DNA
acttccagccaatgatagtg

SEQ ID NO: 29702 - DNA, 20 bp, synthetic construct
  misc_feature 1..20: note = Description of Artificial Sequence: Synthetic oligonucleotide
  misc_feature 1..20: note = Target: SCN10A; (+) strand; PAM type: NRG; PAM sequence: AAG
  source 1..20: mol_type = other DNA
cagccaatgatagtggagca

SEQ ID NO: 29703 - DNA, 20 bp, synthetic construct
  misc_feature 1..20: note = Description of Artificial Sequence: Synthetic oligonucleotide
  misc_feature 1..20: note = Target: SCN10A; (+) strand; PAM type: NRG; PAM sequence: TGG
  source 1..20: mol_type = other DNA
agcaaaaccttactttctgc

SEQ ID NO: 29704 - DNA, 20 bp, synthetic construct
  misc_feature 1..20: note = Description of Artificial Sequence: Synthetic oligonucleotide
  misc_feature 1..20: note = Target: SCN10A; (+) strand; PAM type: NRG; PAM sequence: GGG
  source 1..20: mol_type = other DNA
gcaaaaccttactttctgct

SEQ ID NO: 29705 - DNA, 20 bp, synthetic construct
  misc_feature 1..20: note = Description of Artificial Sequence: Synthetic oligonucleotide
  misc_feature 1..20: note = Target: SCN10A; (+) strand; PAM type: NRG; PAM sequence: GGG
  source 1..20: mol_type = other DNA
caaaaccttactttctgctg

SEQ ID NO: 29706 - DNA, 20 bp, synthetic construct
  misc_feature 1..20: note = Description of Artificial Sequence: Synthetic oligonucleotide
  misc_feature 1..20: note = Target: SCN10A; (+) strand; PAM type: NRG; PAM sequence: GAG
  source 1..20: mol_type = other DNA
aaaccttactttctgctggg

SEQ ID NO: 29707 - DNA, 20 bp, synthetic construct
  misc_feature 1..20: note = Description of Artificial Sequence: Synthetic oligonucleotide
  misc_feature 1..20: note = Target: SCN10A; (+) strand; PAM type: NRG; PAM sequence: GAG
  source 1..20: mol_type = other DNA
ggggagccatttgtaattat

SEQ ID NO: 29708 - DNA, 20 bp, synthetic construct
  misc_feature 1..20: note = Description of Artificial Sequence: Synthetic oligonucleotide
  misc_feature 1..20: note = Target: SCN10A; (+) strand; PAM type: NRG; PAM sequence: AGG
  source 1..20: mol_type = other DNA
gggagccatttgtaattatg

SEQ ID NO: 29709 - DNA, 20 bp, synthetic construct
  misc_feature 1..20: note = Description of Artificial Sequence: Synthetic oligonucleotide
  misc_feature 1..20: note = Target: SCN10A; (+) strand; PAM type: NRG; PAM sequence: AAG
  source 1..20: mol_type = other DNA
agccatttgtaattatgagg

SEQ ID NO: 29710 - DNA, 20 bp, synthetic construct
  misc_feature 1..20: note = Description of Artificial Sequence: Synthetic oligonucleotide
  misc_feature 1..20: note = Target: SCN10A; (+) strand; PAM type: NRG; PAM sequence: GAG
  source 1..20: mol_type = other DNA
ccatttgtaattatgaggaa

SEQ ID NO: 29711 - DNA, 20 bp, synthetic construct
  misc_feature 1..20: note = Description of Artificial Sequence: Synthetic oligonucleotide
  misc_feature 1..20: note = Target: SCN10A; (+) strand; PAM type: NRG; PAM sequence: AGG
  source 1..20: mol_type = other DNA
catttgtaattatgaggaag

SEQ ID NO: 29712 - DNA, 20 bp, synthetic construct
  misc_feature 1..20: note = Description of Artificial Sequence: Synthetic oligonucleotide
  misc_feature 1..20: note = Target: SCN10A; (+) strand; PAM type: NRG; PAM sequence: TGG
  source 1..20: mol_type = other DNA
ttgtaattatgaggaagagg

SEQ ID NO: 29713 - DNA, 20 bp, synthetic construct
  misc_feature 1..20: note = Description of Artificial Sequence: Synthetic oligonucleotide
  misc_feature 1..20: note = Target: SCN10A; (+) strand; PAM type: NRG; PAM sequence: GGG
  source 1..20: mol_type = other DNA
tgtaattatgaggaagaggt

SEQ ID NO: 29714 - DNA, 20 bp, synthetic construct
  misc_feature 1..20: note = Description of Artificial Sequence: Synthetic oligonucleotide
  misc_feature 1..20: note = Target: SCN10A; (+) strand; PAM type: NRG; PAM sequence: CAG
  source 1..20: mol_type = other DNA
aggaagaggtgggtgtcaat

SEQ ID NO: 29715 - DNA, 20 bp, synthetic construct
  misc_feature 1..20: note = Description of Artificial Sequence: Synthetic oligonucleotide
  misc_feature 1..20: note = Target: SCN10A; (+) strand; PAM type: NRG; PAM sequence: AAG
  source 1..20: mol_type = other DNA
ggtgtcaatcagcaatctct

SEQ ID NO: 29716 - DNA, 20 bp, synthetic construct
  misc_feature 1..20: note = Description of Artificial Sequence: Synthetic oligonucleotide
  misc_feature 1..20: note = Target: SCN10A; (+) strand; PAM type: NRG; PAM sequence: AAG
  source 1..20: mol_type = other DNA
caatcagcaatctctaagac

SEQ ID NO: 29717 - DNA, 20 bp, synthetic construct
  misc_feature 1..20: note = Description of Artificial Sequence: Synthetic oligonucleotide
  misc_feature 1..20: note = Target: SCN10A; (+) strand; PAM type: NRG; PAM sequence: AGG
  source 1..20: mol_type = other DNA
aatcagcaatctctaagaca

SEQ ID NO: 29718 - DNA, 20 bp, synthetic construct
  misc_feature 1..20: note = Description of Artificial Sequence: Synthetic oligonucleotide
  misc_feature 1..20: note = Target: SCN10A; (+) strand; PAM type: NRG; PAM sequence: TGG
  source 1..20: mol_type = other DNA
caatctctaagacaaggctc

SEQ ID NO: 29719 - DNA, 20 bp, synthetic construct
  misc_feature 1..20: note = Description of Artificial Sequence: Synthetic oligonucleotide
  misc_feature 1..20: note = Target: SCN10A; (+) strand; PAM type: NRG; PAM sequence: GAG
  source 1..20: mol_type = other DNA
taagacaaggctctggctgt

SEQ ID NO: 29720 - DNA, 20 bp, synthetic construct
  misc_feature 1..20: note = Description of Artificial Sequence: Synthetic oligonucleotide
  misc_feature 1..20: note = Target: SCN10A; (+) strand; PAM type: NRG; PAM sequence: CGG
  source 1..20: mol_type = other DNA
ctgtgagcattctgtcctga

SEQ ID NO: 29721 - DNA, 20 bp, synthetic construct
  misc_feature 1..20: note = Description of Artificial Sequence: Synthetic oligonucleotide
  misc_feature 1..20: note = Target: SCN10A; (+) strand; PAM type: NRG; PAM sequence: GAG
  source 1..20: mol_type = other DNA
gtgagcattctgtcctgacg

SEQ ID NO: 29722 - DNA, 20 bp, synthetic construct
  misc_feature 1..20: note = Description of Artificial Sequence: Synthetic oligonucleotide
  misc_feature 1..20: note = Target: SCN10A; (+) strand; PAM type: NRG; PAM sequence: AGG
  source 1..20: mol_type = other DNA
tgagcattctgtcctgacgg

SEQ ID NO: 29723 - DNA, 20 bp, synthetic construct
  misc_feature 1..20: note = Description of Artificial Sequence: Synthetic oligonucleotide
  misc_feature 1..20: note = Target: SCN10A; (+) strand; PAM type: NRG; PAM sequence: CAG
  source 1..20: mol_type = other DNA
gcattctgtcctgacggagg

SEQ ID NO: 29724 - DNA, 20 bp, synthetic construct
  misc_feature 1..20: note = Description of Artificial Sequence: Synthetic oligonucleotide
  misc_feature 1..20: note = Target: SCN10A; (+) strand; PAM type: NRG; PAM sequence: TAG
  source 1..20: mol_type = other DNA
tctgtcctgacggaggcagt

SEQ ID NO: 29725 - DNA, 20 bp, synthetic construct
  misc_feature 1..20: note = Description of Artificial Sequence: Synthetic oligonucleotide
  misc_feature 1..20: note = Target: SCN10A; (+) strand; PAM type: NRG; PAM sequence: AGG
  source 1..20: mol_type = other DNA
ctgtcctgacggaggcagtt

SEQ ID NO: 29726 - DNA, 20 bp, synthetic construct
  misc_feature 1..20: note = Description of Artificial Sequence: Synthetic oligonucleotide
  misc_feature 1..20: note = Target: SCN10A; (+) strand; PAM type: NRG; PAM sequence: GGG
  source 1..20: mol_type = other DNA
tgtcctgacggaggcagtta

SEQ ID NO: 29727 - DNA, 20 bp, synthetic construct
  misc_feature 1..20: note = Description of Artificial Sequence: Synthetic oligonucleotide
  misc_feature 1..20: note = Target: SCN10A; (+) strand; PAM type: NRG; PAM sequence: AAG
  source 1..20: mol_type = other DNA
ctgacggaggcagttagggc

SEQ ID NO: 29728 - DNA, 20 bp, synthetic construct
  misc_feature 1..20: note = Description of Artificial Sequence: Synthetic oligonucleotide
  misc_feature 1..20: note = Target: SCN10A; (+) strand; PAM type: NRG; PAM sequence: AGG
  source 1..20: mol_type = other DNA
tgacggaggcagttagggca

SEQ ID NO: 29729 - DNA, 20 bp, synthetic construct
  misc_feature 1..20: note = Description of Artificial Sequence: Synthetic oligonucleotide
  misc_feature 1..20: note = Target: SCN10A; (+) strand; PAM type: NRG; PAM sequence: TGG
  source 1..20: mol_type = other DNA
cggaggcagttagggcaagg

SEQ ID NO: 29730 - DNA, 20 bp, synthetic construct
  misc_feature 1..20: note = Description of Artificial Sequence: Synthetic oligonucleotide
  misc_feature 1..20: note = Target: SCN10A; (+) strand; PAM type: NRG; PAM sequence: GAG
  source 1..20: mol_type = other DNA
gaggcagttagggcaaggtg

SEQ ID NO: 29731 - DNA, 20 bp, synthetic construct
  misc_feature 1..20: note = Description of Artificial Sequence: Synthetic oligonucleotide
  misc_feature 1..20: note = Target: SCN10A; (+) strand; PAM type: NRG; PAM sequence: AGG
  source 1..20: mol_type = other DNA
aggcagttagggcaaggtgg

SEQ ID NO: 29732 - DNA, 20 bp, synthetic construct
  misc_feature 1..20: note = Description of Artificial Sequence: Synthetic oligonucleotide
  misc_feature 1..20: note = Target: SCN10A; (+) strand; PAM type: NRG; PAM sequence: CAG
  source 1..20: mol_type = other DNA
tagggcaaggtggaggctga

SEQ ID NO: 29733 - DNA, 20 bp, synthetic construct
  misc_feature 1..20: note = Description of Artificial Sequence: Synthetic oligonucleotide
  misc_feature 1..20: note = Target: SCN10A; (+) strand; PAM type: NRG; PAM sequence: TGG
  source 1..20: mol_type = other DNA
ggcaaggtggaggctgacag

SEQ ID NO: 29734 - DNA, 20 bp, synthetic construct
  misc_feature 1..20: note = Description of Artificial Sequence: Synthetic oligonucleotide
  misc_feature 1..20: note = Target: SCN10A; (+) strand; PAM type: NRG; PAM sequence: TGG
  source 1..20: mol_type = other DNA
aaggtggaggctgacagtgg

SEQ ID NO: 29735 - DNA, 20 bp, synthetic construct
  misc_feature 1..20: note = Description of Artificial Sequence: Synthetic oligonucleotide
  misc_feature 1..20: note = Target: SCN10A; (+) strand; PAM type: NRG; PAM sequence: AAG
  source 1..20: mol_type = other DNA
ggaggctgacagtggtggat

SEQ ID NO: 29736 - DNA, 20 bp, synthetic construct
  misc_feature 1..20: note = Description of Artificial Sequence: Synthetic oligonucleotide
  misc_feature 1..20: note = Target: SCN10A; (+) strand; PAM type: NRG; PAM sequence: AGG
  source 1..20: mol_type = other DNA
gaggctgacagtggtggata

SEQ ID NO: 29737 - DNA, 20 bp, synthetic construct
  misc_feature 1..20: note = Description of Artificial Sequence: Synthetic oligonucleotide
  misc_feature 1..20: note = Target: SCN10A; (+) strand; PAM type: NRG; PAM sequence: AAG
  source 1..20: mol_type = other DNA
ctgacagtggtggataagga

SEQ ID NO: 29738 - DNA, 20 bp, synthetic construct
  misc_feature 1..20: note = Description of Artificial Sequence: Synthetic oligonucleotide
  misc_feature 1..20: note = Target: SCN10A; (+) strand; PAM type: NRG; PAM sequence: AGG
  source 1..20: mol_type = other DNA
tgacagtggtggataaggaa

SEQ ID NO: 29739 - DNA, 20 bp, synthetic construct
  misc_feature 1..20: note = Description of Artificial Sequence: Synthetic oligonucleotide
  misc_feature 1..20: note = Target: SCN10A; (+) strand; PAM type: NRG; PAM sequence: GGG
  source 1..20: mol_type = other DNA
gacagtggtggataaggaaa

SEQ ID NO: 29740 - DNA, 20 bp, synthetic construct
  misc_feature 1..20: note = Description of Artificial Sequence: Synthetic oligonucleotide
  misc_feature 1..20: note = Target: SCN10A; (+) strand; PAM type: NRG; PAM sequence: GGG
  source 1..20: mol_type = other DNA
acagtggtggataaggaaag

SEQ ID NO: 29741 - DNA, 20 bp, synthetic construct
  misc_feature 1..20: note = Description of Artificial Sequence: Synthetic oligonucleotide
  misc_feature 1..20: note = Target: SCN10A; (+) strand; PAM type: NRG; PAM sequence: TGG
  source 1..20: mol_type = other DNA
gtggtggataaggaaagggg

SEQ ID NO: 29742 - DNA, 20 bp, synthetic construct
  misc_feature 1..20: note = Description of Artificial Sequence: Synthetic oligonucleotide
  misc_feature 1..20: note = Target: SCN10A; (+) strand; PAM type: NRG; PAM sequence: TGG
  source 1..20: mol_type = other DNA
tggataaggaaaggggtgga

SEQ ID NO: 29743 - DNA, 20 bp, synthetic construct
  misc_feature 1..20: note = Description of Artificial Sequence: Synthetic oligonucleotide
  misc_feature 1..20: note = Target: SCN10A; (+) strand; PAM type: NRG; PAM sequence: AAG
  source 1..20: mol_type = other DNA
ataaggaaaggggtggatgg

SEQ ID NO: 29744 - DNA, 20 bp, synthetic construct
  misc_feature 1..20: note = Description of Artificial Sequence: Synthetic oligonucleotide
  misc_feature 1..20: note = Target: SCN10A; (+) strand; PAM type: NRG; PAM sequence: AGG
  source 1..20: mol_type = other DNA
taaggaaaggggtggatgga

SEQ ID NO: 29745 - DNA, 20 bp, synthetic construct
  misc_feature 1..20: note = Description of Artificial Sequence: Synthetic oligonucleotide
  misc_feature 1..20: note = Target: SCN10A; (+) strand; PAM type: NRG; PAM sequence: GGG
  source 1..20: mol_type = other DNA
aaggaaaggggtggatggaa

SEQ ID NO: 29746 - DNA, 20 bp, synthetic construct
  misc_feature 1..20: note = Description of Artificial Sequence: Synthetic oligonucleotide
  misc_feature 1..20: note = Target: SCN10A; (+) strand; PAM type: NRG; PAM sequence: CAG
  source 1..20: mol_type = other DNA
ggatggaagggaaaaattta

SEQ ID NO: 29747 - DNA, 20 bp, synthetic construct
  misc_feature 1..20: note = Description of Artificial Sequence: Synthetic oligonucleotide
  misc_feature 1..20: note = Target: SCN10A; (+) strand; PAM type: NRG; PAM sequence: AGG
  source 1..20: mol_type = other DNA
gatggaagggaaaaatttac

SEQ ID NO: 29748 - DNA, 20 bp, synthetic construct
  misc_feature 1..20: note = Description of Artificial Sequence: Synthetic oligonucleotide
  misc_feature 1..20: note = Target: SCN10A; (+) strand; PAM type: NRG; PAM sequence: AAG
  source 1..20: mol_type = other DNA
caggacctgatgattgcatt

SEQ ID NO: 29749 - DNA, 20 bp, synthetic construct
  misc_feature 1..20: note = Description of Artificial Sequence: Synthetic oligonucleotide
  misc_feature 1..20: note = Target: SCN10A; (+) strand; PAM type: NRG; PAM sequence: TAG
  source 1..20: mol_type = other DNA
gacctgatgattgcattaag

SEQ ID NO: 29750 - DNA, 20 bp, synthetic construct
  misc_feature 1..20: note = Description of Artificial Sequence: Synthetic oligonucleotide
  misc_feature 1..20: note = Target: SCN10A; (+) strand; PAM type: NRG; PAM sequence: AGG
  source 1..20: mol_type = other DNA
acctgatgattgcattaagt

SEQ ID NO: 29751 - DNA, 20 bp, synthetic construct
  misc_feature 1..20: note = Description of Artificial Sequence: Synthetic oligonucleotide
  misc_feature 1..20: note = Target: SCN10A; (+) strand; PAM type: NRG; PAM sequence: GAG
  source 1..20: mol_type = other DNA
ctgatgattgcattaagtag

SEQ ID NO: 29752 - DNA, 20 bp, synthetic construct
  misc_feature 1..20: note = Description of Artificial Sequence: Synthetic oligonucleotide
  misc_feature 1..20: note = Target: SCN10A; (+) strand; PAM type: NRG; PAM sequence: GAG
  source 1..20: mol_type = other DNA
gatgattgcattaagtagga

SEQ ID NO: 29753 - DNA, 20 bp, synthetic construct
  misc_feature 1..20: note = Description of Artificial Sequence: Synthetic oligonucleotide
  misc_feature 1..20: note = Target: SCN10A; (+) strand; PAM type: NRG; PAM sequence: AAG
  source 1..20: mol_type = other DNA
gattgcattaagtaggagag

SEQ ID NO: 29754 - DNA, 20 bp, synthetic construct
  misc_feature 1..20: note = Description of Artificial Sequence: Synthetic oligonucleotide
  misc_feature 1..20: note = Target: SCN10A; (+) strand; PAM type: NRG; PAM sequence: AAG
  source 1..20: mol_type = other DNA
tgcattaagtaggagagaag

SEQ ID NO: 29755 - DNA, 20 bp, synthetic construct
  misc_feature 1..20: note = Description of Artificial Sequence: Synthetic oligonucleotide
  misc_feature 1..20: note = Target: SCN10A; (+) strand; PAM type: NRG; PAM sequence: CAG
  source 1..20: mol_type = other DNA
gtaggagagaagaagcattc

SEQ ID NO: 29756 - DNA, 20 bp, synthetic construct
  misc_feature 1..20: note = Description of Artificial Sequence: Synthetic oligonucleotide
  misc_feature 1..20: note = Target: SCN10A; (+) strand; PAM type: NRG; PAM sequence: TGG
  source 1..20: mol_type = other DNA
ggagagaagaagcattccag

SEQ ID NO: 29757 - DNA, 20 bp, synthetic construct
  misc_feature 1..20: note = Description of Artificial Sequence: Synthetic oligonucleotide
  misc_feature 1..20: note = Target: SCN10A; (+) strand; PAM type: NRG; PAM sequence: GGG
  source 1..20: mol_type = other DNA
gagagaagaagcattccagt

SEQ ID NO: 29758 - DNA, 20 bp, synthetic construct
  misc_feature 1..20: note = Description of Artificial Sequence: Synthetic oligonucleotide
  misc_feature 1..20: note = Target: SCN10A; (+) strand; PAM type: NRG; PAM sequence: TGG
  source 1..20: mol_type = other DNA
agaagaagcattccagtggg

SEQ ID NO: 29759 - DNA, 20 bp, synthetic construct
  misc_feature 1..20: note = Description of Artificial Sequence: Synthetic oligonucleotide
  misc_feature 1..20: note = Target: SCN10A; (+) strand; PAM type: NRG; PAM sequence: CAG
  source 1..20: mol_type = other DNA
agaagcattccagtgggtgg

SEQ ID NO: 29760 - DNA, 20 bp, synthetic construct
  misc_feature 1..20: note = Description of Artificial Sequence: Synthetic oligonucleotide
  misc_feature 1..20: note = Target: SCN10A; (+) strand; PAM type: NRG; PAM sequence: GAG
  source 1..20: mol_type = other DNA
cattccagtgggtggcagct

SEQ ID NO: 29761 - DNA, 20 bp, synthetic construct
  misc_feature 1..20: note = Description of Artificial Sequence: Synthetic oligonucleotide
  misc_feature 1..20: note = Target: SCN10A; (+) strand; PAM type: NRG; PAM sequence: AGG
  source 1..20: mol_type = other DNA
attccagtgggtggcagctg

SEQ ID NO: 29762 - DNA, 20 bp, synthetic construct
  misc_feature 1..20: note = Description of Artificial Sequence: Synthetic oligonucleotide
  misc_feature 1..20: note = Target: SCN10A; (+) strand; PAM type: NRG; PAM sequence: GAG
  source 1..20: mol_type = other DNA
tgggtggcagctgaggtaat

SEQ ID NO: 29763 - DNA, 20 bp, synthetic construct
  misc_feature 1..20: note = Description of Artificial Sequence: Synthetic oligonucleotide
  misc_feature 1..20: note = Target: SCN10A; (+) strand; PAM type: NRG; PAM sequence: TGG
  source 1..20: mol_type = other DNA
tgagctgatgatgtcactca

SEQ ID NO: 29764 - DNA, 20 bp, synthetic construct
  misc_feature 1..20: note = Description of Artificial Sequence: Synthetic oligonucleotide
  misc_feature 1..20: note = Target: SCN10A; (+) strand; PAM type: NRG; PAM sequence: GAG
  source 1..20: mol_type = other DNA
agctgatgatgtcactcatg

SEQ ID NO: 29765 - DNA, 20 bp, synthetic construct
  misc_feature 1..20: note = Description of Artificial Sequence: Synthetic oligonucleotide
  misc_feature 1..20: note = Target: SCN10A; (+) strand; PAM type: NRG; PAM sequence: TAG
  source 1..20: mol_type = other DNA
tgatgtcactcatggagtat

SEQ ID NO: 29766 - DNA, 20 bp, synthetic construct
  misc_feature 1..20: note = Description of Artificial Sequence: Synthetic oligonucleotide
  misc_feature 1..20: note = Target: SCN10A; (+) strand; PAM type: NRG; PAM sequence: GAG
  source 1..20: mol_type = other DNA
atgtcactcatggagtatta

SEQ ID NO: 29767 - DNA, 20 bp, synthetic construct
  misc_feature 1..20: note = Description of Artificial Sequence: Synthetic oligonucleotide
  misc_feature 1..20: note = Target: SCN10A; (+) strand; PAM type: NRG; PAM sequence: AGG
  source 1..20: mol_type = other DNA
tgtcactcatggagtattag

SEQ ID NO: 29768 - DNA, 20 bp, synthetic construct
  misc_feature 1..20: note = Description of Artificial Sequence: Synthetic oligonucleotide
  misc_feature 1..20: note = Target: SCN10A; (+) strand; PAM type: NRG; PAM sequence: AAG
  source 1..20: mol_type = other DNA
actcatggagtattagagga

SEQ ID NO: 29769 - DNA, 20 bp, synthetic construct
  misc_feature 1..20: note = Description of Artificial Sequence: Synthetic oligonucleotide
  misc_feature 1..20: note = Target: SCN10A; (+) strand; PAM type: NRG; PAM sequence: TGG
  source 1..20: mol_type = other DNA
gaggaaagactcatttgtca

SEQ ID NO: 29770 - DNA, 20 bp, synthetic construct
  misc_feature 1..20: note = Description of Artificial Sequence: Synthetic oligonucleotide
  misc_feature 1..20: note = Target: SCN10A; (+) strand; PAM type: NRG; PAM sequence: AAG
  source 1..20: mol_type = other DNA
aaagactcatttgtcatgga

SEQ ID NO: 29771 - DNA, 20 bp, synthetic construct
  misc_feature 1..20: note = Description of Artificial Sequence: Synthetic oligonucleotide
  misc_feature 1..20: note = Target: SCN10A; (+) strand; PAM type: NRG; PAM sequence: CAG
  source 1..20: mol_type = other DNA
actcatttgtcatggaaaga

SEQ ID NO: 29772 - DNA, 20 bp, synthetic construct
  misc_feature 1..20: note = Description of Artificial Sequence: Synthetic oligonucleotide
  misc_feature 1..20: note = Target: SCN10A; (+) strand; PAM type: NRG; PAM sequence: GAG
  source 1..20: mol_type = other DNA
tcatttgtcatggaaagaca

SEQ ID NO: 29773 - DNA, 20 bp, synthetic construct
  misc_feature 1..20: note = Description of Artificial Sequence: Synthetic oligonucleotide
  misc_feature 1..20: note = Target: SCN10A; (+) strand; PAM type: NRG; PAM sequence: TGG
  source 1..20: mol_type = other DNA
tcatggaaagacagagaact

SEQ ID NO: 29774 - DNA, 20 bp, synthetic construct
  misc_feature 1..20: note = Description of Artificial Sequence: Synthetic oligonucleotide
  misc_feature 1..20: note = Target: SCN10A; (+) strand; PAM type: NRG; PAM sequence: GGG
  source 1..20: mol_type = other DNA
catggaaagacagagaactt

SEQ ID NO: 29775 - DNA, 20 bp, synthetic construct
  misc_feature 1..20: note = Description of Artificial Sequence: Synthetic oligonucleotide
  misc_feature 1..20: note = Target: SCN10A; (+) strand; PAM type: NRG; PAM sequence: TGG
  source 1..20: mol_type = other DNA
acagagaacttgggatgttc

SEQ ID NO: 29776 - DNA, 20 bp, synthetic construct
  misc_feature 1..20: note = Description of Artificial Sequence: Synthetic oligonucleotide
  misc_feature 1..20: note = Target: SCN10A; (+) strand; PAM type: NRG; PAM sequence: GAG
  source 1..20: mol_type = other DNA
agagaacttgggatgttctg

SEQ ID NO: 29777 - DNA, 20 bp, synthetic construct
  misc_feature 1..20: note = Description of Artificial Sequence: Synthetic oligonucleotide
  misc_feature 1..20: note = Target: SCN10A; (+) strand; PAM type: NRG; PAM sequence: TGG
  source 1..20: mol_type = other DNA
ttgggatgttctggagatgt

SEQ ID NO: 29778 - DNA, 20 bp, synthetic construct
  misc_feature 1..20: note = Description of Artificial Sequence: Synthetic oligonucleotide
  misc_feature 1..20: note = Target: SCN10A; (+) strand; PAM type: NRG; PAM sequence: AAG
  source 1..20: mol_type = other DNA
gttctggagatgttggcaat

SEQ ID NO: 29779 - DNA, 20 bp, synthetic construct
  misc_feature 1..20: note = Description of Artificial Sequence: Synthetic oligonucleotide
  misc_feature 1..20: note = Target: SCN10A; (+) strand; PAM type: NRG; PAM sequence: GAG
  source 1..20: mol_type = other DNA
tctggagatgttggcaataa

SEQ ID NO: 29780 - DNA, 20 bp, synthetic construct
  misc_feature 1..20: note = Description of Artificial Sequence: Synthetic oligonucleotide
  misc_feature 1..20: note = Target: SCN10A; (+) strand; PAM type: NRG; PAM sequence: AGG
  source 1..20: mol_type = other DNA
ctggagatgttggcaataag

SEQ ID NO: 29781 - DNA, 20 bp, synthetic construct
  misc_feature 1..20: note = Description of Artificial Sequence: Synthetic oligonucleotide
  misc_feature 1..20: note = Target: SCN10A; (+) strand; PAM type: NRG; PAM sequence: CAG
  source 1..20: mol_type = other DNA
gagatgttggcaataagagg

SEQ ID NO: 29782 - DNA, 20 bp, synthetic construct
  misc_feature 1..20: note = Description of Artificial Sequence: Synthetic oligonucleotide
  misc_feature 1..20: note = Target: SCN10A; (+) strand; PAM type: NRG; PAM sequence: GAG
  source 1..20: mol_type = other DNA
gatgttggcaataagaggca

SEQ ID NO: 29783 - DNA, 20 bp, synthetic construct
  misc_feature 1..20: note = Description of Artificial Sequence: Synthetic oligonucleotide
  misc_feature 1..20: note = Target: SCN10A; (+) strand; PAM type: NRG; PAM sequence: TGG
  source 1..20: mol_type = other DNA
ttggcaataagaggcagagt

SEQ ID NO: 29784 - DNA, 20 bp, synthetic construct
  misc_feature 1..20: note = Description of Artificial Sequence: Synthetic oligonucleotide
  misc_feature 1..20: note = Target: SCN10A; (+) strand; PAM type: NRG; PAM sequence: GGG
  source 1..20: mol_type = other DNA
tggcaataagaggcagagtt

SEQ ID NO: 29785 - DNA, 20 bp, synthetic construct
  misc_feature 1..20: note = Description of Artificial Sequence: Synthetic oligonucleotide
  misc_feature 1..20: note = Target: SCN10A; (+) strand; PAM type: NRG; PAM sequence: GAG
  source 1..20: mol_type = other DNA
agaggcagagttgggtgatt

SEQ ID NO: 29786 - DNA, 20 bp, synthetic construct
  misc_feature 1..20: note = Description of Artificial Sequence: Synthetic oligonucleotide
  misc_feature 1..20: note = Target: SCN10A; (+) strand; PAM type: NRG; PAM sequence: TAG
  source 1..20: mol_type = other DNA
gagttgggtgattgagataa

SEQ ID NO: 29787 - DNA, 20 bp, synthetic construct
  misc_feature 1..20: note = Description of Artificial Sequence: Synthetic oligonucleotide
  misc_feature 1..20: note = Target: SCN10A; (+) strand; PAM type: NRG; PAM sequence: TGG
  source 1..20: mol_type = other DNA
attgagataatagatgcttg

SEQ ID NO: 29788 - DNA, 20 bp, synthetic construct
  misc_feature 1..20: note = Description of Artificial Sequence: Synthetic oligonucleotide
  misc_feature 1..20: note = Target: SCN10A; (+) strand; PAM type: NRG; PAM sequence: GAG
  source 1..20: mol_type = other DNA
tgagataatagatgcttgtg

SEQ ID NO: 29789 - DNA, 20 bp, synthetic construct
  misc_feature 1..20: note = Description of Artificial Sequence: Synthetic oligonucleotide
  misc_feature 1..20: note = Target: SCN10A; (+) strand; PAM type: NRG; PAM sequence: CAG
  source 1..20: mol_type = other DNA
atgcttgtggagcgatgatt

SEQ ID NO: 29790 - DNA, 20 bp, synthetic construct
  misc_feature 1..20: note = Description of Artificial Sequence: Synthetic oligonucleotide
  misc_feature 1..20: note = Target: SCN10A; (+) strand; PAM type: NRG; PAM sequence: AGG
  source 1..20: mol_type = other DNA
tgcttgtggagcgatgattc

SEQ ID NO: 29791 - DNA, 20 bp, synthetic construct
  misc_feature 1..20: note = Description of Artificial Sequence: Synthetic oligonucleotide
  misc_feature 1..20: note = Target: SCN10A; (+) strand; PAM type: NRG; PAM sequence: AAG
  source 1..20: mol_type = other DNA
tgattcaggattacttcact

SEQ ID NO: 29792 - DNA, 20 bp, synthetic construct
  misc_feature 1..20: note = Description of Artificial Sequence: Synthetic oligonucleotide
  misc_feature 1..20: note = Target: SCN10A; (+) strand; PAM type: NRG; PAM sequence: GAG
  source 1..20: mol_type = other DNA
attcaggattacttcactaa

SEQ ID NO: 29793 - DNA, 20 bp, synthetic construct
  misc_feature 1..20: note = Description of Artificial Sequence: Synthetic oligonucleotide
  misc_feature 1..20: note = Target: SCN10A; (+) strand; PAM type: NRG; PAM sequence: AAG
  source 1..20: mol_type = other DNA
ggattacttcactaagagca

SEQ ID NO: 29794 - DNA, 20 bp, synthetic construct
  misc_feature 1..20: note = Description of Artificial Sequence: Synthetic oligonucleotide
  misc_feature 1..20: note = Target: SCN10A; (+) strand; PAM type: NRG; PAM sequence: AGG
  source 1..20: mol_type = other DNA
gattacttcactaagagcaa

SEQ ID NO: 29795 - DNA, 20 bp, synthetic construct
  misc_feature 1..20: note = Description of Artificial Sequence: Synthetic oligonucleotide
  misc_feature 1..20: note = Target: SCN10A; (+) strand; PAM type: NRG; PAM sequence: GGG
  source 1..20: mol_type = other DNA
attacttcactaagagcaaa

SEQ ID NO: 29796 - DNA, 20 bp, synthetic construct
  misc_feature 1..20: note = Description of Artificial Sequence: Synthetic oligonucleotide
  misc_feature 1..20: note = Target: SCN10A; (+) strand; PAM type: NRG; PAM sequence: GGG
  source 1..20: mol_type = other DNA
ttacttcactaagagcaaag

SEQ ID NO: 29797 - DNA, 20 bp, synthetic construct
  misc_feature 1..20: note = Description of Artificial Sequence: Synthetic oligonucleotide
  misc_feature 1..20: note = Target: SCN10A; (+) strand; PAM type: NRG; PAM sequence: GGG
  source 1..20: mol_type = other DNA
tacttcactaagagcaaagg

SEQ ID NO: 29798 - DNA, 20 bp, synthetic construct
  misc_feature 1..20: note = Description of Artificial Sequence: Synthetic oligonucleotide
  misc_feature 1..20: note = Target: SCN10A; (+) strand; PAM type: NRG; PAM sequence: GAG
  source 1..20: mol_type = other DNA
tcactaagagcaaagggggt

SEQ ID NO: 29799 - DNA, 20 bp, synthetic construct
  misc_feature 1..20: note = Description of Artificial Sequence: Synthetic oligonucleotide
  misc_feature 1..20: note = Target: SCN10A; (+) strand; PAM type: NRG; PAM sequence: AGG
  source 1..20: mol_type = other DNA
cactaagagcaaagggggtg

SEQ ID NO: 29800 - DNA, 20 bp, synthetic construct
  misc_feature 1..20: note = Description of Artificial Sequence: Synthetic oligonucleotide
  misc_feature 1..20: note = Target: SCN10A; (+) strand; PAM type: NRG; PAM sequence: TGG
  source 1..20: mol_type = other DNA
agagcaaagggggtgaggtc

SEQ ID NO: 29801 - DNA, 20 bp, synthetic construct
  misc_feature 1..20: note = Description of Artificial Sequence: Synthetic oligonucleotide
  misc_feature 1..20: note = Target: SCN10A; (+) strand; PAM type: NRG; PAM sequence: GGG
  source 1..20: mol_type = other DNA
gagcaaagggggtgaggtct

SEQ ID NO: 29802 - DNA, 20 bp, synthetic construct
  misc_feature 1..20: note = Description of Artificial Sequence: Synthetic oligonucleotide
  misc_feature 1..20: note = Target: SCN10A; (+) strand; PAM type: NRG; PAM sequence: TGG
  source 1..20: mol_type = other DNA
agggggtgaggtctgggtcc

SEQ ID NO: 29803 - DNA, 20 bp, synthetic construct
  misc_feature 1..20: note = Description of Artificial Sequence: Synthetic oligonucleotide
  misc_feature 1..20: note = Target: SCN10A; (+) strand; PAM type: NRG; PAM sequence: TGG
  source 1..20: mol_type = other DNA
gggtgaggtctgggtcctgg

SEQ ID NO: 29804 - DNA, 20 bp, synthetic construct
  misc_feature 1..20: note = Description of Artificial Sequence: Synthetic oligonucleotide
  misc_feature 1..20: note = Target: SCN10A; (+) strand; PAM type: NRG; PAM sequence: TGG
  source 1..20: mol_type = other DNA
cctggtggctgtaatattta

SEQ ID NO: 29805 - DNA, 20 bp, synthetic construct
  misc_feature 1..20: note = Description of Artificial Sequence: Synthetic oligonucleotide
  misc_feature 1..20: note = Target: SCN10A; (+) strand; PAM type: NRG; PAM sequence: GGG
  source 1..20: mol_type = other DNA
ctggtggctgtaatatttat

SEQ ID NO: 29806 - DNA, 20 bp, synthetic construct
  misc_feature 1..20: note = Description of Artificial Sequence: Synthetic oligonucleotide
  misc_feature 1..20: note = Target: SCN10A; (+) strand; PAM type: NRG; PAM sequence: AAG
  source 1..20: mol_type = other DNA
ctgtaatatttatgggtgac

SEQ ID NO: 29807 - DNA, 20 bp, synthetic construct
  misc_feature 1..20: note = Description of Artificial Sequence: Synthetic oligonucleotide
  misc_feature 1..20: note = Target: SCN10A; (+) strand; PAM type: NRG; PAM sequence: AGG
  source 1..20: mol_type = other DNA
tgtaatatttatgggtgaca

SEQ ID NO: 29808 - DNA, 20 bp, synthetic construct
  misc_feature 1..20: note = Description of Artificial Sequence: Synthetic oligonucleotide
  misc_feature 1..20: note = Target: SCN10A; (+) strand; PAM type: NRG; PAM sequence: GGG
  source 1..20: mol_type = other DNA
gtaatatttatgggtgacaa

SEQ ID NO: 29809 - DNA, 20 bp, synthetic construct
  misc_feature 1..20: note = Description of Artificial Sequence: Synthetic oligonucleotide
  misc_feature 1..20: note = Target: SCN10A; (+) strand; PAM type: NRG; PAM sequence: AAG
  source 1..20: mol_type = other DNA
atatttatgggtgacaaggg

SEQ ID NO: 29810 - DNA, 20 bp, synthetic construct
  misc_feature 1..20: note = Description of Artificial Sequence: Synthetic oligonucleotide
  misc_feature 1..20: note = Target: SCN10A; (+) strand; PAM type: NRG; PAM sequence: TGG
  source 1..20: mol_type = other DNA
ttatgggtgacaagggaaga

SEQ ID NO: 29811 - DNA, 20 bp, synthetic construct
  misc_feature 1..20: note = Description of Artificial Sequence: Synthetic oligonucleotide
  misc_feature 1..20: note = Target: SCN10A; (+) strand; PAM type: NRG; PAM sequence: GGG
  source 1..20: mol_type = other DNA
tatgggtgacaagggaagat

SEQ ID NO: 29812 - DNA, 20 bp, synthetic construct
  misc_feature 1..20: note = Description of Artificial Sequence: Synthetic oligonucleotide
  misc_feature 1..20: note = Target: SCN10A; (+) strand; PAM type: NRG; PAM sequence: AAG
  source 1..20: mol_type = other DNA
agggaagatgggcccacaaa

SEQ ID NO: 29813 - DNA, 20 bp, synthetic construct
  misc_feature 1..20: note = Description of Artificial Sequence: Synthetic oligonucleotide
  misc_feature 1..20: note = Target: SCN10A; (+) strand; PAM type: NRG; PAM sequence: AAG
  source 1..20: mol_type = other DNA
gggcccacaaaaagacttga

SEQ ID NO: 29814 - DNA, 20 bp, synthetic construct
  misc_feature 1..20: note = Description of Artificial Sequence: Synthetic oligonucleotide
  misc_feature 1..20: note = Target: SCN10A; (+) strand; PAM type: NRG; PAM sequence: GAG
  source 1..20: mol_type = other DNA
gcccacaaaaagacttgaaa

SEQ ID NO: 29815 - DNA, 20 bp, synthetic construct
  misc_feature 1..20: note = Description of Artificial Sequence: Synthetic oligonucleotide
  misc_feature 1..20: note = Target: SCN10A; (+) strand; PAM type: NRG; PAM sequence: AAG
  source 1..20: mol_type = other DNA
aaaagacttgaaagagaact

SEQ ID NO: 29816 - DNA, 20 bp, synthetic construct
  misc_feature 1..20: note = Description of Artificial Sequence: Synthetic oligonucleotide
  misc_feature 1..20: note = Target: SCN10A; (+) strand; PAM type: NRG; PAM sequence: GAG
  source 1..20: mol_type = other DNA
aagacttgaaagagaactaa

SEQ ID NO: 29817 - DNA, 20 bp, synthetic construct
  misc_feature 1..20: note = Description of Artificial Sequence: Synthetic oligonucleotide
  misc_feature 1..20: note = Target: SCN10A; (+) strand; PAM type: NRG; PAM sequence: GAG
  source 1..20: mol_type = other DNA
gacttgaaagagaactaaga

SEQ ID NO: 29818 - DNA, 20 bp, synthetic construct
  misc_feature 1..20: note = Description of Artificial Sequence: Synthetic oligonucleotide
  misc_feature 1..20: note = Target: SCN10A; (+) strand; PAM type: NRG; PAM sequence: TAG
  source 1..20: mol_type = other DNA
tgaaagagaactaagagagt

SEQ ID NO: 29819 - DNA, 20 bp, synthetic construct
  misc_feature 1..20: note = Description of Artificial Sequence: Synthetic oligonucleotide
  misc_feature 1..20: note = Target: SCN10A; (+) strand; PAM type: NRG; PAM sequence: AGG
  source 1..20: mol_type = other DNA
gaaagagaactaagagagtt

SEQ ID NO: 29820 - DNA, 20 bp, synthetic construct
  misc_feature 1..20: note = Description of Artificial Sequence: Synthetic oligonucleotide
  misc_feature 1..20: note = Target: SCN10A; (+) strand; PAM type: NRG; PAM sequence: CAG
  source 1..20: mol_type = other DNA
actaagagagttaggacatg

SEQ ID NO: 29821 - DNA, 20 bp, synthetic construct
  misc_feature 1..20: note = Description of Artificial Sequence: Synthetic oligonucleotide
  misc_feature 1..20: note = Target: SCN10A; (+) strand; PAM type: NRG; PAM sequence: AAG
  source 1..20: mol_type = other DNA
taggacatgcagcaccacca

SEQ ID NO: 29822 - DNA, 20 bp, synthetic construct
  misc_feature 1..20: note = Description of Artificial Sequence: Synthetic oligonucleotide
  misc_feature 1..20: note = Target: SCN10A; (+) strand; PAM type: NRG; PAM sequence: CAG
  source 1..20: mol_type = other DNA
acatgcagcaccaccaaagt

SEQ ID NO: 29823 - DNA, 20 bp, synthetic construct
  misc_feature 1..20: note = Description of Artificial Sequence: Synthetic oligonucleotide
  misc_feature 1..20: note = Target: SCN10A; (+) strand; PAM type: NRG; PAM sequence: GAG
  source 1..20: mol_type = other DNA
atgcagcaccaccaaagtca

SEQ ID NO: 29824 - DNA, 20 bp, synthetic construct
  misc_feature 1..20: note = Description of Artificial Sequence: Synthetic oligonucleotide
  misc_feature 1..20: note = Target: SCN10A; (+) strand; PAM type: NRG; PAM sequence: CAG
  source 1..20: mol_type = other DNA
cagcaccaccaaagtcagag

SEQ ID NO: 29825 - DNA, 20 bp, synthetic construct
  misc_feature 1..20: note = Description of Artificial Sequence: Synthetic oligonucleotide
  misc_feature 1..20: note = Target: SCN10A; (+) strand; PAM type: NRG; PAM sequence: AGG
  source 1..20: mol_type = other DNA
agcaccaccaaagtcagagc

SEQ ID NO: 29826 - DNA, 20 bp, synthetic construct
  misc_feature 1..20: note = Description of Artificial Sequence: Synthetic oligonucleotide
  misc_feature 1..20: note = Target: SCN10A; (+) strand; PAM type: NRG; PAM sequence: AAG
  source 1..20: mol_type = other DNA
accaccaaagtcagagcagg

SEQ ID NO: 29827 - DNA, 20 bp, synthetic construct
  misc_feature 1..20: note = Description of Artificial Sequence: Synthetic oligonucleotide
  misc_feature 1..20: note = Target: SCN10A; (+) strand; PAM type: NRG; PAM sequence: AAG
  source 1..20: mol_type = other DNA
caaagtcagagcaggaagtg

SEQ ID NO: 29828 - DNA, 20 bp, synthetic construct
  misc_feature 1..20: note = Description of Artificial Sequence: Synthetic oligonucleotide
  misc_feature 1..20: note = Target: SCN10A; (+) strand; PAM type: NRG; PAM sequence: CAG
  source 1..20: mol_type = other DNA
cagagcaggaagtgaagact

SEQ ID NO: 29829 - DNA, 20 bp, synthetic construct
  misc_feature 1..20: note = Description of Artificial Sequence: Synthetic oligonucleotide
  misc_feature 1..20: note = Target: SCN10A; (+) strand; PAM type: NRG; PAM sequence: GAG
  source 1..20: mol_type = other DNA
gagcaggaagtgaagactca

SEQ ID NO: 29830 - DNA, 20 bp, synthetic construct
  misc_feature 1..20: note = Description of Artificial Sequence: Synthetic oligonucleotide
  misc_feature 1..20: note = Target: SCN10A; (+) strand; PAM type: NRG; PAM sequence: TGG
  source 1..20: mol_type = other DNA
gaagactcagagcctacctt

SEQ ID NO: 29831 - DNA, 20 bp, synthetic construct
  misc_feature 1..20: note = Description of Artificial Sequence: Synthetic oligonucleotide
  misc_feature 1..20: note = Target: SCN10A; (+) strand; PAM type: NRG; PAM sequence: GAG
  source 1..20: mol_type = other DNA
agactcagagcctacctttg

SEQ ID NO: 29832 - DNA, 20 bp, synthetic construct
  misc_feature 1..20: note = Description of Artificial Sequence: Synthetic oligonucleotide
  misc_feature 1..20: note = Target: SCN10A; (+) strand; PAM type: NRG; PAM sequence: AGG
  source 1..20: mol_type = other DNA
gactcagagcctacctttgg

SEQ ID NO: 29833 - DNA, 20 bp, synthetic construct
  misc_feature 1..20: note = Description of Artificial Sequence: Synthetic oligonucleotide
  misc_feature 1..20: note = Target: SCN10A; (+) strand; PAM type: NRG; PAM sequence: TGG
  source 1..20: mol_type = other DNA
tcagagcctacctttggagg

SEQ ID NO: 29834 - DNA, 20 bp, synthetic construct
  misc_feature 1..20: note = Description of Artificial Sequence: Synthetic oligonucleotide
  misc_feature 1..20: note = Target: SCN10A; (+) strand; PAM type: NRG; PAM sequence: GGG
  source 1..20: mol_type = other DNA
cagagcctacctttggaggt

SEQ ID NO: 29835 - DNA, 20 bp, synthetic construct
  misc_feature 1..20: note = Description of Artificial Sequence: Synthetic oligonucleotide
  misc_feature 1..20: note = Target: SCN10A; (+) strand; PAM type: NRG; PAM sequence: GGG
  source 1..20: mol_type = other DNA
agagcctacctttggaggtg

SEQ ID NO: 29836 - DNA, 20 bp, synthetic construct
  misc_feature 1..20: note = Description of Artificial Sequence: Synthetic oligonucleotide
  misc_feature 1..20: note = Target: SCN10A; (+) strand; PAM type: NRG; PAM sequence: CGG
  source 1..20: mol_type = other DNA
tacctttggaggtggggccc

SEQ ID NO: 29837 - DNA, 20 bp, synthetic construct
  misc_feature 1..20: note = Description of Artificial Sequence: Synthetic oligonucleotide
  misc_feature 1..20: note = Target: SCN10A; (+) strand; PAM type: NRG; PAM sequence: GAG
  source 1..20: mol_type = other DNA
cctttggaggtggggccccg

SEQ ID NO: 29838 - DNA, 20 bp, synthetic construct
  misc_feature 1..20: note = Description of Artificial Sequence: Synthetic oligonucleotide
  misc_feature 1..20: note = Target: SCN10A; (+) strand; PAM type: NRG; PAM sequence: CAG
  source 1..20: mol_type = other DNA
ggaggtggggccccggagct

SEQ ID NO: 29839 - DNA, 20 bp, synthetic construct
  misc_feature 1..20: note = Description of Artificial Sequence: Synthetic oligonucleotide
  misc_feature 1..20: note = Target: SCN10A; (+) strand; PAM type: NRG; PAM sequence: AGG
  source 1..20: mol_type = other DNA
gaggtggggccccggagctc

SEQ ID NO: 29840 - DNA, 20 bp, synthetic construct
  misc_feature 1..20: note = Description of Artificial Sequence: Synthetic oligonucleotide
  misc_feature 1..20: note = Target: SCN10A; (+) strand; PAM type: NRG; PAM sequence: GGG
  source 1..20: mol_type = other DNA
aggtggggccccggagctca

SEQ ID NO: 29841 - DNA, 20 bp, synthetic construct
  misc_feature 1..20: note = Description of Artificial Sequence: Synthetic oligonucleotide
  misc_feature 1..20: note = Target: SCN10A; (+) strand; PAM type: NRG; PAM sequence: TGG
  source 1..20: mol_type = other DNA
ggggccccggagctcagggt

SEQ ID NO: 29842 - DNA, 20 bp, synthetic construct
  misc_feature 1..20: note = Description of Artificial Sequence: Synthetic oligonucleotide
  misc_feature 1..20: note = Target: SCN10A; (+) strand; PAM type: NRG; PAM sequence: TGG
  source 1..20: mol_type = other DNA
gccccggagctcagggttgg

SEQ ID NO: 29843 - DNA, 20 bp, synthetic construct
  misc_feature 1..20: note = Description of Artificial Sequence: Synthetic oligonucleotide
  misc_feature 1..20: note = Target: SCN10A; (+) strand; PAM type: NRG; PAM sequence: GGG
  source 1..20: mol_type = other DNA
ccccggagctcagggttggt

SEQ ID NO: 29844 - DNA, 20 bp, synthetic construct
  misc_feature 1..20: note = Description of Artificial Sequence: Synthetic oligonucleotide
  misc_feature 1..20: note = Target: SCN10A; (+) strand; PAM type: NRG; PAM sequence: TGG
  source 1..20: mol_type = other DNA
ggagctcagggttggtggga

SEQ ID NO: 29845 - DNA, 20 bp, synthetic construct
  misc_feature 1..20: note = Description of Artificial Sequence: Synthetic oligonucleotide
  misc_feature 1..20: note = Target: SCN10A; (+) strand; PAM type: NRG; PAM sequence: GAG
  source 1..20: mol_type = other DNA
agctcagggttggtgggatg

SEQ ID NO: 29846 - DNA, 20 bp, synthetic construct
  misc_feature 1..20: note = Description of Artificial Sequence: Synthetic oligonucleotide
  misc_feature 1..20: note = Target: SCN10A; (+) strand; PAM type: NRG; PAM sequence: AGG
  source 1..20: mol_type = other DNA
gctcagggttggtgggatgg

SEQ ID NO: 29847 - DNA, 20 bp, synthetic construct
  misc_feature 1..20: note = Description of Artificial Sequence: Synthetic oligonucleotide
  misc_feature 1..20: note = Target: SCN10A; (+) strand; PAM type: NRG; PAM sequence: GGG
  source 1..20: mol_type = other DNA
ctcagggttggtgggatgga

SEQ ID NO: 29848 - DNA, 20 bp, synthetic construct
  misc_feature 1..20: note = Description of Artificial Sequence: Synthetic oligonucleotide
  misc_feature 1..20: note = Target: SCN10A; (+) strand; PAM type: NRG; PAM sequence: AAG
  source 1..20: mol_type = other DNA
ttggtgggatggagggcata

SEQ ID NO: 29849 - DNA, 20 bp, synthetic construct
  misc_feature 1..20: note = Description of Artificial Sequence: Synthetic oligonucleotide
  misc_feature 1..20: note = Target: SCN10A; (+) strand; PAM type: NRG; PAM sequence: AGG
  source 1..20: mol_type = other DNA
tggtgggatggagggcataa

SEQ ID NO: 29850 - DNA, 20 bp, synthetic construct
  misc_feature 1..20: note = Description of Artificial Sequence: Synthetic oligonucleotide
  misc_feature 1..20: note = Target: SCN10A; (+) strand; PAM type: NRG; PAM sequence: GGG
  source 1..20: mol_type = other DNA
ggtgggatggagggcataaa

SEQ ID NO: 29851 - DNA, 20 bp, synthetic construct
  misc_feature 1..20: note = Description of Artificial Sequence: Synthetic oligonucleotide
  misc_feature 1..20: note = Target: SCN10A; (+) strand; PAM type: NRG; PAM sequence: GGG
  source 1..20: mol_type = other DNA
gtgggatggagggcataaag

SEQ ID NO: 29852 - DNA, 20 bp, synthetic construct
  misc_feature 1..20: note = Description of Artificial Sequence: Synthetic oligonucleotide
  misc_feature 1..20: note = Target: SCN10A; (+) strand; PAM type: NRG; PAM sequence: GGG
  source 1..20: mol_type = other DNA
tgggatggagggcataaagg

SEQ ID NO: 29853 - DNA, 20 bp, synthetic construct
  misc_feature 1..20: note = Description of Artificial Sequence: Synthetic oligonucleotide
  misc_feature 1..20: note = Target: SCN10A; (+) strand; PAM type: NRG; PAM sequence: AAG
  source 1..20: mol_type = other DNA
gatggagggcataaaggggg

SEQ ID NO: 29854 - DNA, 20 bp, synthetic construct
  misc_feature 1..20: note = Description of Artificial Sequence: Synthetic oligonucleotide
  misc_feature 1..20: note = Target: SCN10A; (+) strand; PAM type: NRG; PAM sequence: AGG
  source 1..20: mol_type = other DNA
atggagggcataaaggggga

SEQ ID NO: 29855 - DNA, 20 bp, synthetic construct
  misc_feature 1..20: note = Description of Artificial Sequence: Synthetic oligonucleotide
  misc_feature 1..20: note = Target: SCN10A; (+) strand; PAM type: NRG; PAM sequence: GGG
  source 1..20: mol_type = other DNA
tggagggcataaagggggaa

SEQ ID NO: 29856 - DNA, 20 bp, synthetic construct
  misc_feature 1..20: note = Description of Artificial Sequence: Synthetic oligonucleotide
  misc_feature 1..20: note = Target: SCN10A; (+) strand; PAM type: NRG; PAM sequence: CAG
  source 1..20: mol_type = other DNA
ggaagggttaccaaaacctg

SEQ ID NO: 29857 - DNA, 20 bp, synthetic construct
  misc_feature 1..20: note = Description of Artificial Sequence: Synthetic oligonucleotide
  misc_feature 1..20: note = Target: SCN10A; (+) strand; PAM type: NRG; PAM sequence: CAG
  source 1..20: mol_type = other DNA
ggttaccaaaacctgcagac

SEQ ID NO: 29858 - DNA, 20 bp, synthetic construct
  misc_feature 1..20: note = Description of Artificial Sequence: Synthetic oligonucleotide
  misc_feature 1..20: note = Target: SCN10A; (+) strand; PAM type: NRG; PAM sequence: GAG
  source 1..20: mol_type = other DNA
ttaccaaaacctgcagacca

SEQ ID NO: 29859 - DNA, 20 bp, synthetic construct
  misc_feature 1..20: note = Description of Artificial Sequence: Synthetic oligonucleotide
  misc_feature 1..20: note = Target: SCN10A; (+) strand; PAM type: NRG; PAM sequence: AAG
  source 1..20: mol_type = other DNA
ccaaaacctgcagaccagag

SEQ ID NO: 29860 - DNA, 20 bp, synthetic construct
  misc_feature 1..20: note = Description of Artificial Sequence: Synthetic oligonucleotide
  misc_feature 1..20: note = Target: SCN10A; (+) strand; PAM type: NRG; PAM sequence: GAG
  source 1..20: mol_type = other DNA
aagttttttgtttgtttttt

SEQ ID NO: 29861 - DNA, 20 bp, synthetic construct
  misc_feature 1..20: note = Description of Artificial Sequence: Synthetic oligonucleotide
  misc_feature 1..20: note = Target: SCN10A; (+) strand; PAM type: NRG; PAM sequence: AGG
  source 1..20: mol_type = other DNA
agttttttgtttgttttttg

SEQ ID NO: 29862 - DNA, 20 bp, synthetic construct
  misc_feature 1..20: note = Description of Artificial Sequence: Synthetic oligonucleotide
  misc_feature 1..20: note = Target: SCN10A; (+) strand; PAM type: NRG; PAM sequence: CGG
  source 1..20: mol_type = other DNA
tttttgtttgttttttgagg

SEQ ID NO: 29863 - DNA, 20 bp, synthetic construct
  misc_feature 1..20: note = Description of Artificial Sequence: Synthetic oligonucleotide
  misc_feature 1..20: note = Target: SCN10A; (+) strand; PAM type: NRG; PAM sequence: GAG
  source 1..20: mol_type = other DNA
tttgtttgttttttgaggcg

SEQ ID NO: 29864 - DNA, 20 bp, synthetic construct
  misc_feature 1..20: note = Description of Artificial Sequence: Synthetic oligonucleotide
  misc_feature 1..20: note = Target: SCN10A; (+) strand; PAM type: NRG; PAM sequence: CAG
  source 1..20: mol_type = other DNA
cggagtctcgctctgtcacc

SEQ ID NO: 29865 - DNA, 20 bp, synthetic construct
  misc_feature 1..20: note = Description of Artificial Sequence: Synthetic oligonucleotide
  misc_feature 1..20: note = Target: SCN10A; (+) strand; PAM type: NRG; PAM sequence: AGG
  source 1..20: mol_type = other DNA
ggagtctcgctctgtcaccc

SEQ ID NO: 29866 - DNA, 20 bp, synthetic construct
  misc_feature 1..20: note = Description of Artificial Sequence: Synthetic oligonucleotide
  misc_feature 1..20: note = Target: SCN10A; (+) strand; PAM type: NRG; PAM sequence: TGG
  source 1..20: mol_type = other DNA
tctcgctctgtcacccaggc

SEQ ID NO: 29867 - DNA, 20 bp, synthetic construct
  misc_feature 1..20: note = Description of Artificial Sequence: Synthetic oligonucleotide
  misc_feature 1..20: note = Target: SCN10A; (+) strand; PAM type: NRG; PAM sequence: GAG
  source 1..20: mol_type = other DNA
tcgctctgtcacccaggctg

SEQ ID NO: 29868 - DNA, 20 bp, synthetic construct
  misc_feature 1..20: note = Description of Artificial Sequence: Synthetic oligonucleotide
  misc_feature 1..20: note = Target: SCN10A; (+) strand; PAM type: NRG; PAM sequence: TGG
  source 1..20: mol_type = other DNA
tcacccaggctggagtataa

SEQ ID NO: 29869 - DNA, 20 bp, synthetic construct
  misc_feature 1..20: note = Description of Artificial Sequence: Synthetic oligonucleotide
  misc_feature 1..20: note = Target: SCN10A; (+) strand; PAM type: NRG; PAM sequence: CGG
  source 1..20: mol_type = other DNA
ggagtataatggcacaatct

SEQ ID NO: 29870 - DNA, 20 bp, synthetic construct
  misc_feature 1..20: note = Description of Artificial Sequence: Synthetic oligonucleotide
  misc_feature 1..20: note = Target: SCN10A; (+) strand; PAM type: NRG; PAM sequence: TGG
  source 1..20: mol_type = other DNA
ctcactaccaccacacctcg

SEQ ID NO: 29871 - DNA, 20 bp, synthetic construct
  misc_feature 1..20: note = Description of Artificial Sequence: Synthetic oligonucleotide
  misc_feature 1..20: note = Target: SCN10A; (+) strand; PAM type: NRG; PAM sequence: TGG
  source 1..20: mol_type = other DNA
actaccaccacacctcgtgg

SEQ ID NO: 29872 - DNA, 20 bp, synthetic construct
  misc_feature 1..20: note = Description of Artificial Sequence: Synthetic oligonucleotide
  misc_feature 1..20: note = Target: SCN10A; (+) strand; PAM type: NRG; PAM sequence: TAG
  source 1..20: mol_type = other DNA
accaccacacctcgtggtgg

SEQ ID NO: 29873 - DNA, 20 bp, synthetic construct
  misc_feature 1..20: note = Description of Artificial Sequence: Synthetic oligonucleotide
  misc_feature 1..20: note = Target: SCN10A; (+) strand; PAM type: NRG; PAM sequence: TAG
  source 1..20: mol_type = other DNA
ggtagtgatttttgtacttt

SEQ ID NO: 29874 - DNA, 20 bp, synthetic construct
  misc_feature 1..20: note = Description of Artificial Sequence: Synthetic oligonucleotide
  misc_feature 1..20: note = Target: SCN10A; (+) strand; PAM type: NRG; PAM sequence: CAG
  source 1..20: mol_type = other DNA
agtgatttttgtacttttag

SEQ ID NO: 29875 - DNA, 20 bp, synthetic construct
  misc_feature 1..20: note = Description of Artificial Sequence: Synthetic oligonucleotide
  misc_feature 1..20: note = Target: SCN10A; (+) strand; PAM type: NRG; PAM sequence: GAG
  source 1..20: mol_type = other DNA
tgatttttgtacttttagca

SEQ ID NO: 29876 - DNA, 20 bp, synthetic construct
  misc_feature 1..20: note = Description of Artificial Sequence: Synthetic oligonucleotide
  misc_feature 1..20: note = Target: SCN10A; (+) strand; PAM type: NRG; PAM sequence: CAG
  source 1..20: mol_type = other DNA
ttttgtacttttagcagaga

SEQ ID NO: 29877 - DNA, 20 bp, synthetic construct
  misc_feature 1..20: note = Description of Artificial Sequence: Synthetic oligonucleotide
  misc_feature 1..20: note = Target: SCN10A; (+) strand; PAM type: NRG; PAM sequence: AGG
  source 1..20: mol_type = other DNA
tttgtacttttagcagagac

SEQ ID NO: 29878 - DNA, 20 bp, synthetic construct
  misc_feature 1..20: note = Description of Artificial Sequence: Synthetic oligonucleotide
  misc_feature 1..20: note = Target: SCN10A; (+) strand; PAM type: NRG; PAM sequence: GGG
  source 1..20: mol_type = other DNA
ttgtacttttagcagagaca

SEQ ID NO: 29879 - DNA, 20 bp, synthetic construct
  misc_feature 1..20: note = Description of Artificial Sequence: Synthetic oligonucleotide
  misc_feature 1..20: note = Target: SCN10A; (+) strand; PAM type: NRG; PAM sequence: CGG
  source 1..20: mol_type = other DNA
ttttagcagagacagggttt

SEQ ID NO: 29880 - DNA, 20 bp, synthetic construct
  misc_feature 1..20: note = Description of Artificial Sequence: Synthetic oligonucleotide
  misc_feature 1..20: note = Target: SCN10A; (+) strand; PAM type: NRG; PAM sequence: TGG
  source 1..20: mol_type = other DNA
gagacagggtttcggcatgt

SEQ ID NO: 29881 - DNA, 20 bp, synthetic construct
  misc_feature 1..20: note = Description of Artificial Sequence: Synthetic oligonucleotide
  misc_feature 1..20: note = Target: SCN10A; (+) strand; PAM type: NRG; PAM sequence: CAG
  source 1..20: mol_type = other DNA
cagggtttcggcatgttggc

SEQ ID NO: 29882 - DNA, 20 bp, synthetic construct
  misc_feature 1..20: note = Description of Artificial Sequence: Synthetic oligonucleotide
  misc_feature 1..20: note = Target: SCN10A; (+) strand; PAM type: NRG; PAM sequence: AGG
  source 1..20: mol_type = other DNA
agggtttcggcatgttggcc

SEQ ID NO: 29883 - DNA, 20 bp, synthetic construct
  misc_feature 1..20: note = Description of Artificial Sequence: Synthetic oligonucleotide
  misc_feature 1..20: note = Target: SCN10A; (+) strand; PAM type: NRG; PAM sequence: GGG
  source 1..20: mol_type = other DNA
gggtttcggcatgttggcca

SEQ ID NO: 29884 - DNA, 20 bp, synthetic construct
  misc_feature 1..20: note = Description of Artificial Sequence: Synthetic oligonucleotide
  misc_feature 1..20: note = Target: SCN10A; (+) strand; PAM type: NRG; PAM sequence: TGG
  source 1..20: mol_type = other DNA
tttcggcatgttggccaggg

SEQ ID NO: 29885 - DNA, 20 bp, synthetic construct
  misc_feature 1..20: note = Description of Artificial Sequence: Synthetic oligonucleotide
  misc_feature 1..20: note = Target: SCN10A; (+) strand; PAM type: NRG; PAM sequence: CAG
  source 1..20: mol_type = other DNA
tggttttgaactcctaacct

SEQ ID NO: 29886 - DNA, 20 bp, synthetic construct
  misc_feature 1..20: note = Description of Artificial Sequence: Synthetic oligonucleotide
  misc_feature 1..20: note = Target: SCN10A; (+) strand; PAM type: NRG; PAM sequence: AGG
  source 1..20: mol_type = other DNA
ggttttgaactcctaacctc

SEQ ID NO: 29887 - DNA, 20 bp, synthetic construct
  misc_feature 1..20: note = Description of Artificial Sequence: Synthetic oligonucleotide
  misc_feature 1..20: note = Target: SCN10A; (+) strand; PAM type: NRG; PAM sequence: CAG
  source 1..20: mol_type = other DNA
ctcaggtgatccgcccgcct

SEQ ID NO: 29888 - DNA, 20 bp, synthetic construct
  misc_feature 1..20: note = Description of Artificial Sequence: Synthetic oligonucleotide
  misc_feature 1..20: note = Target: SCN10A; (+) strand; PAM type: NRG; PAM sequence: AAG
  source 1..20: mol_type = other DNA
ccgcccgcctcagcctccca

SEQ ID NO: 29889 - DNA, 20 bp, synthetic construct
  misc_feature 1..20: note = Description of Artificial Sequence: Synthetic oligonucleotide
  misc_feature 1..20: note = Target: SCN10A; (+) strand; PAM type: NRG; PAM sequence: TGG
  source 1..20: mol_type = other DNA
gcctcagcctcccaaagtgc

SEQ ID NO: 29890 - DNA, 20 bp, synthetic construct
  misc_feature 1..20: note = Description of Artificial Sequence: Synthetic oligonucleotide
  misc_feature 1..20: note = Target: SCN10A; (+) strand; PAM type: NRG; PAM sequence: GGG
  source 1..20: mol_type = other DNA
cctcagcctcccaaagtgct

SEQ ID NO: 29891 - DNA, 20 bp, synthetic construct
  misc_feature 1..20: note = Description of Artificial Sequence: Synthetic oligonucleotide
  misc_feature 1..20: note = Target: SCN10A; (+) strand; PAM type: NRG; PAM sequence: CAG
  source 1..20: mol_type = other DNA
ctcccaaagtgctgggatta

SEQ ID NO: 29892 - DNA, 20 bp, synthetic construct
  misc_feature 1..20: note = Description of Artificial Sequence: Synthetic oligonucleotide
  misc_feature 1..20: note = Target: SCN10A; (+) strand; PAM type: NRG; PAM sequence: AGG
  source 1..20: mol_type = other DNA
tcccaaagtgctgggattac

SEQ ID NO: 29893 - DNA, 20 bp, synthetic construct
  misc_feature 1..20: note = Description of Artificial Sequence: Synthetic oligonucleotide
  misc_feature 1..20: note = Target: SCN10A; (+) strand; PAM type: NRG; PAM sequence: TGG
  source 1..20: mol_type = other DNA
caggcatgaaccaccgtgcc

SEQ ID NO: 29894 - DNA, 20 bp, synthetic construct
  misc_feature 1..20: note = Description of Artificial Sequence: Synthetic oligonucleotide
  misc_feature 1..20: note = Target: SCN10A; (+) strand; PAM type: NRG; PAM sequence: CAG
  source 1..20: mol_type = other DNA
catgaaccaccgtgcctggc

SEQ ID NO: 29895 - DNA, 20 bp, synthetic construct
  misc_feature 1..20: note = Description of Artificial Sequence: Synthetic oligonucleotide
  misc_feature 1..20: note = Target: SCN10A; (+) strand; PAM type: NRG; PAM sequence: GAG
  source 1..20: mol_type = other DNA
accaccgtgcctggccagat

SEQ ID NO: 29896 - DNA, 20 bp, synthetic construct
  misc_feature 1..20: note = Description of Artificial Sequence: Synthetic oligonucleotide
  misc_feature 1..20: note = Target: SCN10A; (+) strand; PAM type: NRG; PAM sequence: GAG
  source 1..20: mol_type = other DNA
caccgtgcctggccagatga

SEQ ID NO: 29897 - DNA, 20 bp, synthetic construct
  misc_feature 1..20: note = Description of Artificial Sequence: Synthetic oligonucleotide
  misc_feature 1..20: note = Target: SCN10A; (+) strand; PAM type: NRG; PAM sequence: AAG
  source 1..20: mol_type = other DNA
cgtgcctggccagatgagag

SEQ ID NO: 29898 - DNA, 20 bp, synthetic construct
  misc_feature 1..20: note = Description of Artificial Sequence: Synthetic oligonucleotide
  misc_feature 1..20: note = Target: SCN10A; (+) strand; PAM type: NRG; PAM sequence: GAG
  source 1..20: mol_type = other DNA
ggccagatgagagaagtttt

SEQ ID NO: 29899 - DNA, 20 bp, synthetic construct
  misc_feature 1..20: note = Description of Artificial Sequence: Synthetic oligonucleotide
  misc_feature 1..20: note = Target: SCN10A; (+) strand; PAM type: NRG; PAM sequence: CAG
  source 1..20: mol_type = other DNA
gatgagagaagttttgagat

SEQ ID NO: 29900 - DNA, 20 bp, synthetic construct
  misc_feature 1..20: note = Description of Artificial Sequence: Synthetic oligonucleotide
  misc_feature 1..20: note = Target: SCN10A; (+) strand; PAM type: NRG; PAM sequence: GAG
  source 1..20: mol_type = other DNA
tacccgcatgccttcaaatc

SEQ ID NO: 29901 - DNA, 20 bp, synthetic construct
  misc_feature 1..20: note = Description of Artificial Sequence: Synthetic oligonucleotide
  misc_feature 1..20: note = Target: SCN10A; (+) strand; PAM type: NRG; PAM sequence: AAG
  source 1..20: mol_type = other DNA
cgcatgccttcaaatcgaga

SEQ ID NO: 29902 - DNA, 20 bp, synthetic construct
  misc_feature 1..20: note = Description of Artificial Sequence: Synthetic oligonucleotide
  misc_feature 1..20: note = Target: SCN10A; (+) strand; PAM type: NRG; PAM sequence: GAG
  source 1..20: mol_type = other DNA
catgccttcaaatcgagaaa

SEQ ID NO: 29903 - DNA, 20 bp, synthetic construct
  misc_feature 1..20: note = Description of Artificial Sequence: Synthetic oligonucleotide
  misc_feature 1..20: note = Target: SCN10A; (+) strand; PAM type: NRG; PAM sequence: CAG
  source 1..20: mol_type = other DNA
tcaaatcgagaaagagcccg

SEQ ID NO: 29904 - DNA, 20 bp, synthetic construct
  misc_feature 1..20: note = Description of Artificial Sequence: Synthetic oligonucleotide
  misc_feature 1..20: note = Target: SCN10A; (+) strand; PAM type: NRG; PAM sequence: TGG
  source 1..20: mol_type = other DNA
aatcgagaaagagcccgcag

SEQ ID NO: 29905 - DNA, 20 bp, synthetic construct
  misc_feature 1..20: note = Description of Artificial Sequence: Synthetic oligonucleotide
  misc_feature 1..20: note = Target: SCN10A; (+) strand; PAM type: NRG; PAM sequence: CAG
  source 1..20: mol_type = other DNA
gaaagagcccgcagtggccg

SEQ ID NO: 29906 - DNA, 20 bp, synthetic construct
  misc_feature 1..20: note = Description of Artificial Sequence: Synthetic oligonucleotide
  misc_feature 1..20: note = Target: SCN10A; (+) strand; PAM type: NRG; PAM sequence: GAG
  source 1..20: mol_type = other DNA
aagagcccgcagtggccgca

SEQ ID NO: 29907 - DNA, 20 bp, synthetic construct
  misc_feature 1..20: note = Description of Artificial Sequence: Synthetic oligonucleotide
  misc_feature 1..20: note = Target: SCN10A; (+) strand; PAM type: NRG; PAM sequence: AAG
  source 1..20: mol_type = other DNA
cgcagtggccgcagagcgcg

SEQ ID NO: 29908 - DNA, 20 bp, synthetic construct
  misc_feature 1..20: note = Description of Artificial Sequence: Synthetic oligonucleotide
  misc_feature 1..20: note = Target: SCN10A; (+) strand; PAM type: NRG; PAM sequence: AGG
  source 1..20: mol_type = other DNA
gcagtggccgcagagcgcga

SEQ ID NO: 29909 - DNA, 20 bp, synthetic construct
  misc_feature 1..20: note = Description of Artificial Sequence: Synthetic oligonucleotide
  misc_feature 1..20: note = Target: SCN10A; (+) strand; PAM type: NRG; PAM sequence: GGG
  source 1..20: mol_type = other DNA
cagtggccgcagagcgcgaa

SEQ ID NO: 29910 - DNA, 20 bp, synthetic construct
  misc_feature 1..20: note = Description of Artificial Sequence: Synthetic oligonucleotide
  misc_feature 1..20: note = Target: SCN10A; (+) strand; PAM type: NRG; PAM sequence: AAG
  source 1..20: mol_type = other DNA
cgcagagcgcgaagggttcg

SEQ ID NO: 29911 - DNA, 20 bp, synthetic construct
  misc_feature 1..20: note = Description of Artificial Sequence: Synthetic oligonucleotide
  misc_feature 1..20: note = Target: SCN10A; (+) strand; PAM type: NRG; PAM sequence: AGG
  source 1..20: mol_type = other DNA
gcagagcgcgaagggttcga

SEQ ID NO: 29912 - DNA, 20 bp, synthetic construct
  misc_feature 1..20: note = Description of Artificial Sequence: Synthetic oligonucleotide
  misc_feature 1..20: note = Target: SCN10A; (+) strand; PAM type: NRG; PAM sequence: GGG
  source 1..20: mol_type = other DNA
cagagcgcgaagggttcgaa

SEQ ID NO: 29913 - DNA, 20 bp, synthetic construct
  misc_feature 1..20: note = Description of Artificial Sequence: Synthetic oligonucleotide
  misc_feature 1..20: note = Target: SCN10A; (+) strand; PAM type: NRG; PAM sequence: TGG
  source 1..20: mol_type = other DNA
aagggttcgaagggctttga

SEQ ID NO: 29914 - DNA, 20 bp, synthetic construct
  misc_feature 1..20: note = Description of Artificial Sequence: Synthetic oligonucleotide
  misc_feature 1..20: note = Target: SCN10A; (+) strand; PAM type: NRG; PAM sequence: GGG
  source 1..20: mol_type = other DNA
agggttcgaagggctttgat

SEQ ID NO: 29915 - DNA, 20 bp, synthetic construct
  misc_feature 1..20: note = Description of Artificial Sequence: Synthetic oligonucleotide
  misc_feature 1..20: note = Target: SCN10A; (+) strand; PAM type: NRG; PAM sequence: GAG
  source 1..20: mol_type = other DNA
ggttcgaagggctttgatgg

SEQ ID NO: 29916 - DNA, 20 bp, synthetic construct
  misc_feature 1..20: note = Description of Artificial Sequence: Synthetic oligonucleotide
  misc_feature 1..20: note = Target: SCN10A; (+) strand; PAM type: NRG; PAM sequence: CAG
  source 1..20: mol_type = other DNA
ggctttgatgggagccactt

SEQ ID NO: 29917 - DNA, 20 bp, synthetic construct
  misc_feature 1..20: note = Description of Artificial Sequence: Synthetic oligonucleotide
  misc_feature 1..20: note = Target: SCN10A; (+) strand; PAM type: NRG; PAM sequence: CAG
  source 1..20: mol_type = other DNA
ggagccacttcagaatattc

SEQ ID NO: 29918 - DNA, 20 bp, synthetic construct
  misc_feature 1..20: note = Description of Artificial Sequence: Synthetic oligonucleotide
  misc_feature 1..20: note = Target: SCN10A; (+) strand; PAM type: NRG; PAM sequence: GAG
  source 1..20: mol_type = other DNA
tattccagaatcttcgctgt

SEQ ID NO: 29919 - DNA, 20 bp, synthetic construct
  misc_feature 1..20: note = Description of Artificial Sequence: Synthetic oligonucleotide
  misc_feature 1..20: note = Target: SCN10A; (+) strand; PAM type: NRG; PAM sequence: CAG
  source 1..20: mol_type = other DNA
atcttcgctgtgagacttat

SEQ ID NO: 29920 - DNA, 20 bp, synthetic construct
  misc_feature 1..20: note = Description of Artificial Sequence: Synthetic oligonucleotide
  misc_feature 1..20: note = Target: SCN10A; (+) strand; PAM type: NRG; PAM sequence: GAG
  source 1..20: mol_type = other DNA
tcgctgtgagacttatcagt

SEQ ID NO: 29921 - DNA, 20 bp, synthetic construct
  misc_feature 1..20: note = Description of Artificial Sequence: Synthetic oligonucleotide
  misc_feature 1..20: note = Target: SCN10A; (+) strand; PAM type: NRG; PAM sequence: GAG
  source 1..20: mol_type = other DNA
gagacttatcagtgagatct

SEQ ID NO: 29922 - DNA, 20 bp, synthetic construct
  misc_feature 1..20: note = Description of Artificial Sequence: Synthetic oligonucleotide
  misc_feature 1..20: note = Target: SCN10A; (+) strand; PAM type: NRG; PAM sequence: CAG
  source 1..20: mol_type = other DNA
ttatcagtgagatctgagtg

SEQ ID NO: 29923 - DNA, 20 bp, synthetic construct
  misc_feature 1..20: note = Description of Artificial Sequence: Synthetic oligonucleotide
  misc_feature 1..20: note = Target: SCN10A; (+) strand; PAM type: NRG; PAM sequence: AGG
  source 1..20: mol_type = other DNA
tatcagtgagatctgagtgc

SEQ ID NO: 29924 - DNA, 20 bp, synthetic construct
  misc_feature 1..20: note = Description of Artificial Sequence: Synthetic oligonucleotide
  misc_feature 1..20: note = Target: SCN10A; (+) strand; PAM type: NRG; PAM sequence: GAG
  source 1..20: mol_type = other DNA
tcagtgagatctgagtgcag

SEQ ID NO: 29925 - DNA, 20 bp, synthetic construct
  misc_feature 1..20: note = Description of Artificial Sequence: Synthetic oligonucleotide
  misc_feature 1..20: note = Target: SCN10A; (+) strand; PAM type: NRG; PAM sequence: GAG
  source 1..20: mol_type = other DNA
agtgagatctgagtgcagga

SEQ ID NO: 29926 - DNA, 20 bp, synthetic construct
  misc_feature 1..20: note = Description of Artificial Sequence: Synthetic oligonucleotide
  misc_feature 1..20: note = Target: SCN10A; (+) strand; PAM type: NRG; PAM sequence: AGG
  source 1..20: mol_type = other DNA
gtgagatctgagtgcaggag

SEQ ID NO: 29927 - DNA, 20 bp, synthetic construct
  misc_feature 1..20: note = Description of Artificial Sequence: Synthetic oligonucleotide
  misc_feature 1..20: note = Target: SCN10A; (+) strand; PAM type: NRG; PAM sequence: GGG
  source 1..20: mol_type = other DNA
tgagatctgagtgcaggaga

SEQ ID NO: 29928 - DNA, 20 bp, synthetic construct
  misc_feature 1..20: note = Description of Artificial Sequence: Synthetic oligonucleotide
  misc_feature 1..20: note = Target: SCN10A; (+) strand; PAM type: NRG; PAM sequence: CAG
  source 1..20: mol_type = other DNA
gatctgagtgcaggagaggg

SEQ ID NO: 29929 - DNA, 20 bp, synthetic construct
  misc_feature 1..20: note = Description of Artificial Sequence: Synthetic oligonucleotide
  misc_feature 1..20: note = Target: SCN10A; (+) strand; PAM type: NRG; PAM sequence: TAG
  source 1..20: mol_type = other DNA
agagggcagaaacatcactc

SEQ ID NO: 29930 - DNA, 20 bp, synthetic construct
  misc_feature 1..20: note = Description of Artificial Sequence: Synthetic oligonucleotide
  misc_feature 1..20: note = Target: SCN10A; (+) strand; PAM type: NRG; PAM sequence: AGG
  source 1..20: mol_type = other DNA
gagggcagaaacatcactct

SEQ ID NO: 29931 - DNA, 20 bp, synthetic construct
  misc_feature 1..20: note = Description of Artificial Sequence: Synthetic oligonucleotide
  misc_feature 1..20: note = Target: SCN10A; (+) strand; PAM type: NRG; PAM sequence: CAG
  source 1..20: mol_type = other DNA
gaaacatcactctaggtttc

SEQ ID NO: 29932 - DNA, 20 bp, synthetic construct
  misc_feature 1..20: note = Description of Artificial Sequence: Synthetic oligonucleotide
  misc_feature 1..20: note = Target: SCN10A; (+) strand; PAM type: NRG; PAM sequence: AAG
  source 1..20: mol_type = other DNA
catcactctaggtttccaga

SEQ ID NO: 29933 - DNA, 20 bp, synthetic construct
  misc_feature 1..20: note = Description of Artificial Sequence: Synthetic oligonucleotide
  misc_feature 1..20: note = Target: SCN10A; (+) strand; PAM type: NRG; PAM sequence: AGG
  source 1..20: mol_type = other DNA
atcactctaggtttccagaa

SEQ ID NO: 29934 - DNA, 20 bp, synthetic construct
  misc_feature 1..20: note = Description of Artificial Sequence: Synthetic oligonucleotide
  misc_feature 1..20: note = Target: SCN10A; (+) strand; PAM type: NRG; PAM sequence: CAG
  source 1..20: mol_type = other DNA
actctaggtttccagaaagg

SEQ ID NO: 29935 - DNA, 20 bp, synthetic construct
  misc_feature 1..20: note = Description of Artificial Sequence: Synthetic oligonucleotide
  misc_feature 1..20: note = Target: SCN10A; (+) strand; PAM type: NRG; PAM sequence: TGG
  source 1..20: mol_type = other DNA
ttccagaaaggcagtcctcg

SEQ ID NO: 29936 - DNA, 20 bp, synthetic construct
  misc_feature 1..20: note = Description of Artificial Sequence: Synthetic oligonucleotide
  misc_feature 1..20: note = Target: SCN10A; (+) strand; PAM type: NRG; PAM sequence: AAG
  source 1..20: mol_type = other DNA
cagaaaggcagtcctcgtgg

SEQ ID NO: 29937 - DNA, 20 bp, synthetic construct
  misc_feature 1..20: note = Description of Artificial Sequence: Synthetic oligonucleotide
  misc_feature 1..20: note = Target: SCN10A; (+) strand; PAM type: NRG; PAM sequence: AGG
  source 1..20: mol_type = other DNA
agaaaggcagtcctcgtgga

SEQ ID NO: 29938 - DNA, 20 bp, synthetic construct
  misc_feature 1..20: note = Description of Artificial Sequence: Synthetic oligonucleotide
  misc_feature 1..20: note = Target: SCN10A; (+) strand; PAM type: NRG; PAM sequence: GAG
  source 1..20: mol_type = other DNA
aaaggcagtcctcgtggaag

SEQ ID NO: 29939 - DNA, 20 bp, synthetic construct
  misc_feature 1..20: note = Description of Artificial Sequence: Synthetic oligonucleotide
  misc_feature 1..20: note = Target: SCN10A; (+) strand; PAM type: NRG; PAM sequence: CAG
  source 1..20: mol_type = other DNA
gcagtcctcgtggaaggaga

SEQ ID NO: 29940 - DNA, 20 bp, synthetic construct
  misc_feature 1..20: note = Description of Artificial Sequence: Synthetic oligonucleotide
  misc_feature 1..20: note = Target: SCN10A; (+) strand; PAM type: NRG; PAM sequence: AGG
  source 1..20: mol_type = other DNA
cagtcctcgtggaaggagac

SEQ ID NO: 29941 - DNA, 20 bp, synthetic construct
  misc_feature 1..20: note = Description of Artificial Sequence: Synthetic oligonucleotide
  misc_feature 1..20: note = Target: SCN10A; (+) strand; PAM type: NRG; PAM sequence: CAG
  source 1..20: mol_type = other DNA
ggagacaggaactccctgcc

SEQ ID NO: 29942 - DNA, 20 bp, synthetic construct
  misc_feature 1..20: note = Description of Artificial Sequence: Synthetic oligonucleotide
  misc_feature 1..20: note = Target: SCN10A; (+) strand; PAM type: NRG; PAM sequence: AAG
  source 1..20: mol_type = other DNA
cctcccattcctacacgtct

SEQ ID NO: 29943 - DNA, 20 bp, synthetic construct
  misc_feature 1..20: note = Description of Artificial Sequence: Synthetic oligonucleotide
  misc_feature 1..20: note = Target: SCN10A; (+) strand; PAM type: NRG; PAM sequence: TAG
  source 1..20: mol_type = other DNA
acacgtctaagccatcatcc

SEQ ID NO: 29944 - DNA, 20 bp, synthetic construct
  misc_feature 1..20: note = Description of Artificial Sequence: Synthetic oligonucleotide
  misc_feature 1..20: note = Target: SCN10A; (+) strand; PAM type: NRG; PAM sequence: CGG
  source 1..20: mol_type = other DNA
atcctagctcccaccttatt

SEQ ID NO: 29945 - DNA, 20 bp, synthetic construct
  misc_feature 1..20: note = Description of Artificial Sequence: Synthetic oligonucleotide
  misc_feature 1..20: note = Target: SCN10A; (+) strand; PAM type: NRG; PAM sequence: GAG
  source 1..20: mol_type = other DNA
accttattcggaactccaat

SEQ ID NO: 29946 - DNA, 20 bp, synthetic construct
  misc_feature 1..20: note = Description of Artificial Sequence: Synthetic oligonucleotide
  misc_feature 1..20: note = Target: SCN10A; (+) strand; PAM type: NRG; PAM sequence: GAG
  source 1..20: mol_type = other DNA
cttattcggaactccaatga

SEQ ID NO: 29947 - DNA, 20 bp, synthetic construct
  misc_feature 1..20: note = Description of Artificial Sequence: Synthetic oligonucleotide
  misc_feature 1..20: note = Target: SCN10A; (+) strand; PAM type: NRG; PAM sequence: AGG
  source 1..20: mol_type = other DNA
ttattcggaactccaatgag

SEQ ID NO: 29948 - DNA, 20 bp, synthetic construct
  misc_feature 1..20: note = Description of Artificial Sequence: Synthetic oligonucleotide
  misc_feature 1..20: note = Target: SCN10A; (+) strand; PAM type: NRG; PAM sequence: TAG
  source 1..20: mol_type = other DNA
cggaactccaatgagaggtc

SEQ ID NO: 29949 - DNA, 20 bp, synthetic construct
  misc_feature 1..20: note = Description of Artificial Sequence: Synthetic oligonucleotide
  misc_feature 1..20: note = Target: SCN10A; (+) strand; PAM type: NRG; PAM sequence: AAG
  source 1..20: mol_type = other DNA
actccaatgagaggtctaga

SEQ ID NO: 29950 - DNA, 20 bp, synthetic construct
  misc_feature 1..20: note = Description of Artificial Sequence: Synthetic oligonucleotide
  misc_feature 1..20: note = Target: SCN10A; (+) strand; PAM type: NRG; PAM sequence: GAG
  source 1..20: mol_type = other DNA
tccaatgagaggtctagaaa

SEQ ID NO: 29951 - DNA, 20 bp, synthetic construct
  misc_feature 1..20: note = Description of Artificial Sequence: Synthetic oligonucleotide
  misc_feature 1..20: note = Target: SCN10A; (+) strand; PAM type: NRG; PAM sequence: TGG
  source 1..20: mol_type = other DNA
caccactctcttaaacaatc

SEQ ID NO: 29952 - DNA, 20 bp, synthetic construct
  misc_feature 1..20: note = Description of Artificial Sequence: Synthetic oligonucleotide
  misc_feature 1..20: note = Target: SCN10A; (+) strand; PAM type: NRG; PAM sequence: GGG
  source 1..20: mol_type = other DNA
accactctcttaaacaatct

SEQ ID NO: 29953 - DNA, 20 bp, synthetic construct
  misc_feature 1..20: note = Description of Artificial Sequence: Synthetic oligonucleotide
  misc_feature 1..20: note = Target: SCN10A; (+) strand; PAM type: NRG; PAM sequence: AAG
  source 1..20: mol_type = other DNA
ctctcttaaacaatctgggc

SEQ ID NO: 29954 - DNA, 20 bp, synthetic construct
  misc_feature 1..20: note = Description of Artificial Sequence: Synthetic oligonucleotide
  misc_feature 1..20: note = Target: SCN10A; (+) strand; PAM type: NRG; PAM sequence: CAG
  source 1..20: mol_type = other DNA
caatctgggcaagaaaaact

SEQ ID NO: 29955 - DNA, 20 bp, synthetic construct
  misc_feature 1..20: note = Description of Artificial Sequence: Synthetic oligonucleotide
  misc_feature 1..20: note = Target: SCN10A; (+) strand; PAM type: NRG; PAM sequence: TGG
  source 1..20: mol_type = other DNA
tctctaacatcaccaacctc

SEQ ID NO: 29956 - DNA, 20 bp, synthetic construct
  misc_feature 1..20: note = Description of Artificial Sequence: Synthetic oligonucleotide
  misc_feature 1..20: note = Target: SCN10A; (+) strand; PAM type: NRG; PAM sequence: TAG
  source 1..20: mol_type = other DNA
catcaccaacctctggtacg

SEQ ID NO: 29957 - DNA, 20 bp, synthetic construct
  misc_feature 1..20: note = Description of Artificial Sequence: Synthetic oligonucleotide
  misc_feature 1..20: note = Target: SCN10A; (+) strand; PAM type: NRG; PAM sequence: AGG
  source 1..20: mol_type = other DNA
atcaccaacctctggtacgt

SEQ ID NO: 29958 - DNA, 20 bp, synthetic construct
  misc_feature 1..20: note = Description of Artificial Sequence: Synthetic oligonucleotide
  misc_feature 1..20: note = Target: SCN10A; (+) strand; PAM type: NRG; PAM sequence: TGG
  source 1..20: mol_type = other DNA
accaacctctggtacgtagg

SEQ ID NO: 29959 - DNA, 20 bp, synthetic construct
  misc_feature 1..20: note = Description of Artificial Sequence: Synthetic oligonucleotide
  misc_feature 1..20: note = Target: SCN10A; (+) strand; PAM type: NRG; PAM sequence: AAG
  source 1..20: mol_type = other DNA
cctctggtacgtaggtggcc

SEQ ID NO: 29960 - DNA, 20 bp, synthetic construct
  misc_feature 1..20: note = Description of Artificial Sequence: Synthetic oligonucleotide
  misc_feature 1..20: note = Target: SCN10A; (+) strand; PAM type: NRG; PAM sequence: CAG
  source 1..20: mol_type = other DNA
tacgtaggtggccaagcttc

SEQ ID NO: 29961 - DNA, 20 bp, synthetic construct
  misc_feature 1..20: note = Description of Artificial Sequence: Synthetic oligonucleotide
  misc_feature 1..20: note = Target: SCN10A; (+) strand; PAM type: NRG; PAM sequence: TAG
  source 1..20: mol_type = other DNA
tcaactcttccttttccttc

SEQ ID NO: 29962 - DNA, 20 bp, synthetic construct
  misc_feature 1..20: note = Description of Artificial Sequence: Synthetic oligonucleotide
  misc_feature 1..20: note = Target: SCN10A; (+) strand; PAM type: NRG; PAM sequence: AGG
  source 1..20: mol_type = other DNA
caactcttccttttccttct

SEQ ID NO: 29963 - DNA, 20 bp, synthetic construct
  misc_feature 1..20: note = Description of Artificial Sequence: Synthetic oligonucleotide
  misc_feature 1..20: note = Target: SCN10A; (+) strand; PAM type: NRG; PAM sequence: GGG
  source 1..20: mol_type = other DNA
aactcttccttttccttcta

SEQ ID NO: 29964 - DNA, 20 bp, synthetic construct
  misc_feature 1..20: note = Description of Artificial Sequence: Synthetic oligonucleotide
  misc_feature 1..20: note = Target: SCN10A; (+) strand; PAM type: NRG; PAM sequence: GGG
  source 1..20: mol_type = other DNA
actcttccttttccttctag

SEQ ID NO: 29965 - DNA, 20 bp, synthetic construct
  misc_feature 1..20: note = Description of Artificial Sequence: Synthetic oligonucleotide
  misc_feature 1..20: note = Target: SCN10A; (+) strand; PAM type: NRG; PAM sequence: CAG
  source 1..20: mol_type = other DNA
cttccttttccttctagggg

SEQ ID NO: 29966 - DNA, 20 bp, synthetic construct
  misc_feature 1..20: note = Description of Artificial Sequence: Synthetic oligonucleotide
  misc_feature 1..20: note = Target: SCN10A; (+) strand; PAM type: NRG; PAM sequence: CAG
  source 1..20: mol_type = other DNA
ccttttccttctaggggcag

SEQ ID NO: 29967 - DNA, 20 bp, synthetic construct
  misc_feature 1..20: note = Description of Artificial Sequence: Synthetic oligonucleotide
  misc_feature 1..20: note = Target: SCN10A; (+) strand; PAM type: NRG; PAM sequence: CAG
  source 1..20: mol_type = other DNA
ttccttctaggggcagcagt

SEQ ID NO: 29968 - DNA, 20 bp, synthetic construct
  misc_feature 1..20: note = Description of Artificial Sequence: Synthetic oligonucleotide
  misc_feature 1..20: note = Target: SCN10A; (+) strand; PAM type: NRG; PAM sequence: AGG
  source 1..20: mol_type = other DNA
tccttctaggggcagcagtc

SEQ ID NO: 29969 - DNA, 20 bp, synthetic construct
  misc_feature 1..20: note = Description of Artificial Sequence: Synthetic oligonucleotide
  misc_feature 1..20: note = Target: SCN10A; (+) strand; PAM type: NRG; PAM sequence: CAG
  source 1..20: mol_type = other DNA
acaaccttgaaactgatttt

SEQ ID NO: 29970 - DNA, 20 bp, synthetic construct
  misc_feature 1..20: note = Description of Artificial Sequence: Synthetic oligonucleotide
  misc_feature 1..20: note = Target: SCN10A; (+) strand; PAM type: NRG; PAM sequence: GAG
  source 1..20: mol_type = other DNA
aaccttgaaactgattttca

SEQ ID NO: 29971 - DNA, 20 bp, synthetic construct
  misc_feature 1..20: note = Description of Artificial Sequence: Synthetic oligonucleotide
  misc_feature 1..20: note = Target: SCN10A; (+) strand; PAM type: NRG; PAM sequence: TGG
  source 1..20: mol_type = other DNA
gaaactgattttcagagact

SEQ ID NO: 29972 - DNA, 20 bp, synthetic construct
  misc_feature 1..20: note = Description of Artificial Sequence: Synthetic oligonucleotide
  misc_feature 1..20: note = Target: SCN10A; (+) strand; PAM type: NRG; PAM sequence: GAG
  source 1..20: mol_type = other DNA
aactgattttcagagacttg

SEQ ID NO: 29973 - DNA, 20 bp, synthetic construct
  misc_feature 1..20: note = Description of Artificial Sequence: Synthetic oligonucleotide
  misc_feature 1..20: note = Target: SCN10A; (+) strand; PAM type: NRG; PAM sequence: TAG
  source 1..20: mol_type = other DNA
ggagacatgatgttccctcc

SEQ ID NO: 29974 - DNA, 20 bp, synthetic construct
  misc_feature 1..20: note = Description of Artificial Sequence: Synthetic oligonucleotide
  misc_feature 1..20: note = Target: SCN10A; (+) strand; PAM type: NRG; PAM sequence: AGG
  source 1..20: mol_type = other DNA
gagacatgatgttccctcct

SEQ ID NO: 29975 - DNA, 20 bp, synthetic construct
  misc_feature 1..20: note = Description of Artificial Sequence: Synthetic oligonucleotide
  misc_feature 1..20: note = Target: SCN10A; (+) strand; PAM type: NRG; PAM sequence: GGG
  source 1..20: mol_type = other DNA
agacatgatgttccctccta

SEQ ID NO: 29976 - DNA, 20 bp, synthetic construct
  misc_feature 1..20: note = Description of Artificial Sequence: Synthetic oligonucleotide
  misc_feature 1..20: note = Target: SCN10A; (+) strand; PAM type: NRG; PAM sequence: GGG
  source 1..20: mol_type = other DNA
gacatgatgttccctcctag

SEQ ID NO: 29977 - DNA, 20 bp, synthetic construct
  misc_feature 1..20: note = Description of Artificial Sequence: Synthetic oligonucleotide
  misc_feature 1..20: note = Target: SCN10A; (+) strand; PAM type: NRG; PAM sequence: GAG
  source 1..20: mol_type = other DNA
tccctcctaggggctatgct

SEQ ID NO: 29978 - DNA, 20 bp, synthetic construct
  misc_feature 1..20: note = Description of Artificial Sequence: Synthetic oligonucleotide
  misc_feature 1..20: note = Target: SCN10A; (+) strand; PAM type: NRG; PAM sequence: GAG
  source 1..20: mol_type = other DNA
cctcctaggggctatgctga

SEQ ID NO: 29979 - DNA, 20 bp, synthetic construct
  misc_feature 1..20: note = Description of Artificial Sequence: Synthetic oligonucleotide
  misc_feature 1..20: note = Target: SCN10A; (+) strand; PAM type: NRG; PAM sequence: GAG
  source 1..20: mol_type = other DNA
ctatgctgagagtctattct

SEQ ID NO: 29980 - DNA, 20 bp, synthetic construct
  misc_feature 1..20: note = Description of Artificial Sequence: Synthetic oligonucleotide
  misc_feature 1..20: note = Target: SCN10A; (+) strand; PAM type: NRG; PAM sequence: AGG
  source 1..20: mol_type = other DNA
tatgctgagagtctattctg

SEQ ID NO: 29981 - DNA, 20 bp, synthetic construct
  misc_feature 1..20: note = Description of Artificial Sequence: Synthetic oligonucleotide
  misc_feature 1..20: note = Target: SCN10A; (+) strand; PAM type: NRG; PAM sequence: TAG
  source 1..20: mol_type = other DNA
agagtctattctgaggaata

SEQ ID NO: 29982 - DNA, 20 bp, synthetic construct
  misc_feature 1..20: note = Description of Artificial Sequence: Synthetic oligonucleotide
  misc_feature 1..20: note = Target: SCN10A; (+) strand; PAM type: NRG; PAM sequence: CAG
  source 1..20: mol_type = other DNA
taatctgaattatatttgct

SEQ ID NO: 29983 - DNA, 20 bp, synthetic construct
  misc_feature 1..20: note = Description of Artificial Sequence: Synthetic oligonucleotide
  misc_feature 1..20: note = Target: SCN10A; (+) strand; PAM type: NRG; PAM sequence: GAG
  source 1..20: mol_type = other DNA
atctgaattatatttgctca

SEQ ID NO: 29984 - DNA, 20 bp, synthetic construct
  misc_feature 1..20: note = Description of Artificial Sequence: Synthetic oligonucleotide
  misc_feature 1..20: note = Target: SCN10A; (+) strand; PAM type: NRG; PAM sequence: AAG
  source 1..20: mol_type = other DNA
tgaattatatttgctcagag

SEQ ID NO: 29985 - DNA, 20 bp, synthetic construct
  misc_feature 1..20: note = Description of Artificial Sequence: Synthetic oligonucleotide
  misc_feature 1..20: note = Target: SCN10A; (+) strand; PAM type: NRG; PAM sequence: TGG
  source 1..20: mol_type = other DNA
attatatttgctcagagaag

SEQ ID NO: 29986 - DNA, 20 bp, synthetic construct
  misc_feature 1..20: note = Description of Artificial Sequence: Synthetic oligonucleotide
  misc_feature 1..20: note = Target: SCN10A; (+) strand; PAM type: NRG; PAM sequence: GGG
  source 1..20: mol_type = other DNA
ttatatttgctcagagaagt

SEQ ID NO: 29987 - DNA, 20 bp, synthetic construct
  misc_feature 1..20: note = Description of Artificial Sequence: Synthetic oligonucleotide
  misc_feature 1..20: note = Target: SCN10A; (+) strand; PAM type: NRG; PAM sequence: GGG
  source 1..20: mol_type = other DNA
tatatttgctcagagaagtg

SEQ ID NO: 29988 - DNA, 20 bp, synthetic construct
  misc_feature 1..20: note = Description of Artificial Sequence: Synthetic oligonucleotide
  misc_feature 1..20: note = Target: SCN10A; (+) strand; PAM type: NRG; PAM sequence: TGG
  source 1..20: mol_type = other DNA
atttgctcagagaagtgggg

SEQ ID NO: 29989 - DNA, 20 bp, synthetic construct
  misc_feature 1..20: note = Description of Artificial Sequence: Synthetic oligonucleotide
  misc_feature 1..20: note = Target: SCN10A; (+) strand; PAM type: NRG; PAM sequence: AAG
  source 1..20: mol_type = other DNA
gctcagagaagtggggtgga

SEQ ID NO: 29990 - DNA, 20 bp, synthetic construct
  misc_feature 1..20: note = Description of Artificial Sequence: Synthetic oligonucleotide
  misc_feature 1..20: note = Target: SCN10A; (+) strand; PAM type: NRG; PAM sequence: TAG
  source 1..20: mol_type = other DNA
gagaagtggggtggaaagaa

SEQ ID NO: 29991 - DNA, 20 bp, synthetic construct
  misc_feature 1..20: note = Description of Artificial Sequence: Synthetic oligonucleotide
  misc_feature 1..20: note = Target: SCN10A; (+) strand; PAM type: NRG; PAM sequence: TGG
  source 1..20: mol_type = other DNA
aagtggggtggaaagaatag

SEQ ID NO: 29992 - DNA, 20 bp, synthetic construct
  misc_feature 1..20: note = Description of Artificial Sequence: Synthetic oligonucleotide
  misc_feature 1..20: note = Target: SCN10A; (+) strand; PAM type: NRG; PAM sequence: TGG
  source 1..20: mol_type = other DNA
gggtggaaagaatagtggtt

SEQ ID NO: 29993 - DNA, 20 bp, synthetic construct
  misc_feature 1..20: note = Description of Artificial Sequence: Synthetic oligonucleotide
  misc_feature 1..20: note = Target: SCN10A; (+) strand; PAM type: NRG; PAM sequence: GGG
  source 1..20: mol_type = other DNA
ggtggaaagaatagtggttt

SEQ ID NO: 29994 - DNA, 20 bp, synthetic construct
  misc_feature 1..20: note = Description of Artificial Sequence: Synthetic oligonucleotide
  misc_feature 1..20: note = Target: SCN10A; (+) strand; PAM type: NRG; PAM sequence: TGG
  source 1..20: mol_type = other DNA
ggaaagaatagtggtttggg

SEQ ID NO: 29995 - DNA, 20 bp, synthetic construct
  misc_feature 1..20: note = Description of Artificial Sequence: Synthetic oligonucleotide
  misc_feature 1..20: note = Target: SCN10A; (+) strand; PAM type: NRG; PAM sequence: GGG
  source 1..20: mol_type = other DNA
gaaagaatagtggtttgggt

SEQ ID NO: 29996 - DNA, 20 bp, synthetic construct
  misc_feature 1..20: note = Description of Artificial Sequence: Synthetic oligonucleotide
  misc_feature 1..20: note = Target: SCN10A; (+) strand; PAM type: NRG; PAM sequence: GGG
  source 1..20: mol_type = other DNA
aaagaatagtggtttgggtg

SEQ ID NO: 29997 - DNA, 20 bp, synthetic construct
  misc_feature 1..20: note = Description of Artificial Sequence: Synthetic oligonucleotide
  misc_feature 1..20: note = Target: SCN10A; (+) strand; PAM type: NRG; PAM sequence: GAG
  source 1..20: mol_type = other DNA
tttgaaccctgattttttgt

SEQ ID NO: 29998 - DNA, 20 bp, synthetic construct
  misc_feature 1..20: note = Description of Artificial Sequence: Synthetic oligonucleotide
  misc_feature 1..20: note = Target: SCN10A; (+) strand; PAM type: NRG; PAM sequence: TGG
  source 1..20: mol_type = other DNA
accctgattttttgtgagct

SEQ ID NO: 29999 - DNA, 20 bp, synthetic construct
  misc_feature 1..20: note = Description of Artificial Sequence: Synthetic oligonucleotide
  misc_feature 1..20: note = Target: SCN10A; (+) strand; PAM type: NRG; PAM sequence: GGG
  source 1..20: mol_type = other DNA
ccctgattttttgtgagctt

SEQ ID NO: 30000 - DNA, 20 bp, synthetic construct
  misc_feature 1..20: note = Description of Artificial Sequence: Synthetic oligonucleotide
  misc_feature 1..20: note = Target: SCN10A; (+) strand; PAM type: NRG; PAM sequence: TAG
  source 1..20: mol_type = other DNA
gattttttgtgagcttgggt

SEQ ID NO: 30001 - DNA, 20 bp, synthetic construct
  misc_feature 1..20: note = Description of Artificial Sequence: Synthetic oligonucleotide
  misc_feature 1..20: note = Target: SCN10A; (+) strand; PAM type: NRG; PAM sequence: TGG
  source 1..20: mol_type = other DNA
tgtgagcttgggttagtgcc

SEQ ID NO: 30002 - DNA, 20 bp, synthetic construct
  misc_feature 1..20: note = Description of Artificial Sequence: Synthetic oligonucleotide
  misc_feature 1..20: note = Target: SCN10A; (+) strand; PAM type: NRG; PAM sequence: TAG
  source 1..20: mol_type = other DNA
agcttgggttagtgcctggc

SEQ ID NO: 30003 - DNA, 20 bp, synthetic construct
  misc_feature 1..20: note = Description of Artificial Sequence: Synthetic oligonucleotide
  misc_feature 1..20: note = Target: SCN10A; (+) strand; PAM type: NRG; PAM sequence: CAG
  source 1..20: mol_type = other DNA
gggttagtgcctggctagtc

SEQ ID NO: 30004 - DNA, 20 bp, synthetic construct
  misc_feature 1..20: note = Description of Artificial Sequence: Synthetic oligonucleotide
  misc_feature 1..20: note = Target: SCN10A; (+) strand; PAM type: NRG; PAM sequence: AGG
  source 1..20: mol_type = other DNA
ggttagtgcctggctagtcc

SEQ ID NO: 30005 - DNA, 20 bp, synthetic construct
  misc_feature 1..20: note = Description of Artificial Sequence: Synthetic oligonucleotide
  misc_feature 1..20: note = Target: SCN10A; (+) strand; PAM type: NRG; PAM sequence: GGG
  source 1..20: mol_type = other DNA
gttagtgcctggctagtcca

SEQ ID NO: 30006 - DNA, 20 bp, synthetic construct
  misc_feature 1..20: note = Description of Artificial Sequence: Synthetic oligonucleotide
  misc_feature 1..20: note = Target: SCN10A; (+) strand; PAM type: NRG; PAM sequence: AAG
  source 1..20: mol_type = other DNA
tcaccctttgtaaaatgaaa

SEQ ID NO: 30007 - DNA, 20 bp, synthetic construct
  misc_feature 1..20: note = Description of Artificial Sequence: Synthetic oligonucleotide
  misc_feature 1..20: note = Target: SCN10A; (+) strand; PAM type: NRG; PAM sequence: CAG
  source 1..20: mol_type = other DNA
cctttgtaaaatgaaaaagt

SEQ ID NO: 30008 - DNA, 20 bp, synthetic construct
  misc_feature 1..20: note = Description of Artificial Sequence: Synthetic oligonucleotide
  misc_feature 1..20: note = Target: SCN10A; (+) strand; PAM type: NRG; PAM sequence: AAG
  source 1..20: mol_type = other DNA
taaaatgaaaaagtcagact

SEQ ID NO: 30009 - DNA, 20 bp, synthetic construct
  misc_feature 1..20: note = Description of Artificial Sequence: Synthetic oligonucleotide
  misc_feature 1..20: note = Target: SCN10A; (+) strand; PAM type: NRG; PAM sequence: GAG
  source 1..20: mol_type = other DNA
aaatgaaaaagtcagactaa

SEQ ID NO: 30010 - DNA, 20 bp, synthetic construct
  misc_feature 1..20: note = Description of Artificial Sequence: Synthetic oligonucleotide
  misc_feature 1..20: note = Target: SCN10A; (+) strand; PAM type: NRG; PAM sequence: AAG
  source 1..20: mol_type = other DNA
gtcagactaagagaattcca

SEQ ID NO: 30011 - DNA, 20 bp, synthetic construct
  misc_feature 1..20: note = Description of Artificial Sequence: Synthetic oligonucleotide
  misc_feature 1..20: note = Target: SCN10A; (+) strand; PAM type: NRG; PAM sequence: TAG
  source 1..20: mol_type = other DNA
agagaattccaaagttctga

SEQ ID NO: 30012 - DNA, 20 bp, synthetic construct
  misc_feature 1..20: note = Description of Artificial Sequence: Synthetic oligonucleotide
  misc_feature 1..20: note = Target: SCN10A; (+) strand; PAM type: NRG; PAM sequence: CAG
  source 1..20: mol_type = other DNA
ccaaagttctgatagctctg

SEQ ID NO: 30013 - DNA, 20 bp, synthetic construct
  misc_feature 1..20: note = Description of Artificial Sequence: Synthetic oligonucleotide
  misc_feature 1..20: note = Target: SCN10A; (+) strand; PAM type: NRG; PAM sequence: AAG
  source 1..20: mol_type = other DNA
tagctctgcagttcttcaaa

SEQ ID NO: 30014 - DNA, 20 bp, synthetic construct
  misc_feature 1..20: note = Description of Artificial Sequence: Synthetic oligonucleotide
  misc_feature 1..20: note = Target: SCN10A; (+) strand; PAM type: NRG; PAM sequence: TGG
  source 1..20: mol_type = other DNA
gcagttcttcaaaaagtttc

SEQ ID NO: 30015 - DNA, 20 bp, synthetic construct
  misc_feature 1..20: note = Description of Artificial Sequence: Synthetic oligonucleotide
  misc_feature 1..20: note = Target: SCN10A; (+) strand; PAM type: NRG; PAM sequence: TGG
  source 1..20: mol_type = other DNA
tcttcaaaaagtttctggta

SEQ ID NO: 30016 - DNA, 20 bp, synthetic construct
  misc_feature 1..20: note = Description of Artificial Sequence: Synthetic oligonucleotide
  misc_feature 1..20: note = Target: SCN10A; (+) strand; PAM type: NRG; PAM sequence: GGG
  source 1..20: mol_type = other DNA
cttcaaaaagtttctggtat

SEQ ID NO: 30017 - DNA, 20 bp, synthetic construct
  misc_feature 1..20: note = Description of Artificial Sequence: Synthetic oligonucleotide
  misc_feature 1..20: note = Target: SCN10A; (+) strand; PAM type: NRG; PAM sequence: GAG
  source 1..20: mol_type = other DNA
agtttctggtatgggtccat

SEQ ID NO: 30018 - DNA, 20 bp, synthetic construct
  misc_feature 1..20: note = Description of Artificial Sequence: Synthetic oligonucleotide
  misc_feature 1..20: note = Target: SCN10A; (+) strand; PAM type: NRG; PAM sequence: TAG
  source 1..20: mol_type = other DNA
tggtatgggtccatgagatc

SEQ ID NO: 30019 - DNA, 20 bp, synthetic construct
  misc_feature 1..20: note = Description of Artificial Sequence: Synthetic oligonucleotide
  misc_feature 1..20: note = Target: SCN10A; (+) strand; PAM type: NRG; PAM sequence: TAG
  source 1..20: mol_type = other DNA
tccatgagatctagcttcaa

SEQ ID NO: 30020 - DNA, 20 bp, synthetic construct
  misc_feature 1..20: note = Description of Artificial Sequence: Synthetic oligonucleotide
  misc_feature 1..20: note = Target: SCN10A; (+) strand; PAM type: NRG; PAM sequence: GAG
  source 1..20: mol_type = other DNA
tctagcttcaatagatatct

SEQ ID NO: 30021 - DNA, 20 bp, synthetic construct
  misc_feature 1..20: note = Description of Artificial Sequence: Synthetic oligonucleotide
  misc_feature 1..20: note = Target: SCN10A; (+) strand; PAM type: NRG; PAM sequence: GAG
  source 1..20: mol_type = other DNA
agatataatgactgacttgt

SEQ ID NO: 30022 - DNA, 20 bp, synthetic construct
  misc_feature 1..20: note = Description of Artificial Sequence: Synthetic oligonucleotide
  misc_feature 1..20: note = Target: SCN10A; (+) strand; PAM type: NRG; PAM sequence: TGG
  source 1..20: mol_type = other DNA
actgacttgtgagccccttt

SEQ ID NO: 30023 - DNA, 20 bp, synthetic construct
  misc_feature 1..20: note = Description of Artificial Sequence: Synthetic oligonucleotide
  misc_feature 1..20: note = Target: SCN10A; (+) strand; PAM type: NRG; PAM sequence: CAG
  source 1..20: mol_type = other DNA
gtgagccccttttggtctgt

SEQ ID NO: 30024 - DNA, 20 bp, synthetic construct
  misc_feature 1..20: note = Description of Artificial Sequence: Synthetic oligonucleotide
  misc_feature 1..20: note = Target: SCN10A; (+) strand; PAM type: NRG; PAM sequence: AAG
  source 1..20: mol_type = other DNA
ttggtctgtcagttttcttt

SEQ ID NO: 30025 - DNA, 20 bp, synthetic construct
  misc_feature 1..20: note = Description of Artificial Sequence: Synthetic oligonucleotide
  misc_feature 1..20: note = Target: SCN10A; (+) strand; PAM type: NRG; PAM sequence: TGG
  source 1..20: mol_type = other DNA
gtctgtcagttttctttaag

SEQ ID NO: 30026 - DNA, 20 bp, synthetic construct
  misc_feature 1..20: note = Description of Artificial Sequence: Synthetic oligonucleotide
  misc_feature 1..20: note = Target: SCN10A; (+) strand; PAM type: NRG; PAM sequence: TGG
  source 1..20: mol_type = other DNA
tgtcagttttctttaagtgg

SEQ ID NO: 30027 - DNA, 20 bp, synthetic construct
  misc_feature 1..20: note = Description of Artificial Sequence: Synthetic oligonucleotide
  misc_feature 1..20: note = Target: SCN10A; (+) strand; PAM type: NRG; PAM sequence: AAG
  source 1..20: mol_type = other DNA
tttctttaagtggtggtcca

SEQ ID NO: 30028 - DNA, 20 bp, synthetic construct
  misc_feature 1..20: note = Description of Artificial Sequence: Synthetic oligonucleotide
  misc_feature 1..20: note = Target: SCN10A; (+) strand; PAM type: NRG; PAM sequence: AAG
  source 1..20: mol_type = other DNA
gtggtggtccaaagactgca

SEQ ID NO: 30029 - DNA, 20 bp, synthetic construct
  misc_feature 1..20: note = Description of Artificial Sequence: Synthetic oligonucleotide
  misc_feature 1..20: note = Target: SCN10A; (+) strand; PAM type: NRG; PAM sequence: AGG
  source 1..20: mol_type = other DNA
tggtggtccaaagactgcaa

SEQ ID NO: 30030 - DNA, 20 bp, synthetic construct
  misc_feature 1..20: note = Description of Artificial Sequence: Synthetic oligonucleotide
  misc_feature 1..20: note = Target: SCN10A; (+) strand; PAM type: NRG; PAM sequence: CAG
  source 1..20: mol_type = other DNA
ggtccaaagactgcaaagga

SEQ ID NO: 30031 - DNA, 20 bp, synthetic construct
  misc_feature 1..20: note = Description of Artificial Sequence: Synthetic oligonucleotide
  misc_feature 1..20: note = Target: SCN10A; (+) strand; PAM type: NRG; PAM sequence: AAG
  source 1..20: mol_type = other DNA
gacagaaacttacatgaaaa

SEQ ID NO: 30032 - DNA, 20 bp, synthetic construct
  misc_feature 1..20: note = Description of Artificial Sequence: Synthetic oligonucleotide
  misc_feature 1..20: note = Target: SCN10A; (+) strand; PAM type: NRG; PAM sequence: TAG
  source 1..20: mol_type = other DNA
catgaaaaaagttcccctgc

SEQ ID NO: 30033 - DNA, 20 bp, synthetic construct
  misc_feature 1..20: note = Description of Artificial Sequence: Synthetic oligonucleotide
  misc_feature 1..20: note = Target: SCN10A; (+) strand; PAM type: NRG; PAM sequence: AGG
  source 1..20: mol_type = other DNA
atgaaaaaagttcccctgct

SEQ ID NO: 30034 - DNA, 20 bp, synthetic construct
  misc_feature 1..20: note = Description of Artificial Sequence: Synthetic oligonucleotide
  misc_feature 1..20: note = Target: SCN10A; (+) strand; PAM type: NRG; PAM sequence: AAG
  source 1..20: mol_type = other DNA
ttcccctgctaggaactttg

SEQ ID NO: 30035 - DNA, 20 bp, synthetic construct
  misc_feature 1..20: note = Description of Artificial Sequence: Synthetic oligonucleotide
  misc_feature 1..20: note = Target: SCN10A; (+) strand; PAM type: NRG; PAM sequence: AGG
  source 1..20: mol_type = other DNA
tcccctgctaggaactttga

SEQ ID NO: 30036 - DNA, 20 bp, synthetic construct
  misc_feature 1..20: note = Description of Artificial Sequence: Synthetic oligonucleotide
  misc_feature 1..20: note = Target: SCN10A; (+) strand; PAM type: NRG; PAM sequence: CAG
  source 1..20: mol_type = other DNA
gctaggaactttgaaggtgc

SEQ ID NO: 30037 - DNA, 20 bp, synthetic construct
  misc_feature 1..20: note = Description of Artificial Sequence: Synthetic oligonucleotide
  misc_feature 1..20: note = Target: SCN10A; (+) strand; PAM type: NRG; PAM sequence: AGG
  source 1..20: mol_type = other DNA
ctaggaactttgaaggtgcc

SEQ ID NO: 30038 - DNA, 20 bp, synthetic construct
  misc_feature 1..20: note = Description of Artificial Sequence: Synthetic oligonucleotide
  misc_feature 1..20: note = Target: SCN10A; (+) strand; PAM type: NRG; PAM sequence: GGG
  source 1..20: mol_type = other DNA
taggaactttgaaggtgcca

SEQ ID NO: 30039 - DNA, 20 bp, synthetic construct
  misc_feature 1..20: note = Description of Artificial Sequence: Synthetic oligonucleotide
  misc_feature 1..20: note = Target: SCN10A; (+) strand; PAM type: NRG; PAM sequence: GAG
  source 1..20: mol_type = other DNA
ggaactttgaaggtgccagg

SEQ ID NO: 30040 - DNA, 20 bp, synthetic construct
  misc_feature 1..20: note = Description of Artificial Sequence: Synthetic oligonucleotide
  misc_feature 1..20: note = Target: SCN10A; (+) strand; PAM type: NRG; PAM sequence: TAG
  source 1..20: mol_type = other DNA
aaggtgccagggagatgtca

SEQ ID NO: 30041 - DNA, 20 bp, synthetic construct
  misc_feature 1..20: note = Description of Artificial Sequence: Synthetic oligonucleotide
  misc_feature 1..20: note = Target: SCN10A; (+) strand; PAM type: NRG; PAM sequence: CGG
  source 1..20: mol_type = other DNA
ccagggagatgtcatagata

SEQ ID NO: 30042 - DNA, 20 bp, synthetic construct
  misc_feature 1..20: note = Description of Artificial Sequence: Synthetic oligonucleotide
  misc_feature 1..20: note = Target: SCN10A; (+) strand; PAM type: NRG; PAM sequence: GGG
  source 1..20: mol_type = other DNA
cagggagatgtcatagatac

SEQ ID NO: 30043 - DNA, 20 bp, synthetic construct
  misc_feature 1..20: note = Description of Artificial Sequence: Synthetic oligonucleotide
  misc_feature 1..20: note = Target: SCN10A; (+) strand; PAM type: NRG; PAM sequence: GAG
  source 1..20: mol_type = other DNA
gggctatgaccctgtcctgt

SEQ ID NO: 30044 - DNA, 20 bp, synthetic construct
  misc_feature 1..20: note = Description of Artificial Sequence: Synthetic oligonucleotide
  misc_feature 1..20: note = Target: SCN10A; (+) strand; PAM type: NRG; PAM sequence: TAG
  source 1..20: mol_type = other DNA
gaccctgtcctgtgagatct

SEQ ID NO: 30045 - DNA, 20 bp, synthetic construct
  misc_feature 1..20: note = Description of Artificial Sequence: Synthetic oligonucleotide
  misc_feature 1..20: note = Target: SCN10A; (+) strand; PAM type: NRG; PAM sequence: CAG
  source 1..20: mol_type = other DNA
gtgagatcttagccacacca

SEQ ID NO: 30046 - DNA, 20 bp, synthetic construct
  misc_feature 1..20: note = Description of Artificial Sequence: Synthetic oligonucleotide
  misc_feature 1..20: note = Target: SCN10A; (+) strand; PAM type: NRG; PAM sequence: TGG
  source 1..20: mol_type = other DNA
gatcttagccacaccacaga

SEQ ID NO: 30047 - DNA, 20 bp, synthetic construct
  misc_feature 1..20: note = Description of Artificial Sequence: Synthetic oligonucleotide
  misc_feature 1..20: note = Target: SCN10A; (+) strand; PAM type: NRG; PAM sequence: TGG
  source 1..20: mol_type = other DNA
cttagccacaccacagatgg

SEQ ID NO: 30048 - DNA, 20 bp, synthetic construct
  misc_feature 1..20: note = Description of Artificial Sequence: Synthetic oligonucleotide
  misc_feature 1..20: note = Target: SCN10A; (+) strand; PAM type: NRG; PAM sequence: GGG
  source 1..20: mol_type = other DNA
ttagccacaccacagatggt

SEQ ID NO: 30049 - DNA, 20 bp, synthetic construct
  misc_feature 1..20: note = Description of Artificial Sequence: Synthetic oligonucleotide
  misc_feature 1..20: note = Target: SCN10A; (+) strand; PAM type: NRG; PAM sequence: CAG
  source 1..20: mol_type = other DNA
cacagatggtgggctgaatt

SEQ ID NO: 30050 - DNA, 20 bp, synthetic construct
  misc_feature 1..20: note = Description of Artificial Sequence: Synthetic oligonucleotide
  misc_feature 1..20: note = Target: SCN10A; (+) strand; PAM type: NRG; PAM sequence: AGG
  source 1..20: mol_type = other DNA
acagatggtgggctgaattc

SEQ ID NO: 30051 - DNA, 20 bp, synthetic construct
  misc_feature 1..20: note = Description of Artificial Sequence: Synthetic oligonucleotide
  misc_feature 1..20: note = Target: SCN10A; (+) strand; PAM type: NRG; PAM sequence: CAG
  source 1..20: mol_type = other DNA
tggtgggctgaattcaggct

SEQ ID NO: 30052 - DNA, 20 bp, synthetic construct
  misc_feature 1..20: note = Description of Artificial Sequence: Synthetic oligonucleotide
  misc_feature 1..20: note = Target: SCN10A; (+) strand; PAM type: NRG; PAM sequence: TGG
  source 1..20: mol_type = other DNA
aattcaggctcagcttatcc

SEQ ID NO: 30053 - DNA, 20 bp, synthetic construct
  misc_feature 1..20: note = Description of Artificial Sequence: Synthetic oligonucleotide
  misc_feature 1..20: note = Target: SCN10A; (+) strand; PAM type: NRG; PAM sequence: CAG
  source 1..20: mol_type = other DNA
tcaggctcagcttatcctgg

SEQ ID NO: 30054 - DNA, 20 bp, synthetic construct
  misc_feature 1..20: note = Description of Artificial Sequence: Synthetic oligonucleotide
  misc_feature 1..20: note = Target: SCN10A; (+) strand; PAM type: NRG; PAM sequence: TAG
  source 1..20: mol_type = other DNA
gctcagcttatcctggcagt

SEQ ID NO: 30055 - DNA, 20 bp, synthetic construct
  misc_feature 1..20: note = Description of Artificial Sequence: Synthetic oligonucleotide
  misc_feature 1..20: note = Target: SCN10A; (+) strand; PAM type: NRG; PAM sequence: AGG
  source 1..20: mol_type = other DNA
ctcagcttatcctggcagtt

SEQ ID NO: 30056 - DNA, 20 bp, synthetic construct
  misc_feature 1..20: note = Description of Artificial Sequence: Synthetic oligonucleotide
  misc_feature 1..20: note = Target: SCN10A; (+) strand; PAM type: NRG; PAM sequence: TGG
  source 1..20: mol_type = other DNA
agcttatcctggcagttagg

SEQ ID NO: 30057 - DNA, 20 bp, synthetic construct
  misc_feature 1..20: note = Description of Artificial Sequence: Synthetic oligonucleotide
  misc_feature 1..20: note = Target: SCN10A; (+) strand; PAM type: NRG; PAM sequence: GGG
  source 1..20: mol_type = other DNA
gcttatcctggcagttaggt

SEQ ID NO: 30058 - DNA, 20 bp, synthetic construct
  misc_feature 1..20: note = Description of Artificial Sequence: Synthetic oligonucleotide
  misc_feature 1..20: note = Target: SCN10A; (+) strand; PAM type: NRG; PAM sequence: CAG
  source 1..20: mol_type = other DNA
gcagttaggtgggatgcaca

SEQ ID NO: 30059 - DNA, 20 bp, synthetic construct
  misc_feature 1..20: note = Description of Artificial Sequence: Synthetic oligonucleotide
  misc_feature 1..20: note = Target: SCN10A; (+) strand; PAM type: NRG; PAM sequence: AGG
  source 1..20: mol_type = other DNA
cagttaggtgggatgcacac

SEQ ID NO: 30060 - DNA, 20 bp, synthetic construct
  misc_feature 1..20: note = Description of Artificial Sequence: Synthetic oligonucleotide
  misc_feature 1..20: note = Target: SCN10A; (+) strand; PAM type: NRG; PAM sequence: GAG
  source 1..20: mol_type = other DNA
gttaggtgggatgcacacag

SEQ ID NO: 30061 - DNA, 20 bp, synthetic construct
  misc_feature 1..20: note = Description of Artificial Sequence: Synthetic oligonucleotide
  misc_feature 1..20: note = Target: SCN10A; (+) strand; PAM type: NRG; PAM sequence: CAG
  source 1..20: mol_type = other DNA
tgggatgcacacaggagctt

SEQ ID NO: 30062 - DNA, 20 bp, synthetic construct
  misc_feature 1..20: note = Description of Artificial Sequence: Synthetic oligonucleotide
  misc_feature 1..20: note = Target: SCN10A; (+) strand; PAM type: NRG; PAM sequence: AAG
  source 1..20: mol_type = other DNA
tgcacacaggagcttcagaa

SEQ ID NO: 30063 - DNA, 20 bp, synthetic construct
  misc_feature 1..20: note = Description of Artificial Sequence: Synthetic oligonucleotide
  misc_feature 1..20: note = Target: SCN10A; (+) strand; PAM type: NRG; PAM sequence: AAG
  source 1..20: mol_type = other DNA
acacaggagcttcagaaaag

SEQ ID NO: 30064 - DNA, 20 bp, synthetic construct
  misc_feature 1..20: note = Description of Artificial Sequence: Synthetic oligonucleotide
  misc_feature 1..20: note = Target: SCN10A; (+) strand; PAM type: NRG; PAM sequence: AGG
  source 1..20: mol_type = other DNA
cacaggagcttcagaaaaga

SEQ ID NO: 30065 - DNA, 20 bp, synthetic construct
  misc_feature 1..20: note = Description of Artificial Sequence: Synthetic oligonucleotide
  misc_feature 1..20: note = Target: SCN10A; (+) strand; PAM type: NRG; PAM sequence: GGG
  source 1..20: mol_type = other DNA
acaggagcttcagaaaagaa

SEQ ID NO: 30066 - DNA, 20 bp, synthetic construct
  misc_feature 1..20: note = Description of Artificial Sequence: Synthetic oligonucleotide
  misc_feature 1..20: note = Target: SCN10A; (+) strand; PAM type: NRG; PAM sequence: GAG
  source 1..20: mol_type = other DNA
aaaagaagggctttatactt

SEQ ID NO: 30067 - DNA, 20 bp, synthetic construct
  misc_feature 1..20: note = Description of Artificial Sequence: Synthetic oligonucleotide
  misc_feature 1..20: note = Target: SCN10A; (+) strand; PAM type: NRG; PAM sequence: TGG
  source 1..20: mol_type = other DNA
agaagggctttatacttgag

SEQ ID NO: 30068 - DNA, 20 bp, synthetic construct
  misc_feature 1..20: note = Description of Artificial Sequence: Synthetic oligonucleotide
  misc_feature 1..20: note = Target: SCN10A; (+) strand; PAM type: NRG; PAM sequence: CAG
  source 1..20: mol_type = other DNA
agggctttatacttgagtgg

SEQ ID NO: 30069 - DNA, 20 bp, synthetic construct
  misc_feature 1..20: note = Description of Artificial Sequence: Synthetic oligonucleotide
  misc_feature 1..20: note = Target: SCN10A; (+) strand; PAM type: NRG; PAM sequence: GAG
  source 1..20: mol_type = other DNA
ggctttatacttgagtggca

SEQ ID NO: 30070 - DNA, 20 bp, synthetic construct
  misc_feature 1..20: note = Description of Artificial Sequence: Synthetic oligonucleotide
  misc_feature 1..20: note = Target: SCN10A; (+) strand; PAM type: NRG; PAM sequence: AAG
  source 1..20: mol_type = other DNA
tacttgagtggcagagcccc

SEQ ID NO: 30071 - DNA, 20 bp, synthetic construct
  misc_feature 1..20: note = Description of Artificial Sequence: Synthetic oligonucleotide
  misc_feature 1..20: note = Target: SCN10A; (+) strand; PAM type: NRG; PAM sequence: TGG
  source 1..20: mol_type = other DNA
cccaagcaatgtccattctt

SEQ ID NO: 30072 - DNA, 20 bp, synthetic construct
  misc_feature 1..20: note = Description of Artificial Sequence: Synthetic oligonucleotide
  misc_feature 1..20: note = Target: SCN10A; (+) strand; PAM type: NRG; PAM sequence: GAG
  source 1..20: mol_type = other DNA
gcaatgtccattctttggat

SEQ ID NO: 30073 - DNA, 20 bp, synthetic construct
  misc_feature 1..20: note = Description of Artificial Sequence: Synthetic oligonucleotide
  misc_feature 1..20: note = Target: SCN10A; (+) strand; PAM type: NRG; PAM sequence: TGG
  source 1..20: mol_type = other DNA
atgtccattctttggatgag

SEQ ID NO: 30074 - DNA, 20 bp, synthetic construct
  misc_feature 1..20: note = Description of Artificial Sequence: Synthetic oligonucleotide
  misc_feature 1..20: note = Target: SCN10A; (+) strand; PAM type: NRG; PAM sequence: CAG
  source 1..20: mol_type = other DNA
ggatgagtggcttattgcac

SEQ ID NO: 30075 - DNA, 20 bp, synthetic construct
  misc_feature 1..20: note = Description of Artificial Sequence: Synthetic oligonucleotide
  misc_feature 1..20: note = Target: SCN10A; (+) strand; PAM type: NRG; PAM sequence: AGG
  source 1..20: mol_type = other DNA
gatgagtggcttattgcacc

SEQ ID NO: 30076 - DNA, 20 bp, synthetic construct
  misc_feature 1..20: note = Description of Artificial Sequence: Synthetic oligonucleotide
  misc_feature 1..20: note = Target: SCN10A; (+) strand; PAM type: NRG; PAM sequence: AAG
  source 1..20: mol_type = other DNA
tggcttattgcaccaggaca

SEQ ID NO: 30077 - DNA, 20 bp, synthetic construct
  misc_feature 1..20: note = Description of Artificial Sequence: Synthetic oligonucleotide
  misc_feature 1..20: note = Target: SCN10A; (+) strand; PAM type: NRG; PAM sequence: CGG
  source 1..20: mol_type = other DNA
attgcaccaggacaaagaac

SEQ ID NO: 30078 - DNA, 20 bp, synthetic construct
  misc_feature 1..20: note = Description of Artificial Sequence: Synthetic oligonucleotide
  misc_feature 1..20: note = Target: SCN10A; (+) strand; PAM type: NRG; PAM sequence: TGG
  source 1..20: mol_type = other DNA
accaggacaaagaaccggaa

SEQ ID NO: 30079 - DNA, 20 bp, synthetic construct
  misc_feature 1..20: note = Description of Artificial Sequence: Synthetic oligonucleotide
  misc_feature 1..20: note = Target: SCN10A; (+) strand; PAM type: NRG; PAM sequence: AAG
  source 1..20: mol_type = other DNA
aggacaaagaaccggaatgg

SEQ ID NO: 30080 - DNA, 20 bp, synthetic construct
  misc_feature 1..20: note = Description of Artificial Sequence: Synthetic oligonucleotide
  misc_feature 1..20: note = Target: SCN10A; (+) strand; PAM type: NRG; PAM sequence: AGG
  source 1..20: mol_type = other DNA
ggacaaagaaccggaatgga

SEQ ID NO: 30081 - DNA, 20 bp, synthetic construct
  misc_feature 1..20: note = Description of Artificial Sequence: Synthetic oligonucleotide
  misc_feature 1..20: note = Target: SCN10A; (+) strand; PAM type: NRG; PAM sequence: GGG
  source 1..20: mol_type = other DNA
gacaaagaaccggaatggaa

SEQ ID NO: 30082 - DNA, 20 bp, synthetic construct
  misc_feature 1..20: note = Description of Artificial Sequence: Synthetic oligonucleotide
  misc_feature 1..20: note = Target: SCN10A; (+) strand; PAM type: NRG; PAM sequence: AAG
  source 1..20: mol_type = other DNA
ccctcttccttcattcatgc

SEQ ID NO: 30083 - DNA, 20 bp, synthetic construct
  misc_feature 1..20: note = Description of Artificial Sequence: Synthetic oligonucleotide
  misc_feature 1..20: note = Target: SCN10A; (+) strand; PAM type: NRG; PAM sequence: AGG
  source 1..20: mol_type = other DNA
cctcttccttcattcatgca

SEQ ID NO: 30084 - DNA, 20 bp, synthetic construct
  misc_feature 1..20: note = Description of Artificial Sequence: Synthetic oligonucleotide
  misc_feature 1..20: note = Target: SCN10A; (+) strand; PAM type: NRG; PAM sequence: CAG
  source 1..20: mol_type = other DNA
ccttcattcatgcaaggctc

SEQ ID NO: 30085 - DNA, 20 bp, synthetic construct
  misc_feature 1..20: note = Description of Artificial Sequence: Synthetic oligonucleotide
  misc_feature 1..20: note = Target: SCN10A; (+) strand; PAM type: NRG; PAM sequence: CAG
  source 1..20: mol_type = other DNA
tcatgcaaggctccagacat

SEQ ID NO: 30086 - DNA, 20 bp, synthetic construct
  misc_feature 1..20: note = Description of Artificial Sequence: Synthetic oligonucleotide
  misc_feature 1..20: note = Target: SCN10A; (+) strand; PAM type: NRG; PAM sequence: CAG
  source 1..20: mol_type = other DNA
tgcaaggctccagacatcag

SEQ ID NO: 30087 - DNA, 20 bp, synthetic construct
  misc_feature 1..20: note = Description of Artificial Sequence: Synthetic oligonucleotide
  misc_feature 1..20: note = Target: SCN10A; (+) strand; PAM type: NRG; PAM sequence: AGG
  source 1..20: mol_type = other DNA
gcaaggctccagacatcagc

SEQ ID NO: 30088 - DNA, 20 bp, synthetic construct
  misc_feature 1..20: note = Description of Artificial Sequence: Synthetic oligonucleotide
  misc_feature 1..20: note = Target: SCN10A; (+) strand; PAM type: NRG; PAM sequence: GAG
  source 1..20: mol_type = other DNA
ggctccagacatcagcaggt

SEQ ID NO: 30089 - DNA, 20 bp, synthetic construct
  misc_feature 1..20: note = Description of Artificial Sequence: Synthetic oligonucleotide
  misc_feature 1..20: note = Target: SCN10A; (+) strand; PAM type: NRG; PAM sequence: CAG
  source 1..20: mol_type = other DNA
agacatcagcaggtgagacc

SEQ ID NO: 30090 - DNA, 20 bp, synthetic construct
  misc_feature 1..20: note = Description of Artificial Sequence: Synthetic oligonucleotide
  misc_feature 1..20: note = Target: SCN10A; (+) strand; PAM type: NRG; PAM sequence: TGG
  source 1..20: mol_type = other DNA
gcaggtgagacccagctgcc

SEQ ID NO: 30091 - DNA, 20 bp, synthetic construct
  misc_feature 1..20: note = Description of Artificial Sequence: Synthetic oligonucleotide
  misc_feature 1..20: note = Target: SCN10A; (+) strand; PAM type: NRG; PAM sequence: GGG
  source 1..20: mol_type = other DNA
caggtgagacccagctgcct

SEQ ID NO: 30092 - DNA, 20 bp, synthetic construct
  misc_feature 1..20: note = Description of Artificial Sequence: Synthetic oligonucleotide
  misc_feature 1..20: note = Target: SCN10A; (+) strand; PAM type: NRG; PAM sequence: GAG
  source 1..20: mol_type = other DNA
acccagctgcctgggtgcat

SEQ ID NO: 30093 - DNA, 20 bp, synthetic construct
  misc_feature 1..20: note = Description of Artificial Sequence: Synthetic oligonucleotide
  misc_feature 1..20: note = Target: SCN10A; (+) strand; PAM type: NRG; PAM sequence: AGG
  source 1..20: mol_type = other DNA
cccagctgcctgggtgcatg

SEQ ID NO: 30094 - DNA, 20 bp, synthetic construct
  misc_feature 1..20: note = Description of Artificial Sequence: Synthetic oligonucleotide
  misc_feature 1..20: note = Target: SCN10A; (+) strand; PAM type: NRG; PAM sequence: GGG
  source 1..20: mol_type = other DNA
ccagctgcctgggtgcatga

SEQ ID NO: 30095 - DNA, 20 bp, synthetic construct
  misc_feature 1..20: note = Description of Artificial Sequence: Synthetic oligonucleotide
  misc_feature 1..20: note = Target: SCN10A; (+) strand; PAM type: NRG; PAM sequence: TAG
  source 1..20: mol_type = other DNA
gctgcctgggtgcatgaggg

SEQ ID NO: 30096 - DNA, 20 bp, synthetic construct
  misc_feature 1..20: note = Description of Artificial Sequence: Synthetic oligonucleotide
  misc_feature 1..20: note = Target: SCN10A; (+) strand; PAM type: NRG; PAM sequence: AGG
  source 1..20: mol_type = other DNA
ctgcctgggtgcatgagggt

SEQ ID NO: 30097 - DNA, 20 bp, synthetic construct
  misc_feature 1..20: note = Description of Artificial Sequence: Synthetic oligonucleotide
  misc_feature 1..20: note = Target: SCN10A; (+) strand; PAM type: NRG; PAM sequence: GGG
  source 1..20: mol_type = other DNA
tgcctgggtgcatgagggta

SEQ ID NO: 30098 - DNA, 20 bp, synthetic construct
  misc_feature 1..20: note = Description of Artificial Sequence: Synthetic oligonucleotide
  misc_feature 1..20: note = Target: SCN10A; (+) strand; PAM type: NRG; PAM sequence: GAG
  source 1..20: mol_type = other DNA
cctgggtgcatgagggtagg

SEQ ID NO: 30099 - DNA, 20 bp, synthetic construct
  misc_feature 1..20: note = Description of Artificial Sequence: Synthetic oligonucleotide
  misc_feature 1..20: note = Target: SCN10A; (+) strand; PAM type: NRG; PAM sequence: AGG
  source 1..20: mol_type = other DNA
ctgggtgcatgagggtaggg

SEQ ID NO: 30100 - DNA, 20 bp, synthetic construct
  misc_feature 1..20: note = Description of Artificial Sequence: Synthetic oligonucleotide
  misc_feature 1..20: note = Target: SCN10A; (+) strand; PAM type: NRG; PAM sequence: TGG
  source 1..20: mol_type = other DNA
tgcatgagggtagggaggtt

SEQ ID NO: 30101 - DNA, 20 bp, synthetic construct
  misc_feature 1..20: note = Description of Artificial Sequence: Synthetic oligonucleotide
  misc_feature 1..20: note = Target: SCN10A; (+) strand; PAM type: NRG; PAM sequence: GGG
  source 1..20: mol_type = other DNA
gcatgagggtagggaggttt

SEQ ID NO: 30102 - DNA, 20 bp, synthetic construct
  misc_feature 1..20: note = Description of Artificial Sequence: Synthetic oligonucleotide
  misc_feature 1..20: note = Target: SCN10A; (+) strand; PAM type: NRG; PAM sequence: GGG
  source 1..20: mol_type = other DNA
catgagggtagggaggtttg

SEQ ID NO: 30103 - DNA, 20 bp, synthetic construct
  misc_feature 1..20: note = Description of Artificial Sequence: Synthetic oligonucleotide
  misc_feature 1..20: note = Target: SCN10A; (+) strand; PAM type: NRG; PAM sequence: CAG
  source 1..20: mol_type = other DNA
agggtagggaggtttggggc

SEQ ID NO: 30104 - DNA, 20 bp, synthetic construct
  misc_feature 1..20: note = Description of Artificial Sequence: Synthetic oligonucleotide
  misc_feature 1..20: note = Target: SCN10A; (+) strand; PAM type: NRG; PAM sequence: CAG
  source 1..20: mol_type = other DNA
gttccatgctgaaccctatt

SEQ ID NO: 30105 - DNA, 20 bp, synthetic construct
  misc_feature 1..20: note = Description of Artificial Sequence: Synthetic oligonucleotide
  misc_feature 1..20: note = Target: SCN10A; (+) strand; PAM type: NRG; PAM sequence: CAG
  source 1..20: mol_type = other DNA
accctattcagtcttttgct

SEQ ID NO: 30106 - DNA, 20 bp, synthetic construct
  misc_feature 1..20: note = Description of Artificial Sequence: Synthetic oligonucleotide
  misc_feature 1..20: note = Target: SCN10A; (+) strand; PAM type: NRG; PAM sequence: TGG
  source 1..20: mol_type = other DNA
cagtcttttgctcagccccc

SEQ ID NO: 30107 - DNA, 20 bp, synthetic construct
  misc_feature 1..20: note = Description of Artificial Sequence: Synthetic oligonucleotide
  misc_feature 1..20: note = Target: SCN10A; (+) strand; PAM type: NRG; PAM sequence: GGG
  source 1..20: mol_type = other DNA
agtcttttgctcagccccct

SEQ ID NO: 30108 - DNA, 20 bp, synthetic construct
  misc_feature 1..20: note = Description of Artificial Sequence: Synthetic oligonucleotide
  misc_feature 1..20: note = Target: SCN10A; (+) strand; PAM type: NRG; PAM sequence: AAG
  source 1..20: mol_type = other DNA
cttttgctcagccccctggg

SEQ ID NO: 30109 - DNA, 20 bp, synthetic construct
  misc_feature 1..20: note = Description of Artificial Sequence: Synthetic oligonucleotide
  misc_feature 1..20: note = Target: SCN10A; (+) strand; PAM type: NRG; PAM sequence: TGG
  source 1..20: mol_type = other DNA
cctgggaagtctgcctcaca

SEQ ID NO: 30110 - DNA, 20 bp, synthetic construct
  misc_feature 1..20: note = Description of Artificial Sequence: Synthetic oligonucleotide
  misc_feature 1..20: note = Target: SCN10A; (+) strand; PAM type: NRG; PAM sequence: CAG
  source 1..20: mol_type = other DNA
tgcctcacatggataatctg

SEQ ID NO: 30111 - DNA, 20 bp, synthetic construct
  misc_feature 1..20: note = Description of Artificial Sequence: Synthetic oligonucleotide
  misc_feature 1..20: note = Target: SCN10A; (+) strand; PAM type: NRG; PAM sequence: TGG
  source 1..20: mol_type = other DNA
tcacatggataatctgcagc

SEQ ID NO: 30112 - DNA, 20 bp, synthetic construct
  misc_feature 1..20: note = Description of Artificial Sequence: Synthetic oligonucleotide
  misc_feature 1..20: note = Target: SCN10A; (+) strand; PAM type: NRG; PAM sequence: GGG
  source 1..20: mol_type = other DNA
cacatggataatctgcagct

SEQ ID NO: 30113 - DNA, 20 bp, synthetic construct
  misc_feature 1..20: note = Description of Artificial Sequence: Synthetic oligonucleotide
  misc_feature 1..20: note = Target: SCN10A; (+) strand; PAM type: NRG; PAM sequence: GGG
  source 1..20: mol_type = other DNA
acatggataatctgcagctg

SEQ ID NO: 30114 - DNA, 20 bp, synthetic construct
  misc_feature 1..20: note = Description of Artificial Sequence: Synthetic oligonucleotide
  misc_feature 1..20: note = Target: SCN10A; (+) strand; PAM type: NRG; PAM sequence: CAG
  source 1..20: mol_type = other DNA
tggataatctgcagctgggg

SEQ ID NO: 30115 - DNA, 20 bp, synthetic construct
  misc_feature 1..20: note = Description of Artificial Sequence: Synthetic oligonucleotide
  misc_feature 1..20: note = Target: SCN10A; (+) strand; PAM type: NRG; PAM sequence: CAG
  source 1..20: mol_type = other DNA
taatctgcagctggggcaga

SEQ ID NO: 30116 - DNA, 20 bp, synthetic construct
  misc_feature 1..20: note = Description of Artificial Sequence: Synthetic oligonucleotide
  misc_feature 1..20: note = Target: SCN10A; (+) strand; PAM type: NRG; PAM sequence: AGG
  source 1..20: mol_type = other DNA
aatctgcagctggggcagac

SEQ ID NO: 30117 - DNA, 20 bp, synthetic construct
  misc_feature 1..20: note = Description of Artificial Sequence: Synthetic oligonucleotide
  misc_feature 1..20: note = Target: SCN10A; (+) strand; PAM type: NRG; PAM sequence: CAG
  source 1..20: mol_type = other DNA
agacaggtgctgtgcctctc

SEQ ID NO: 30118 - DNA, 20 bp, synthetic construct
  misc_feature 1..20: note = Description of Artificial Sequence: Synthetic oligonucleotide
  misc_feature 1..20: note = Target: SCN10A; (+) strand; PAM type: NRG; PAM sequence: AAG
  source 1..20: mol_type = other DNA
ggtgctgtgcctctccagca

SEQ ID NO: 30119 - DNA, 20 bp, synthetic construct
  misc_feature 1..20: note = Description of Artificial Sequence: Synthetic oligonucleotide
  misc_feature 1..20: note = Target: SCN10A; (+) strand; PAM type: NRG; PAM sequence: AAG
  source 1..20: mol_type = other DNA
ccagcaaagtctgtccaccc

SEQ ID NO: 30120 - DNA, 20 bp, synthetic construct
  misc_feature 1..20: note = Description of Artificial Sequence: Synthetic oligonucleotide
  misc_feature 1..20: note = Target: SCN10A; (+) strand; PAM type: NRG; PAM sequence: CAG
  source 1..20: mol_type = other DNA
ccacctccattcccactgct

SEQ ID NO: 30121 - DNA, 20 bp, synthetic construct
  misc_feature 1..20: note = Description of Artificial Sequence: Synthetic oligonucleotide
  misc_feature 1..20: note = Target: SCN10A; (+) strand; PAM type: NRG; PAM sequence: TAG
  source 1..20: mol_type = other DNA
attcccactgctcagcccac

SEQ ID NO: 30122 - DNA, 20 bp, synthetic construct
  misc_feature 1..20: note = Description of Artificial Sequence: Synthetic oligonucleotide
  misc_feature 1..20: note = Target: SCN10A; (+) strand; PAM type: NRG; PAM sequence: AAG
  source 1..20: mol_type = other DNA
gctcagcccactagcctccc

SEQ ID NO: 30123 - DNA, 20 bp, synthetic construct
  misc_feature 1..20: note = Description of Artificial Sequence: Synthetic oligonucleotide
  misc_feature 1..20: note = Target: SCN10A; (+) strand; PAM type: NRG; PAM sequence: TAG
  source 1..20: mol_type = other DNA
cagcccactagcctcccaag

SEQ ID NO: 30124 - DNA, 20 bp, synthetic construct
  misc_feature 1..20: note = Description of Artificial Sequence: Synthetic oligonucleotide
  misc_feature 1..20: note = Target: SCN10A; (+) strand; PAM type: NRG; PAM sequence: CAG
  source 1..20: mol_type = other DNA
ctagcctcccaagtagtctc

SEQ ID NO: 30125 - DNA, 20 bp, synthetic construct
  misc_feature 1..20: note = Description of Artificial Sequence: Synthetic oligonucleotide
  misc_feature 1..20: note = Target: SCN10A; (+) strand; PAM type: NRG; PAM sequence: AGG
  source 1..20: mol_type = other DNA
tagcctcccaagtagtctcc

SEQ ID NO: 30126 - DNA, 20 bp, synthetic construct
  misc_feature 1..20: note = Description of Artificial Sequence: Synthetic oligonucleotide
  misc_feature 1..20: note = Target: SCN10A; (+) strand; PAM type: NRG; PAM sequence: TAG
  source 1..20: mol_type = other DNA
cccaagtagtctccaggccc

SEQ ID NO: 30127 - DNA, 20 bp, synthetic construct
  misc_feature 1..20: note = Description of Artificial Sequence: Synthetic oligonucleotide
  misc_feature 1..20: note = Target: SCN10A; (+) strand; PAM type: NRG; PAM sequence: TGG
  source 1..20: mol_type = other DNA
ctcttactcccaaacatcac

SEQ ID NO: 30128 - DNA, 20 bp, synthetic construct
  misc_feature 1..20: note = Description of Artificial Sequence: Synthetic oligonucleotide
  misc_feature 1..20: note = Target: SCN10A; (+) strand; PAM type: NRG; PAM sequence: CAG
  source 1..20: mol_type = other DNA
cactggtactttatcaccct

SEQ ID NO: 30129 - DNA, 20 bp, synthetic construct
  misc_feature 1..20: note = Description of Artificial Sequence: Synthetic oligonucleotide
  misc_feature 1..20: note = Target: SCN10A; (+) strand; PAM type: NRG; PAM sequence: AGG
  source 1..20: mol_type = other DNA
actggtactttatcaccctc

SEQ ID NO: 30130 - DNA, 20 bp, synthetic construct
  misc_feature 1..20: note = Description of Artificial Sequence: Synthetic oligonucleotide
  misc_feature 1..20: note = Target: SCN10A; (+) strand; PAM type: NRG; PAM sequence: TAG
  source 1..20: mol_type = other DNA
aggataaactccatactctg

SEQ ID NO: 30131 - DNA, 20 bp, synthetic construct
  misc_feature 1..20: note = Description of Artificial Sequence: Synthetic oligonucleotide
  misc_feature 1..20: note = Target: SCN10A; (+) strand; PAM type: NRG; PAM sequence: TGG
  source 1..20: mol_type = other DNA
actctgtagcctgtgtcata

SEQ ID NO: 30132 - DNA, 20 bp, synthetic construct
  misc_feature 1..20: note = Description of Artificial Sequence: Synthetic oligonucleotide
  misc_feature 1..20: note = Target: SCN10A; (+) strand; PAM type: NRG; PAM sequence: CAG
  source 1..20: mol_type = other DNA
atggtcacaacctacttttc

SEQ ID NO: 30133 - DNA, 20 bp, synthetic construct
  misc_feature 1..20: note = Description of Artificial Sequence: Synthetic oligonucleotide
  misc_feature 1..20: note = Target: SCN10A; (+) strand; PAM type: NRG; PAM sequence: GAG
  source 1..20: mol_type = other DNA
cccaaatcaaattgttccct

SEQ ID NO: 30134 - DNA, 20 bp, synthetic construct
  misc_feature 1..20: note = Description of Artificial Sequence: Synthetic oligonucleotide
  misc_feature 1..20: note = Target: SCN10A; (+) strand; PAM type: NRG; PAM sequence: AAG
  source 1..20: mol_type = other DNA
ttgtgtctgtgcctttgttc

SEQ ID NO: 30135 - DNA, 20 bp, synthetic construct
  misc_feature 1..20: note = Description of Artificial Sequence: Synthetic oligonucleotide
  misc_feature 1..20: note = Target: SCN10A; (+) strand; PAM type: NRG; PAM sequence: AGG
  source 1..20: mol_type = other DNA
tgtgtctgtgcctttgttca

SEQ ID NO: 30136 - DNA, 20 bp, synthetic construct
  misc_feature 1..20: note = Description of Artificial Sequence: Synthetic oligonucleotide
  misc_feature 1..20: note = Target: SCN10A; (+) strand; PAM type: NRG; PAM sequence: CAG
  source 1..20: mol_type = other DNA
tctgtgcctttgttcaaggt

SEQ ID NO: 30137 - DNA, 20 bp, synthetic construct
  misc_feature 1..20: note = Description of Artificial Sequence: Synthetic oligonucleotide
  misc_feature 1..20: note = Target: SCN10A; (+) strand; PAM type: NRG; PAM sequence: TAG
  source 1..20: mol_type = other DNA
ctttgttcaaggtcagcctt

SEQ ID NO: 30138 - DNA, 20 bp, synthetic construct
  misc_feature 1..20: note = Description of Artificial Sequence: Synthetic oligonucleotide
  misc_feature 1..20: note = Target: SCN10A; (+) strand; PAM type: NRG; PAM sequence: AAG
  source 1..20: mol_type = other DNA
ttcaaggtcagcctttagct

SEQ ID NO: 30139 - DNA, 20 bp, synthetic construct
  misc_feature 1..20: note = Description of Artificial Sequence: Synthetic oligonucleotide
  misc_feature 1..20: note = Target: SCN10A; (+) strand; PAM type: NRG; PAM sequence: CGG
  source 1..20: mol_type = other DNA
aggtcagcctttagctaaga

SEQ ID NO: 30140 - DNA, 20 bp, synthetic construct
  misc_feature 1..20: note = Description of Artificial Sequence: Synthetic oligonucleotide
  misc_feature 1..20: note = Target: SCN10A; (+) strand; PAM type: NRG; PAM sequence: GGG
  source 1..20: mol_type = other DNA
ggtcagcctttagctaagac

SEQ ID NO: 30141 - DNA, 20 bp, synthetic construct
  misc_feature 1..20: note = Description of Artificial Sequence: Synthetic oligonucleotide
  misc_feature 1..20: note = Target: SCN10A; (+) strand; PAM type: NRG; PAM sequence: CAG
  source 1..20: mol_type = other DNA
tagctaagacgggccttccc

SEQ ID NO: 30142 - DNA, 20 bp, synthetic construct
  misc_feature 1..20: note = Description of Artificial Sequence: Synthetic oligonucleotide
  misc_feature 1..20: note = Target: SCN10A; (+) strand; PAM type: NRG; PAM sequence: CAG
  source 1..20: mol_type = other DNA
ggccttccccagtcctctcg

SEQ ID NO: 30143 - DNA, 20 bp, synthetic construct
  misc_feature 1..20: note = Description of Artificial Sequence: Synthetic oligonucleotide
  misc_feature 1..20: note = Target: SCN10A; (+) strand; PAM type: NRG; PAM sequence: TGG
  source 1..20: mol_type = other DNA
ccagtcctctcgcagctcct

SEQ ID NO: 30144 - DNA, 20 bp, synthetic construct
  misc_feature 1..20: note = Description of Artificial Sequence: Synthetic oligonucleotide
  misc_feature 1..20: note = Target: SCN10A; (+) strand; PAM type: NRG; PAM sequence: TAG
  source 1..20: mol_type = other DNA
acatctaatgccacctccca

SEQ ID NO: 30145 - DNA, 20 bp, synthetic construct
  misc_feature 1..20: note = Description of Artificial Sequence: Synthetic oligonucleotide
  misc_feature 1..20: note = Target: SCN10A; (+) strand; PAM type: NRG; PAM sequence: AGG
  source 1..20: mol_type = other DNA
catctaatgccacctcccat

SEQ ID NO: 30146 - DNA, 20 bp, synthetic construct
  misc_feature 1..20: note = Description of Artificial Sequence: Synthetic oligonucleotide
  misc_feature 1..20: note = Target: SCN10A; (+) strand; PAM type: NRG; PAM sequence: AAG
  source 1..20: mol_type = other DNA
ctaatgccacctcccatagg

SEQ ID NO: 30147 - DNA, 20 bp, synthetic construct
  misc_feature 1..20: note = Description of Artificial Sequence: Synthetic oligonucleotide
  misc_feature 1..20: note = Target: SCN10A; (+) strand; PAM type: NRG; PAM sequence: AAG
  source 1..20: mol_type = other DNA
attctcaaccaccccacccc

SEQ ID NO: 30148 - DNA, 20 bp, synthetic construct
  misc_feature 1..20: note = Description of Artificial Sequence: Synthetic oligonucleotide
  misc_feature 1..20: note = Target: SCN10A; (+) strand; PAM type: NRG; PAM sequence: GAG
  source 1..20: mol_type = other DNA
tctcaaccaccccaccccaa

SEQ ID NO: 30149 - DNA, 20 bp, synthetic construct
  misc_feature 1..20: note = Description of Artificial Sequence: Synthetic oligonucleotide
  misc_feature 1..20: note = Target: SCN10A; (+) strand; PAM type: NRG; PAM sequence: TGG
  source 1..20: mol_type = other DNA
caaccaccccaccccaagag

SEQ ID NO: 30150 - DNA, 20 bp, synthetic construct
  misc_feature 1..20: note = Description of Artificial Sequence: Synthetic oligonucleotide
  misc_feature 1..20: note = Target: SCN10A; (+) strand; PAM type: NRG; PAM sequence: AAG
  source 1..20: mol_type = other DNA
ccaccccaccccaagagtgg

SEQ ID NO: 30151 - DNA, 20 bp, synthetic construct
  misc_feature 1..20: note = Description of Artificial Sequence: Synthetic oligonucleotide
  misc_feature 1..20: note = Target: SCN10A; (+) strand; PAM type: NRG; PAM sequence: AAG
  source 1..20: mol_type = other DNA
ccccaccccaagagtggaag

SEQ ID NO: 30152 - DNA, 20 bp, synthetic construct
  misc_feature 1..20: note = Description of Artificial Sequence: Synthetic oligonucleotide
  misc_feature 1..20: note = Target: SCN10A; (+) strand; PAM type: NRG; PAM sequence: AGG
  source 1..20: mol_type = other DNA
cccaccccaagagtggaaga

SEQ ID NO: 30153 - DNA, 20 bp, synthetic construct
  misc_feature 1..20: note = Description of Artificial Sequence: Synthetic oligonucleotide
  misc_feature 1..20: note = Target: SCN10A; (+) strand; PAM type: NRG; PAM sequence: AAG
  source 1..20: mol_type = other DNA
gctcatgtctctgtgtctcc

SEQ ID NO: 30154 - DNA, 20 bp, synthetic construct
  misc_feature 1..20: note = Description of Artificial Sequence: Synthetic oligonucleotide
  misc_feature 1..20: note = Target: SCN10A; (+) strand; PAM type: NRG; PAM sequence: CAG
  source 1..20: mol_type = other DNA
tccaagatactaattgcccc

SEQ ID NO: 30155 - DNA, 20 bp, synthetic construct
  misc_feature 1..20: note = Description of Artificial Sequence: Synthetic oligonucleotide
  misc_feature 1..20: note = Target: SCN10A; (+) strand; PAM type: NRG; PAM sequence: CAG
  source 1..20: mol_type = other DNA
aagatactaattgcccccag

SEQ ID NO: 30156 - DNA, 20 bp, synthetic construct
  misc_feature 1..20: note = Description of Artificial Sequence: Synthetic oligonucleotide
  misc_feature 1..20: note = Target: SCN10A; (+) strand; PAM type: NRG; PAM sequence: AAG
  source 1..20: mol_type = other DNA
atgtgtgtcttgtctgctga

SEQ ID NO: 30157 - DNA, 20 bp, synthetic construct
  misc_feature 1..20: note = Description of Artificial Sequence: Synthetic oligonucleotide
  misc_feature 1..20: note = Target: SCN10A; (+) strand; PAM type: NRG; PAM sequence: AAG
  source 1..20: mol_type = other DNA
tcttgtctgctgaaagacta

SEQ ID NO: 30158 - DNA, 20 bp, synthetic construct
  misc_feature 1..20: note = Description of Artificial Sequence: Synthetic oligonucleotide
  misc_feature 1..20: note = Target: SCN10A; (+) strand; PAM type: NRG; PAM sequence: AAG
  source 1..20: mol_type = other DNA
ctgctgaaagactaaagtgt

SEQ ID NO: 30159 - DNA, 20 bp, synthetic construct
  misc_feature 1..20: note = Description of Artificial Sequence: Synthetic oligonucleotide
  misc_feature 1..20: note = Target: SCN10A; (+) strand; PAM type: NRG; PAM sequence: TGG
  source 1..20: mol_type = other DNA
aagactaaagtgtaagatcc

SEQ ID NO: 30160 - DNA, 20 bp, synthetic construct
  misc_feature 1..20: note = Description of Artificial Sequence: Synthetic oligonucleotide
  misc_feature 1..20: note = Target: SCN10A; (+) strand; PAM type: NRG; PAM sequence: GAG
  source 1..20: mol_type = other DNA
gactaaagtgtaagatcctg

SEQ ID NO: 30161 - DNA, 20 bp, synthetic construct
  misc_feature 1..20: note = Description of Artificial Sequence: Synthetic oligonucleotide
  misc_feature 1..20: note = Target: SCN10A; (+) strand; PAM type: NRG; PAM sequence: TAG
  source 1..20: mol_type = other DNA
aaagtgtaagatcctggaga

SEQ ID NO: 30162 - DNA, 20 bp, synthetic construct
  misc_feature 1..20: note = Description of Artificial Sequence: Synthetic oligonucleotide
  misc_feature 1..20: note = Target: SCN10A; (+) strand; PAM type: NRG; PAM sequence: GAG
  source 1..20: mol_type = other DNA
tgtaagatcctggagatagt

SEQ ID NO: 30163 - DNA, 20 bp, synthetic construct
  misc_feature 1..20: note = Description of Artificial Sequence: Synthetic oligonucleotide
  misc_feature 1..20: note = Target: SCN10A; (+) strand; PAM type: NRG; PAM sequence: AAG
  source 1..20: mol_type = other DNA
ctgtgcttctgtttcttaca

SEQ ID NO: 30164 - DNA, 20 bp, synthetic construct
  misc_feature 1..20: note = Description of Artificial Sequence: Synthetic oligonucleotide
  misc_feature 1..20: note = Target: SCN10A; (+) strand; PAM type: NRG; PAM sequence: AAG
  source 1..20: mol_type = other DNA
tttcttacaaagcacttcat

SEQ ID NO: 30165 - DNA, 20 bp, synthetic construct
  misc_feature 1..20: note = Description of Artificial Sequence: Synthetic oligonucleotide
  misc_feature 1..20: note = Target: SCN10A; (+) strand; PAM type: NRG; PAM sequence: TAG
  source 1..20: mol_type = other DNA
taagacaatcctgtattcaa

SEQ ID NO: 30166 - DNA, 20 bp, synthetic construct
  misc_feature 1..20: note = Description of Artificial Sequence: Synthetic oligonucleotide
  misc_feature 1..20: note = Target: SCN10A; (+) strand; PAM type: NRG; PAM sequence: TAG
  source 1..20: mol_type = other DNA
acaatcctgtattcaatagt

SEQ ID NO: 30167 - DNA, 20 bp, synthetic construct
  misc_feature 1..20: note = Description of Artificial Sequence: Synthetic oligonucleotide
  misc_feature 1..20: note = Target: SCN10A; (+) strand; PAM type: NRG; PAM sequence: TAG
  source 1..20: mol_type = other DNA
gtattcaatagttagatgta

SEQ ID NO: 30168 - DNA, 20 bp, synthetic construct
  misc_feature 1..20: note = Description of Artificial Sequence: Synthetic oligonucleotide
  misc_feature 1..20: note = Target: SCN10A; (+) strand; PAM type: NRG; PAM sequence: TGG
  source 1..20: mol_type = other DNA
atagttagatgtatagcaaa

SEQ ID NO: 30169 - DNA, 20 bp, synthetic construct
  misc_feature 1..20: note = Description of Artificial Sequence: Synthetic oligonucleotide
  misc_feature 1..20: note = Target: SCN10A; (+) strand; PAM type: NRG; PAM sequence: AAG
  source 1..20: mol_type = other DNA
gttagatgtatagcaaatgg

SEQ ID NO: 30170 - DNA, 20 bp, synthetic construct
  misc_feature 1..20: note = Description of Artificial Sequence: Synthetic oligonucleotide
  misc_feature 1..20: note = Target: SCN10A; (+) strand; PAM type: NRG; PAM sequence: TAG
  source 1..20: mol_type = other DNA
tatagcaaatggaagaaaaa

SEQ ID NO: 30171 - DNA, 20 bp, synthetic construct
  misc_feature 1..20: note = Description of Artificial Sequence: Synthetic oligonucleotide
  misc_feature 1..20: note = Target: SCN10A; (+) strand; PAM type: NRG; PAM sequence: AGG
  source 1..20: mol_type = other DNA
atagcaaatggaagaaaaat

SEQ ID NO: 30172 - DNA, 20 bp, synthetic construct
  misc_feature 1..20: note = Description of Artificial Sequence: Synthetic oligonucleotide
  misc_feature 1..20: note = Target: SCN10A; (+) strand; PAM type: NRG; PAM sequence: TGG
  source 1..20: mol_type = other DNA
tggaagaaaaataggatcat

SEQ ID NO: 30173 - DNA, 20 bp, synthetic construct
  misc_feature 1..20: note = Description of Artificial Sequence: Synthetic oligonucleotide
  misc_feature 1..20: note = Target: SCN10A; (+) strand; PAM type: NRG; PAM sequence: GGG
  source 1..20: mol_type = other DNA
ggaagaaaaataggatcatt

SEQ ID NO: 30174 - DNA, 20 bp, synthetic construct
  misc_feature 1..20: note = Description of Artificial Sequence: Synthetic oligonucleotide
  misc_feature 1..20: note = Target: SCN10A; (+) strand; PAM type: NRG; PAM sequence: TGG
  source 1..20: mol_type = other DNA
gaaaaataggatcattggga

SEQ ID NO: 30175 - DNA, 20 bp, synthetic construct
  misc_feature 1..20: note = Description of Artificial Sequence: Synthetic oligonucleotide
  misc_feature 1..20: note = Target: SCN10A; (+) strand; PAM type: NRG; PAM sequence: TAG
  source 1..20: mol_type = other DNA
aataggatcattgggatggc

SEQ ID NO: 30176 - DNA, 20 bp, synthetic construct
  misc_feature 1..20: note = Description of Artificial Sequence: Synthetic oligonucleotide
  misc_feature 1..20: note = Target: SCN10A; (+) strand; PAM type: NRG; PAM sequence: AAG
  source 1..20: mol_type = other DNA
aggatcattgggatggctag

SEQ ID NO: 30177 - DNA, 20 bp, synthetic construct
  misc_feature 1..20: note = Description of Artificial Sequence: Synthetic oligonucleotide
  misc_feature 1..20: note = Target: SCN10A; (+) strand; PAM type: NRG; PAM sequence: AGG
  source 1..20: mol_type = other DNA
ggatcattgggatggctaga

SEQ ID NO: 30178 - DNA, 20 bp, synthetic construct
  misc_feature 1..20: note = Description of Artificial Sequence: Synthetic oligonucleotide
  misc_feature 1..20: note = Target: SCN10A; (+) strand; PAM type: NRG; PAM sequence: AAG
  source 1..20: mol_type = other DNA
cattgggatggctagaagga

SEQ ID NO: 30179 - DNA, 20 bp, synthetic construct
  misc_feature 1..20: note = Description of Artificial Sequence: Synthetic oligonucleotide
  misc_feature 1..20: note = Target: SCN10A; (+) strand; PAM type: NRG; PAM sequence: AAG
  source 1..20: mol_type = other DNA
gggatggctagaaggaaaga

SEQ ID NO: 30180 - DNA, 20 bp, synthetic construct
  misc_feature 1..20: note = Description of Artificial Sequence: Synthetic oligonucleotide
  misc_feature 1..20: note = Target: SCN10A; (+) strand; PAM type: NRG; PAM sequence: AAG
  source 1..20: mol_type = other DNA
tggctagaaggaaagaaaga

SEQ ID NO: 30181 - DNA, 20 bp, synthetic construct
  misc_feature 1..20: note = Description of Artificial Sequence: Synthetic oligonucleotide
  misc_feature 1..20: note = Target: SCN10A; (+) strand; PAM type: NRG; PAM sequence: AAG
  source 1..20: mol_type = other DNA
ctagaaggaaagaaagaaag

SEQ ID NO: 30182 - DNA, 20 bp, synthetic construct
  misc_feature 1..20: note = Description of Artificial Sequence: Synthetic oligonucleotide
  misc_feature 1..20: note = Target: SCN10A; (+) strand; PAM type: NRG; PAM sequence: CAG
  source 1..20: mol_type = other DNA
aggaaagaaagaaagaagta

SEQ ID NO: 30183 - DNA, 20 bp, synthetic construct
  misc_feature 1..20: note = Description of Artificial Sequence: Synthetic oligonucleotide
  misc_feature 1..20: note = Target: SCN10A; (+) strand; PAM type: NRG; PAM sequence: TGG
  source 1..20: mol_type = other DNA
aagaaagaaagaagtacagc

SEQ ID NO: 30184 - DNA, 20 bp, synthetic construct
  misc_feature 1..20: note = Description of Artificial Sequence: Synthetic oligonucleotide
  misc_feature 1..20: note = Target: SCN10A; (+) strand; PAM type: NRG; PAM sequence: AAG
  source 1..20: mol_type = other DNA
aagaagtacagctggatgaa

SEQ ID NO: 30185 - DNA, 20 bp, synthetic construct
  misc_feature 1..20: note = Description of Artificial Sequence: Synthetic oligonucleotide
  misc_feature 1..20: note = Target: SCN10A; (+) strand; PAM type: NRG; PAM sequence: AAG
  source 1..20: mol_type = other DNA
tacagctggatgaaaagttg

SEQ ID NO: 30186 - DNA, 20 bp, synthetic construct
  misc_feature 1..20: note = Description of Artificial Sequence: Synthetic oligonucleotide
  misc_feature 1..20: note = Target: SCN10A; (+) strand; PAM type: NRG; PAM sequence: AGG
  source 1..20: mol_type = other DNA
acagctggatgaaaagttga

SEQ ID NO: 30187 - DNA, 20 bp, synthetic construct
  misc_feature 1..20: note = Description of Artificial Sequence: Synthetic oligonucleotide
  misc_feature 1..20: note = Target: SCN10A; (+) strand; PAM type: NRG; PAM sequence: GGG
  source 1..20: mol_type = other DNA
cagctggatgaaaagttgaa

SEQ ID NO: 30188 - DNA, 20 bp, synthetic construct
  misc_feature 1..20: note = Description of Artificial Sequence: Synthetic oligonucleotide
  misc_feature 1..20: note = Target: SCN10A; (+) strand; PAM type: NRG; PAM sequence: TAG
  source 1..20: mol_type = other DNA
aaagttgaagggtgattgca

SEQ ID NO: 30189 - DNA, 20 bp, synthetic construct
  misc_feature 1..20: note = Description of Artificial Sequence: Synthetic oligonucleotide
  misc_feature 1..20: note = Target: SCN10A; (+) strand; PAM type: NRG; PAM sequence: GAG
  source 1..20: mol_type = other DNA
agttgaagggtgattgcata

SEQ ID NO: 30190 - DNA, 20 bp, synthetic construct
  misc_feature 1..20: note = Description of Artificial Sequence: Synthetic oligonucleotide
  misc_feature 1..20: note = Target: SCN10A; (+) strand; PAM type: NRG; PAM sequence: AGG
  source 1..20: mol_type = other DNA
gttgaagggtgattgcatag

SEQ ID NO: 30191 - DNA, 20 bp, synthetic construct
  misc_feature 1..20: note = Description of Artificial Sequence: Synthetic oligonucleotide
  misc_feature 1..20: note = Target: SCN10A; (+) strand; PAM type: NRG; PAM sequence: GGG
  source 1..20: mol_type = other DNA
ttgaagggtgattgcataga

SEQ ID NO: 30192 - DNA, 20 bp, synthetic construct
  misc_feature 1..20: note = Description of Artificial Sequence: Synthetic oligonucleotide
  misc_feature 1..20: note = Target: SCN10A; (+) strand; PAM type: NRG; PAM sequence: AAG
  source 1..20: mol_type = other DNA
ttgcatagagggatgaatta

SEQ ID NO: 30193 - DNA, 20 bp, synthetic construct
  misc_feature 1..20: note = Description of Artificial Sequence: Synthetic oligonucleotide
  misc_feature 1..20: note = Target: SCN10A; (+) strand; PAM type: NRG; PAM sequence: AGG
  source 1..20: mol_type = other DNA
tgcatagagggatgaattaa

SEQ ID NO: 30194 - DNA, 20 bp, synthetic construct
  misc_feature 1..20: note = Description of Artificial Sequence: Synthetic oligonucleotide
  misc_feature 1..20: note = Target: SCN10A; (+) strand; PAM type: NRG; PAM sequence: TAG
  source 1..20: mol_type = other DNA
ttaaaggatacaatgataaa

SEQ ID NO: 30195 - DNA, 20 bp, synthetic construct
  misc_feature 1..20: note = Description of Artificial Sequence: Synthetic oligonucleotide
  misc_feature 1..20: note = Target: SCN10A; (+) strand; PAM type: NRG; PAM sequence: AGG
  source 1..20: mol_type = other DNA
taaaggatacaatgataaat

SEQ ID NO: 30196 - DNA, 20 bp, synthetic construct
  misc_feature 1..20: note = Description of Artificial Sequence: Synthetic oligonucleotide
  misc_feature 1..20: note = Target: SCN10A; (+) strand; PAM type: NRG; PAM sequence: TAG
  source 1..20: mol_type = other DNA
ggatacaatgataaatagga

SEQ ID NO: 30197 - DNA, 20 bp, synthetic construct
  misc_feature 1..20: note = Description of Artificial Sequence: Synthetic oligonucleotide
  misc_feature 1..20: note = Target: SCN10A; (+) strand; PAM type: NRG; PAM sequence: TAG
  source 1..20: mol_type = other DNA
aatgtataacatgaatacta

SEQ ID NO: 30198 - DNA, 20 bp, synthetic construct
  misc_feature 1..20: note = Description of Artificial Sequence: Synthetic oligonucleotide
  misc_feature 1..20: note = Target: SCN10A; (+) strand; PAM type: NRG; PAM sequence: TAG
  source 1..20: mol_type = other DNA
atgaatactatagttaataa

SEQ ID NO: 30199 - DNA, 20 bp, synthetic construct
  misc_feature 1..20: note = Description of Artificial Sequence: Synthetic oligonucleotide
  misc_feature 1..20: note = Target: SCN10A; (+) strand; PAM type: NRG; PAM sequence: CAG
  source 1..20: mol_type = other DNA
taataatagcatattgtttt

SEQ ID NO: 30200 - DNA, 20 bp, synthetic construct
  misc_feature 1..20: note = Description of Artificial Sequence: Synthetic oligonucleotide
  misc_feature 1..20: note = Target: SCN10A; (+) strand; PAM type: NRG; PAM sequence: GAG
  source 1..20: mol_type = other DNA
tttcagtatttttgctcgct

SEQ ID NO: 30201 - DNA, 20 bp, synthetic construct
  misc_feature 1..20: note = Description of Artificial Sequence: Synthetic oligonucleotide
  misc_feature 1..20: note = Target: SCN10A; (+) strand; PAM type: NRG; PAM sequence: TAG
  source 1..20: mol_type = other DNA
ttttgctcgctgagtaatta

SEQ ID NO: 30202 - DNA, 20 bp, synthetic construct
  misc_feature 1..20: note = Description of Artificial Sequence: Synthetic oligonucleotide
  misc_feature 1..20: note = Target: SCN10A; (+) strand; PAM type: NRG; PAM sequence: CAG
  source 1..20: mol_type = other DNA
aattatagctgctcttgcca

SEQ ID NO: 30203 - DNA, 20 bp, synthetic construct
  misc_feature 1..20: note = Description of Artificial Sequence: Synthetic oligonucleotide
  misc_feature 1..20: note = Target: SCN10A; (+) strand; PAM type: NRG; PAM sequence: AGG
  source 1..20: mol_type = other DNA
attatagctgctcttgccac

SEQ ID NO: 30204 - DNA, 20 bp, synthetic construct
  misc_feature 1..20: note = Description of Artificial Sequence: Synthetic oligonucleotide
  misc_feature 1..20: note = Target: SCN10A; (+) strand; PAM type: NRG; PAM sequence: GGG
  source 1..20: mol_type = other DNA
ttatagctgctcttgccaca

SEQ ID NO: 30205 - DNA, 20 bp, synthetic construct
  misc_feature 1..20: note = Description of Artificial Sequence: Synthetic oligonucleotide
  misc_feature 1..20: note = Target: SCN10A; (+) strand; PAM type: NRG; PAM sequence: GGG
  source 1..20: mol_type = other DNA
tatagctgctcttgccacag

SEQ ID NO: 30206 - DNA, 20 bp, synthetic construct
  misc_feature 1..20: note = Description of Artificial Sequence: Synthetic oligonucleotide
  misc_feature 1..20: note = Target: SCN10A; (+) strand; PAM type: NRG; PAM sequence: GGG
  source 1..20: mol_type = other DNA
atagctgctcttgccacagg

SEQ ID NO: 30207 - DNA, 20 bp, synthetic construct
  misc_feature 1..20: note = Description of Artificial Sequence: Synthetic oligonucleotide
  misc_feature 1..20: note = Target: SCN10A; (+) strand; PAM type: NRG; PAM sequence: GAG
  source 1..20: mol_type = other DNA
agctgctcttgccacagggg

SEQ ID NO: 30208 - DNA, 20 bp, synthetic construct
  misc_feature 1..20: note = Description of Artificial Sequence: Synthetic oligonucleotide
  misc_feature 1..20: note = Target: SCN10A; (+) strand; PAM type: NRG; PAM sequence: TGG
  source 1..20: mol_type = other DNA
tcttgccacagggggagaaa

SEQ ID NO: 30209 - DNA, 20 bp, synthetic construct
  misc_feature 1..20: note = Description of Artificial Sequence: Synthetic oligonucleotide
  misc_feature 1..20: note = Target: SCN10A; (+) strand; PAM type: NRG; PAM sequence: GGG
  source 1..20: mol_type = other DNA
cttgccacagggggagaaat

SEQ ID NO: 30210 - DNA, 20 bp, synthetic construct
  misc_feature 1..20: note = Description of Artificial Sequence: Synthetic oligonucleotide
  misc_feature 1..20: note = Target: SCN10A; (+) strand; PAM type: NRG; PAM sequence: GAG
  source 1..20: mol_type = other DNA
ggagaaatgggtaactatgt

SEQ ID NO: 30211 - DNA, 20 bp, synthetic construct
  misc_feature 1..20: note = Description of Artificial Sequence: Synthetic oligonucleotide
  misc_feature 1..20: note = Target: SCN10A; (+) strand; PAM type: NRG; PAM sequence: TGG
  source 1..20: mol_type = other DNA
tgggtaactatgtgagatga

SEQ ID NO: 30212 - DNA, 20 bp, synthetic construct
  misc_feature 1..20: note = Description of Artificial Sequence: Synthetic oligonucleotide
  misc_feature 1..20: note = Target: SCN10A; (+) strand; PAM type: NRG; PAM sequence: TAG
  source 1..20: mol_type = other DNA
tatgttaatatgttccacta

SEQ ID NO: 30213 - DNA, 20 bp, synthetic construct
  misc_feature 1..20: note = Description of Artificial Sequence: Synthetic oligonucleotide
  misc_feature 1..20: note = Target: SCN10A; (+) strand; PAM type: NRG; PAM sequence: TGG
  source 1..20: mol_type = other DNA
gtatcccttaaaaattgata

SEQ ID NO: 30214 - DNA, 20 bp, synthetic construct
  misc_feature 1..20: note = Description of Artificial Sequence: Synthetic oligonucleotide
  misc_feature 1..20: note = Target: SCN10A; (+) strand; PAM type: NRG; PAM sequence: TGG
  source 1..20: mol_type = other DNA
ccttaaaaattgatatggtt

SEQ ID NO: 30215 - DNA, 20 bp, synthetic construct
  misc_feature 1..20: note = Description of Artificial Sequence: Synthetic oligonucleotide
  misc_feature 1..20: note = Target: SCN10A; (+) strand; PAM type: NRG; PAM sequence: TGG
  source 1..20: mol_type = other DNA
tcttgaattcccatgtgttg

SEQ ID NO: 30216 - DNA, 20 bp, synthetic construct
  misc_feature 1..20: note = Description of Artificial Sequence: Synthetic oligonucleotide
  misc_feature 1..20: note = Target: SCN10A; (+) strand; PAM type: NRG; PAM sequence: GGG
  source 1..20: mol_type = other DNA
cttgaattcccatgtgttgt

SEQ ID NO: 30217 - DNA, 20 bp, synthetic construct
  misc_feature 1..20: note = Description of Artificial Sequence: Synthetic oligonucleotide
  misc_feature 1..20: note = Target: SCN10A; (+) strand; PAM type: NRG; PAM sequence: GAG
  source 1..20: mol_type = other DNA
tgaattcccatgtgttgtgg

SEQ ID NO: 30218 - DNA, 20 bp, synthetic construct
  misc_feature 1..20: note = Description of Artificial Sequence: Synthetic oligonucleotide
  misc_feature 1..20: note = Target: SCN10A; (+) strand; PAM type: NRG; PAM sequence: AGG
  source 1..20: mol_type = other DNA
gaattcccatgtgttgtggg

SEQ ID NO: 30219 - DNA, 20 bp, synthetic construct
  misc_feature 1..20: note = Description of Artificial Sequence: Synthetic oligonucleotide
  misc_feature 1..20: note = Target: SCN10A; (+) strand; PAM type: NRG; PAM sequence: GGG
  source 1..20: mol_type = other DNA
aattcccatgtgttgtggga

SEQ ID NO: 30220 - DNA, 20 bp, synthetic construct
  misc_feature 1..20: note = Description of Artificial Sequence: Synthetic oligonucleotide
  misc_feature 1..20: note = Target: SCN10A; (+) strand; PAM type: NRG; PAM sequence: GGG
  source 1..20: mol_type = other DNA
attcccatgtgttgtgggag

SEQ ID NO: 30221 - DNA, 20 bp, synthetic construct
  misc_feature 1..20: note = Description of Artificial Sequence: Synthetic oligonucleotide
  misc_feature 1..20: note = Target: SCN10A; (+) strand; PAM type: NRG; PAM sequence: GAG
  source 1..20: mol_type = other DNA
tcccatgtgttgtgggaggg

SEQ ID NO: 30222 - DNA, 20 bp, synthetic construct
  misc_feature 1..20: note = Description of Artificial Sequence: Synthetic oligonucleotide
  misc_feature 1..20: note = Target: SCN10A; (+) strand; PAM type: NRG; PAM sequence: AGG
  source 1..20: mol_type = other DNA
cccatgtgttgtgggagggg

SEQ ID NO: 30223 - DNA, 20 bp, synthetic construct
  misc_feature 1..20: note = Description of Artificial Sequence: Synthetic oligonucleotide
  misc_feature 1..20: note = Target: SCN10A; (+) strand; PAM type: NRG; PAM sequence: GGG
  source 1..20: mol_type = other DNA
ccatgtgttgtgggagggga

SEQ ID NO: 30224 - DNA, 20 bp, synthetic construct
  misc_feature 1..20: note = Description of Artificial Sequence: Synthetic oligonucleotide
  misc_feature 1..20: note = Target: SCN10A; (+) strand; PAM type: NRG; PAM sequence: TGG
  source 1..20: mol_type = other DNA
gtgggaggggagggaccctg

SEQ ID NO: 30225 - DNA, 20 bp, synthetic construct
  misc_feature 1..20: note = Description of Artificial Sequence: Synthetic oligonucleotide
  misc_feature 1..20: note = Target: SCN10A; (+) strand; PAM type: NRG; PAM sequence: GGG
  source 1..20: mol_type = other DNA
tgggaggggagggaccctgt

SEQ ID NO: 30226 - DNA, 20 bp, synthetic construct
  misc_feature 1..20: note = Description of Artificial Sequence: Synthetic oligonucleotide
  misc_feature 1..20: note = Target: SCN10A; (+) strand; PAM type: NRG; PAM sequence: GAG
  source 1..20: mol_type = other DNA
ggaggggagggaccctgtgg

SEQ ID NO: 30227 - DNA, 20 bp, synthetic construct
  misc_feature 1..20: note = Description of Artificial Sequence: Synthetic oligonucleotide
  misc_feature 1..20: note = Target: SCN10A; (+) strand; PAM type: NRG; PAM sequence: AGG
  source 1..20: mol_type = other DNA
gaggggagggaccctgtggg

SEQ ID NO: 30228 - DNA, 20 bp, synthetic construct
  misc_feature 1..20: note = Description of Artificial Sequence: Synthetic oligonucleotide
  misc_feature 1..20: note = Target: SCN10A; (+) strand; PAM type: NRG; PAM sequence: AAG
  source 1..20: mol_type = other DNA
ggagggaccctgtgggaggt

SEQ ID NO: 30229 - DNA, 20 bp, synthetic construct
  misc_feature 1..20: note = Description of Artificial Sequence: Synthetic oligonucleotide
  misc_feature 1..20: note = Target: SCN10A; (+) strand; PAM type: NRG; PAM sequence: TGG
  source 1..20: mol_type = other DNA
tgtgggaggtaagtgaatca

SEQ ID NO: 30230 - DNA, 20 bp, synthetic construct
  misc_feature 1..20: note = Description of Artificial Sequence: Synthetic oligonucleotide
  misc_feature 1..20: note = Target: SCN10A; (+) strand; PAM type: NRG; PAM sequence: GGG
  source 1..20: mol_type = other DNA
gtgggaggtaagtgaatcat

SEQ ID NO: 30231 - DNA, 20 bp, synthetic construct
  misc_feature 1..20: note = Description of Artificial Sequence: Synthetic oligonucleotide
  misc_feature 1..20: note = Target: SCN10A; (+) strand; PAM type: NRG; PAM sequence: GAG
  source 1..20: mol_type = other DNA
gggaggtaagtgaatcatgg

SEQ ID NO: 30232 - DNA, 20 bp, synthetic construct
  misc_feature 1..20: note = Description of Artificial Sequence: Synthetic oligonucleotide
  misc_feature 1..20: note = Target: SCN10A; (+) strand; PAM type: NRG; PAM sequence: CAG
  source 1..20: mol_type = other DNA
aggtaagtgaatcatgggag

SEQ ID NO: 30233 - DNA, 20 bp, synthetic construct
  misc_feature 1..20: note = Description of Artificial Sequence: Synthetic oligonucleotide
  misc_feature 1..20: note = Target: SCN10A; (+) strand; PAM type: NRG; PAM sequence: AGG
  source 1..20: mol_type = other DNA
ggtaagtgaatcatgggagc

SEQ ID NO: 30234 - DNA, 20 bp, synthetic construct
  misc_feature 1..20: note = Description of Artificial Sequence: Synthetic oligonucleotide
  misc_feature 1..20: note = Target: SCN10A; (+) strand; PAM type: NRG; PAM sequence: TAG
  source 1..20: mol_type = other DNA
ttcccatgctgttctcatga

SEQ ID NO: 30235 - DNA, 20 bp, synthetic construct
  misc_feature 1..20: note = Description of Artificial Sequence: Synthetic oligonucleotide
  misc_feature 1..20: note = Target: SCN10A; (+) strand; PAM type: NRG; PAM sequence: AAG
  source 1..20: mol_type = other DNA
ctgttctcatgatagtgaat

SEQ ID NO: 30236 - DNA, 20 bp, synthetic construct
  misc_feature 1..20: note = Description of Artificial Sequence: Synthetic oligonucleotide
  misc_feature 1..20: note = Target: SCN10A; (+) strand; PAM type: NRG; PAM sequence: GAG
  source 1..20: mol_type = other DNA
tgatagtgaataagtttcat

SEQ ID NO: 30237 - DNA, 20 bp, synthetic construct
  misc_feature 1..20: note = Description of Artificial Sequence: Synthetic oligonucleotide
  misc_feature 1..20: note = Target: SCN10A; (+) strand; PAM type: NRG; PAM sequence: CGG
  source 1..20: mol_type = other DNA
ataagtttcatgagatgtga

SEQ ID NO: 30238 - DNA, 20 bp, synthetic construct
  misc_feature 1..20: note = Description of Artificial Sequence: Synthetic oligonucleotide
  misc_feature 1..20: note = Target: SCN10A; (+) strand; PAM type: NRG; PAM sequence: AAG
  source 1..20: mol_type = other DNA
atgagatgtgacggtattat

SEQ ID NO: 30239 - DNA, 20 bp, synthetic construct
  misc_feature 1..20: note = Description of Artificial Sequence: Synthetic oligonucleotide
  misc_feature 1..20: note = Target: SCN10A; (+) strand; PAM type: NRG; PAM sequence: AGG
  source 1..20: mol_type = other DNA
tgagatgtgacggtattata

SEQ ID NO: 30240 - DNA, 20 bp, synthetic construct
  misc_feature 1..20: note = Description of Artificial Sequence: Synthetic oligonucleotide
  misc_feature 1..20: note = Target: SCN10A; (+) strand; PAM type: NRG; PAM sequence: GGG
  source 1..20: mol_type = other DNA
gagatgtgacggtattataa

SEQ ID NO: 30241 - DNA, 20 bp, synthetic construct
  misc_feature 1..20: note = Description of Artificial Sequence: Synthetic oligonucleotide
  misc_feature 1..20: note = Target: SCN10A; (+) strand; PAM type: NRG; PAM sequence: GGG
  source 1..20: mol_type = other DNA
agatgtgacggtattataag

SEQ ID NO: 30242 - DNA, 20 bp, synthetic construct
  misc_feature 1..20: note = Description of Artificial Sequence: Synthetic oligonucleotide
  misc_feature 1..20: note = Target: SCN10A; (+) strand; PAM type: NRG; PAM sequence: GGG
  source 1..20: mol_type = other DNA
gatgtgacggtattataagg

SEQ ID NO: 30243 - DNA, 20 bp, synthetic construct
  misc_feature 1..20: note = Description of Artificial Sequence: Synthetic oligonucleotide
  misc_feature 1..20: note = Target: SCN10A; (+) strand; PAM type: NRG; PAM sequence: GAG
  source 1..20: mol_type = other DNA
tgtgacggtattataagggg

SEQ ID NO: 30244 - DNA, 20 bp, synthetic construct
  misc_feature 1..20: note = Description of Artificial Sequence: Synthetic oligonucleotide
  misc_feature 1..20: note = Target: SCN10A; (+) strand; PAM type: NRG; PAM sequence: AAG
  source 1..20: mol_type = other DNA
ttgcctgctgccatccacat

SEQ ID NO: 30245 - DNA, 20 bp, synthetic construct
  misc_feature 1..20: note = Description of Artificial Sequence: Synthetic oligonucleotide
  misc_feature 1..20: note = Target: SCN10A; (+) strand; PAM type: NRG; PAM sequence: AAG
  source 1..20: mol_type = other DNA
tttccttttgccatgattgt

SEQ ID NO: 30246 - DNA, 20 bp, synthetic construct
  misc_feature 1..20: note = Description of Artificial Sequence: Synthetic oligonucleotide
  misc_feature 1..20: note = Target: SCN10A; (+) strand; PAM type: NRG; PAM sequence: AGG
  source 1..20: mol_type = other DNA
ttccttttgccatgattgta

SEQ ID NO: 30247 - DNA, 20 bp, synthetic construct
  misc_feature 1..20: note = Description of Artificial Sequence: Synthetic oligonucleotide
  misc_feature 1..20: note = Target: SCN10A; (+) strand; PAM type: NRG; PAM sequence: CAG
  source 1..20: mol_type = other DNA
ccatgattgtaaggcttccc

SEQ ID NO: 30248 - DNA, 20 bp, synthetic construct
  misc_feature 1..20: note = Description of Artificial Sequence: Synthetic oligonucleotide
  misc_feature 1..20: note = Target: SCN10A; (+) strand; PAM type: NRG; PAM sequence: AAG
  source 1..20: mol_type = other DNA
aaggcttccccagccatgtg

SEQ ID NO: 30249 - DNA, 20 bp, synthetic construct
  misc_feature 1..20: note = Description of Artificial Sequence: Synthetic oligonucleotide
  misc_feature 1..20: note = Target: SCN10A; (+) strand; PAM type: NRG; PAM sequence: AAG
  source 1..20: mol_type = other DNA
ccccagccatgtgaagctgt

SEQ ID NO: 30250 - DNA, 20 bp, synthetic construct
  misc_feature 1..20: note = Description of Artificial Sequence: Synthetic oligonucleotide
  misc_feature 1..20: note = Target: SCN10A; (+) strand; PAM type: NRG; PAM sequence: CAG
  source 1..20: mol_type = other DNA
tctttcttttataaattgcc

SEQ ID NO: 30251 - DNA, 20 bp, synthetic construct
  misc_feature 1..20: note = Description of Artificial Sequence: Synthetic oligonucleotide
  misc_feature 1..20: note = Target: SCN10A; (+) strand; PAM type: NRG; PAM sequence: TAG
  source 1..20: mol_type = other DNA
ttttataaattgcccagtct

SEQ ID NO: 30252 - DNA, 20 bp, synthetic construct
  misc_feature 1..20: note = Description of Artificial Sequence: Synthetic oligonucleotide
  misc_feature 1..20: note = Target: SCN10A; (+) strand; PAM type: NRG; PAM sequence: AGG
  source 1..20: mol_type = other DNA
tttataaattgcccagtctt

SEQ ID NO: 30253 - DNA, 20 bp, synthetic construct
  misc_feature 1..20: note = Description of Artificial Sequence: Synthetic oligonucleotide
  misc_feature 1..20: note = Target: SCN10A; (+) strand; PAM type: NRG; PAM sequence: CAG
  source 1..20: mol_type = other DNA
agtcttaggtatgtctttat

SEQ ID NO: 30254 - DNA, 20 bp, synthetic construct
  misc_feature 1..20: note = Description of Artificial Sequence: Synthetic oligonucleotide
  misc_feature 1..20: note = Target: SCN10A; (+) strand; PAM type: NRG; PAM sequence: CAG
  source 1..20: mol_type = other DNA
cttaggtatgtctttatcag

SEQ ID NO: 30255 - DNA, 20 bp, synthetic construct
  misc_feature 1..20: note = Description of Artificial Sequence: Synthetic oligonucleotide
  misc_feature 1..20: note = Target: SCN10A; (+) strand; PAM type: NRG; PAM sequence: TAG
  source 1..20: mol_type = other DNA
ctttatcagcagcatgaaaa

SEQ ID NO: 30256 - DNA, 20 bp, synthetic construct
  misc_feature 1..20: note = Description of Artificial Sequence: Synthetic oligonucleotide
  misc_feature 1..20: note = Target: SCN10A; (+) strand; PAM type: NRG; PAM sequence: AAG
  source 1..20: mol_type = other DNA
tatattttttaaaattttaa

SEQ ID NO: 30257 - DNA, 20 bp, synthetic construct
  misc_feature 1..20: note = Description of Artificial Sequence: Synthetic oligonucleotide
  misc_feature 1..20: note = Target: SCN10A; (+) strand; PAM type: NRG; PAM sequence: CAG
  source 1..20: mol_type = other DNA
tttaaaattttaaaagataa

SEQ ID NO: 30258 - DNA, 20 bp, synthetic construct
  misc_feature 1..20: note = Description of Artificial Sequence: Synthetic oligonucleotide
  misc_feature 1..20: note = Target: SCN10A; (+) strand; PAM type: NRG; PAM sequence: AAG
  source 1..20: mol_type = other DNA
taaaagataacagacacaaa

SEQ ID NO: 30259 - DNA, 20 bp, synthetic construct
  misc_feature 1..20: note = Description of Artificial Sequence: Synthetic oligonucleotide
  misc_feature 1..20: note = Target: SCN10A; (+) strand; PAM type: NRG; PAM sequence: TGG
  source 1..20: mol_type = other DNA
agataacagacacaaaaaga

SEQ ID NO: 30260 - DNA, 20 bp, synthetic construct
  misc_feature 1..20: note = Description of Artificial Sequence: Synthetic oligonucleotide
  misc_feature 1..20: note = Target: SCN10A; (+) strand; PAM type: NRG; PAM sequence: TAG
  source 1..20: mol_type = other DNA
aacagacacaaaaagatgga

SEQ ID NO: 30261 - DNA, 20 bp, synthetic construct
  misc_feature 1..20: note = Description of Artificial Sequence: Synthetic oligonucleotide
  misc_feature 1..20: note = Target: SCN10A; (+) strand; PAM type: NRG; PAM sequence: AGG
  source 1..20: mol_type = other DNA
acagacacaaaaagatggat

SEQ ID NO: 30262 - DNA, 20 bp, synthetic construct
  misc_feature 1..20: note = Description of Artificial Sequence: Synthetic oligonucleotide
  misc_feature 1..20: note = Target: SCN10A; (+) strand; PAM type: NRG; PAM sequence: TAG
  source 1..20: mol_type = other DNA
acacaaaaagatggatagga

SEQ ID NO: 30263 - DNA, 20 bp, synthetic construct
  misc_feature 1..20: note = Description of Artificial Sequence: Synthetic oligonucleotide
  misc_feature 1..20: note = Target: SCN10A; (+) strand; PAM type: NRG; PAM sequence: TAG
  source 1..20: mol_type = other DNA
aaaaagatggataggataga

SEQ ID NO: 30264 - DNA, 20 bp, synthetic construct
  misc_feature 1..20: note = Description of Artificial Sequence: Synthetic oligonucleotide
  misc_feature 1..20: note = Target: SCN10A; (+) strand; PAM type: NRG; PAM sequence: TGG
  source 1..20: mol_type = other DNA
ggataggatagatagttgaa

SEQ ID NO: 30265 - DNA, 20 bp, synthetic construct
  misc_feature 1..20: note = Description of Artificial Sequence: Synthetic oligonucleotide
  misc_feature 1..20: note = Target: SCN10A; (+) strand; PAM type: NRG; PAM sequence: AAG
  source 1..20: mol_type = other DNA
taggatagatagttgaatgg

SEQ ID NO: 30266 - DNA, 20 bp, synthetic construct
  misc_feature 1..20: note = Description of Artificial Sequence: Synthetic oligonucleotide
  misc_feature 1..20: note = Target: SCN10A; (+) strand; PAM type: NRG; PAM sequence: AGG
  source 1..20: mol_type = other DNA
aggatagatagttgaatgga

SEQ ID NO: 30267 - DNA, 20 bp, synthetic construct
  misc_feature 1..20: note = Description of Artificial Sequence: Synthetic oligonucleotide
  misc_feature 1..20: note = Target: SCN10A; (+) strand; PAM type: NRG; PAM sequence: TGG
  source 1..20: mol_type = other DNA
tagatagttgaatggaagga

SEQ ID NO: 30268 - DNA, 20 bp, synthetic construct
  misc_feature 1..20: note = Description of Artificial Sequence: Synthetic oligonucleotide
  misc_feature 1..20: note = Target: SCN10A; (+) strand; PAM type: NRG; PAM sequence: GGG
  source 1..20: mol_type = other DNA
agatagttgaatggaaggat

SEQ ID NO: 30269 - DNA, 20 bp, synthetic construct
  misc_feature 1..20: note = Description of Artificial Sequence: Synthetic oligonucleotide
  misc_feature 1..20: note = Target: SCN10A; (+) strand; PAM type: NRG; PAM sequence: GAG
  source 1..20: mol_type = other DNA
atagttgaatggaaggatgg

SEQ ID NO: 30270 - DNA, 20 bp, synthetic construct
  misc_feature 1..20: note = Description of Artificial Sequence: Synthetic oligonucleotide
  misc_feature 1..20: note = Target: SCN10A; (+) strand; PAM type: NRG; PAM sequence: AAG
  source 1..20: mol_type = other DNA
gaaggatgggagaaacaaac

SEQ ID NO: 30271 - DNA, 20 bp, synthetic construct
  misc_feature 1..20: note = Description of Artificial Sequence: Synthetic oligonucleotide
  misc_feature 1..20: note = Target: SCN10A; (+) strand; PAM type: NRG; PAM sequence: AAG
  source 1..20: mol_type = other DNA
gatgggagaaacaaacaaga

SEQ ID NO: 30272 - DNA, 20 bp, synthetic construct
  misc_feature 1..20: note = Description of Artificial Sequence: Synthetic oligonucleotide
  misc_feature 1..20: note = Target: SCN10A; (+) strand; PAM type: NRG; PAM sequence: AGG
  source 1..20: mol_type = other DNA
atgggagaaacaaacaagaa

SEQ ID NO: 30273 - DNA, 20 bp, synthetic construct
  misc_feature 1..20: note = Description of Artificial Sequence: Synthetic oligonucleotide
  misc_feature 1..20: note = Target: SCN10A; (+) strand; PAM type: NRG; PAM sequence: AAG
  source 1..20: mol_type = other DNA
agaaacaaacaagaaaggaa

SEQ ID NO: 30274 - DNA, 20 bp, synthetic construct
  misc_feature 1..20: note = Description of Artificial Sequence: Synthetic oligonucleotide
  misc_feature 1..20: note = Target: SCN10A; (+) strand; PAM type: NRG; PAM sequence: AAG
  source 1..20: mol_type = other DNA
acaagaaaggaaaagtatga

SEQ ID NO: 30275 - DNA, 20 bp, synthetic construct
  misc_feature 1..20: note = Description of Artificial Sequence: Synthetic oligonucleotide
  misc_feature 1..20: note = Target: SCN10A; (+) strand; PAM type: NRG; PAM sequence: CAG
  source 1..20: mol_type = other DNA
agaaaggaaaagtatgaaag

SEQ ID NO: 30276 - DNA, 20 bp, synthetic construct
  misc_feature 1..20: note = Description of Artificial Sequence: Synthetic oligonucleotide
  misc_feature 1..20: note = Target: SCN10A; (+) strand; PAM type: NRG; PAM sequence: AGG
  source 1..20: mol_type = other DNA
gaaaggaaaagtatgaaagc

SEQ ID NO: 30277 - DNA, 20 bp, synthetic construct
  misc_feature 1..20: note = Description of Artificial Sequence: Synthetic oligonucleotide
  misc_feature 1..20: note = Target: SCN10A; (+) strand; PAM type: NRG; PAM sequence: GGG
  source 1..20: mol_type = other DNA
aaaggaaaagtatgaaagca

SEQ ID NO: 30278 - DNA, 20 bp, synthetic construct
  misc_feature 1..20: note = Description of Artificial Sequence: Synthetic oligonucleotide
  misc_feature 1..20: note = Target: SCN10A; (+) strand; PAM type: NRG; PAM sequence: TAG
  source 1..20: mol_type = other DNA
aaaagtatgaaagcagggaa

SEQ ID NO: 30279 - DNA, 20 bp, synthetic construct
  misc_feature 1..20: note = Description of Artificial Sequence: Synthetic oligonucleotide
  misc_feature 1..20: note = Target: SCN10A; (+) strand; PAM type: NRG; PAM sequence: TGG
  source 1..20: mol_type = other DNA
tgaaagcagggaatagtgaa

SEQ ID NO: 30280 - DNA, 20 bp, synthetic construct
  misc_feature 1..20: note = Description of Artificial Sequence: Synthetic oligonucleotide
  misc_feature 1..20: note = Target: SCN10A; (+) strand; PAM type: NRG; PAM sequence: TAG
  source 1..20: mol_type = other DNA
agcagggaatagtgaatgga

SEQ ID NO: 30281 - DNA, 20 bp, synthetic construct
  misc_feature 1..20: note = Description of Artificial Sequence: Synthetic oligonucleotide
  misc_feature 1..20: note = Target: SCN10A; (+) strand; PAM type: NRG; PAM sequence: GAG
  source 1..20: mol_type = other DNA
ggaatagtgaatggatagat

SEQ ID NO: 30282 - DNA, 20 bp, synthetic construct
  misc_feature 1..20: note = Description of Artificial Sequence: Synthetic oligonucleotide
  misc_feature 1..20: note = Target: SCN10A; (+) strand; PAM type: NRG; PAM sequence: TAG
  source 1..20: mol_type = other DNA
tagtgaatggatagatgaga

SEQ ID NO: 30283 - DNA, 20 bp, synthetic construct
  misc_feature 1..20: note = Description of Artificial Sequence: Synthetic oligonucleotide
  misc_feature 1..20: note = Target: SCN10A; (+) strand; PAM type: NRG; PAM sequence: AGG
  source 1..20: mol_type = other DNA
agtgaatggatagatgagat

SEQ ID NO: 30284 - DNA, 20 bp, synthetic construct
  misc_feature 1..20: note = Description of Artificial Sequence: Synthetic oligonucleotide
  misc_feature 1..20: note = Target: SCN10A; (+) strand; PAM type: NRG; PAM sequence: TGG
  source 1..20: mol_type = other DNA
gaatggatagatgagatagg

SEQ ID NO: 30285 - DNA, 20 bp, synthetic construct
  misc_feature 1..20: note = Description of Artificial Sequence: Synthetic oligonucleotide
  misc_feature 1..20: note = Target: SCN10A; (+) strand; PAM type: NRG; PAM sequence: AAG
  source 1..20: mol_type = other DNA
gatagatgagataggtggat

SEQ ID NO: 30286 - DNA, 20 bp, synthetic construct
  misc_feature 1..20: note = Description of Artificial Sequence: Synthetic oligonucleotide
  misc_feature 1..20: note = Target: SCN10A; (+) strand; PAM type: NRG; PAM sequence: GAG
  source 1..20: mol_type = other DNA
tagatgagataggtggataa

SEQ ID NO: 30287 - DNA, 20 bp, synthetic construct
  misc_feature 1..20: note = Description of Artificial Sequence: Synthetic oligonucleotide
  misc_feature 1..20: note = Target: SCN10A; (+) strand; PAM type: NRG; PAM sequence: AAG
  source 1..20: mol_type = other DNA
atgagataggtggataagag

SEQ ID NO: 30288 - DNA, 20 bp, synthetic construct
  misc_feature 1..20: note = Description of Artificial Sequence: Synthetic oligonucleotide
  misc_feature 1..20: note = Target: SCN10A; (+) strand; PAM type: NRG; PAM sequence: AGG
  source 1..20: mol_type = other DNA
tgagataggtggataagaga

SEQ ID NO: 30289 - DNA, 20 bp, synthetic construct
  misc_feature 1..20: note = Description of Artificial Sequence: Synthetic oligonucleotide
  misc_feature 1..20: note = Target: SCN10A; (+) strand; PAM type: NRG; PAM sequence: TGG
  source 1..20: mol_type = other DNA
ataggtggataagagaagga

SEQ ID NO: 30290 - DNA, 20 bp, synthetic construct
  misc_feature 1..20: note = Description of Artificial Sequence: Synthetic oligonucleotide
  misc_feature 1..20: note = Target: SCN10A; (+) strand; PAM type: NRG; PAM sequence: TGG
  source 1..20: mol_type = other DNA
gtggataagagaaggatgga

SEQ ID NO: 30291 - DNA, 20 bp, synthetic construct
  misc_feature 1..20: note = Description of Artificial Sequence: Synthetic oligonucleotide
  misc_feature 1..20: note = Target: SCN10A; (+) strand; PAM type: NRG; PAM sequence: TGG
  source 1..20: mol_type = other DNA
ataagagaaggatggatggc

SEQ ID NO: 30292 - DNA, 20 bp, synthetic construct
  misc_feature 1..20: note = Description of Artificial Sequence: Synthetic oligonucleotide
  misc_feature 1..20: note = Target: SCN10A; (+) strand; PAM type: NRG; PAM sequence: GGG
  source 1..20: mol_type = other DNA
taagagaaggatggatggct

SEQ ID NO: 30293 - DNA, 20 bp, synthetic construct
  misc_feature 1..20: note = Description of Artificial Sequence: Synthetic oligonucleotide
  misc_feature 1..20: note = Target: SCN10A; (+) strand; PAM type: NRG; PAM sequence: TGG
  source 1..20: mol_type = other DNA
taaaatgactaatgcatgaa

SEQ ID NO: 30294 - DNA, 20 bp, synthetic construct
  misc_feature 1..20: note = Description of Artificial Sequence: Synthetic oligonucleotide
  misc_feature 1..20: note = Target: SCN10A; (+) strand; PAM type: NRG; PAM sequence: AAG
  source 1..20: mol_type = other DNA
atgactaatgcatgaatgga

SEQ ID NO: 30295 - DNA, 20 bp, synthetic construct
  misc_feature 1..20: note = Description of Artificial Sequence: Synthetic oligonucleotide
  misc_feature 1..20: note = Target: SCN10A; (+) strand; PAM type: NRG; PAM sequence: TGG
  source 1..20: mol_type = other DNA
ctaatgcatgaatggaaaga

SEQ ID NO: 30296 - DNA, 20 bp, synthetic construct
  misc_feature 1..20: note = Description of Artificial Sequence: Synthetic oligonucleotide
  misc_feature 1..20: note = Target: SCN10A; (+) strand; PAM type: NRG; PAM sequence: GGG
  source 1..20: mol_type = other DNA
taatgcatgaatggaaagat

SEQ ID NO: 30297 - DNA, 20 bp, synthetic construct
  misc_feature 1..20: note = Description of Artificial Sequence: Synthetic oligonucleotide
  misc_feature 1..20: note = Target: SCN10A; (+) strand; PAM type: NRG; PAM sequence: GGG
  source 1..20: mol_type = other DNA
aatgcatgaatggaaagatg

SEQ ID NO: 30298 - DNA, 20 bp, synthetic construct
  misc_feature 1..20: note = Description of Artificial Sequence: Synthetic oligonucleotide
  misc_feature 1..20: note = Target: SCN10A; (+) strand; PAM type: NRG; PAM sequence: GAG
  source 1..20: mol_type = other DNA
tgcatgaatggaaagatggg

SEQ ID NO: 30299 - DNA, 20 bp, synthetic construct
  misc_feature 1..20: note = Description of Artificial Sequence: Synthetic oligonucleotide
  misc_feature 1..20: note = Target: SCN10A; (+) strand; PAM type: NRG; PAM sequence: TGG
  source 1..20: mol_type = other DNA
tgaatggaaagatggggagc

SEQ ID NO: 30300 - DNA, 20 bp, synthetic construct
  misc_feature 1..20: note = Description of Artificial Sequence: Synthetic oligonucleotide
  misc_feature 1..20: note = Target: SCN10A; (+) strand; PAM type: NRG; PAM sequence: CAG
  source 1..20: mol_type = other DNA
tggaaagatggggagctgga

SEQ ID NO: 30301 - DNA, 20 bp, synthetic construct
  misc_feature 1..20: note = Description of Artificial Sequence: Synthetic oligonucleotide
  misc_feature 1..20: note = Target: SCN10A; (+) strand; PAM type: NRG; PAM sequence: TAG
  source 1..20: mol_type = other DNA
agatggggagctggacagaa

SEQ ID NO: 30302 - DNA, 20 bp, synthetic construct
  misc_feature 1..20: note = Description of Artificial Sequence: Synthetic oligonucleotide
  misc_feature 1..20: note = Target: SCN10A; (+) strand; PAM type: NRG; PAM sequence: TGG
  source 1..20: mol_type = other DNA
agctggacagaatagatgaa

SEQ ID NO: 30303 - DNA, 20 bp, synthetic construct
  misc_feature 1..20: note = Description of Artificial Sequence: Synthetic oligonucleotide
  misc_feature 1..20: note = Target: SCN10A; (+) strand; PAM type: NRG; PAM sequence: TAG
  source 1..20: mol_type = other DNA
aatagatgaatggaataaat

SEQ ID NO: 30304 - DNA, 20 bp, synthetic construct
  misc_feature 1..20: note = Description of Artificial Sequence: Synthetic oligonucleotide
  misc_feature 1..20: note = Target: SCN10A; (+) strand; PAM type: NRG; PAM sequence: TGG
  source 1..20: mol_type = other DNA
ggaataaattagtgaatgac

SEQ ID NO: 30305 - DNA, 20 bp, synthetic construct
  misc_feature 1..20: note = Description of Artificial Sequence: Synthetic oligonucleotide
  misc_feature 1..20: note = Target: SCN10A; (+) strand; PAM type: NRG; PAM sequence: AAG
  source 1..20: mol_type = other DNA
ataaattagtgaatgactgg

SEQ ID NO: 30306 - DNA, 20 bp, synthetic construct
  misc_feature 1..20: note = Description of Artificial Sequence: Synthetic oligonucleotide
  misc_feature 1..20: note = Target: SCN10A; (+) strand; PAM type: NRG; PAM sequence: AGG
  source 1..20: mol_type = other DNA
taaattagtgaatgactgga

SEQ ID NO: 30307 - DNA, 20 bp, synthetic construct
  misc_feature 1..20: note = Description of Artificial Sequence: Synthetic oligonucleotide
  misc_feature 1..20: note = Target: SCN10A; (+) strand; PAM type: NRG; PAM sequence: TAG
  source 1..20: mol_type = other DNA
gtgaatgactggaaggttga

SEQ ID NO: 30308 - DNA, 20 bp, synthetic construct
  misc_feature 1..20: note = Description of Artificial Sequence: Synthetic oligonucleotide
  misc_feature 1..20: note = Target: SCN10A; (+) strand; PAM type: NRG; PAM sequence: AGG
  source 1..20: mol_type = other DNA
tgaatgactggaaggttgat

SEQ ID NO: 30309 - DNA, 20 bp, synthetic construct
  misc_feature 1..20: note = Description of Artificial Sequence: Synthetic oligonucleotide
  misc_feature 1..20: note = Target: SCN10A; (+) strand; PAM type: NRG; PAM sequence: TGG
  source 1..20: mol_type = other DNA
tgactggaaggttgatagga

SEQ ID NO: 30310 - DNA, 20 bp, synthetic construct
  misc_feature 1..20: note = Description of Artificial Sequence: Synthetic oligonucleotide
  misc_feature 1..20: note = Target: SCN10A; (+) strand; PAM type: NRG; PAM sequence: TGG
  source 1..20: mol_type = other DNA
aggttgataggatggatgaa

SEQ ID NO: 30311 - DNA, 20 bp, synthetic construct
  misc_feature 1..20: note = Description of Artificial Sequence: Synthetic oligonucleotide
  misc_feature 1..20: note = Target: SCN10A; (+) strand; PAM type: NRG; PAM sequence: TGG
  source 1..20: mol_type = other DNA
atggatgaatggatgatgaa

SEQ ID NO: 30312 - DNA, 20 bp, synthetic construct
  misc_feature 1..20: note = Description of Artificial Sequence: Synthetic oligonucleotide
  misc_feature 1..20: note = Target: SCN10A; (+) strand; PAM type: NRG; PAM sequence: AAG
  source 1..20: mol_type = other DNA
gatgaatggatgatgaatgg

SEQ ID NO: 30313 - DNA, 20 bp, synthetic construct
  misc_feature 1..20: note = Description of Artificial Sequence: Synthetic oligonucleotide
  misc_feature 1..20: note = Target: SCN10A; (+) strand; PAM type: NRG; PAM sequence: AGG
  source 1..20: mol_type = other DNA
atgaatggatgatgaatgga

SEQ ID NO: 30314 - DNA, 20 bp, synthetic construct
  misc_feature 1..20: note = Description of Artificial Sequence: Synthetic oligonucleotide
  misc_feature 1..20: note = Target: SCN10A; (+) strand; PAM type: NRG; PAM sequence: GGG
  source 1..20: mol_type = other DNA
tgaatggatgatgaatggaa

SEQ ID NO: 30315 - DNA, 20 bp, synthetic construct
  misc_feature 1..20: note = Description of Artificial Sequence: Synthetic oligonucleotide
  misc_feature 1..20: note = Target: SCN10A; (+) strand; PAM type: NRG; PAM sequence: AAG
  source 1..20: mol_type = other DNA
tggatgatgaatggaaggga

SEQ ID NO: 30316 - DNA, 20 bp, synthetic construct
  misc_feature 1..20: note = Description of Artificial Sequence: Synthetic oligonucleotide
  misc_feature 1..20: note = Target: SCN10A; (+) strand; PAM type: NRG; PAM sequence: AGG
  source 1..20: mol_type = other DNA
ggatgatgaatggaagggaa

SEQ ID NO: 30317 - DNA, 20 bp, synthetic construct
  misc_feature 1..20: note = Description of Artificial Sequence: Synthetic oligonucleotide
  misc_feature 1..20: note = Target: SCN10A; (+) strand; PAM type: NRG; PAM sequence: GGG
  source 1..20: mol_type = other DNA
gatgatgaatggaagggaaa

SEQ ID NO: 30318 - DNA, 20 bp, synthetic construct
  misc_feature 1..20: note = Description of Artificial Sequence: Synthetic oligonucleotide
  misc_feature 1..20: note = Target: SCN10A; (+) strand; PAM type: NRG; PAM sequence: CAG
  source 1..20: mol_type = other DNA
aagggaaagggatgaatgaa

SEQ ID NO: 30319 - DNA, 20 bp, synthetic construct
  misc_feature 1..20: note = Description of Artificial Sequence: Synthetic oligonucleotide
  misc_feature 1..20: note = Target: SCN10A; (+) strand; PAM type: NRG; PAM sequence: AAG
  source 1..20: mol_type = other DNA
aaagggatgaatgaacagat

SEQ ID NO: 30320 - DNA, 20 bp, synthetic construct
  misc_feature 1..20: note = Description of Artificial Sequence: Synthetic oligonucleotide
  misc_feature 1..20: note = Target: SCN10A; (+) strand; PAM type: NRG; PAM sequence: TGG
  source 1..20: mol_type = other DNA
gggatgaatgaacagataag

SEQ ID NO: 30321 - DNA, 20 bp, synthetic construct
  misc_feature 1..20: note = Description of Artificial Sequence: Synthetic oligonucleotide
  misc_feature 1..20: note = Target: SCN10A; (+) strand; PAM type: NRG; PAM sequence: AAG
  source 1..20: mol_type = other DNA
atgaatgaacagataagtgg

SEQ ID NO: 30322 - DNA, 20 bp, synthetic construct
  misc_feature 1..20: note = Description of Artificial Sequence: Synthetic oligonucleotide
  misc_feature 1..20: note = Target: SCN10A; (+) strand; PAM type: NRG; PAM sequence: AAG
  source 1..20: mol_type = other DNA
atgaacagataagtggaaga

SEQ ID NO: 30323 - DNA, 20 bp, synthetic construct
  misc_feature 1..20: note = Description of Artificial Sequence: Synthetic oligonucleotide
  misc_feature 1..20: note = Target: SCN10A; (+) strand; PAM type: NRG; PAM sequence: AGG
  source 1..20: mol_type = other DNA
tgaacagataagtggaagaa

SEQ ID NO: 30324 - DNA, 20 bp, synthetic construct
  misc_feature 1..20: note = Description of Artificial Sequence: Synthetic oligonucleotide
  misc_feature 1..20: note = Target: SCN10A; (+) strand; PAM type: NRG; PAM sequence: AAG
  source 1..20: mol_type = other DNA
acagataagtggaagaaagg

SEQ ID NO: 30325 - DNA, 20 bp, synthetic construct
  misc_feature 1..20: note = Description of Artificial Sequence: Synthetic oligonucleotide
  misc_feature 1..20: note = Target: SCN10A; (+) strand; PAM type: NRG; PAM sequence: TAG
  source 1..20: mol_type = other DNA
taagtggaagaaaggaagaa

SEQ ID NO: 30326 - DNA, 20 bp, synthetic construct
  misc_feature 1..20: note = Description of Artificial Sequence: Synthetic oligonucleotide
  misc_feature 1..20: note = Target: SCN10A; (+) strand; PAM type: NRG; PAM sequence: TGG
  source 1..20: mol_type = other DNA
tggaagaaaggaagaataga

SEQ ID NO: 30327 - DNA, 20 bp, synthetic construct
  misc_feature 1..20: note = Description of Artificial Sequence: Synthetic oligonucleotide
  misc_feature 1..20: note = Target: SCN10A; (+) strand; PAM type: NRG; PAM sequence: TAG
  source 1..20: mol_type = other DNA
agaaaggaagaatagatgga

SEQ ID NO: 30328 - DNA, 20 bp, synthetic construct
  misc_feature 1..20: note = Description of Artificial Sequence: Synthetic oligonucleotide
  misc_feature 1..20: note = Target: SCN10A; (+) strand; PAM type: NRG; PAM sequence: AGG
  source 1..20: mol_type = other DNA
gaaaggaagaatagatggat

SEQ ID NO: 30329 - DNA, 20 bp, synthetic construct
  misc_feature 1..20: note = Description of Artificial Sequence: Synthetic oligonucleotide
  misc_feature 1..20: note = Target: SCN10A; (+) strand; PAM type: NRG; PAM sequence: AAG
  source 1..20: mol_type = other DNA
atagatggataggttgaaac

SEQ ID NO: 30330 - DNA, 20 bp, synthetic construct
  misc_feature 1..20: note = Description of Artificial Sequence: Synthetic oligonucleotide
  misc_feature 1..20: note = Target: SCN10A; (+) strand; PAM type: NRG; PAM sequence: TGG
  source 1..20: mol_type = other DNA
tggataggttgaaacaagaa

SEQ ID NO: 30331 - DNA, 20 bp, synthetic construct
  misc_feature 1..20: note = Description of Artificial Sequence: Synthetic oligonucleotide
  misc_feature 1..20: note = Target: SCN10A; (+) strand; PAM type: NRG; PAM sequence: AAG
  source 1..20: mol_type = other DNA
taggttgaaacaagaatgga

SEQ ID NO: 30332 - DNA, 20 bp, synthetic construct
  misc_feature 1..20: note = Description of Artificial Sequence: Synthetic oligonucleotide
  misc_feature 1..20: note = Target: SCN10A; (+) strand; PAM type: NRG; PAM sequence: TAG
  source 1..20: mol_type = other DNA
ttgaaacaagaatggaaaga

SEQ ID NO: 30333 - DNA, 20 bp, synthetic construct
  misc_feature 1..20: note = Description of Artificial Sequence: Synthetic oligonucleotide
  misc_feature 1..20: note = Target: SCN10A; (+) strand; PAM type: NRG; PAM sequence: AAG
  source 1..20: mol_type = other DNA
aaacaagaatggaaagatag

SEQ ID NO: 30334 - DNA, 20 bp, synthetic construct
  misc_feature 1..20: note = Description of Artificial Sequence: Synthetic oligonucleotide
  misc_feature 1..20: note = Target: SCN10A; (+) strand; PAM type: NRG; PAM sequence: GAG
  source 1..20: mol_type = other DNA
gaatggaaagatagaagaat

SEQ ID NO: 30335 - DNA, 20 bp, synthetic construct
  misc_feature 1..20: note = Description of Artificial Sequence: Synthetic oligonucleotide
  misc_feature 1..20: note = Target: SCN10A; (+) strand; PAM type: NRG; PAM sequence: TGG
  source 1..20: mol_type = other DNA
tggaaagatagaagaatgag

SEQ ID NO: 30336 - DNA, 20 bp, synthetic construct
  misc_feature 1..20: note = Description of Artificial Sequence: Synthetic oligonucleotide
  misc_feature 1..20: note = Target: SCN10A; (+) strand; PAM type: NRG; PAM sequence: TAG
  source 1..20: mol_type = other DNA
aagatagaagaatgagtgga

SEQ ID NO: 30337 - DNA, 20 bp, synthetic construct
  misc_feature 1..20: note = Description of Artificial Sequence: Synthetic oligonucleotide
  misc_feature 1..20: note = Target: SCN10A; (+) strand; PAM type: NRG; PAM sequence: AAG
  source 1..20: mol_type = other DNA
atagaagaatgagtggatag

SEQ ID NO: 30338 - DNA, 20 bp, synthetic construct
  misc_feature 1..20: note = Description of Artificial Sequence: Synthetic oligonucleotide
  misc_feature 1..20: note = Target: SCN10A; (+) strand; PAM type: NRG; PAM sequence: AGG
  source 1..20: mol_type = other DNA
tagaagaatgagtggataga

SEQ ID NO: 30339 - DNA, 20 bp, synthetic construct
  misc_feature 1..20: note = Description of Artificial Sequence: Synthetic oligonucleotide
  misc_feature 1..20: note = Target: SCN10A; (+) strand; PAM type: NRG; PAM sequence: GAG
  source 1..20: mol_type = other DNA
gaatgagtggatagaaggat

SEQ ID NO: 30340 - DNA, 20 bp, synthetic construct
  misc_feature 1..20: note = Description of Artificial Sequence: Synthetic oligonucleotide
  misc_feature 1..20: note = Target: SCN10A; (+) strand; PAM type: NRG; PAM sequence: GAG
  source 1..20: mol_type = other DNA
gagtggatagaaggatgagt

SEQ ID NO: 30341 - DNA, 20 bp, synthetic construct
  misc_feature 1..20: note = Description of Artificial Sequence: Synthetic oligonucleotide
  misc_feature 1..20: note = Target: SCN10A; (+) strand; PAM type: NRG; PAM sequence: TAG
  source 1..20: mol_type = other DNA
tggatagaaggatgagtgag

SEQ ID NO: 30342 - DNA, 20 bp, synthetic construct
  misc_feature 1..20: note = Description of Artificial Sequence: Synthetic oligonucleotide
  misc_feature 1..20: note = Target: SCN10A; (+) strand; PAM type: NRG; PAM sequence: AAG
  source 1..20: mol_type = other DNA
atagaaggatgagtgagtag

SEQ ID NO: 30343 - DNA, 20 bp, synthetic construct
  misc_feature 1..20: note = Description of Artificial Sequence: Synthetic oligonucleotide
  misc_feature 1..20: note = Target: SCN10A; (+) strand; PAM type: NRG; PAM sequence: TGG
  source 1..20: mol_type = other DNA
tgagtgagtagaagcatgct

SEQ ID NO: 30344 - DNA, 20 bp, synthetic construct
  misc_feature 1..20: note = Description of Artificial Sequence: Synthetic oligonucleotide
  misc_feature 1..20: note = Target: SCN10A; (+) strand; PAM type: NRG; PAM sequence: TGG
  source 1..20: mol_type = other DNA
tgagtagaagcatgcttgga

SEQ ID NO: 30345 - DNA, 20 bp, synthetic construct
  misc_feature 1..20: note = Description of Artificial Sequence: Synthetic oligonucleotide
  misc_feature 1..20: note = Target: SCN10A; (+) strand; PAM type: NRG; PAM sequence: AAG
  source 1..20: mol_type = other DNA
gtagaagcatgcttggatgg

SEQ ID NO: 30346 - DNA, 20 bp, synthetic construct
  misc_feature 1..20: note = Description of Artificial Sequence: Synthetic oligonucleotide
  misc_feature 1..20: note = Target: SCN10A; (+) strand; PAM type: NRG; PAM sequence: GAG
  source 1..20: mol_type = other DNA
tggatggaagatgcgtgaat

SEQ ID NO: 30347 - DNA, 20 bp, synthetic construct
  misc_feature 1..20: note = Description of Artificial Sequence: Synthetic oligonucleotide
  misc_feature 1..20: note = Target: SCN10A; (+) strand; PAM type: NRG; PAM sequence: CAG
  source 1..20: mol_type = other DNA
aagatgcgtgaatgagtgaa

SEQ ID NO: 30348 - DNA, 20 bp, synthetic construct
  misc_feature 1..20: note = Description of Artificial Sequence: Synthetic oligonucleotide
  misc_feature 1..20: note = Target: SCN10A; (+) strand; PAM type: NRG; PAM sequence: TAG
  source 1..20: mol_type = other DNA
tgaatgagtgaacagaatgt

SEQ ID NO: 30349 - DNA, 20 bp, synthetic construct
  misc_feature 1..20: note = Description of Artificial Sequence: Synthetic oligonucleotide
  misc_feature 1..20: note = Target: SCN10A; (+) strand; PAM type: NRG; PAM sequence: TGG
  source 1..20: mol_type = other DNA
tgaacagaatgttagatgat

SEQ ID NO: 30350 - DNA, 20 bp, synthetic construct
  misc_feature 1..20: note = Description of Artificial Sequence: Synthetic oligonucleotide
  misc_feature 1..20: note = Target: SCN10A; (+) strand; PAM type: NRG; PAM sequence: CAG
  source 1..20: mol_type = other DNA
cagaatgttagatgattgga

SEQ ID NO: 30351 - DNA, 20 bp, synthetic construct
  misc_feature 1..20: note = Description of Artificial Sequence: Synthetic oligonucleotide
  misc_feature 1..20: note = Target: SCN10A; (+) strand; PAM type: NRG; PAM sequence: TGG
  source 1..20: mol_type = other DNA
atgttagatgattggacagt

SEQ ID NO: 30352 - DNA, 20 bp, synthetic construct
  misc_feature 1..20: note = Description of Artificial Sequence: Synthetic oligonucleotide
  misc_feature 1..20: note = Target: SCN10A; (+) strand; PAM type: NRG; PAM sequence: TAG
  source 1..20: mol_type = other DNA
tagatgattggacagttgga

SEQ ID NO: 30353 - DNA, 20 bp, synthetic construct
  misc_feature 1..20: note = Description of Artificial Sequence: Synthetic oligonucleotide
  misc_feature 1..20: note = Target: SCN10A; (+) strand; PAM type: NRG; PAM sequence: AAG
  source 1..20: mol_type = other DNA
atgattggacagttggatag

SEQ ID NO: 30354 - DNA, 20 bp, synthetic construct
  misc_feature 1..20: note = Description of Artificial Sequence: Synthetic oligonucleotide
  misc_feature 1..20: note = Target: SCN10A; (+) strand; PAM type: NRG; PAM sequence: AAG
  source 1..20: mol_type = other DNA
tggatagaagaatgaatcaa

SEQ ID NO: 30355 - DNA, 20 bp, synthetic construct
  misc_feature 1..20: note = Description of Artificial Sequence: Synthetic oligonucleotide
  misc_feature 1..20: note = Target: SCN10A; (+) strand; PAM type: NRG; PAM sequence: TAG
  source 1..20: mol_type = other DNA
tagaagaatgaatcaaaaga

SEQ ID NO: 30356 - DNA, 20 bp, synthetic construct
  misc_feature 1..20: note = Description of Artificial Sequence: Synthetic oligonucleotide
  misc_feature 1..20: note = Target: SCN10A; (+) strand; PAM type: NRG; PAM sequence: AAG
  source 1..20: mol_type = other DNA
agaatgaatcaaaagataga

SEQ ID NO: 30357 - DNA, 20 bp, synthetic construct
  misc_feature 1..20: note = Description of Artificial Sequence: Synthetic oligonucleotide
  misc_feature 1..20: note = Target: SCN10A; (+) strand; PAM type: NRG; PAM sequence: AAG
  source 1..20: mol_type = other DNA
atcaaaagatagaaagatat

SEQ ID NO: 30358 - DNA, 20 bp, synthetic construct
  misc_feature 1..20: note = Description of Artificial Sequence: Synthetic oligonucleotide
  misc_feature 1..20: note = Target: SCN10A; (+) strand; PAM type: NRG; PAM sequence: AGG
  source 1..20: mol_type = other DNA
tcaaaagatagaaagatata

SEQ ID NO: 30359 - DNA, 20 bp, synthetic construct
  misc_feature 1..20: note = Description of Artificial Sequence: Synthetic oligonucleotide
  misc_feature 1..20: note = Target: SCN10A; (+) strand; PAM type: NRG; PAM sequence: GGG
  source 1..20: mol_type = other DNA
caaaagatagaaagatataa

SEQ ID NO: 30360 - DNA, 20 bp, synthetic construct
  misc_feature 1..20: note = Description of Artificial Sequence: Synthetic oligonucleotide
  misc_feature 1..20: note = Target: SCN10A; (+) strand; PAM type: NRG; PAM sequence: AAG
  source 1..20: mol_type = other DNA
gatagaaagatataagggtt

SEQ ID NO: 30361 - DNA, 20 bp, synthetic construct
  misc_feature 1..20: note = Description of Artificial Sequence: Synthetic oligonucleotide
  misc_feature 1..20: note = Target: SCN10A; (+) strand; PAM type: NRG; PAM sequence: AGG
  source 1..20: mol_type = other DNA
atagaaagatataagggtta

SEQ ID NO: 30362 - DNA, 20 bp, synthetic construct
  misc_feature 1..20: note = Description of Artificial Sequence: Synthetic oligonucleotide
  misc_feature 1..20: note = Target: SCN10A; (+) strand; PAM type: NRG; PAM sequence: TAG
  source 1..20: mol_type = other DNA
taagggttaaggatgatgaa

SEQ ID NO: 30363 - DNA, 20 bp, synthetic construct
  misc_feature 1..20: note = Description of Artificial Sequence: Synthetic oligonucleotide
  misc_feature 1..20: note = Target: SCN10A; (+) strand; PAM type: NRG; PAM sequence: TGG
  source 1..20: mol_type = other DNA
ggttaaggatgatgaataga

SEQ ID NO: 30364 - DNA, 20 bp, synthetic construct
  misc_feature 1..20: note = Description of Artificial Sequence: Synthetic oligonucleotide
  misc_feature 1..20: note = Target: SCN10A; (+) strand; PAM type: NRG; PAM sequence: AAG
  source 1..20: mol_type = other DNA
taaggatgatgaatagatgg

SEQ ID NO: 30365 - DNA, 20 bp, synthetic construct
  misc_feature 1..20: note = Description of Artificial Sequence: Synthetic oligonucleotide
  misc_feature 1..20: note = Target: SCN10A; (+) strand; PAM type: NRG; PAM sequence: AGG
  source 1..20: mol_type = other DNA
aaggatgatgaatagatgga

SEQ ID NO: 30366 - DNA, 20 bp, synthetic construct
  misc_feature 1..20: note = Description of Artificial Sequence: Synthetic oligonucleotide
  misc_feature 1..20: note = Target: SCN10A; (+) strand; PAM type: NRG; PAM sequence: AAG
  source 1..20: mol_type = other DNA
gatgatgaatagatggaagg

SEQ ID NO: 30367 - DNA, 20 bp, synthetic construct
  misc_feature 1..20: note = Description of Artificial Sequence: Synthetic oligonucleotide
  misc_feature 1..20: note = Target: SCN10A; (+) strand; PAM type: NRG; PAM sequence: TAG
  source 1..20: mol_type = other DNA
tgaatagatggaaggaagtt

SEQ ID NO: 30368 - DNA, 20 bp, synthetic construct
  misc_feature 1..20: note = Description of Artificial Sequence: Synthetic oligonucleotide
  misc_feature 1..20: note = Target: SCN10A; (+) strand; PAM type: NRG; PAM sequence: AAG
  source 1..20: mol_type = other DNA
tggaaggaagtttagaataa

SEQ ID NO: 30369 - DNA, 20 bp, synthetic construct
  misc_feature 1..20: note = Description of Artificial Sequence: Synthetic oligonucleotide
  misc_feature 1..20: note = Target: SCN10A; (+) strand; PAM type: NRG; PAM sequence: TGG
  source 1..20: mol_type = other DNA
ggaagtttagaataaaagat

SEQ ID NO: 30370 - DNA, 20 bp, synthetic construct
  misc_feature 1..20: note = Description of Artificial Sequence: Synthetic oligonucleotide
  misc_feature 1..20: note = Target: SCN10A; (+) strand; PAM type: NRG; PAM sequence: GGG
  source 1..20: mol_type = other DNA
gaagtttagaataaaagatt

SEQ ID NO: 30371 - DNA, 20 bp, synthetic construct
  misc_feature 1..20: note = Description of Artificial Sequence: Synthetic oligonucleotide
  misc_feature 1..20: note = Target: SCN10A; (+) strand; PAM type: NRG; PAM sequence: CAG
  source 1..20: mol_type = other DNA
gtttagaataaaagattggg

SEQ ID NO: 30372 - DNA, 20 bp, synthetic construct
  misc_feature 1..20: note = Description of Artificial Sequence: Synthetic oligonucleotide
  misc_feature 1..20: note = Target: SCN10A; (+) strand; PAM type: NRG; PAM sequence: AAG
  source 1..20: mol_type = other DNA
tagaataaaagattgggcag

SEQ ID NO: 30373 - DNA, 20 bp, synthetic construct
  misc_feature 1..20: note = Description of Artificial Sequence: Synthetic oligonucleotide
  misc_feature 1..20: note = Target: SCN10A; (+) strand; PAM type: NRG; PAM sequence: GAG
  source 1..20: mol_type = other DNA
gaataaaagattgggcagaa

SEQ ID NO: 30374 - DNA, 20 bp, synthetic construct
  misc_feature 1..20: note = Description of Artificial Sequence: Synthetic oligonucleotide
  misc_feature 1..20: note = Target: SCN10A; (+) strand; PAM type: NRG; PAM sequence: AAG
  source 1..20: mol_type = other DNA
taaaagattgggcagaagag

SEQ ID NO: 30375 - DNA, 20 bp, synthetic construct
  misc_feature 1..20: note = Description of Artificial Sequence: Synthetic oligonucleotide
  misc_feature 1..20: note = Target: SCN10A; (+) strand; PAM type: NRG; PAM sequence: GAG
  source 1..20: mol_type = other DNA
aaagattgggcagaagagaa

SEQ ID NO: 30376 - DNA, 20 bp, synthetic construct
  misc_feature 1..20: note = Description of Artificial Sequence: Synthetic oligonucleotide
  misc_feature 1..20: note = Target: SCN10A; (+) strand; PAM type: NRG; PAM sequence: AGG
  source 1..20: mol_type = other DNA
aagattgggcagaagagaag

SEQ ID NO: 30377 - DNA, 20 bp, synthetic construct
  misc_feature 1..20: note = Description of Artificial Sequence: Synthetic oligonucleotide
  misc_feature 1..20: note = Target: SCN10A; (+) strand; PAM type: NRG; PAM sequence: GGG
  source 1..20: mol_type = other DNA
agattgggcagaagagaaga

SEQ ID NO: 30378 - DNA, 20 bp, synthetic construct
  misc_feature 1..20: note = Description of Artificial Sequence: Synthetic oligonucleotide
  misc_feature 1..20: note = Target: SCN10A; (+) strand; PAM type: NRG; PAM sequence: AAG
  source 1..20: mol_type = other DNA
tgggcagaagagaagaggga

SEQ ID NO: 30379 - DNA, 20 bp, synthetic construct
  misc_feature 1..20: note = Description of Artificial Sequence: Synthetic oligonucleotide
  misc_feature 1..20: note = Target: SCN10A; (+) strand; PAM type: NRG; PAM sequence: AAG
  source 1..20: mol_type = other DNA
gcagaagagaagagggaaag

SEQ ID NO: 30380 - DNA, 20 bp, synthetic construct
  misc_feature 1..20: note = Description of Artificial Sequence: Synthetic oligonucleotide
  misc_feature 1..20: note = Target: SCN10A; (+) strand; PAM type: NRG; PAM sequence: TGG
  source 1..20: mol_type = other DNA
agagaagagggaaagaagaa

SEQ ID NO: 30381 - DNA, 20 bp, synthetic construct
  misc_feature 1..20: note = Description of Artificial Sequence: Synthetic oligonucleotide
  misc_feature 1..20: note = Target: SCN10A; (+) strand; PAM type: NRG; PAM sequence: GGG
  source 1..20: mol_type = other DNA
gagaagagggaaagaagaat

SEQ ID NO: 30382 - DNA, 20 bp, synthetic construct
  misc_feature 1..20: note = Description of Artificial Sequence: Synthetic oligonucleotide
  misc_feature 1..20: note = Target: SCN10A; (+) strand; PAM type: NRG; PAM sequence: TGG
  source 1..20: mol_type = other DNA
gagggaaagaagaatgggaa

SEQ ID NO: 30383 - DNA, 20 bp, synthetic construct
  misc_feature 1..20: note = Description of Artificial Sequence: Synthetic oligonucleotide
  misc_feature 1..20: note = Target: SCN10A; (+) strand; PAM type: NRG; PAM sequence: TGG
  source 1..20: mol_type = other DNA
gaaagaagaatgggaatgga

SEQ ID NO: 30384 - DNA, 20 bp, synthetic construct
  misc_feature 1..20: note = Description of Artificial Sequence: Synthetic oligonucleotide
  misc_feature 1..20: note = Target: SCN10A; (+) strand; PAM type: NRG; PAM sequence: TGG
  source 1..20: mol_type = other DNA
gaagaatgggaatggatgga

SEQ ID NO: 30385 - DNA, 20 bp, synthetic construct
  misc_feature 1..20: note = Description of Artificial Sequence: Synthetic oligonucleotide
  misc_feature 1..20: note = Target: SCN10A; (+) strand; PAM type: NRG; PAM sequence: AAG
  source 1..20: mol_type = other DNA
gaatgggaatggatggatgg

SEQ ID NO: 30386 - DNA, 20 bp, synthetic construct
  misc_feature 1..20: note = Description of Artificial Sequence: Synthetic oligonucleotide
  misc_feature 1..20: note = Target: SCN10A; (+) strand; PAM type: NRG; PAM sequence: AGG
  source 1..20: mol_type = other DNA
aatgggaatggatggatgga

SEQ ID NO: 30387 - DNA, 20 bp, synthetic construct
  misc_feature 1..20: note = Description of Artificial Sequence: Synthetic oligonucleotide
  misc_feature 1..20: note = Target: SCN10A; (+) strand; PAM type: NRG; PAM sequence: GGG
  source 1..20: mol_type = other DNA
atgggaatggatggatggaa

SEQ ID NO: 30388 - DNA, 20 bp, synthetic construct
  misc_feature 1..20: note = Description of Artificial Sequence: Synthetic oligonucleotide
  misc_feature 1..20: note = Target: SCN10A; (+) strand; PAM type: NRG; PAM sequence: GGG
  source 1..20: mol_type = other DNA
tgggaatggatggatggaag

SEQ ID NO: 30389 - DNA, 20 bp, synthetic construct
  misc_feature 1..20: note = Description of Artificial Sequence: Synthetic oligonucleotide
  misc_feature 1..20: note = Target: SCN10A; (+) strand; PAM type: NRG; PAM sequence: GAG
  source 1..20: mol_type = other DNA
ggaatggatggatggaaggg

SEQ ID NO: 30390 - DNA, 20 bp, synthetic construct
  misc_feature 1..20: note = Description of Artificial Sequence: Synthetic oligonucleotide
  misc_feature 1..20: note = Target: SCN10A; (+) strand; PAM type: NRG; PAM sequence: AGG
  source 1..20: mol_type = other DNA
gaatggatggatggaagggg

SEQ ID NO: 30391 - DNA, 20 bp, synthetic construct
  misc_feature 1..20: note = Description of Artificial Sequence: Synthetic oligonucleotide
  misc_feature 1..20: note = Target: SCN10A; (+) strand; PAM type: NRG; PAM sequence: AAG
  source 1..20: mol_type = other DNA
atggaaggggaggactgatg

SEQ ID NO: 30392 - DNA, 20 bp, synthetic construct
  misc_feature 1..20: note = Description of Artificial Sequence: Synthetic oligonucleotide
  misc_feature 1..20: note = Target: SCN10A; (+) strand; PAM type: NRG; PAM sequence: CAG
  source 1..20: mol_type = other DNA
ggaggactgatgaagatgta

SEQ ID NO: 30393 - DNA, 20 bp, synthetic construct
  misc_feature 1..20: note = Description of Artificial Sequence: Synthetic oligonucleotide
  misc_feature 1..20: note = Target: SCN10A; (+) strand; PAM type: NRG; PAM sequence: TGG
  source 1..20: mol_type = other DNA
gactgatgaagatgtacagc

SEQ ID NO: 30394 - DNA, 20 bp, synthetic construct
  misc_feature 1..20: note = Description of Artificial Sequence: Synthetic oligonucleotide
  misc_feature 1..20: note = Target: SCN10A; (+) strand; PAM type: NRG; PAM sequence: AAG
  source 1..20: mol_type = other DNA
tgatgaagatgtacagctgg

SEQ ID NO: 30395 - DNA, 20 bp, synthetic construct
  misc_feature 1..20: note = Description of Artificial Sequence: Synthetic oligonucleotide
  misc_feature 1..20: note = Target: SCN10A; (+) strand; PAM type: NRG; PAM sequence: AAG
  source 1..20: mol_type = other DNA
atgtacagctggaagaaata

SEQ ID NO: 30396 - DNA, 20 bp, synthetic construct
  misc_feature 1..20: note = Description of Artificial Sequence: Synthetic oligonucleotide
  misc_feature 1..20: note = Target: SCN10A; (+) strand; PAM type: NRG; PAM sequence: TGG
  source 1..20: mol_type = other DNA
acagctggaagaaataaaga

SEQ ID NO: 30397 - DNA, 20 bp, synthetic construct
  misc_feature 1..20: note = Description of Artificial Sequence: Synthetic oligonucleotide
  misc_feature 1..20: note = Target: SCN10A; (+) strand; PAM type: NRG; PAM sequence: TGG
  source 1..20: mol_type = other DNA
ctggaagaaataaagatgga

SEQ ID NO: 30398 - DNA, 20 bp, synthetic construct
  misc_feature 1..20: note = Description of Artificial Sequence: Synthetic oligonucleotide
  misc_feature 1..20: note = Target: SCN10A; (+) strand; PAM type: NRG; PAM sequence: TGG
  source 1..20: mol_type = other DNA
aataaagatggatggatgtt

SEQ ID NO: 30399 - DNA, 20 bp, synthetic construct
  misc_feature 1..20: note = Description of Artificial Sequence: Synthetic oligonucleotide
  misc_feature 1..20: note = Target: SCN10A; (+) strand; PAM type: NRG; PAM sequence: GGG
  source 1..20: mol_type = other DNA
ataaagatggatggatgttt

SEQ ID NO: 30400 - DNA, 20 bp, synthetic construct
  misc_feature 1..20: note = Description of Artificial Sequence: Synthetic oligonucleotide
  misc_feature 1..20: note = Target: SCN10A; (+) strand; PAM type: NRG; PAM sequence: GAG
  source 1..20: mol_type = other DNA
aaagatggatggatgtttgg

SEQ ID NO: 30401 - DNA, 20 bp, synthetic construct
  misc_feature 1..20: note = Description of Artificial Sequence: Synthetic oligonucleotide
  misc_feature 1..20: note = Target: SCN10A; (+) strand; PAM type: NRG; PAM sequence: AGG
  source 1..20: mol_type = other DNA
aagatggatggatgtttggg

SEQ ID NO: 30402 - DNA, 20 bp, synthetic construct
  misc_feature 1..20: note = Description of Artificial Sequence: Synthetic oligonucleotide
  misc_feature 1..20: note = Target: SCN10A; (+) strand; PAM type: NRG; PAM sequence: AAG
  source 1..20: mol_type = other DNA
atggatggatgtttgggagg

SEQ ID NO: 30403 - DNA, 20 bp, synthetic construct
  misc_feature 1..20: note = Description of Artificial Sequence: Synthetic oligonucleotide
  misc_feature 1..20: note = Target: SCN10A; (+) strand; PAM type: NRG; PAM sequence: AGG
  source 1..20: mol_type = other DNA
tggatggatgtttgggagga

SEQ ID NO: 30404 - DNA, 20 bp, synthetic construct
  misc_feature 1..20: note = Description of Artificial Sequence: Synthetic oligonucleotide
  misc_feature 1..20: note = Target: SCN10A; (+) strand; PAM type: NRG; PAM sequence: AAG
  source 1..20: mol_type = other DNA
gatgtttgggaggaaggaaa

SEQ ID NO: 30405 - DNA, 20 bp, synthetic construct
  misc_feature 1..20: note = Description of Artificial Sequence: Synthetic oligonucleotide
  misc_feature 1..20: note = Target: SCN10A; (+) strand; PAM type: NRG; PAM sequence: AGG
  source 1..20: mol_type = other DNA
atgtttgggaggaaggaaaa

SEQ ID NO: 30406 - DNA, 20 bp, synthetic construct
  misc_feature 1..20: note = Description of Artificial Sequence: Synthetic oligonucleotide
  misc_feature 1..20: note = Target: SCN10A; (+) strand; PAM type: NRG; PAM sequence: AAG
  source 1..20: mol_type = other DNA
tttgggaggaaggaaaaagg

SEQ ID NO: 30407 - DNA, 20 bp, synthetic construct
  misc_feature 1..20: note = Description of Artificial Sequence: Synthetic oligonucleotide
  misc_feature 1..20: note = Target: SCN10A; (+) strand; PAM type: NRG; PAM sequence: TGG
  source 1..20: mol_type = other DNA
aaggaaaaaggaagactgaa

SEQ ID NO: 30408 - DNA, 20 bp, synthetic construct
  misc_feature 1..20: note = Description of Artificial Sequence: Synthetic oligonucleotide
  misc_feature 1..20: note = Target: SCN10A; (+) strand; PAM type: NRG; PAM sequence: TGG
  source 1..20: mol_type = other DNA
aaaaaggaagactgaatggt

SEQ ID NO: 30409 - DNA, 20 bp, synthetic construct
  misc_feature 1..20: note = Description of Artificial Sequence: Synthetic oligonucleotide
  misc_feature 1..20: note = Target: SCN10A; (+) strand; PAM type: NRG; PAM sequence: AAG
  source 1..20: mol_type = other DNA
gactgaatggttggatacaa

SEQ ID NO: 30410 - DNA, 20 bp, synthetic construct
  misc_feature 1..20: note = Description of Artificial Sequence: Synthetic oligonucleotide
  misc_feature 1..20: note = Target: SCN10A; (+) strand; PAM type: NRG; PAM sequence: AGG
  source 1..20: mol_type = other DNA
actgaatggttggatacaaa

SEQ ID NO: 30411 - DNA, 20 bp, synthetic construct
  misc_feature 1..20: note = Description of Artificial Sequence: Synthetic oligonucleotide
  misc_feature 1..20: note = Target: SCN10A; (+) strand; PAM type: NRG; PAM sequence: TGG
  source 1..20: mol_type = other DNA
gatacaaaaggtgaaatgta

SEQ ID NO: 30412 - DNA, 20 bp, synthetic construct
  misc_feature 1..20: note = Description of Artificial Sequence: Synthetic oligonucleotide
  misc_feature 1..20: note = Target: SCN10A; (+) strand; PAM type: NRG; PAM sequence: AAG
  source 1..20: mol_type = other DNA
acaaaaggtgaaatgtatgg

SEQ ID NO: 30413 - DNA, 20 bp, synthetic construct
  misc_feature 1..20: note = Description of Artificial Sequence: Synthetic oligonucleotide
  misc_feature 1..20: note = Target: SCN10A; (+) strand; PAM type: NRG; PAM sequence: AGG
  source 1..20: mol_type = other DNA
caaaaggtgaaatgtatgga

SEQ ID NO: 30414 - DNA, 20 bp, synthetic construct
  misc_feature 1..20: note = Description of Artificial Sequence: Synthetic oligonucleotide
  misc_feature 1..20: note = Target: SCN10A; (+) strand; PAM type: NRG; PAM sequence: AAG
  source 1..20: mol_type = other DNA
aaggtgaaatgtatggaagg

SEQ ID NO: 30415 - DNA, 20 bp, synthetic construct
  misc_feature 1..20: note = Description of Artificial Sequence: Synthetic oligonucleotide
  misc_feature 1..20: note = Target: SCN10A; (+) strand; PAM type: NRG; PAM sequence: AGG
  source 1..20: mol_type = other DNA
aggtgaaatgtatggaagga

SEQ ID NO: 30416 - DNA, 20 bp, synthetic construct
  misc_feature 1..20: note = Description of Artificial Sequence: Synthetic oligonucleotide
  misc_feature 1..20: note = Target: SCN10A; (+) strand; PAM type: NRG; PAM sequence: TGG
  source 1..20: mol_type = other DNA
gaaatgtatggaaggaagga

SEQ ID NO: 30417 - DNA, 20 bp, synthetic construct
  misc_feature 1..20: note = Description of Artificial Sequence: Synthetic oligonucleotide
  misc_feature 1..20: note = Target: SCN10A; (+) strand; PAM type: NRG; PAM sequence: TGG
  source 1..20: mol_type = other DNA
tgtatggaaggaaggatgga

SEQ ID NO: 30418 - DNA, 20 bp, synthetic construct
  misc_feature 1..20: note = Description of Artificial Sequence: Synthetic oligonucleotide
  misc_feature 1..20: note = Target: SCN10A; (+) strand; PAM type: NRG; PAM sequence: TGG
  source 1..20: mol_type = other DNA
tggaaggaaggatggatggt

SEQ ID NO: 30419 - DNA, 20 bp, synthetic construct
  misc_feature 1..20: note = Description of Artificial Sequence: Synthetic oligonucleotide
  misc_feature 1..20: note = Target: SCN10A; (+) strand; PAM type: NRG; PAM sequence: AAG
  source 1..20: mol_type = other DNA
aaggaaggatggatggttgg

SEQ ID NO: 30420 - DNA, 20 bp, synthetic construct
  misc_feature 1..20: note = Description of Artificial Sequence: Synthetic oligonucleotide
  misc_feature 1..20: note = Target: SCN10A; (+) strand; PAM type: NRG; PAM sequence: AGG
  source 1..20: mol_type = other DNA
aggaaggatggatggttgga

SEQ ID NO: 30421 - DNA, 20 bp, synthetic construct
  misc_feature 1..20: note = Description of Artificial Sequence: Synthetic oligonucleotide
  misc_feature 1..20: note = Target: SCN10A; (+) strand; PAM type: NRG; PAM sequence: AAG
  source 1..20: mol_type = other DNA
aaggatggatggttggaagg

SEQ ID NO: 30422 - DNA, 20 bp, synthetic construct
  misc_feature 1..20: note = Description of Artificial Sequence: Synthetic oligonucleotide
  misc_feature 1..20: note = Target: SCN10A; (+) strand; PAM type: NRG; PAM sequence: CAG
  source 1..20: mol_type = other DNA
ggatggttggaaggaagaat

SEQ ID NO: 30423 - DNA, 20 bp, synthetic construct
  misc_feature 1..20: note = Description of Artificial Sequence: Synthetic oligonucleotide
  misc_feature 1..20: note = Target: SCN10A; (+) strand; PAM type: NRG; PAM sequence: TAG
  source 1..20: mol_type = other DNA
tggttggaaggaagaatcag

SEQ ID NO: 30424 - DNA, 20 bp, synthetic construct
  misc_feature 1..20: note = Description of Artificial Sequence: Synthetic oligonucleotide
  misc_feature 1..20: note = Target: SCN10A; (+) strand; PAM type: NRG; PAM sequence: AGG
  source 1..20: mol_type = other DNA
ggttggaaggaagaatcagt

SEQ ID NO: 30425 - DNA, 20 bp, synthetic construct
  misc_feature 1..20: note = Description of Artificial Sequence: Synthetic oligonucleotide
  misc_feature 1..20: note = Target: SCN10A; (+) strand; PAM type: NRG; PAM sequence: AAG
  source 1..20: mol_type = other DNA
tggaaggaagaatcagtagg

SEQ ID NO: 30426 - DNA, 20 bp, synthetic construct
  misc_feature 1..20: note = Description of Artificial Sequence: Synthetic oligonucleotide
  misc_feature 1..20: note = Target: SCN10A; (+) strand; PAM type: NRG; PAM sequence: TGG
  source 1..20: mol_type = other DNA
aggaagaatcagtaggaaga

SEQ ID NO: 30427 - DNA, 20 bp, synthetic construct
  misc_feature 1..20: note = Description of Artificial Sequence: Synthetic oligonucleotide
  misc_feature 1..20: note = Target: SCN10A; (+) strand; PAM type: NRG; PAM sequence: GAG
  source 1..20: mol_type = other DNA
agtaggaagatggatgaaat

SEQ ID NO: 30428 - DNA, 20 bp, synthetic construct
  misc_feature 1..20: note = Description of Artificial Sequence: Synthetic oligonucleotide
  misc_feature 1..20: note = Target: SCN10A; (+) strand; PAM type: NRG; PAM sequence: AAG
  source 1..20: mol_type = other DNA
aaatgagtgcatgaccgttt

SEQ ID NO: 30429 - DNA, 20 bp, synthetic construct
  misc_feature 1..20: note = Description of Artificial Sequence: Synthetic oligonucleotide
  misc_feature 1..20: note = Target: SCN10A; (+) strand; PAM type: NRG; PAM sequence: AGG
  source 1..20: mol_type = other DNA
aatgagtgcatgaccgttta

SEQ ID NO: 30430 - DNA, 20 bp, synthetic construct
  misc_feature 1..20: note = Description of Artificial Sequence: Synthetic oligonucleotide
  misc_feature 1..20: note = Target: SCN10A; (+) strand; PAM type: NRG; PAM sequence: TAG
  source 1..20: mol_type = other DNA
gcatgaccgtttaaggtgat

SEQ ID NO: 30431 - DNA, 20 bp, synthetic construct
  misc_feature 1..20: note = Description of Artificial Sequence: Synthetic oligonucleotide
  misc_feature 1..20: note = Target: SCN10A; (+) strand; PAM type: NRG; PAM sequence: AGG
  source 1..20: mol_type = other DNA
catgaccgtttaaggtgatt

SEQ ID NO: 30432 - DNA, 20 bp, synthetic construct
  misc_feature 1..20: note = Description of Artificial Sequence: Synthetic oligonucleotide
  misc_feature 1..20: note = Target: SCN10A; (+) strand; PAM type: NRG; PAM sequence: GAG
  source 1..20: mol_type = other DNA
cgtttaaggtgattaggact

SEQ ID NO: 30433 - DNA, 20 bp, synthetic construct
  misc_feature 1..20: note = Description of Artificial Sequence: Synthetic oligonucleotide
  misc_feature 1..20: note = Target: SCN10A; (+) strand; PAM type: NRG; PAM sequence: TGG
  source 1..20: mol_type = other DNA
aaggtgattaggactgagac

SEQ ID NO: 30434 - DNA, 20 bp, synthetic construct
  misc_feature 1..20: note = Description of Artificial Sequence: Synthetic oligonucleotide
  misc_feature 1..20: note = Target: SCN10A; (+) strand; PAM type: NRG; PAM sequence: GAG
  source 1..20: mol_type = other DNA
tgattaggactgagactggt

SEQ ID NO: 30435 - DNA, 20 bp, synthetic construct
  misc_feature 1..20: note = Description of Artificial Sequence: Synthetic oligonucleotide
  misc_feature 1..20: note = Target: SCN10A; (+) strand; PAM type: NRG; PAM sequence: AAG
  source 1..20: mol_type = other DNA
gagactggtgagatcaacat

SEQ ID NO: 30436 - DNA, 20 bp, synthetic construct
  misc_feature 1..20: note = Description of Artificial Sequence: Synthetic oligonucleotide
  misc_feature 1..20: note = Target: SCN10A; (+) strand; PAM type: NRG; PAM sequence: CAG
  source 1..20: mol_type = other DNA
actggtgagatcaacataag

SEQ ID NO: 30437 - DNA, 20 bp, synthetic construct
  misc_feature 1..20: note = Description of Artificial Sequence: Synthetic oligonucleotide
  misc_feature 1..20: note = Target: SCN10A; (+) strand; PAM type: NRG; PAM sequence: AGG
  source 1..20: mol_type = other DNA
ctggtgagatcaacataagc

SEQ ID NO: 30438 - DNA, 20 bp, synthetic construct
  misc_feature 1..20: note = Description of Artificial Sequence: Synthetic oligonucleotide
  misc_feature 1..20: note = Target: SCN10A; (+) strand; PAM type: NRG; PAM sequence: GAG
  source 1..20: mol_type = other DNA
ggtgagatcaacataagcag

SEQ ID NO: 30439 - DNA, 20 bp, synthetic construct
  misc_feature 1..20: note = Description of Artificial Sequence: Synthetic oligonucleotide
  misc_feature 1..20: note = Target: SCN10A; (+) strand; PAM type: NRG; PAM sequence: AAG
  source 1..20: mol_type = other DNA
caggagtgactgtgccccca

SEQ ID NO: 30440 - DNA, 20 bp, synthetic construct
  misc_feature 1..20: note = Description of Artificial Sequence: Synthetic oligonucleotide
  misc_feature 1..20: note = Target: SCN10A; (+) strand; PAM type: NRG; PAM sequence: AGG
  source 1..20: mol_type = other DNA
aggagtgactgtgcccccaa

SEQ ID NO: 30441 - DNA, 20 bp, synthetic construct
  misc_feature 1..20: note = Description of Artificial Sequence: Synthetic oligonucleotide
  misc_feature 1..20: note = Target: SCN10A; (+) strand; PAM type: NRG; PAM sequence: GGG
  source 1..20: mol_type = other DNA
ggagtgactgtgcccccaaa

SEQ ID NO: 30442 - DNA, 20 bp, synthetic construct
  misc_feature 1..20: note = Description of Artificial Sequence: Synthetic oligonucleotide
  misc_feature 1..20: note = Target: SCN10A; (+) strand; PAM type: NRG; PAM sequence: GGG
  source 1..20: mol_type = other DNA
gagtgactgtgcccccaaag

SEQ ID NO: 30443 - DNA, 20 bp, synthetic construct
  misc_feature 1..20: note = Description of Artificial Sequence: Synthetic oligonucleotide
  misc_feature 1..20: note = Target: SCN10A; (+) strand; PAM type: NRG; PAM sequence: TGG
  source 1..20: mol_type = other DNA
tgactgtgcccccaaagggg

SEQ ID NO: 30444 - DNA, 20 bp, synthetic construct
  misc_feature 1..20: note = Description of Artificial Sequence: Synthetic oligonucleotide
  misc_feature 1..20: note = Target: SCN10A; (+) strand; PAM type: NRG; PAM sequence: GGG
  source 1..20: mol_type = other DNA
gactgtgcccccaaaggggt

SEQ ID NO: 30445 - DNA, 20 bp, synthetic construct
  misc_feature 1..20: note = Description of Artificial Sequence: Synthetic oligonucleotide
  misc_feature 1..20: note = Target: SCN10A; (+) strand; PAM type: NRG; PAM sequence: CGG
  source 1..20: mol_type = other DNA
cccccaaaggggtgggacac

SEQ ID NO: 30446 - DNA, 20 bp, synthetic construct
  misc_feature 1..20: note = Description of Artificial Sequence: Synthetic oligonucleotide
  misc_feature 1..20: note = Target: SCN10A; (+) strand; PAM type: NRG; PAM sequence: CAG
  source 1..20: mol_type = other DNA
gaataattatttcatatgca

SEQ ID NO: 30447 - DNA, 20 bp, synthetic construct
  misc_feature 1..20: note = Description of Artificial Sequence: Synthetic oligonucleotide
  misc_feature 1..20: note = Target: SCN10A; (+) strand; PAM type: NRG; PAM sequence: CAG
  source 1..20: mol_type = other DNA
cagaattatcacccatgact

SEQ ID NO: 30448 - DNA, 20 bp, synthetic construct
  misc_feature 1..20: note = Description of Artificial Sequence: Synthetic oligonucleotide
  misc_feature 1..20: note = Target: SCN10A; (+) strand; PAM type: NRG; PAM sequence: CAG
  source 1..20: mol_type = other DNA
atcacccatgactcagattt

SEQ ID NO: 30449 - DNA, 20 bp, synthetic construct
  misc_feature 1..20: note = Description of Artificial Sequence: Synthetic oligonucleotide
  misc_feature 1..20: note = Target: SCN10A; (+) strand; PAM type: NRG; PAM sequence: AGG
  source 1..20: mol_type = other DNA
tcacccatgactcagatttc

SEQ ID NO: 30450 - DNA, 20 bp, synthetic construct
  misc_feature 1..20: note = Description of Artificial Sequence: Synthetic oligonucleotide
  misc_feature 1..20: note = Target: SCN10A; (+) strand; PAM type: NRG; PAM sequence: CAG
  source 1..20: mol_type = other DNA
gactcagatttcaggcctca

SEQ ID NO: 30451 - DNA, 20 bp, synthetic construct
  misc_feature 1..20: note = Description of Artificial Sequence: Synthetic oligonucleotide
  misc_feature 1..20: note = Target: SCN10A; (+) strand; PAM type: NRG; PAM sequence: TGG
  source 1..20: mol_type = other DNA
ggcctcacagctaatccttg

SEQ ID NO: 30452 - DNA, 20 bp, synthetic construct
  misc_feature 1..20: note = Description of Artificial Sequence: Synthetic oligonucleotide
  misc_feature 1..20: note = Target: SCN10A; (+) strand; PAM type: NRG; PAM sequence: CAG
  source 1..20: mol_type = other DNA
cacagctaatccttgtggta

SEQ ID NO: 30453 - DNA, 20 bp, synthetic construct
  misc_feature 1..20: note = Description of Artificial Sequence: Synthetic oligonucleotide
  misc_feature 1..20: note = Target: SCN10A; (+) strand; PAM type: NRG; PAM sequence: TGG
  source 1..20: mol_type = other DNA
agctaatccttgtggtacag

SEQ ID NO: 30454 - DNA, 20 bp, synthetic construct
  misc_feature 1..20: note = Description of Artificial Sequence: Synthetic oligonucleotide
  misc_feature 1..20: note = Target: SCN10A; (+) strand; PAM type: NRG; PAM sequence: AAG
  source 1..20: mol_type = other DNA
ccttgtggtacagtggcctg

SEQ ID NO: 30455 - DNA, 20 bp, synthetic construct
  misc_feature 1..20: note = Description of Artificial Sequence: Synthetic oligonucleotide
  misc_feature 1..20: note = Target: SCN10A; (+) strand; PAM type: NRG; PAM sequence: TAG
  source 1..20: mol_type = other DNA
gtacagtggcctgaagctgc

SEQ ID NO: 30456 - DNA, 20 bp, synthetic construct
  misc_feature 1..20: note = Description of Artificial Sequence: Synthetic oligonucleotide
  misc_feature 1..20: note = Target: SCN10A; (+) strand; PAM type: NRG; PAM sequence: TGG
  source 1..20: mol_type = other DNA
gcctgaagctgctagtgcat

SEQ ID NO: 30457 - DNA, 20 bp, synthetic construct
  misc_feature 1..20: note = Description of Artificial Sequence: Synthetic oligonucleotide
  misc_feature 1..20: note = Target: SCN10A; (+) strand; PAM type: NRG; PAM sequence: CAG
  source 1..20: mol_type = other DNA
agctgctagtgcattggcat

SEQ ID NO: 30458 - DNA, 20 bp, synthetic construct
  misc_feature 1..20: note = Description of Artificial Sequence: Synthetic oligonucleotide
  misc_feature 1..20: note = Target: SCN10A; (+) strand; PAM type: NRG; PAM sequence: AGG
  source 1..20: mol_type = other DNA
gctgctagtgcattggcatc

SEQ ID NO: 30459 - DNA, 20 bp, synthetic construct
  misc_feature 1..20: note = Description of Artificial Sequence: Synthetic oligonucleotide
  misc_feature 1..20: note = Target: SCN10A; (+) strand; PAM type: NRG; PAM sequence: GGG
  source 1..20: mol_type = other DNA
ctgctagtgcattggcatca

SEQ ID NO: 30460 - DNA, 20 bp, synthetic construct
  misc_feature 1..20: note = Description of Artificial Sequence: Synthetic oligonucleotide
  misc_feature 1..20: note = Target: SCN10A; (+) strand; PAM type: NRG; PAM sequence: AAG
  source 1..20: mol_type = other DNA
ctagtgcattggcatcaggg

SEQ ID NO: 30461 - DNA, 20 bp, synthetic construct
  misc_feature 1..20: note = Description of Artificial Sequence: Synthetic oligonucleotide
  misc_feature 1..20: note = Target: SCN10A; (+) strand; PAM type: NRG; PAM sequence: AAG
  source 1..20: mol_type = other DNA
gtgcattggcatcagggaag

SEQ ID NO: 30462 - DNA, 20 bp, synthetic construct
  misc_feature 1..20: note = Description of Artificial Sequence: Synthetic oligonucleotide
  misc_feature 1..20: note = Target: SCN10A; (+) strand; PAM type: NRG; PAM sequence: GAG
  source 1..20: mol_type = other DNA
gcattggcatcagggaagaa

SEQ ID NO: 30463 - DNA, 20 bp, synthetic construct
  misc_feature 1..20: note = Description of Artificial Sequence: Synthetic oligonucleotide
  misc_feature 1..20: note = Target: SCN10A; (+) strand; PAM type: NRG; PAM sequence: CAG
  source 1..20: mol_type = other DNA
gaagaagagaattgaatgca

SEQ ID NO: 30464 - DNA, 20 bp, synthetic construct
  misc_feature 1..20: note = Description of Artificial Sequence: Synthetic oligonucleotide
  misc_feature 1..20: note = Target: SCN10A; (+) strand; PAM type: NRG; PAM sequence: AGG
  source 1..20: mol_type = other DNA
aagaagagaattgaatgcac

SEQ ID NO: 30465 - DNA, 20 bp, synthetic construct
  misc_feature 1..20: note = Description of Artificial Sequence: Synthetic oligonucleotide
  misc_feature 1..20: note = Target: SCN10A; (+) strand; PAM type: NRG; PAM sequence: TGG
  source 1..20: mol_type = other DNA
ttgaatgcacaggcctgcta

SEQ ID NO: 30466 - DNA, 20 bp, synthetic construct
  misc_feature 1..20: note = Description of Artificial Sequence: Synthetic oligonucleotide
  misc_feature 1..20: note = Target: SCN10A; (+) strand; PAM type: NRG; PAM sequence: GAG
  source 1..20: mol_type = other DNA
gaatgcacaggcctgctatg

SEQ ID NO: 30467 - DNA, 20 bp, synthetic construct
  misc_feature 1..20: note = Description of Artificial Sequence: Synthetic oligonucleotide
  misc_feature 1..20: note = Target: SCN10A; (+) strand; PAM type: NRG; PAM sequence: AGG
  source 1..20: mol_type = other DNA
aatgcacaggcctgctatgg

SEQ ID NO: 30468 - DNA, 20 bp, synthetic construct
  misc_feature 1..20: note = Description of Artificial Sequence: Synthetic oligonucleotide
  misc_feature 1..20: note = Target: SCN10A; (+) strand; PAM type: NRG; PAM sequence: CAG
  source 1..20: mol_type = other DNA
gcctgctatggaggacctgc

SEQ ID NO: 30469 - DNA, 20 bp, synthetic construct
  misc_feature 1..20: note = Description of Artificial Sequence: Synthetic oligonucleotide
  misc_feature 1..20: note = Target: SCN10A; (+) strand; PAM type: NRG; PAM sequence: CAG
  source 1..20: mol_type = other DNA
ctatggaggacctgccagca

SEQ ID NO: 30470 - DNA, 20 bp, synthetic construct
  misc_feature 1..20: note = Description of Artificial Sequence: Synthetic oligonucleotide
  misc_feature 1..20: note = Target: SCN10A; (+) strand; PAM type: NRG; PAM sequence: AGG
  source 1..20: mol_type = other DNA
tatggaggacctgccagcac

SEQ ID NO: 30471 - DNA, 20 bp, synthetic construct
  misc_feature 1..20: note = Description of Artificial Sequence: Synthetic oligonucleotide
  misc_feature 1..20: note = Target: SCN10A; (+) strand; PAM type: NRG; PAM sequence: GAG
  source 1..20: mol_type = other DNA
tggaggacctgccagcacag

SEQ ID NO: 30472 - DNA, 20 bp, synthetic construct
  misc_feature 1..20: note = Description of Artificial Sequence: Synthetic oligonucleotide
  misc_feature 1..20: note = Target: SCN10A; (+) strand; PAM type: NRG; PAM sequence: AGG
  source 1..20: mol_type = other DNA
ggaggacctgccagcacagg

SEQ ID NO: 30473 - DNA, 20 bp, synthetic construct
  misc_feature 1..20: note = Description of Artificial Sequence: Synthetic oligonucleotide
  misc_feature 1..20: note = Target: SCN10A; (+) strand; PAM type: NRG; PAM sequence: TGG
  source 1..20: mol_type = other DNA
gacctgccagcacaggaggc

SEQ ID NO: 30474 - DNA, 20 bp, synthetic construct
  misc_feature 1..20: note = Description of Artificial Sequence: Synthetic oligonucleotide
  misc_feature 1..20: note = Target: SCN10A; (+) strand; PAM type: NRG; PAM sequence: CAG
  source 1..20: mol_type = other DNA
tgccagcacaggaggctgga

SEQ ID NO: 30475 - DNA, 20 bp, synthetic construct
  misc_feature 1..20: note = Description of Artificial Sequence: Synthetic oligonucleotide
  misc_feature 1..20: note = Target: SCN10A; (+) strand; PAM type: NRG; PAM sequence: CAG
  source 1..20: mol_type = other DNA
gttctgtgctgaacctcatc

SEQ ID NO: 30476 - DNA, 20 bp, synthetic construct
  misc_feature 1..20: note = Description of Artificial Sequence: Synthetic oligonucleotide
  misc_feature 1..20: note = Target: SCN10A; (+) strand; PAM type: NRG; PAM sequence: CAG
  source 1..20: mol_type = other DNA
tgctgaacctcatccagctt

SEQ ID NO: 30477 - DNA, 20 bp, synthetic construct
  misc_feature 1..20: note = Description of Artificial Sequence: Synthetic oligonucleotide
  misc_feature 1..20: note = Target: SCN10A; (+) strand; PAM type: NRG; PAM sequence: AGG
  source 1..20: mol_type = other DNA
gctgaacctcatccagcttc

SEQ ID NO: 30478 - DNA, 20 bp, synthetic construct
  misc_feature 1..20: note = Description of Artificial Sequence: Synthetic oligonucleotide
  misc_feature 1..20: note = Target: SCN10A; (+) strand; PAM type: NRG; PAM sequence: GAG
  source 1..20: mol_type = other DNA
tgaacctcatccagcttcag

SEQ ID NO: 30479 - DNA, 20 bp, synthetic construct
  misc_feature 1..20: note = Description of Artificial Sequence: Synthetic oligonucleotide
  misc_feature 1..20: note = Target: SCN10A; (+) strand; PAM type: NRG; PAM sequence: AGG
  source 1..20: mol_type = other DNA
gaacctcatccagcttcagg

SEQ ID NO: 30480 - DNA, 20 bp, synthetic construct
  misc_feature 1..20: note = Description of Artificial Sequence: Synthetic oligonucleotide
  misc_feature 1..20: note = Target: SCN10A; (+) strand; PAM type: NRG; PAM sequence: AAG
  source 1..20: mol_type = other DNA
ctcatccagcttcaggaggc

SEQ ID NO: 30481 - DNA, 20 bp, synthetic construct
  misc_feature 1..20: note = Description of Artificial Sequence: Synthetic oligonucleotide
  misc_feature 1..20: note = Target: SCN10A; (+) strand; PAM type: NRG; PAM sequence: CAG
  source 1..20: mol_type = other DNA
caggaggcaagcaccaaata

SEQ ID NO: 30482 - DNA, 20 bp, synthetic construct
  misc_feature 1..20: note = Description of Artificial Sequence: Synthetic oligonucleotide
  misc_feature 1..20: note = Target: SCN10A; (+) strand; PAM type: NRG; PAM sequence: TGG
  source 1..20: mol_type = other DNA
acatttcctgacacctctgc

SEQ ID NO: 30483 - DNA, 20 bp, synthetic construct
  misc_feature 1..20: note = Description of Artificial Sequence: Synthetic oligonucleotide
  misc_feature 1..20: note = Target: SCN10A; (+) strand; PAM type: NRG; PAM sequence: GGG
  source 1..20: mol_type = other DNA
catttcctgacacctctgct

SEQ ID NO: 30484 - DNA, 20 bp, synthetic construct
  misc_feature 1..20: note = Description of Artificial Sequence: Synthetic oligonucleotide
  misc_feature 1..20: note = Target: SCN10A; (+) strand; PAM type: NRG; PAM sequence: CAG
  source 1..20: mol_type = other DNA
ttcctgacacctctgctggg

SEQ ID NO: 30485 - DNA, 20 bp, synthetic construct
  misc_feature 1..20: note = Description of Artificial Sequence: Synthetic oligonucleotide
  misc_feature 1..20: note = Target: SCN10A; (+) strand; PAM type: NRG; PAM sequence: TGG
  source 1..20: mol_type = other DNA
tgctgggcagaccttgctgc

SEQ ID NO: 30486 - DNA, 20 bp, synthetic construct
  misc_feature 1..20: note = Description of Artificial Sequence: Synthetic oligonucleotide
  misc_feature 1..20: note = Target: SCN10A; (+) strand; PAM type: NRG; PAM sequence: CAG
  source 1..20: mol_type = other DNA
tgggcagaccttgctgctgg

SEQ ID NO: 30487 - DNA, 20 bp, synthetic construct
  misc_feature 1..20: note = Description of Artificial Sequence: Synthetic oligonucleotide
  misc_feature 1..20: note = Target: SCN10A; (+) strand; PAM type: NRG; PAM sequence: GAG
  source 1..20: mol_type = other DNA
cttgctgctggcagctgctt

SEQ ID NO: 30488 - DNA, 20 bp, synthetic construct
  misc_feature 1..20: note = Description of Artificial Sequence: Synthetic oligonucleotide
  misc_feature 1..20: note = Target: SCN10A; (+) strand; PAM type: NRG; PAM sequence: TGG
  source 1..20: mol_type = other DNA
gctgctggcagctgcttgag

SEQ ID NO: 30489 - DNA, 20 bp, synthetic construct
  misc_feature 1..20: note = Description of Artificial Sequence: Synthetic oligonucleotide
  misc_feature 1..20: note = Target: SCN10A; (+) strand; PAM type: NRG; PAM sequence: GGG
  source 1..20: mol_type = other DNA
ctgctggcagctgcttgagt

SEQ ID NO: 30490 - DNA, 20 bp, synthetic construct
  misc_feature 1..20: note = Description of Artificial Sequence: Synthetic oligonucleotide
  misc_feature 1..20: note = Target: SCN10A; (+) strand; PAM type: NRG; PAM sequence: GGG
  source 1..20: mol_type = other DNA
tgctggcagctgcttgagtg

SEQ ID NO: 30491 - DNA, 20 bp, synthetic construct
  misc_feature 1..20: note = Description of Artificial Sequence: Synthetic oligonucleotide
  misc_feature 1..20: note = Target: SCN10A; (+) strand; PAM type: NRG; PAM sequence: CAG
  source 1..20: mol_type = other DNA
tggcagctgcttgagtgggg

SEQ ID NO: 30492 - DNA, 20 bp, synthetic construct
  misc_feature 1..20: note = Description of Artificial Sequence: Synthetic oligonucleotide
  misc_feature 1..20: note = Target: SCN10A; (+) strand; PAM type: NRG; PAM sequence: AGG
  source 1..20: mol_type = other DNA
ggcagctgcttgagtggggc

SEQ ID NO: 30493 - DNA, 20 bp, synthetic construct
  misc_feature 1..20: note = Description of Artificial Sequence: Synthetic oligonucleotide
  misc_feature 1..20: note = Target: SCN10A; (+) strand; PAM type: NRG; PAM sequence: CAG
  source 1..20: mol_type = other DNA
agctgcttgagtggggcagg

SEQ ID NO: 30494 - DNA, 20 bp, synthetic construct
  misc_feature 1..20: note = Description of Artificial Sequence: Synthetic oligonucleotide
  misc_feature 1..20: note = Target: SCN10A; (+) strand; PAM type: NRG; PAM sequence: GAG
  source 1..20: mol_type = other DNA
ctgcttgagtggggcaggca

SEQ ID NO: 30495 - DNA, 20 bp, synthetic construct
  misc_feature 1..20: note = Description of Artificial Sequence: Synthetic oligonucleotide
  misc_feature 1..20: note = Target: SCN10A; (+) strand; PAM type: NRG; PAM sequence: CAG
  source 1..20: mol_type = other DNA
ggggcaggcagagaccaaca

SEQ ID NO: 30496 - DNA, 20 bp, synthetic construct
  misc_feature 1..20: note = Description of Artificial Sequence: Synthetic oligonucleotide
  misc_feature 1..20: note = Target: SCN10A; (+) strand; PAM type: NRG; PAM sequence: CAG
  source 1..20: mol_type = other DNA
cacatgcctcaccctgcttg

SEQ ID NO: 30497 - DNA, 20 bp, synthetic construct
  misc_feature 1..20: note = Description of Artificial Sequence: Synthetic oligonucleotide
  misc_feature 1..20: note = Target: SCN10A; (+) strand; PAM type: NRG; PAM sequence: CAG
  source 1..20: mol_type = other DNA
accctgcttgcagaaaccct

SEQ ID NO: 30498 - DNA, 20 bp, synthetic construct
  misc_feature 1..20: note = Description of Artificial Sequence: Synthetic oligonucleotide
  misc_feature 1..20: note = Target: SCN10A; (+) strand; PAM type: NRG; PAM sequence: CGG
  source 1..20: mol_type = other DNA
tgcagaaaccctcagctatg

SEQ ID NO: 30499 - DNA, 20 bp, synthetic construct
  misc_feature 1..20: note = Description of Artificial Sequence: Synthetic oligonucleotide
  misc_feature 1..20: note = Target: SCN10A; (+) strand; PAM type: NRG; PAM sequence: CAG
  source 1..20: mol_type = other DNA
agaaaccctcagctatgcgg

SEQ ID NO: 30500 - DNA, 20 bp, synthetic construct
  misc_feature 1..20: note = Description of Artificial Sequence: Synthetic oligonucleotide
  misc_feature 1..20: note = Target: SCN10A; (+) strand; PAM type: NRG; PAM sequence: CAG
  source 1..20: mol_type = other DNA
ctcagctatgcggcagtgaa

SEQ ID NO: 30501 - DNA, 20 bp, synthetic construct
  misc_feature 1..20: note = Description of Artificial Sequence: Synthetic oligonucleotide
  misc_feature 1..20: note = Target: SCN10A; (+) strand; PAM type: NRG; PAM sequence: CAG
  source 1..20: mol_type = other DNA
gcggcagtgaacagataact

SEQ ID NO: 30502 - DNA, 20 bp, synthetic construct
  misc_feature 1..20: note = Description of Artificial Sequence: Synthetic oligonucleotide
  misc_feature 1..20: note = Target: SCN10A; (+) strand; PAM type: NRG; PAM sequence: AAG
  source 1..20: mol_type = other DNA
actcagttaaccatgctgca

SEQ ID NO: 30503 - DNA, 20 bp, synthetic construct
  misc_feature 1..20: note = Description of Artificial Sequence: Synthetic oligonucleotide
  misc_feature 1..20: note = Target: SCN10A; (+) strand; PAM type: NRG; PAM sequence: AAG
  source 1..20: mol_type = other DNA
gttaaccatgctgcaaagca

SEQ ID NO: 30504 - DNA, 20 bp, synthetic construct
  misc_feature 1..20: note = Description of Artificial Sequence: Synthetic oligonucleotide
  misc_feature 1..20: note = Target: SCN10A; (+) strand; PAM type: NRG; PAM sequence: AAG
  source 1..20: mol_type = other DNA
aaccatgctgcaaagcaaag

SEQ ID NO: 30505 - DNA, 20 bp, synthetic construct
  misc_feature 1..20: note = Description of Artificial Sequence: Synthetic oligonucleotide
  misc_feature 1..20: note = Target: SCN10A; (+) strand; PAM type: NRG; PAM sequence: AGG
  source 1..20: mol_type = other DNA
accatgctgcaaagcaaaga

SEQ ID NO: 30506 - DNA, 20 bp, synthetic construct
  misc_feature 1..20: note = Description of Artificial Sequence: Synthetic oligonucleotide
  misc_feature 1..20: note = Target: SCN10A; (+) strand; PAM type: NRG; PAM sequence: TAG
  source 1..20: mol_type = other DNA
atgctgcaaagcaaagaagg

SEQ ID NO: 30507 - DNA, 20 bp, synthetic construct
  misc_feature 1..20: note = Description of Artificial Sequence: Synthetic oligonucleotide
  misc_feature 1..20: note = Target: SCN10A; (+) strand; PAM type: NRG; PAM sequence: TGG
  source 1..20: mol_type = other DNA
ctgcaaagcaaagaaggtag

SEQ ID NO: 30508 - DNA, 20 bp, synthetic construct
  misc_feature 1..20: note = Description of Artificial Sequence: Synthetic oligonucleotide
  misc_feature 1..20: note = Target: SCN10A; (+) strand; PAM type: NRG; PAM sequence: TAG
  source 1..20: mol_type = other DNA
aagcaaagaaggtagtggcc

SEQ ID NO: 30509 - DNA, 20 bp, synthetic construct
  misc_feature 1..20: note = Description of Artificial Sequence: Synthetic oligonucleotide
  misc_feature 1..20: note = Target: SCN10A; (+) strand; PAM type: NRG; PAM sequence: CAG
  source 1..20: mol_type = other DNA
aaagaaggtagtggcctaga

SEQ ID NO: 30510 - DNA, 20 bp, synthetic construct
  misc_feature 1..20: note = Description of Artificial Sequence: Synthetic oligonucleotide
  misc_feature 1..20: note = Target: SCN10A; (+) strand; PAM type: NRG; PAM sequence: TAG
  source 1..20: mol_type = other DNA
ggtagtggcctagacagtga

SEQ ID NO: 30511 - DNA, 20 bp, synthetic construct
  misc_feature 1..20: note = Description of Artificial Sequence: Synthetic oligonucleotide
  misc_feature 1..20: note = Target: SCN10A; (+) strand; PAM type: NRG; PAM sequence: TGG
  source 1..20: mol_type = other DNA
tagacagtgatagtgcaatg

SEQ ID NO: 30512 - DNA, 20 bp, synthetic construct
  misc_feature 1..20: note = Description of Artificial Sequence: Synthetic oligonucleotide
  misc_feature 1..20: note = Target: SCN10A; (+) strand; PAM type: NRG; PAM sequence: TGG
  source 1..20: mol_type = other DNA
acagtgatagtgcaatgtgg

SEQ ID NO: 30513 - DNA, 20 bp, synthetic construct
  misc_feature 1..20: note = Description of Artificial Sequence: Synthetic oligonucleotide
  misc_feature 1..20: note = Target: SCN10A; (+) strand; PAM type: NRG; PAM sequence: AAG
  source 1..20: mol_type = other DNA
gatagtgcaatgtggtggtt

SEQ ID NO: 30514 - DNA, 20 bp, synthetic construct
  misc_feature 1..20: note = Description of Artificial Sequence: Synthetic oligonucleotide
  misc_feature 1..20: note = Target: SCN10A; (+) strand; PAM type: NRG; PAM sequence: GAG
  source 1..20: mol_type = other DNA
tgcaatgtggtggttaagat

SEQ ID NO: 30515 - DNA, 20 bp, synthetic construct
  misc_feature 1..20: note = Description of Artificial Sequence: Synthetic oligonucleotide
  misc_feature 1..20: note = Target: SCN10A; (+) strand; PAM type: NRG; PAM sequence: AGG
  source 1..20: mol_type = other DNA
gcaatgtggtggttaagatg

SEQ ID NO: 30516 - DNA, 20 bp, synthetic construct
  misc_feature 1..20: note = Description of Artificial Sequence: Synthetic oligonucleotide
  misc_feature 1..20: note = Target: SCN10A; (+) strand; PAM type: NRG; PAM sequence: AAG
  source 1..20: mol_type = other DNA
atgtggtggttaagatgagg

SEQ ID NO: 30517 - DNA, 20 bp, synthetic construct
  misc_feature 1..20: note = Description of Artificial Sequence: Synthetic oligonucleotide
  misc_feature 1..20: note = Target: SCN10A; (+) strand; PAM type: NRG; PAM sequence: GAG
  source 1..20: mol_type = other DNA
gtggtggttaagatgaggaa

SEQ ID NO: 30518 - DNA, 20 bp, synthetic construct
  misc_feature 1..20: note = Description of Artificial Sequence: Synthetic oligonucleotide
  misc_feature 1..20: note = Target: SCN10A; (+) strand; PAM type: NRG; PAM sequence: GAG
  source 1..20: mol_type = other DNA
aagatgaggaagagatgact

SEQ ID NO: 30519 - DNA, 20 bp, synthetic construct
  misc_feature 1..20: note = Description of Artificial Sequence: Synthetic oligonucleotide
  misc_feature 1..20: note = Target: SCN10A; (+) strand; PAM type: NRG; PAM sequence: AGG
  source 1..20: mol_type = other DNA
agatgaggaagagatgactg

SEQ ID NO: 30520 - DNA, 20 bp, synthetic construct
  misc_feature 1..20: note = Description of Artificial Sequence: Synthetic oligonucleotide
  misc_feature 1..20: note = Target: SCN10A; (+) strand; PAM type: NRG; PAM sequence: GAG
  source 1..20: mol_type = other DNA
gaatcacatgtctgatgtgt

SEQ ID NO: 30521 - DNA, 20 bp, synthetic construct
  misc_feature 1..20: note = Description of Artificial Sequence: Synthetic oligonucleotide
  misc_feature 1..20: note = Target: SCN10A; (+) strand; PAM type: NRG; PAM sequence: AAG
  source 1..20: mol_type = other DNA
tcacatgtctgatgtgtgag

SEQ ID NO: 30522 - DNA, 20 bp, synthetic construct
  misc_feature 1..20: note = Description of Artificial Sequence: Synthetic oligonucleotide
  misc_feature 1..20: note = Target: SCN10A; (+) strand; PAM type: NRG; PAM sequence: CAG
  source 1..20: mol_type = other DNA
tctgatgtgtgagaagcaca

SEQ ID NO: 30523 - DNA, 20 bp, synthetic construct
  misc_feature 1..20: note = Description of Artificial Sequence: Synthetic oligonucleotide
  misc_feature 1..20: note = Target: SCN10A; (+) strand; PAM type: NRG; PAM sequence: CAG
  source 1..20: mol_type = other DNA
acacagtcaattctctaatg

SEQ ID NO: 30524 - DNA, 20 bp, synthetic construct
  misc_feature 1..20: note = Description of Artificial Sequence: Synthetic oligonucleotide
  misc_feature 1..20: note = Target: SCN10A; (+) strand; PAM type: NRG; PAM sequence: AGG
  source 1..20: mol_type = other DNA
cacagtcaattctctaatgc

SEQ ID NO: 30525 - DNA, 20 bp, synthetic construct
  misc_feature 1..20: note = Description of Artificial Sequence: Synthetic oligonucleotide
  misc_feature 1..20: note = Target: SCN10A; (+) strand; PAM type: NRG; PAM sequence: GGG
  source 1..20: mol_type = other DNA
acagtcaattctctaatgca

SEQ ID NO: 30526 - DNA, 20 bp, synthetic construct
  misc_feature 1..20: note = Description of Artificial Sequence: Synthetic oligonucleotide
  misc_feature 1..20: note = Target: SCN10A; (+) strand; PAM type: NRG; PAM sequence: TGG
  source 1..20: mol_type = other DNA
ttctctaatgcagggattac

SEQ ID NO: 30527 - DNA, 20 bp, synthetic construct
  misc_feature 1..20: note = Description of Artificial Sequence: Synthetic oligonucleotide
  misc_feature 1..20: note = Target: SCN10A; (+) strand; PAM type: NRG; PAM sequence: CAG
  source 1..20: mol_type = other DNA
aatgcagggattactggcca

SEQ ID NO: 30528 - DNA, 20 bp, synthetic construct
  misc_feature 1..20: note = Description of Artificial Sequence: Synthetic oligonucleotide
  misc_feature 1..20: note = Target: SCN10A; (+) strand; PAM type: NRG; PAM sequence: AGG
  source 1..20: mol_type = other DNA
atgcagggattactggccac

SEQ ID NO: 30529 - DNA, 20 bp, synthetic construct
  misc_feature 1..20: note = Description of Artificial Sequence: Synthetic oligonucleotide
  misc_feature 1..20: note = Target: SCN10A; (+) strand; PAM type: NRG; PAM sequence: GAG
  source 1..20: mol_type = other DNA
tactggccacaggttaccat

SEQ ID NO: 30530 - DNA, 20 bp, synthetic construct
  misc_feature 1..20: note = Description of Artificial Sequence: Synthetic oligonucleotide
  misc_feature 1..20: note = Target: SCN10A; (+) strand; PAM type: NRG; PAM sequence: CAG
  source 1..20: mol_type = other DNA
gagtgtgaacacatgaactc

SEQ ID NO: 30531 - DNA, 20 bp, synthetic construct
  misc_feature 1..20: note = Description of Artificial Sequence: Synthetic oligonucleotide
  misc_feature 1..20: note = Target: SCN10A; (+) strand; PAM type: NRG; PAM sequence: TGG
  source 1..20: mol_type = other DNA
tctgttcttttcaatgccac

SEQ ID NO: 30532 - DNA, 20 bp, synthetic construct
  misc_feature 1..20: note = Description of Artificial Sequence: Synthetic oligonucleotide
  misc_feature 1..20: note = Target: SCN10A; (+) strand; PAM type: NRG; PAM sequence: GGG
  source 1..20: mol_type = other DNA
ctgttcttttcaatgccact

SEQ ID NO: 30533 - DNA, 20 bp, synthetic construct
  misc_feature 1..20: note = Description of Artificial Sequence: Synthetic oligonucleotide
  misc_feature 1..20: note = Target: SCN10A; (+) strand; PAM type: NRG; PAM sequence: GGG
  source 1..20: mol_type = other DNA
tgttcttttcaatgccactg

SEQ ID NO: 30534 - DNA, 20 bp, synthetic construct
  misc_feature 1..20: note = Description of Artificial Sequence: Synthetic oligonucleotide
  misc_feature 1..20: note = Target: SCN10A; (+) strand; PAM type: NRG; PAM sequence: GAG
  source 1..20: mol_type = other DNA
ttcttttcaatgccactggg

SEQ ID NO: 30535 - DNA, 20 bp, synthetic construct
  misc_feature 1..20: note = Description of Artificial Sequence: Synthetic oligonucleotide
  misc_feature 1..20: note = Target: SCN10A; (+) strand; PAM type: NRG; PAM sequence: AGG
  source 1..20: mol_type = other DNA
tcttttcaatgccactgggg

SEQ ID NO: 30536 - DNA, 20 bp, synthetic construct
  misc_feature 1..20: note = Description of Artificial Sequence: Synthetic oligonucleotide
  misc_feature 1..20: note = Target: SCN10A; (+) strand; PAM type: NRG; PAM sequence: GAG
  source 1..20: mol_type = other DNA
ttttcaatgccactggggag

SEQ ID NO: 30537 - DNA, 20 bp, synthetic construct
  misc_feature 1..20: note = Description of Artificial Sequence: Synthetic oligonucleotide
  misc_feature 1..20: note = Target: SCN10A; (+) strand; PAM type: NRG; PAM sequence: AGG
  source 1..20: mol_type = other DNA
tttcaatgccactggggagg

SEQ ID NO: 30538 - DNA, 20 bp, synthetic construct
  misc_feature 1..20: note = Description of Artificial Sequence: Synthetic oligonucleotide
  misc_feature 1..20: note = Target: SCN10A; (+) strand; PAM type: NRG; PAM sequence: CAG
  source 1..20: mol_type = other DNA
caatgccactggggaggagg

SEQ ID NO: 30539 - DNA, 20 bp, synthetic construct
  misc_feature 1..20: note = Description of Artificial Sequence: Synthetic oligonucleotide
  misc_feature 1..20: note = Target: SCN10A; (+) strand; PAM type: NRG; PAM sequence: CAG
  source 1..20: mol_type = other DNA
tgccactggggaggaggcag

SEQ ID NO: 30540 - DNA, 20 bp, synthetic construct
  misc_feature 1..20: note = Description of Artificial Sequence: Synthetic oligonucleotide
  misc_feature 1..20: note = Target: SCN10A; (+) strand; PAM type: NRG; PAM sequence: AAG
  source 1..20: mol_type = other DNA
tggggaggaggcagcagtat

SEQ ID NO: 30541 - DNA, 20 bp, synthetic construct
  misc_feature 1..20: note = Description of Artificial Sequence: Synthetic oligonucleotide
  misc_feature 1..20: note = Target: SCN10A; (+) strand; PAM type: NRG; PAM sequence: CAG
  source 1..20: mol_type = other DNA
aggaggcagcagtataagct

SEQ ID NO: 30542 - DNA, 20 bp, synthetic construct
  misc_feature 1..20: note = Description of Artificial Sequence: Synthetic oligonucleotide
  misc_feature 1..20: note = Target: SCN10A; (+) strand; PAM type: NRG; PAM sequence: TGG
  source 1..20: mol_type = other DNA
aggcagcagtataagctcag

SEQ ID NO: 30543 - DNA, 20 bp, synthetic construct
  misc_feature 1..20: note = Description of Artificial Sequence: Synthetic oligonucleotide
  misc_feature 1..20: note = Target: SCN10A; (+) strand; PAM type: NRG; PAM sequence: AAG
  source 1..20: mol_type = other DNA
agtataagctcagtggttct

SEQ ID NO: 30544 - DNA, 20 bp, synthetic construct
  misc_feature 1..20: note = Description of Artificial Sequence: Synthetic oligonucleotide
  misc_feature 1..20: note = Target: SCN10A; (+) strand; PAM type: NRG; PAM sequence: TGG
  source 1..20: mol_type = other DNA
agctcagtggttctaagcca

SEQ ID NO: 30545 - DNA, 20 bp, synthetic construct
  misc_feature 1..20: note = Description of Artificial Sequence: Synthetic oligonucleotide
  misc_feature 1..20: note = Target: SCN10A; (+) strand; PAM type: NRG; PAM sequence: TGG
  source 1..20: mol_type = other DNA
tctaagccatggctgcacct

SEQ ID NO: 30546 - DNA, 20 bp, synthetic construct
  misc_feature 1..20: note = Description of Artificial Sequence: Synthetic oligonucleotide
  misc_feature 1..20: note = Target: SCN10A; (+) strand; PAM type: NRG; PAM sequence: TGG
  source 1..20: mol_type = other DNA
ggctgcaccttggaaatgcc

SEQ ID NO: 30547 - DNA, 20 bp, synthetic construct
  misc_feature 1..20: note = Description of Artificial Sequence: Synthetic oligonucleotide
  misc_feature 1..20: note = Target: SCN10A; (+) strand; PAM type: NRG; PAM sequence: GGG
  source 1..20: mol_type = other DNA
gctgcaccttggaaatgcct

SEQ ID NO: 30548 - DNA, 20 bp, synthetic construct
  misc_feature 1..20: note = Description of Artificial Sequence: Synthetic oligonucleotide
  misc_feature 1..20: note = Target: SCN10A; (+) strand; PAM type: NRG; PAM sequence: GAG
  source 1..20: mol_type = other DNA
tgcaccttggaaatgcctgg

SEQ ID NO: 30549 - DNA, 20 bp, synthetic construct
  misc_feature 1..20: note = Description of Artificial Sequence: Synthetic oligonucleotide
  misc_feature 1..20: note = Target: SCN10A; (+) strand; PAM type: NRG; PAM sequence: CAG
  source 1..20: mol_type = other DNA
ctgggagcatttataaaata

SEQ ID NO: 30550 - DNA, 20 bp, synthetic construct
  misc_feature 1..20: note = Description of Artificial Sequence: Synthetic oligonucleotide
  misc_feature 1..20: note = Target: SCN10A; (+) strand; PAM type: NRG; PAM sequence: AGG
  source 1..20: mol_type = other DNA
tgggagcatttataaaatac

SEQ ID NO: 30551 - DNA, 20 bp, synthetic construct
  misc_feature 1..20: note = Description of Artificial Sequence: Synthetic oligonucleotide
  misc_feature 1..20: note = Target: SCN10A; (+) strand; PAM type: NRG; PAM sequence: TGG
  source 1..20: mol_type = other DNA
atttataaaatacaggtgcc

SEQ ID NO: 30552 - DNA, 20 bp, synthetic construct
  misc_feature 1..20: note = Description of Artificial Sequence: Synthetic oligonucleotide
  misc_feature 1..20: note = Target: SCN10A; (+) strand; PAM type: NRG; PAM sequence: GGG
  source 1..20: mol_type = other DNA
tttataaaatacaggtgcct

SEQ ID NO: 30553 - DNA, 20 bp, synthetic construct
  misc_feature 1..20: note = Description of Artificial Sequence: Synthetic oligonucleotide
  misc_feature 1..20: note = Target: SCN10A; (+) strand; PAM type: NRG; PAM sequence: AAG
  source 1..20: mol_type = other DNA
caggtgcctgggcaccaccc

SEQ ID NO: 30554 - DNA, 20 bp, synthetic construct
  misc_feature 1..20: note = Description of Artificial Sequence: Synthetic oligonucleotide
  misc_feature 1..20: note = Target: SCN10A; (+) strand; PAM type: NRG; PAM sequence: AAG
  source 1..20: mol_type = other DNA
gggcaccacccaagaccaat

SEQ ID NO: 30555 - DNA, 20 bp, synthetic construct
  misc_feature 1..20: note = Description of Artificial Sequence: Synthetic oligonucleotide
  misc_feature 1..20: note = Target: SCN10A; (+) strand; PAM type: NRG; PAM sequence: CAG
  source 1..20: mol_type = other DNA
ccacccaagaccaataagat

SEQ ID NO: 30556 - DNA, 20 bp, synthetic construct
  misc_feature 1..20: note = Description of Artificial Sequence: Synthetic oligonucleotide
  misc_feature 1..20: note = Target: SCN10A; (+) strand; PAM type: NRG; PAM sequence: TGG
  source 1..20: mol_type = other DNA
accaataagatcagaatctc

SEQ ID NO: 30557 - DNA, 20 bp, synthetic construct
  misc_feature 1..20: note = Description of Artificial Sequence: Synthetic oligonucleotide
  misc_feature 1..20: note = Target: SCN10A; (+) strand; PAM type: NRG; PAM sequence: GGG
  source 1..20: mol_type = other DNA
ccaataagatcagaatctct

SEQ ID NO: 30558 - DNA, 20 bp, synthetic construct
  misc_feature 1..20: note = Description of Artificial Sequence: Synthetic oligonucleotide
  misc_feature 1..20: note = Target: SCN10A; (+) strand; PAM type: NRG; PAM sequence: GGG
  source 1..20: mol_type = other DNA
caataagatcagaatctctg

SEQ ID NO: 30559 - DNA, 20 bp, synthetic construct
  misc_feature 1..20: note = Description of Artificial Sequence: Synthetic oligonucleotide
  misc_feature 1..20: note = Target: SCN10A; (+) strand; PAM type: NRG; PAM sequence: TAG
  source 1..20: mol_type = other DNA
taagatcagaatctctgggg

SEQ ID NO: 30560 - DNA, 20 bp, synthetic construct
  misc_feature 1..20: note = Description of Artificial Sequence: Synthetic oligonucleotide
  misc_feature 1..20: note = Target: SCN10A; (+) strand; PAM type: NRG; PAM sequence: TGG
  source 1..20: mol_type = other DNA
gatcagaatctctggggtag

SEQ ID NO: 30561 - DNA, 20 bp, synthetic construct
  misc_feature 1..20: note = Description of Artificial Sequence: Synthetic oligonucleotide
  misc_feature 1..20: note = Target: SCN10A; (+) strand; PAM type: NRG; PAM sequence: TGG
  source 1..20: mol_type = other DNA
cagaatctctggggtagtgg

SEQ ID NO: 30562 - DNA, 20 bp, synthetic construct
  misc_feature 1..20: note = Description of Artificial Sequence: Synthetic oligonucleotide
  misc_feature 1..20: note = Target: SCN10A; (+) strand; PAM type: NRG; PAM sequence: CGG
  source 1..20: mol_type = other DNA
atctctggggtagtggtggt

SEQ ID NO: 30563 - DNA, 20 bp, synthetic construct
  misc_feature 1..20: note = Description of Artificial Sequence: Synthetic oligonucleotide
  misc_feature 1..20: note = Target: SCN10A; (+) strand; PAM type: NRG; PAM sequence: TAG
  source 1..20: mol_type = other DNA
gtcggtcactgcatatttca

SEQ ID NO: 30564 - DNA, 20 bp, synthetic construct
  misc_feature 1..20: note = Description of Artificial Sequence: Synthetic oligonucleotide
  misc_feature 1..20: note = Target: SCN10A; (+) strand; PAM type: NRG; PAM sequence: CAG
  source 1..20: mol_type = other DNA
ctgcatatttcatagctccc

SEQ ID NO: 30565 - DNA, 20 bp, synthetic construct
  misc_feature 1..20: note = Description of Artificial Sequence: Synthetic oligonucleotide
  misc_feature 1..20: note = Target: SCN10A; (+) strand; PAM type: NRG; PAM sequence: AGG
  source 1..20: mol_type = other DNA
tgcatatttcatagctcccc

SEQ ID NO: 30566 - DNA, 20 bp, synthetic construct
  misc_feature 1..20: note = Description of Artificial Sequence: Synthetic oligonucleotide
  misc_feature 1..20: note = Target: SCN10A; (+) strand; PAM type: NRG; PAM sequence: AAG
  source 1..20: mol_type = other DNA
tagctccccaggtgattctc

SEQ ID NO: 30567 - DNA, 20 bp, synthetic construct
  misc_feature 1..20: note = Description of Artificial Sequence: Synthetic oligonucleotide
  misc_feature 1..20: note = Target: SCN10A; (+) strand; PAM type: NRG; PAM sequence: CAG
  source 1..20: mol_type = other DNA
ccccaggtgattctcaagtg

SEQ ID NO: 30568 - DNA, 20 bp, synthetic construct
  misc_feature 1..20: note = Description of Artificial Sequence: Synthetic oligonucleotide
  misc_feature 1..20: note = Target: SCN10A; (+) strand; PAM type: NRG; PAM sequence: CAG
  source 1..20: mol_type = other DNA
aggtgattctcaagtgcagc

SEQ ID NO: 30569 - DNA, 20 bp, synthetic construct
  misc_feature 1..20: note = Description of Artificial Sequence: Synthetic oligonucleotide
  misc_feature 1..20: note = Target: SCN10A; (+) strand; PAM type: NRG; PAM sequence: AGG
  source 1..20: mol_type = other DNA
ggtgattctcaagtgcagcc

SEQ ID NO: 30570 - DNA, 20 bp, synthetic construct
  misc_feature 1..20: note = Description of Artificial Sequence: Synthetic oligonucleotide
  misc_feature 1..20: note = Target: SCN10A; (+) strand; PAM type: NRG; PAM sequence: GAG
  source 1..20: mol_type = other DNA
tctcaagtgcagccaggtgt

SEQ ID NO: 30571 - DNA, 20 bp, synthetic construct
  misc_feature 1..20: note = Description of Artificial Sequence: Synthetic oligonucleotide
  misc_feature 1..20: note = Target: SCN10A; (+) strand; PAM type: NRG; PAM sequence: AGG
  source 1..20: mol_type = other DNA
ctcaagtgcagccaggtgtg

SEQ ID NO: 30572 - DNA, 20 bp, synthetic construct
  misc_feature 1..20: note = Description of Artificial Sequence: Synthetic oligonucleotide
  misc_feature 1..20: note = Target: SCN10A; (+) strand; PAM type: NRG; PAM sequence: CAG
  source 1..20: mol_type = other DNA
gcagccaggtgtgaggacca

SEQ ID NO: 30573 - DNA, 20 bp, synthetic construct
  misc_feature 1..20: note = Description of Artificial Sequence: Synthetic oligonucleotide
  misc_feature 1..20: note = Target: SCN10A; (+) strand; PAM type: NRG; PAM sequence: CAG
  source 1..20: mol_type = other DNA
gtgtgaggaccacagaaccg

SEQ ID NO: 30574 - DNA, 20 bp, synthetic construct
  misc_feature 1..20: note = Description of Artificial Sequence: Synthetic oligonucleotide
  misc_feature 1..20: note = Target: SCN10A; (+) strand; PAM type: NRG; PAM sequence: AGG
  source 1..20: mol_type = other DNA
tgtgaggaccacagaaccgc

SEQ ID NO: 30575 - DNA, 20 bp, synthetic construct
  misc_feature 1..20: note = Description of Artificial Sequence: Synthetic oligonucleotide
  misc_feature 1..20: note = Target: SCN10A; (+) strand; PAM type: NRG; PAM sequence: TGG
  source 1..20: mol_type = other DNA
gaggaccacagaaccgcagg

SEQ ID NO: 30576 - DNA, 20 bp, synthetic construct
  misc_feature 1..20: note = Description of Artificial Sequence: Synthetic oligonucleotide
  misc_feature 1..20: note = Target: SCN10A; (+) strand; PAM type: NRG; PAM sequence: GGG
  source 1..20: mol_type = other DNA
aggaccacagaaccgcaggt

SEQ ID NO: 30577 - DNA, 20 bp, synthetic construct
  misc_feature 1..20: note = Description of Artificial Sequence: Synthetic oligonucleotide
  misc_feature 1..20: note = Target: SCN10A; (+) strand; PAM type: NRG; PAM sequence: AAG
  source 1..20: mol_type = other DNA
accacagaaccgcaggtggg

SEQ ID NO: 30578 - DNA, 20 bp, synthetic construct
  misc_feature 1..20: note = Description of Artificial Sequence: Synthetic oligonucleotide
  misc_feature 1..20: note = Target: SCN10A; (+) strand; PAM type: NRG; PAM sequence: CAG
  source 1..20: mol_type = other DNA
gggaagattctctgtgctca

SEQ ID NO: 30579 - DNA, 20 bp, synthetic construct
  misc_feature 1..20: note = Description of Artificial Sequence: Synthetic oligonucleotide
  misc_feature 1..20: note = Target: SCN10A; (+) strand; PAM type: NRG; PAM sequence: TGG
  source 1..20: mol_type = other DNA
ttctctgtgctcacagttca

SEQ ID NO: 30580 - DNA, 20 bp, synthetic construct
  misc_feature 1..20: note = Description of Artificial Sequence: Synthetic oligonucleotide
  misc_feature 1..20: note = Target: SCN10A; (+) strand; PAM type: NRG; PAM sequence: AAG
  source 1..20: mol_type = other DNA
ctcacagttcatggctcccc

SEQ ID NO: 30581 - DNA, 20 bp, synthetic construct
  misc_feature 1..20: note = Description of Artificial Sequence: Synthetic oligonucleotide
  misc_feature 1..20: note = Target: SCN10A; (+) strand; PAM type: NRG; PAM sequence: AGG
  source 1..20: mol_type = other DNA
tcacagttcatggctcccca

SEQ ID NO: 30582 - DNA, 20 bp, synthetic construct
  misc_feature 1..20: note = Description of Artificial Sequence: Synthetic oligonucleotide
  misc_feature 1..20: note = Target: SCN10A; (+) strand; PAM type: NRG; PAM sequence: CAG
  source 1..20: mol_type = other DNA
gttcatggctccccaaggtc

SEQ ID NO: 30583 - DNA, 20 bp, synthetic construct
  misc_feature 1..20: note = Description of Artificial Sequence: Synthetic oligonucleotide
  misc_feature 1..20: note = Target: SCN10A; (+) strand; PAM type: NRG; PAM sequence: AAG
  source 1..20: mol_type = other DNA
catggctccccaaggtccag

SEQ ID NO: 30584 - DNA, 20 bp, synthetic construct
  misc_feature 1..20: note = Description of Artificial Sequence: Synthetic oligonucleotide
  misc_feature 1..20: note = Target: SCN10A; (+) strand; PAM type: NRG; PAM sequence: TGG
  source 1..20: mol_type = other DNA
aggtccagaagacccatcta

SEQ ID NO: 30585 - DNA, 20 bp, synthetic construct
  misc_feature 1..20: note = Description of Artificial Sequence: Synthetic oligonucleotide
  misc_feature 1..20: note = Target: SCN10A; (+) strand; PAM type: NRG; PAM sequence: CAG
  source 1..20: mol_type = other DNA
agaagacccatctatggatg

SEQ ID NO: 30586 - DNA, 20 bp, synthetic construct
  misc_feature 1..20: note = Description of Artificial Sequence: Synthetic oligonucleotide
  misc_feature 1..20: note = Target: SCN10A; (+) strand; PAM type: NRG; PAM sequence: AGG
  source 1..20: mol_type = other DNA
gaagacccatctatggatgc

SEQ ID NO: 30587 - DNA, 20 bp, synthetic construct
  misc_feature 1..20: note = Description of Artificial Sequence: Synthetic oligonucleotide
  misc_feature 1..20: note = Target: SCN10A; (+) strand; PAM type: NRG; PAM sequence: GGG
  source 1..20: mol_type = other DNA
aagacccatctatggatgca

SEQ ID NO: 30588 - DNA, 20 bp, synthetic construct
  misc_feature 1..20: note = Description of Artificial Sequence: Synthetic oligonucleotide
  misc_feature 1..20: note = Target: SCN10A; (+) strand; PAM type: NRG; PAM sequence: AAG
  source 1..20: mol_type = other DNA
atctatggatgcagggccat

SEQ ID NO: 30589 - DNA, 20 bp, synthetic construct
  misc_feature 1..20: note = Description of Artificial Sequence: Synthetic oligonucleotide
  misc_feature 1..20: note = Target: SCN10A; (+) strand; PAM type: NRG; PAM sequence: GAG
  source 1..20: mol_type = other DNA
tgcagggccataagacctct

SEQ ID NO: 30590 - DNA, 20 bp, synthetic construct
  misc_feature 1..20: note = Description of Artificial Sequence: Synthetic oligonucleotide
  misc_feature 1..20: note = Target: SCN10A; (+) strand; PAM type: NRG; PAM sequence: GAG
  source 1..20: mol_type = other DNA
cagggccataagacctctga

SEQ ID NO: 30591 - DNA, 20 bp, synthetic construct
  misc_feature 1..20: note = Description of Artificial Sequence: Synthetic oligonucleotide
  misc_feature 1..20: note = Target: SCN10A; (+) strand; PAM type: NRG; PAM sequence: TGG
  source 1..20: mol_type = other DNA
ctgcatgtgtcatctcactt

SEQ ID NO: 30592 - DNA, 20 bp, synthetic construct
  misc_feature 1..20: note = Description of Artificial Sequence: Synthetic oligonucleotide
  misc_feature 1..20: note = Target: SCN10A; (+) strand; PAM type: NRG; PAM sequence: CAG
  source 1..20: mol_type = other DNA
tcactttggatgtaaaaatg

SEQ ID NO: 30593 - DNA, 20 bp, synthetic construct
  misc_feature 1..20: note = Description of Artificial Sequence: Synthetic oligonucleotide
  misc_feature 1..20: note = Target: SCN10A; (+) strand; PAM type: NRG; PAM sequence: GAG
  source 1..20: mol_type = other DNA
actttggatgtaaaaatgca

SEQ ID NO: 30594 - DNA, 20 bp, synthetic construct
  misc_feature 1..20: note = Description of Artificial Sequence: Synthetic oligonucleotide
  misc_feature 1..20: note = Target: SCN10A; (+) strand; PAM type: NRG; PAM sequence: AGG
  source 1..20: mol_type = other DNA
ctttggatgtaaaaatgcag

SEQ ID NO: 30595 - DNA, 20 bp, synthetic construct
  misc_feature 1..20: note = Description of Artificial Sequence: Synthetic oligonucleotide
  misc_feature 1..20: note = Target: SCN10A; (+) strand; PAM type: NRG; PAM sequence: CAG
  source 1..20: mol_type = other DNA
tgtaaaaatgcagaggattg

SEQ ID NO: 30596 - DNA, 20 bp, synthetic construct
  misc_feature 1..20: note = Description of Artificial Sequence: Synthetic oligonucleotide
  misc_feature 1..20: note = Target: SCN10A; (+) strand; PAM type: NRG; PAM sequence: AGG
  source 1..20: mol_type = other DNA
gtaaaaatgcagaggattgc

SEQ ID NO: 30597 - DNA, 20 bp, synthetic construct
  misc_feature 1..20: note = Description of Artificial Sequence: Synthetic oligonucleotide
  misc_feature 1..20: note = Target: SCN10A; (+) strand; PAM type: NRG; PAM sequence: GGG
  source 1..20: mol_type = other DNA
taaaaatgcagaggattgca

SEQ ID NO: 30598 - DNA, 20 bp, synthetic construct
  misc_feature 1..20: note = Description of Artificial Sequence: Synthetic oligonucleotide
  misc_feature 1..20: note = Target: SCN10A; (+) strand; PAM type: NRG; PAM sequence: TGG
  source 1..20: mol_type = other DNA
attgcagggatctttctgaa

SEQ ID NO: 30599 - DNA, 20 bp, synthetic construct
  misc_feature 1..20: note = Description of Artificial Sequence: Synthetic oligonucleotide
  misc_feature 1..20: note = Target: SCN10A; (+) strand; PAM type: NRG; PAM sequence: GAG
  source 1..20: mol_type = other DNA
tgcagggatctttctgaatg

SEQ ID NO: 30600 - DNA, 20 bp, synthetic construct
  misc_feature 1..20: note = Description of Artificial Sequence: Synthetic oligonucleotide
  misc_feature 1..20: note = Target: SCN10A; (+) strand; PAM type: NRG; PAM sequence: CAG
  source 1..20: mol_type = other DNA
agacctaataactcacctaa

SEQ ID NO: 30601 - DNA, 20 bp, synthetic construct
  misc_feature 1..20: note = Description of Artificial Sequence: Synthetic oligonucleotide
  misc_feature 1..20: note = Target: SCN10A; (+) strand; PAM type: NRG; PAM sequence: CAG
  source 1..20: mol_type = other DNA
taacagtcactattgtgtca

SEQ ID NO: 30602 - DNA, 20 bp, synthetic construct
  misc_feature 1..20: note = Description of Artificial Sequence: Synthetic oligonucleotide
  misc_feature 1..20: note = Target: SCN10A; (+) strand; PAM type: NRG; PAM sequence: TGG
  source 1..20: mol_type = other DNA
tgtcacagtcacatactgcc

SEQ ID NO: 30603 - DNA, 20 bp, synthetic construct
  misc_feature 1..20: note = Description of Artificial Sequence: Synthetic oligonucleotide
  misc_feature 1..20: note = Target: SCN10A; (+) strand; PAM type: NRG; PAM sequence: TGG
  source 1..20: mol_type = other DNA
tgcctggactttaccactca

SEQ ID NO: 30604 - DNA, 20 bp, synthetic construct
  misc_feature 1..20: note = Description of Artificial Sequence: Synthetic oligonucleotide
  misc_feature 1..20: note = Target: SCN10A; (+) strand; PAM type: NRG; PAM sequence: GGG
  source 1..20: mol_type = other DNA
gcctggactttaccactcat

SEQ ID NO: 30605 - DNA, 20 bp, synthetic construct
  misc_feature 1..20: note = Description of Artificial Sequence: Synthetic oligonucleotide
  misc_feature 1..20: note = Target: SCN10A; (+) strand; PAM type: NRG; PAM sequence: CAG
  source 1..20: mol_type = other DNA
actttaccactcatgggtgt

SEQ ID NO: 30606 - DNA, 20 bp, synthetic construct
  misc_feature 1..20: note = Description of Artificial Sequence: Synthetic oligonucleotide
  misc_feature 1..20: note = Target: SCN10A; (+) strand; PAM type: NRG; PAM sequence: AGG
  source 1..20: mol_type = other DNA
ctttaccactcatgggtgtc

SEQ ID NO: 30607 - DNA, 20 bp, synthetic construct
  misc_feature 1..20: note = Description of Artificial Sequence: Synthetic oligonucleotide
  misc_feature 1..20: note = Target: SCN10A; (+) strand; PAM type: NRG; PAM sequence: GGG
  source 1..20: mol_type = other DNA
tttaccactcatgggtgtca

SEQ ID NO: 30608 - DNA, 20 bp, synthetic construct
  misc_feature 1..20: note = Description of Artificial Sequence: Synthetic oligonucleotide
  misc_feature 1..20: note = Target: SCN10A; (+) strand; PAM type: NRG; PAM sequence: CAG
  source 1..20: mol_type = other DNA
atgggtgtcagggctattct

SEQ ID NO: 30609 - DNA, 20 bp, synthetic construct
  misc_feature 1..20: note = Description of Artificial Sequence: Synthetic oligonucleotide
  misc_feature 1..20: note = Target: SCN10A; (+) strand; PAM type: NRG; PAM sequence: TGG
  source 1..20: mol_type = other DNA
aaatgctcaaaacttttctt

SEQ ID NO: 30610 - DNA, 20 bp, synthetic construct
  misc_feature 1..20: note = Description of Artificial Sequence: Synthetic oligonucleotide
  misc_feature 1..20: note = Target: SCN10A; (+) strand; PAM type: NRG; PAM sequence: GAG
  source 1..20: mol_type = other DNA
atgctcaaaacttttctttg

SEQ ID NO: 30611 - DNA, 20 bp, synthetic construct
  misc_feature 1..20: note = Description of Artificial Sequence: Synthetic oligonucleotide
  misc_feature 1..20: note = Target: SCN10A; (+) strand; PAM type: NRG; PAM sequence: TAG
  source 1..20: mol_type = other DNA
ctcaaaacttttctttggag

SEQ ID NO: 30612 - DNA, 20 bp, synthetic construct
  misc_feature 1..20: note = Description of Artificial Sequence: Synthetic oligonucleotide
  misc_feature 1..20: note = Target: SCN10A; (+) strand; PAM type: NRG; PAM sequence: GAG
  source 1..20: mol_type = other DNA
ttttctttggagtagccctt

SEQ ID NO: 30613 - DNA, 20 bp, synthetic construct
  misc_feature 1..20: note = Description of Artificial Sequence: Synthetic oligonucleotide
  misc_feature 1..20: note = Target: SCN10A; (+) strand; PAM type: NRG; PAM sequence: AGG
  source 1..20: mol_type = other DNA
tttctttggagtagcccttg

SEQ ID NO: 30614 - DNA, 20 bp, synthetic construct
  misc_feature 1..20: note = Description of Artificial Sequence: Synthetic oligonucleotide
  misc_feature 1..20: note = Target: SCN10A; (+) strand; PAM type: NRG; PAM sequence: GGG
  source 1..20: mol_type = other DNA
ttctttggagtagcccttga

SEQ ID NO: 30615 - DNA, 20 bp, synthetic construct
  misc_feature 1..20: note = Description of Artificial Sequence: Synthetic oligonucleotide
  misc_feature 1..20: note = Target: SCN10A; (+) strand; PAM type: NRG; PAM sequence: CAG
  source 1..20: mol_type = other DNA
ttggagtagcccttgagggc

SEQ ID NO: 30616 - DNA, 20 bp, synthetic construct
  misc_feature 1..20: note = Description of Artificial Sequence: Synthetic oligonucleotide
  misc_feature 1..20: note = Target: SCN10A; (+) strand; PAM type: NRG; PAM sequence: AGG
  source 1..20: mol_type = other DNA
tggagtagcccttgagggcc

SEQ ID NO: 30617 - DNA, 20 bp, synthetic construct
  misc_feature 1..20: note = Description of Artificial Sequence: Synthetic oligonucleotide
  misc_feature 1..20: note = Target: SCN10A; (+) strand; PAM type: NRG; PAM sequence: GAG
  source 1..20: mol_type = other DNA
cccttgagggccaggtctct

SEQ ID NO: 30618 - DNA, 20 bp, synthetic construct
  misc_feature 1..20: note = Description of Artificial Sequence: Synthetic oligonucleotide
  misc_feature 1..20: note = Target: SCN10A; (+) strand; PAM type: NRG; PAM sequence: TAG
  source 1..20: mol_type = other DNA
tctctgagcttcctttgccc

SEQ ID NO: 30619 - DNA, 20 bp, synthetic construct
  misc_feature 1..20: note = Description of Artificial Sequence: Synthetic oligonucleotide
  misc_feature 1..20: note = Target: SCN10A; (+) strand; PAM type: NRG; PAM sequence: TAG
  source 1..20: mol_type = other DNA
agcttcctttgccctagctg

SEQ ID NO: 30620 - DNA, 20 bp, synthetic construct
  misc_feature 1..20: note = Description of Artificial Sequence: Synthetic oligonucleotide
  misc_feature 1..20: note = Target: SCN10A; (+) strand; PAM type: NRG; PAM sequence: CAG
  source 1..20: mol_type = other DNA
tcctttgccctagctgtagc

SEQ ID NO: 30621 - DNA, 20 bp, synthetic construct
  misc_feature 1..20: note = Description of Artificial Sequence: Synthetic oligonucleotide
  misc_feature 1..20: note = Target: SCN10A; (+) strand; PAM type: NRG; PAM sequence: AGG
  source 1..20: mol_type = other DNA
cctttgccctagctgtagcc

SEQ ID NO: 30622 - DNA, 20 bp, synthetic construct
  misc_feature 1..20: note = Description of Artificial Sequence: Synthetic oligonucleotide
  misc_feature 1..20: note = Target: SCN10A; (+) strand; PAM type: NRG; PAM sequence: GAG
  source 1..20: mol_type = other DNA
tttgccctagctgtagccag

SEQ ID NO: 30623 - DNA, 20 bp, synthetic construct
  misc_feature 1..20: note = Description of Artificial Sequence: Synthetic oligonucleotide
  misc_feature 1..20: note = Target: SCN10A; (+) strand; PAM type: NRG; PAM sequence: CAG
  source 1..20: mol_type = other DNA
ccctagctgtagccaggagt

SEQ ID NO: 30624 - DNA, 20 bp, synthetic construct
  misc_feature 1..20: note = Description of Artificial Sequence: Synthetic oligonucleotide
  misc_feature 1..20: note = Target: SCN10A; (+) strand; PAM type: NRG; PAM sequence: GAG
  source 1..20: mol_type = other DNA
ctagctgtagccaggagtca

SEQ ID NO: 30625 - DNA, 20 bp, synthetic construct
  misc_feature 1..20: note = Description of Artificial Sequence: Synthetic oligonucleotide
  misc_feature 1..20: note = Target: SCN10A; (+) strand; PAM type: NRG; PAM sequence: AGG
  source 1..20: mol_type = other DNA
tagctgtagccaggagtcag

SEQ ID NO: 30626 - DNA, 20 bp, synthetic construct
  misc_feature 1..20: note = Description of Artificial Sequence: Synthetic oligonucleotide
  misc_feature 1..20: note = Target: SCN10A; (+) strand; PAM type: NRG; PAM sequence: GGG
  source 1..20: mol_type = other DNA
agctgtagccaggagtcaga

SEQ ID NO: 30627 - DNA, 20 bp, synthetic construct
  misc_feature 1..20: note = Description of Artificial Sequence: Synthetic oligonucleotide
  misc_feature 1..20: note = Target: SCN10A; (+) strand; PAM type: NRG; PAM sequence: GGG
  source 1..20: mol_type = other DNA
gctgtagccaggagtcagag

SEQ ID NO: 30628 - DNA, 20 bp, synthetic construct
  misc_feature 1..20: note = Description of Artificial Sequence: Synthetic oligonucleotide
  misc_feature 1..20: note = Target: SCN10A; (+) strand; PAM type: NRG; PAM sequence: GAG
  source 1..20: mol_type = other DNA
tgtagccaggagtcagaggg

SEQ ID NO: 30629 - DNA, 20 bp, synthetic construct
  misc_feature 1..20: note = Description of Artificial Sequence: Synthetic oligonucleotide
  misc_feature 1..20: note = Target: SCN10A; (+) strand; PAM type: NRG; PAM sequence: AGG
  source 1..20: mol_type = other DNA
gtagccaggagtcagagggg

SEQ ID NO: 30630 - DNA, 20 bp, synthetic construct
  misc_feature 1..20: note = Description of Artificial Sequence: Synthetic oligonucleotide
  misc_feature 1..20: note = Target: SCN10A; (+) strand; PAM type: NRG; PAM sequence: GAG
  source 1..20: mol_type = other DNA
aaaccccacgtgttcccact

SEQ ID NO: 30631 - DNA, 20 bp, synthetic construct
  misc_feature 1..20: note = Description of Artificial Sequence: Synthetic oligonucleotide
  misc_feature 1..20: note = Target: SCN10A; (+) strand; PAM type: NRG; PAM sequence: GAG
  source 1..20: mol_type = other DNA
gagccactcacattcacaat

SEQ ID NO: 30632 - DNA, 20 bp, synthetic construct
  misc_feature 1..20: note = Description of Artificial Sequence: Synthetic oligonucleotide
  misc_feature 1..20: note = Target: SCN10A; (+) strand; PAM type: NRG; PAM sequence: AGG
  source 1..20: mol_type = other DNA
agccactcacattcacaatg

SEQ ID NO: 30633 - DNA, 20 bp, synthetic construct
  misc_feature 1..20: note = Description of Artificial Sequence: Synthetic oligonucleotide
  misc_feature 1..20: note = Target: SCN10A; (+) strand; PAM type: NRG; PAM sequence: AAG
  source 1..20: mol_type = other DNA
cactcacattcacaatgagg

SEQ ID NO: 30634 - DNA, 20 bp, synthetic construct
  misc_feature 1..20: note = Description of Artificial Sequence: Synthetic oligonucleotide
  misc_feature 1..20: note = Target: SCN10A; (+) strand; PAM type: NRG; PAM sequence: CAG
  source 1..20: mol_type = other DNA
acattcacaatgaggaagtc

SEQ ID NO: 30635 - DNA, 20 bp, synthetic construct
  misc_feature 1..20: note = Description of Artificial Sequence: Synthetic oligonucleotide
  misc_feature 1..20: note = Target: SCN10A; (+) strand; PAM type: NRG; PAM sequence: CAG
  source 1..20: mol_type = other DNA
tcacaatgaggaagtccagc

SEQ ID NO: 30636 - DNA, 20 bp, synthetic construct
  misc_feature 1..20: note = Description of Artificial Sequence: Synthetic oligonucleotide
  misc_feature 1..20: note = Target: SCN10A; (+) strand; PAM type: NRG; PAM sequence: CAG
  source 1..20: mol_type = other DNA
tgaggaagtccagccagcac

SEQ ID NO: 30637 - DNA, 20 bp, synthetic construct
  misc_feature 1..20: note = Description of Artificial Sequence: Synthetic oligonucleotide
  misc_feature 1..20: note = Target: SCN10A; (+) strand; PAM type: NRG; PAM sequence: AGG
  source 1..20: mol_type = other DNA
gaggaagtccagccagcacc

SEQ ID NO: 30638 - DNA, 20 bp, synthetic construct
  misc_feature 1..20: note = Description of Artificial Sequence: Synthetic oligonucleotide
  misc_feature 1..20: note = Target: SCN10A; (+) strand; PAM type: NRG; PAM sequence: TGG
  source 1..20: mol_type = other DNA
gtccagccagcaccaggcat

SEQ ID NO: 30639 - DNA, 20 bp, synthetic construct
  misc_feature 1..20: note = Description of Artificial Sequence: Synthetic oligonucleotide
  misc_feature 1..20: note = Target: SCN10A; (+) strand; PAM type: NRG; PAM sequence: AAG
  source 1..20: mol_type = other DNA
gccagcaccaggcattggtg

SEQ ID NO: 30640 - DNA, 20 bp, synthetic construct
  misc_feature 1..20: note = Description of Artificial Sequence: Synthetic oligonucleotide
  misc_feature 1..20: note = Target: SCN10A; (+) strand; PAM type: NRG; PAM sequence: AAG
  source 1..20: mol_type = other DNA
cattggtgaagtactttttg

SEQ ID NO: 30641 - DNA, 20 bp, synthetic construct
  misc_feature 1..20: note = Description of Artificial Sequence: Synthetic oligonucleotide
  misc_feature 1..20: note = Target: SCN10A; (+) strand; PAM type: NRG; PAM sequence: TAG
  source 1..20: mol_type = other DNA
tgaagtactttttgaagcca

SEQ ID NO: 30642 - DNA, 20 bp, synthetic construct
  misc_feature 1..20: note = Description of Artificial Sequence: Synthetic oligonucleotide
  misc_feature 1..20: note = Target: SCN10A; (+) strand; PAM type: NRG; PAM sequence: AGG
  source 1..20: mol_type = other DNA
gaagtactttttgaagccat

SEQ ID NO: 30643 - DNA, 20 bp, synthetic construct
  misc_feature 1..20: note = Description of Artificial Sequence: Synthetic oligonucleotide
  misc_feature 1..20: note = Target: SCN10A; (+) strand; PAM type: NRG; PAM sequence: AAG
  source 1..20: mol_type = other DNA
aagccataggccacccactt

SEQ ID NO: 30644 - DNA, 20 bp, synthetic construct
  misc_feature 1..20: note = Description of Artificial Sequence: Synthetic oligonucleotide
  misc_feature 1..20: note = Target: SCN10A; (+) strand; PAM type: NRG; PAM sequence: CAG
  source 1..20: mol_type = other DNA
ccataggccacccacttaag

SEQ ID NO: 30645 - DNA, 20 bp, synthetic construct
  misc_feature 1..20: note = Description of Artificial Sequence: Synthetic oligonucleotide
  misc_feature 1..20: note = Target: SCN10A; (+) strand; PAM type: NRG; PAM sequence: AAG
  source 1..20: mol_type = other DNA
taagcagcatctcgaacaca

SEQ ID NO: 30646 - DNA, 20 bp, synthetic construct
  misc_feature 1..20: note = Description of Artificial Sequence: Synthetic oligonucleotide
  misc_feature 1..20: note = Target: SCN10A; (+) strand; PAM type: NRG; PAM sequence: AAG
  source 1..20: mol_type = other DNA
gcatctcgaacacaaagata

SEQ ID NO: 30647 - DNA, 20 bp, synthetic construct
  misc_feature 1..20: note = Description of Artificial Sequence: Synthetic oligonucleotide
  misc_feature 1..20: note = Target: SCN10A; (+) strand; PAM type: NRG; PAM sequence: AGG
  source 1..20: mol_type = other DNA
catctcgaacacaaagataa

SEQ ID NO: 30648 - DNA, 20 bp, synthetic construct
  misc_feature 1..20: note = Description of Artificial Sequence: Synthetic oligonucleotide
  misc_feature 1..20: note = Target: SCN10A; (+) strand; PAM type: NRG; PAM sequence: AAG
  source 1..20: mol_type = other DNA
cgaacacaaagataaaggtg

SEQ ID NO: 30649 - DNA, 20 bp, synthetic construct
  misc_feature 1..20: note = Description of Artificial Sequence: Synthetic oligonucleotide
  misc_feature 1..20: note = Target: SCN10A; (+) strand; PAM type: NRG; PAM sequence: CAG
  source 1..20: mol_type = other DNA
gataaaggtgaagaccctgt

SEQ ID NO: 30650 - DNA, 20 bp, synthetic construct
  misc_feature 1..20: note = Description of Artificial Sequence: Synthetic oligonucleotide
  misc_feature 1..20: note = Target: SCN10A; (+) strand; PAM type: NRG; PAM sequence: CAG
  source 1..20: mol_type = other DNA
aagaccctgtcagtgtactc

SEQ ID NO: 30651 - DNA, 20 bp, synthetic construct
  misc_feature 1..20: note = Description of Artificial Sequence: Synthetic oligonucleotide
  misc_feature 1..20: note = Target: SCN10A; (+) strand; PAM type: NRG; PAM sequence: AAG
  source 1..20: mol_type = other DNA
cctgtcagtgtactccagca

SEQ ID NO: 30652 - DNA, 20 bp, synthetic construct
  misc_feature 1..20: note = Description of Artificial Sequence: Synthetic oligonucleotide
  misc_feature 1..20: note = Target: SCN10A; (+) strand; PAM type: NRG; PAM sequence: TGG
  source 1..20: mol_type = other DNA
ctccagcaaagctttcaccg

SEQ ID NO: 30653 - DNA, 20 bp, synthetic construct
  misc_feature 1..20: note = Description of Artificial Sequence: Synthetic oligonucleotide
  misc_feature 1..20: note = Target: SCN10A; (+) strand; PAM type: NRG; PAM sequence: GGG
  source 1..20: mol_type = other DNA
tccagcaaagctttcaccgt

SEQ ID NO: 30654 - DNA, 20 bp, synthetic construct
  misc_feature 1..20: note = Description of Artificial Sequence: Synthetic oligonucleotide
  misc_feature 1..20: note = Target: SCN10A; (+) strand; PAM type: NRG; PAM sequence: TGG
  source 1..20: mol_type = other DNA
aagctttcaccgtgggcttc

SEQ ID NO: 30655 - DNA, 20 bp, synthetic construct
  misc_feature 1..20: note = Description of Artificial Sequence: Synthetic oligonucleotide
  misc_feature 1..20: note = Target: SCN10A; (+) strand; PAM type: NRG; PAM sequence: CAG
  source 1..20: mol_type = other DNA
ttcaccgtgggcttctggtc

SEQ ID NO: 30656 - DNA, 20 bp, synthetic construct
  misc_feature 1..20: note = Description of Artificial Sequence: Synthetic oligonucleotide
  misc_feature 1..20: note = Target: SCN10A; (+) strand; PAM type: NRG; PAM sequence: AGG
  source 1..20: mol_type = other DNA
tcaccgtgggcttctggtcc

SEQ ID NO: 30657 - DNA, 20 bp, synthetic construct
  misc_feature 1..20: note = Description of Artificial Sequence: Synthetic oligonucleotide
  misc_feature 1..20: note = Target: SCN10A; (+) strand; PAM type: NRG; PAM sequence: TAG
  source 1..20: mol_type = other DNA
tgggcttctggtccaggtaa

SEQ ID NO: 30658 - DNA, 20 bp, synthetic construct
  misc_feature 1..20: note = Description of Artificial Sequence: Synthetic oligonucleotide
  misc_feature 1..20: note = Target: SCN10A; (+) strand; PAM type: NRG; PAM sequence: AAG
  source 1..20: mol_type = other DNA
ggtccaggtaatagtcttca

SEQ ID NO: 30659 - DNA, 20 bp, synthetic construct
  misc_feature 1..20: note = Description of Artificial Sequence: Synthetic oligonucleotide
  misc_feature 1..20: note = Target: SCN10A; (+) strand; PAM type: NRG; PAM sequence: AGG
  source 1..20: mol_type = other DNA
gtccaggtaatagtcttcaa

SEQ ID NO: 30660 - DNA, 20 bp, synthetic construct
  misc_feature 1..20: note = Description of Artificial Sequence: Synthetic oligonucleotide
  misc_feature 1..20: note = Target: SCN10A; (+) strand; PAM type: NRG; PAM sequence: TGG
  source 1..20: mol_type = other DNA
ggtaatagtcttcaaaggcc

SEQ ID NO: 30661 - DNA, 20 bp, synthetic construct
  misc_feature 1..20: note = Description of Artificial Sequence: Synthetic oligonucleotide
  misc_feature 1..20: note = Target: SCN10A; (+) strand; PAM type: NRG; PAM sequence: AAG
  source 1..20: mol_type = other DNA
aatagtcttcaaaggcctgg

SEQ ID NO: 30662 - DNA, 20 bp, synthetic construct
  misc_feature 1..20: note = Description of Artificial Sequence: Synthetic oligonucleotide
  misc_feature 1..20: note = Target: SCN10A; (+) strand; PAM type: NRG; PAM sequence: AGG
  source 1..20: mol_type = other DNA
atagtcttcaaaggcctgga

SEQ ID NO: 30663 - DNA, 20 bp, synthetic construct
  misc_feature 1..20: note = Description of Artificial Sequence: Synthetic oligonucleotide
  misc_feature 1..20: note = Target: SCN10A; (+) strand; PAM type: NRG; PAM sequence: AAG
  source 1..20: mol_type = other DNA
gtcttcaaaggcctggaagg

SEQ ID NO: 30664 - DNA, 20 bp, synthetic construct
  misc_feature 1..20: note = Description of Artificial Sequence: Synthetic oligonucleotide
  misc_feature 1..20: note = Target: SCN10A; (+) strand; PAM type: NRG; PAM sequence: AAG
  source 1..20: mol_type = other DNA
tcaaaggcctggaaggaaga

SEQ ID NO: 30665 - DNA, 20 bp, synthetic construct
  misc_feature 1..20: note = Description of Artificial Sequence: Synthetic oligonucleotide
  misc_feature 1..20: note = Target: SCN10A; (+) strand; PAM type: NRG; PAM sequence: AGG
  source 1..20: mol_type = other DNA
caaaggcctggaaggaagaa

SEQ ID NO: 30666 - DNA, 20 bp, synthetic construct
  misc_feature 1..20: note = Description of Artificial Sequence: Synthetic oligonucleotide
  misc_feature 1..20: note = Target: SCN10A; (+) strand; PAM type: NRG; PAM sequence: CAG
  source 1..20: mol_type = other DNA
cctggaaggaagaaaggatg

SEQ ID NO: 30667 - DNA, 20 bp, synthetic construct
  misc_feature 1..20: note = Description of Artificial Sequence: Synthetic oligonucleotide
  misc_feature 1..20: note = Target: SCN10A; (+) strand; PAM type: NRG; PAM sequence: TGG
  source 1..20: mol_type = other DNA
aaggaagaaaggatgcagaa

SEQ ID NO: 30668 - DNA, 20 bp, synthetic construct
  misc_feature 1..20: note = Description of Artificial Sequence: Synthetic oligonucleotide
  misc_feature 1..20: note = Target: SCN10A; (+) strand; PAM type: NRG; PAM sequence: CAG
  source 1..20: mol_type = other DNA
gaagaaaggatgcagaatgg

SEQ ID NO: 30669 - DNA, 20 bp, synthetic construct
  misc_feature 1..20: note = Description of Artificial Sequence: Synthetic oligonucleotide
  misc_feature 1..20: note = Target: SCN10A; (+) strand; PAM type: NRG; PAM sequence: AGG
  source 1..20: mol_type = other DNA
aagaaaggatgcagaatggc

SEQ ID NO: 30670 - DNA, 20 bp, synthetic construct
  misc_feature 1..20: note = Description of Artificial Sequence: Synthetic oligonucleotide
  misc_feature 1..20: note = Target: SCN10A; (+) strand; PAM type: NRG; PAM sequence: TGG
  source 1..20: mol_type = other DNA
atgcagaatggcaggctgcc

SEQ ID NO: 30671 - DNA, 20 bp, synthetic construct
  misc_feature 1..20: note = Description of Artificial Sequence: Synthetic oligonucleotide
  misc_feature 1..20: note = Target: SCN10A; (+) strand; PAM type: NRG; PAM sequence: CAG
  source 1..20: mol_type = other DNA
tggcaggctgcctggaccca

SEQ ID NO: 30672 - DNA, 20 bp, synthetic construct
  misc_feature 1..20: note = Description of Artificial Sequence: Synthetic oligonucleotide
  misc_feature 1..20: note = Target: SCN10A; (+) strand; PAM type: NRG; PAM sequence: TGG
  source 1..20: mol_type = other DNA
gctgcctggacccacagcac

SEQ ID NO: 30673 - DNA, 20 bp, synthetic construct
  misc_feature 1..20: note = Description of Artificial Sequence: Synthetic oligonucleotide
  misc_feature 1..20: note = Target: SCN10A; (+) strand; PAM type: NRG; PAM sequence: GGG
  source 1..20: mol_type = other DNA
ctgcctggacccacagcact

SEQ ID NO: 30674 - DNA, 20 bp, synthetic construct
  misc_feature 1..20: note = Description of Artificial Sequence: Synthetic oligonucleotide
  misc_feature 1..20: note = Target: SCN10A; (+) strand; PAM type: NRG; PAM sequence: GGG
  source 1..20: mol_type = other DNA
tgcctggacccacagcactg

SEQ ID NO: 30675 - DNA, 20 bp, synthetic construct
  misc_feature 1..20: note = Description of Artificial Sequence: Synthetic oligonucleotide
  misc_feature 1..20: note = Target: SCN10A; (+) strand; PAM type: NRG; PAM sequence: CAG
  source 1..20: mol_type = other DNA
ggacccacagcactggggcc

SEQ ID NO: 30676 - DNA, 20 bp, synthetic construct
  misc_feature 1..20: note = Description of Artificial Sequence: Synthetic oligonucleotide
  misc_feature 1..20: note = Target: SCN10A; (+) strand; PAM type: NRG; PAM sequence: TAG
  source 1..20: mol_type = other DNA
agcactggggcccagactga

SEQ ID NO: 30677 - DNA, 20 bp, synthetic construct
  misc_feature 1..20: note = Description of Artificial Sequence: Synthetic oligonucleotide
  misc_feature 1..20: note = Target: SCN10A; (+) strand; PAM type: NRG; PAM sequence: AGG
  source 1..20: mol_type = other DNA
gcactggggcccagactgat

SEQ ID NO: 30678 - DNA, 20 bp, synthetic construct
  misc_feature 1..20: note = Description of Artificial Sequence: Synthetic oligonucleotide
  misc_feature 1..20: note = Target: SCN10A; (+) strand; PAM type: NRG; PAM sequence: GGG
  source 1..20: mol_type = other DNA
cactggggcccagactgata

SEQ ID NO: 30679 - DNA, 20 bp, synthetic construct
  misc_feature 1..20: note = Description of Artificial Sequence: Synthetic oligonucleotide
  misc_feature 1..20: note = Target: SCN10A; (+) strand; PAM type: NRG; PAM sequence: AAG
  source 1..20: mol_type = other DNA
tggggcccagactgataggg

SEQ ID NO: 30680 - DNA, 20 bp, synthetic construct
  misc_feature 1..20: note = Description of Artificial Sequence: Synthetic oligonucleotide
  misc_feature 1..20: note = Target: SCN10A; (+) strand; PAM type: NRG; PAM sequence: AGG
  source 1..20: mol_type = other DNA
ggggcccagactgataggga

SEQ ID NO: 30681 - DNA, 20 bp, synthetic construct
  misc_feature 1..20: note = Description of Artificial Sequence: Synthetic oligonucleotide
  misc_feature 1..20: note = Target: SCN10A; (+) strand; PAM type: NRG; PAM sequence: CAG
  source 1..20: mol_type = other DNA
cagactgatagggaaggacc

SEQ ID NO: 30682 - DNA, 20 bp, synthetic construct
  misc_feature 1..20: note = Description of Artificial Sequence: Synthetic oligonucleotide
  misc_feature 1..20: note = Target: SCN10A; (+) strand; PAM type: NRG; PAM sequence: CAG
  source 1..20: mol_type = other DNA
ctgatagggaaggacccagc

SEQ ID NO: 30683 - DNA, 20 bp, synthetic construct
  misc_feature 1..20: note = Description of Artificial Sequence: Synthetic oligonucleotide
  misc_feature 1..20: note = Target: SCN10A; (+) strand; PAM type: NRG; PAM sequence: CAG
  source 1..20: mol_type = other DNA
gacccagccagccctgacca

SEQ ID NO: 30684 - DNA, 20 bp, synthetic construct
  misc_feature 1..20: note = Description of Artificial Sequence: Synthetic oligonucleotide
  misc_feature 1..20: note = Target: SCN10A; (+) strand; PAM type: NRG; PAM sequence: TGG
  source 1..20: mol_type = other DNA
ccagccctgaccacagtccc

SEQ ID NO: 30685 - DNA, 20 bp, synthetic construct
  misc_feature 1..20: note = Description of Artificial Sequence: Synthetic oligonucleotide
  misc_feature 1..20: note = Target: SCN10A; (+) strand; PAM type: NRG; PAM sequence: AAG
  source 1..20: mol_type = other DNA
gccctgaccacagtccctgg

SEQ ID NO: 30686 - DNA, 20 bp, synthetic construct
  misc_feature 1..20: note = Description of Artificial Sequence: Synthetic oligonucleotide
  misc_feature 1..20: note = Target: SCN10A; (+) strand; PAM type: NRG; PAM sequence: AGG
  source 1..20: mol_type = other DNA
ccctgaccacagtccctgga

SEQ ID NO: 30687 - DNA, 20 bp, synthetic construct
  misc_feature 1..20: note = Description of Artificial Sequence: Synthetic oligonucleotide
  misc_feature 1..20: note = Target: SCN10A; (+) strand; PAM type: NRG; PAM sequence: GGG
  source 1..20: mol_type = other DNA
cctgaccacagtccctggaa

SEQ ID NO: 30688 - DNA, 20 bp, synthetic construct
  misc_feature 1..20: note = Description of Artificial Sequence: Synthetic oligonucleotide
  misc_feature 1..20: note = Target: SCN10A; (+) strand; PAM type: NRG; PAM sequence: GGG
  source 1..20: mol_type = other DNA
ctgaccacagtccctggaag

SEQ ID NO: 30689 - DNA, 20 bp, synthetic construct
  misc_feature 1..20: note = Description of Artificial Sequence: Synthetic oligonucleotide
  misc_feature 1..20: note = Target: SCN10A; (+) strand; PAM type: NRG; PAM sequence: TGG
  source 1..20: mol_type = other DNA
acagtccctggaaggggatt

SEQ ID NO: 30690 - DNA, 20 bp, synthetic construct
  misc_feature 1..20: note = Description of Artificial Sequence: Synthetic oligonucleotide
  misc_feature 1..20: note = Target: SCN10A; (+) strand; PAM type: NRG; PAM sequence: TAG
  source 1..20: mol_type = other DNA
gtccctggaaggggatttgg

SEQ ID NO: 30691 - DNA, 20 bp, synthetic construct
  misc_feature 1..20: note = Description of Artificial Sequence: Synthetic oligonucleotide
  misc_feature 1..20: note = Target: SCN10A; (+) strand; PAM type: NRG; PAM sequence: CAG
  source 1..20: mol_type = other DNA
ctggaaggggatttggtagt

SEQ ID NO: 30692 - DNA, 20 bp, synthetic construct
  misc_feature 1..20: note = Description of Artificial Sequence: Synthetic oligonucleotide
  misc_feature 1..20: note = Target: SCN10A; (+) strand; PAM type: NRG; PAM sequence: CAG
  source 1..20: mol_type = other DNA
ggatttggtagtcagcttgc

SEQ ID NO: 30693 - DNA, 20 bp, synthetic construct
  misc_feature 1..20: note = Description of Artificial Sequence: Synthetic oligonucleotide
  misc_feature 1..20: note = Target: SCN10A; (+) strand; PAM type: NRG; PAM sequence: TAG
  source 1..20: mol_type = other DNA
tttggtagtcagcttgccag

SEQ ID NO: 30694 - DNA, 20 bp, synthetic construct
  misc_feature 1..20: note = Description of Artificial Sequence: Synthetic oligonucleotide
  misc_feature 1..20: note = Target: SCN10A; (+) strand; PAM type: NRG; PAM sequence: TGG
  source 1..20: mol_type = other DNA
cagtagcattttgtttgctg

SEQ ID NO: 30695 - DNA, 20 bp, synthetic construct
  misc_feature 1..20: note = Description of Artificial Sequence: Synthetic oligonucleotide
  misc_feature 1..20: note = Target: SCN10A; (+) strand; PAM type: NRG; PAM sequence: GGG
  source 1..20: mol_type = other DNA
agtagcattttgtttgctgt

SEQ ID NO: 30696 - DNA, 20 bp, synthetic construct
  misc_feature 1..20: note = Description of Artificial Sequence: Synthetic oligonucleotide
  misc_feature 1..20: note = Target: SCN10A; (+) strand; PAM type: NRG; PAM sequence: GGG
  source 1..20: mol_type = other DNA
gtagcattttgtttgctgtg

SEQ ID NO: 30697 - DNA, 20 bp, synthetic construct
  misc_feature 1..20: note = Description of Artificial Sequence: Synthetic oligonucleotide
  misc_feature 1..20: note = Target: SCN10A; (+) strand; PAM type: NRG; PAM sequence: GAG
  source 1..20: mol_type = other DNA
agcattttgtttgctgtggg

SEQ ID NO: 30698 - DNA, 20 bp, synthetic construct
  misc_feature 1..20: note = Description of Artificial Sequence: Synthetic oligonucleotide
  misc_feature 1..20: note = Target: SCN10A; (+) strand; PAM type: NRG; PAM sequence: AGG
  source 1..20: mol_type = other DNA
gcattttgtttgctgtgggg

SEQ ID NO: 30699 - DNA, 20 bp, synthetic construct
  misc_feature 1..20: note = Description of Artificial Sequence: Synthetic oligonucleotide
  misc_feature 1..20: note = Target: SCN10A; (+) strand; PAM type: NRG; PAM sequence: AAG
  source 1..20: mol_type = other DNA
ttgtttgctgtggggaggta

SEQ ID NO: 30700 - DNA, 20 bp, synthetic construct
  misc_feature 1..20: note = Description of Artificial Sequence: Synthetic oligonucleotide
  misc_feature 1..20: note = Target: SCN10A; (+) strand; PAM type: NRG; PAM sequence: TGG
  source 1..20: mol_type = other DNA
tttgctgtggggaggtaaag

SEQ ID NO: 30701 - DNA, 20 bp, synthetic construct
  misc_feature 1..20: note = Description of Artificial Sequence: Synthetic oligonucleotide
  misc_feature 1..20: note = Target: SCN10A; (+) strand; PAM type: NRG; PAM sequence: GGG
  source 1..20: mol_type = other DNA
ttgctgtggggaggtaaagt

SEQ ID NO: 30702 - DNA, 20 bp, synthetic construct
  misc_feature 1..20: note = Description of Artificial Sequence: Synthetic oligonucleotide
  misc_feature 1..20: note = Target: SCN10A; (+) strand; PAM type: NRG; PAM sequence: TAG
  source 1..20: mol_type = other DNA
tgtggggaggtaaagtggga

SEQ ID NO: 30703 - DNA, 20 bp, synthetic construct
  misc_feature 1..20: note = Description of Artificial Sequence: Synthetic oligonucleotide
  misc_feature 1..20: note = Target: SCN10A; (+) strand; PAM type: NRG; PAM sequence: TGG
  source 1..20: mol_type = other DNA
ggggaggtaaagtgggatag

SEQ ID NO: 30704 - DNA, 20 bp, synthetic construct
  misc_feature 1..20: note = Description of Artificial Sequence: Synthetic oligonucleotide
  misc_feature 1..20: note = Target: SCN10A; (+) strand; PAM type: NRG; PAM sequence: GAG
  source 1..20: mol_type = other DNA
ggaggtaaagtgggatagtg

SEQ ID NO: 30705 - DNA, 20 bp, synthetic construct
  misc_feature 1..20: note = Description of Artificial Sequence: Synthetic oligonucleotide
  misc_feature 1..20: note = Target: SCN10A; (+) strand; PAM type: NRG; PAM sequence: AGG
  source 1..20: mol_type = other DNA
gaggtaaagtgggatagtgg

SEQ ID NO: 30706 - DNA, 20 bp, synthetic construct
  misc_feature 1..20: note = Description of Artificial Sequence: Synthetic oligonucleotide
  misc_feature 1..20: note = Target: SCN10A; (+) strand; PAM type: NRG; PAM sequence: GAG
  source 1..20: mol_type = other DNA
ggtaaagtgggatagtggag

SEQ ID NO: 30707 - DNA, 20 bp, synthetic construct
  misc_feature 1..20: note = Description of Artificial Sequence: Synthetic oligonucleotide
  misc_feature 1..20: note = Target: SCN10A; (+) strand; PAM type: NRG; PAM sequence: AGG
  source 1..20: mol_type = other DNA
gtaaagtgggatagtggagg

SEQ ID NO: 30708 - DNA, 20 bp, synthetic construct
  misc_feature 1..20: note = Description of Artificial Sequence: Synthetic oligonucleotide
  misc_feature 1..20: note = Target: SCN10A; (+) strand; PAM type: NRG; PAM sequence: GAG
  source 1..20: mol_type = other DNA
gatagtggaggaggtactgt

SEQ ID NO: 30709 - DNA, 20 bp, synthetic construct
  misc_feature 1..20: note = Description of Artificial Sequence: Synthetic oligonucleotide
  misc_feature 1..20: note = Target: SCN10A; (+) strand; PAM type: NRG; PAM sequence: AAG
  source 1..20: mol_type = other DNA
aggaggtactgtgagatcca

SEQ ID NO: 30710 - DNA, 20 bp, synthetic construct
  misc_feature 1..20: note = Description of Artificial Sequence: Synthetic oligonucleotide
  misc_feature 1..20: note = Target: SCN10A; (+) strand; PAM type: NRG; PAM sequence: CAG
  source 1..20: mol_type = other DNA
gatccaaagcatgacttctt

SEQ ID NO: 30711 - DNA, 20 bp, synthetic construct
  misc_feature 1..20: note = Description of Artificial Sequence: Synthetic oligonucleotide
  misc_feature 1..20: note = Target: SCN10A; (+) strand; PAM type: NRG; PAM sequence: AGG
  source 1..20: mol_type = other DNA
atccaaagcatgacttcttc

SEQ ID NO: 30712 - DNA, 20 bp, synthetic construct
  misc_feature 1..20: note = Description of Artificial Sequence: Synthetic oligonucleotide
  misc_feature 1..20: note = Target: SCN10A; (+) strand; PAM type: NRG; PAM sequence: GGG
  source 1..20: mol_type = other DNA
tccaaagcatgacttcttca

SEQ ID NO: 30713 - DNA, 20 bp, synthetic construct
  misc_feature 1..20: note = Description of Artificial Sequence: Synthetic oligonucleotide
  misc_feature 1..20: note = Target: SCN10A; (+) strand; PAM type: NRG; PAM sequence: TGG
  source 1..20: mol_type = other DNA
catgacttcttcagggccaa

SEQ ID NO: 30714 - DNA, 20 bp, synthetic construct
  misc_feature 1..20: note = Description of Artificial Sequence: Synthetic oligonucleotide
  misc_feature 1..20: note = Target: SCN10A; (+) strand; PAM type: NRG; PAM sequence: GGG
  source 1..20: mol_type = other DNA
atgacttcttcagggccaat

SEQ ID NO: 30715 - DNA, 20 bp, synthetic construct
  misc_feature 1..20: note = Description of Artificial Sequence: Synthetic oligonucleotide
  misc_feature 1..20: note = Target: SCN10A; (+) strand; PAM type: NRG; PAM sequence: GGG
  source 1..20: mol_type = other DNA
tgacttcttcagggccaatg

SEQ ID NO: 30716 - DNA, 20 bp, synthetic construct
  misc_feature 1..20: note = Description of Artificial Sequence: Synthetic oligonucleotide
  misc_feature 1..20: note = Target: SCN10A; (+) strand; PAM type: NRG; PAM sequence: CAG
  source 1..20: mol_type = other DNA
tcagggccaatggggacaaa

SEQ ID NO: 30717 - DNA, 20 bp, synthetic construct
  misc_feature 1..20: note = Description of Artificial Sequence: Synthetic oligonucleotide
  misc_feature 1..20: note = Target: SCN10A; (+) strand; PAM type: NRG; PAM sequence: CAG
  source 1..20: mol_type = other DNA
aacagccctgctgatacttg

SEQ ID NO: 30718 - DNA, 20 bp, synthetic construct
  misc_feature 1..20: note = Description of Artificial Sequence: Synthetic oligonucleotide
  misc_feature 1..20: note = Target: SCN10A; (+) strand; PAM type: NRG; PAM sequence: AGG
  source 1..20: mol_type = other DNA
acagccctgctgatacttgc

SEQ ID NO: 30719 - DNA, 20 bp, synthetic construct
  misc_feature 1..20: note = Description of Artificial Sequence: Synthetic oligonucleotide
  misc_feature 1..20: note = Target: SCN10A; (+) strand; PAM type: NRG; PAM sequence: GGG
  source 1..20: mol_type = other DNA
cagccctgctgatacttgca

SEQ ID NO: 30720 - DNA, 20 bp, synthetic construct
  misc_feature 1..20: note = Description of Artificial Sequence: Synthetic oligonucleotide
  misc_feature 1..20: note = Target: SCN10A; (+) strand; PAM type: NRG; PAM sequence: AAG
  source 1..20: mol_type = other DNA
cttgcagggatgctgaatgc

SEQ ID NO: 30721 - DNA, 20 bp, synthetic construct
  misc_feature 1..20: note = Description of Artificial Sequence: Synthetic oligonucleotide
  misc_feature 1..20: note = Target: SCN10A; (+) strand; PAM type: NRG; PAM sequence: AGG
  source 1..20: mol_type = other DNA
ttgcagggatgctgaatgca

SEQ ID NO: 30722 - DNA, 20 bp, synthetic construct
  misc_feature 1..20: note = Description of Artificial Sequence: Synthetic oligonucleotide
  misc_feature 1..20: note = Target: SCN10A; (+) strand; PAM type: NRG; PAM sequence: GGG
  source 1..20: mol_type = other DNA
tgcagggatgctgaatgcaa

SEQ ID NO: 30723 - DNA, 20 bp, synthetic construct
  misc_feature 1..20: note = Description of Artificial Sequence: Synthetic oligonucleotide
  misc_feature 1..20: note = Target: SCN10A; (+) strand; PAM type: NRG; PAM sequence: GAG
  source 1..20: mol_type = other DNA
cagggatgctgaatgcaagg

SEQ ID NO: 30724 - DNA, 20 bp, synthetic construct
  misc_feature 1..20: note = Description of Artificial Sequence: Synthetic oligonucleotide
  misc_feature 1..20: note = Target: SCN10A; (+) strand; PAM type: NRG; PAM sequence: AAG
  source 1..20: mol_type = other DNA
gatgctgaatgcaagggaga

SEQ ID NO: 30725 - DNA, 20 bp, synthetic construct
  misc_feature 1..20: note = Description of Artificial Sequence: Synthetic oligonucleotide
  misc_feature 1..20: note = Target: SCN10A; (+) strand; PAM type: NRG; PAM sequence: TGG
  source 1..20: mol_type = other DNA
gaaagaaaaccttctcaaat

SEQ ID NO: 30726 - DNA, 20 bp, synthetic construct
  misc_feature 1..20: note = Description of Artificial Sequence: Synthetic oligonucleotide
  misc_feature 1..20: note = Target: SCN10A; (+) strand; PAM type: NRG; PAM sequence: TGG
  source 1..20: mol_type = other DNA
aaccttctcaaattggattt

SEQ ID NO: 30727 - DNA, 20 bp, synthetic construct
  misc_feature 1..20: note = Description of Artificial Sequence: Synthetic oligonucleotide
  misc_feature 1..20: note = Target: SCN10A; (+) strand; PAM type: NRG; PAM sequence: AAG
  source 1..20: mol_type = other DNA
cttctcaaattggattttgg

SEQ ID NO: 30728 - DNA, 20 bp, synthetic construct
  misc_feature 1..20: note = Description of Artificial Sequence: Synthetic oligonucleotide
  misc_feature 1..20: note = Target: SCN10A; (+) strand; PAM type: NRG; PAM sequence: AAG
  source 1..20: mol_type = other DNA
tggattttggaagtgaacca

SEQ ID NO: 30729 - DNA, 20 bp, synthetic construct
  misc_feature 1..20: note = Description of Artificial Sequence: Synthetic oligonucleotide
  misc_feature 1..20: note = Target: SCN10A; (+) strand; PAM type: NRG; PAM sequence: AGG
  source 1..20: mol_type = other DNA
ggattttggaagtgaaccaa

SEQ ID NO: 30730 - DNA, 20 bp, synthetic construct
  misc_feature 1..20: note = Description of Artificial Sequence: Synthetic oligonucleotide
  misc_feature 1..20: note = Target: SCN10A; (+) strand; PAM type: NRG; PAM sequence: GGG
  source 1..20: mol_type = other DNA
gattttggaagtgaaccaaa

SEQ ID NO: 30731 - DNA, 20 bp, synthetic construct
  misc_feature 1..20: note = Description of Artificial Sequence: Synthetic oligonucleotide
  misc_feature 1..20: note = Target: SCN10A; (+) strand; PAM type: NRG; PAM sequence: CAG
  source 1..20: mol_type = other DNA
gtgaaccaaagggatgctaa

SEQ ID NO: 30732 - DNA, 20 bp, synthetic construct
  misc_feature 1..20: note = Description of Artificial Sequence: Synthetic oligonucleotide
  misc_feature 1..20: note = Target: SCN10A; (+) strand; PAM type: NRG; PAM sequence: AAG
  source 1..20: mol_type = other DNA
gtgactttgtttaaaaataa

SEQ ID NO: 30733 - DNA, 20 bp, synthetic construct
  misc_feature 1..20: note = Description of Artificial Sequence: Synthetic oligonucleotide
  misc_feature 1..20: note = Target: SCN10A; (+) strand; PAM type: NRG; PAM sequence: CGG
  source 1..20: mol_type = other DNA
tttaaaaataaaagcatcaa

SEQ ID NO: 30734 - DNA, 20 bp, synthetic construct
  misc_feature 1..20: note = Description of Artificial Sequence: Synthetic oligonucleotide
  misc_feature 1..20: note = Target: SCN10A; (+) strand; PAM type: NRG; PAM sequence: CAG
  source 1..20: mol_type = other DNA
aaagcatcaacggatgttca

SEQ ID NO: 30735 - DNA, 20 bp, synthetic construct
  misc_feature 1..20: note = Description of Artificial Sequence: Synthetic oligonucleotide
  misc_feature 1..20: note = Target: SCN10A; (+) strand; PAM type: NRG; PAM sequence: AGG
  source 1..20: mol_type = other DNA
aagcatcaacggatgttcac

SEQ ID NO: 30736 - DNA, 20 bp, synthetic construct
  misc_feature 1..20: note = Description of Artificial Sequence: Synthetic oligonucleotide
  misc_feature 1..20: note = Target: SCN10A; (+) strand; PAM type: NRG; PAM sequence: CAG
  source 1..20: mol_type = other DNA
catcaacggatgttcacagg

SEQ ID NO: 30737 - DNA, 20 bp, synthetic construct
  misc_feature 1..20: note = Description of Artificial Sequence: Synthetic oligonucleotide
  misc_feature 1..20: note = Target: SCN10A; (+) strand; PAM type: NRG; PAM sequence: AAG
  source 1..20: mol_type = other DNA
caggcagtttacaaaaatga

SEQ ID NO: 30738 - DNA, 20 bp, synthetic construct
  misc_feature 1..20: note = Description of Artificial Sequence: Synthetic oligonucleotide
  misc_feature 1..20: note = Target: SCN10A; (+) strand; PAM type: NRG; PAM sequence: AAG
  source 1..20: mol_type = other DNA
cagtttacaaaaatgaaagt

SEQ ID NO: 30739 - DNA, 20 bp, synthetic construct
  misc_feature 1..20: note = Description of Artificial Sequence: Synthetic oligonucleotide
  misc_feature 1..20: note = Target: SCN10A; (+) strand; PAM type: NRG; PAM sequence: AAG
  source 1..20: mol_type = other DNA
tcgccaacacacctctgaaa

SEQ ID NO: 30740 - DNA, 20 bp, synthetic construct
  misc_feature 1..20: note = Description of Artificial Sequence: Synthetic oligonucleotide
  misc_feature 1..20: note = Target: SCN10A; (+) strand; PAM type: NRG; PAM sequence: TGG
  source 1..20: mol_type = other DNA
aaaagaatgttctatctcac

SEQ ID NO: 30741 - DNA, 20 bp, synthetic construct
  misc_feature 1..20: note = Description of Artificial Sequence: Synthetic oligonucleotide
  misc_feature 1..20: note = Target: SCN10A; (+) strand; PAM type: NRG; PAM sequence: AAG
  source 1..20: mol_type = other DNA
gttctatctcactggtaatc

SEQ ID NO: 30742 - DNA, 20 bp, synthetic construct
  misc_feature 1..20: note = Description of Artificial Sequence: Synthetic oligonucleotide
  misc_feature 1..20: note = Target: SCN10A; (+) strand; PAM type: NRG; PAM sequence: AGG
  source 1..20: mol_type = other DNA
ttctatctcactggtaatca

SEQ ID NO: 30743 - DNA, 20 bp, synthetic construct
  misc_feature 1..20: note = Description of Artificial Sequence: Synthetic oligonucleotide
  misc_feature 1..20: note = Target: SCN10A; (+) strand; PAM type: NRG; PAM sequence: AAG
  source 1..20: mol_type = other DNA
atcaaggaaattcaaattaa

SEQ ID NO: 30744 - DNA, 20 bp, synthetic construct
  misc_feature 1..20: note = Description of Artificial Sequence: Synthetic oligonucleotide
  misc_feature 1..20: note = Target: SCN10A; (+) strand; PAM type: NRG; PAM sequence: AAG
  source 1..20: mol_type = other DNA
aaggaaattcaaattaaaag

SEQ ID NO: 30745 - DNA, 20 bp, synthetic construct
  misc_feature 1..20: note = Description of Artificial Sequence: Synthetic oligonucleotide
  misc_feature 1..20: note = Target: SCN10A; (+) strand; PAM type: NRG; PAM sequence: CAG
  source 1..20: mol_type = other DNA
agatgctgtttttcttttat

SEQ ID NO: 30746 - DNA, 20 bp, synthetic construct
  misc_feature 1..20: note = Description of Artificial Sequence: Synthetic oligonucleotide
  misc_feature 1..20: note = Target: SCN10A; (+) strand; PAM type: NRG; PAM sequence: TGG
  source 1..20: mol_type = other DNA
ctgtttttcttttatcagac

SEQ ID NO: 30747 - DNA, 20 bp, synthetic construct
  misc_feature 1..20: note = Description of Artificial Sequence: Synthetic oligonucleotide
  misc_feature 1..20: note = Target: SCN10A; (+) strand; PAM type: NRG; PAM sequence: TGG
  source 1..20: mol_type = other DNA
tttttcttttatcagactgg

SEQ ID NO: 30748 - DNA, 20 bp, synthetic construct
  misc_feature 1..20: note = Description of Artificial Sequence: Synthetic oligonucleotide
  misc_feature 1..20: note = Target: SCN10A; (+) strand; PAM type: NRG; PAM sequence: GAG
  source 1..20: mol_type = other DNA
tttcttttatcagactggtg

SEQ ID NO: 30749 - DNA, 20 bp, synthetic construct
  misc_feature 1..20: note = Description of Artificial Sequence: Synthetic oligonucleotide
  misc_feature 1..20: note = Target: SCN10A; (+) strand; PAM type: NRG; PAM sequence: TGG
  source 1..20: mol_type = other DNA
ttttatcagactggtggaga

SEQ ID NO: 30750 - DNA, 20 bp, synthetic construct
  misc_feature 1..20: note = Description of Artificial Sequence: Synthetic oligonucleotide
  misc_feature 1..20: note = Target: SCN10A; (+) strand; PAM type: NRG; PAM sequence: AAG
  source 1..20: mol_type = other DNA
tcagactggtggagatggaa

SEQ ID NO: 30751 - DNA, 20 bp, synthetic construct
  misc_feature 1..20: note = Description of Artificial Sequence: Synthetic oligonucleotide
  misc_feature 1..20: note = Target: SCN10A; (+) strand; PAM type: NRG; PAM sequence: TAG
  source 1..20: mol_type = other DNA
ctggtggagatggaaaagaa

SEQ ID NO: 30752 - DNA, 20 bp, synthetic construct
  misc_feature 1..20: note = Description of Artificial Sequence: Synthetic oligonucleotide
  misc_feature 1..20: note = Target: SCN10A; (+) strand; PAM type: NRG; PAM sequence: AGG
  source 1..20: mol_type = other DNA
tggtggagatggaaaagaat

SEQ ID NO: 30753 - DNA, 20 bp, synthetic construct
  misc_feature 1..20: note = Description of Artificial Sequence: Synthetic oligonucleotide
  misc_feature 1..20: note = Target: SCN10A; (+) strand; PAM type: NRG; PAM sequence: GGG
  source 1..20: mol_type = other DNA
ggtggagatggaaaagaata

SEQ ID NO: 30754 - DNA, 20 bp, synthetic construct
  misc_feature 1..20: note = Description of Artificial Sequence: Synthetic oligonucleotide
  misc_feature 1..20: note = Target: SCN10A; (+) strand; PAM type: NRG; PAM sequence: GGG
  source 1..20: mol_type = other DNA
gtggagatggaaaagaatag

SEQ ID NO: 30755 - DNA, 20 bp, synthetic construct
  misc_feature 1..20: note = Description of Artificial Sequence: Synthetic oligonucleotide
  misc_feature 1..20: note = Target: SCN10A; (+) strand; PAM type: NRG; PAM sequence: TAG
  source 1..20: mol_type = other DNA
gaaaagaataggggaaaccc

SEQ ID NO: 30756 - DNA, 20 bp, synthetic construct
  misc_feature 1..20: note = Description of Artificial Sequence: Synthetic oligonucleotide
  misc_feature 1..20: note = Target: SCN10A; (+) strand; PAM type: NRG; PAM sequence: AGG
  source 1..20: mol_type = other DNA
aaaagaataggggaaaccct

SEQ ID NO: 30757 - DNA, 20 bp, synthetic construct
  misc_feature 1..20: note = Description of Artificial Sequence: Synthetic oligonucleotide
  misc_feature 1..20: note = Target: SCN10A; (+) strand; PAM type: NRG; PAM sequence: TGG
  source 1..20: mol_type = other DNA
ggggaaaccctaggatgctg

SEQ ID NO: 30758 - DNA, 20 bp, synthetic construct
  misc_feature 1..20: note = Description of Artificial Sequence: Synthetic oligonucleotide
  misc_feature 1..20: note = Target: SCN10A; (+) strand; PAM type: NRG; PAM sequence: TGG
  source 1..20: mol_type = other DNA
accctaggatgctgtggctg

SEQ ID NO: 30759 - DNA, 20 bp, synthetic construct
  misc_feature 1..20: note = Description of Artificial Sequence: Synthetic oligonucleotide
  misc_feature 1..20: note = Target: SCN10A; (+) strand; PAM type: NRG; PAM sequence: GGG
  source 1..20: mol_type = other DNA
ccctaggatgctgtggctgt

SEQ ID NO: 30760 - DNA, 20 bp, synthetic construct
  misc_feature 1..20: note = Description of Artificial Sequence: Synthetic oligonucleotide
  misc_feature 1..20: note = Target: SCN10A; (+) strand; PAM type: NRG; PAM sequence: GGG
  source 1..20: mol_type = other DNA
cctaggatgctgtggctgtg

SEQ ID NO: 30761 - DNA, 20 bp, synthetic construct
  misc_feature 1..20: note = Description of Artificial Sequence: Synthetic oligonucleotide
  misc_feature 1..20: note = Target: SCN10A; (+) strand; PAM type: NRG; PAM sequence: GGG
  source 1..20: mol_type = other DNA
ctaggatgctgtggctgtgg

SEQ ID NO: 30762 - DNA, 20 bp, synthetic construct
  misc_feature 1..20: note = Description of Artificial Sequence: Synthetic oligonucleotide
  misc_feature 1..20: note = Target: SCN10A; (+) strand; PAM type: NRG; PAM sequence: GGG
  source 1..20: mol_type = other DNA
taggatgctgtggctgtggg

SEQ ID NO: 30763 - DNA, 20 bp, synthetic construct
  misc_feature 1..20: note = Description of Artificial Sequence: Synthetic oligonucleotide
  misc_feature 1..20: note = Target: SCN10A; (+) strand; PAM type: NRG; PAM sequence: GAG
  source 1..20: mol_type = other DNA
tttttttttttttttttttt

SEQ ID NO: 30764 - DNA, 20 bp, synthetic construct
  misc_feature 1..20: note = Description of Artificial Sequence: Synthetic oligonucleotide
  misc_feature 1..20: note = Target: SCN10A; (+) strand; PAM type: NRG; PAM sequence: CGG
  source 1..20: mol_type = other DNA
ttttttttttttttttgaga

SEQ ID NO: 30765 - DNA, 20 bp, synthetic construct
  misc_feature 1..20: note = Description of Artificial Sequence: Synthetic oligonucleotide
  misc_feature 1..20: note = Target: SCN10A; (+) strand; PAM type: NRG; PAM sequence: GAG
  source 1..20: mol_type = other DNA
ttttttttttttttgagacg

SEQ ID NO: 30766 - DNA, 20 bp, synthetic construct
  misc_feature 1..20: note = Description of Artificial Sequence: Synthetic oligonucleotide
  misc_feature 1..20: note = Target: SCN10A; (+) strand; PAM type: NRG; PAM sequence: CAG
  source 1..20: mol_type = other DNA
cggagtctcgctctgtcgcc

SEQ ID NO: 30767 - DNA, 20 bp, synthetic construct
  misc_feature 1..20: note = Description of Artificial Sequence: Synthetic oligonucleotide
  misc_feature 1..20: note = Target: SCN10A; (+) strand; PAM type: NRG; PAM sequence: AGG
  source 1..20: mol_type = other DNA
ggagtctcgctctgtcgccc

SEQ ID NO: 30768 - DNA, 20 bp, synthetic construct
  misc_feature 1..20: note = Description of Artificial Sequence: Synthetic oligonucleotide
  misc_feature 1..20: note = Target: SCN10A; (+) strand; PAM type: NRG; PAM sequence: TGG
  source 1..20: mol_type = other DNA
tctcgctctgtcgcccaggc

SEQ ID NO: 30769 - DNA, 20 bp, synthetic construct
  misc_feature 1..20: note = Description of Artificial Sequence: Synthetic oligonucleotide
  misc_feature 1..20: note = Target: SCN10A; (+) strand; PAM type: NRG; PAM sequence: GAG
  source 1..20: mol_type = other DNA
tcgctctgtcgcccaggctg

SEQ ID NO: 30770 - DNA, 20 bp, synthetic construct
  misc_feature 1..20: note = Description of Artificial Sequence: Synthetic oligonucleotide
  misc_feature 1..20: note = Target: SCN10A; (+) strand; PAM type: NRG; PAM sequence: CAG
  source 1..20: mol_type = other DNA
ctgtcgcccaggctggagtg

SEQ ID NO: 30771 - DNA, 20 bp, synthetic construct
  misc_feature 1..20: note = Description of Artificial Sequence: Synthetic oligonucleotide
  misc_feature 1..20: note = Target: SCN10A; (+) strand; PAM type: NRG; PAM sequence: TAG
  source 1..20: mol_type = other DNA
tcgcccaggctggagtgcag

SEQ ID NO: 30772 - DNA, 20 bp, synthetic construct
  misc_feature 1..20: note = Description of Artificial Sequence: Synthetic oligonucleotide
  misc_feature 1..20: note = Target: SCN10A; (+) strand; PAM type: NRG; PAM sequence: CGG
  source 1..20: mol_type = other DNA
cccaggctggagtgcagtag

SEQ ID NO: 30773 - DNA, 20 bp, synthetic construct
  misc_feature 1..20: note = Description of Artificial Sequence: Synthetic oligonucleotide
  misc_feature 1..20: note = Target: SCN10A; (+) strand; PAM type: NRG; PAM sequence: GGG
  source 1..20: mol_type = other DNA
ccaggctggagtgcagtagc

SEQ ID NO: 30774 - DNA, 20 bp, synthetic construct
  misc_feature 1..20: note = Description of Artificial Sequence: Synthetic oligonucleotide
  misc_feature 1..20: note = Target: SCN10A; (+) strand; PAM type: NRG; PAM sequence: CGG
  source 1..20: mol_type = other DNA
ggagtgcagtagcgggatct

SEQ ID NO: 30775 - DNA, 20 bp, synthetic construct
  misc_feature 1..20: note = Description of Artificial Sequence: Synthetic oligonucleotide
  misc_feature 1..20: note = Target: SCN10A; (+) strand; PAM type: NRG; PAM sequence: AAG
  source 1..20: mol_type = other DNA
gcgggatctcggctcactgc

SEQ ID NO: 30776 - DNA, 20 bp, synthetic construct
  misc_feature 1..20: note = Description of Artificial Sequence: Synthetic oligonucleotide
  misc_feature 1..20: note = Target: SCN10A; (+) strand; PAM type: NRG; PAM sequence: CAG
  source 1..20: mol_type = other DNA
tcactgcaagctctgcctcc

SEQ ID NO: 30777 - DNA, 20 bp, synthetic construct
  misc_feature 1..20: note = Description of Artificial Sequence: Synthetic oligonucleotide
  misc_feature 1..20: note = Target: SCN10A; (+) strand; PAM type: NRG; PAM sequence: AGG
  source 1..20: mol_type = other DNA
cactgcaagctctgcctccc

SEQ ID NO: 30778 - DNA, 20 bp, synthetic construct
  misc_feature 1..20: note = Description of Artificial Sequence: Synthetic oligonucleotide
  misc_feature 1..20: note = Target: SCN10A; (+) strand; PAM type: NRG; PAM sequence: CAG
  source 1..20: mol_type = other DNA
ttcacgccattctcctgcct

SEQ ID NO: 30779 - DNA, 20 bp, synthetic construct
  misc_feature 1..20: note = Description of Artificial Sequence: Synthetic oligonucleotide
  misc_feature 1..20: note = Target: SCN10A; (+) strand; PAM type: NRG; PAM sequence: AAG
  source 1..20: mol_type = other DNA
ttctcctgcctcagcctccc

SEQ ID NO: 30780 - DNA, 20 bp, synthetic construct
  misc_feature 1..20: note = Description of Artificial Sequence: Synthetic oligonucleotide
  misc_feature 1..20: note = Target: SCN10A; (+) strand; PAM type: NRG; PAM sequence: TAG
  source 1..20: mol_type = other DNA
tcctgcctcagcctcccaag

SEQ ID NO: 30781 - DNA, 20 bp, synthetic construct
  misc_feature 1..20: note = Description of Artificial Sequence: Synthetic oligonucleotide
  misc_feature 1..20: note = Target: SCN10A; (+) strand; PAM type: NRG; PAM sequence: TGG
  source 1..20: mol_type = other DNA
gcctcagcctcccaagtagc

SEQ ID NO: 30782 - DNA, 20 bp, synthetic construct
  misc_feature 1..20: note = Description of Artificial Sequence: Synthetic oligonucleotide
  misc_feature 1..20: note = Target: SCN10A; (+) strand; PAM type: NRG; PAM sequence: GGG
  source 1..20: mol_type = other DNA
cctcagcctcccaagtagct

SEQ ID NO: 30783 - DNA, 20 bp, synthetic construct
  misc_feature 1..20: note = Description of Artificial Sequence: Synthetic oligonucleotide
  misc_feature 1..20: note = Target: SCN10A; (+) strand; PAM type: NRG; PAM sequence: CAG
  source 1..20: mol_type = other DNA
ctcccaagtagctgggacta

SEQ ID NO: 30784 - DNA, 20 bp, synthetic construct
  misc_feature 1..20: note = Description of Artificial Sequence: Synthetic oligonucleotide
  misc_feature 1..20: note = Target: SCN10A; (+) strand; PAM type: NRG; PAM sequence: AGG
  source 1..20: mol_type = other DNA
tcccaagtagctgggactac

SEQ ID NO: 30785 - DNA, 20 bp, synthetic construct
  misc_feature 1..20: note = Description of Artificial Sequence: Synthetic oligonucleotide
  misc_feature 1..20: note = Target: SCN10A; (+) strand; PAM type: NRG; PAM sequence: CGG
  source 1..20: mol_type = other DNA
caggcgcccgccactacgcc

SEQ ID NO: 30786 - DNA, 20 bp, synthetic construct
  misc_feature 1..20: note = Description of Artificial Sequence: Synthetic oligonucleotide
  misc_feature 1..20: note = Target: SCN10A; (+) strand; PAM type: NRG; PAM sequence: TAG
  source 1..20: mol_type = other DNA
cggctaattttttgtatttt

SEQ ID NO: 30787 - DNA, 20 bp, synthetic construct
  misc_feature 1..20: note = Description of Artificial Sequence: Synthetic oligonucleotide
  misc_feature 1..20: note = Target: SCN10A; (+) strand; PAM type: NRG; PAM sequence: TAG
  source 1..20: mol_type = other DNA
ctaattttttgtatttttag

SEQ ID NO: 30788 - DNA, 20 bp, synthetic construct
  misc_feature 1..20: note = Description of Artificial Sequence: Synthetic oligonucleotide
  misc_feature 1..20: note = Target: SCN10A; (+) strand; PAM type: NRG; PAM sequence: GAG
  source 1..20: mol_type = other DNA
aattttttgtatttttagta

SEQ ID NO: 30789 - DNA, 20 bp, synthetic construct
  misc_feature 1..20: note = Description of Artificial Sequence: Synthetic oligonucleotide
  misc_feature 1..20: note = Target: SCN10A; (+) strand; PAM type: NRG; PAM sequence: CGG
  source 1..20: mol_type = other DNA
ttttgtatttttagtagaga

SEQ ID NO: 30790 - DNA, 20 bp, synthetic construct
  misc_feature 1..20: note = Description of Artificial Sequence: Synthetic oligonucleotide
  misc_feature 1..20: note = Target: SCN10A; (+) strand; PAM type: NRG; PAM sequence: GGG
  source 1..20: mol_type = other DNA
tttgtatttttagtagagac

SEQ ID NO: 30791 - DNA, 20 bp, synthetic construct
  misc_feature 1..20: note = Description of Artificial Sequence: Synthetic oligonucleotide
  misc_feature 1..20: note = Target: SCN10A; (+) strand; PAM type: NRG; PAM sequence: GGG
  source 1..20: mol_type = other DNA
ttgtatttttagtagagacg

SEQ ID NO: 30792 - DNA, 20 bp, synthetic construct
  misc_feature 1..20: note = Description of Artificial Sequence: Synthetic oligonucleotide
  misc_feature 1..20: note = Target: SCN10A; (+) strand; PAM type: NRG; PAM sequence: TAG
  source 1..20: mol_type = other DNA
gagacggggtttcaccgttt

SEQ ID NO: 30793 - DNA, 20 bp, synthetic construct
  misc_feature 1..20: note = Description of Artificial Sequence: Synthetic oligonucleotide
  misc_feature 1..20: note = Target: SCN10A; (+) strand; PAM type: NRG; PAM sequence: CGG
  source 1..20: mol_type = other DNA
cggggtttcaccgttttagc

SEQ ID NO: 30794 - DNA, 20 bp, synthetic construct
  misc_feature 1..20: note = Description of Artificial Sequence: Synthetic oligonucleotide
  misc_feature 1..20: note = Target: SCN10A; (+) strand; PAM type: NRG; PAM sequence: GGG
  source 1..20: mol_type = other DNA
ggggtttcaccgttttagcc

SEQ ID NO: 30795 - DNA, 20 bp, synthetic construct
  misc_feature 1..20: note = Description of Artificial Sequence: Synthetic oligonucleotide
  misc_feature 1..20: note = Target: SCN10A; (+) strand; PAM type: NRG; PAM sequence: TGG
  source 1..20: mol_type = other DNA
tttcaccgttttagccggga

SEQ ID NO: 30796 - DNA, 20 bp, synthetic construct
  misc_feature 1..20: note = Description of Artificial Sequence: Synthetic oligonucleotide
  misc_feature 1..20: note = Target: SCN10A; (+) strand; PAM type: NRG; PAM sequence: CAG
  source 1..20: mol_type = other DNA
acctcatgatccgcccgcct

SEQ ID NO: 30797 - DNA, 20 bp, synthetic construct
  misc_feature 1..20: note = Description of Artificial Sequence: Synthetic oligonucleotide
  misc_feature 1..20: note = Target: SCN10A; (+) strand; PAM type: NRG; PAM sequence: AAG
  source 1..20: mol_type = other DNA
ccgcccgcctcagcctccca

SEQ ID NO: 30798 - DNA, 20 bp, synthetic construct
  misc_feature 1..20: note = Description of Artificial Sequence: Synthetic oligonucleotide
  misc_feature 1..20: note = Target: SCN10A; (+) strand; PAM type: NRG; PAM sequence: TGG
  source 1..20: mol_type = other DNA
gcctcagcctcccaaagtgc

SEQ ID NO: 30799 - DNA, 20 bp, synthetic construct
  misc_feature 1..20: note = Description of Artificial Sequence: Synthetic oligonucleotide
  misc_feature 1..20: note = Target: SCN10A; (+) strand; PAM type: NRG; PAM sequence: GGG
  source 1..20: mol_type = other DNA
cctcagcctcccaaagtgct

SEQ ID NO: 30800 - DNA, 20 bp, synthetic construct
  misc_feature 1..20: note = Description of Artificial Sequence: Synthetic oligonucleotide
  misc_feature 1..20: note = Target: SCN10A; (+) strand; PAM type: NRG; PAM sequence: CAG
  source 1..20: mol_type = other DNA
ctcccaaagtgctgggatta

SEQ ID NO: 30801 - DNA, 20 bp, synthetic construct
  misc_feature 1..20: note = Description of Artificial Sequence: Synthetic oligonucleotide
  misc_feature 1..20: note = Target: SCN10A; (+) strand; PAM type: NRG; PAM sequence: AGG
  source 1..20: mol_type = other DNA
tcccaaagtgctgggattac

SEQ ID NO: 30802 - DNA, 20 bp, synthetic construct
  misc_feature 1..20: note = Description of Artificial Sequence: Synthetic oligonucleotide
  misc_feature 1..20: note = Target: SCN10A; (+) strand; PAM type: NRG; PAM sequence: GAG
  source 1..20: mol_type = other DNA
agtgctgggattacaggcgt

SEQ ID NO: 30803 - DNA, 20 bp, synthetic construct
  misc_feature 1..20: note = Description of Artificial Sequence: Synthetic oligonucleotide
  misc_feature 1..20: note = Target: SCN10A; (+) strand; PAM type: NRG; PAM sequence: CGG
  source 1..20: mol_type = other DNA
caggcgtgagccaccgcgcc

SEQ ID NO: 30804 - DNA, 20 bp, synthetic construct
  misc_feature 1..20: note = Description of Artificial Sequence: Synthetic oligonucleotide
  misc_feature 1..20: note = Target: SCN10A; (+) strand; PAM type: NRG; PAM sequence: AAG
  source 1..20: mol_type = other DNA
ccgcgcccggccactcttac

SEQ ID NO: 30805 - DNA, 20 bp, synthetic construct
  misc_feature 1..20: note = Description of Artificial Sequence: Synthetic oligonucleotide
  misc_feature 1..20: note = Target: SCN10A; (+) strand; PAM type: NRG; PAM sequence: TGG
  source 1..20: mol_type = other DNA
cggccactcttacaagtgac

SEQ ID NO: 30806 - DNA, 20 bp, synthetic construct
  misc_feature 1..20: note = Description of Artificial Sequence: Synthetic oligonucleotide
  misc_feature 1..20: note = Target: SCN10A; (+) strand; PAM type: NRG; PAM sequence: CAG
  source 1..20: mol_type = other DNA
ccactcttacaagtgactgg

SEQ ID NO: 30807 - DNA, 20 bp, synthetic construct
  misc_feature 1..20: note = Description of Artificial Sequence: Synthetic oligonucleotide
  misc_feature 1..20: note = Target: SCN10A; (+) strand; PAM type: NRG; PAM sequence: AGG
  source 1..20: mol_type = other DNA
cactcttacaagtgactggc

SEQ ID NO: 30808 - DNA, 20 bp, synthetic construct
  misc_feature 1..20: note = Description of Artificial Sequence: Synthetic oligonucleotide
  misc_feature 1..20: note = Target: SCN10A; (+) strand; PAM type: NRG; PAM sequence: GAG
  source 1..20: mol_type = other DNA
ctcttacaagtgactggcag

SEQ ID NO: 30809 - DNA, 20 bp, synthetic construct
  misc_feature 1..20: note = Description of Artificial Sequence: Synthetic oligonucleotide
  misc_feature 1..20: note = Target: SCN10A; (+) strand; PAM type: NRG; PAM sequence: TGG
  source 1..20: mol_type = other DNA
gactggcaggagtgaaaacc

SEQ ID NO: 30810 - DNA, 20 bp, synthetic construct
  misc_feature 1..20: note = Description of Artificial Sequence: Synthetic oligonucleotide
  misc_feature 1..20: note = Target: SCN10A; (+) strand; PAM type: NRG; PAM sequence: CAG
  source 1..20: mol_type = other DNA
ggcaggagtgaaaacctggc

SEQ ID NO: 30811 - DNA, 20 bp, synthetic construct
  misc_feature 1..20: note = Description of Artificial Sequence: Synthetic oligonucleotide
  misc_feature 1..20: note = Target: SCN10A; (+) strand; PAM type: NRG; PAM sequence: AAG
  source 1..20: mol_type = other DNA
aacctggccagtcctgtgtg

SEQ ID NO: 30812 - DNA, 20 bp, synthetic construct
  misc_feature 1..20: note = Description of Artificial Sequence: Synthetic oligonucleotide
  misc_feature 1..20: note = Target: SCN10A; (+) strand; PAM type: NRG; PAM sequence: TGG
  source 1..20: mol_type = other DNA
agtcctgtgtgaagccaaat

SEQ ID NO: 30813 - DNA, 20 bp, synthetic construct
  misc_feature 1..20: note = Description of Artificial Sequence: Synthetic oligonucleotide
  misc_feature 1..20: note = Target: SCN10A; (+) strand; PAM type: NRG; PAM sequence: CAG
  source 1..20: mol_type = other DNA
gccaaattggcaatgtgact

SEQ ID NO: 30814 - DNA, 20 bp, synthetic construct
  misc_feature 1..20: note = Description of Artificial Sequence: Synthetic oligonucleotide
  misc_feature 1..20: note = Target: SCN10A; (+) strand; PAM type: NRG; PAM sequence: GAG
  source 1..20: mol_type = other DNA
caaattggcaatgtgactca

SEQ ID NO: 30815 - DNA, 20 bp, synthetic construct
  misc_feature 1..20: note = Description of Artificial Sequence: Synthetic oligonucleotide
  misc_feature 1..20: note = Target: SCN10A; (+) strand; PAM type: NRG; PAM sequence: AGG
  source 1..20: mol_type = other DNA
aaattggcaatgtgactcag

SEQ ID NO: 30816 - DNA, 20 bp, synthetic construct
  misc_feature 1..20: note = Description of Artificial Sequence: Synthetic oligonucleotide
  misc_feature 1..20: note = Target: SCN10A; (+) strand; PAM type: NRG; PAM sequence: CAG
  source 1..20: mol_type = other DNA
gcaatgtgactcagaggttt

SEQ ID NO: 30817 - DNA, 20 bp, synthetic construct
  misc_feature 1..20: note = Description of Artificial Sequence: Synthetic oligonucleotide
  misc_feature 1..20: note = Target: SCN10A; (+) strand; PAM type: NRG; PAM sequence: AGG
  source 1..20: mol_type = other DNA
caatgtgactcagaggtttc

SEQ ID NO: 30818 - DNA, 20 bp, synthetic construct
  misc_feature 1..20: note = Description of Artificial Sequence: Synthetic oligonucleotide
  misc_feature 1..20: note = Target: SCN10A; (+) strand; PAM type: NRG; PAM sequence: TAG
  source 1..20: mol_type = other DNA
actcagaggtttcaggaacc

SEQ ID NO: 30819 - DNA, 20 bp, synthetic construct
  misc_feature 1..20: note = Description of Artificial Sequence: Synthetic oligonucleotide
  misc_feature 1..20: note = Target: SCN10A; (+) strand; PAM type: NRG; PAM sequence: AAG
  source 1..20: mol_type = other DNA
aacctagcaattcctccttc

SEQ ID NO: 30820 - DNA, 20 bp, synthetic construct
  misc_feature 1..20: note = Description of Artificial Sequence: Synthetic oligonucleotide
  misc_feature 1..20: note = Target: SCN10A; (+) strand; PAM type: NRG; PAM sequence: AAG
  source 1..20: mol_type = other DNA
ctccttcaagcactaatcct

SEQ ID NO: 30821 - DNA, 20 bp, synthetic construct
  misc_feature 1..20: note = Description of Artificial Sequence: Synthetic oligonucleotide
  misc_feature 1..20: note = Target: SCN10A; (+) strand; PAM type: NRG; PAM sequence: AGG
  source 1..20: mol_type = other DNA
tccttcaagcactaatccta

SEQ ID NO: 30822 - DNA, 20 bp, synthetic construct
  misc_feature 1..20: note = Description of Artificial Sequence: Synthetic oligonucleotide
  misc_feature 1..20: note = Target: SCN10A; (+) strand; PAM type: NRG; PAM sequence: TGG
  source 1..20: mol_type = other DNA
agcactaatcctaaggacac

SEQ ID NO: 30823 - DNA, 20 bp, synthetic construct
  misc_feature 1..20: note = Description of Artificial Sequence: Synthetic oligonucleotide
  misc_feature 1..20: note = Target: SCN10A; (+) strand; PAM type: NRG; PAM sequence: GAG
  source 1..20: mol_type = other DNA
cactaatcctaaggacactg

SEQ ID NO: 30824 - DNA, 20 bp, synthetic construct
  misc_feature 1..20: note = Description of Artificial Sequence: Synthetic oligonucleotide
  misc_feature 1..20: note = Target: SCN10A; (+) strand; PAM type: NRG; PAM sequence: AGG
  source 1..20: mol_type = other DNA
actaatcctaaggacactgg

SEQ ID NO: 30825 - DNA, 20 bp, synthetic construct
  misc_feature 1..20: note = Description of Artificial Sequence: Synthetic oligonucleotide
  misc_feature 1..20: note = Target: SCN10A; (+) strand; PAM type: NRG; PAM sequence: TGG
  source 1..20: mol_type = other DNA
ctaaggacactggaggctgt

SEQ ID NO: 30826 - DNA, 20 bp, synthetic construct
  misc_feature 1..20: note = Description of Artificial Sequence: Synthetic oligonucleotide
  misc_feature 1..20: note = Target: SCN10A; (+) strand; PAM type: NRG; PAM sequence: CAG
  source 1..20: mol_type = other DNA
ggaggctgttggtgcccact

SEQ ID NO: 30827 - DNA, 20 bp, synthetic construct
  misc_feature 1..20: note = Description of Artificial Sequence: Synthetic oligonucleotide
  misc_feature 1..20: note = Target: SCN10A; (+) strand; PAM type: NRG; PAM sequence: AGG
  source 1..20: mol_type = other DNA
gaggctgttggtgcccactc

SEQ ID NO: 30828 - DNA, 20 bp, synthetic construct
  misc_feature 1..20: note = Description of Artificial Sequence: Synthetic oligonucleotide
  misc_feature 1..20: note = Target: SCN10A; (+) strand; PAM type: NRG; PAM sequence: AAG
  source 1..20: mol_type = other DNA
tgcccactcaggtcctcttt

SEQ ID NO: 30829 - DNA, 20 bp, synthetic construct
  misc_feature 1..20: note = Description of Artificial Sequence: Synthetic oligonucleotide
  misc_feature 1..20: note = Target: SCN10A; (+) strand; PAM type: NRG; PAM sequence: AGG
  source 1..20: mol_type = other DNA
gcccactcaggtcctcttta

SEQ ID NO: 30830 - DNA, 20 bp, synthetic construct
  misc_feature 1..20: note = Description of Artificial Sequence: Synthetic oligonucleotide
  misc_feature 1..20: note = Target: SCN10A; (+) strand; PAM type: NRG; PAM sequence: GGG
  source 1..20: mol_type = other DNA
cccactcaggtcctctttaa

SEQ ID NO: 30831 - DNA, 20 bp, synthetic construct
  misc_feature 1..20: note = Description of Artificial Sequence: Synthetic oligonucleotide
  misc_feature 1..20: note = Target: SCN10A; (+) strand; PAM type: NRG; PAM sequence: GGG
  source 1..20: mol_type = other DNA
ccactcaggtcctctttaag

SEQ ID NO: 30832 - DNA, 20 bp, synthetic construct
  misc_feature 1..20: note = Description of Artificial Sequence: Synthetic oligonucleotide
  misc_feature 1..20: note = Target: SCN10A; (+) strand; PAM type: NRG; PAM sequence: CAG
  source 1..20: mol_type = other DNA
tcaggtcctctttaaggggc

SEQ ID NO: 30833 - DNA, 20 bp, synthetic construct
  misc_feature 1..20: note = Description of Artificial Sequence: Synthetic oligonucleotide
  misc_feature 1..20: note = Target: SCN10A; (+) strand; PAM type: NRG; PAM sequence: TGG
  source 1..20: mol_type = other DNA
tgcccctatccttcatctgc

SEQ ID NO: 30834 - DNA, 20 bp, synthetic construct
  misc_feature 1..20: note = Description of Artificial Sequence: Synthetic oligonucleotide
  misc_feature 1..20: note = Target: SCN10A; (+) strand; PAM type: NRG; PAM sequence: GGG
  source 1..20: mol_type = other DNA
gcccctatccttcatctgct

SEQ ID NO: 30835 - DNA, 20 bp, synthetic construct
  misc_feature 1..20: note = Description of Artificial Sequence: Synthetic oligonucleotide
  misc_feature 1..20: note = Target: SCN10A; (+) strand; PAM type: NRG; PAM sequence: GAG
  source 1..20: mol_type = other DNA
ccctatccttcatctgctgg

SEQ ID NO: 30836 - DNA, 20 bp, synthetic construct
  misc_feature 1..20: note = Description of Artificial Sequence: Synthetic oligonucleotide
  misc_feature 1..20: note = Target: SCN10A; (+) strand; PAM type: NRG; PAM sequence: CGG
  source 1..20: mol_type = other DNA
ccttcatctgctgggagtgt

SEQ ID NO: 30837 - DNA, 20 bp, synthetic construct
  misc_feature 1..20: note = Description of Artificial Sequence: Synthetic oligonucleotide
  misc_feature 1..20: note = Target: SCN10A; (+) strand; PAM type: NRG; PAM sequence: TAG
  source 1..20: mol_type = other DNA
ctgggagtgtcggctgctaa

SEQ ID NO: 30838 - DNA, 20 bp, synthetic construct
  misc_feature 1..20: note = Description of Artificial Sequence: Synthetic oligonucleotide
  misc_feature 1..20: note = Target: SCN10A; (+) strand; PAM type: NRG; PAM sequence: TGG
  source 1..20: mol_type = other DNA
tgtcggctgctaatagttca

SEQ ID NO: 30839 - DNA, 20 bp, synthetic construct
  misc_feature 1..20: note = Description of Artificial Sequence: Synthetic oligonucleotide
  misc_feature 1..20: note = Target: SCN10A; (+) strand; PAM type: NRG; PAM sequence: CAG
  source 1..20: mol_type = other DNA
ctgctaatagttcatggatg

SEQ ID NO: 30840 - DNA, 20 bp, synthetic construct
  misc_feature 1..20: note = Description of Artificial Sequence: Synthetic oligonucleotide
  misc_feature 1..20: note = Target: SCN10A; (+) strand; PAM type: NRG; PAM sequence: TGG
  source 1..20: mol_type = other DNA
tgcagacacccccttcctga

SEQ ID NO: 30841 - DNA, 20 bp, synthetic construct
  misc_feature 1..20: note = Description of Artificial Sequence: Synthetic oligonucleotide
  misc_feature 1..20: note = Target: SCN10A; (+) strand; PAM type: NRG; PAM sequence: TGG
  source 1..20: mol_type = other DNA
ccccttcctgatggcttcgc

SEQ ID NO: 30842 - DNA, 20 bp, synthetic construct
  misc_feature 1..20: note = Description of Artificial Sequence: Synthetic oligonucleotide
  misc_feature 1..20: note = Target: SCN10A; (+) strand; PAM type: NRG; PAM sequence: GGG
  source 1..20: mol_type = other DNA
cccttcctgatggcttcgct

SEQ ID NO: 30843 - DNA, 20 bp, synthetic construct
  misc_feature 1..20: note = Description of Artificial Sequence: Synthetic oligonucleotide
  misc_feature 1..20: note = Target: SCN10A; (+) strand; PAM type: NRG; PAM sequence: TGG
  source 1..20: mol_type = other DNA
tcctgatggcttcgctgggc

SEQ ID NO: 30844 - DNA, 20 bp, synthetic construct
  misc_feature 1..20: note = Description of Artificial Sequence: Synthetic oligonucleotide
  misc_feature 1..20: note = Target: SCN10A; (+) strand; PAM type: NRG; PAM sequence: GAG
  source 1..20: mol_type = other DNA
ctgatggcttcgctgggctg

SEQ ID NO: 30845 - DNA, 20 bp, synthetic construct
  misc_feature 1..20: note = Description of Artificial Sequence: Synthetic oligonucleotide
  misc_feature 1..20: note = Target: SCN10A; (+) strand; PAM type: NRG; PAM sequence: AGG
  source 1..20: mol_type = other DNA
tgatggcttcgctgggctgg

SEQ ID NO: 30846 - DNA, 20 bp, synthetic construct
  misc_feature 1..20: note = Description of Artificial Sequence: Synthetic oligonucleotide
  misc_feature 1..20: note = Target: SCN10A; (+) strand; PAM type: NRG; PAM sequence: TGG
  source 1..20: mol_type = other DNA
ggaggaaactgtgtccacct

SEQ ID NO: 30847 - DNA, 20 bp, synthetic construct
  misc_feature 1..20: note = Description of Artificial Sequence: Synthetic oligonucleotide
  misc_feature 1..20: note = Target: SCN10A; (+) strand; PAM type: NRG; PAM sequence: GGG
  source 1..20: mol_type = other DNA
gaggaaactgtgtccacctt

SEQ ID NO: 30848 - DNA, 20 bp, synthetic construct
  misc_feature 1..20: note = Description of Artificial Sequence: Synthetic oligonucleotide
  misc_feature 1..20: note = Target: SCN10A; (+) strand; PAM type: NRG; PAM sequence: TGG
  source 1..20: mol_type = other DNA
gaaatgcttatcctccccgc

SEQ ID NO: 30849 - DNA, 20 bp, synthetic construct
  misc_feature 1..20: note = Description of Artificial Sequence: Synthetic oligonucleotide
  misc_feature 1..20: note = Target: SCN10A; (+) strand; PAM type: NRG; PAM sequence: GGG
  source 1..20: mol_type = other DNA
aaatgcttatcctccccgct

SEQ ID NO: 30850 - DNA, 20 bp, synthetic construct
  misc_feature 1..20: note = Description of Artificial Sequence: Synthetic oligonucleotide
  misc_feature 1..20: note = Target: SCN10A; (+) strand; PAM type: NRG; PAM sequence: GGG
  source 1..20: mol_type = other DNA
aatgcttatcctccccgctg

SEQ ID NO: 30851 - DNA, 20 bp, synthetic construct
  misc_feature 1..20: note = Description of Artificial Sequence: Synthetic oligonucleotide
  misc_feature 1..20: note = Target: SCN10A; (+) strand; PAM type: NRG; PAM sequence: CAG
  source 1..20: mol_type = other DNA
gcttatcctccccgctgggg

SEQ ID NO: 30852 - DNA, 20 bp, synthetic construct
  misc_feature 1..20: note = Description of Artificial Sequence: Synthetic oligonucleotide
  misc_feature 1..20: note = Target: SCN10A; (+) strand; PAM type: NRG; PAM sequence: CAG
  source 1..20: mol_type = other DNA
ctccccgctggggcagccct

SEQ ID NO: 30853 - DNA, 20 bp, synthetic construct
  misc_feature 1..20: note = Description of Artificial Sequence: Synthetic oligonucleotide
  misc_feature 1..20: note = Target: SCN10A; (+) strand; PAM type: NRG; PAM sequence: CAG
  source 1..20: mol_type = other DNA
ccgctggggcagccctcagc

SEQ ID NO: 30854 - DNA, 20 bp, synthetic construct
  misc_feature 1..20: note = Description of Artificial Sequence: Synthetic oligonucleotide
  misc_feature 1..20: note = Target: SCN10A; (+) strand; PAM type: NRG; PAM sequence: AGG
  source 1..20: mol_type = other DNA
cgctggggcagccctcagcc

SEQ ID NO: 30855 - DNA, 20 bp, synthetic construct
  misc_feature 1..20: note = Description of Artificial Sequence: Synthetic oligonucleotide
  misc_feature 1..20: note = Target: SCN10A; (+) strand; PAM type: NRG; PAM sequence: GGG
  source 1..20: mol_type = other DNA
gctggggcagccctcagcca

SEQ ID NO: 30856 - DNA, 20 bp, synthetic construct
  misc_feature 1..20: note = Description of Artificial Sequence: Synthetic oligonucleotide
  misc_feature 1..20: note = Target: SCN10A; (+) strand; PAM type: NRG; PAM sequence: CAG
  source 1..20: mol_type = other DNA
gggcagccctcagccaggga

SEQ ID NO: 30857 - DNA, 20 bp, synthetic construct
  misc_feature 1..20: note = Description of Artificial Sequence: Synthetic oligonucleotide
  misc_feature 1..20: note = Target: SCN10A; (+) strand; PAM type: NRG; PAM sequence: CAG
  source 1..20: mol_type = other DNA
ccctcagccagggacagtga

SEQ ID NO: 30858 - DNA, 20 bp, synthetic construct
  misc_feature 1..20: note = Description of Artificial Sequence: Synthetic oligonucleotide
  misc_feature 1..20: note = Target: SCN10A; (+) strand; PAM type: NRG; PAM sequence: AGG
  source 1..20: mol_type = other DNA
cctcagccagggacagtgac

SEQ ID NO: 30859 - DNA, 20 bp, synthetic construct
  misc_feature 1..20: note = Description of Artificial Sequence: Synthetic oligonucleotide
  misc_feature 1..20: note = Target: SCN10A; (+) strand; PAM type: NRG; PAM sequence: GGG
  source 1..20: mol_type = other DNA
ctcagccagggacagtgaca

SEQ ID NO: 30860 - DNA, 20 bp, synthetic construct
  misc_feature 1..20: note = Description of Artificial Sequence: Synthetic oligonucleotide
  misc_feature 1..20: note = Target: SCN10A; (+) strand; PAM type: NRG; PAM sequence: GGG
  source 1..20: mol_type = other DNA
tcagccagggacagtgacag

SEQ ID NO: 30861 - DNA, 20 bp, synthetic construct
  misc_feature 1..20: note = Description of Artificial Sequence: Synthetic oligonucleotide
  misc_feature 1..20: note = Target: SCN10A; (+) strand; PAM type: NRG; PAM sequence: GGG
  source 1..20: mol_type = other DNA
cagccagggacagtgacagg

SEQ ID NO: 30862 - DNA, 20 bp, synthetic construct
  misc_feature 1..20: note = Description of Artificial Sequence: Synthetic oligonucleotide
  misc_feature 1..20: note = Target: SCN10A; (+) strand; PAM type: NRG; PAM sequence: AAG
  source 1..20: mol_type = other DNA
acagtgacagggggatttac

SEQ ID NO: 30863 - DNA, 20 bp, synthetic construct
  misc_feature 1..20: note = Description of Artificial Sequence: Synthetic oligonucleotide
  misc_feature 1..20: note = Target: SCN10A; (+) strand; PAM type: NRG; PAM sequence: AGG
  source 1..20: mol_type = other DNA
cagtgacagggggatttaca

SEQ ID NO: 30864 - DNA, 20 bp, synthetic construct
  misc_feature 1..20: note = Description of Artificial Sequence: Synthetic oligonucleotide
  misc_feature 1..20: note = Target: SCN10A; (+) strand; PAM type: NRG; PAM sequence: AAG
  source 1..20: mol_type = other DNA
aaggctgtcttctttgcctc

SEQ ID NO: 30865 - DNA, 20 bp, synthetic construct
  misc_feature 1..20: note = Description of Artificial Sequence: Synthetic oligonucleotide
  misc_feature 1..20: note = Target: SCN10A; (+) strand; PAM type: NRG; PAM sequence: AGG
  source 1..20: mol_type = other DNA
aggctgtcttctttgcctca

SEQ ID NO: 30866 - DNA, 20 bp, synthetic construct
  misc_feature 1..20: note = Description of Artificial Sequence: Synthetic oligonucleotide
  misc_feature 1..20: note = Target: SCN10A; (+) strand; PAM type: NRG; PAM sequence: TGG
  source 1..20: mol_type = other DNA
ctgtcttctttgcctcaagg

SEQ ID NO: 30867 - DNA, 20 bp, synthetic construct
  misc_feature 1..20: note = Description of Artificial Sequence: Synthetic oligonucleotide
  misc_feature 1..20: note = Target: SCN10A; (+) strand; PAM type: NRG; PAM sequence: GGG
  source 1..20: mol_type = other DNA
tgtcttctttgcctcaaggt

SEQ ID NO: 30868 - DNA, 20 bp, synthetic construct
  misc_feature 1..20: note = Description of Artificial Sequence: Synthetic oligonucleotide
  misc_feature 1..20: note = Target: SCN10A; (+) strand; PAM type: NRG; PAM sequence: CAG
  source 1..20: mol_type = other DNA
ttctttgcctcaaggtggga

SEQ ID NO: 30869 - DNA, 20 bp, synthetic construct
  misc_feature 1..20: note = Description of Artificial Sequence: Synthetic oligonucleotide
  misc_feature 1..20: note = Target: SCN10A; (+) strand; PAM type: NRG; PAM sequence: TGG
  source 1..20: mol_type = other DNA
ctcaaggtgggacagctctt

SEQ ID NO: 30870 - DNA, 20 bp, synthetic construct
  misc_feature 1..20: note = Description of Artificial Sequence: Synthetic oligonucleotide
  misc_feature 1..20: note = Target: SCN10A; (+) strand; PAM type: NRG; PAM sequence: CAG
  source 1..20: mol_type = other DNA
ctttggtgtcctttgtgctt

SEQ ID NO: 30871 - DNA, 20 bp, synthetic construct
  misc_feature 1..20: note = Description of Artificial Sequence: Synthetic oligonucleotide
  misc_feature 1..20: note = Target: SCN10A; (+) strand; PAM type: NRG; PAM sequence: AGG
  source 1..20: mol_type = other DNA
tttggtgtcctttgtgcttc

SEQ ID NO: 30872 - DNA, 20 bp, synthetic construct
  misc_feature 1..20: note = Description of Artificial Sequence: Synthetic oligonucleotide
  misc_feature 1..20: note = Target: SCN10A; (+) strand; PAM type: NRG; PAM sequence: GGG
  source 1..20: mol_type = other DNA
ttggtgtcctttgtgcttca

SEQ ID NO: 30873 - DNA, 20 bp, synthetic construct
  misc_feature 1..20: note = Description of Artificial Sequence: Synthetic oligonucleotide
  misc_feature 1..20: note = Target: SCN10A; (+) strand; PAM type: NRG; PAM sequence: TGG
  source 1..20: mol_type = other DNA
ttgtgcttcagggctttcca

SEQ ID NO: 30874 - DNA, 20 bp, synthetic construct
  misc_feature 1..20: note = Description of Artificial Sequence: Synthetic oligonucleotide
  misc_feature 1..20: note = Target: SCN10A; (+) strand; PAM type: NRG; PAM sequence: GGG
  source 1..20: mol_type = other DNA
tgtgcttcagggctttccat

SEQ ID NO: 30875 - DNA, 20 bp, synthetic construct
  misc_feature 1..20: note = Description of Artificial Sequence: Synthetic oligonucleotide
  misc_feature 1..20: note = Target: SCN10A; (+) strand; PAM type: NRG; PAM sequence: CAG
  source 1..20: mol_type = other DNA
ttcagggctttccatgggat

SEQ ID NO: 30876 - DNA, 20 bp, synthetic construct
  misc_feature 1..20: note = Description of Artificial Sequence: Synthetic oligonucleotide
  misc_feature 1..20: note = Target: SCN10A; (+) strand; PAM type: NRG; PAM sequence: AAG
  source 1..20: mol_type = other DNA
gctttccatgggatcagctg

SEQ ID NO: 30877 - DNA, 20 bp, synthetic construct
  misc_feature 1..20: note = Description of Artificial Sequence: Synthetic oligonucleotide
  misc_feature 1..20: note = Target: SCN10A; (+) strand; PAM type: NRG; PAM sequence: CGG
  source 1..20: mol_type = other DNA
tccatgggatcagctgaagc

SEQ ID NO: 30878 - DNA, 20 bp, synthetic construct
  misc_feature 1..20: note = Description of Artificial Sequence: Synthetic oligonucleotide
  misc_feature 1..20: note = Target: SCN10A; (+) strand; PAM type: NRG; PAM sequence: CAG
  source 1..20: mol_type = other DNA
actgaacccacatcttttct

SEQ ID NO: 30879 - DNA, 20 bp, synthetic construct
  misc_feature 1..20: note = Description of Artificial Sequence: Synthetic oligonucleotide
  misc_feature 1..20: note = Target: SCN10A; (+) strand; PAM type: NRG; PAM sequence: TAG
  source 1..20: mol_type = other DNA
tcagcttccgattctgtgtc

SEQ ID NO: 30880 - DNA, 20 bp, synthetic construct
  misc_feature 1..20: note = Description of Artificial Sequence: Synthetic oligonucleotide
  misc_feature 1..20: note = Target: SCN10A; (+) strand; PAM type: NRG; PAM sequence: AGG
  source 1..20: mol_type = other DNA
cagcttccgattctgtgtct

SEQ ID NO: 30881 - DNA, 20 bp, synthetic construct
  misc_feature 1..20: note = Description of Artificial Sequence: Synthetic oligonucleotide
  misc_feature 1..20: note = Target: SCN10A; (+) strand; PAM type: NRG; PAM sequence: GAG
  source 1..20: mol_type = other DNA
tccgattctgtgtctaggac

SEQ ID NO: 30882 - DNA, 20 bp, synthetic construct
  misc_feature 1..20: note = Description of Artificial Sequence: Synthetic oligonucleotide
  misc_feature 1..20: note = Target: SCN10A; (+) strand; PAM type: NRG; PAM sequence: AGG
  source 1..20: mol_type = other DNA
ccgattctgtgtctaggacg

SEQ ID NO: 30883 - DNA, 20 bp, synthetic construct
  misc_feature 1..20: note = Description of Artificial Sequence: Synthetic oligonucleotide
  misc_feature 1..20: note = Target: SCN10A; (+) strand; PAM type: NRG; PAM sequence: AAG
  source 1..20: mol_type = other DNA
ctgtgtctaggacgaggact

SEQ ID NO: 30884 - DNA, 20 bp, synthetic construct
  misc_feature 1..20: note = Description of Artificial Sequence: Synthetic oligonucleotide
  misc_feature 1..20: note = Target: SCN10A; (+) strand; PAM type: NRG; PAM sequence: TGG
  source 1..20: mol_type = other DNA
gtctaggacgaggactaaga

SEQ ID NO: 30885 - DNA, 20 bp, synthetic construct
  misc_feature 1..20: note = Description of Artificial Sequence: Synthetic oligonucleotide
  misc_feature 1..20: note = Target: SCN10A; (+) strand; PAM type: NRG; PAM sequence: GGG
  source 1..20: mol_type = other DNA
tctaggacgaggactaagat

SEQ ID NO: 30886 - DNA, 20 bp, synthetic construct
  misc_feature 1..20: note = Description of Artificial Sequence: Synthetic oligonucleotide
  misc_feature 1..20: note = Target: SCN10A; (+) strand; PAM type: NRG; PAM sequence: GAG
  source 1..20: mol_type = other DNA
taggacgaggactaagatgg

SEQ ID NO: 30887 - DNA, 20 bp, synthetic construct
  misc_feature 1..20: note = Description of Artificial Sequence: Synthetic oligonucleotide
  misc_feature 1..20: note = Target: SCN10A; (+) strand; PAM type: NRG; PAM sequence: AAG
  source 1..20: mol_type = other DNA
ggagattatccaacgtctct

SEQ ID NO: 30888 - DNA, 20 bp, synthetic construct
  misc_feature 1..20: note = Description of Artificial Sequence: Synthetic oligonucleotide
  misc_feature 1..20: note = Target: SCN10A; (+) strand; PAM type: NRG; PAM sequence: AGG
  source 1..20: mol_type = other DNA
gagattatccaacgtctcta

SEQ ID NO: 30889 - DNA, 20 bp, synthetic construct
  misc_feature 1..20: note = Description of Artificial Sequence: Synthetic oligonucleotide
  misc_feature 1..20: note = Target: SCN10A; (+) strand; PAM type: NRG; PAM sequence: GGG
  source 1..20: mol_type = other DNA
agattatccaacgtctctaa

SEQ ID NO: 30890 - DNA, 20 bp, synthetic construct
  misc_feature 1..20: note = Description of Artificial Sequence: Synthetic oligonucleotide
  misc_feature 1..20: note = Target: SCN10A; (+) strand; PAM type: NRG; PAM sequence: GAG
  source 1..20: mol_type = other DNA
attatccaacgtctctaagg

SEQ ID NO: 30891 - DNA, 20 bp, synthetic construct
  misc_feature 1..20: note = Description of Artificial Sequence: Synthetic oligonucleotide
  misc_feature 1..20: note = Target: SCN10A; (+) strand; PAM type: NRG; PAM sequence: CAG
  source 1..20: mol_type = other DNA
cgtctctaagggagtacaca

SEQ ID NO: 30892 - DNA, 20 bp, synthetic construct
  misc_feature 1..20: note = Description of Artificial Sequence: Synthetic oligonucleotide
  misc_feature 1..20: note = Target: SCN10A; (+) strand; PAM type: NRG; PAM sequence: AGG
  source 1..20: mol_type = other DNA
gtctctaagggagtacacac

SEQ ID NO: 30893 - DNA, 20 bp, synthetic construct
  misc_feature 1..20: note = Description of Artificial Sequence: Synthetic oligonucleotide
  misc_feature 1..20: note = Target: SCN10A; (+) strand; PAM type: NRG; PAM sequence: GGG
  source 1..20: mol_type = other DNA
tctctaagggagtacacaca

SEQ ID NO: 30894 - DNA, 20 bp, synthetic construct
  misc_feature 1..20: note = Description of Artificial Sequence: Synthetic oligonucleotide
  misc_feature 1..20: note = Target: SCN10A; (+) strand; PAM type: NRG; PAM sequence: TAG
  source 1..20: mol_type = other DNA
agggaatattcaatgtgtat

SEQ ID NO: 30895 - DNA, 20 bp, synthetic construct
  misc_feature 1..20: note = Description of Artificial Sequence: Synthetic oligonucleotide
  misc_feature 1..20: note = Target: SCN10A; (+) strand; PAM type: NRG; PAM sequence: AAG
  source 1..20: mol_type = other DNA
gaatattcaatgtgtattag

SEQ ID NO: 30896 - DNA, 20 bp, synthetic construct
  misc_feature 1..20: note = Description of Artificial Sequence: Synthetic oligonucleotide
  misc_feature 1..20: note = Target: SCN10A; (+) strand; PAM type: NRG; PAM sequence: TAG
  source 1..20: mol_type = other DNA
atgtgtattagaagtaaaca

SEQ ID NO: 30897 - DNA, 20 bp, synthetic construct
  misc_feature 1..20: note = Description of Artificial Sequence: Synthetic oligonucleotide
  misc_feature 1..20: note = Target: SCN10A; (+) strand; PAM type: NRG; PAM sequence: GAG
  source 1..20: mol_type = other DNA
gtgtattagaagtaaacata

SEQ ID NO: 30898 - DNA, 20 bp, synthetic construct
  misc_feature 1..20: note = Description of Artificial Sequence: Synthetic oligonucleotide
  misc_feature 1..20: note = Target: SCN10A; (+) strand; PAM type: NRG; PAM sequence: TGG
  source 1..20: mol_type = other DNA
ttagaagtaaacatagagat

SEQ ID NO: 30899 - DNA, 20 bp, synthetic construct
  misc_feature 1..20: note = Description of Artificial Sequence: Synthetic oligonucleotide
  misc_feature 1..20: note = Target: SCN10A; (+) strand; PAM type: NRG; PAM sequence: GAG
  source 1..20: mol_type = other DNA
agtaaacatagagattggtt

SEQ ID NO: 30900 - DNA, 20 bp, synthetic construct
  misc_feature 1..20: note = Description of Artificial Sequence: Synthetic oligonucleotide
  misc_feature 1..20: note = Target: SCN10A; (+) strand; PAM type: NRG; PAM sequence: AAG
  source 1..20: mol_type = other DNA
gattggttgagtaaattata

SEQ ID NO: 30901 - DNA, 20 bp, synthetic construct
  misc_feature 1..20: note = Description of Artificial Sequence: Synthetic oligonucleotide
  misc_feature 1..20: note = Target: SCN10A; (+) strand; PAM type: NRG; PAM sequence: AGG
  source 1..20: mol_type = other DNA
attggttgagtaaattataa

SEQ ID NO: 30902 - DNA, 20 bp, synthetic construct
  misc_feature 1..20: note = Description of Artificial Sequence: Synthetic oligonucleotide
  misc_feature 1..20: note = Target: SCN10A; (+) strand; PAM type: NRG; PAM sequence: TAG
  source 1..20: mol_type = other DNA
aattataaaggaatatgtta

SEQ ID NO: 30903 - DNA, 20 bp, synthetic construct
  misc_feature 1..20: note = Description of Artificial Sequence: Synthetic oligonucleotide
  misc_feature 1..20: note = Target: SCN10A; (+) strand; PAM type: NRG; PAM sequence: GAG
  source 1..20: mol_type = other DNA
atatgttatagccattaaat

SEQ ID NO: 30904 - DNA, 20 bp, synthetic construct
  misc_feature 1..20: note = Description of Artificial Sequence: Synthetic oligonucleotide
  misc_feature 1..20: note = Target: SCN10A; (+) strand; PAM type: NRG; PAM sequence: GAG
  source 1..20: mol_type = other DNA
gccattaaatgagataatat

SEQ ID NO: 30905 - DNA, 20 bp, synthetic construct
  misc_feature 1..20: note = Description of Artificial Sequence: Synthetic oligonucleotide
  misc_feature 1..20: note = Target: SCN10A; (+) strand; PAM type: NRG; PAM sequence: GAG
  source 1..20: mol_type = other DNA
ataatatgagactatttact

SEQ ID NO: 30906 - DNA, 20 bp, synthetic construct
  misc_feature 1..20: note = Description of Artificial Sequence: Synthetic oligonucleotide
  misc_feature 1..20: note = Target: SCN10A; (+) strand; PAM type: NRG; PAM sequence: GAG
  source 1..20: mol_type = other DNA
tttactgagaaaaatgtact

SEQ ID NO: 30907 - DNA, 20 bp, synthetic construct
  misc_feature 1..20: note = Description of Artificial Sequence: Synthetic oligonucleotide
  misc_feature 1..20: note = Target: SCN10A; (+) strand; PAM type: NRG; PAM sequence: AGG
  source 1..20: mol_type = other DNA
ttactgagaaaaatgtactg

SEQ ID NO: 30908 - DNA, 20 bp, synthetic construct
  misc_feature 1..20: note = Description of Artificial Sequence: Synthetic oligonucleotide
  misc_feature 1..20: note = Target: SCN10A; (+) strand; PAM type: NRG; PAM sequence: TAG
  source 1..20: mol_type = other DNA
agaaaaatgtactgaggtta

SEQ ID NO: 30909 - DNA, 20 bp, synthetic construct
  misc_feature 1..20: note = Description of Artificial Sequence: Synthetic oligonucleotide
  misc_feature 1..20: note = Target: SCN10A; (+) strand; PAM type: NRG; PAM sequence: TGG
  source 1..20: mol_type = other DNA
ggttatagaatgcataaatg

SEQ ID NO: 30910 - DNA, 20 bp, synthetic construct
  misc_feature 1..20: note = Description of Artificial Sequence: Synthetic oligonucleotide
  misc_feature 1..20: note = Target: SCN10A; (+) strand; PAM type: NRG; PAM sequence: AAG
  source 1..20: mol_type = other DNA
tatgtgtatattttatgcat

SEQ ID NO: 30911 - DNA, 20 bp, synthetic construct
  misc_feature 1..20: note = Description of Artificial Sequence: Synthetic oligonucleotide
  misc_feature 1..20: note = Target: SCN10A; (+) strand; PAM type: NRG; PAM sequence: AAG
  source 1..20: mol_type = other DNA
tgtatattttatgcataagc

SEQ ID NO: 30912 - DNA, 20 bp, synthetic construct
  misc_feature 1..20: note = Description of Artificial Sequence: Synthetic oligonucleotide
  misc_feature 1..20: note = Target: SCN10A; (+) strand; PAM type: NRG; PAM sequence: GAG
  source 1..20: mol_type = other DNA
attttatgcataagcaagat

SEQ ID NO: 30913 - DNA, 20 bp, synthetic construct
  misc_feature 1..20: note = Description of Artificial Sequence: Synthetic oligonucleotide
  misc_feature 1..20: note = Target: SCN10A; (+) strand; PAM type: NRG; PAM sequence: AAG
  source 1..20: mol_type = other DNA
tatgcataagcaagatgaga

SEQ ID NO: 30914 - DNA, 20 bp, synthetic construct
  misc_feature 1..20: note = Description of Artificial Sequence: Synthetic oligonucleotide
  misc_feature 1..20: note = Target: SCN10A; (+) strand; PAM type: NRG; PAM sequence: GAG
  source 1..20: mol_type = other DNA
tgcataagcaagatgagaaa

SEQ ID NO: 30915 - DNA, 20 bp, synthetic construct
  misc_feature 1..20: note = Description of Artificial Sequence: Synthetic oligonucleotide
  misc_feature 1..20: note = Target: SCN10A; (+) strand; PAM type: NRG; PAM sequence: AGG
  source 1..20: mol_type = other DNA
gcataagcaagatgagaaag

SEQ ID NO: 30916 - DNA, 20 bp, synthetic construct
  misc_feature 1..20: note = Description of Artificial Sequence: Synthetic oligonucleotide
  misc_feature 1..20: note = Target: SCN10A; (+) strand; PAM type: NRG; PAM sequence: CAG
  source 1..20: mol_type = other DNA
aagatgagaaagaggtatac

SEQ ID NO: 30917 - DNA, 20 bp, synthetic construct
  misc_feature 1..20: note = Description of Artificial Sequence: Synthetic oligonucleotide
  misc_feature 1..20: note = Target: SCN10A; (+) strand; PAM type: NRG; PAM sequence: AAG
  source 1..20: mol_type = other DNA
aggtataccagcatgttttc

SEQ ID NO: 30918 - DNA, 20 bp, synthetic construct
  misc_feature 1..20: note = Description of Artificial Sequence: Synthetic oligonucleotide
  misc_feature 1..20: note = Target: SCN10A; (+) strand; PAM type: NRG; PAM sequence: GAG
  source 1..20: mol_type = other DNA
ataccagcatgttttcaagt

SEQ ID NO: 30919 - DNA, 20 bp, synthetic construct
  misc_feature 1..20: note = Description of Artificial Sequence: Synthetic oligonucleotide
  misc_feature 1..20: note = Target: SCN10A; (+) strand; PAM type: NRG; PAM sequence: GAG
  source 1..20: mol_type = other DNA
tttcaagtgagtttctcttt

SEQ ID NO: 30920 - DNA, 20 bp, synthetic construct
  misc_feature 1..20: note = Description of Artificial Sequence: Synthetic oligonucleotide
  misc_feature 1..20: note = Target: SCN10A; (+) strand; PAM type: NRG; PAM sequence: TAG
  source 1..20: mol_type = other DNA
gtgagtttctctttgagtga

SEQ ID NO: 30921 - DNA, 20 bp, synthetic construct
  misc_feature 1..20: note = Description of Artificial Sequence: Synthetic oligonucleotide
  misc_feature 1..20: note = Target: SCN10A; (+) strand; PAM type: NRG; PAM sequence: AGG
  source 1..20: mol_type = other DNA
tgagtttctctttgagtgat

SEQ ID NO: 30922 - DNA, 20 bp, synthetic construct
  misc_feature 1..20: note = Description of Artificial Sequence: Synthetic oligonucleotide
  misc_feature 1..20: note = Target: SCN10A; (+) strand; PAM type: NRG; PAM sequence: GGG
  source 1..20: mol_type = other DNA
gagtttctctttgagtgata

SEQ ID NO: 30923 - DNA, 20 bp, synthetic construct
  misc_feature 1..20: note = Description of Artificial Sequence: Synthetic oligonucleotide
  misc_feature 1..20: note = Target: SCN10A; (+) strand; PAM type: NRG; PAM sequence: TGG
  source 1..20: mol_type = other DNA
ctctttgagtgatagggaaa

SEQ ID NO: 30924 - DNA, 20 bp, synthetic construct
  misc_feature 1..20: note = Description of Artificial Sequence: Synthetic oligonucleotide
  misc_feature 1..20: note = Target: SCN10A; (+) strand; PAM type: NRG; PAM sequence: AAG
  source 1..20: mol_type = other DNA
tacctttttctataatttcc

SEQ ID NO: 30925 - DNA, 20 bp, synthetic construct
  misc_feature 1..20: note = Description of Artificial Sequence: Synthetic oligonucleotide
  misc_feature 1..20: note = Target: SCN10A; (+) strand; PAM type: NRG; PAM sequence: TGG
  source 1..20: mol_type = other DNA
ataatttccaagtatttttt

SEQ ID NO: 30926 - DNA, 20 bp, synthetic construct
  misc_feature 1..20: note = Description of Artificial Sequence: Synthetic oligonucleotide
  misc_feature 1..20: note = Target: SCN10A; (+) strand; PAM type: NRG; PAM sequence: CAG
  source 1..20: mol_type = other DNA
tttttggtactttactttgt

SEQ ID NO: 30927 - DNA, 20 bp, synthetic construct
  misc_feature 1..20: note = Description of Artificial Sequence: Synthetic oligonucleotide
  misc_feature 1..20: note = Target: SCN10A; (+) strand; PAM type: NRG; PAM sequence: AAG
  source 1..20: mol_type = other DNA
aaaatgcatgttatttttaa

SEQ ID NO: 30928 - DNA, 20 bp, synthetic construct
  misc_feature 1..20: note = Description of Artificial Sequence: Synthetic oligonucleotide
  misc_feature 1..20: note = Target: SCN10A; (+) strand; PAM type: NRG; PAM sequence: AGG
  source 1..20: mol_type = other DNA
aaatgcatgttatttttaaa

SEQ ID NO: 30929 - DNA, 20 bp, synthetic construct
  misc_feature 1..20: note = Description of Artificial Sequence: Synthetic oligonucleotide
  misc_feature 1..20: note = Target: SCN10A; (+) strand; PAM type: NRG; PAM sequence: AAG
  source 1..20: mol_type = other DNA
ttatttttaaaaggtactca

SEQ ID NO: 30930 - DNA, 20 bp, synthetic construct
  misc_feature 1..20: note = Description of Artificial Sequence: Synthetic oligonucleotide
  misc_feature 1..20: note = Target: SCN10A; (+) strand; PAM type: NRG; PAM sequence: AAG
  source 1..20: mol_type = other DNA
ttaaaaggtactcaaagtga

SEQ ID NO: 30931 - DNA, 20 bp, synthetic construct
  misc_feature 1..20: note = Description of Artificial Sequence: Synthetic oligonucleotide
  misc_feature 1..20: note = Target: SCN10A; (+) strand; PAM type: NRG; PAM sequence: AAG
  source 1..20: mol_type = other DNA
gtactcaaagtgaaagccta

SEQ ID NO: 30932 - DNA, 20 bp, synthetic construct
  misc_feature 1..20: note = Description of Artificial Sequence: Synthetic oligonucleotide
  misc_feature 1..20: note = Target: SCN10A; (+) strand; PAM type: NRG; PAM sequence: AAG
  source 1..20: mol_type = other DNA
ctcaaagtgaaagcctaaag

SEQ ID NO: 30933 - DNA, 20 bp, synthetic construct
  misc_feature 1..20: note = Description of Artificial Sequence: Synthetic oligonucleotide
  misc_feature 1..20: note = Target: SCN10A; (+) strand; PAM type: NRG; PAM sequence: AGG
  source 1..20: mol_type = other DNA
tcaaagtgaaagcctaaaga

SEQ ID NO: 30934 - DNA, 20 bp, synthetic construct
  misc_feature 1..20: note = Description of Artificial Sequence: Synthetic oligonucleotide
  misc_feature 1..20: note = Target: SCN10A; (+) strand; PAM type: NRG; PAM sequence: TGG
  source 1..20: mol_type = other DNA
agcctaaagaaggctaaatt

SEQ ID NO: 30935 - DNA, 20 bp, synthetic construct
  misc_feature 1..20: note = Description of Artificial Sequence: Synthetic oligonucleotide
  misc_feature 1..20: note = Target: SCN10A; (+) strand; PAM type: NRG; PAM sequence: CAG
  source 1..20: mol_type = other DNA
aagaaggctaaatttggtgc

SEQ ID NO: 30936 - DNA, 20 bp, synthetic construct
  misc_feature 1..20: note = Description of Artificial Sequence: Synthetic oligonucleotide
  misc_feature 1..20: note = Target: SCN10A; (+) strand; PAM type: NRG; PAM sequence: CAG
  source 1..20: mol_type = other DNA
aaatttggtgccagcctgtt

SEQ ID NO: 30937 - DNA, 20 bp, synthetic construct
  misc_feature 1..20: note = Description of Artificial Sequence: Synthetic oligonucleotide
  misc_feature 1..20: note = Target: SCN10A; (+) strand; PAM type: NRG; PAM sequence: CAG
  source 1..20: mol_type = other DNA
ggtgccagcctgttcagtcc

SEQ ID NO: 30938 - DNA, 20 bp, synthetic construct
  misc_feature 1..20: note = Description of Artificial Sequence: Synthetic oligonucleotide
  misc_feature 1..20: note = Target: SCN10A; (+) strand; PAM type: NRG; PAM sequence: AGG
  source 1..20: mol_type = other DNA
gtgccagcctgttcagtccc

SEQ ID NO: 30939 - DNA, 20 bp, synthetic construct
  misc_feature 1..20: note = Description of Artificial Sequence: Synthetic oligonucleotide
  misc_feature 1..20: note = Target: SCN10A; (+) strand; PAM type: NRG; PAM sequence: GGG
  source 1..20: mol_type = other DNA
tgccagcctgttcagtccca

SEQ ID NO: 30940 - DNA, 20 bp, synthetic construct
  misc_feature 1..20: note = Description of Artificial Sequence: Synthetic oligonucleotide
  misc_feature 1..20: note = Target: SCN10A; (+) strand; PAM type: NRG; PAM sequence: GGG
  source 1..20: mol_type = other DNA
gccagcctgttcagtcccag

SEQ ID NO: 30941 - DNA, 20 bp, synthetic construct
  misc_feature 1..20: note = Description of Artificial Sequence: Synthetic oligonucleotide
  misc_feature 1..20: note = Target: SCN10A; (+) strand; PAM type: NRG; PAM sequence: AAG
  source 1..20: mol_type = other DNA
agcctgttcagtcccagggg

SEQ ID NO: 30942 - DNA, 20 bp, synthetic construct
  misc_feature 1..20: note = Description of Artificial Sequence: Synthetic oligonucleotide
  misc_feature 1..20: note = Target: SCN10A; (+) strand; PAM type: NRG; PAM sequence: AGG
  source 1..20: mol_type = other DNA
gcctgttcagtcccagggga

SEQ ID NO: 30943 - DNA, 20 bp, synthetic construct
  misc_feature 1..20: note = Description of Artificial Sequence: Synthetic oligonucleotide
  misc_feature 1..20: note = Target: SCN10A; (+) strand; PAM type: NRG; PAM sequence: GAG
  source 1..20: mol_type = other DNA
ctgttcagtcccaggggaag

SEQ ID NO: 30944 - DNA, 20 bp, synthetic construct
  misc_feature 1..20: note = Description of Artificial Sequence: Synthetic oligonucleotide
  misc_feature 1..20: note = Target: SCN10A; (+) strand; PAM type: NRG; PAM sequence: TGG
  source 1..20: mol_type = other DNA
tcagtcccaggggaaggaga

SEQ ID NO: 30945 - DNA, 20 bp, synthetic construct
  misc_feature 1..20: note = Description of Artificial Sequence: Synthetic oligonucleotide
  misc_feature 1..20: note = Target: SCN10A; (+) strand; PAM type: NRG; PAM sequence: GGG
  source 1..20: mol_type = other DNA
cagtcccaggggaaggagat

SEQ ID NO: 30946 - DNA, 20 bp, synthetic construct
  misc_feature 1..20: note = Description of Artificial Sequence: Synthetic oligonucleotide
  misc_feature 1..20: note = Target: SCN10A; (+) strand; PAM type: NRG; PAM sequence: GAG
  source 1..20: mol_type = other DNA
gtcccaggggaaggagatgg

SEQ ID NO: 30947 - DNA, 20 bp, synthetic construct
  misc_feature 1..20: note = Description of Artificial Sequence: Synthetic oligonucleotide
  misc_feature 1..20: note = Target: SCN10A; (+) strand; PAM type: NRG; PAM sequence: AGG
  source 1..20: mol_type = other DNA
tcccaggggaaggagatggg

SEQ ID NO: 30948 - DNA, 20 bp, synthetic construct
  misc_feature 1..20: note = Description of Artificial Sequence: Synthetic oligonucleotide
  misc_feature 1..20: note = Target: SCN10A; (+) strand; PAM type: NRG; PAM sequence: GGG
  source 1..20: mol_type = other DNA
cccaggggaaggagatggga

SEQ ID NO: 30949 - DNA, 20 bp, synthetic construct
  misc_feature 1..20: note = Description of Artificial Sequence: Synthetic oligonucleotide
  misc_feature 1..20: note = Target: SCN10A; (+) strand; PAM type: NRG; PAM sequence: AAG
  source 1..20: mol_type = other DNA
aggggaaggagatgggaggg

SEQ ID NO: 30950 - DNA, 20 bp, synthetic construct
  misc_feature 1..20: note = Description of Artificial Sequence: Synthetic oligonucleotide
  misc_feature 1..20: note = Target: SCN10A; (+) strand; PAM type: NRG; PAM sequence: AGG
  source 1..20: mol_type = other DNA
ggggaaggagatgggaggga

SEQ ID NO: 30951 - DNA, 20 bp, synthetic construct
  misc_feature 1..20: note = Description of Artificial Sequence: Synthetic oligonucleotide
  misc_feature 1..20: note = Target: SCN10A; (+) strand; PAM type: NRG; PAM sequence: GGG
  source 1..20: mol_type = other DNA
gggaaggagatgggagggaa

SEQ ID NO: 30952 - DNA, 20 bp, synthetic construct
  misc_feature 1..20: note = Description of Artificial Sequence: Synthetic oligonucleotide
  misc_feature 1..20: note = Target: SCN10A; (+) strand; PAM type: NRG; PAM sequence: GAG
  source 1..20: mol_type = other DNA
gaaggagatgggagggaagg

SEQ ID NO: 30953 - DNA, 20 bp, synthetic construct
  misc_feature 1..20: note = Description of Artificial Sequence: Synthetic oligonucleotide
  misc_feature 1..20: note = Target: SCN10A; (+) strand; PAM type: NRG; PAM sequence: GAG
  source 1..20: mol_type = other DNA
aggagatgggagggaaggga

SEQ ID NO: 30954 - DNA, 20 bp, synthetic construct
  misc_feature 1..20: note = Description of Artificial Sequence: Synthetic oligonucleotide
  misc_feature 1..20: note = Target: SCN10A; (+) strand; PAM type: NRG; PAM sequence: CAG
  source 1..20: mol_type = other DNA
tgggagggaagggagagctg

SEQ ID NO: 30955 - DNA, 20 bp, synthetic construct
  misc_feature 1..20: note = Description of Artificial Sequence: Synthetic oligonucleotide
  misc_feature 1..20: note = Target: SCN10A; (+) strand; PAM type: NRG; PAM sequence: AGG
  source 1..20: mol_type = other DNA
gggagggaagggagagctgc

SEQ ID NO: 30956 - DNA, 20 bp, synthetic construct
  misc_feature 1..20: note = Description of Artificial Sequence: Synthetic oligonucleotide
  misc_feature 1..20: note = Target: SCN10A; (+) strand; PAM type: NRG; PAM sequence: GGG
  source 1..20: mol_type = other DNA
ggagggaagggagagctgca

SEQ ID NO: 30957 - DNA, 20 bp, synthetic construct
  misc_feature 1..20: note = Description of Artificial Sequence: Synthetic oligonucleotide
  misc_feature 1..20: note = Target: SCN10A; (+) strand; PAM type: NRG; PAM sequence: GGG
  source 1..20: mol_type = other DNA
gagggaagggagagctgcag

SEQ ID NO: 30958 - DNA, 20 bp, synthetic construct
  misc_feature 1..20: note = Description of Artificial Sequence: Synthetic oligonucleotide
  misc_feature 1..20: note = Target: SCN10A; (+) strand; PAM type: NRG; PAM sequence: GGG
  source 1..20: mol_type = other DNA
agggaagggagagctgcagg

SEQ ID NO: 30959 - DNA, 20 bp, synthetic construct
  misc_feature 1..20: note = Description of Artificial Sequence: Synthetic oligonucleotide
  misc_feature 1..20: note = Target: SCN10A; (+) strand; PAM type: NRG; PAM sequence: CGG
  source 1..20: mol_type = other DNA
gaagggagagctgcaggggg

SEQ ID NO: 30960 - DNA, 20 bp, synthetic construct
  misc_feature 1..20: note = Description of Artificial Sequence: Synthetic oligonucleotide
  misc_feature 1..20: note = Target: SCN10A; (+) strand; PAM type: NRG; PAM sequence: GGG
  source 1..20: mol_type = other DNA
aagggagagctgcagggggc

SEQ ID NO: 30961 - DNA, 20 bp, synthetic construct
  misc_feature 1..20: note = Description of Artificial Sequence: Synthetic oligonucleotide
  misc_feature 1..20: note = Target: SCN10A; (+) strand; PAM type: NRG; PAM sequence: TGG
  source 1..20: mol_type = other DNA
gagagctgcagggggcgggc

SEQ ID NO: 30962 - DNA, 20 bp, synthetic construct
  misc_feature 1..20: note = Description of Artificial Sequence: Synthetic oligonucleotide
  misc_feature 1..20: note = Target: SCN10A; (+) strand; PAM type: NRG; PAM sequence: GGG
  source 1..20: mol_type = other DNA
agagctgcagggggcgggct

SEQ ID NO: 30963 - DNA, 20 bp, synthetic construct
  misc_feature 1..20: note = Description of Artificial Sequence: Synthetic oligonucleotide
  misc_feature 1..20: note = Target: SCN10A; (+) strand; PAM type: NRG; PAM sequence: TGG
  source 1..20: mol_type = other DNA
ctgcagggggcgggctgggc

SEQ ID NO: 30964 - DNA, 20 bp, synthetic construct
  misc_feature 1..20: note = Description of Artificial Sequence: Synthetic oligonucleotide
  misc_feature 1..20: note = Target: SCN10A; (+) strand; PAM type: NRG; PAM sequence: CAG
  source 1..20: mol_type = other DNA
gggggcgggctgggctggcg

SEQ ID NO: 30965 - DNA, 20 bp, synthetic construct
  misc_feature 1..20: note = Description of Artificial Sequence: Synthetic oligonucleotide
  misc_feature 1..20: note = Target: SCN10A; (+) strand; PAM type: NRG; PAM sequence: CAG
  source 1..20: mol_type = other DNA
gctgggctggcgcagtgctg

SEQ ID NO: 30966 - DNA, 20 bp, synthetic construct
  misc_feature 1..20: note = Description of Artificial Sequence: Synthetic oligonucleotide
  misc_feature 1..20: note = Target: SCN10A; (+) strand; PAM type: NRG; PAM sequence: AGG
  source 1..20: mol_type = other DNA
ctgggctggcgcagtgctgc

SEQ ID NO: 30967 - DNA, 20 bp, synthetic construct
  misc_feature 1..20: note = Description of Artificial Sequence: Synthetic oligonucleotide
  misc_feature 1..20: note = Target: SCN10A; (+) strand; PAM type: NRG; PAM sequence: GAG
  source 1..20: mol_type = other DNA
tggcgcagtgctgcaggtct

SEQ ID NO: 30968 - DNA, 20 bp, synthetic construct
  misc_feature 1..20: note = Description of Artificial Sequence: Synthetic oligonucleotide
  misc_feature 1..20: note = Target: SCN10A; (+) strand; PAM type: NRG; PAM sequence: TGG
  source 1..20: mol_type = other DNA
tgcaggtctgagcttcctcc

SEQ ID NO: 30969 - DNA, 20 bp, synthetic construct
  misc_feature 1..20: note = Description of Artificial Sequence: Synthetic oligonucleotide
  misc_feature 1..20: note = Target: SCN10A; (+) strand; PAM type: NRG; PAM sequence: GGG
  source 1..20: mol_type = other DNA
gcaggtctgagcttcctcct

SEQ ID NO: 30970 - DNA, 20 bp, synthetic construct
  misc_feature 1..20: note = Description of Artificial Sequence: Synthetic oligonucleotide
  misc_feature 1..20: note = Target: SCN10A; (+) strand; PAM type: NRG; PAM sequence: TGG
  source 1..20: mol_type = other DNA
tgagcttcctcctgggaatg

SEQ ID NO: 30971 - DNA, 20 bp, synthetic construct
  misc_feature 1..20: note = Description of Artificial Sequence: Synthetic oligonucleotide
  misc_feature 1..20: note = Target: SCN10A; (+) strand; PAM type: NRG; PAM sequence: GGG
  source 1..20: mol_type = other DNA
gagcttcctcctgggaatgt

SEQ ID NO: 30972 - DNA, 20 bp, synthetic construct
  misc_feature 1..20: note = Description of Artificial Sequence: Synthetic oligonucleotide
  misc_feature 1..20: note = Target: SCN10A; (+) strand; PAM type: NRG; PAM sequence: GGG
  source 1..20: mol_type = other DNA
agcttcctcctgggaatgtg

SEQ ID NO: 30973 - DNA, 20 bp, synthetic construct
  misc_feature 1..20: note = Description of Artificial Sequence: Synthetic oligonucleotide
  misc_feature 1..20: note = Target: SCN10A; (+) strand; PAM type: NRG; PAM sequence: GGG
  source 1..20: mol_type = other DNA
gcttcctcctgggaatgtgg

SEQ ID NO: 30974 - DNA, 20 bp, synthetic construct
  misc_feature 1..20: note = Description of Artificial Sequence: Synthetic oligonucleotide
  misc_feature 1..20: note = Target: SCN10A; (+) strand; PAM type: NRG; PAM sequence: GGG
  source 1..20: mol_type = other DNA
cttcctcctgggaatgtggg

SEQ ID NO: 30975 - DNA, 20 bp, synthetic construct
  misc_feature 1..20: note = Description of Artificial Sequence: Synthetic oligonucleotide
  misc_feature 1..20: note = Target: SCN10A; (+) strand; PAM type: NRG; PAM sequence: TGG
  source 1..20: mol_type = other DNA
cctcctgggaatgtgggggg

SEQ ID NO: 30976 - DNA, 20 bp, synthetic construct
  misc_feature 1..20: note = Description of Artificial Sequence: Synthetic oligonucleotide
  misc_feature 1..20: note = Target: SCN10A; (+) strand; PAM type: NRG; PAM sequence: CGG
  source 1..20: mol_type = other DNA
tgggaatgtggggggtggac

SEQ ID NO: 30977 - DNA, 20 bp, synthetic construct
  misc_feature 1..20: note = Description of Artificial Sequence: Synthetic oligonucleotide
  misc_feature 1..20: note = Target: SCN10A; (+) strand; PAM type: NRG; PAM sequence: GGG
  source 1..20: mol_type = other DNA
gggaatgtggggggtggacc

SEQ ID NO: 30978 - DNA, 20 bp, synthetic construct
  misc_feature 1..20: note = Description of Artificial Sequence: Synthetic oligonucleotide
  misc_feature 1..20: note = Target: SCN10A; (+) strand; PAM type: NRG; PAM sequence: GGG
  source 1..20: mol_type = other DNA
ggaatgtggggggtggaccg

SEQ ID NO: 30979 - DNA, 20 bp, synthetic construct
  misc_feature 1..20: note = Description of Artificial Sequence: Synthetic oligonucleotide
  misc_feature 1..20: note = Target: SCN10A; (+) strand; PAM type: NRG; PAM sequence: AAG
  source 1..20: mol_type = other DNA
ggggggtggaccggggtgtg

SEQ ID NO: 30980 - DNA, 20 bp, synthetic construct
  misc_feature 1..20: note = Description of Artificial Sequence: Synthetic oligonucleotide
  misc_feature 1..20: note = Target: SCN10A; (+) strand; PAM type: NRG; PAM sequence: GAG
  source 1..20: mol_type = other DNA
ggggtggaccggggtgtgaa

SEQ ID NO: 30981 - DNA, 20 bp, synthetic construct
  misc_feature 1..20: note = Description of Artificial Sequence: Synthetic oligonucleotide
  misc_feature 1..20: note = Target: SCN10A; (+) strand; PAM type: NRG; PAM sequence: AAG
  source 1..20: mol_type = other DNA
gtggaccggggtgtgaagag

SEQ ID NO: 30982 - DNA, 20 bp, synthetic construct
  misc_feature 1..20: note = Description of Artificial Sequence: Synthetic oligonucleotide
  misc_feature 1..20: note = Target: SCN10A; (+) strand; PAM type: NRG; PAM sequence: AGG
  source 1..20: mol_type = other DNA
tggaccggggtgtgaagaga

SEQ ID NO: 30983 - DNA, 20 bp, synthetic construct
  misc_feature 1..20: note = Description of Artificial Sequence: Synthetic oligonucleotide
  misc_feature 1..20: note = Target: SCN10A; (+) strand; PAM type: NRG; PAM sequence: GGG
  source 1..20: mol_type = other DNA
ggaccggggtgtgaagagaa

SEQ ID NO: 30984 - DNA, 20 bp, synthetic construct
  misc_feature 1..20: note = Description of Artificial Sequence: Synthetic oligonucleotide
  misc_feature 1..20: note = Target: SCN10A; (+) strand; PAM type: NRG; PAM sequence: GGG
  source 1..20: mol_type = other DNA
gaccggggtgtgaagagaag

SEQ ID NO: 30985 - DNA, 20 bp, synthetic construct
  misc_feature 1..20: note = Description of Artificial Sequence: Synthetic oligonucleotide
  misc_feature 1..20: note = Target: SCN10A; (+) strand; PAM type: NRG; PAM sequence: GGG
  source 1..20: mol_type = other DNA
accggggtgtgaagagaagg

SEQ ID NO: 30986 - DNA, 20 bp, synthetic construct
  misc_feature 1..20: note = Description of Artificial Sequence: Synthetic oligonucleotide
  misc_feature 1..20: note = Target: SCN10A; (+) strand; PAM type: NRG; PAM sequence: TAG
  source 1..20: mol_type = other DNA
gggtgtgaagagaagggggc

SEQ ID NO: 30987 - DNA, 20 bp, synthetic construct
  misc_feature 1..20: note = Description of Artificial Sequence: Synthetic oligonucleotide
  misc_feature 1..20: note = Target: SCN10A; (+) strand; PAM type: NRG; PAM sequence: GAG
  source 1..20: mol_type = other DNA
gtgtgaagagaagggggcta

SEQ ID NO: 30988 - DNA, 20 bp, synthetic construct
  misc_feature 1..20: note = Description of Artificial Sequence: Synthetic oligonucleotide
  misc_feature 1..20: note = Target: SCN10A; (+) strand; PAM type: NRG; PAM sequence: GAG
  source 1..20: mol_type = other DNA
gtgaagagaagggggctaga

SEQ ID NO: 30989 - DNA, 20 bp, synthetic construct
  misc_feature 1..20: note = Description of Artificial Sequence: Synthetic oligonucleotide
  misc_feature 1..20: note = Target: SCN10A; (+) strand; PAM type: NRG; PAM sequence: GAG
  source 1..20: mol_type = other DNA
gaagagaagggggctagaga

SEQ ID NO: 30990 - DNA, 20 bp, synthetic construct
  misc_feature 1..20: note = Description of Artificial Sequence: Synthetic oligonucleotide
  misc_feature 1..20: note = Target: SCN10A; (+) strand; PAM type: NRG; PAM sequence: AAG
  source 1..20: mol_type = other DNA
gagaagggggctagagagag

SEQ ID NO: 30991 - DNA, 20 bp, synthetic construct
  misc_feature 1..20: note = Description of Artificial Sequence: Synthetic oligonucleotide
  misc_feature 1..20: note = Target: SCN10A; (+) strand; PAM type: NRG; PAM sequence: AGG
  source 1..20: mol_type = other DNA
agaagggggctagagagaga

SEQ ID NO: 30992 - DNA, 20 bp, synthetic construct
  misc_feature 1..20: note = Description of Artificial Sequence: Synthetic oligonucleotide
  misc_feature 1..20: note = Target: SCN10A; (+) strand; PAM type: NRG; PAM sequence: GGG
  source 1..20: mol_type = other DNA
gaagggggctagagagagaa

SEQ ID NO: 30993 - DNA, 20 bp, synthetic construct
  misc_feature 1..20: note = Description of Artificial Sequence: Synthetic oligonucleotide
  misc_feature 1..20: note = Target: SCN10A; (+) strand; PAM type: NRG; PAM sequence: GAG
  source 1..20: mol_type = other DNA
agggggctagagagagaagg

SEQ ID NO: 30994 - DNA, 20 bp, synthetic construct
  misc_feature 1..20: note = Description of Artificial Sequence: Synthetic oligonucleotide
  misc_feature 1..20: note = Target: SCN10A; (+) strand; PAM type: NRG; PAM sequence: AGG
  source 1..20: mol_type = other DNA
gggggctagagagagaaggg

SEQ ID NO: 30995 - DNA, 20 bp, synthetic construct
  misc_feature 1..20: note = Description of Artificial Sequence: Synthetic oligonucleotide
  misc_feature 1..20: note = Target: SCN10A; (+) strand; PAM type: NRG; PAM sequence: GGG
  source 1..20: mol_type = other DNA
ggggctagagagagaaggga

SEQ ID NO: 30996 - DNA, 20 bp, synthetic construct
  misc_feature 1..20: note = Description of Artificial Sequence: Synthetic oligonucleotide
  misc_feature 1..20: note = Target: SCN10A; (+) strand; PAM type: NRG; PAM sequence: GAG
  source 1..20: mol_type = other DNA
ggctagagagagaagggagg

SEQ ID NO: 30997 - DNA, 20 bp, synthetic construct
  misc_feature 1..20: note = Description of Artificial Sequence: Synthetic oligonucleotide
  misc_feature 1..20: note = Target: SCN10A; (+) strand; PAM type: NRG; PAM sequence: AAG
  source 1..20: mol_type = other DNA
agagagagaagggagggagc

SEQ ID NO: 30998 - DNA, 20 bp, synthetic construct
  misc_feature 1..20: note = Description of Artificial Sequence: Synthetic oligonucleotide
  misc_feature 1..20: note = Target: SCN10A; (+) strand; PAM type: NRG; PAM sequence: AGG
  source 1..20: mol_type = other DNA
gagagagaagggagggagca

SEQ ID NO: 30999 - DNA, 20 bp, synthetic construct
  misc_feature 1..20: note = Description of Artificial Sequence: Synthetic oligonucleotide
  misc_feature 1..20: note = Target: SCN10A; (+) strand; PAM type: NRG; PAM sequence: GGG
  source 1..20: mol_type = other DNA
agagagaagggagggagcaa

SEQ ID NO: 31000 - DNA, 20 bp, synthetic construct
  misc_feature 1..20: note = Description of Artificial Sequence: Synthetic oligonucleotide
  misc_feature 1..20: note = Target: SCN10A; (+) strand; PAM type: NRG; PAM sequence: GAG
  source 1..20: mol_type = other DNA
agagaagggagggagcaagg

SEQ ID NO: 31001 - DNA, 20 bp, synthetic construct
  misc_feature 1..20: note = Description of Artificial Sequence: Synthetic oligonucleotide
  misc_feature 1..20: note = Target: SCN10A; (+) strand; PAM type: NRG; PAM sequence: GAG
  source 1..20: mol_type = other DNA
agaagggagggagcaaggga

SEQ ID NO: 31002 - DNA, 20 bp, synthetic construct
  misc_feature 1..20: note = Description of Artificial Sequence: Synthetic oligonucleotide
  misc_feature 1..20: note = Target: SCN10A; (+) strand; PAM type: NRG; PAM sequence: CAG
  source 1..20: mol_type = other DNA
agggagggagcaagggagag

SEQ ID NO: 31003 - DNA, 20 bp, synthetic construct
  misc_feature 1..20: note = Description of Artificial Sequence: Synthetic oligonucleotide
  misc_feature 1..20: note = Target: SCN10A; (+) strand; PAM type: NRG; PAM sequence: GAG
  source 1..20: mol_type = other DNA
ggagggagcaagggagagca

SEQ ID NO: 31004 - DNA, 20 bp, synthetic construct
  misc_feature 1..20: note = Description of Artificial Sequence: Synthetic oligonucleotide
  misc_feature 1..20: note = Target: SCN10A; (+) strand; PAM type: NRG; PAM sequence: AAG
  source 1..20: mol_type = other DNA
gggagcaagggagagcagag

SEQ ID NO: 31005 - DNA, 20 bp, synthetic construct
  misc_feature 1..20: note = Description of Artificial Sequence: Synthetic oligonucleotide
  misc_feature 1..20: note = Target: SCN10A; (+) strand; PAM type: NRG; PAM sequence: GAG
  source 1..20: mol_type = other DNA
ggagagcagagaagcaaaat

SEQ ID NO: 31006 - DNA, 20 bp, synthetic construct
  misc_feature 1..20: note = Description of Artificial Sequence: Synthetic oligonucleotide
  misc_feature 1..20: note = Target: SCN10A; (+) strand; PAM type: NRG; PAM sequence: AGG
  source 1..20: mol_type = other DNA
gagagcagagaagcaaaatg

SEQ ID NO: 31007 - DNA, 20 bp, synthetic construct
  misc_feature 1..20: note = Description of Artificial Sequence: Synthetic oligonucleotide
  misc_feature 1..20: note = Target: SCN10A; (+) strand; PAM type: NRG; PAM sequence: GAG
  source 1..20: mol_type = other DNA
gagcagagaagcaaaatgag

SEQ ID NO: 31008 - DNA, 20 bp, synthetic construct
  misc_feature 1..20: note = Description of Artificial Sequence: Synthetic oligonucleotide
  misc_feature 1..20: note = Target: SCN10A; (+) strand; PAM type: NRG; PAM sequence: GAG
  source 1..20: mol_type = other DNA
gcagagaagcaaaatgagga

SEQ ID NO: 31009 - DNA, 20 bp, synthetic construct
  misc_feature 1..20: note = Description of Artificial Sequence: Synthetic oligonucleotide
  misc_feature 1..20: note = Target: SCN10A; (+) strand; PAM type: NRG; PAM sequence: AAG
  source 1..20: mol_type = other DNA
gagaagcaaaatgaggagag

SEQ ID NO: 31010 - DNA, 20 bp, synthetic construct
  misc_feature 1..20: note = Description of Artificial Sequence: Synthetic oligonucleotide
  misc_feature 1..20: note = Target: SCN10A; (+) strand; PAM type: NRG; PAM sequence: AGG
  source 1..20: mol_type = other DNA
agaagcaaaatgaggagaga

SEQ ID NO: 31011 - DNA, 20 bp, synthetic construct
  misc_feature 1..20: note = Description of Artificial Sequence: Synthetic oligonucleotide
  misc_feature 1..20: note = Target: SCN10A; (+) strand; PAM type: NRG; PAM sequence: AAG
  source 1..20: mol_type = other DNA
aatgaggagagaaggcccac

SEQ ID NO: 31012 - DNA, 20 bp, synthetic construct
  misc_feature 1..20: note = Description of Artificial Sequence: Synthetic oligonucleotide
  misc_feature 1..20: note = Target: SCN10A; (+) strand; PAM type: NRG; PAM sequence: TAG
  source 1..20: mol_type = other DNA
aggcccacaagccaatgacg

SEQ ID NO: 31013 - DNA, 20 bp, synthetic construct
  misc_feature 1..20: note = Description of Artificial Sequence: Synthetic oligonucleotide
  misc_feature 1..20: note = Target: SCN10A; (+) strand; PAM type: NRG; PAM sequence: GAG
  source 1..20: mol_type = other DNA
ccacaagccaatgacgtagt

SEQ ID NO: 31014 - DNA, 20 bp, synthetic construct
  misc_feature 1..20: note = Description of Artificial Sequence: Synthetic oligonucleotide
  misc_feature 1..20: note = Target: SCN10A; (+) strand; PAM type: NRG; PAM sequence: AGG
  source 1..20: mol_type = other DNA
cacaagccaatgacgtagtg

SEQ ID NO: 31015 - DNA, 20 bp, synthetic construct
  misc_feature 1..20: note = Description of Artificial Sequence: Synthetic oligonucleotide
  misc_feature 1..20: note = Target: SCN10A; (+) strand; PAM type: NRG; PAM sequence: GAG
  source 1..20: mol_type = other DNA
caagccaatgacgtagtgag

SEQ ID NO: 31016 - DNA, 20 bp, synthetic construct
  misc_feature 1..20: note = Description of Artificial Sequence: Synthetic oligonucleotide
  misc_feature 1..20: note = Target: SCN10A; (+) strand; PAM type: NRG; PAM sequence: GAG
  source 1..20: mol_type = other DNA
agccaatgacgtagtgagga

SEQ ID NO: 31017 - DNA, 20 bp, synthetic construct
  misc_feature 1..20: note = Description of Artificial Sequence: Synthetic oligonucleotide
  misc_feature 1..20: note = Target: SCN10A; (+) strand; PAM type: NRG; PAM sequence: TGG
  source 1..20: mol_type = other DNA
gacgtagtgaggagagcacc

SEQ ID NO: 31018 - DNA, 20 bp, synthetic construct
  misc_feature 1..20: note = Description of Artificial Sequence: Synthetic oligonucleotide
  misc_feature 1..20: note = Target: SCN10A; (+) strand; PAM type: NRG; PAM sequence: CAG
  source 1..20: mol_type = other DNA
tgaggagagcacctggccaa

SEQ ID NO: 31019 - DNA, 20 bp, synthetic construct
  misc_feature 1..20: note = Description of Artificial Sequence: Synthetic oligonucleotide
  misc_feature 1..20: note = Target: SCN10A; (+) strand; PAM type: NRG; PAM sequence: TGG
  source 1..20: mol_type = other DNA
cacctggccaacagcacatg

SEQ ID NO: 31020 - DNA, 20 bp, synthetic construct
  misc_feature 1..20: note = Description of Artificial Sequence: Synthetic oligonucleotide
  misc_feature 1..20: note = Target: SCN10A; (+) strand; PAM type: NRG; PAM sequence: CAG
  source 1..20: mol_type = other DNA
atgtggttattactttaatc

SEQ ID NO: 31021 - DNA, 20 bp, synthetic construct
  misc_feature 1..20: note = Description of Artificial Sequence: Synthetic oligonucleotide
  misc_feature 1..20: note = Target: SCN10A; (+) strand; PAM type: NRG; PAM sequence: CAG
  source 1..20: mol_type = other DNA
tggttattactttaatccag

SEQ ID NO: 31022 - DNA, 20 bp, synthetic construct
  misc_feature 1..20: note = Description of Artificial Sequence: Synthetic oligonucleotide
  misc_feature 1..20: note = Target: SCN10A; (+) strand; PAM type: NRG; PAM sequence: AGG
  source 1..20: mol_type = other DNA
ggttattactttaatccagc

SEQ ID NO: 31023 - DNA, 20 bp, synthetic construct
  misc_feature 1..20: note = Description of Artificial Sequence: Synthetic oligonucleotide
  misc_feature 1..20: note = Target: SCN10A; (+) strand; PAM type: NRG; PAM sequence: TGG
  source 1..20: mol_type = other DNA
ttactttaatccagcaggac

SEQ ID NO: 31024 - DNA, 20 bp, synthetic construct
  misc_feature 1..20: note = Description of Artificial Sequence: Synthetic oligonucleotide
  misc_feature 1..20: note = Target: SCN10A; (+) strand; PAM type: NRG; PAM sequence: AAG
  source 1..20: mol_type = other DNA
ctttaatccagcaggactgg

SEQ ID NO: 31025 - DNA, 20 bp, synthetic construct
  misc_feature 1..20: note = Description of Artificial Sequence: Synthetic oligonucleotide
  misc_feature 1..20: note = Target: SCN10A; (+) strand; PAM type: NRG; PAM sequence: AGG
  source 1..20: mol_type = other DNA
tttaatccagcaggactgga

SEQ ID NO: 31026 - DNA, 20 bp, synthetic construct
  misc_feature 1..20: note = Description of Artificial Sequence: Synthetic oligonucleotide
  misc_feature 1..20: note = Target: SCN10A; (+) strand; PAM type: NRG; PAM sequence: GAG
  source 1..20: mol_type = other DNA
taatccagcaggactggaag

SEQ ID NO: 31027 - DNA, 20 bp, synthetic construct
  misc_feature 1..20: note = Description of Artificial Sequence: Synthetic oligonucleotide
  misc_feature 1..20: note = Target: SCN10A; (+) strand; PAM type: NRG; PAM sequence: AAG
  source 1..20: mol_type = other DNA
tccagcaggactggaaggag

SEQ ID NO: 31028 - DNA, 20 bp, synthetic construct
  misc_feature 1..20: note = Description of Artificial Sequence: Synthetic oligonucleotide
  misc_feature 1..20: note = Target: SCN10A; (+) strand; PAM type: NRG; PAM sequence: GAG
  source 1..20: mol_type = other DNA
cagcaggactggaaggagaa

SEQ ID NO: 31029 - DNA, 20 bp, synthetic construct
  misc_feature 1..20: note = Description of Artificial Sequence: Synthetic oligonucleotide
  misc_feature 1..20: note = Target: SCN10A; (+) strand; PAM type: NRG; PAM sequence: TAG
  source 1..20: mol_type = other DNA
ggactggaaggagaagagca

SEQ ID NO: 31030 - DNA, 20 bp, synthetic construct
  misc_feature 1..20: note = Description of Artificial Sequence: Synthetic oligonucleotide
  misc_feature 1..20: note = Target: SCN10A; (+) strand; PAM type: NRG; PAM sequence: AGG
  source 1..20: mol_type = other DNA
gactggaaggagaagagcat

SEQ ID NO: 31031 - DNA, 20 bp, synthetic construct
  misc_feature 1..20: note = Description of Artificial Sequence: Synthetic oligonucleotide
  misc_feature 1..20: note = Target: SCN10A; (+) strand; PAM type: NRG; PAM sequence: TGG
  source 1..20: mol_type = other DNA
gaaggagaagagcataggtg

SEQ ID NO: 31032 - DNA, 20 bp, synthetic construct
  misc_feature 1..20: note = Description of Artificial Sequence: Synthetic oligonucleotide
  misc_feature 1..20: note = Target: SCN10A; (+) strand; PAM type: NRG; PAM sequence: GAG
  source 1..20: mol_type = other DNA
aggagaagagcataggtgtg

SEQ ID NO: 31033 - DNA, 20 bp, synthetic construct
  misc_feature 1..20: note = Description of Artificial Sequence: Synthetic oligonucleotide
  misc_feature 1..20: note = Target: SCN10A; (+) strand; PAM type: NRG; PAM sequence: AAG
  source 1..20: mol_type = other DNA
gaagagcataggtgtggaga

SEQ ID NO: 31034 - DNA, 20 bp, synthetic construct
  misc_feature 1..20: note = Description of Artificial Sequence: Synthetic oligonucleotide
  misc_feature 1..20: note = Target: SCN10A; (+) strand; PAM type: NRG; PAM sequence: CAG
  source 1..20: mol_type = other DNA
ggtgtggagaaagcactgcc

SEQ ID NO: 31035 - DNA, 20 bp, synthetic construct
  misc_feature 1..20: note = Description of Artificial Sequence: Synthetic oligonucleotide
  misc_feature 1..20: note = Target: SCN10A; (+) strand; PAM type: NRG; PAM sequence: TGG
  source 1..20: mol_type = other DNA
cctctcttgcccctgcaatt

SEQ ID NO: 31036 - DNA, 20 bp, synthetic construct
  misc_feature 1..20: note = Description of Artificial Sequence: Synthetic oligonucleotide
  misc_feature 1..20: note = Target: SCN10A; (+) strand; PAM type: NRG; PAM sequence: GAG
  source 1..20: mol_type = other DNA
tttggcctctacactgtgct

SEQ ID NO: 31037 - DNA, 20 bp, synthetic construct
  misc_feature 1..20: note = Description of Artificial Sequence: Synthetic oligonucleotide
  misc_feature 1..20: note = Target: SCN10A; (+) strand; PAM type: NRG; PAM sequence: AGG
  source 1..20: mol_type = other DNA
ttggcctctacactgtgctg

SEQ ID NO: 31038 - DNA, 20 bp, synthetic construct
  misc_feature 1..20: note = Description of Artificial Sequence: Synthetic oligonucleotide
  misc_feature 1..20: note = Target: SCN10A; (+) strand; PAM type: NRG; PAM sequence: TGG
  source 1..20: mol_type = other DNA
acactgtgctgaggtccgtg

SEQ ID NO: 31039 - DNA, 20 bp, synthetic construct
  misc_feature 1..20: note = Description of Artificial Sequence: Synthetic oligonucleotide
  misc_feature 1..20: note = Target: SCN10A; (+) strand; PAM type: NRG; PAM sequence: CAG
  source 1..20: mol_type = other DNA
ggacaatcactgccctgtgc

SEQ ID NO: 31040 - DNA, 20 bp, synthetic construct
  misc_feature 1..20: note = Description of Artificial Sequence: Synthetic oligonucleotide
  misc_feature 1..20: note = Target: SCN10A; (+) strand; PAM type: NRG; PAM sequence: AGG
  source 1..20: mol_type = other DNA
gacaatcactgccctgtgcc

SEQ ID NO: 31041 - DNA, 20 bp, synthetic construct
  misc_feature 1..20: note = Description of Artificial Sequence: Synthetic oligonucleotide
  misc_feature 1..20: note = Target: SCN10A; (+) strand; PAM type: NRG; PAM sequence: GGG
  source 1..20: mol_type = other DNA
acaatcactgccctgtgcca

SEQ ID NO: 31042 - DNA, 20 bp, synthetic construct
  misc_feature 1..20: note = Description of Artificial Sequence: Synthetic oligonucleotide
  misc_feature 1..20: note = Target: SCN10A; (+) strand; PAM type: NRG; PAM sequence: TGG
  source 1..20: mol_type = other DNA
actgccctgtgccagggcac

SEQ ID NO: 31043 - DNA, 20 bp, synthetic construct
  misc_feature 1..20: note = Description of Artificial Sequence: Synthetic oligonucleotide
  misc_feature 1..20: note = Target: SCN10A; (+) strand; PAM type: NRG; PAM sequence: GGG
  source 1..20: mol_type = other DNA
ctgccctgtgccagggcact

SEQ ID NO: 31044 - DNA, 20 bp, synthetic construct
  misc_feature 1..20: note = Description of Artificial Sequence: Synthetic oligonucleotide
  misc_feature 1..20: note = Target: SCN10A; (+) strand; PAM type: NRG; PAM sequence: CAG
  source 1..20: mol_type = other DNA
gccagggcactgggcacctg

SEQ ID NO: 31045 - DNA, 20 bp, synthetic construct
  misc_feature 1..20: note = Description of Artificial Sequence: Synthetic oligonucleotide
  misc_feature 1..20: note = Target: SCN10A; (+) strand; PAM type: NRG; PAM sequence: CAG
  source 1..20: mol_type = other DNA
cacctgcagccgctgtcaca

SEQ ID NO: 31046 - DNA, 20 bp, synthetic construct
  misc_feature 1..20: note = Description of Artificial Sequence: Synthetic oligonucleotide
  misc_feature 1..20: note = Target: SCN10A; (+) strand; PAM type: NRG; PAM sequence: CAG
  source 1..20: mol_type = other DNA
cacacagttccccctccacc

SEQ ID NO: 31047 - DNA, 20 bp, synthetic construct
  misc_feature 1..20: note = Description of Artificial Sequence: Synthetic oligonucleotide
  misc_feature 1..20: note = Target: SCN10A; (+) strand; PAM type: NRG; PAM sequence: AGG
  source 1..20: mol_type = other DNA
acacagttccccctccaccc

SEQ ID NO: 31048 - DNA, 20 bp, synthetic construct
  misc_feature 1..20: note = Description of Artificial Sequence: Synthetic oligonucleotide
  misc_feature 1..20: note = Target: SCN10A; (+) strand; PAM type: NRG; PAM sequence: TGG
  source 1..20: mol_type = other DNA
agttccccctccacccagga

SEQ ID NO: 31049 - DNA, 20 bp, synthetic construct
  misc_feature 1..20: note = Description of Artificial Sequence: Synthetic oligonucleotide
  misc_feature 1..20: note = Target: SCN10A; (+) strand; PAM type: NRG; PAM sequence: CAG
  source 1..20: mol_type = other DNA
tccccctccacccaggatgg

SEQ ID NO: 31050 - DNA, 20 bp, synthetic construct
  misc_feature 1..20: note = Description of Artificial Sequence: Synthetic oligonucleotide
  misc_feature 1..20: note = Target: SCN10A; (+) strand; PAM type: NRG; PAM sequence: CAG
  source 1..20: mol_type = other DNA
ctccacccaggatggcagac

SEQ ID NO: 31051 - DNA, 20 bp, synthetic construct
  misc_feature 1..20: note = Description of Artificial Sequence: Synthetic oligonucleotide
  misc_feature 1..20: note = Target: SCN10A; (+) strand; PAM type: NRG; PAM sequence: TGG
  source 1..20: mol_type = other DNA
cccgaaactctcttctccct

SEQ ID NO: 31052 - DNA, 20 bp, synthetic construct
  misc_feature 1..20: note = Description of Artificial Sequence: Synthetic oligonucleotide
  misc_feature 1..20: note = Target: SCN10A; (+) strand; PAM type: NRG; PAM sequence: TAG
  source 1..20: mol_type = other DNA
gctttgcgtcattgccaccc

SEQ ID NO: 31053 - DNA, 20 bp, synthetic construct
  misc_feature 1..20: note = Description of Artificial Sequence: Synthetic oligonucleotide
  misc_feature 1..20: note = Target: SCN10A; (+) strand; PAM type: NRG; PAM sequence: CAG
  source 1..20: mol_type = other DNA
ctagttttcctcccacctct

SEQ ID NO: 31054 - DNA, 20 bp, synthetic construct
  misc_feature 1..20: note = Description of Artificial Sequence: Synthetic oligonucleotide
  misc_feature 1..20: note = Target: SCN10A; (+) strand; PAM type: NRG; PAM sequence: AAG
  source 1..20: mol_type = other DNA
cgcacctgtgctcctcccta

SEQ ID NO: 31055 - DNA, 20 bp, synthetic construct
  misc_feature 1..20: note = Description of Artificial Sequence: Synthetic oligonucleotide
  misc_feature 1..20: note = Target: SCN10A; (+) strand; PAM type: NRG; PAM sequence: GAG
  source 1..20: mol_type = other DNA
ctgtgctcctccctaaagct

SEQ ID NO: 31056 - DNA, 20 bp, synthetic construct
  misc_feature 1..20: note = Description of Artificial Sequence: Synthetic oligonucleotide
  misc_feature 1..20: note = Target: SCN10A; (+) strand; PAM type: NRG; PAM sequence: AGG
  source 1..20: mol_type = other DNA
tgtgctcctccctaaagctg

SEQ ID NO: 31057 - DNA, 20 bp, synthetic construct
  misc_feature 1..20: note = Description of Artificial Sequence: Synthetic oligonucleotide
  misc_feature 1..20: note = Target: SCN10A; (+) strand; PAM type: NRG; PAM sequence: GAG
  source 1..20: mol_type = other DNA
taaagctgaggccatgcacc

SEQ ID NO: 31058 - DNA, 20 bp, synthetic construct
  misc_feature 1..20: note = Description of Artificial Sequence: Synthetic oligonucleotide
  misc_feature 1..20: note = Target: SCN10A; (+) strand; PAM type: NRG; PAM sequence: CAG
  source 1..20: mol_type = other DNA
agctgaggccatgcaccgag

SEQ ID NO: 31059 - DNA, 20 bp, synthetic construct
  misc_feature 1..20: note = Description of Artificial Sequence: Synthetic oligonucleotide
  misc_feature 1..20: note = Target: SCN10A; (+) strand; PAM type: NRG; PAM sequence: TGG
  source 1..20: mol_type = other DNA
agcagttttgtcacccttcc

SEQ ID NO: 31060 - DNA, 20 bp, synthetic construct
  misc_feature 1..20: note = Description of Artificial Sequence: Synthetic oligonucleotide
  misc_feature 1..20: note = Target: SCN10A; (+) strand; PAM type: NRG; PAM sequence: TGG
  source 1..20: mol_type = other DNA
gtcacccttcctggacaatc

SEQ ID NO: 31061 - DNA, 20 bp, synthetic construct
  misc_feature 1..20: note = Description of Artificial Sequence: Synthetic oligonucleotide
  misc_feature 1..20: note = Target: SCN10A; (+) strand; PAM type: NRG; PAM sequence: TAG
  source 1..20: mol_type = other DNA
ttcctggacaatctggcatt

SEQ ID NO: 31062 - DNA, 20 bp, synthetic construct
  misc_feature 1..20: note = Description of Artificial Sequence: Synthetic oligonucleotide
  misc_feature 1..20: note = Target: SCN10A; (+) strand; PAM type: NRG; PAM sequence: TGG
  source 1..20: mol_type = other DNA
tggacaatctggcatttaga

SEQ ID NO: 31063 - DNA, 20 bp, synthetic construct
  misc_feature 1..20: note = Description of Artificial Sequence: Synthetic oligonucleotide
  misc_feature 1..20: note = Target: SCN10A; (+) strand; PAM type: NRG; PAM sequence: GAG
  source 1..20: mol_type = other DNA
gacaatctggcatttagatg

SEQ ID NO: 31064 - DNA, 20 bp, synthetic construct
  misc_feature 1..20: note = Description of Artificial Sequence: Synthetic oligonucleotide
  misc_feature 1..20: note = Target: SCN10A; (+) strand; PAM type: NRG; PAM sequence: AGG
  source 1..20: mol_type = other DNA
acaatctggcatttagatgg

SEQ ID NO: 31065 - DNA, 20 bp, synthetic construct
  misc_feature 1..20: note = Description of Artificial Sequence: Synthetic oligonucleotide
  misc_feature 1..20: note = Target: SCN10A; (+) strand; PAM type: NRG; PAM sequence: TAG
  source 1..20: mol_type = other DNA
ctggcatttagatggaggcc

SEQ ID NO: 31066 - DNA, 20 bp, synthetic construct
  misc_feature 1..20: note = Description of Artificial Sequence: Synthetic oligonucleotide
  misc_feature 1..20: note = Target: SCN10A; (+) strand; PAM type: NRG; PAM sequence: TAG
  source 1..20: mol_type = other DNA
tagatggaggcctagatatt

SEQ ID NO: 31067 - DNA, 20 bp, synthetic construct
  misc_feature 1..20: note = Description of Artificial Sequence: Synthetic oligonucleotide
  misc_feature 1..20: note = Target: SCN10A; (+) strand; PAM type: NRG; PAM sequence: TAG
  source 1..20: mol_type = other DNA
atggaggcctagatatttag

SEQ ID NO: 31068 - DNA, 20 bp, synthetic construct
  misc_feature 1..20: note = Description of Artificial Sequence: Synthetic oligonucleotide
  misc_feature 1..20: note = Target: SCN10A; (+) strand; PAM type: NRG; PAM sequence: AGG
  source 1..20: mol_type = other DNA
tggaggcctagatatttagt

SEQ ID NO: 31069 - DNA, 20 bp, synthetic construct
  misc_feature 1..20: note = Description of Artificial Sequence: Synthetic oligonucleotide
  misc_feature 1..20: note = Target: SCN10A; (+) strand; PAM type: NRG; PAM sequence: TAG
  source 1..20: mol_type = other DNA
gatatttagtaggttgtttt

SEQ ID NO: 31070 - DNA, 20 bp, synthetic construct
  misc_feature 1..20: note = Description of Artificial Sequence: Synthetic oligonucleotide
  misc_feature 1..20: note = Target: SCN10A; (+) strand; PAM type: NRG; PAM sequence: GAG
  source 1..20: mol_type = other DNA
tatttagtaggttgttttta

SEQ ID NO: 31071 - DNA, 20 bp, synthetic construct
  misc_feature 1..20: note = Description of Artificial Sequence: Synthetic oligonucleotide
  misc_feature 1..20: note = Target: SCN10A; (+) strand; PAM type: NRG; PAM sequence: GAG
  source 1..20: mol_type = other DNA
tttagtaggttgtttttaga

SEQ ID NO: 31072 - DNA, 20 bp, synthetic construct
  misc_feature 1..20: note = Description of Artificial Sequence: Synthetic oligonucleotide
  misc_feature 1..20: note = Target: SCN10A; (+) strand; PAM type: NRG; PAM sequence: GAG
  source 1..20: mol_type = other DNA
ttagagagtaaatgacacat

SEQ ID NO: 31073 - DNA, 20 bp, synthetic construct
  misc_feature 1..20: note = Description of Artificial Sequence: Synthetic oligonucleotide
  misc_feature 1..20: note = Target: SCN10A; (+) strand; PAM type: NRG; PAM sequence: AGG
  source 1..20: mol_type = other DNA
tagagagtaaatgacacatg

SEQ ID NO: 31074 - DNA, 20 bp, synthetic construct
  misc_feature 1..20: note = Description of Artificial Sequence: Synthetic oligonucleotide
  misc_feature 1..20: note = Target: SCN10A; (+) strand; PAM type: NRG; PAM sequence: AAG
  source 1..20: mol_type = other DNA
gtaaatgacacatgaggcgc

SEQ ID NO: 31075 - DNA, 20 bp, synthetic construct
  misc_feature 1..20: note = Description of Artificial Sequence: Synthetic oligonucleotide
  misc_feature 1..20: note = Target: SCN10A; (+) strand; PAM type: NRG; PAM sequence: GAG
  source 1..20: mol_type = other DNA
tgacacatgaggcgcaagat

SEQ ID NO: 31076 - DNA, 20 bp, synthetic construct
  misc_feature 1..20: note = Description of Artificial Sequence: Synthetic oligonucleotide
  misc_feature 1..20: note = Target: SCN10A; (+) strand; PAM type: NRG; PAM sequence: CAG
  source 1..20: mol_type = other DNA
caagatgagtgaaaacactg

SEQ ID NO: 31077 - DNA, 20 bp, synthetic construct
  misc_feature 1..20: note = Description of Artificial Sequence: Synthetic oligonucleotide
  misc_feature 1..20: note = Target: SCN10A; (+) strand; PAM type: NRG; PAM sequence: CGG
  source 1..20: mol_type = other DNA
aaaacactgcagccgtgaat

SEQ ID NO: 31078 - DNA, 20 bp, synthetic construct
  misc_feature 1..20: note = Description of Artificial Sequence: Synthetic oligonucleotide
  misc_feature 1..20: note = Target: SCN10A; (+) strand; PAM type: NRG; PAM sequence: AAG
  source 1..20: mol_type = other DNA
acactgcagccgtgaatcgg

SEQ ID NO: 31079 - DNA, 20 bp, synthetic construct
  misc_feature 1..20: note = Description of Artificial Sequence: Synthetic oligonucleotide
  misc_feature 1..20: note = Target: SCN10A; (+) strand; PAM type: NRG; PAM sequence: GAG
  source 1..20: mol_type = other DNA
actgcagccgtgaatcggaa

SEQ ID NO: 31080 - DNA, 20 bp, synthetic construct
  misc_feature 1..20: note = Description of Artificial Sequence: Synthetic oligonucleotide
  misc_feature 1..20: note = Target: SCN10A; (+) strand; PAM type: NRG; PAM sequence: CGG
  source 1..20: mol_type = other DNA
gcagccgtgaatcggaagag

SEQ ID NO: 31081 - DNA, 20 bp, synthetic construct
  misc_feature 1..20: note = Description of Artificial Sequence: Synthetic oligonucleotide
  misc_feature 1..20: note = Target: SCN10A; (+) strand; PAM type: NRG; PAM sequence: GGG
  source 1..20: mol_type = other DNA
cagccgtgaatcggaagagc

SEQ ID NO: 31082 - DNA, 20 bp, synthetic construct
  misc_feature 1..20: note = Description of Artificial Sequence: Synthetic oligonucleotide
  misc_feature 1..20: note = Target: SCN10A; (+) strand; PAM type: NRG; PAM sequence: TAG
  source 1..20: mol_type = other DNA
gaatcggaagagcgggactg

SEQ ID NO: 31083 - DNA, 20 bp, synthetic construct
  misc_feature 1..20: note = Description of Artificial Sequence: Synthetic oligonucleotide
  misc_feature 1..20: note = Target: SCN10A; (+) strand; PAM type: NRG; PAM sequence: TAG
  source 1..20: mol_type = other DNA
gaagagcgggactgtagtcc

SEQ ID NO: 31084 - DNA, 20 bp, synthetic construct
  misc_feature 1..20: note = Description of Artificial Sequence: Synthetic oligonucleotide
  misc_feature 1..20: note = Target: SCN10A; (+) strand; PAM type: NRG; PAM sequence: TAG
  source 1..20: mol_type = other DNA
gtcctagcccttcaactaat

SEQ ID NO: 31085 - DNA, 20 bp, synthetic construct
  misc_feature 1..20: note = Description of Artificial Sequence: Synthetic oligonucleotide
  misc_feature 1..20: note = Target: SCN10A; (+) strand; PAM type: NRG; PAM sequence: CAG
  source 1..20: mol_type = other DNA
caccctgaactctctattcc

SEQ ID NO: 31086 - DNA, 20 bp, synthetic construct
  misc_feature 1..20: note = Description of Artificial Sequence: Synthetic oligonucleotide
  misc_feature 1..20: note = Target: SCN10A; (+) strand; PAM type: NRG; PAM sequence: AAG
  source 1..20: mol_type = other DNA
gcccttcaactaattacctg

SEQ ID NO: 31087 - DNA, 20 bp, synthetic construct
  misc_feature 1..20: note = Description of Artificial Sequence: Synthetic oligonucleotide
  misc_feature 1..20: note = Target: SCN10A; (+) strand; PAM type: NRG; PAM sequence: TGG
  source 1..20: mol_type = other DNA
cctgaagcccctcatgcctt

SEQ ID NO: 31088 - DNA, 20 bp, synthetic construct
  misc_feature 1..20: note = Description of Artificial Sequence: Synthetic oligonucleotide
  misc_feature 1..20: note = Target: SCN10A; (+) strand; PAM type: NRG; PAM sequence: GGG
  source 1..20: mol_type = other DNA
ctgaagcccctcatgccttt

SEQ ID NO: 31089 - DNA, 20 bp, synthetic construct
  misc_feature 1..20: note = Description of Artificial Sequence: Synthetic oligonucleotide
  misc_feature 1..20: note = Target: SCN10A; (+) strand; PAM type: NRG; PAM sequence: TAG
  source 1..20: mol_type = other DNA
tgggctttgacttcctcatt

SEQ ID NO: 31090 - DNA, 20 bp, synthetic construct
  misc_feature 1..20: note = Description of Artificial Sequence: Synthetic oligonucleotide
  misc_feature 1..20: note = Target: SCN10A; (+) strand; PAM type: NRG; PAM sequence: GAG
  source 1..20: mol_type = other DNA
tttagaaaatgcaaacaact

SEQ ID NO: 31091 - DNA, 20 bp, synthetic construct
  misc_feature 1..20: note = Description of Artificial Sequence: Synthetic oligonucleotide
  misc_feature 1..20: note = Target: SCN10A; (+) strand; PAM type: NRG; PAM sequence: AGG
  source 1..20: mol_type = other DNA
ttagaaaatgcaaacaactg

SEQ ID NO: 31092 - DNA, 20 bp, synthetic construct
  misc_feature 1..20: note = Description of Artificial Sequence: Synthetic oligonucleotide
  misc_feature 1..20: note = Target: SCN10A; (+) strand; PAM type: NRG; PAM sequence: AAG
  source 1..20: mol_type = other DNA
tgcaaacaactgaggatgtt

SEQ ID NO: 31093 - DNA, 20 bp, synthetic construct
  misc_feature 1..20: note = Description of Artificial Sequence: Synthetic oligonucleotide
  misc_feature 1..20: note = Target: SCN10A; (+) strand; PAM type: NRG; PAM sequence: TGG
  source 1..20: mol_type = other DNA
tcctgtgtctatgtctacct

SEQ ID NO: 31094 - DNA, 20 bp, synthetic construct
  misc_feature 1..20: note = Description of Artificial Sequence: Synthetic oligonucleotide
  misc_feature 1..20: note = Target: SCN10A; (+) strand; PAM type: NRG; PAM sequence: TGG
  source 1..20: mol_type = other DNA
ctatgtctaccttggtctat

SEQ ID NO: 31095 - DNA, 20 bp, synthetic construct
  misc_feature 1..20: note = Description of Artificial Sequence: Synthetic oligonucleotide
  misc_feature 1..20: note = Target: SCN10A; (+) strand; PAM type: NRG; PAM sequence: CGG
  source 1..20: mol_type = other DNA
tgtctaccttggtctattgg

SEQ ID NO: 31096 - DNA, 20 bp, synthetic construct
  misc_feature 1..20: note = Description of Artificial Sequence: Synthetic oligonucleotide
  misc_feature 1..20: note = Target: SCN10A; (+) strand; PAM type: NRG; PAM sequence: GAG
  source 1..20: mol_type = other DNA
tctaccttggtctattggcg

SEQ ID NO: 31097 - DNA, 20 bp, synthetic construct
  misc_feature 1..20: note = Description of Artificial Sequence: Synthetic oligonucleotide
  misc_feature 1..20: note = Target: SCN10A; (+) strand; PAM type: NRG; PAM sequence: TAG
  source 1..20: mol_type = other DNA
accttggtctattggcggag

SEQ ID NO: 31098 - DNA, 20 bp, synthetic construct
  misc_feature 1..20: note = Description of Artificial Sequence: Synthetic oligonucleotide
  misc_feature 1..20: note = Target: SCN10A; (+) strand; PAM type: NRG; PAM sequence: GAG
  source 1..20: mol_type = other DNA
ggtctattggcggagtagtt

SEQ ID NO: 31099 - DNA, 20 bp, synthetic construct
  misc_feature 1..20: note = Description of Artificial Sequence: Synthetic oligonucleotide
  misc_feature 1..20: note = Target: SCN10A; (+) strand; PAM type: NRG; PAM sequence: AAG
  source 1..20: mol_type = other DNA
cggagtagttgagattgtgt

SEQ ID NO: 31100 - DNA, 20 bp, synthetic construct
  misc_feature 1..20: note = Description of Artificial Sequence: Synthetic oligonucleotide
  misc_feature 1..20: note = Target: SCN10A; (+) strand; PAM type: NRG; PAM sequence: AGG
  source 1..20: mol_type = other DNA
ggagtagttgagattgtgta

SEQ ID NO: 31101 - DNA, 20 bp, synthetic construct
  misc_feature 1..20: note = Description of Artificial Sequence: Synthetic oligonucleotide
  misc_feature 1..20: note = Target: SCN10A; (+) strand; PAM type: NRG; PAM sequence: GAG
  source 1..20: mol_type = other DNA
agtagttgagattgtgtaag

SEQ ID NO: 31102 - DNA, 20 bp, synthetic construct
  misc_feature 1..20: note = Description of Artificial Sequence: Synthetic oligonucleotide
  misc_feature 1..20: note = Target: SCN10A; (+) strand; PAM type: NRG; PAM sequence: AAG
  source 1..20: mol_type = other DNA
tgagattgtgtaaggagctt

SEQ ID NO: 31103 - DNA, 20 bp, synthetic construct
  misc_feature 1..20: note = Description of Artificial Sequence: Synthetic oligonucleotide
  misc_feature 1..20: note = Target: SCN10A; (+) strand; PAM type: NRG; PAM sequence: CAG
  source 1..20: mol_type = other DNA
tgtgtaaggagcttaagcca

SEQ ID NO: 31104 - DNA, 20 bp, synthetic construct
  misc_feature 1..20: note = Description of Artificial Sequence: Synthetic oligonucleotide
  misc_feature 1..20: note = Target: SCN10A; (+) strand; PAM type: NRG; PAM sequence: CAG
  source 1..20: mol_type = other DNA
aaggagcttaagccacagta

SEQ ID NO: 31105 - DNA, 20 bp, synthetic construct
  misc_feature 1..20: note = Description of Artificial Sequence: Synthetic oligonucleotide
  misc_feature 1..20: note = Target: SCN10A; (+) strand; PAM type: NRG; PAM sequence: GAG
  source 1..20: mol_type = other DNA
ggagcttaagccacagtaca

SEQ ID NO: 31106 - DNA, 20 bp, synthetic construct
  misc_feature 1..20: note = Description of Artificial Sequence: Synthetic oligonucleotide
  misc_feature 1..20: note = Target: SCN10A; (+) strand; PAM type: NRG; PAM sequence: GAG
  source 1..20: mol_type = other DNA
agcttaagccacagtacaga

SEQ ID NO: 31107 - DNA, 20 bp, synthetic construct
  misc_feature 1..20: note = Description of Artificial Sequence: Synthetic oligonucleotide
  misc_feature 1..20: note = Target: SCN10A; (+) strand; PAM type: NRG; PAM sequence: AAG
  source 1..20: mol_type = other DNA
ccttccttctttgctctaca

SEQ ID NO: 31108 - DNA, 20 bp, synthetic construct
  misc_feature 1..20: note = Description of Artificial Sequence: Synthetic oligonucleotide
  misc_feature 1..20: note = Target: SCN10A; (+) strand; PAM type: NRG; PAM sequence: CAG
  source 1..20: mol_type = other DNA
cttctttgctctacaaagcc

SEQ ID NO: 31109 - DNA, 20 bp, synthetic construct
  misc_feature 1..20: note = Description of Artificial Sequence: Synthetic oligonucleotide
  misc_feature 1..20: note = Target: SCN10A; (+) strand; PAM type: NRG; PAM sequence: CAG
  source 1..20: mol_type = other DNA
gctctacaaagcccagtatt

SEQ ID NO: 31110 - DNA, 20 bp, synthetic construct
  misc_feature 1..20: note = Description of Artificial Sequence: Synthetic oligonucleotide
  misc_feature 1..20: note = Target: SCN10A; (+) strand; PAM type: NRG; PAM sequence: CAG
  source 1..20: mol_type = other DNA
tacaaagcccagtattcagc

SEQ ID NO: 31111 - DNA, 20 bp, synthetic construct
  misc_feature 1..20: note = Description of Artificial Sequence: Synthetic oligonucleotide
  misc_feature 1..20: note = Target: SCN10A; (+) strand; PAM type: NRG; PAM sequence: AGG
  source 1..20: mol_type = other DNA
acaaagcccagtattcagcc

SEQ ID NO: 31112 - DNA, 20 bp, synthetic construct
  misc_feature 1..20: note = Description of Artificial Sequence: Synthetic oligonucleotide
  misc_feature 1..20: note = Target: SCN10A; (+) strand; PAM type: NRG; PAM sequence: GGG
  source 1..20: mol_type = other DNA
caaagcccagtattcagcca

SEQ ID NO: 31113 - DNA, 20 bp, synthetic construct
  misc_feature 1..20: note = Description of Artificial Sequence: Synthetic oligonucleotide
  misc_feature 1..20: note = Target: SCN10A; (+) strand; PAM type: NRG; PAM sequence: TAG
  source 1..20: mol_type = other DNA
ccagtattcagccagggcct

SEQ ID NO: 31114 - DNA, 20 bp, synthetic construct
  misc_feature 1..20: note = Description of Artificial Sequence: Synthetic oligonucleotide
  misc_feature 1..20: note = Target: SCN10A; (+) strand; PAM type: NRG; PAM sequence: GAG
  source 1..20: mol_type = other DNA
agtattcagccagggcctta

SEQ ID NO: 31115 - DNA, 20 bp, synthetic construct
  misc_feature 1..20: note = Description of Artificial Sequence: Synthetic oligonucleotide
  misc_feature 1..20: note = Target: SCN10A; (+) strand; PAM type: NRG; PAM sequence: AAG
  source 1..20: mol_type = other DNA
ctctgaatctctattcccat

SEQ ID NO: 31116 - DNA, 20 bp, synthetic construct
  misc_feature 1..20: note = Description of Artificial Sequence: Synthetic oligonucleotide
  misc_feature 1..20: note = Target: SCN10A; (+) strand; PAM type: NRG; PAM sequence: AGG
  source 1..20: mol_type = other DNA
tctgaatctctattcccata

SEQ ID NO: 31117 - DNA, 20 bp, synthetic construct
  misc_feature 1..20: note = Description of Artificial Sequence: Synthetic oligonucleotide
  misc_feature 1..20: note = Target: SCN10A; (+) strand; PAM type: NRG; PAM sequence: AAG
  source 1..20: mol_type = other DNA
ccataaggccttgttattca

SEQ ID NO: 31118 - DNA, 20 bp, synthetic construct
  misc_feature 1..20: note = Description of Artificial Sequence: Synthetic oligonucleotide
  misc_feature 1..20: note = Target: SCN10A; (+) strand; PAM type: NRG; PAM sequence: TGG
  source 1..20: mol_type = other DNA
aggccttgttattcaaagtg

SEQ ID NO: 31119 - DNA, 20 bp, synthetic construct
  misc_feature 1..20: note = Description of Artificial Sequence: Synthetic oligonucleotide
  misc_feature 1..20: note = Target: SCN10A; (+) strand; PAM type: NRG; PAM sequence: GGG
  source 1..20: mol_type = other DNA
ggccttgttattcaaagtgt

SEQ ID NO: 31120 - DNA, 20 bp, synthetic construct
  misc_feature 1..20: note = Description of Artificial Sequence: Synthetic oligonucleotide
  misc_feature 1..20: note = Target: SCN10A; (+) strand; PAM type: NRG; PAM sequence: GAG
  source 1..20: mol_type = other DNA
tattcaaagtgtgggtcact

SEQ ID NO: 31121 - DNA, 20 bp, synthetic construct
  misc_feature 1..20: note = Description of Artificial Sequence: Synthetic oligonucleotide
  misc_feature 1..20: note = Target: SCN10A; (+) strand; PAM type: NRG; PAM sequence: AGG
  source 1..20: mol_type = other DNA
attcaaagtgtgggtcactg

SEQ ID NO: 31122 - DNA, 20 bp, synthetic construct
  misc_feature 1..20: note = Description of Artificial Sequence: Synthetic oligonucleotide
  misc_feature 1..20: note = Target: SCN10A; (+) strand; PAM type: NRG; PAM sequence: GGG
  source 1..20: mol_type = other DNA
ttcaaagtgtgggtcactga

SEQ ID NO: 31123 - DNA, 20 bp, synthetic construct
  misc_feature 1..20: note = Description of Artificial Sequence: Synthetic oligonucleotide
  misc_feature 1..20: note = Target: SCN10A; (+) strand; PAM type: NRG; PAM sequence: CAG
  source 1..20: mol_type = other DNA
aaagtgtgggtcactgaggg

SEQ ID NO: 31124 - DNA, 20 bp, synthetic construct
  misc_feature 1..20: note = Description of Artificial Sequence: Synthetic oligonucleotide
  misc_feature 1..20: note = Target: SCN10A; (+) strand; PAM type: NRG; PAM sequence: AAG
  source 1..20: mol_type = other DNA
tgggtcactgagggcagtgc

SEQ ID NO: 31125 - DNA, 20 bp, synthetic construct
  misc_feature 1..20: note = Description of Artificial Sequence: Synthetic oligonucleotide
  misc_feature 1..20: note = Target: SCN10A; (+) strand; PAM type: NRG; PAM sequence: TGG
  source 1..20: mol_type = other DNA
agggcagtgcaagcatcacc

SEQ ID NO: 31126 - DNA, 20 bp, synthetic construct
  misc_feature 1..20: note = Description of Artificial Sequence: Synthetic oligonucleotide
  misc_feature 1..20: note = Target: SCN10A; (+) strand; PAM type: NRG; PAM sequence: GGG
  source 1..20: mol_type = other DNA
gggcagtgcaagcatcacct

SEQ ID NO: 31127 - DNA, 20 bp, synthetic construct
  misc_feature 1..20: note = Description of Artificial Sequence: Synthetic oligonucleotide
  misc_feature 1..20: note = Target: SCN10A; (+) strand; PAM type: NRG; PAM sequence: GAG
  source 1..20: mol_type = other DNA
gcagtgcaagcatcacctgg

SEQ ID NO: 31128 - DNA, 20 bp, synthetic construct
  misc_feature 1..20: note = Description of Artificial Sequence: Synthetic oligonucleotide
  misc_feature 1..20: note = Target: SCN10A; (+) strand; PAM type: NRG; PAM sequence: TAG
  source 1..20: mol_type = other DNA
agcatcacctgggagcttgt

SEQ ID NO: 31129 - DNA, 20 bp, synthetic construct
  misc_feature 1..20: note = Description of Artificial Sequence: Synthetic oligonucleotide
  misc_feature 1..20: note = Target: SCN10A; (+) strand; PAM type: NRG; PAM sequence: CAG
  source 1..20: mol_type = other DNA
ttgttagaaatgcaaattct

SEQ ID NO: 31130 - DNA, 20 bp, synthetic construct
  misc_feature 1..20: note = Description of Artificial Sequence: Synthetic oligonucleotide
  misc_feature 1..20: note = Target: SCN10A; (+) strand; PAM type: NRG; PAM sequence: AGG
  source 1..20: mol_type = other DNA
tgttagaaatgcaaattctc

SEQ ID NO: 31131 - DNA, 20 bp, synthetic construct
  misc_feature 1..20: note = Description of Artificial Sequence: Synthetic oligonucleotide
  misc_feature 1..20: note = Target: SCN10A; (+) strand; PAM type: NRG; PAM sequence: CAG
  source 1..20: mol_type = other DNA
caaattctcaggccctgcca

SEQ ID NO: 31132 - DNA, 20 bp, synthetic construct
  misc_feature 1..20: note = Description of Artificial Sequence: Synthetic oligonucleotide
  misc_feature 1..20: note = Target: SCN10A; (+) strand; PAM type: NRG; PAM sequence: TGG
  source 1..20: mol_type = other DNA
caggccctgccacagattta

SEQ ID NO: 31133 - DNA, 20 bp, synthetic construct
  misc_feature 1..20: note = Description of Artificial Sequence: Synthetic oligonucleotide
  misc_feature 1..20: note = Target: SCN10A; (+) strand; PAM type: NRG; PAM sequence: GAG
  source 1..20: mol_type = other DNA
ctgccacagatttatggaat

SEQ ID NO: 31134 - DNA, 20 bp, synthetic construct
  misc_feature 1..20: note = Description of Artificial Sequence: Synthetic oligonucleotide
  misc_feature 1..20: note = Target: SCN10A; (+) strand; PAM type: NRG; PAM sequence: AAG
  source 1..20: mol_type = other DNA
atgagaatctgcatttgaac

SEQ ID NO: 31135 - DNA, 20 bp, synthetic construct
  misc_feature 1..20: note = Description of Artificial Sequence: Synthetic oligonucleotide
  misc_feature 1..20: note = Target: SCN10A; (+) strand; PAM type: NRG; PAM sequence: TGG
  source 1..20: mol_type = other DNA
tctgcatttgaacaagctcc

SEQ ID NO: 31136 - DNA, 20 bp, synthetic construct
  misc_feature 1..20: note = Description of Artificial Sequence: Synthetic oligonucleotide
  misc_feature 1..20: note = Target: SCN10A; (+) strand; PAM type: NRG; PAM sequence: GGG
  source 1..20: mol_type = other DNA
ctgcatttgaacaagctcct

SEQ ID NO: 31137 - DNA, 20 bp, synthetic construct
  misc_feature 1..20: note = Description of Artificial Sequence: Synthetic oligonucleotide
  misc_feature 1..20: note = Target: SCN10A; (+) strand; PAM type: NRG; PAM sequence: GAG
  source 1..20: mol_type = other DNA
gcatttgaacaagctcctgg

SEQ ID NO: 31138 - DNA, 20 bp, synthetic construct
  misc_feature 1..20: note = Description of Artificial Sequence: Synthetic oligonucleotide
  misc_feature 1..20: note = Target: SCN10A; (+) strand; PAM type: NRG; PAM sequence: GAG
  source 1..20: mol_type = other DNA
ctcctgggagattaaatttt

SEQ ID NO: 31139 - DNA, 20 bp, synthetic construct
  misc_feature 1..20: note = Description of Artificial Sequence: Synthetic oligonucleotide
  misc_feature 1..20: note = Target: SCN10A; (+) strand; PAM type: NRG; PAM sequence: AAG
  source 1..20: mol_type = other DNA
ctgggagattaaattttgag

SEQ ID NO: 31140 - DNA, 20 bp, synthetic construct
  misc_feature 1..20: note = Description of Artificial Sequence: Synthetic oligonucleotide
  misc_feature 1..20: note = Target: SCN10A; (+) strand; PAM type: NRG; PAM sequence: GAG
  source 1..20: mol_type = other DNA
ctattgtaatgattttctgt

SEQ ID NO: 31141 - DNA, 20 bp, synthetic construct
  misc_feature 1..20: note = Description of Artificial Sequence: Synthetic oligonucleotide
  misc_feature 1..20: note = Target: SCN10A; (+) strand; PAM type: NRG; PAM sequence: AAG
  source 1..20: mol_type = other DNA
atgattttctgtgagcttta

SEQ ID NO: 31142 - DNA, 20 bp, synthetic construct
  misc_feature 1..20: note = Description of Artificial Sequence: Synthetic oligonucleotide
  misc_feature 1..20: note = Target: SCN10A; (+) strand; PAM type: NRG; PAM sequence: AGG
  source 1..20: mol_type = other DNA
tgattttctgtgagctttaa

SEQ ID NO: 31143 - DNA, 20 bp, synthetic construct
  misc_feature 1..20: note = Description of Artificial Sequence: Synthetic oligonucleotide
  misc_feature 1..20: note = Target: SCN10A; (+) strand; PAM type: NRG; PAM sequence: GAG
  source 1..20: mol_type = other DNA
attttctgtgagctttaaag

SEQ ID NO: 31144 - DNA, 20 bp, synthetic construct
  misc_feature 1..20: note = Description of Artificial Sequence: Synthetic oligonucleotide
  misc_feature 1..20: note = Target: SCN10A; (+) strand; PAM type: NRG; PAM sequence: TAG
  source 1..20: mol_type = other DNA
gtgagctttaaaggagtaat

SEQ ID NO: 31145 - DNA, 20 bp, synthetic construct
  misc_feature 1..20: note = Description of Artificial Sequence: Synthetic oligonucleotide
  misc_feature 1..20: note = Target: SCN10A; (+) strand; PAM type: NRG; PAM sequence: TAG
  source 1..20: mol_type = other DNA
agctttaaaggagtaattag

SEQ ID NO: 31146 - DNA, 20 bp, synthetic construct
  misc_feature 1..20: note = Description of Artificial Sequence: Synthetic oligonucleotide
  misc_feature 1..20: note = Target: SCN10A; (+) strand; PAM type: NRG; PAM sequence: TGG
  source 1..20: mol_type = other DNA
aaggagtaattagtagcatt

SEQ ID NO: 31147 - DNA, 20 bp, synthetic construct
  misc_feature 1..20: note = Description of Artificial Sequence: Synthetic oligonucleotide
  misc_feature 1..20: note = Target: SCN10A; (+) strand; PAM type: NRG; PAM sequence: AAG
  source 1..20: mol_type = other DNA
gagtaattagtagcatttgg

SEQ ID NO: 31148 - DNA, 20 bp, synthetic construct
  misc_feature 1..20: note = Description of Artificial Sequence: Synthetic oligonucleotide
  misc_feature 1..20: note = Target: SCN10A; (+) strand; PAM type: NRG; PAM sequence: TGG
  source 1..20: mol_type = other DNA
taattagtagcatttggaag

SEQ ID NO: 31149 - DNA, 20 bp, synthetic construct
  misc_feature 1..20: note = Description of Artificial Sequence: Synthetic oligonucleotide
  misc_feature 1..20: note = Target: SCN10A; (+) strand; PAM type: NRG; PAM sequence: AAG
  source 1..20: mol_type = other DNA
gcatttggaagtggtttgat

SEQ ID NO: 31150 - DNA, 20 bp, synthetic construct
  misc_feature 1..20: note = Description of Artificial Sequence: Synthetic oligonucleotide
  misc_feature 1..20: note = Target: SCN10A; (+) strand; PAM type: NRG; PAM sequence: AGG
  source 1..20: mol_type = other DNA
catttggaagtggtttgata

SEQ ID NO: 31151 - DNA, 20 bp, synthetic construct
  misc_feature 1..20: note = Description of Artificial Sequence: Synthetic oligonucleotide
  misc_feature 1..20: note = Target: SCN10A; (+) strand; PAM type: NRG; PAM sequence: AAG
  source 1..20: mol_type = other DNA
tggaagtggtttgataagga

SEQ ID NO: 31152 - DNA, 20 bp, synthetic construct
  misc_feature 1..20: note = Description of Artificial Sequence: Synthetic oligonucleotide
  misc_feature 1..20: note = Target: SCN10A; (+) strand; PAM type: NRG; PAM sequence: TAG
  source 1..20: mol_type = other DNA
agtggtttgataaggaaaga

SEQ ID NO: 31153 - DNA, 20 bp, synthetic construct
  misc_feature 1..20: note = Description of Artificial Sequence: Synthetic oligonucleotide
  misc_feature 1..20: note = Target: SCN10A; (+) strand; PAM type: NRG; PAM sequence: TAG
  source 1..20: mol_type = other DNA
agatagtcctttttgtattg

SEQ ID NO: 31154 - DNA, 20 bp, synthetic construct
  misc_feature 1..20: note = Description of Artificial Sequence: Synthetic oligonucleotide
  misc_feature 1..20: note = Target: SCN10A; (+) strand; PAM type: NRG; PAM sequence: AGG
  source 1..20: mol_type = other DNA
gatagtcctttttgtattgt

SEQ ID NO: 31155 - DNA, 20 bp, synthetic construct
  misc_feature 1..20: note = Description of Artificial Sequence: Synthetic oligonucleotide
  misc_feature 1..20: note = Target: SCN10A; (+) strand; PAM type: NRG; PAM sequence: CAG
  source 1..20: mol_type = other DNA
ctttttgtattgtaggcctt

SEQ ID NO: 31156 - DNA, 20 bp, synthetic construct
  misc_feature 1..20: note = Description of Artificial Sequence: Synthetic oligonucleotide
  misc_feature 1..20: note = Target: SCN10A; (+) strand; PAM type: NRG; PAM sequence: GAG
  source 1..20: mol_type = other DNA
ttttgtattgtaggccttca

SEQ ID NO: 31157 - DNA, 20 bp, synthetic construct
  misc_feature 1..20: note = Description of Artificial Sequence: Synthetic oligonucleotide
  misc_feature 1..20: note = Target: SCN10A; (+) strand; PAM type: NRG; PAM sequence: AAG
  source 1..20: mol_type = other DNA
tgtattgtaggccttcagag

SEQ ID NO: 31158 - DNA, 20 bp, synthetic construct
  misc_feature 1..20: note = Description of Artificial Sequence: Synthetic oligonucleotide
  misc_feature 1..20: note = Target: SCN10A; (+) strand; PAM type: NRG; PAM sequence: AGG
  source 1..20: mol_type = other DNA
gtattgtaggccttcagaga

SEQ ID NO: 31159 - DNA, 20 bp, synthetic construct
  misc_feature 1..20: note = Description of Artificial Sequence: Synthetic oligonucleotide
  misc_feature 1..20: note = Target: SCN10A; (+) strand; PAM type: NRG; PAM sequence: TGG
  source 1..20: mol_type = other DNA
cttcagagaaggccgtgtgt

SEQ ID NO: 31160 - DNA, 20 bp, synthetic construct
  misc_feature 1..20: note = Description of Artificial Sequence: Synthetic oligonucleotide
  misc_feature 1..20: note = Target: SCN10A; (+) strand; PAM type: NRG; PAM sequence: GGG
  source 1..20: mol_type = other DNA
ttcagagaaggccgtgtgtt

SEQ ID NO: 31161 - DNA, 20 bp, synthetic construct
  misc_feature 1..20: note = Description of Artificial Sequence: Synthetic oligonucleotide
  misc_feature 1..20: note = Target: SCN10A; (+) strand; PAM type: NRG; PAM sequence: GGG
  source 1..20: mol_type = other DNA
tcagagaaggccgtgtgttg

SEQ ID NO: 31162 - DNA, 20 bp, synthetic construct
  misc_feature 1..20: note = Description of Artificial Sequence: Synthetic oligonucleotide
  misc_feature 1..20: note = Target: SCN10A; (+) strand; PAM type: NRG; PAM sequence: GAG
  source 1..20: mol_type = other DNA
agagaaggccgtgtgttggg

SEQ ID NO: 31163 - DNA, 20 bp, synthetic construct
  misc_feature 1..20: note = Description of Artificial Sequence: Synthetic oligonucleotide
  misc_feature 1..20: note = Target: SCN10A; (+) strand; PAM type: NRG; PAM sequence: AGG
  source 1..20: mol_type = other DNA
gagaaggccgtgtgttgggg

SEQ ID NO: 31164 - DNA, 20 bp, synthetic construct
  misc_feature 1..20: note = Description of Artificial Sequence: Synthetic oligonucleotide
  misc_feature 1..20: note = Target: SCN10A; (+) strand; PAM type: NRG; PAM sequence: CAG
  source 1..20: mol_type = other DNA
aggccgtgtgttggggaggt

SEQ ID NO: 31165 - DNA, 20 bp, synthetic construct
  misc_feature 1..20: note = Description of Artificial Sequence: Synthetic oligonucleotide
  misc_feature 1..20: note = Target: SCN10A; (+) strand; PAM type: NRG; PAM sequence: GAG
  source 1..20: mol_type = other DNA
gccgtgtgttggggaggtca

SEQ ID NO: 31166 - DNA, 20 bp, synthetic construct
  misc_feature 1..20: note = Description of Artificial Sequence: Synthetic oligonucleotide
  misc_feature 1..20: note = Target: SCN10A; (+) strand; PAM type: NRG; PAM sequence: AGG
  source 1..20: mol_type = other DNA
ccgtgtgttggggaggtcag

SEQ ID NO: 31167 - DNA, 20 bp, synthetic construct
  misc_feature 1..20: note = Description of Artificial Sequence: Synthetic oligonucleotide
  misc_feature 1..20: note = Target: SCN10A; (+) strand; PAM type: NRG; PAM sequence: GGG
  source 1..20: mol_type = other DNA
cgtgtgttggggaggtcaga

SEQ ID NO: 31168 - DNA, 20 bp, synthetic construct
  misc_feature 1..20: note = Description of Artificial Sequence: Synthetic oligonucleotide
  misc_feature 1..20: note = Target: SCN10A; (+) strand; PAM type: NRG; PAM sequence: TGG
  source 1..20: mol_type = other DNA
gtgttggggaggtcagaggg

SEQ ID NO: 31169 - DNA, 20 bp, synthetic construct
  misc_feature 1..20: note = Description of Artificial Sequence: Synthetic oligonucleotide
  misc_feature 1..20: note = Target: SCN10A; (+) strand; PAM type: NRG; PAM sequence: GGG
  source 1..20: mol_type = other DNA
tgttggggaggtcagagggt

SEQ ID NO: 31170 - DNA, 20 bp, synthetic construct
  misc_feature 1..20: note = Description of Artificial Sequence: Synthetic oligonucleotide
  misc_feature 1..20: note = Target: SCN10A; (+) strand; PAM type: NRG; PAM sequence: AAG
  source 1..20: mol_type = other DNA
tggggaggtcagagggtggg

SEQ ID NO: 31171 - DNA, 20 bp, synthetic construct
  misc_feature 1..20: note = Description of Artificial Sequence: Synthetic oligonucleotide
  misc_feature 1..20: note = Target: SCN10A; (+) strand; PAM type: NRG; PAM sequence: CAG
  source 1..20: mol_type = other DNA
gaggtcagagggtgggaagc

SEQ ID NO: 31172 - DNA, 20 bp, synthetic construct
  misc_feature 1..20: note = Description of Artificial Sequence: Synthetic oligonucleotide
  misc_feature 1..20: note = Target: SCN10A; (+) strand; PAM type: NRG; PAM sequence: AGG
  source 1..20: mol_type = other DNA
aggtcagagggtgggaagcc

SEQ ID NO: 31173 - DNA, 20 bp, synthetic construct
  misc_feature 1..20: note = Description of Artificial Sequence: Synthetic oligonucleotide
  misc_feature 1..20: note = Target: SCN10A; (+) strand; PAM type: NRG; PAM sequence: GGG
  source 1..20: mol_type = other DNA
ggtcagagggtgggaagcca

SEQ ID NO: 31174 - DNA, 20 bp, synthetic construct
  misc_feature 1..20: note = Description of Artificial Sequence: Synthetic oligonucleotide
  misc_feature 1..20: note = Target: SCN10A; (+) strand; PAM type: NRG; PAM sequence: GGG
  source 1..20: mol_type = other DNA
gtcagagggtgggaagccag

SEQ ID NO: 31175 - DNA, 20 bp, synthetic construct
  misc_feature 1..20: note = Description of Artificial Sequence: Synthetic oligonucleotide
  misc_feature 1..20: note = Target: SCN10A; (+) strand; PAM type: NRG; PAM sequence: CGG
  source 1..20: mol_type = other DNA
gggtgggaagccaggggctt

SEQ ID NO: 31176 - DNA, 20 bp, synthetic construct
  misc_feature 1..20: note = Description of Artificial Sequence: Synthetic oligonucleotide
  misc_feature 1..20: note = Target: SCN10A; (+) strand; PAM type: NRG; PAM sequence: GGG
  source 1..20: mol_type = other DNA
ggtgggaagccaggggcttc

SEQ ID NO: 31177 - DNA, 20 bp, synthetic construct
  misc_feature 1..20: note = Description of Artificial Sequence: Synthetic oligonucleotide
  misc_feature 1..20: note = Target: SCN10A; (+) strand; PAM type: NRG; PAM sequence: AAG
  source 1..20: mol_type = other DNA
caggggcttcgggattaaat

SEQ ID NO: 31178 - DNA, 20 bp, synthetic construct
  misc_feature 1..20: note = Description of Artificial Sequence: Synthetic oligonucleotide
  misc_feature 1..20: note = Target: SCN10A; (+) strand; PAM type: NRG; PAM sequence: AGG
  source 1..20: mol_type = other DNA
aggggcttcgggattaaata

SEQ ID NO: 31179 - DNA, 20 bp, synthetic construct
  misc_feature 1..20: note = Description of Artificial Sequence: Synthetic oligonucleotide
  misc_feature 1..20: note = Target: SCN10A; (+) strand; PAM type: NRG; PAM sequence: GGG
  source 1..20: mol_type = other DNA
ggggcttcgggattaaataa

SEQ ID NO: 31180 - DNA, 20 bp, synthetic construct
  misc_feature 1..20: note = Description of Artificial Sequence: Synthetic oligonucleotide
  misc_feature 1..20: note = Target: SCN10A; (+) strand; PAM type: NRG; PAM sequence: AAG
  source 1..20: mol_type = other DNA
ttcgggattaaataagggca

SEQ ID NO: 31181 - DNA, 20 bp, synthetic construct
  misc_feature 1..20: note = Description of Artificial Sequence: Synthetic oligonucleotide
  misc_feature 1..20: note = Target: SCN10A; (+) strand; PAM type: NRG; PAM sequence: TGG
  source 1..20: mol_type = other DNA
ggattaaataagggcaaagc

SEQ ID NO: 31182 - DNA, 20 bp, synthetic construct
  misc_feature 1..20: note = Description of Artificial Sequence: Synthetic oligonucleotide
  misc_feature 1..20: note = Target: SCN10A; (+) strand; PAM type: NRG; PAM sequence: GGG
  source 1..20: mol_type = other DNA
gattaaataagggcaaagct

SEQ ID NO: 31183 - DNA, 20 bp, synthetic construct
  misc_feature 1..20: note = Description of Artificial Sequence: Synthetic oligonucleotide
  misc_feature 1..20: note = Target: SCN10A; (+) strand; PAM type: NRG; PAM sequence: AAG
  source 1..20: mol_type = other DNA
agctgggttttgctactgac

SEQ ID NO: 31184 - DNA, 20 bp, synthetic construct
  misc_feature 1..20: note = Description of Artificial Sequence: Synthetic oligonucleotide
  misc_feature 1..20: note = Target: SCN10A; (+) strand; PAM type: NRG; PAM sequence: TGG
  source 1..20: mol_type = other DNA
gggttttgctactgacaagt

SEQ ID NO: 31185 - DNA, 20 bp, synthetic construct
  misc_feature 1..20: note = Description of Artificial Sequence: Synthetic oligonucleotide
  misc_feature 1..20: note = Target: SCN10A; (+) strand; PAM type: NRG; PAM sequence: GGG
  source 1..20: mol_type = other DNA
ggttttgctactgacaagtt

SEQ ID NO: 31186 - DNA, 20 bp, synthetic construct
  misc_feature 1..20: note = Description of Artificial Sequence: Synthetic oligonucleotide
  misc_feature 1..20: note = Target: SCN10A; (+) strand; PAM type: NRG; PAM sequence: TGG
  source 1..20: mol_type = other DNA
actgacaagttgggtgacct

SEQ ID NO: 31187 - DNA, 20 bp, synthetic construct
  misc_feature 1..20: note = Description of Artificial Sequence: Synthetic oligonucleotide
  misc_feature 1..20: note = Target: SCN10A; (+) strand; PAM type: NRG; PAM sequence: AAG
  source 1..20: mol_type = other DNA
caagttgggtgaccttggac

SEQ ID NO: 31188 - DNA, 20 bp, synthetic construct
  misc_feature 1..20: note = Description of Artificial Sequence: Synthetic oligonucleotide
  misc_feature 1..20: note = Target: SCN10A; (+) strand; PAM type: NRG; PAM sequence: GAG
  source 1..20: mol_type = other DNA
acaagccttttaaacatttt

SEQ ID NO: 31189 - DNA, 20 bp, synthetic construct
  misc_feature 1..20: note = Description of Artificial Sequence: Synthetic oligonucleotide
  misc_feature 1..20: note = Target: SCN10A; (+) strand; PAM type: NRG; PAM sequence: CAG
  source 1..20: mol_type = other DNA
cttttaaacattttgagtgt

SEQ ID NO: 31190 - DNA, 20 bp, synthetic construct
  misc_feature 1..20: note = Description of Artificial Sequence: Synthetic oligonucleotide
  misc_feature 1..20: note = Target: SCN10A; (+) strand; PAM type: NRG; PAM sequence: TAG
  source 1..20: mol_type = other DNA
tgtcagtttccccatctata

SEQ ID NO: 31191 - DNA, 20 bp, synthetic construct
  misc_feature 1..20: note = Description of Artificial Sequence: Synthetic oligonucleotide
  misc_feature 1..20: note = Target: SCN10A; (+) strand; PAM type: NRG; PAM sequence: TGG
  source 1..20: mol_type = other DNA
cagtttccccatctatatag

SEQ ID NO: 31192 - DNA, 20 bp, synthetic construct
  misc_feature 1..20: note = Description of Artificial Sequence: Synthetic oligonucleotide
  misc_feature 1..20: note = Target: SCN10A; (+) strand; PAM type: NRG; PAM sequence: GGG
  source 1..20: mol_type = other DNA
agtttccccatctatatagt

SEQ ID NO: 31193 - DNA, 20 bp, synthetic construct
  misc_feature 1..20: note = Description of Artificial Sequence: Synthetic oligonucleotide
  misc_feature 1..20: note = Target: SCN10A; (+) strand; PAM type: NRG; PAM sequence: GAG
  source 1..20: mol_type = other DNA
tttccccatctatatagtgg

SEQ ID NO: 31194 - DNA, 20 bp, synthetic construct
  misc_feature 1..20: note = Description of Artificial Sequence: Synthetic oligonucleotide
  misc_feature 1..20: note = Target: SCN10A; (+) strand; PAM type: NRG; PAM sequence: AGG
  source 1..20: mol_type = other DNA
ttccccatctatatagtggg

SEQ ID NO: 31195 - DNA, 20 bp, synthetic construct
  misc_feature 1..20: note = Description of Artificial Sequence: Synthetic oligonucleotide
  misc_feature 1..20: note = Target: SCN10A; (+) strand; PAM type: NRG; PAM sequence: CAG
  source 1..20: mol_type = other DNA
ctcactcactcaaatgcttg

SEQ ID NO: 31196 - DNA, 20 bp, synthetic construct
  misc_feature 1..20: note = Description of Artificial Sequence: Synthetic oligonucleotide
  misc_feature 1..20: note = Target: SCN10A; (+) strand; PAM type: NRG; PAM sequence: CAG
  source 1..20: mol_type = other DNA
ctcactcaaatgcttgcagc

SEQ ID NO: 31197 - DNA, 20 bp, synthetic construct
  misc_feature 1..20: note = Description of Artificial Sequence: Synthetic oligonucleotide
  misc_feature 1..20: note = Target: SCN10A; (+) strand; PAM type: NRG; PAM sequence: AGG
  source 1..20: mol_type = other DNA
tcactcaaatgcttgcagcc

SEQ ID NO: 31198 - DNA, 20 bp, synthetic construct
  misc_feature 1..20: note = Description of Artificial Sequence: Synthetic oligonucleotide
  misc_feature 1..20: note = Target: SCN10A; (+) strand; PAM type: NRG; PAM sequence: TGG
  source 1..20: mol_type = other DNA
caaatgcttgcagccaggtt

SEQ ID NO: 31199 - DNA, 20 bp, synthetic construct
  misc_feature 1..20: note = Description of Artificial Sequence: Synthetic oligonucleotide
  misc_feature 1..20: note = Target: SCN10A; (+) strand; PAM type: NRG; PAM sequence: CAG
  source 1..20: mol_type = other DNA
atgcttgcagccaggtttgg

SEQ ID NO: 31200 - DNA, 20 bp, synthetic construct
  misc_feature 1..20: note = Description of Artificial Sequence: Synthetic oligonucleotide
  misc_feature 1..20: note = Target: SCN10A; (+) strand; PAM type: NRG; PAM sequence: AGG
  source 1..20: mol_type = other DNA
tgcttgcagccaggtttggc

SEQ ID NO: 31201 - DNA, 20 bp, synthetic construct
  misc_feature 1..20: note = Description of Artificial Sequence: Synthetic oligonucleotide
  misc_feature 1..20: note = Target: SCN10A; (+) strand; PAM type: NRG; PAM sequence: TGG
  source 1..20: mol_type = other DNA
cagccaggtttggcaggcca

SEQ ID NO: 31202 - DNA, 20 bp, synthetic construct
  misc_feature 1..20: note = Description of Artificial Sequence: Synthetic oligonucleotide
  misc_feature 1..20: note = Target: SCN10A; (+) strand; PAM type: NRG; PAM sequence: CGG
  source 1..20: mol_type = other DNA
aggtttggcaggccatggca

SEQ ID NO: 31203 - DNA, 20 bp, synthetic construct
  misc_feature 1..20: note = Description of Artificial Sequence: Synthetic oligonucleotide
  misc_feature 1..20: note = Target: SCN10A; (+) strand; PAM type: NRG; PAM sequence: GGG
  source 1..20: mol_type = other DNA
ggtttggcaggccatggcac

SEQ ID NO: 31204 - DNA, 20 bp, synthetic construct
  misc_feature 1..20: note = Description of Artificial Sequence: Synthetic oligonucleotide
  misc_feature 1..20: note = Target: SCN10A; (+) strand; PAM type: NRG; PAM sequence: AAG
  source 1..20: mol_type = other DNA
acctcccatgctctgctgct

SEQ ID NO: 31205 - DNA, 20 bp, synthetic construct
  misc_feature 1..20: note = Description of Artificial Sequence: Synthetic oligonucleotide
  misc_feature 1..20: note = Target: SCN10A; (+) strand; PAM type: NRG; PAM sequence: GAG
  source 1..20: mol_type = other DNA
ctcccatgctctgctgctaa

SEQ ID NO: 31206 - DNA, 20 bp, synthetic construct
  misc_feature 1..20: note = Description of Artificial Sequence: Synthetic oligonucleotide
  misc_feature 1..20: note = Target: SCN10A; (+) strand; PAM type: NRG; PAM sequence: AGG
  source 1..20: mol_type = other DNA
tcccatgctctgctgctaag

SEQ ID NO: 31207 - DNA, 20 bp, synthetic construct
  misc_feature 1..20: note = Description of Artificial Sequence: Synthetic oligonucleotide
  misc_feature 1..20: note = Target: SCN10A; (+) strand; PAM type: NRG; PAM sequence: GGG
  source 1..20: mol_type = other DNA
cccatgctctgctgctaaga

SEQ ID NO: 31208 - DNA, 20 bp, synthetic construct
  misc_feature 1..20: note = Description of Artificial Sequence: Synthetic oligonucleotide
  misc_feature 1..20: note = Target: SCN10A; (+) strand; PAM type: NRG; PAM sequence: GGG
  source 1..20: mol_type = other DNA
ccatgctctgctgctaagag

SEQ ID NO: 31209 - DNA, 20 bp, synthetic construct
  misc_feature 1..20: note = Description of Artificial Sequence: Synthetic oligonucleotide
  misc_feature 1..20: note = Target: SCN10A; (+) strand; PAM type: NRG; PAM sequence: TGG
  source 1..20: mol_type = other DNA
gctaagaggggccctcgccc

SEQ ID NO: 31210 - DNA, 20 bp, synthetic construct
  misc_feature 1..20: note = Description of Artificial Sequence: Synthetic oligonucleotide
  misc_feature 1..20: note = Target: SCN10A; (+) strand; PAM type: NRG; PAM sequence: GGG
  source 1..20: mol_type = other DNA
ctaagaggggccctcgccct

SEQ ID NO: 31211 - DNA, 20 bp, synthetic construct
  misc_feature 1..20: note = Description of Artificial Sequence: Synthetic oligonucleotide
  misc_feature 1..20: note = Target: SCN10A; (+) strand; PAM type: NRG; PAM sequence: CAG
  source 1..20: mol_type = other DNA
ggggccctcgccctgggctg

SEQ ID NO: 31212 - DNA, 20 bp, synthetic construct
  misc_feature 1..20: note = Description of Artificial Sequence: Synthetic oligonucleotide
  misc_feature 1..20: note = Target: SCN10A; (+) strand; PAM type: NRG; PAM sequence: TAG
  source 1..20: mol_type = other DNA
ctgggctgcagctctccttc

SEQ ID NO: 31213 - DNA, 20 bp, synthetic construct
  misc_feature 1..20: note = Description of Artificial Sequence: Synthetic oligonucleotide
  misc_feature 1..20: note = Target: SCN10A; (+) strand; PAM type: NRG; PAM sequence: AAG
  source 1..20: mol_type = other DNA
gcagctctccttctagtgac

SEQ ID NO: 31214 - DNA, 20 bp, synthetic construct
  misc_feature 1..20: note = Description of Artificial Sequence: Synthetic oligonucleotide
  misc_feature 1..20: note = Target: SCN10A; (+) strand; PAM type: NRG; PAM sequence: AGG
  source 1..20: mol_type = other DNA
cagctctccttctagtgaca

SEQ ID NO: 31215 - DNA, 20 bp, synthetic construct
  misc_feature 1..20: note = Description of Artificial Sequence: Synthetic oligonucleotide
  misc_feature 1..20: note = Target: SCN10A; (+) strand; PAM type: NRG; PAM sequence: TGG
  source 1..20: mol_type = other DNA
tctccttctagtgacaaggt

SEQ ID NO: 31216 - DNA, 20 bp, synthetic construct
  misc_feature 1..20: note = Description of Artificial Sequence: Synthetic oligonucleotide
  misc_feature 1..20: note = Target: SCN10A; (+) strand; PAM type: NRG; PAM sequence: GGG
  source 1..20: mol_type = other DNA
ctccttctagtgacaaggtt

SEQ ID NO: 31217 - DNA, 20 bp, synthetic construct
  misc_feature 1..20: note = Description of Artificial Sequence: Synthetic oligonucleotide
  misc_feature 1..20: note = Target: SCN10A; (+) strand; PAM type: NRG; PAM sequence: GGG
  source 1..20: mol_type = other DNA
tccttctagtgacaaggttg

SEQ ID NO: 31218 - DNA, 20 bp, synthetic construct
  misc_feature 1..20: note = Description of Artificial Sequence: Synthetic oligonucleotide
  misc_feature 1..20: note = Target: SCN10A; (+) strand; PAM type: NRG; PAM sequence: CAG
  source 1..20: mol_type = other DNA
gtgacaaggttggggacttt

SEQ ID NO: 31219 - DNA, 20 bp, synthetic construct
  misc_feature 1..20: note = Description of Artificial Sequence: Synthetic oligonucleotide
  misc_feature 1..20: note = Target: SCN10A; (+) strand; PAM type: NRG; PAM sequence: CAG
  source 1..20: mol_type = other DNA
aaggttggggactttcagct

SEQ ID NO: 31220 - DNA, 20 bp, synthetic construct
  misc_feature 1..20: note = Description of Artificial Sequence: Synthetic oligonucleotide
  misc_feature 1..20: note = Target: SCN10A; (+) strand; PAM type: NRG; PAM sequence: TAG
  source 1..20: mol_type = other DNA
gttggggactttcagctcag

SEQ ID NO: 31221 - DNA, 20 bp, synthetic construct
  misc_feature 1..20: note = Description of Artificial Sequence: Synthetic oligonucleotide
  misc_feature 1..20: note = Target: SCN10A; (+) strand; PAM type: NRG; PAM sequence: CAG
  source 1..20: mol_type = other DNA
gggactttcagctcagtagt

SEQ ID NO: 31222 - DNA, 20 bp, synthetic construct
  misc_feature 1..20: note = Description of Artificial Sequence: Synthetic oligonucleotide
  misc_feature 1..20: note = Target: SCN10A; (+) strand; PAM type: NRG; PAM sequence: AGG
  source 1..20: mol_type = other DNA
ggactttcagctcagtagtc

SEQ ID NO: 31223 - DNA, 20 bp, synthetic construct
  misc_feature 1..20: note = Description of Artificial Sequence: Synthetic oligonucleotide
  misc_feature 1..20: note = Target: SCN10A; (+) strand; PAM type: NRG; PAM sequence: GAG
  source 1..20: mol_type = other DNA
actttcagctcagtagtcag

SEQ ID NO: 31224 - DNA, 20 bp, synthetic construct
  misc_feature 1..20: note = Description of Artificial Sequence: Synthetic oligonucleotide
  misc_feature 1..20: note = Target: SCN10A; (+) strand; PAM type: NRG; PAM sequence: CAG
  source 1..20: mol_type = other DNA
gtcaggagaacccactgatg

SEQ ID NO: 31225 - DNA, 20 bp, synthetic construct
  misc_feature 1..20: note = Description of Artificial Sequence: Synthetic oligonucleotide
  misc_feature 1..20: note = Target: SCN10A; (+) strand; PAM type: NRG; PAM sequence: CAG
  source 1..20: mol_type = other DNA
agaacccactgatgcagctc

SEQ ID NO: 31226 - DNA, 20 bp, synthetic construct
  misc_feature 1..20: note = Description of Artificial Sequence: Synthetic oligonucleotide
  misc_feature 1..20: note = Target: SCN10A; (+) strand; PAM type: NRG; PAM sequence: AGG
  source 1..20: mol_type = other DNA
gaacccactgatgcagctcc

SEQ ID NO: 31227 - DNA, 20 bp, synthetic construct
  misc_feature 1..20: note = Description of Artificial Sequence: Synthetic oligonucleotide
  misc_feature 1..20: note = Target: SCN10A; (+) strand; PAM type: NRG; PAM sequence: GGG
  source 1..20: mol_type = other DNA
aacccactgatgcagctcca

SEQ ID NO: 31228 - DNA, 20 bp, synthetic construct
  misc_feature 1..20: note = Description of Artificial Sequence: Synthetic oligonucleotide
  misc_feature 1..20: note = Target: SCN10A; (+) strand; PAM type: NRG; PAM sequence: TGG
  source 1..20: mol_type = other DNA
tgatgcagctccagggcctt

SEQ ID NO: 31229 - DNA, 20 bp, synthetic construct
  misc_feature 1..20: note = Description of Artificial Sequence: Synthetic oligonucleotide
  misc_feature 1..20: note = Target: SCN10A; (+) strand; PAM type: NRG; PAM sequence: TAG
  source 1..20: mol_type = other DNA
gctccagggcctttggattg

SEQ ID NO: 31230 - DNA, 20 bp, synthetic construct
  misc_feature 1..20: note = Description of Artificial Sequence: Synthetic oligonucleotide
  misc_feature 1..20: note = Target: SCN10A; (+) strand; PAM type: NRG; PAM sequence: AGG
  source 1..20: mol_type = other DNA
ctccagggcctttggattgt

SEQ ID NO: 31231 - DNA, 20 bp, synthetic construct
  misc_feature 1..20: note = Description of Artificial Sequence: Synthetic oligonucleotide
  misc_feature 1..20: note = Target: SCN10A; (+) strand; PAM type: NRG; PAM sequence: GAG
  source 1..20: mol_type = other DNA
ccagggcctttggattgtag

SEQ ID NO: 31232 - DNA, 20 bp, synthetic construct
  misc_feature 1..20: note = Description of Artificial Sequence: Synthetic oligonucleotide
  misc_feature 1..20: note = Target: SCN10A; (+) strand; PAM type: NRG; PAM sequence: TGG
  source 1..20: mol_type = other DNA
gattgtaggagattcctatc

SEQ ID NO: 31233 - DNA, 20 bp, synthetic construct
  misc_feature 1..20: note = Description of Artificial Sequence: Synthetic oligonucleotide
  misc_feature 1..20: note = Target: SCN10A; (+) strand; PAM type: NRG; PAM sequence: GAG
  source 1..20: mol_type = other DNA
ttgtaggagattcctatctg

SEQ ID NO: 31234 - DNA, 20 bp, synthetic construct
  misc_feature 1..20: note = Description of Artificial Sequence: Synthetic oligonucleotide
  misc_feature 1..20: note = Target: SCN10A; (+) strand; PAM type: NRG; PAM sequence: AGG
  source 1..20: mol_type = other DNA
tgtaggagattcctatctgg

SEQ ID NO: 31235 - DNA, 20 bp, synthetic construct
  misc_feature 1..20: note = Description of Artificial Sequence: Synthetic oligonucleotide
  misc_feature 1..20: note = Target: SCN10A; (+) strand; PAM type: NRG; PAM sequence: TGG
  source 1..20: mol_type = other DNA
agattcctatctggaggatt

SEQ ID NO: 31236 - DNA, 20 bp, synthetic construct
  misc_feature 1..20: note = Description of Artificial Sequence: Synthetic oligonucleotide
  misc_feature 1..20: note = Target: SCN10A; (+) strand; PAM type: NRG; PAM sequence: GGG
  source 1..20: mol_type = other DNA
gattcctatctggaggattt

SEQ ID NO: 31237 - DNA, 20 bp, synthetic construct
  misc_feature 1..20: note = Description of Artificial Sequence: Synthetic oligonucleotide
  misc_feature 1..20: note = Target: SCN10A; (+) strand; PAM type: NRG; PAM sequence: GGG
  source 1..20: mol_type = other DNA
attcctatctggaggatttg

SEQ ID NO: 31238 - DNA, 20 bp, synthetic construct
  misc_feature 1..20: note = Description of Artificial Sequence: Synthetic oligonucleotide
  misc_feature 1..20: note = Target: SCN10A; (+) strand; PAM type: NRG; PAM sequence: GGG
  source 1..20: mol_type = other DNA
ttcctatctggaggatttgg

SEQ ID NO: 31239 - DNA, 20 bp, synthetic construct
  misc_feature 1..20: note = Description of Artificial Sequence: Synthetic oligonucleotide
  misc_feature 1..20: note = Target: SCN10A; (+) strand; PAM type: NRG; PAM sequence: CAG
  source 1..20: mol_type = other DNA
ctatctggaggatttggggg

SEQ ID NO: 31240 - DNA, 20 bp, synthetic construct
  misc_feature 1..20: note = Description of Artificial Sequence: Synthetic oligonucleotide
  misc_feature 1..20: note = Target: SCN10A; (+) strand; PAM type: NRG; PAM sequence: AGG
  source 1..20: mol_type = other DNA
tatctggaggatttgggggc

SEQ ID NO: 31241 - DNA, 20 bp, synthetic construct
  misc_feature 1..20: note = Description of Artificial Sequence: Synthetic oligonucleotide
  misc_feature 1..20: note = Target: SCN10A; (+) strand; PAM type: NRG; PAM sequence: GGG
  source 1..20: mol_type = other DNA
atctggaggatttgggggca

SEQ ID NO: 31242 - DNA, 20 bp, synthetic construct
  misc_feature 1..20: note = Description of Artificial Sequence: Synthetic oligonucleotide
  misc_feature 1..20: note = Target: SCN10A; (+) strand; PAM type: NRG; PAM sequence: CAG
  source 1..20: mol_type = other DNA
gggactatgcctccccttac

SEQ ID NO: 31243 - DNA, 20 bp, synthetic construct
  misc_feature 1..20: note = Description of Artificial Sequence: Synthetic oligonucleotide
  misc_feature 1..20: note = Target: SCN10A; (+) strand; PAM type: NRG; PAM sequence: GAG
  source 1..20: mol_type = other DNA
gactatgcctccccttacca

SEQ ID NO: 31244 - DNA, 20 bp, synthetic construct
  misc_feature 1..20: note = Description of Artificial Sequence: Synthetic oligonucleotide
  misc_feature 1..20: note = Target: SCN10A; (+) strand; PAM type: NRG; PAM sequence: GAG
  source 1..20: mol_type = other DNA
cttaccagagatccactgct

SEQ ID NO: 31245 - DNA, 20 bp, synthetic construct
  misc_feature 1..20: note = Description of Artificial Sequence: Synthetic oligonucleotide
  misc_feature 1..20: note = Target: SCN10A; (+) strand; PAM type: NRG; PAM sequence: CAG
  source 1..20: mol_type = other DNA
accagagatccactgctgag

SEQ ID NO: 31246 - DNA, 20 bp, synthetic construct
  misc_feature 1..20: note = Description of Artificial Sequence: Synthetic oligonucleotide
  misc_feature 1..20: note = Target: SCN10A; (+) strand; PAM type: NRG; PAM sequence: AGG
  source 1..20: mol_type = other DNA
ccagagatccactgctgagc

SEQ ID NO: 31247 - DNA, 20 bp, synthetic construct
  misc_feature 1..20: note = Description of Artificial Sequence: Synthetic oligonucleotide
  misc_feature 1..20: note = Target: SCN10A; (+) strand; PAM type: NRG; PAM sequence: AAG
  source 1..20: mol_type = other DNA
cactgctgagcaggatcatg

SEQ ID NO: 31248 - DNA, 20 bp, synthetic construct
  misc_feature 1..20: note = Description of Artificial Sequence: Synthetic oligonucleotide
  misc_feature 1..20: note = Target: SCN10A; (+) strand; PAM type: NRG; PAM sequence: AAG
  source 1..20: mol_type = other DNA
gcaggatcatgaagatgatg

SEQ ID NO: 31249 - DNA, 20 bp, synthetic construct
  misc_feature 1..20: note = Description of Artificial Sequence: Synthetic oligonucleotide
  misc_feature 1..20: note = Target: SCN10A; (+) strand; PAM type: NRG; PAM sequence: CAG
  source 1..20: mol_type = other DNA
agatgatgaagctctcaaac

SEQ ID NO: 31250 - DNA, 20 bp, synthetic construct
  misc_feature 1..20: note = Description of Artificial Sequence: Synthetic oligonucleotide
  misc_feature 1..20: note = Target: SCN10A; (+) strand; PAM type: NRG; PAM sequence: CGG
  source 1..20: mol_type = other DNA
accagctgtgctccacgata

SEQ ID NO: 31251 - DNA, 20 bp, synthetic construct
  misc_feature 1..20: note = Description of Artificial Sequence: Synthetic oligonucleotide
  misc_feature 1..20: note = Target: SCN10A; (+) strand; PAM type: NRG; PAM sequence: TAG
  source 1..20: mol_type = other DNA
agctgtgctccacgatacgg

SEQ ID NO: 31252 - DNA, 20 bp, synthetic construct
  misc_feature 1..20: note = Description of Artificial Sequence: Synthetic oligonucleotide
  misc_feature 1..20: note = Target: SCN10A; (+) strand; PAM type: NRG; PAM sequence: AAG
  source 1..20: mol_type = other DNA
gtgctccacgatacggtagc

SEQ ID NO: 31253 - DNA, 20 bp, synthetic construct
  misc_feature 1..20: note = Description of Artificial Sequence: Synthetic oligonucleotide
  misc_feature 1..20: note = Target: SCN10A; (+) strand; PAM type: NRG; PAM sequence: CAG
  source 1..20: mol_type = other DNA
agcaagtcttgcgcacctgc

SEQ ID NO: 31254 - DNA, 20 bp, synthetic construct
  misc_feature 1..20: note = Description of Artificial Sequence: Synthetic oligonucleotide
  misc_feature 1..20: note = Target: SCN10A; (+) strand; PAM type: NRG; PAM sequence: TGG
  source 1..20: mol_type = other DNA
acctgccagcccacatccca

SEQ ID NO: 31255 - DNA, 20 bp, synthetic construct
  misc_feature 1..20: note = Description of Artificial Sequence: Synthetic oligonucleotide
  misc_feature 1..20: note = Target: SCN10A; (+) strand; PAM type: NRG; PAM sequence: TGG
  source 1..20: mol_type = other DNA
gcccacatcccatggactct

SEQ ID NO: 31256 - DNA, 20 bp, synthetic construct
  misc_feature 1..20: note = Description of Artificial Sequence: Synthetic oligonucleotide
  misc_feature 1..20: note = Target: SCN10A; (+) strand; PAM type: NRG; PAM sequence: TGG
  source 1..20: mol_type = other DNA
cacatcccatggactcttgg

SEQ ID NO: 31257 - DNA, 20 bp, synthetic construct
  misc_feature 1..20: note = Description of Artificial Sequence: Synthetic oligonucleotide
  misc_feature 1..20: note = Target: SCN10A; (+) strand; PAM type: NRG; PAM sequence: CAG
  source 1..20: mol_type = other DNA
catggactcttggtggtatc

SEQ ID NO: 31258 - DNA, 20 bp, synthetic construct
  misc_feature 1..20: note = Description of Artificial Sequence: Synthetic oligonucleotide
  misc_feature 1..20: note = Target: SCN10A; (+) strand; PAM type: NRG; PAM sequence: CAG
  source 1..20: mol_type = other DNA
tcttggtggtatccagtttg

SEQ ID NO: 31259 - DNA, 20 bp, synthetic construct
  misc_feature 1..20: note = Description of Artificial Sequence: Synthetic oligonucleotide
  misc_feature 1..20: note = Target: SCN10A; (+) strand; PAM type: NRG; PAM sequence: CAG
  source 1..20: mol_type = other DNA
tggtggtatccagtttgcag

SEQ ID NO: 31260 - DNA, 20 bp, synthetic construct
  misc_feature 1..20: note = Description of Artificial Sequence: Synthetic oligonucleotide
  misc_feature 1..20: note = Target: SCN10A; (+) strand; PAM type: NRG; PAM sequence: AGG
  source 1..20: mol_type = other DNA
ggtggtatccagtttgcagc

SEQ ID NO: 31261 - DNA, 20 bp, synthetic construct
  misc_feature 1..20: note = Description of Artificial Sequence: Synthetic oligonucleotide
  misc_feature 1..20: note = Target: SCN10A; (+) strand; PAM type: NRG; PAM sequence: GGG
  source 1..20: mol_type = other DNA
gtggtatccagtttgcagca

SEQ ID NO: 31262 - DNA, 20 bp, synthetic construct
  misc_feature 1..20: note = Description of Artificial Sequence: Synthetic oligonucleotide
  misc_feature 1..20: note = Target: SCN10A; (+) strand; PAM type: NRG; PAM sequence: CAG
  source 1..20: mol_type = other DNA
tatccagtttgcagcaggga

SEQ ID NO: 31263 - DNA, 20 bp, synthetic construct
  misc_feature 1..20: note = Description of Artificial Sequence: Synthetic oligonucleotide
  misc_feature 1..20: note = Target: SCN10A; (+) strand; PAM type: NRG; PAM sequence: TGG
  source 1..20: mol_type = other DNA
ccagtttgcagcagggacag

SEQ ID NO: 31264 - DNA, 20 bp, synthetic construct
  misc_feature 1..20: note = Description of Artificial Sequence: Synthetic oligonucleotide
  misc_feature 1..20: note = Target: SCN10A; (+) strand; PAM type: NRG; PAM sequence: TGG
  source 1..20: mol_type = other DNA
acagtggcgaatgcatcctg

SEQ ID NO: 31265 - DNA, 20 bp, synthetic construct
  misc_feature 1..20: note = Description of Artificial Sequence: Synthetic oligonucleotide
  misc_feature 1..20: note = Target: SCN10A; (+) strand; PAM type: NRG; PAM sequence: GGG
  source 1..20: mol_type = other DNA
cagtggcgaatgcatcctgt

SEQ ID NO: 31266 - DNA, 20 bp, synthetic construct
  misc_feature 1..20: note = Description of Artificial Sequence: Synthetic oligonucleotide
  misc_feature 1..20: note = Target: SCN10A; (+) strand; PAM type: NRG; PAM sequence: GGG
  source 1..20: mol_type = other DNA
agtggcgaatgcatcctgtg

SEQ ID NO: 31267 - DNA, 20 bp, synthetic construct
  misc_feature 1..20: note = Description of Artificial Sequence: Synthetic oligonucleotide
  misc_feature 1..20: note = Target: SCN10A; (+) strand; PAM type: NRG; PAM sequence: GAG
  source 1..20: mol_type = other DNA
tggcgaatgcatcctgtggg

SEQ ID NO: 31268 - DNA, 20 bp, synthetic construct
  misc_feature 1..20: note = Description of Artificial Sequence: Synthetic oligonucleotide
  misc_feature 1..20: note = Target: SCN10A; (+) strand; PAM type: NRG; PAM sequence: GAG
  source 1..20: mol_type = other DNA
gcgaatgcatcctgtgggga

SEQ ID NO: 31269 - DNA, 20 bp, synthetic construct
  misc_feature 1..20: note = Description of Artificial Sequence: Synthetic oligonucleotide
  misc_feature 1..20: note = Target: SCN10A; (+) strand; PAM type: NRG; PAM sequence: AGG
  source 1..20: mol_type = other DNA
cgaatgcatcctgtggggag

SEQ ID NO: 31270 - DNA, 20 bp, synthetic construct
  misc_feature 1..20: note = Description of Artificial Sequence: Synthetic oligonucleotide
  misc_feature 1..20: note = Target: SCN10A; (+) strand; PAM type: NRG; PAM sequence: TGG
  source 1..20: mol_type = other DNA
ctgtggggagaggtgactga

SEQ ID NO: 31271 - DNA, 20 bp, synthetic construct
  misc_feature 1..20: note = Description of Artificial Sequence: Synthetic oligonucleotide
  misc_feature 1..20: note = Target: SCN10A; (+) strand; PAM type: NRG; PAM sequence: TGG
  source 1..20: mol_type = other DNA
tggggagaggtgactgatgg

SEQ ID NO: 31272 - DNA, 20 bp, synthetic construct
  misc_feature 1..20: note = Description of Artificial Sequence: Synthetic oligonucleotide
  misc_feature 1..20: note = Target: SCN10A; (+) strand; PAM type: NRG; PAM sequence: GGG
  source 1..20: mol_type = other DNA
ggggagaggtgactgatggt

SEQ ID NO: 31273 - DNA, 20 bp, synthetic construct
  misc_feature 1..20: note = Description of Artificial Sequence: Synthetic oligonucleotide
  misc_feature 1..20: note = Target: SCN10A; (+) strand; PAM type: NRG; PAM sequence: TGG
  source 1..20: mol_type = other DNA
aggtgactgatggtgggtga

SEQ ID NO: 31274 - DNA, 20 bp, synthetic construct
  misc_feature 1..20: note = Description of Artificial Sequence: Synthetic oligonucleotide
  misc_feature 1..20: note = Target: SCN10A; (+) strand; PAM type: NRG; PAM sequence: CAG
  source 1..20: mol_type = other DNA
gactgatggtgggtgatggc

SEQ ID NO: 31275 - DNA, 20 bp, synthetic construct
  misc_feature 1..20: note = Description of Artificial Sequence: Synthetic oligonucleotide
  misc_feature 1..20: note = Target: SCN10A; (+) strand; PAM type: NRG; PAM sequence: TGG
  source 1..20: mol_type = other DNA
tgatggtgggtgatggccag

SEQ ID NO: 31276 - DNA, 20 bp, synthetic construct
  misc_feature 1..20: note = Description of Artificial Sequence: Synthetic oligonucleotide
  misc_feature 1..20: note = Target: SCN10A; (+) strand; PAM type: NRG; PAM sequence: GGG
  source 1..20: mol_type = other DNA
gatggtgggtgatggccagt

SEQ ID NO: 31277 - DNA, 20 bp, synthetic construct
  misc_feature 1..20: note = Description of Artificial Sequence: Synthetic oligonucleotide
  misc_feature 1..20: note = Target: SCN10A; (+) strand; PAM type: NRG; PAM sequence: AAG
  source 1..20: mol_type = other DNA
tgggtgatggccagtgggca

SEQ ID NO: 31278 - DNA, 20 bp, synthetic construct
  misc_feature 1..20: note = Description of Artificial Sequence: Synthetic oligonucleotide
  misc_feature 1..20: note = Target: SCN10A; (+) strand; PAM type: NRG; PAM sequence: AGG
  source 1..20: mol_type = other DNA
gggtgatggccagtgggcaa

SEQ ID NO: 31279 - DNA, 20 bp, synthetic construct
  misc_feature 1..20: note = Description of Artificial Sequence: Synthetic oligonucleotide
  misc_feature 1..20: note = Target: SCN10A; (+) strand; PAM type: NRG; PAM sequence: GGG
  source 1..20: mol_type = other DNA
ggtgatggccagtgggcaaa

SEQ ID NO: 31280 - DNA, 20 bp, synthetic construct
  misc_feature 1..20: note = Description of Artificial Sequence: Synthetic oligonucleotide
  misc_feature 1..20: note = Target: SCN10A; (+) strand; PAM type: NRG; PAM sequence: GGG
  source 1..20: mol_type = other DNA
gtgatggccagtgggcaaag

SEQ ID NO: 31281 - DNA, 20 bp, synthetic construct
  misc_feature 1..20: note = Description of Artificial Sequence: Synthetic oligonucleotide
  misc_feature 1..20: note = Target: SCN10A; (+) strand; PAM type: NRG; PAM sequence: CAG
  source 1..20: mol_type = other DNA
gataatttctgctcctgctg

SEQ ID NO: 31282 - DNA, 20 bp, synthetic construct
  misc_feature 1..20: note = Description of Artificial Sequence: Synthetic oligonucleotide
  misc_feature 1..20: note = Target: SCN10A; (+) strand; PAM type: NRG; PAM sequence: GAG
  source 1..20: mol_type = other DNA
taatttctgctcctgctgca

SEQ ID NO: 31283 - DNA, 20 bp, synthetic construct
  misc_feature 1..20: note = Description of Artificial Sequence: Synthetic oligonucleotide
  misc_feature 1..20: note = Target: SCN10A; (+) strand; PAM type: NRG; PAM sequence: TAG
  source 1..20: mol_type = other DNA
ctgcagagaaaccattctgc

SEQ ID NO: 31284 - DNA, 20 bp, synthetic construct
  misc_feature 1..20: note = Description of Artificial Sequence: Synthetic oligonucleotide
  misc_feature 1..20: note = Target: SCN10A; (+) strand; PAM type: NRG; PAM sequence: AGG
  source 1..20: mol_type = other DNA
tgcagagaaaccattctgct

SEQ ID NO: 31285 - DNA, 20 bp, synthetic construct
  misc_feature 1..20: note = Description of Artificial Sequence: Synthetic oligonucleotide
  misc_feature 1..20: note = Target: SCN10A; (+) strand; PAM type: NRG; PAM sequence: TGG
  source 1..20: mol_type = other DNA
aaacccacttgtcatgccct

SEQ ID NO: 31286 - DNA, 20 bp, synthetic construct
  misc_feature 1..20: note = Description of Artificial Sequence: Synthetic oligonucleotide
  misc_feature 1..20: note = Target: SCN10A; (+) strand; PAM type: NRG; PAM sequence: TGG
  source 1..20: mol_type = other DNA
cttggaaaaaaattctttcc

SEQ ID NO: 31287 - DNA, 20 bp, synthetic construct
  misc_feature 1..20: note = Description of Artificial Sequence: Synthetic oligonucleotide
  misc_feature 1..20: note = Target: SCN10A; (+) strand; PAM type: NRG; PAM sequence: TGG
  source 1..20: mol_type = other DNA
aaaaattctttcctggaata

SEQ ID NO: 31288 - DNA, 20 bp, synthetic construct
  misc_feature 1..20: note = Description of Artificial Sequence: Synthetic oligonucleotide
  misc_feature 1..20: note = Target: SCN10A; (+) strand; PAM type: NRG; PAM sequence: GGG
  source 1..20: mol_type = other DNA
aaaattctttcctggaatat

SEQ ID NO: 31289 - DNA, 20 bp, synthetic construct
  misc_feature 1..20: note = Description of Artificial Sequence: Synthetic oligonucleotide
  misc_feature 1..20: note = Target: SCN10A; (+) strand; PAM type: NRG; PAM sequence: AAG
  source 1..20: mol_type = other DNA
tctttcctggaatatgggtg

SEQ ID NO: 31290 - DNA, 20 bp, synthetic construct
  misc_feature 1..20: note = Description of Artificial Sequence: Synthetic oligonucleotide
  misc_feature 1..20: note = Target: SCN10A; (+) strand; PAM type: NRG; PAM sequence: GAG
  source 1..20: mol_type = other DNA
tttcctggaatatgggtgaa
